United States Patent Application Publication US 2026/0240980 A1, published August 20, 2026 (application 19/375,806).

The application's sequence listing, which the Patent Office published only in electronic form, follows.

SEQUENCE LISTING (32673 sequences)

SEQ ID NO: 1 - protein, 566 aa, synthetic construct
  REGION 1..566: note = hemagglutinin__InfluenzaA__AAA16879
MEAKLFVLFCTFTVLKADTICVGYHANNSTDTVDTVLEKNVTVTHSVNLLEDSHNGKLCSLNGIAPLQLGKCNVAGWLLGNPECDLLLTANSWSYIIETSNSENGTCYPGEFIDYEELREQLSSVSSFEKFEIFPKASSWPNHETTKGVTAACSYSGASSFYRNLLWITKKGTSYPKLSKSYTNNKGKEVLVLWGVHHPPTTSEQQSLYQNADAYVSVGSSKYNRRFTPEIAARPKVRGQAGRMNYYWTLLDQGDTITFEATGNLIAPWYAFALNKGSDSGIITSDAPVHNCDTRCQTPHGALNSSLPFQNVHPITIGECPKYIKSTKLRMATGLRNVPSIQSRGLFGAIAGFIEGGWTGMIDGWYGYHHQNEQGSGYAADQKSTQNAIDGITNKVNSVIEKMNTQFTAVGKEFNNLERRIENLNKKVDDGFLDVWTYNAELLVLLENERTLDFHDSNVRNLYEKVKSQLRNNAKELGNGCFEFYHKCDDECMEREKNGTYDYPKYSEESKLNREEIDGVKLESMGVYQILAIYSTVASSLVLLVSLGAISFWMCSNGSLQCRICI

SEQ ID NO: 2 - protein, 566 aa, synthetic construct
  REGION 1..566: note = hemagglutinin__InfluenzaA__AAA16880
MEAKLFVLFCTFTVLKADTICVGYHANNSTDTVDTVLEKNVTVTHSVNLLEDSHNGKLCSLNGIAPLQLGKCNVAGWLLGNPECDLLLTANSWSYIIETSNSENGTCYPGEFIDYEELREQLSSVSSFEKFEIFPKASSWPNHETTKGVTAACSYSGASSFYRNLLWITKKGTSYPTLSKSYTNNKGKEVLVLWGVHHPPTVNEQQSLYQNADAYVSVGSSKYNRRFTPEIAARPKVRGQAGRMNYHWTLLDQGDTITFEATGNLIAPWYAFALNKGSDSGIITSDAPVHNCDTRCQTPHGALNSSLPFQNVHPITIGECPKYVKSTKLRMATGLRNVPSIQSRGLFGAIAGFIEGGWTGMIDGWYGYHHQNEQGSGYAADQKSTQNAIDGITNKVNSVIEKMNTKFTAVGKEFNNLERRIENLNKKVDDGFLDVWTYNAELLVLLENERTLDFHDSNVRNLYEKVKSQLRNNAKELGNGCFEFYHKCDDECIESVKNGTYDYPKYSEESKLNREEIDGVKLESMGVYQILAIYSTVASSLVLLVSLGAISFWMCSNGSLQCRICI

SEQ ID NO: 3 - protein, 562 aa, synthetic construct
  REGION 1..562: note = hemagglutinin__InfluenzaA__AAA64362
MAIIYLILLFTAVRGDQICIGYHANNSTEKVDTILERNVTVTHAKDILEKTHNGKLCKLNGIPPLELGDCSIAGWLLGNPECDRLLSVPEWSYIMEKENPRDGLCYPGSFNDYEELKYLLSSVKHFEKVKILPKDRWTQHTTTGGSRACAVSGNPSFFRNMVWLTKKGSDYPVAKGSYNNTSGEQMLIIWGVHHPNDETEQRTLYQNVGTYVSVGTSTLNKRSTPEIATRPKVNGLGSRMEFSWTLLDMWDTINFESTGNLIAPEYGFKISKRGSSGIMKTEGTLENCETKCQTPLGAINTTLPFHNVHPLTIGECPRYVKSEKLVLATGLRNVPQIESRGLFGAIAGFIEGGWQGMVDGWYGYHHSNDQGSGYAADKESTQKAFDGITNKVNSVIEKMNTQFEAVGKEFSNLERRLENLNKKMEDGFLDVWTYNAELLVLMENERTLDFHDSNVKNLYDKVRMQLRDNVKELGNGCFEFYHKCDDECMNSVKNGTYDYPKYEEESKLNRNEIKGVKLSSMGVYQILAIYATVAGSLSLAIMMAGISFWMCSNGSLQCRICI

SEQ ID NO: 4 - protein, 562 aa, synthetic construct
  REGION 1..562: note = hemagglutinin__InfluenzaA__AAA64363
MAIIYLILLFTAVRGDQICIGYHANNSTEKVDTILERNVTVTHAKDILEKTHNGKLCKLNGIPPLELGDCSIAGWLLGNPECDRLLSVPEWSYIMEKENPRDGLCYPGSFNDYEELKHLLSSVKHFEKVKILPKDRWTQHTTTGGSRACAVSGNPSFFRNMVWLTKKGSNYPVAKGSYNNTSGEQMLIIWGVHHPNDETEQRTLYQNVGTYVSVGTSTLNKRSTPDIATRPKVNGQGGRMEFSWTLLDMWDTINFESTGNLIAPEYGFKISKRGSSGIMKTEGTLGNCETKCQTPLGAINTTLPFHNVHPLTIGECPKYVKSEKLVLATGLRNVPQIESRGLFGAIAGFIEGGWQGMVDGWYGYHHSNDQGSGYAADKESTQKAFDGITNKVNSVIEKINTQFEAVEKEFSNLERRLENLNKKMEDGFLDVWTYNAELLVLMENERTLDFHDSSVKNLYDKVRMQLRDNVKELGNGCFEFYHKCDDECMNSVKNGTYDYPKYEEESKLNRNEIKGVKLSSMGIYQILAIYATVAGSLSLAIMMAGISFWMCSNGSLQCRICI

SEQ ID NO: 5 - protein, 562 aa, synthetic construct
  REGION 1..562: note = hemagglutinin__InfluenzaA__AAA64365
MAIIYLILLFTAVRGDQICIGYHANNSTEKVDTILERNVTVTHAKDILEKTHNGKLCKLNGIPPLELGDCSIAGWLLGNPECDRLLSVPEWSYIMEKENPRDGLCYPGSFNDYEELKHLLSSVKHFEKVKILPKDRWTQHTTTGGSRACAVSGNPSFFRNMVWLTKKGSNYPVAKGSYNNTSGEQMLIIWGVHHPNDETEQRTLYQNVGTYVSVGTSTLNKRSTPDIATRPKVDGLGSRMEFSWTLLDMWDTINFESTGNLIAPEYGFKISKRGSSGIMKTEGTLGNCETKCQTPLGAINTTLPFHNVHPLTIGECPKYVKSEKLVLATGLRNVPQIESRGLFGAIAGFIEGGWQGMVDGWYGYHHSNDQGSGYAADKESTQKAFDGITNKVNSVIEKMNTQFEAVEKEFSNLERRLENLNKKMEDGFLDVWTYNAELLVLMENERTLDFHDSNVKNLYNKVRMQLRDNVKELGNGCFEFYHKCDDECMNSVKNGTYDYPKYEEESKLNRNEIKGVKLSSMGIYQILAIYATVAGSLSLAIMMAGISFWMCSNGSLQCRICI

SEQ ID NO: 6 - protein, 562 aa, synthetic construct
  REGION 1..562: note = hemagglutinin__InfluenzaA__AAA64366
MAIIYLILLFTAVRGDQICIGYHANNSTEKVDTILERNVTVTHAKDILEKTHNGKLCKLNGIPPLELGDCSIAGWLLGNPECDRLLSVPEWSYIMEKENPRDGLCYPGSFNDYEELKHLLSSVKHFEKVKILPKDRWTQHTTTGGSRACAVSGNPSFFRNMVWLTKKESNYPVAKGSYNNTSGEQMLIIWGVHHPNDETEQRTLYQNVGTYVSVGTSTLNKRSTPDIATRPKVNGLGSRMEFSWTLLDMWDTINFESTGNLIAPEYGFKISKRGSSGIMKTEGTLENCETKCQTPLGAINTTLPFHNVHPLTIGECPKYVKSEKLVLATGLRNVPQIESRGLFGAIAGFIEGGWQGMVDGWYGYHHSNDQGSGYAADKESTQKAFDGITNKVNSVIEKMNTQFEAVGKEFSNLERRLENLNKKMEDGFLDVWTYNAELLVLMENERTLDFHDSNVKNLYDKVRMQLRDNVKELGNGCFEFYHKCDDECMNSVKNGTYDYPKYEEESKLNRNEIKGVKLSSMGVYQILAIYATVAGSLSLAIMMAGISFWMCSNGSLQCRICI

SEQ ID NO: 7 - protein, 566 aa, synthetic construct
  REGION 1..566: note = hemagglutinin__InfluenzaA__AAA85781
MKTIIALSYIFCLVFAQDLPGNDNSTATLCLGHHAVPNGTLVKTITNDQIEVTNATELVQSSSTGKICDNPHRILDGINCTLIDALLGDPHCDGFQNEKWDLFVERSKAFSNCYPYDVPDYASLRSLVASSGTLEFINEGFNWTGVTQNGGSSACKRGPDNGFFSRLNWLYKSGSTYPVQNVTMPNNDNSDKLYIWGVHHPSTDKEQTNLYVQASGKVTVSTKRSQQTVIPNVGSRPWVRGLSSRVSIYWTIVKPGDILVINSNGNLIAPRGYYKMRTGKSSIMRSDAPIGTCSSECITPNGSIPNDKPFQNVNKITYGACPKYVKQNTLKLATGMRNVPEKQIRGIFGAIAGFIENGWEGMIDGWYGFRHQNSEGTGQAADLKSTQAAIDQINGKLNRVIEKTNEKFHQIEKEFSEVEGRIQDLEKYVEDTKIDLWSYNAELLVALENQHTIDLTDSEMNKLFEKTRRQLRENAEDMGNGCFKIYHKCDNPCIGSIRNGTYDHDVYRDEALNNRFQIKGVELKSGYKDWILWISFAISCFLLCVVLLGFIMWACQKGNIRCNICI

SEQ ID NO: 8 - protein, 568 aa, synthetic construct
  REGION 1..568: note = hemagglutinin__InfluenzaA__AAC14418
MERIVLLLATVSLVKSDQICIGYHANNSTEQVDTIMEKNVTVTHAQDILERTHNGKLCDLNGVKPLILRDCSVAGWLLGNPMCDEFINVPEWSYIVEKASPANDLCYPGNFNDYEELKHLLSRINHFEKIQIIPKSSWSNHDASSGVSSACPYLGRSSFFRNVVWLIKKNSTYPTIKRSYNNTNQEDLLVLWGIHHPNDAAEQTKLYQNPTTYISVGTSTLNQRLVPEIATRPKVNGQSGRMEFFWTILKPNDAINFESNGNFIAPEYAYKIVKKGDSTIMKSELEYGNCNTKCQTPMGAINSSMPFHNIHPLTIGECPKYVKSNRLVLATGLRNAPQRERRRKKRGLFGAIAGFIEGGWQGMVDGWYGYHHSNEQGSGYAADQESTQKAIDGVTNKVNSIINKMNTQFEAVGREFNNLERRIENLNKKMEDGFLDVWTYNAELLVLMENERTLDFHDSNVKNLYDKVRLQLRDNAKELGNGCFEFYHKCDNECMESVKNGTYDYPQYSEEARLNREEISGVKLESMGTYQILSIYSTVASSLALAIMVAGLSLWMCSNGSLQCRICI

SEQ ID NO: 9 - protein, 568 aa, synthetic construct
  REGION 1..568: note = hemagglutinin__InfluenzaA__AAC40508
MERTVLLLATVSLVKSDQICIGYHANNSTEQVDTIMEKNVTVTHAQDILERTHNGKLCDLNGVKPLILRDCSVAGWLLGNPMCDEFINVPEWSYIVEKASPANDLCYPGNFNDYEELKHLLSRINHFEKIQIIPKSSWSNHDASSGVSSACPYLGRSSFFRNVVWLIKKNSAYPTIKRSYNNTNQEDLLVLWGVHHPNDAAEQTKLYQNPTTYISVGTSTLNQRLVPEIATRPKVNGQSGRMEFFWTILKPNDAINFESNGNFIAPEYAYKIVKKGDSTIMKSELEYGNCNTKCQTPMGAINSSMPFHNIHPLTIGECPKYVKSNRLVLATGLRNTPQRERRRKKRGLFGAIAGFIEGGWQGMVDGWYGYHHSNEQGSCYSADKESTQKAIDGVTNKVNSIINKMNTQFEAVGREFNNLERRIENLNKKMEDGFLDVWTYNAELLVLMENERTLDFHDSNVKNLYDKVRLQLRDNAKELGNGCFEFYHKCDNECMESVKNGTYDYPQYSEEARLNREEISGVKLESMGTYQILSIYSTVASSLALAIMVAGLSLWMCSNGSLQCRICI

SEQ ID NO: 10 - protein, 566 aa, synthetic construct
  REGION 1..566: note = hemagglutinin__InfluenzaA__AAF87274
MKAILVVLLYTFTTANADTLCIGYHANNSTDTVDTVLEKNVTVTHSVNLLENRHNGKLCKLKGVAPLHLGKCNIAGWLLGNPECELLFTASSWSYIVETSNSDNGTCYPGDFINYEELREQLSSVSSFERFEIFPKANSWPNHETNRGVTSACPYAGANSFYRNLIWLVKKGNSYPKLSKSYINNKGKEVLVLWGIHHPPTSNDQQSLYQNADAYVFVGSSKYNKKFMPEIATRPKVRGQAGRMNYYWTLIEPGDTITFEATGNLVAPRYAFAMERGSGSGIIISDTPVHDCNATCQTPKGAINTNLPFQNIHPVTIGECPKYVKSTRLRMATGLRNIPSIQSRGLFGAIAGFIEGGWTGMIDGWYGYHHQNEQGSGYAADRKSTQNAIDGITNKVNSVIEKMNTQFTAVGKEFNHLEKRIKNLNKKVDDGFLDVWTYNAELLVLLENERTLDYHDSNVKNLYEKVRSQLRNNAKEIGNGCFEFYHKCDDTCMESIKNGTYDYPKYSEEAKLTREEIDGVKLESTRIYQILAIYSTIASSLVLLVSLGAISFWMCSNGSLQCRICI

SEQ ID NO: 11 - protein, 566 aa, synthetic construct
  REGION 1..566: note = hemagglutinin__InfluenzaA__AAF87275
MKAILVVLLYTFTTANADTLCIGYHANNSTDTVDTVLEKNVTVTHSVNLLENRHNGKLCKLKGVAPLHLGKCNIAGWLLGNPECELLFTASSWSYIVETSNSDNGTCYPGDFINYEELREQLSSVSSFERFEIFPKANSWPNHETNRGVTSACPYAGANSFYRNLIWLVKKGNSYPKLSKSYINNKGKEVLVLWGIHHPPTSNDQQSLYQNADAYVFVGSSKYNKKFMPEIATRPKVRGQAGRMNYYWTLIEPGDTITFEATGNLVAPRYAFAMERGSGSGIIISDTPVHDCNATCQTPKGAINTNLPFQNIHPVTIGECPKYVKSTRLRMATGLRNIPSIQSRGLFGAIAGFIEGGWTGMIDGWYGYHHQNEQGSGYAADRKSTQNAIDGITNKVNSVIEKMNTQFTAVGKEFNHLEKRIENLNKKVDDGFLDVWTYNAELLVLLENERTLDYHDSNVKNLYEKVRSQLRNNAKEIGNGCFEFYHKCDDTCMESIKNGTYDYPKYSEEAKLTREEIDGVKLESTRIYQILAIYSTIASSLVLLVSLGAISFWMCSNGSLQCRICI

SEQ ID NO: 12 - protein, 566 aa, synthetic construct
  REGION 1..566: note = hemagglutinin__InfluenzaA__AAF87277
MKAILLVLLYTFTAANADTLCIGYHANNSTDTVDTVLEKNVTVTHSVNLLEDRHNGKLCKLRGIAPLHLGKCNIAGWLLGNPECELLFTASSWSYIVETSNSDNGTCYPGDFINYEELREQLSSVSSFERFEIFPKASSWPDHETNRGVTAACPYAGANSFYRNLIWLVKKGNSYPKLSKSYINNKEKEVLVLWGIHHPPTSTDQQSLYQNADAYVFVGSSKYNKKFKPEIASRPKVRGQAGRMDYYWTLVEPGDTITFEATGNLVVPRYAFAMKRGSGSGIIISDTPVHDCNTTCQTPKGAINTSLPFQNIHPVTIGECPKYVKSTKLRMATGLRNIPSIQSRGLFGAIAGFIEGGWTGMIDGWYGYHHQNEQGSGYAADRKSTQNAIDGVTNKVNSVIEKMNTQFTAVGKEFNHLEKRIENLNKKVDDGFLDVWTYNAELLVLLENERTLDYHDSNVKNLYEKVRSQLKNNAKEIGNGCFEFYHKCDDTCMESVKNGTYDYPKYSEESKLNREEIDGVKLESTRIYQILAIYSTVASSLILLVSLGAISFWMCSNGSLQCRICI

SEQ ID NO: 13 - protein, 566 aa, synthetic construct
  REGION 1..566: note = hemagglutinin__InfluenzaA__AAF87278
MKAILLVLLYTFTAANADTLCIGYHANNSTDTVDTVLEKNVTVTHSVNLLEDRHNGKLCKLRGIAPLHLGKCNIAGWLLGNPECELLFTASSWSYIVETSNSDNGTCYPGDFINYEELREQLSSVSSFERFEIFPKASSWPNHETNRGVTAACPYAGANSFYRNLIWLVKKGNSYPKLSKSYINNKEKEVLVLWGIHHPPTSTDQQSLYQNADAYVFVGSSKYNKKFKPEIASRPKVRGQAGRMDYYWTLVEPGDTITFEATGNLVVPRYAFAMKRGSGSGIIISDTPVHDCNTTCQTPKGAINTSLPFQNIHPVTIGECPKYVKSTKLRMATGLRNIPSIQSRGLFGAIAGFIEGGWTGMIDGWYGYHHQNEQGSGYAADRKSTQNAIDGVTNKVNSVIEKMNTQFTAVGKEFNHLEKRIENLNKKVDDGFLDVWTYNAELLVLLENERALDYHDSNVKNLYEKVRSQLKNNAKEIGNGCFEFYHKCDDTCMESVKNGTYDYPKYSEESKLNREEIDGVKLESTRIYQILAIYSTVASSLILLVSLGAISFWMCSNGSLQCRICI

SEQ ID NO: 14 - protein, 566 aa, synthetic construct
  REGION 1..566: note = hemagglutinin__InfluenzaA__AAF87279
MKAILLVLLYTFTAANADTLCIGYHANNSTDTVDTVLEKNVTVTHSVNLLEDRHNGKLCKLRGIAPLHLGKCNIAGWLLGNPECELLFTASSWSYIVETSNSDNGTCYPGDFINYEELREQLSSVSSFERFEIFPKASSWPNHETNRGVTAACPYAGANSFYRNLIWLVKKGNSYPKLSKSYINNKEKEVLVLWGIHHPPTSTDQQSLYQNADAYVFVGSSKYNKKFKPEIASRPKVRGQAGRMDYYWTLVEPGDTITFEATGNLVVPRYAFAMKRGSGSGIIISDTPVHDCNTTCQTPKGAINTSLPFQNIHPVTIGECPKYVKSTKLRMATGLRNIPSIQSRGLFGAIAGFIEGGWTGMIDGWYGYHHQNEQGSGYAADRKSTQNAIDGVTNKVNSVIEKMNTQFTAVGKEFNHLEKRIENLNKKVDDGFLDVWTYNAELLVLLENERTLDYHDSNVKNLYEKVRSQLKNNAKEIGNGCFEFYHKCDDTCMESVKNGTYDYPKYSEESKLNREEIDGVKLESTRIYQILAIYSTVASSLILLVSLGAISFWMCSNGSLQCRICI

SEQ ID NO: 15 - protein, 566 aa, synthetic construct
  REGION 1..566: note = hemagglutinin__InfluenzaA__AAF87281
MKAILVVLLYTFTTANADTLCIGYHANNSTDTVDTVLEKNVTVTHSVNLLEDRHNGKLCKLKGIAPLHLGKCNIAGWLLGNPECELLFTASSWSYIVETSNSDNGTCYPGDFINYEELREQLSSVSSFERFEIFPKASSWPNHETNRGVTSACPYAGANSFYRNLIWLVKKGNSYPKLSKSYINNKGKKVLVLWGIHHPPTSTDQQSLYQNADAYVFVGSSKYNKKFMPEIATRPKVRGQAGRMNYYWTLIEPGDTITFEATGNLVVPRYAFAMERGYGSGIIISDTPVHDCNTTCQTPKGAINTSLPFQNIHPVTIGECPKYVKSTKLRMATGLRNIPSIQSRGLFGAIAGFIEGGWTGMIDGWYGYHHQNEQGSGYAADRKSTQNAIDGITNKVNSVIEKMNTQFTAVGKEFNHLEKRIENLNKKVDDGFLDVWTYNAELLVLLENERTLDYHDSNVKNLYEKVKSQLKNNAKEIGNGCFEFYHKCDDTCMESVKNGTYDYPKYSEEAKLNREEIDGVKLESTRIYQILAIYSTIASSLVLLVSLGAISFWMCSNGSLQCRICI

SEQ ID NO: 16 - protein, 566 aa, synthetic construct; identical to SEQ ID NO: 14
  REGION 1..566: note = hemagglutinin__InfluenzaA__AAF87282

SEQ ID NO: 17 - protein, 566 aa, synthetic construct
  REGION 1..566: note = hemagglutinin__InfluenzaA__AAF87283
MKAILVVLLYAFTTANADTLCIGYHANNSTDTVDTVLEKNVTVTHSVNLLEDRHNGKLCKLKGVAPLHLGKCNIAGWLLGNPECELLFTASSWSYIVETSNSDNGTCYPGDFINYEELREQLSSVSSFERFEIFPKASSWPNHETNRGVTSACPYSGANSFYRNLIWLVKKGNSYPKLSKSYINNKGKEVLVLWGIHHPPTSTDQQSLYQNADAYVFVGSSKYNKKFMPEIATRPKVRGQAGRMNYYWTLIEPGDTITFEATGNLVAPRYAFAMERGSGSGIIISDTPVYDCNTACQTPKGAINTSLPFQNIHPVTIGECPKYVKSTKLRMATGLRNIPSIQSRGLFGAIAGFIEGGWTGMIDGWYGYHHQNEQGSGYAPDRKSTQNAIDGITNKVNSVIEKMNTQFTAVGKEFNHLEKRIENLNKKVDDGFLNVWTYNAELLVLLENERTLDYHDSNVKNLYEKVRSQLKNNAKEIGNGCFEFYHKCDDTCMESVKNGTYDYPKYSEEARLNREEIDGVKLESTRIYQILAIYSTIASSLVLLVSLGAISFWMCSNGSLQCRICI

SEQ ID NO: 18 - protein, 566 aa, synthetic construct
  REGION 1..566: note = hemagglutinin__InfluenzaA__AAF87284
MKAILVVLLYAFTTANADTLCIGYHANNSTDTVDTVLEKNVTVTHSVNLLEDRHNGKLCKLKGVAPLHLGKCNIAGWLLGNPECELLFTASSWSYIVETSNSDNGTCYPGDFINYEELREQLSSVSSFERFEIFPKASSWPNHETNRGVTSACLLFWSKQLLQKLNMAGKKGNSYPKLSKSYINNKGKEVLVLWGIHHPPTSTDQQSLYQNADAYVFVGSSKYNKKFMPEIATRPKVRGQAGRMNYYWTLIEPGDTITFEATGNLVAPRYAFAMERGSGSGIIISDTPVYDCNTACQTPKGAINTSLPFQNIHPVTIGECPKYVKSTKLRMATGLRNIPSIQSRGLFGAIAGFIEGGWTGMIDGWYGYHHQNEQGSGYAADRKSTQNAIDGITNKVNSVIEKMNTQFTAVGKEFNHLEKRIENLNKKVDDGFLNVWTYNAELLVLLENERTLDYHDSNVKNLYEKVRSQLKNNAKEIGNGCFEFYHKCDDTCMESVKNGTYDYPKYSEEARLNREEIDGVKLESTRIYQILAIYSTIASSLVLLVSLGAISFWMCSNGSLQCRICI

SEQ ID NO: 19 - protein, 566 aa, synthetic construct
  REGION 1..566: note = hemagglutinin__InfluenzaA__AAG01749
MSTIIALSYILCLVFAQKLPGNDNSTATLCLGHHAVPNGTLVKTITNDQIEVTNATELVQSSSTGRICDSPHRILDGKNCTLIDALLGDPHCDGFQNKEWDLFVERSKAYSNCYPYDVPDYASLRSLVASSGTLEFTNEGFNWTGVAQDGTSYACKRGSVKSFFSRLNWLHKLEYKYPALNVTMPNNDKFDKLYIWGVHHPSTDSDQTSLYVQASGRVTVSTKRSQQTVIPNIGSRPWVRGISSRISIYWTIVKPGDILLINSTGNLIAPRGYFKIRSGKSSIMRSDAPIDNCNSECITPNGSIPNEKPFQNVNRITYGACPRYVKQNTLKLATGMRNVPEKQTRGIFGAIAGFIENGWEGMVDGWYGFRHQNSEGTGQAADLKSTQAAINQINGKLNRLIEKTNEKFHQIEKEFSEVEGRIQDLEKYVEDTKIDLWSYNAELLVALENQHTIDLTDSEMNKLFERTRKQLRENAEDMGNGCFKIYHKCDNACIGSIRNGTYDHDVYRDEALNNRFQIKGVELKSGYKDWILWISFAISCFLLCVVLLGFIMWACQKGNIRCNICI

SEQ ID NO: 20 - protein, 566 aa, synthetic construct
  REGION 1..566: note = hemagglutinin__InfluenzaA__AAG01767
MNTIIALSYILCLVFAQKLPGNDNSTATLCLGHHAVPNGTLVKTITNDQIEVTNATELVQSSSTGRICDSPHRILDGKNCTLIDALLGDPHCDGFQNKEWDLFIERSKAYSNCYPYDVPDYSSLRSLVASSGTLEFTNEDFNWTGVAQDGGSYSCKRESVKSFFSRLNWLHKLEYKYPALNVTMPNNDKFDKLYIWGVHHPSTDSEQTSLYVQAIGRVTVSTKSSQQTVIPNIGSRPWVRGISSRISIYWTIVKPGDILLISSTGNLIAPRGYFKIRNGKSSIMRSDAPIDNCYSECITPNGSIPNDKPFQNVNRITYGACPKYVKQKTLKLATGMRNVPEKQTRGIFGAIAGFIENGWEGMVDGWYGFRHQNSEGTGQAADLKSTQAAIDQVNGKLNRLIEKTNEKFHQIEKEFSEVEGRIQDLEKYVEDTKIDLWSYNAELLVALENQHTIDLTDSEMNKLFEKTRKQLRENAEDMGNGCFKIYHKCDNACIGSIRNGTYDHDVYRDEALNNRFQIKGVELKSGYKDWILWISFAISCFLLCVVLLGFIMWACQKGNIRCNICI

SEQ ID NO: 21 - protein, 566 aa, synthetic construct
  REGION 1..566: note = hemagglutinin__InfluenzaA__AAG01776
MNTIIALSYILCLVFAQKLPGNDNSTATLCLGHHAVPNGTLVKTITNDQIEVTNATELVQSSSTGRICDSPHRILDGKNCTLIDALLGDPHCDGFQNKEWDLFIERSKAYSNCYPYDVPDYSSLRSLVASSGTLEFTNEDFNWTGVAQDGGSYSCKRESVKSFFSRLNWLHKLEYKYPALNVTMPNNDKFDKLYIWGVHHPSTDSEQTSLYVQAIGRVTVSTKSSQQTVIPNIGSRPWVRGISSRISIYWTIVKPGDILLISSTGNLIAPRGYFKIRNGKSSIMRSDAPIDNCYSECITPNGSIPNDKPFQNVNRITYGACPKYVKQKTLKLATGMRNVPEKQTRGIFGAIAGFIENGWEGMVDGWYGFRHQNSEGTGQAADLKSTQAAIDQVNGKLNWLIEKTNEKFHQIEKEFSEVEGRIQDLEKYVEDTKIDLWSYNAELLVALENQHTIDLTDSEMNKLFEKTRKQLRENAEDMGNGCFKIYHKCDNACIGSIRNGTYDHDVYRDEALNNRFQIKGVELKSGYKDWILWISFAISCFLLCVVLLGFIMWACQKGNIRCNICI

SEQ ID NO: 22 - protein, 566 aa, synthetic construct
  REGION 1..566: note = hemagglutinin__InfluenzaA__AAG01785
MKTIIALSYILCLVFAQKLPGNDNSTATLCLGHHAVPNGTLVKTITNDQIEVTNATELVQSSSTGRICDSPHRILDGKNCTLIDALLGDPHCDGFQNKEWDLFIERSKAYSNCYPYDVPDYSSLRSLVASSGTLEFTNEDFNWTGVAQDGGSYSCKRESVKSFFSRLNWLHKLEYKYPALNVTMPNNDKFDKLYIWGVHHPSTDSEQTSLYVQAIGRVTVSTKSSQQTVIPNIGSRPWVRGISSRISIYWTIVKPGDILLISSTGNLIAPRGYFKIRNGKSSIMRSDAPIDNCYSECITPNGSIPNDKPFQNVNRITYGACPKYVKQKTLKLATGMRNVPEKQTRGIFGAIAGFIENGWEGMVDGWYGFRHQNSEGTGQAADLKSTQAAIDQVNGKLNRLIEKTNEKFHQIEKEFSEVEGRIQDLEKYVEDTKIDLWSYNAELLVALENQHTIDLTDSEMNKLFEKTRKQLRENAEDMGNGCFKIYHKCDNACIGSIRNGTYDHDVYRDEALNNRFQIKGVELKSGYKDWILWISFAISCFLLCVVLLGFIMWACQKGNIRCNICI

SEQ ID NO: 23 - protein, 566 aa, synthetic construct
  REGION 1..566: note = hemagglutinin__InfluenzaA__AAK52911
MKTIIALSYILCLVFAQKLPGNDNSTATLCLGHHAVPNGTLVKTITNDQIEVTNATELVQSSSTGRICDSPHQILDGKNCTLIDALLGDPHCDGFQNKEWDLFVERSTAYSNCYPYDVPDYASLRSLVASSGTLEFTKEGFNWTGVAQDGTSYACKRGSVKSFFSRLNWLHKLEYKYPALNVTMPNNDKFDKLYIWGVHHPSTDSDQTSLYVQASGRVTVSTKRSQQTVIPNIGSRPWVRGVSSRISIYWTIVKPGDILLINSTGNLIAPRGYFKIRSGKSSIMRSDAPIDNCNSECITPNGSIPNDKPFQNVNRITYGACPRYVKQNTLKLATGMRNVPEKQTRGIFGAIAGFIENGWEGMVDGWYGFRHQNSEGTGQAADLKSTQAAINQINGKLNRLIEKTNEKFHQIEKEFSEVEGRIQDLEKYVEDTKIDLWSYNAELLVALENQHTIDLTDSEMNKLFERTRKQLRENAEDMGNGCFKIYHKCDNACIGSIRNGTYDHDVYRDEALNNRFQIKGVELKSGYKDWILWISFAISCFLLCVVLLGFIMWACQKGNIRCNICI

SEQ ID NO: 24 - protein, 566 aa, synthetic construct
  REGION 1..566: note = hemagglutinin__InfluenzaA__AAK52912
MKTIIALSYILCLVFAQKLPGNDNSTATLCLGHHAVPNGTLVKTITNDQIEVTNATELVQSSSTGRICDSPHRILDGKNCTLIDALLGDPHCDGFQNKEWDLFVERTKAYSNCYPYDVPDYASLRSLVASSGTLEFTNEGFNWTGVAQNGTSYACKRGSVKSFFSRLNWLHKLEYKYPALNVTMPNNDKFDKLYIWGVHHPSTDSDQTSLYVQASGRVTVSTKRSQQTVIPNIGSRPWVRGVSSRISIYWTIVKPGDILLINSTGNLIAPRGYFKIRSGKSSIMRSDAPIGNCNSECITPNGSIPNDKPFQNVNRITYGACPRYVKQNTLKLATGMRNVPEKQTRGIFGAIAGFIENGWEGMVDGWYGFRHQNSEGTGQAADLKSTQAAINQINGKLNRLIEKTNEKFHQIEKEFSEVEGRIQDLEKYVEDTKIDLWSYNAELLVALENQHTIDLTDSEMNKLFERTRKQLRENAEDMGNGCFKIYHKCDNACIGSIRNGTYDHDVYRDEALNNRFQIKGVELKSGYKDWILWISFAISCFLLCVVLLGFIMWACQKGNIRCNICI

SEQ ID NO: 25 - protein, 566 aa, synthetic construct
  REGION 1..566: note = hemagglutinin__InfluenzaA__AAK71687
MKAILVVLLYTFTTANADTLCIGYHANNSTDTVDTVLEKNVTVTHSVNLLEDRHNGKLCKLRGVAPLHLGKCNIAGWLLGNPECESLFTASSWSYIVETSNSDNGTCYPGDFINYEELREQLSSVSSFERFEIFPETSSWPNHDTNRGVTAACPHAGANSFYRNLIWLAKKGDSYPKLSKSYINNKGKEVLVLWGIHHPPTSADQQSLYQNADAYVFVGSSRYSKKFKPEIATRPKVRGQAGRMNYYWTLVEPGDKITFEATGNLVVPRYAFAMKRNSESGIIISDISVHDCNTTCQTPKGAINTSLPFQNIHPVTIGECPKYVKSTKLRMATGLRNVPSIQSRGLFGAIAGFIEGGWTGMIDGWYGYHHQNEQGSGYAADLKSTQNAIDGITNKVNSVIEKMNTQFTVVGKEFNHLEKRIENLNKKVDDGFLDIWTYNAELLVLLENERTLDYHDSNVKNLYEKVRSQLKNNAKEIGNGCFEFYHKCDDTCMESVKNGTYDYPKYSEEAKLNREEIDGVKLESTRIYQILAIYSTVASSLVLVVSLGTISFWMCSNGSLQCRICI

SEQ ID NO: 26 - protein, 568 aa, synthetic construct
  REGION 1..568: note = hemagglutinin__InfluenzaA__AAS65618
MEKIVLLFAIVSLVKSDQICIGYHANNSTEQVDTIMEKNVTVTHAQDILEKTHNGKLCDLDGVKPLILRDCSVAGWLLGNPMCDEFINVPEWSYIVEKANPVNDLCYPGDFNDYEELKHLLSRINHFEKIQIIPKSSWSSHEVSLGVSSACPYQGKSSFFRNVVWLIKKNSTYPTIKRSYNNTNQEDLLVLWGIHHPNDAAEQTKLYQNPTTYISVGTSTLNQRLVPRIATRSKVNGQSGRMEFFWTILKPNDAINFESNGNFIAPEYAYKIVKKGDSTIMKSELEYGNCNTKCQTPMGAINSSMPFHNIHPLTIGECPKYVKSNRLVLATGLRNSPQRERRRKKRGLFGAIAGFIEGGWQGMVDGWYGYHHSNEQGSGYAAAKESTQKAIDGVTNKVNSIIDKMNTQFEAVGREFNNLERRIENLNKKMEDGFLDVWTYNAELLVLMENERTLDFHDSNVKNLYDKVRLQLKDNAKELGNGCFEFYHKCDNECMESVRNGTYDYPQYSEEARLKREEISGVKLESIGIYQILSIYSTVASSLALAIMVAGLSLWMCSNGSLQCRICI

SEQ ID NO: 27 - protein, 567 aa, synthetic construct
  REGION 1..567: note = hemagglutinin__InfluenzaA__AAT38819
MNTQILAFIACMLIGTKGDKICLGHHAVANGTKVNTLTERGIEVVNATETVETVNIKKICTQGKRPTDLGQCGLLGTLIGPPQCDQFLEFDANLIIERREGTDVCYPGKFTNEESLRQILRGSGGIDKESMGFTYSGIRTNGATSACRRSGSSFYAEMKWLLSNSDNAAFPQMTKSYRNPRNKPALIIWGVHHSGSATEQTKLYGSGNKLITVGSSKYQQSFTPSPGARPQVNGQSGRIDFHWLLLDPNDTVTFTFNGAFIAPDRASFFRGESLGVQSDVPLDSGCEGDCFHSGGTIVSSLPFQNINPRTVGKCPRYVKQTSLLLATGMRNVPENPKQAYQKQMTRGLFGAIAGFIENGWEGLIDGWYGFRHQNAQGEGTAADYKSTQSAIDQITGKLNRLIDKTNQQFELIDNEFSEIEQQIGNVINWTRDSMTEVWSYNAELLVAMENQHTIDLADSEMNKLYERVRKQLRENAEEDGTGCFEIFHKCDDQCMESIRNNTYDHTQYRTESLQNRIQIDPVKLSSGYKDIILWFSFGASCFLLLAIAMGLVFICIKNGNMRCTICI

SEQ ID NO: 28 - protein, 568 aa, synthetic construct
  REGION 1..568: note = hemagglutinin__InfluenzaA__AAV32636
MEKIVLLFAIVSLVKSDQICIGYHANNSTEQVDTIMEKNVTVTHAQDILEKTHNGKLCDLDGVKPLILRDCSVAGWLLGNPMCDEFINVPEWSYIVEKANPVNDLCYPGDFNDYEELKHLLSRINHFEKIQIIPKSSWSSHEASLGVSSACPYQGKSSFFRNVVWLIKKNSTYPTIKRSYNNTNQEDLLVLWGIHHPNDAAEQTKLYQNPTTYISVGTSTLNQRLVPRIATRSKVNGQSGRMEFFWTILKPNDAINFESNGNFIAPEYAYKIVKKGDSTIMKSELEYGNCNTKCQTPMGAINSSMPFHNIHPLTIGECPKYVKSNRLVLATGLRNSPQRERRRKKRGLFGAIAGFIEGGWQGMVDGWYGYHHSNEQGSGYAADKESTQKAIDGVTNKVNSIIDKMNTQFEAVGREFNNLERRIENLNKKMEDGFLDVWTYNAELLVLMENERTLDFHDSNVKNLYDKVRLQLRDNAKELGNGCFEFYHKCDNECMESVRNGTYDYPQYSEEARLKREEISGVKLESIGIYQILSIYSTVASSLALAIMVAGLSLWMCSNGSLQCRICI

SEQ ID NO: 29 - protein, 568 aa, synthetic construct; identical to SEQ ID NO: 28
  REGION 1..568: note = hemagglutinin__InfluenzaA__AAV34704

SEQ ID NO: 30 - protein, 568 aa, synthetic construct
  REGION 1..568: note = hemagglutinin__InfluenzaA__AAV65826
MEKIVLLFAIVSLVKSDQICIGYHANNSTEQVDTIMEKNVTVTHAQDILEKTHNGKLCDLDGVKPLILRDCSVAGWLLGNPMCDEFINVPEWSYIVEKANPVNDLCYPGDFNDYEELKHLLSRINHFEKIQIIPKSSWSSHEASLGVSSACPYQGKSSFFRNVVWLIKKNSTYPTIKRSYNNTNQEDLLVLGGIHHPNDAAEQTKLYQNPTTYISVGTSTLNQRLVPRIATRSKVNGQSGRMEFFWTILKPNDAINFESNGNFIAPEYAYKIVKKGDSTIMKSELEYGNCNTKCQTPMGAINSSMPFHNIHPLTIGECPKYVKSNRLVLATGLRNSPQRERRRKKRGLFGAIAGFIEGGWQGMVDGWYGYHHSNEQGSGYAADKESTQKAIDGVTNKVNSIIDKMNTQFEAVGREFNNLERRIENLNKKMEDGFLDVWTYNAELLVLMENERTLDFHDSNVKNLYDKVRLQLRDNAKELGNGCFEFYHKCDNECMESVRNGTYDYPQYSEEARLKREEISGVKLESIGIYQILSIYSTVASSLALAIMVAGLSLWMCSNGSLQCRICI

SEQ ID NO: 31 - protein, 566 aa, synthetic construct
  REGION 1..566: note = hemagglutinin__InfluenzaA__AAX11505
MKTIIALSYILCLVFAQKLPGNDNSTATLCLGHHAVPNGTIVKTITNDQIEVTNATELVQSSSTGGICDSPHQILDGENCTLIDALLGDPQCDGFQNKKWDLFVERSKAYSNCYPYDVPDYASLRSLVASSGTLEFNNESFNWTGVTQNGTSSACERRSNKSFFSRLNWLTHLKYKYPALNVTMPNNEKFDKLYIWGVHHPGTDSDQISLYAQASGRITVSTKRSQQTVIPNIGSRPRVRDVSSRISIYWTIVKPGDILLINSTGNLIAPRGYFKIRSGKSSIMRSDAPIGKCNSECITPNGSIPNDKPFQNVNRITYGACPRYVKQNTLKLATGMRNVPEKQTRGIFGAIAGFIENGWEGMVDGWYGFRHQNSEGTGQAADLKSTQAAINQINGKLNRLIGKTNEKFHQIEKEFSEVEGRIQDLEKYVEDTKIDLWSYNAELLVALENQHTIDLTDSEMNKLFERTKKQLRENAEDMGNGCFKIYHKCDNACIGSIRNGTYDHDVYRDEALNNRFQIKGVELKSGYKDWILWISFAISCFLLCVALLGFIMWACQKGNIRCDICI

SEQ ID NO: 32 - protein, 566 aa, synthetic construct
  REGION 1..566: note = hemagglutinin__InfluenzaA__AAX11525
MKTIIALSYILCLVFAQKLPGNDNSTATLCLGHHAVPNGTIVKTITNDQIEVTNATELVQSSSTGGICDSPHQILDGENCTLIDALLGDPQCDGFQNKKWDLFVERSKAYSNCYPYDVPDYASLRSLVASSGTLEFNNESFDWTGVTQNGTSSACKRRSNKSFFSRLNWLTHLKYKYPALNVTMPNNEKFDKLYIWGVHHPGTDSDQISLYAQASGRITVSTKRSQQTVIPNIGSRPRVRDVSSRISIYWTIVKPGDILLINSTGNLIAPRGYFKIRSGKSSIMRSDAPIGKCNSECITPNGSIPNDKPFQNVNRITYGACPRYVKQNTLKLATGMRNVPEKQTRGIFGAIAGFIENGWEGMVDGWYGFRHQNSEGTGQAADLKSTQAAINQINGKLNRLIGKTNEKFHQIEKEFSEVEGRIQDLEKYVEDTKIDLWSYNAELLVALENQHTIDLTDSEMNKLFERTKKQLRENAEDMGNGCFKIYHKCDNACIGSIRNGTYDHDVYRDEALNNRFQIKGVELKSGYKDWILWISFAISCFLLCVALLGFIMWACQKGNIRCNICI

SEQ ID NO: 33 - protein, 566 aa, synthetic construct; identical to SEQ ID NO: 32
  REGION 1..566: note = hemagglutinin__InfluenzaA__AAX11535

SEQ ID NO: 34 - protein, 566 aa, synthetic construct; identical to SEQ ID NO: 32
  REGION 1..566: note = hemagglutinin__InfluenzaA__AAX11545

SEQ ID NO: 35 - protein, 566 aa, synthetic construct; identical to SEQ ID NO: 31
  REGION 1..566: note = hemagglutinin__InfluenzaA__AAX11555

SEQ ID NO: 36 - protein, 566 aa, synthetic construct; identical to SEQ ID NO: 32
  REGION 1..566: note = hemagglutinin__InfluenzaA__AAX11565

SEQ ID NO: 37 - protein, 566 aa, synthetic construct
  REGION 1..566: note = hemagglutinin__InfluenzaA__AAX11585
MKTIIALSYILCLVFAQKLPGNDNSTATLCLGHHAVPNGTIVKTITNDQIEVTNATELVQISSTGGICDSPHQILDGENCTLIDALLGDPQCDGFQNKKWDLFVERSKAYSNCYPYDVPDYASLRSLVASSGTLEFNNESFDWTGVTQNGTSSACKRRSNKSFFSRLNWLTHLKYKYPALNVTMPNNEKFDKLYIWGVHHPGTDNDQISLYAQASGRITVSTKRSQQTVIPNIGSRPRVRDVSSQISIYWTIVKPGDILLINSTGNLIAPRGYFKIRSGKSSIMRSDAPIGKCNSECITPNGSIPNDKPFQNVNRITYGACPRYVKQNTLKLATGMRNVPEKQTRGIFGAIAGFIENGWEGMVDGWYGFRHQNSEGTGQAADLKSTQAAINQINGKLNRLIGKTNEKFHQIEKEFSEVEGRIQDLEKYVEDTKIDLWSYNAELLVALENQHTIDLTDSEMNKLFERTKKQLRENAEDMGNGCFKIYHKCDNACIGSIRNGTYDHDVYRDEALNNRFQIKGVELKSGYKDWILWISFAISCFLLCVALLGFIMWACQKGNIRCNICI

SEQ ID NO: 38 - protein, 566 aa, synthetic construct; identical to SEQ ID NO: 32
  REGION 1..566: note = hemagglutinin__InfluenzaA__AAX11605

SEQ ID NO: 39 - protein, 566 aa, synthetic construct; identical to SEQ ID NO: 32
  REGION 1..566: note = hemagglutinin__InfluenzaA__AAX11615

SEQ ID NO: 40 - protein, 566 aa, synthetic construct
  REGION 1..566: note = hemagglutinin__InfluenzaA__AAX11625
MKTIIALSYILCLVFAQKLPGNDNSTATLCLGHHAVPNGTLVKTITNDQIEVTNATELVQSSSTSRICDSPHQILDGENCTLIDALLGDPHCDGFQNKEWDLFVERSKAYSNCYPYDVPDYVSLRSLVASSGTLEFNNESFNWTGVAQNGTSSACKRRSDKSFFSRLNWLHQLKYKYPALNVTMPNNEKFDKLYIWGVHHPGTDSDQISLYAQASGRVTVSTKRSQQTVIPNIGSGPWVRGVSSRISIYWTIVKPGDILLINSTGNLIAPRGYFKIRSGKSSIMRSDAPIGKCNSECITPNGSIPNDKPFQNVNRITYGACPRYVKQNTLKLATGMRNVPEKQARGIFGAIAGFIENGWEGMMDGWYGFRHQNSEGTGQAADLKSTQAAINQINGKLNRLIEKTNEKFHQIEKEFSEVEGRIQDLEKYVEDTKIDLWSYNAELLVALENQHTIDLTDSEMNKLFERTKKQLRENAEDMGNGCFKIYHKCDNACIGSIRNGTYDHDVYRDEALNNRFQIKGVELKSGYKDWILWISFAISCFLLCIVLLGFIMWACQKGNIRCNICI

SEQ ID NO: 41 - protein, 566 aa, synthetic construct; identical to SEQ ID NO: 32
  REGION 1..566: note = hemagglutinin__InfluenzaA__AAX12731

SEQ ID NO: 42 - protein, 566 aa, synthetic construct
  REGION 1..566: note = hemagglutinin__InfluenzaA__AAX12741
MKTIIALSYILCLVFAQKLPGNDNSTATLCLGHHAVPNGTIVKTITNDQIEVTNATELVQSSSTGGICDSPHQILDGENCTLIDALLGDPQCDGFQNKKWDLFVERSKAYSNCYPYDVPDYASLRSLVASSGTLEFNNESFDWTGVTQNGTSSACKRRSNKSFFSRLNWLTHLKYKYPALNVTMPNNEKFDKLYIWGVHHPGTDSDQISLYAQASGRITVSTKRSQQTVIPNIGSRPRVRDVSSRISIYWTIVKPGDILLINSTGNLIAPRGYFKIRSGKSSIMRSDAPIGKCNSECITPNGSIPNDKPFQNVNRITYGACPRYVKQNTLKLATGMRNVPEKQTRGIFGAIAGFIENGWEGMVDGWYGFRHQNSEGTGQAADLKSTQAAINQINGKLNRLIGKTNEKFHQIEKEFSEVEGRIQDLEKYVEDTKIDLWSYNAELLVALENQHTIDLTDSEMNKLFERTKKQLRENAEDMGNGCFKIYHKCDNACIGSIRNGTYDHDVYRDEALNNRFQIKGVELKSGYKDWILWISFATSCFLLCVALLGFIMWACQKGNIRCNICI

SEQ ID NO: 43 - protein, 566 aa, synthetic construct; identical to SEQ ID NO: 32
  REGION 1..566: note = hemagglutinin__InfluenzaA__AAX12751

SEQ ID NO: 44 - protein, 566 aa, synthetic construct
  REGION 1..566: note = hemagglutinin__InfluenzaA__AAX12761
MKTIIALSYILCLVFAQKLPGNDNSTATLCLGHHAVPNGTLVKTITNDQIEVTNATELVQSSSTGRICDSPHQILDGENCTLIDALLGDPHCDGFQNKEWDLFVERSKAYSNCYPYDVPDYVSLRSLVASSGTLEFNNESFNWTGVAQNGTSSACKRRSDKSFFSRLNWLHQLKYKYPALNVTMPNNEKFDKLYIWGVHHPGTDSDQISLYAQASGRVTVSTKRSQQTVIPNIGSRPWVRGVSSRISIYWTIVKPGDILLINSTGNLIAPRGYFKIRSGKSSIMRSDAPIGKCNSECITPNGSIPNDKPFQNVNRITYGPCPRYVKQNTLKLATGMRNVPEKQTRGIFGAIAGFIENGWEGMMDGWYGFRHQNSEGTGQAADLKSTQAAINQINGKLNRLIEKTNEKFHQIEKEFSEVEGRIQDLEKYVEDTKIDLWSYNAELLVALENQHTIDLTDSEMNKLFERTKKQLRENAEDMGNGCFKIYHKCDNVCIGSIRNGTYDHDVYRDEALNNRFQIKGVELKSGYKDWILWISFAISCFLLCIVLLGFIMWACQKGNIRCNICI

SEQ ID NO: 45 - protein, 566 aa, synthetic construct
  REGION 1..566: note = hemagglutinin__InfluenzaA__AAX12791
MKTIIALSYILCLVFAQKLPGNDNSMATLCLGHHAVPNGTLVKTITNDQIEVTNATELVQSSSTGRICDSPHQILDGENCTLIDALLGDPHCDGFQNKEWDLFVERSKAYSNCYPYDVPDYVSLRSLVASSGTLEFNNESFNWTGVAQNGTSSACKRRSDKSFFSRLNWLHQLKYKYPALNVTMPNNEKFDKLYIWGVHHPGTDSDQISLYAQASGRVTVSTKRSQQTVIPNIGSGPWVRGVSSRISIYWTIVKPGDILLINSTGNLIAPRGYFKIRSGKSSIMRSDAPIDKCNSECITPNGSIPNDKPFQNVNRITYGLCPRYVKQNTLKLATGMRNVPEKQTRGIFGAIAGFIENGWEGMMDGWYGFRHQNSEGTGQAADLKSTQAAINQINGKLNRLIEKTNEKFHQIEKEFSEVEGRIQDLEKYVEDTKIDLWSYNAELLVALENQHTIDLTDSEMNKLFERTKKQLRENAEDMGNGCFKIYHKCDNACIGSIRNGTYDHDVYRDEALNNRFQIKGVELKSGYKDWILWISFAISCFLLCIVLLGFIMWACQKGNIRCNICI

SEQ ID NO: 46 - protein, 566 aa, synthetic construct
  REGION 1..566: note = hemagglutinin__InfluenzaA__AAX12801
MKTIIALSYILCLVFAQKFPGNDNSTATLCLGHHAVPNGTLVKTITNDQIEVTNATELVQSSSTDRICDSPHQILDGENCTLIDALLGDPHCDGFQNKEWDLFVERSKAYSNCYPYDVPDYVSLRSLVASSGTLEFNNESFNWTGVAQNGTSSACKRRSDKSFFSRLNWLHQLKYKYPALNVTMPNNEKFDKLYIWGVHHPGTDSDQISLYAQASGRVTVSTKRSQQTVIPNIGSRPWVRGVSSRISIYWTIVKPGDILLINSTGNLIAPRGYFKIRSGKSSIMRSDAPIGKCNSECITPNGSIPNDKPFQNVNRITYGACPRYVKQNTLKLATGMRNVPEKQTRGIFGAIAGFIENGWEGMMDGWYGFRHQNSEGTGQAADLKSTQAAINQINGKLNRLIEKTNEKFHQIEKEFSEVEGRIQDLEKYVEDTKIDLWSYNAELLVALENQHTIDLTDSEMNKLFERTKKQLRENAEDMGNGCFKIYHKCDNACIGSIRNGTYDHDVYRDEALNNRFQIKGVELKSGYKDWILWISFAISCFLLCIVLLGFIMWACQKGNIRCNICI

SEQ ID NO: 47 - protein, 566 aa, synthetic construct
  REGION 1..566: note = hemagglutinin__InfluenzaA__AAX12811
MKTIIALSYILCLVFAQKLPGNDNSTATLCLGHHAVPNGTLVKTITNDQIEVTNATELVQSSSTSRICDSPHQILDGENCTLIDALLGDPHCDGFQNKEWDLFVERSKAYSNCYPYDVPDYVSLRSLVASSGTLEFNNESFNWTGVAQNGTSSACKRRSDKSFFSRLNWLHQLKYKYPALNVTMPNNEKFDKLYIWGVHHPGTDSDQISLYAQASGRVTVSTKRSQQTVIPNIGSRPWVRGVSSRISIYWTIVKPGDILLINSTGNLIAPRGYFKIRSGKSSIMRSDAPIGKCNSECITPNGSIPNDKPFQNVNRITYGACPRYVKQNTLKLATGMRNVPEKQTRGIFGAIAGFIENGWEGMMDGWYGFRHQNSEGTGQAADLKSTQAAINQINGKLNRLIEKTNEKFHQIEKEFSEVEGRIQDLEKYVEDTKIDLWSYNAELLVALENQHTIDLTDSEMNKLFERTKKQLRENAEDMGNGCFKIYHKCDNACIGSIRNGTYDHDVYRDEALNNRFQIKGVELKSGYKDWILWISFAISCFLLCIVLLGFIMWACQKGNIRCNICI

SEQ ID NO: 48 - protein, 566 aa, synthetic construct
  REGION 1..566: note = hemagglutinin__InfluenzaA__AAX34061
MKTIIALSYILCLVFAQKLPGNDNSTATLCLGHHAVPNGTIVKTITNDQIEVTNATELVQSSSTGEICDSPHQILDGENCTLIDALLGDPQCDGFQNKKWDLFVERSKAYSNCYPYDVPDYASLRSLVASSGTLEFNNESFDWTGVTQNGTSSACKRRSNKSFFSRLNWLTHLKYKYPALNVTMPNNEKFDKLYIWGVHHPGTDSDQISLYAQASGRITVSTKRSQQTVIPNIGSRPRVRDVSSRISIYWTIVKPGDILLINSTGNLIAPRGYFKIRSGKSSIMRSDAPIGKCNSECITPNGSIPNDKPFQNVNRITYGACPRYIKQNTLKLATGMRNVPEKQTRGIFGAIAGFIENGWEGMVDGWYGFRHQNSEGTGQAADLKSTQAAINQINGKLNRLIGKTNEKFHQIEKEFSEVEGRIQDLEKYVEDTKIDLWSYNAELLVALENQHTIDLTDSEMNKLFERTKKQLRENAEDMGNGCFKIYHKCDNACIGSIRNGTYDHDVYRDEALNNRFQIKGVELKSGYKDWILWISFAISCFLLCVALLGFIMWACQKGNIRCNICI

SEQ ID NO: 49 - protein, 566 aa, synthetic construct
  REGION 1..566: note = hemagglutinin__InfluenzaA__AAX35821
MKTIIALSYILCLVFAQKLPGNDNSTATLCLGHHAVPNGTIVKTITNDQIEVTNATELVQSSSTGGICDSPHQILDGENCTLIDALLGDPQCDGFQNKKWDLFVERSKAYSNCYPYDVPDYASLRSLVASSGTLEFNNESFNWTGVTQNGTSSACKRKSNKSFFSRLNWLTHLKYKYPALNVTMPNNEKFDKLYIWGVHHPGTDNDQISLYAQASGRITVSTKRSQQTVIPNIGSRPRVRDVSSRISIYWTIVKPGDILLINSTGNLIAPRGYFKIRSGKSSIMRSDAPIGKCNSECITPNGSIPNDKPFQNVNRITYGACPRYVKQNTLKLATGMRNVPERQTRGIFGAIAGFIENGWEGMVDGWYGFRHQNSEGTGQAADLKSTQAAINQINGKLNRLIGKTNEKFHQIEKEFSEVEGRIQDLEKYVEDTKIDLWSYNAELLVALENQHTIDLTDSEMNKLFERTKKQLRENAEDMGNGCFKIYHKCDNACIGSIRNGTYDHDVYRDEALNNRFQIKGVELKSGYKDWILWISFAISCFLLCVALLGFIMWACQKGNIRCNICI

SEQ ID NO: 50 - protein, 566 aa, synthetic construct; identical to SEQ ID NO: 31
  REGION 1..566: note = hemagglutinin__InfluenzaA__AAX35831

SEQ ID NO: 51 - protein, 566 aa, synthetic construct
  REGION 1..566: note = hemagglutinin__InfluenzaA__AAX35851
MKTIIALSYILCLVFAQKLPGNDNSTATLCLGHHAVPNGTLVKTITNDQIEVTNATELVQSSSTGRICDSPHQILDGENCTLIDALLGDPHCDGFQNKEWDLFVERSKAYSNCYPYDVPDYVSLRSLVASSGTLEFNNESFNWTGVAQNGTSSACKRRSDKSFFSRLNWLHQLKYKYPALNVTMPNNEKFDKLYIWGVHHPGTDSDQISLYAQASGRVTVSTKRSQQTVIPNIGSRPWVRGVSSRISIYWTIVKPGDILLINSTGNLIAPRGYFKIRSGKSSIMRSDAPIGKCNSECITPNGSIPNDKPFQNVNRITYGPCPRYVKQNTLKLATGMRNVPEKQTRGIFGAIAGFIENGWEGMMDGWYGFRHQNSEGTGQAADLKSTQAAINQINGKLNRLIEKTNEKFHQIEKEFSEVEGRIQDLEKYVEDTKIDLWSYNAELLVALENQHTIDLTDSEMNKLFERTKKQLRENAEDMGNGCFKIYHKCDNACIGSIRNGTYDHDVYRDEALNNRFQIKGVELKSGYKDWILWISFAISCFLLCIVLLGFIMWACQKGNIRCNICI

SEQ ID NO: 52 - protein, 566 aa, synthetic construct
  REGION 1..566: note = hemagglutinin__InfluenzaA__AAX35861
MKTIIALSYILCLVFAQKLPGNDNSTATLCLGHHAVPNGTLVKTITNDQIEVTNATELVQSSSTSRICDSPHQILDGENCTLIDALLGDPHCDGFQNKEWDLFVERSKAYSNCYPYDVPDYVSLRSLVASSGTLEFNNESFNWTGVAQNGTSSACKRRSDKSFFSRLNWLHQLKYKYPALNVTMPNNEKFDKLYIWGVHHPGTDSDQISLYAQASGRITVSTKRSQQTVIPNIGSGPWVRGVSSRISIYWTIVKPGDILLINSTGNLIAPRGYFKIRSGKSSIMRSDAPIGKCNSECITPNGSIPNDKPFQNVNRITYGACPRYVKQNTLKLATGMRNVPEKQTRGIFGAIAGFIENGWEGMMDGWYGFRHQNSEGTGQAADLKSTQAAINQINGKLNRLIEKTNEKFHQIEKEFSEVEGRIQDLEKYVEDTKIDLWSYNAELLVALENQHTIDLTDSEMNKLFERTKKQLRENAEDMGNGCFKIYHKCDNACIGSIRNGTYDHDVYRDEALNNRFQIKGVELKSGYKDWILWISFAISCFLLCIVLLGFIMWACQKGNIRCNICI

SEQ ID NO: 53 - protein, 566 aa, synthetic construct
  REGION 1..566: note = hemagglutinin__InfluenzaA__AAX35871
MKTIIALSYILCLVFAQKLPGNDNSTATLCLGHHAVPNGTLVKTITNDQIEVTNATELVQSSSASRICDSPHQILDGENCTLIDALLGDPHCDGFQNKEWDLFVERSKAYSNCYPYDVPDYVSLRSLVASSGTLEFNNESFNWTGVAQNGTSFACKRRSDKSFFSRLNWLHQLKYKYPALNVTMPNNEKFDKLYIWGVHHPGTDSDQISLYAQASGRVTVSTKRSQQTVIPNIGSGPWVRGVSSRISIYWTIVKPGDILLINSTGNLIAPRGYFKIRSGKSSIMRSDAPIGKCNSECITPNGSIPNDKPFQNVNRITYGACPRYVKQNTLKLATGMRNVPEKQTRGIFGAIAGFIENGWEGMMDGWYGFRHQNSEGTGQAADLKSTQAAINQINGKLNRLIEKTNEKFHQIEKEFSEVEGRIQDLEKYVEDTKIDLWSYNAELLVALENQHTIDLTDSEMNKLFERTKKQLRENAEDMGNGCFKIYHKCDNACIGSIRNGTYDHDVYRDEALNNRFQIKGVELKSGYKDWILWISFAISCFLLCIVLLGFIMWACQKGNIRCNICI

SEQ ID NO: 54 - protein, 566 aa, synthetic construct; identical to SEQ ID NO: 47
  REGION 1..566: note = hemagglutinin__InfluenzaA__AAX38237

SEQ ID NO: 55 - protein, 566 aa, synthetic construct
  REGION 1..566: note = hemagglutinin__InfluenzaA__AAX47515
MKAIIALSYILCLVFAQKLPGNDNSTATLCLGHHAVPNGTLVKTITNDQIEVTNATELVQSSSTGRICDSPHQILDGENCTLIDALLGDPHCDGFQNKEWDLFVERSKAYSNCYPYDVPDYVSLRSLVASSGTLEFNNESFNWTGVAQNGTSSACKRRSDKSFFSRLNWLHQLKYKYPALNVTMPNNEKFDKLYIWGVHHPGTDSDQISLYAQASGRVTVSTKRSQQTVIPNIGSRPWVRGVSSRISIYWTIVKPGDILLINSTGNLIAPRGYFKIRSGKSSIMRSDAPIGKCNSECITPNGSIPNDKPFQNVNRITYGACPRYVKQNTLKLATGMRNVPEKQTRGIFGAIAGFIENGWEGMMDGWYGFRHQNSEGTGQAADLKSTQAAINQINGKLNRLIEKTNEKFHQIEKEFSEVEGRIQDLEKYVEDTKIDLWSYNAELLVALENQHTIDLTDSEMNKLFERTKKQLRENAEDMGNGCFKIYHKCDNACIGSIRNGTYDHDVYRDEALNNRFQIKGVELKSGYKDWILWISFAISCFLLCIVLLGFIMWACQKGNIRCNICI

SEQ ID NO: 56 - protein, 566 aa, synthetic construct
  REGION 1..566: note = hemagglutinin__InfluenzaA__AAX47525
MKTIIALSYILCLVFAQKLPGNDNSTATLCMGHHAVPNGTLVKTITNDQIEVTNATELVQSSSTGRICDSPHQILDGENCTLIDALLGDPHCDGFQNKEWDLFVERSKAYSNCYPYDVPDYVSLRSLVASSGTLEFNNESFNWTGVAQNGTSSACKRRSNKSFFSRLNWLHQLKYKYPALNVTMPNNEKFDKLYIWGVHHPDTDSNQISLYAQASGRVTVSTKRSQQTVIPNIGSGPWVRGVSSRISIYWTIVKPGDILLINSTGNLIAPRGYFKIRSGKSSIMRSDAPIGKCNSECITPNGSIPNDKPFQNVNRITYGACPRYVKQNTLKLATGMRNVPEKQTRGIFGAIAGFIENGWEGMMDGWYGFRHQNSEGTGQAADLKSTQAAINQINGKLNRLIEKTNEKFHQIEKEFSEVEGRIQDLEKYVEDTKIDLWSYNAELLVALENQHTIDLTDSEMNKLFERTKKQLRENAEDMGNGCFKIYHKCDNACIGSIRNGTYDHDVYRDEALNNRFQIKGVELKSGYKDWILWISFAISCFLLCIVLLGFIMWACQKGNIRCNICI

SEQ ID NO: 57 - protein, 566 aa, synthetic construct; identical to SEQ ID NO: 47
  REGION 1..566: note = hemagglutinin__InfluenzaA__AAX47535

SEQ ID NO: 58 - protein, 566 aa, synthetic construct; identical to SEQ ID NO: 31
  REGION 1..566: note = hemagglutinin__InfluenzaA__AAX56380

SEQ ID NO: 59 - protein, 566 aa, synthetic construct; identical to SEQ ID NO: 31
  REGION 1..566: note = hemagglutinin__InfluenzaA__AAX56390

SEQ ID NO: 60 - protein, 566 aa, synthetic construct
  REGION 1..566: note = hemagglutinin__InfluenzaA__AAX56400
MKTIIALSYILCLVFAQKLPGNDNSTATLCLGHHAVPNGTIVKTITNDQIEVTNATELVQSSSTGGICDSPHQILDGENCTLIDALLGDPQCDGFQNKKWDLFVERSKAYSNCYPYDVPDYASLRSLVASSGTLEFNNESFNWTGVTQNGTSSACERRSNKSFFSRLNWLTHLKYKYPALNVTMPNNEKFDKLYIWGVHHPGTDSDQISLYAQASGRITVSTKRSQQTVIPNIGSRPRVRDISSRISIYWTIVKPGDILLINSTGNLIAPRGYFKIRSGKSSIMRSDAPIGKCNSECITPNGSIPNDKPFQNVNRITYGACPRYVKQNTLKLATGMRNVPEKQTRGIFGAIAGFIENGWEGMVDGWYGFRHQNSEGTGQAADLKSTQAAINQINGKLNRLIGKTNEKFHQIEKEFSEVEGRIQDLEKYVEDTKIDLWSYNAELLVALENQHTIDLTDSEMNKLFERTKKQLRENAEDMGNGCFKIYHKCDNACIGSIRNGTYDHDVYRDEALNNRFQIKGVELKSGYKDWILWISFAISCFLLCVALLGFIMWACQKGNIRCDICI

SEQ ID NO: 61 - protein, 566 aa, synthetic construct; identical to SEQ ID NO: 31
  REGION 1..566: note = hemagglutinin__InfluenzaA__AAX56410

SEQ ID NO: 62 - protein, 566 aa, synthetic construct
  REGION 1..566: note = hemagglutinin__InfluenzaA__AAX56420
MKTIIALSYFLCLVFAQKLPGNDNSTATLCLGHHAVPNGTIVKTITNDQIEVTNATELVQSSSTGGICDSPHQILDGENCTLIDALLGDPQCDGFQNKKWDLFVERSKAYSNCYPYDVPDYASLRSLVASSGTLEFNNESFDWTGVTQNGTSSACKRRSNKSFFSRLNWLTHLKYKYPALNVTMPNNEKFDKLYIWGVHHPGTDSDQISLYAQASGRITVSTKRSQQTVIPNIGSRPRVRDVSSRISIYWTIVKPGDILLINSTGNLIAPRGYFKIRSGKSSIMRSDAPIGKCNSECITPNGSIPNDKPFQNVNRITYGACPRYVKQNTLKLATGMRNVPEKQTRGIFGAIAGFIENGWEGMVDGWYGFRHQNSEGTGQAADLKSTQAAINQINGKLNRLIGKTNEKFHQIEKEFSEVEGRIQDLEKYVEDTKIDLWSYNAELLVALENQHTIDLTDSEMNKLFERTKKQLRENAEDMGNGCFKIYHKCDNACIGSIRNGTYDHDVYRDEALNNRFQIKGVELKSGYKDWILWISFAISCFLLCVALLGFIMWACQKGNIRCNICI

SEQ ID NO: 63 - protein, 566 aa, synthetic construct
  REGION 1..566: note = hemagglutinin__InfluenzaA__AAX56430
MKTIIALSYILCLVFTQKLPGNDNSTATLCLGHHAVPNGTIVKTITNDQIEVTNATELVQSSSTGGICDSPHQILDGENCTLIDALLGDPQCDGFQNKKWDLFVERSKAYSNCYPYDVPDYASLRSLVASSGTLEFNNESFNWTGVTQNGTSSACERRSNKSFFSRLNWLTHLKYKYPALNVTMPNNEKFDKLYIWGVHHPGTDSDQISLYAQASGRITVSTKRSQQTVIPNIGSRPRVRDVSSRISIYWTIVKPGDILLINSTGNLIAPRGYFKIRSGKSSIMRSDAPIGKCNSECITPNGSIPNDKPFQNVNRITYGACPRYVKQNTLKLATGMRNVPEKQTRGIFGAIAGFIENGWEGMVDGWYGFRHQNSEGTGQAADLKSTQAAINQINGKLNRLIGKTNEKFHQIEKEFSEVEGRIQDLEKYVEDTKIDLWSYNAELLVALENQHTIDLTDSEMNKLFERTKKQLRENAEDMGNGCFKIYHKCDNACIGSIRNGTYDHDVYRDEALNNRFQIKGVELKSGYKDWILWISFAISCFLLCVALLGFIMWACQKGNIRCDICI

SEQ ID NO: 64 - protein, 566 aa, synthetic construct
  REGION 1..566: note = hemagglutinin__InfluenzaA__AAX56440
MKTIIALSYILCLVFAQKLPGNDNSTATLCLGHHAVPNGTLVKTITNDQIEVTNATELVQNSSTGRICDSPHQILDGENCTLIDALLGDPHCDGFQNKEWDLFVERSKAYSNCYPYDVPDYVSLRSLVASSGTLEFNNESFNWTGVAQNGTSSACKRRSDKSFFSRLNWLHQLKYKYPALNVTMPNNEKFDKLYIWGVHHPGTDNDQISLYAQASGRVTVSTKRSQQTVIPNIGSGPWVRGVSSRISIYWTIVKPGDILLINSTGNLIAPRGYFKIRSGKSSIMRSDAPIGKCNSECITPNGSIPNDKPFQNVNRITYGPCPRYVKQNTLKLATGMRNVPEKQTRGIFGAIAGFIENGWEGMMDGWYGFRHQNSEGTGQAADLKSTQAAINQINGKLNRLIEKTNEKFHQIEKEFSEVEGRIQDLEKYVEDTKIDLWSYNAELLVALENQHTIDLTDSEMNKLFERTKKQLRENAEDMGNGCFKIYHKCDNACIGSIRNGTYDHDVYRDEALNNRFQIKGVELKSGYKDWILWISFAISCFLLCIVLLGFIMWACQKGNIRCNICI

SEQ ID NO: 65 - protein, 566 aa, synthetic construct; identical to SEQ ID NO: 47
  REGION 1..566: note = hemagglutinin__InfluenzaA__AAX56450

SEQ ID NO: 66 - protein, 566 aa, synthetic construct
  REGION 1..566: note = hemagglutinin__InfluenzaA__AAX56460
MKTIIALSYILCLVFAQKLPENDNSTATLCLGHHAVPNGTLVKTITNDQIEVTNATELVQSSSTGRICDSPHQILDGENCTLIDALLGDPHCDGFQNKEWDLFVERSKAYSNCYPYDVPDYVSLRSLVASSGTLEFNNESFNWTGVAQNGTSSACKRRSDKSFFSRLNWLHQLKYKYPALNVTMPNNEKFDKLYIWGVHHPGTDSDQISLYAQASGRVTVSTKRSQQTVIPNIGSRPWVRGVSSRISIYWTIVKPGDILLINSTGNLIAPRGYFKIRSGKSSIMRSDAPIGKCNSECITPNGSIPNDKPFQNVNRITHGPCPRYVKQNTLKLATGMRNVPEKQTRGIFGAIAGFIENGWEGMMDGWYGFRHQNSEGTGQAADLKSTQAAINQINGKLNRLIEKTNEKFHQIEKEFSEVEGRIQDLEKYVEDTKIDLWSYNAELLVALENQHTIDLTDSEMNKLFERTKKQLRENAEDMGNGCFKIYHKCDNACIGSIRNGTYDHDVYRDEALNNRFQIKGVELKSGYKDWILWISFAISCFLLCIVLLGFIMWACQKGNIRCNICI

SEQ ID NO: 67 - protein, 566 aa, synthetic construct
  REGION 1..566: note = hemagglutinin__InfluenzaA__AAX56470
MKTIIALSYILCLVFAQKLPGNDNSTATLCLGHHAVPNGTLVKTITNDQIEVTNATELVQSSSTGRICDSPHQILDGENCTLIDALLGDPHCDGFQNKEWDLFVERSKAYSNCYPYDVPDYVSLRSLVASSGTLEFNNESFNWTGVAQNGTSSACKRRSDKSFFSRLNWLHQLKYKYPALNVTMPNNEKFDKLYIWGVHHPGTDSDQISLYAQASGRVTVSTKRSQQTVIPNIGSRPWVRGVSSRISIYWTIVKPGDILLINSTGNLIAPRGYFKMRSGKSSIMRSDAPIGKCNSECITPNGSIPNDKPFQNVNRITYGPCPRYVKQNTLKLATGMRNVPEKQTRGIFGAIAGFIENGWEGMMDGWYGFRHQNSEGTGQAADLKSTQAAINQINGKLNRLIEKTNEKFHQIEKEFSEVEGRIQDLEKYVEDTKIDLWSYNAELLVALENQHTIDLTDSEMNKLFERTKKQLRENAEDMGNGCFKIYHKCDNACIGSIRNGTYDHDVYRDEALNNRFQIKGVELKSGYKDWILWISFAISCFLLCIVLLGFIMWACQKGNIRCNICI

SEQ ID NO: 68 - protein, 566 aa, synthetic construct; identical to SEQ ID NO: 51
  REGION 1..566: note = hemagglutinin__InfluenzaA__AAX56480

SEQ ID NO: 69 - protein, 566 aa, synthetic construct
  REGION 1..566: note = hemagglutinin__InfluenzaA__AAX56510
MKTIIALSYILCLVFAQKLPGNDNSTATLCLGHHAVPNGTLVKTITNDQIEVTNATELVQSSSTGRICDSPHQILDGENCTLIDALLGDPHCDGFQNKEWDLFVERSKAYSNCYPYDVPDYVSLRSLVASSGTLEFNNESFNWTGVAQNGTSSACKRRSDKSFFSRLNWLHQLKYKYPALNVTMPNNEKFDKLYIWGVHHPGTDSDQISLYAQASGRVTVSTKRSQQTVIPNIGSRPWVRGVSSKISIYWTIVKPGDILLINSTGNLIAPRGYFKIRSGKSSIMRSDAPIGKCNSECITPNGSIPNDKPFQNVNRITYGACPRYVKQNTLKLATGMRNVPEKQTRGIFGAIAGFIENGWEGMMDGWYGFRHQNSEGTGQAADLKSTQAAINQINGKLNRLIEKTNEKFHQIEKEFSEVEGRIQDLEKYVEDTKIDLWSYNAELLVALENQHTIDLTDSEMNKLFERTKKQLRENAEDMGNGCFKIYHKCDNACIGSIRNGTYDHDVYRDEALNNRFQIKGVELKSGYKDWILWISFAISCFLLCIVLLGFIMWACQKGNIRCNICI

SEQ ID NO: 70 - protein, 566 aa, synthetic construct; identical to SEQ ID NO: 47
  REGION 1..566: note = hemagglutinin__InfluenzaA__AAX56520

SEQ ID NO: 71 - protein, 566 aa, synthetic construct
  REGION 1..566: note = hemagglutinin__InfluenzaA__AAX56530
MKAKLLVLLCAFTATYADTICIGYHANNSTDTVDTVLEKNVTVTHSVNLLEDSHNGKLCRLKGTAPLQLGNCSIAGWILGNPECESLFSKESWSYIAETPNPKNGTCYPGYFADYEELREQLSSVSSFERFEIFPKDSSWPNHTVTKGVTASCSHNGKSSFYKNLLWLTEKNGLYPNLSKSYVNKKGKEVLVLWGVHHPSNMGDQRAIYHKENAYVSVLSSHYSRRFTPEIAKRPKVRDQEGRINYYWTLLEPGDTIIFEANGNLIAPWYAFALSRGFGSGIIISNASMGECDAKCQTPQGAINSSLPFQNVHPVTIGECPKYVRSTKLRMVTGLRNVPSIQSRGLFGAIAGFIEGGWTGMIDGWYGYHHQNEQGSGYAADQKSTQNAINGITNKVNSIIEKMNTQFTAVGKEFNKLEKRMENLNKKVDDGFLDIWTYNAELLVLLENERTLDFHDLNVKNLYEKVKNQLKNNAKEIGNGCFEFYHKCNNECMESVKNGTYDYPKYSKESKLNREKIDGVKLESMGVYQILAIYSTVASSLVLLVSLGAISFWMCSNGSLQCRICI

SEQ ID NO: 72 - protein, 566 aa, synthetic construct
  REGION 1..566: note = hemagglutinin__InfluenzaA__AAX56550
MKTIIALSYILCLVFAQKLPVNDNSTATLCLGHHAVPNGTLVKTITNDHIEVTNATELVQSSSTGRICDSPHQILDGENCTLIDALLGDPHCDGFQNKEWDLFVERSTAYSNCYPYDVPDYASLRSLVASSGTLEFNNESFNWTGVAQNGTSSACKRRSIKSFFSRLNWLHQLKYKYPALNVTMPNNEKFDKLYIWGVHHPSTDSDQISLYAQASGRVTVSTKRSQQTVIPNIGSRPWVRGVSSRISIYWTIVKPGDILLINSTGNLIAPRGYFKIRSGKSSIMRSNAPIGKCNSECITPNGSIPNDKPFQNVNRITYGACPRYVKQNTLKLATGMRNVPEKQTRGIFGAIAGFIENGWEGMVDGWYGFRHQNSEGTGQAADLKSTQAAINQINGKLNRLIEKTNEKFHQIEKEFSEVEGRIQDLEKYVEDTKIDLWSYNAELLVALENQHTIDLTDSEMNKLFERTRKQLRENAEDMGNGCFKIYHKCDNACIGSIRNGTYDHDVYRDEALNNRFQIKGVELKSGYKDWILWISFAISCFLLCVVLLGFIMWACQKGNIRCNICI

SEQ ID NO: 73 - protein, 566 aa, synthetic construct
  REGION 1..566: note = hemagglutinin__InfluenzaA__AAX56560
MKTIIALSYILCLVFAQKLPGNDNSTATLCLGHHAVPNGTIVKTITNDQIEVTNATELVQISSTGGICDSPHQILDGENCTLIDALLGDPQCDGFQNKKWDLFVERSKAYSNCYPYDVPDYASLRSLVASSGTLEFNNESFDWTGVTQNGTSSACKRRSNKSFFSRLNWLTHLKYKYPALNVTMPNNEKFDKLYIWGVHHPGTDSDQISLYAQASGRITVSTKRSQQTVIPNIGSRPRVRDVSSRISIYWTIVKPGDILLINSTGNLIAPRGYFKIRSGKSSIMRSDAPIGKCNSECITPNGSIPNDKPFQNVNRITYGACPRYVKQNTLKLATGMRNVPEKQTRGIFGAIAGFIENGWEGMVDGWYGFRHQNSEGTGQAADLKSTQAAINQINGKLNRLIGKTNEKFHQIEKEFSEVEGRIQDLEKYVEDTKIDLWSYNAELLVALENQHTIDLTDSEMNKLFERTKKQLRENAEDMGNGCFKIYHKCDNACIGSIRNGTYDHDVYRDEALNNRFQIKGVELKSGYKDWILWISFAISCFLLCVALLGFIMWACQKGNIRCNICI

SEQ ID NO: 74 - protein, 566 aa, synthetic construct
  REGION 1..566: note = hemagglutinin__InfluenzaA__AAX56570
MKTIIALSYILCLVFAQKLPGNDNSTATLCLGHHAVPNGTLVKTITNDQIEVTNATELVQSSSTSRICDSPHQILDGENCTLIDALLGDPHCDGFQNKEWDLFVERSKAYSNCYPYDVPDYVSLRSLVASSGTLEFNNESFNWTGVAQNGTSSACKRRSDKSFFSRLNWLHQLKYKYPALNVTMPNNEKFDKLYIWGVHHPGTDSDQISLYAQASGRVTVSTKRSQQTVIPNIGSRPWVRGVSSGISIYWTIVKPGDILLINSTGNLIAPRGYFKIRSGKSSIMRSDAPIGKCNSECITPNGSIPNDKPFQNVNRITYGACPRYVKQNTLKLATGMRNVPEKQTRGIFGAIAGFIENGWEGMMDGWYGFRHQNSEGTGQAADLKSTQAAINQINGKLNRLIEKTNEKFHQIEKEFSEVEGRIQDLEKYVEDTKIDLWSYNAELLVALENQHTIDLTDSEMNKLFERTKKQLRENAEDMGNGCFKIYHKCDNACIGSIRNGTYDHDVYRDEALNNRFQIKGVELKSGYKDWILWISFAISCFLLCIVLLGFIMWACQKGNIRCNICI

SEQ ID NO: 75 - protein, 566 aa, synthetic construct
  REGION 1..566: note = hemagglutinin__InfluenzaA__AAX56590
MKTIIALSYILCLVFAQKLPGNDNSTATLCLGHHAVPNGTLVKTITNDQIEVTNATELVQSSSTSRICDSPHQILDGENCTLIDALLGDPHCDGFQNKEWDLFVERSKAYSNCYPYDVPDYVSLRSLVASSGTLEFNNESFNWTGVAQNGTSSACKRRSDKSFFSRLNWLHQLKYKYPALNVTMPNNEKFDKLYIWGVHHPSTDSDQISLYAQASGRVTVSTKRSQQTVIPNIGSRPWVRGVSSRISIYWTIVKPGDILLINSTGNLIAPRGYFKIRSGKSSIMRSDAPIGKCNSECITPNGSIPNDKPFQNVNRITYGACPRYVKQNTLKLATGMRNVPEKQTRGIFGAIAGFIENGWEGMMDGWYGFRHQNSEGTGQAADLKSTQAAINQINGKLNRLIEKTNEKFHQIEKEFSEVEGRIQDLEKYVEDTKIDLWSYNAELLVALENQHTIDLTDSEMNKLFERTKKQLRENAEDMGNGCFKIYHKCDNACIGSIRNGTYDHDVYRDEALNNRFQIKGVELKSGYKDWILWISFAISCFLLCIVLLGFIMWACQKGNIRCNICI

SEQ ID NO: 76 - protein, 566 aa, synthetic construct; identical to SEQ ID NO: 73
  REGION 1..566: note = hemagglutinin__InfluenzaA__AAX56600

SEQ ID NO: 77 - protein, 566 aa, synthetic construct
  REGION 1..566: note = hemagglutinin__InfluenzaA__AAX57644
MKTIIALSYILCLVFAQKLPGNDNSTATLCLGHHAVPNGTIVKTITNDQIEVTNATELVQSSSTGGICDSPHQILDGENCTLIDALLGDPQCDGFQNKKWDLFVERSKAYSNCYPYDVPDYASLRSLVASSGTLEFNNESFDWTGVTQNGTSSACKRRSNKSFFSRLNWLTHLKYKYPALNVTMPNNEKFDKLYIWGVHHPGTDSDQISLYAQASGRITVSTKRSQQTVIPNIGSRPRVRDVSSRISIYWTVVKPGDILLINSTGNLIAPRGYFKMRSGKSSIMRSDAPIGKCNSECITPNGSIPNDKPFQNVNRITYGACPRYVKQNTLKLATGMRNVPEKQTRGIFGAIAGFIENGWEGMVDGWYGFRHQNSEGTGQAADLKSTQAAINQINGKLNRLIGKTNEKFHQIEKEFSEVEGRIQDLEKYVEDTKIDLWSYNAELLVALENQHTIDLTDSEMNKLFERTKKQLRENAEDMGNGCFKIYHKCDNACIGSIRNGTYDHDVYRDEALNNRFQIKGVELKSGYKDWILWISFAISCFLLCVALLGFIMWACQKGNIRCNICI

SEQ ID NO: 78 - protein, 566 aa, synthetic construct; identical to SEQ ID NO: 31
  REGION 1..566: note = hemagglutinin__InfluenzaA__AAX57654

SEQ ID NO: 79 - protein, 566 aa, synthetic construct; identical to SEQ ID NO: 47
  REGION 1..566: note = hemagglutinin__InfluenzaA__AAX57664

SEQ ID NO: 80 - protein, 566 aa, synthetic construct
  REGION 1..566: note = hemagglutinin__InfluenzaA__AAX57684
MKTIIALSYILCLVFAQKLPGNDNSTATLCLGHHAVPNGTLVKTITNDQIEVTNATELVQSSSTSRICDSPHQILDGENCTLIDALLGDPHCDGFQNKEWDLFVERSKAYSNCYPYDVPDYVSLRSLVASSGTLEFNNESFNWTGVAQNGTSSACKRRSDKSFFSRLNWLHQLKYKYPALNVTMPNNEKFDKLYIWGVHHPGTDSDQISLYAQASGRVTVSTKRSQQTVIPNIGSGPWVRGVSSRISIYWTIVKPGDILLINSTGNLIAPRGYFKIRSGKSSIMRSDAPIGKCNSECITPNGSIPNDKPFQNVNRITYGACPRYVKQNTLKLATGMRNVPEKQTRGIFGAIAGFIENGWEGMMDGWYGFRHQNSEGTGQAADLKSTQAAINQINGKLNRLIEKTNEKFHQIEKEFSEVEGRIQDLEKYVEDTKIDLWSYNAELLVALENQHTIDLTDSEMNKLFERTKKQLRENAEDMGNGCFKIYHKCDNACIGSIRNGTYDHDVYRDEALNNRFQIKGVELKSGYKDWILWISFAISCFLLCIVLLGFIMWACQKGNIRCNICI

SEQ ID NO: 81 - protein, 566 aa, synthetic construct; identical to SEQ ID NO: 51
  REGION 1..566: note = hemagglutinin__InfluenzaA__AAX57694

SEQ ID NO: 82 - protein, 566 aa, synthetic construct; identical to SEQ ID NO: 73
  REGION 1..566: note = hemagglutinin__InfluenzaA__AAX57704

SEQ ID NO: 83 - protein, 566 aa, synthetic construct; identical to SEQ ID NO: 51
  REGION 1..566: note = hemagglutinin__InfluenzaA__AAX57714

SEQ ID NO: 84 - protein, 566 aa, synthetic construct; identical to SEQ ID NO: 80
  REGION 1..566: note = hemagglutinin__InfluenzaA__AAX57733

SEQ ID NO: 85 - protein, 566 aa, synthetic construct
  REGION 1..566: note = hemagglutinin__InfluenzaA__AAX57734
MKTIIALSYILCLVFAQKLPGNDNSTATLCLGHHAVPNGTLVKTITNDQIEVTNATELVQSSSTSRICNSPHQILDGENCTLIDALLGDPHCDGFQNKEWDLFVERSKAYSNCYPYDVPDYVSLRSLVASSGTLEFNNESFNWTGVAQNGTSSACKRRSDKSFFSRLNWLHQLKYKYPALNVTMPNNEKFDKLYIWGVHHPGTDSDQISLYAQASGRVTVSTKRSQQTVIPNIGSGPWVRGVSSRISIYWTIVKPGDILLINSTGNLIAPRGYFKIRSGKSSIMRSDAPIGKCNSECITPNGSIPNDKPFQNVNRITYGACPRYVKQNTLKLATGMRNVPEKQTRGIFGAIAGFIENGWEGMMDGWYGFRHQNSEGTGQAADLKSTQAAINQINGKLNRLIEKTNEKFHQIEKEFSEVEGRIQDLEKYVEDTKIDLWSYNAELLVALENQHTIDLTDSEMNKLFERTKKQLRENAEDMGNGCFKIYHKCDNACIGSIRNGTYDHDVYRDEALNNRFQIKGVELKSGYKDWILWISFAISCFLLCIVLLGFIMWACQKGNIRCNICI

SEQ ID NO: 86 - protein, 566 aa, synthetic construct; identical to SEQ ID NO: 72
  REGION 1..566: note = hemagglutinin__InfluenzaA__AAX57744

SEQ ID NO: 87 - protein, 566 aa, synthetic construct; identical to SEQ ID NO: 72
  REGION 1..566: note = hemagglutinin__InfluenzaA__AAX57764

SEQ ID NO: 88 - protein, 566 aa, synthetic construct; identical to SEQ ID NO: 72
  REGION 1..566: note = hemagglutinin__InfluenzaA__AAX57774

SEQ ID NO: 89 - protein, 566 aa, synthetic construct
  REGION 1..566: note = hemagglutinin__InfluenzaA__AAX57784
MKTIIALSYILCLVFAQKLPGNDNSTATLCLGHHAVPNGTLVKTITNDQIEVTNATELVQNSSTSRICDSPHQILDGENCTLIDALLGDPHCDGFQNKEWDLFVERSKAYSNCYPYDVPDYVSLRSLVASSGTLEFNNESFNWTGVAQNGTSSACKRRSDKSFFSRLNWLHQLKYKYPALNVTMPNNEKFDKLYIWGVHHPGTDSDQISLYAQASGRVTVSTKRSQQTVIPNIGSRPWVRGVSSRISIYWTIVKPGDILLINSTGNLIAPRGYFKIRSGKSSIMRSDAPIGKCNSECITPNGSIPNDKPFQNVNRITYGACPRYVKQNTLKLATGMRNVPEKQTRGIFGAIAGFIENGWEGMMDGWYGFRHQNSEGTGQAADLKSTQAAINQINGKLNRLIEKTNEKFHQIEKEFSEVEGRIQDLEKYVEDTKIDLWSYNAELLVALENQHTIDLTDSEMNKLFERTKKQLRENAEDMGNGCFKIYHKCDNACIGSIRNGTYDHDVYRDEALNNRFQIKGVELKSGYKDWILWISFAISCFLLCIVLLGFIMWACQKGNIRCNICI

SEQ ID NO: 90 - protein, 566 aa, synthetic construct
  REGION 1..566: note = hemagglutinin__InfluenzaA__AAX57794
MKTIIALSYILCLVFAQKLPVNDNSTATLCLGHHAVPNGTLVKTITNDHIEVTNATELVQSSSTGRICDSPHQILDGENCTLIDALLGDPHCDGFQNKEWDLFVERSTAYSNCYPYDVPDYASLRSLVASSGTLEFNNESFNWTGVAQNGTSSACKRRSIKSFFSRLNWLHQLKYKYPALNVTMPNNEKFDKLYIWGVHHPSTDSDQISLYAQASGRVTVSTKRSQQTVIPNIGSRPWVRGVSSRISIHWTIVKPGDILLINSTGNLIAPRGYFKIRSGKSSIMRSNAPIGKCNSECITPNGSIPNDKPFQNVNRITYGACPRYVKQNTLKLATGMRNVPEKQTRGIFGAIAGFIENGWEGMVDGWYGFRHQNSEGTGQAADLKSTQAAINQINGKLNRLIEKTNEKFHQIEKEFSEVEGRIQDLEKYVEDTKIDLWSYNAELLVALENQHTIDLTDSEMNKLFERTRKQLRENAEDMGNGCFKIYHKCDNACIGSIRNGTYDHDVYRDEALNNRFQIKGVELKSGYKDWILWISFAISCFLLCVVLLGFIMWACQKGNIRCNICI

SEQ ID NO: 91 - protein, 566 aa, synthetic construct; identical to SEQ ID NO: 72
  REGION 1..566: note = hemagglutinin__InfluenzaA__AAX57814

SEQ ID NO: 92 - protein, 566 aa, synthetic construct
  REGION 1..566: note = hemagglutinin__InfluenzaA__AAX57824
MKTIIALSYILCMVFAQKLPVNDNSTATLCLGHHAVPNGTLVKTITNDHIEVTNATELVQSSSTGRICDSPHQILDGENCTLIDALLGDPHCDGFQNKEWDLFVERSTAYSNCYPYDVPDYASLRSLVASSGTLEFNNESFNWTGVAQNGTSSACKRRSIKSFFSRLNWLHQLKYKYPALNVTMPNNEKFDKLYIWGVHHPSTDSDQISLYAQASGRVTVSTKRSQQTVIPNIGSRPWVRGVSSRISIYWTIVKPGDILLINSTGNLIAPRGYFKIRSGKSSIMRSNAPIGKCNSECITPNGSIPNDKPFQNVNRITYGACPRYVKQNTLKLATGMRNVPEKQTRGIFGAIAGFIENGWEGMVDGWYGFRHQNSEGTGQAADLKSTQAAINQINGKLNRLIEKTNEKFHQIEKEFSEVEGRIQDLEKYVEDTKIDLWSYNAELLVALENQHTIDLTDSEMNKLFERTRKQLRENAEDMGNGCFKIYHKCDNACIGSIRNGTYDHDVYRDEALNNRFQIKGVELKSGYKDWILWISFAISCFLLCVVLLGFIMWACQKGNIRCNICI

SEQ ID NO: 93 - protein, 566 aa, synthetic construct; identical to SEQ ID NO: 72
  REGION 1..566: note = hemagglutinin__InfluenzaA__AAX57834

SEQ ID NO: 94 - protein, 566 aa, synthetic construct; identical to SEQ ID NO: 72
  REGION 1..566: note = hemagglutinin__InfluenzaA__AAX57844

SEQ ID NO: 95 - protein, 566 aa, synthetic construct
  REGION 1..566: note = hemagglutinin__InfluenzaA__AAX57864
MKTIIALSYFLCLVFAQKLPVNDNSTATLCLGHHAVPNGTLVKTITNDHIEVTNATELVQSSSTGRICDSPHQILDGENCTLIDALLGDPHCDGFQNKEWDLFVERSTAYSNCYPYDVPDYASLRSLVASSGTLEFNNESFNWTGVAQNGTSSACKRRSIKSFFSRLNWLHQLKYKYPALNVTMPNNEKFDKLYIWGVHHPSTDSDQISLYAQASGRVTVSTKRSQQTVIPNIGSRPWVRGVSSRISIYWTIVKPGDILLINSTGNLIAPRGYFKIRSGKSSIMRSNAPIGKCNSECITPNGSIPNDKPFQNVNRITYGACPRYVKQNTLKLATGMRNVPEKQTRGIFGAIAGFIENGWEGMVDGWYGFRHQNSEGTGQAADLKSTQAAINQINGKLNRLIEKTNEKFHQIEKEFSEVEGRIQDLEKYVEDTKIDLWSYNAELLVALENQHTIDLTDSEMNKLFERTRKQLRENAEDMGNGCFKIYHKCDNACIGSIRNGTYDHDVYRDEALNNRFQIKGVELKSGYKDWILWISFAISCFLLCVVLLGFIMWACQKGNIRCNICI

SEQ ID NO: 96 - protein, 566 aa, synthetic construct; identical to SEQ ID NO: 72
  REGION 1..566: note = hemagglutinin__InfluenzaA__AAX57874

SEQ ID NO: 97 - protein, 566 aa, synthetic construct; identical to SEQ ID NO: 72
  REGION 1..566: note = hemagglutinin__InfluenzaA__AAX57884

SEQ ID NO: 98 - protein, 566 aa, synthetic construct
  REGION 1..566: note = hemagglutinin__InfluenzaA__AAX57894
MKTIIALSYILCLVFAQKLPVNDNSTATLCLGHHAVPNGTLVKTITNDHIEVTNATELVQSSSTGRICDSPHQVLDGENCTLIDALLGDPHCDGFQNKEWDLFVERSTAYSNCYPYDVPDYASLRSLVASSGTLEFNNESFNWTGVAQNGTSSACKRRSIKSFFSRLNWLHQLKYKYPALNVTMPNNEKFDKLYIWGVHHPSTDSDQISLYAQASGRVTVSTKRSQQTVIPNIGSRPWVRGVSSRISIYWTIVKPGDILLINSTGNLIAPRGYFKIRSGKSSIMRSNAPIGKCNSECITPNGSIPNDKPFQNVNRITYGACPRYVKQNTLKLATGMRNVPEKQTRGIFGAIAGFIENGWEGMVDGWYGFRHQNSEGTGQAADLKSTQAAINQINGKLNRLIEKTNEKFHQIEKEFSEVEGRIQDLEKYVEDTKIDLWSYNAELLVALENQHTIDLTDSEMNKLFERTRKQLRENAEDMGNGCFKIYHKCDNACIGSIRNGTYDHDVYRDEALNNRFQIKGVELKSGYKDWILWISFAISCFLLCVVLLGFIMWACQKGNIRCNICI

SEQ ID NO: 99 - protein, 566 aa, synthetic construct
  REGION 1..566: note = hemagglutinin__InfluenzaA__AAX57924
MKTIIALSYILCLVFAQKLPVNDNSTATLCLGHHAVPNGTLVKTITNDHIEVTNATELVQSSSTGRICDSPHQILDGENCTLIDALLGDPHCDGFQNKEWDLFVERSTAYSNCYPYDVPDYASLRSLVASSGTLEFNNESFNWTGVAQNGTSFACKRRSIKSFFSRLNWLHQLKYKYPALNVTMPNNEKFDKLYIWGVHHPSTDSDQISLYAQASGRVTVSTKRSQQTVIPNIGSRPWVRGVSSRISIYWTIVKPGDILLINSTGNLIAPRGYFKIRSGKSSIMRSNAPIGKCNSECITPNGSIPNDKPFQNVNRITYGACPRYVKQNTLKLATGMRNVPEKQTRGIFGAIAGFIENGWEGMVDGWYGFRHQNSEGTGQAADLKSTQAAINQINGKLNRLIEKTNEKFHQIEKEFSEVEGRIQDLEKYVEDTKIDLWSYNAELLVALENQHTIDLTDSEMNKLFERTRKQLRENAEDMGNGCFKIYHKCDNACIGSIRNGTYDHDVYRDEALNNRFQIKGVELKSGYKDWILWISFAISCFLLCVVLLGFIMWACQKGNIRCNICI

SEQ ID NO: 100 - protein, 566 aa, synthetic construct; identical to SEQ ID NO: 72
  REGION 1..566: note = hemagglutinin__InfluenzaA__AAX57934

SEQ ID NO: 101 - protein, 566 aa, synthetic construct
  REGION 1..566: note = hemagglutinin__InfluenzaA__AAX57944
MKTIIALSYILCLVFAQKLPGNDNSTATLCLGHHAVPNGTLVKTITNDQIEVTNATELVQSSSTGRICDSPHQILDGENCTLIDALLGDPHCDGFQNKEWDLFVERSKAYSNCYPYDVPDYVSLRSLVASSGTLEFNNESFNWTGVAQNGTSSACKRRSDKSFFSRLNWLHQLKYKYPALNVTMPNNEKFDKLYIWGVHHPGTDSDQISLYAQASGRVTVSTKRSQQTVIPNIGSGPWVRGVSSRISIYWTIVKPGDILLINSTGNLIAPRGYFKIRSGKSSIMRSDAPIGKCNSECITPNGSIPNGKPFQNVNRITYGACPRYVKQNTLKLATGMRNVPEKQTRGIFGAIAGFIENGWEGMMDGWYGFRHQNSEGTGQAADLKSTQAAINQINGKLNRLIEKTNEKFHQIEKEFSEVEGRIQDLEKYVEDTKIDLWSYNAELLVALENQHTIDLTDSEMNKLFERTKKQLRENAEDMGNGCFKIYHKCDNACIGSIRNGTYDHDVYRDEALNNRFQIKSVELKSGYKDWILWISFAISCFLLCIVLLGFIMWACQKGNIRCNICI

SEQ ID NO: 102 - protein, 566 aa, synthetic construct
  REGION 1..566: note = hemagglutinin__InfluenzaA__AAX76623
MKTIIALSYILCLVFAQKLPGNDKSTATLCLGHHAVPNGTIVKTITNDQIEVTNATELVQSSSTGGICDSPHQILDGENCTLIDALLGDPQCDGFQNKKWDLFVERSKAYSNCYPYDVPDYASLRSLVASSGTLEFNNESFDWTGVTQNGTSSACKRRSNKSFFSRLNWLTHLKYKYPALNVTMPNNEKFDKLYIWGVHHPGTDSDQISLYAQASGRITVSTKRSQQTVIPNIGSRPRVRDISSRISIYWTIVKPGDILLINSTGNLIAPRGYFKIRSGKSSIMRSDAPIGKCNSECITPNGSIPNDKPFQNVNRITYGACPRYVKQNTLKLATGMRNVPEKQTRGIFGAIAGFIENGWEGMVDGWYGFRHQNSEGTGQAADLKSTQAAINQINGKLNRLIGKTNEKFHQIEKEFSEVEGRIQDLEKYVEDTKIDLWSYNAELLVALENQHTIDLTDSEMNKLFERTKKQLRENAEDMGNGCFKIYHKCDNACIGSIRNGTYDHDVYRDEALNNRFQIKGVELRSGYKDWILWISFAISCFLLCVASLGFIMWACQKGNIRCNICI

SEQ ID NO: 103 - protein, 566 aa, synthetic construct
  REGION 1..566: note = hemagglutinin__InfluenzaA__AAX76643
MKTIIALSYFLCLVFAQKLPGNDNSTATLCLGHHAVPNGTIVKTITNDQIEVTNATELVQSSSTGGICDSPHQILDGENCTLIDALLGDPQCDGFQNKKWDLFVERSKAYSNCYPYDVPDYASLRSLVASSGTLEFNNESFNWTGVTQNGTSSACERRSNKSFFSRLNWLTHLKYKYPALNVTMPNNEKFDKLYIWGVHHPGTDSDQISLYAQASGRITVSTKRSQQTVIPNIGSRPRVRDVSSRISIYWTIVKPGDILLINSTGNLIAPRGYFKIRSGKSSIMRSDAPIGKCNSECITPNGSIPNDKPFQNVNRITYGACPRYVKQNTLKLATGMRNVPEKQTRGIFGAIAGFIENGWEGMVDGWYGFRHQNSEGTGQAADLKSTQAAINQINGKLNRLIGKTNEKFHQIEKEFSEVEGRIQDLEKYVEDTKIDLWSYNAELLVALENQHTIDLTDSEMNKLFERTKKQLRENAEDMGNGCFKIYHKCDNACIGSIRNGTYDHDVYRDEALNNRFQIKGVELKSGYKDWILWISFAISCFLLCVALLGFIMWACQKGNIRCDICI

SEQ ID NO: 104 - protein, 566 aa, synthetic construct
  REGION 1..566: note = hemagglutinin__InfluenzaA__AAX76653
MKTIIALSYFLCLVFAQKLPGNDNSTATLCLGHHAVPNGTIVKTITNDQIEVTNATELVQSSSTGGICDSPHQILDGENCTLIDALLGDPQCDGFQNKKWDLFVERSKAYSNCYPYDVPDYASLRSLVASSGTLEFNNESFNWTGVTQNGTSSACERRSNKSFFSRLNWLTHLKYKYPALNVTMPNNEKFDKLYIWGVHHPGTDSDQISLFAQASGRITVSTKRSQQTVIPNIGSGPRVRDVSSRISIYWTIVKPGDILLINSTGNLIAPRGYFKIRSGKSSIMRSDAPIGKCNSECITPNGSIPNDKPFQNVNRITYGACPRYVKQNTLKLATGMRNVPEKQTRGIFGAIAGFIENGWEGMVDGWYGFRHQNSEGTGQAADLKSTQAAINQINGKLNRLIGKTNEKFHQIEKEFSEVEGRIQDLEKYVEDTKIDLWSYNAELLVALENQHTIDLTDSEMNKLFERTKKQLRENAEDMGNGCFKIYHKCDNACIGSIRNGTYDHDVYRDEALNNRFQIKGVELKSGYKDWILWISFAISCFLLCVALLGFIMWACQKGNIRCDICI

SEQ ID NO: 105 - protein, 566 aa, synthetic construct
  REGION 1..566: note = hemagglutinin__InfluenzaA__AAX76663
MKTIIALSYILCLVFAQKLPGNDNSTATLCLGHHAVPNGTLVKTITNDQIEVTNATELVQSSSTGRICDSPHQILDGENCTLIDALLGDPHCDGFQNKEWDLFVERSKAYSNCYPYDVPDYVSLRSLVASSGTLEFNNESFNWTGVAQNGTSSACKRRSDKSFFSRLNWLHQLKYKYPALNVTMPNNEKFDKLYIWGVHHPGTDSDQISLYAQASGRVTVSTKRSQQTVIPNIGSGPWVRGVSSRISIYWTIVKPGDILLINSTGNLIAPRGYFKIRSGKSSIMRSDAPIGKCNSECITPNGSIPNDKPFQNVNRITYGPCPRYVKQNTLKLATGMRNVPEKQTRGIFGAIAGFIENGWEGMMDGWYGFRHQNSEGTGQAADLKSTQAAINQINGKLNRLIEKTNEKFHQIEKEFSEVEGRIQDLEKYVEDTKIDLWSYNAELLVALENQHTIDLTDSEMNKLFERTKKQLRENAEDMGNGCFKIYHKCDNACIGSIRNGTYDHDVYRDEALNNRFQIKGVELKSGYKDWILWISFAISCFLLCIVLLGFIMWACQKGNIRCNICI

SEQ ID NO: 106 - protein, 566 aa, synthetic construct
  REGION 1..566: note = hemagglutinin__InfluenzaA__AAX76673
MKTIIALSYILCLVFAQKLPVNDNSTATLCLGHHAVPNGTLVKTITNDHIEVTNATELVQSSSTGRICDSPHQILDGENCTLIDALLGDPHCDGFQNKEWDLFVERSTAYSNCYPYDVPDYASLRSLVASSGTLEFNNESFNWTGVAQNGTSSACKRRSIKSFFSRLNWLHQLKYKYPALNVTMPNNEKFDKLYIWGVHHPSTDSDQISLYAQASGRVTVSTKRSQQTVIPNIGSRPWVRGVSSRISIYWTIVKPGDILLINSTGNLIAPRGYFKIRSGKSSIMRSNAPIGKCNSECITPNGSIPNDKPFQNVNRITYGACPRYVKQNTLKLATGMRNVPEKQTRGIFGAIAGFIENGWEGMVDGWYGFRHQNSEGTGQAADLKSTQAAINQINGKLNRLIEKTNEKFHQIEKEFSEVEGRIQDLERYVEDTKIDLWSYNAELLVALENQHTIDLTDSEMNKLFERTRKQLRENAEDMGNGCFKIYHKCDNACIGSIRNGTYDHDVYRDEALNNRFQIKGVELKSGYKDWILWISFAISCFLLCVVLLGFIMWACQKGNIRCNICI

SEQ ID NO: 107 - protein, 566 aa, synthetic construct
  REGION 1..566: note = hemagglutinin__InfluenzaA__AAX76683
MKTIIALSYILCLVFAQKLPVNDNSTATLCLGHHAVPNGTLVKTITNDHIEVTNATELVQSSSTGRICDSPHQILDGENCTLIDALLGDPHCDGFQNKEWDLFVERSTAYSNCYPYDVPDYASLRSLVASSGTLEFNNESFNWTGVAQNGTSSACKRRSIKSFFSRLNWLHQLKYKYPALNVTMPNNEKFDKLYIWGVHHPSTDSDQISLYAQASGRVTVSTKRSQQTVIPNIGSRPWVRGVSSRISIYWTIVKPGDILLINSTGNLIAPRGYFKIRSGKSSVMRSNAPIGKCNSECITPNGSIPNDKPFQNVNRITYGACPRYVKQNTLKLATGMRNVPEKQTRGIFGAIAGFIENGWEGMVDGWYGFRHQNSEGTGQAADLKSTQAAINQINGKLNRLIEKTNEKFHQIEKEFSEVEGRIQDLEKYVEDTKIDLWSYNAELLVALENQHTIDLTDSEMNKLFERTRKQLRENAEDMGNGCFKIYHKCDNACIGSIRNGTYDHDVYRDEALNNRFQIKGVELKSGYKDWILWISFAISCFLLCVVLLGFIMWACQKGNIRCNICI

SEQ ID NO: 108 - protein, 566 aa, synthetic construct; identical to SEQ ID NO: 72
  REGION 1..566: note = hemagglutinin__InfluenzaA__AAX76713

SEQ ID NO: 109 - protein, 566 aa, synthetic construct
  REGION 1..566: note = hemagglutinin__InfluenzaA__AAX76723
MKTIIALSYILCLVFAQKLPVNDNSTATLCLGHHAVPNGTLVKTITNDHIEVTNATELVQSSSTGRICDSPHQILDGENCTLIDALLGDPHCDGFQNKEWDLFVERSTAYSNCYPYDVPDYASLRSLVASSGTLEFNNESFNWTGVAQNGTSSACKRRSIKSFFSRLNWLHQLKYKYPALNVTMPNNEEFDKLYIWGVHHPSTDSDQISLYAQASGRVTVSTKRSQQTVIPNIGSRPWVRGVSSIISIYWTIVKPGDILLINSTGNLIAPRGYFKIRSGKSSIMRSNAPIGKCNSECITPNGSIPNDKPFQNVNRITYGACPRYVKQNTLKLATGMRNVPEKQTRGIFGAIAGFIENGWEGMVDGWYGFRHQNSEGTGQAADLKSTQAAINQINGKLNRLIEKTNEKFHQIEKEFSEVEGRIQDLEKYVEDTKIDLWSYNAELLVALENQHTIDLTDSEMNKLFERTRKQLRENAEDMGNGCFKIYHKCDNACIGSIRNGTYDHDVYRDEALNNRFQIKGVELKSGYKDWILWISFAISCFLLCVVLLGFIMWACQKGNIRCNICI

SEQ ID NO: 110 - protein, 566 aa, synthetic construct
  REGION 1..566: note = hemagglutinin__InfluenzaA__AAX76733
MKTIIALSYILCLVFAQKLPGNDNSTATLCLGHHAVPNGTLVKTITNDQIEVTNATELVQSSSTDRICDSPHQILDGGNCTLIDALLGDPHCDGFQNKEWDLFVERSKAYSNCYPYDVPDYVSLRSLVASSGTLEFNNESFNWTGVAQNGTSSACKRRSDKSFFSRLNWLHQLKNKYPALNVAMPNNEKFDKLYIWGVHHPGTDSDQISLYAQASGRVTVSTKRSQQTVIPNIGSRPRVRDISSRISIYWTIVKPGDILLINSTGNLIAPRGYFKIRSGKSSIMRSDAPIGKCNSECITPNGSIPNDKPFQNVNRITYGACPRYVKQNTLKLATGMRNVPEKQTRGIFGAIAGFIENGWEGMVDGWYGFRHQNYEGTGQAADLKSTQAAINQINGKLNRLIEKTNEKFHQIEKEFSEVEGRIQDLEKYVEDTKIDLWSYNAELLVALENQHTIDLTDSEMNKLFERTKKQLRENAEDMGNGCFKIYHKCDNACIGSIRNGTYDHDVYRDEALNNRFQIKGVELKSGYKDWILWISFAISCFLLCIVLLGFIMWACQKGNIRCNICI

SEQ ID NO: 111 - protein, 566 aa, synthetic construct
  REGION 1..566: note = hemagglutinin__InfluenzaA__AAX76743
MKTIIALSYILCLVFAQKLPGNDNSTATLCLGHHAVPNGTLVKTITNDQIEVTNATELVQSSSTGRICDSPHQILDGENCTLIDALLGDPHCDGFQNKEWDLFVERSKAYSNCYPYDVPDYVSLRSLVASSGTLEFNNESFNWTGVAQNGTSSACKRRSNKSFFSRLNWLHQLKNKYPALNVAMPNNEKFDKLYIWGVHHPGTDSDQISLYAQASGRVTVSTKRSQQTVIPNIGSRPRVRDISSRISIYWTIVKPGDILLINSTGNLIAPRGYFKIRSGKSSIMRSDAPIGKCNSECITPNGSIPNDKPFQNVNRITYGACPRYVKQNTLKLATGMRNVPEKQTRGIFGAIAGFIENGWEGMMDGWYGFRHQNSEGTGQAADLKSTQAAINQINGKLNRLIEKTNEKFHQIEKEFSEVEGRIQDLEKYVEDTKIDLWSYNAELLVALENQHTIDLTDSEMNKLFERTKKQLRENAEDMGNGCFKIYHKCDNACIGSIRNGTYDHDVYRDEALNNRFQIKGVELKSGYKDWILWISFAISCFLLCIVLLGFIMWACQKGNIRCNICI

SEQ ID NO: 112 - protein, 566 aa, synthetic construct
  REGION 1..566: note = hemagglutinin__InfluenzaA__AAX76763
MKTIIALSYILCLVFAQKLPGNDNSTATLCLGHHAVPNGTIVKTITNDQIEVTNATELVQSSSTGGICDSPHQILDGENCTLIDALLGDPQCDGFQNKKWDLFVERSKAYSNCYPYDVPDYASLRSLVASSGTLEFNNESFDWTGVTQNGTSSACKRRSNKSFFSRLNWLTHLKYKYPALNVTMPNNEKFDKLYIWGVHHPGTDSDQISLYAQASGRITVSTKRSQQTVIPNIGSRPRVRDISSRISIYWTIVKPGDILLINSTGNLIAPRGYFKIRSGKSSIMRSDAPIGKCNSECITPNGSIPNDKPFQNVNRITYGACPRYVKQNTLKLATGMRNVPEKQTRGIFGAIAGFIENGWEGMVDGWYGFRHQNSEGTGQAADLKSTQAAINQINGKLNRLIGKTNEKFHQIEKEFSEVEGRIQDLEKYVEDTKIDLWSYNAELLIALENQHTIDLTDSEMNKLFERTKKQLRENAEDMGNGCFKIYHKCDNACIGSIRNGTYDHDVYRDEALNNRFQIKGVELKSGYKDWILWISFAISCFLLCVALLGFIMWACQKGNIRCNICI

SEQ ID NO: 113 - protein, 566 aa, synthetic construct; identical to SEQ ID NO: 32
  REGION 1..566: note = hemagglutinin__InfluenzaA__AAY18086

SEQ ID NO: 114 - protein, 566 aa, synthetic construct
  REGION 1..566: note = hemagglutinin__InfluenzaA__AAY18096
MKTIIALSCILCLVFAQKLPGNDNSTATLCLGHHAVPNGTIVKTITNDQIEVTNATELVQSSSTGGICDSPHQILDGENCTLIDALLGDPQCDGFQNKKWDLFVERSKAYSNCYPYDVPDYASLRSLVASSGTLEFNNESFNWTGVTQNGTSSACERRSNKSFFSRLNWLTHLKYKYPALNVTMPNNEKFDKLYIWGVHHPGTDSDQISLYAQASGRITVSTKRSQQTVIPNIGSRPRVRDVSSRISIYWTIVKPGDILLINSTGNLIAPRGYFKIRSGKSSIMRSDAPIGKCNSECITPNGSIPNDKPFQNVNRITYGACPRYVKQNTLKLATGMRNVPEKQTRGIFGAIAGFIENGWEGMVDGWYGFRHQNSEGTGQAADLKSTQAAINQINGKLNRLIGKTNEKFHQIEKEFSEVEGRIQDLEKYVEDTKIDLWSYNAELLVALENQHTIDLTDSEMNKLFERTKKQLRENAEDMGNGCFKIYHKCDNACIGSIRNGTYDHDVYRDEALNNRFQIKGVELKSGYKDWILWISFAISCFLLCVALLGFIMWACQKGNIRCDICI

SEQ ID NO: 115 - protein, 566 aa, synthetic construct; identical to SEQ ID NO: 47
  REGION 1..566: note = hemagglutinin__InfluenzaA__AAY18106

SEQ ID NO: 116 - protein, 566 aa, synthetic construct; identical to SEQ ID NO: 47
  REGION 1..566: note = hemagglutinin__InfluenzaA__AAY18116

SEQ ID NO: 117 - protein, 566 aa, synthetic construct
  REGION 1..566: note = hemagglutinin__InfluenzaA__AAY18126
MKTIIALSYILCLVFAQKLPGNDNSTATLCLGHHAVPNGTIVKTITNDQIEVTNATELVQSSSTGGICDSPHQILDGENCTLIDALLGDPQCDGFQNKKWDLFVERSKAYSNCYPYDVPDYASLRSLVASSGTLEFNNEGFNWTGVTQNGTSSACKRKSNKSFFSRLNWLTHLKYKYPALNVTMPNNEKFDKLYIWGVHHPGTDNDQISLYAQASGRITVSTKRSQQTVIPNIGSRPRVRDVSSRISIYWTIVKPGDILLINSTGNLIAPRGYFKIRSGKSSIMRSDAPIGKCNSECITPNGSIPNDKPFQNVNRITYGACPRYVKQNTLKLATGMRNVPEKQTRGIFGAIAGFIENGWEGMVDGWYGFRHQNSEGTGQAADLKSTQAAINQINGKLNRLIGKTNEKFHQIEKEFSEVEGRIQDLEKYVEDTKIDLWSYNAELLVALENQHTIDLTDSEMNKLFERTKKQLRENAEDMGNGCFKIYHKCDNACIGSIRNGTYDHDVYRDEALNNRFQIKGVELKSGYKDWILWISFAISCFLLCVALLGFIMWACQKGNIRCNICI

SEQ ID NO: 118 - protein, 566 aa, synthetic construct
  REGION 1..566: note = hemagglutinin__InfluenzaA__AAY18136
MKTIIALSYILCLVFAQKLPGNDNSTATLCLGHHAVPNGTIVKTITNDQIEVTNATELVQSSSTGGICDSPHQILDGENCTLIDALLGDPQCDGFQNKKWDLFVERSKAYSNCYPYDVPDYASLRSLVASSGTLEFNNESFDWTGVTQNGTSSACKRRSNKSFFSRLNWLTHLKYKYPALNVTMPNNEKFDKLYIWGVHHPGTDSDQISLYAQASGRITVSTKRSQQTVIPNIGSRPRVRDVSSRISIYWTIVKPGDILLINSTGNLIAPRGYFKIRSGKSSIMRSDAPIGKCNSECITPNGSIPNDKPFQNVNRITYGACPRYIKQNTLKLATGMRNVPEKQTRGIFGAIAGFIENGWEGMVDGWYGFRHQNSEGTGQAADLKSTQAAINQINGKLNRLIGKTNEKFHQIEKEFSEVEGRIQDLEKYVEDTKIDLWSYNAELLVALENQHTIDLTDSEMNKLFERTKKQLRENAEDMGNGCFKIYHKCDNACIGSIRNGTYDHDVYRDEALNNRFQIKGVELKSGYKDWILWISFAISCFLLCVALLGFIMWACQKGNIRCNICI

SEQ ID NO: 119 - protein, 566 aa, synthetic construct; identical to SEQ ID NO: 72
  REGION 1..566: note = hemagglutinin__InfluenzaA__AAY18156

SEQ ID NO: 120 - protein, 566 aa, synthetic construct; identical to SEQ ID NO: 72
  REGION 1..566: note = hemagglutinin__InfluenzaA__AAY18176

SEQ ID NO: 121 - protein, 566 aa, synthetic construct; identical to SEQ ID NO: 72
  REGION 1..566: note = hemagglutinin__InfluenzaA__AAY18186

SEQ ID NO: 122 - protein, 566 aa, synthetic construct; identical to SEQ ID NO: 73
  REGION 1..566: note = hemagglutinin__InfluenzaA__AAY18564

SEQ ID NO: 123 - protein, 566 aa, synthetic construct
  REGION 1..566: note = hemagglutinin__InfluenzaA__AAY18585
MKTIIALSYILCLVFAQKLPENDNSTATLCLGHHAVPNGTLVKTITNDQIEVTNATELVQSSSTGRICDSPHQILDGENCTLIDALLGDPHCDGFQNKEWDLFVERSKAYSNCYPYDVPDYVSLRSLVASSGTLEFNNESFNWTGVAQNGTSSACKRRSDKSFFSRLNWLHQLKYKYPALNVTMPNNEKFDKLYIWGVHHPGTDSDQISLYAQASGRVTVSTKRSQQTVIPNIGSRPWVRGVSSRISIYWTIVKPGDILLINSTGNLIAPRGYFKIRSGKSSIMRSDAPIGKCNSECITPNGSIPNDKPFQNVNRITYGPCPRYVKQNTLKLATGMRNVPEKQTRGIFGAIAGFIENGWEGMMDGWYGFRHQNSEGTGQAADLKSTQAAINQINGKLNRLIEKTNEKFHQIEKEFSEVEGRIQDLEKYVEDTKIDLWSYNAELLVALENQHTIDLTDSEMNKLFERTKKQLRENAEDMGNGCFKIYHKCDNACIGSIRNGTYDHDVYRDEALNNRFQIKGVELKSGYKDWILWISFAISCFLLCIVLLGFIMWACQKGNIRCNICI

SEQ ID NO: 124 - protein, 566 aa, synthetic construct; identical to SEQ ID NO: 32
  REGION 1..566: note = hemagglutinin__InfluenzaA__AAY18611

SEQ ID NO: 125 - protein, 566 aa, synthetic construct; identical to SEQ ID NO: 73
  REGION 1..566: note = hemagglutinin__InfluenzaA__AAY27843

SEQ ID NO: 126 - protein, 566 aa, synthetic construct; identical to SEQ ID NO: 32
  REGION 1..566: note = hemagglutinin__InfluenzaA__AAY27853

SEQ ID NO: 127 - protein, 566 aa, synthetic construct
  REGION 1..566: note = hemagglutinin__InfluenzaA__AAY27863
MKTIIALSYILCLVFAQKLPGNDNSTATLCLGHHAVPNGTIVKTITNDQIEVTNATELVQSSSTGGICDSPHQIIDGENCTLIDALLGDPQCDGFQNKKWDLFVERSKAYSNCYPYDVPDYASLRSLVASSGTLEFNNESFDWTGVTQNGTSSACKRRSNKSFFSRLNWLTHLKYKYPALNVTMPNNEKFDKLYIWGVHHPGTDSDQISLYAQASGRITVSTKRSQQTVIPNIGSRPRVRDVSSRISIYWTIVKPGDILLINSTGNLIAPRGYFKIRSGKSSIMISDAPIGKCNSECITPNGSIPNDKPFQNVNRITYGACPRYVKQNTLKLATGMRNVPEKQTRGIFGAIAGFIENGWEGMVDGWYGFRHQNSEGTGQAADLKSTQAAINQINGKLNRLIGKTNEKFHQIEKEFSEVEGRIQDLEKYVEDTKIDLWSYNAELLVALENQHTIDLTDSEMNKLFERTKKQLRENAEDMGNGCFKIYHKCDNACIGSIRNGTYDHDVYRDEALNNRFQIKGVELKSGYKDWILWISFAISCFLLCVALLGFIMWACQKGNIRCNICI

SEQ ID NO: 128 - protein, 566 aa, synthetic construct; identical to SEQ ID NO: 51
  REGION 1..566: note = hemagglutinin__InfluenzaA__AAY27959

SEQ ID NO: 129 - protein, 566 aa, synthetic construct; identical to SEQ ID NO: 31
  REGION 1..566: note = hemagglutinin__InfluenzaA__AAY27994

SEQ ID NO: 130 - protein, 566 aa, synthetic construct; identical to SEQ ID NO: 31
  REGION 1..566: note = hemagglutinin__InfluenzaA__AAY28004

SEQ ID NO: 131 - protein, 566 aa, synthetic construct; identical to SEQ ID NO: 31
  REGION 1..566: note = hemagglutinin__InfluenzaA__AAY28265

SEQ ID NO: 132 - protein, 566 aa, synthetic construct
  REGION 1..566: note = hemagglutinin__InfluenzaA__AAY28275
MKTIIALSYILCLVFAQKLPGNDNSTATLCLGHHAVPNGTLVKTITNDQIEVTNATELVQSSSTGRICDSPHQILDGENCTLIDALLGDPHCDGFQNKEWDLFVERSKAYSNCYPYDVPDYASLRSLVASSGTLEFNNESFNWTGVAQNGTSSACKRRSNKSFFSRLNWLHQLKYKYPALNVTMPNNEKFDKLYIWGVHHPSTDSDQISLYAQASGRVTVSTKRSQQTVIPNIGSRPWVRGVSSRISIYWTIVKPGDILLINSTGNLIAPRGYFKIRSGKSSVMRSDASIGKCNSECITPNGSIPNDKPFQNVNRITYGACPRYVKQNTLKLATGMRNVPEKQTRGIFGAIAGFIENGWEGMVDGWYGFRHQNSEGTGQAADLKSTQAAINQINGKLNRLIEKTNEKFHQIEKEFSEVEGRIQDLEKYVEDTKIDLWSYNAELLVALENQHTIDLTDSEMNKLFERTKKQLRENAEDMGNGCFKIYHKCDNACIGSIRNGTYDHDVYRDEALNNRFQIKGVELKSGYKDWILWISFAISCFLLCVVLLGFIMWACQKGNIRCNICI

SEQ ID NO: 133 - protein, 566 aa, synthetic construct
  REGION 1..566: note = hemagglutinin__InfluenzaA__AAY28285
MKTIIALSYILCLVFAQKLPGNDNSTATLCLGHHAVPNGTLVKTITNDQIEVTNATELVQNSSTGRICDSPHQILDGENCTLIDALLGDPHCDGFQNKEWDLFVERSKAYSNCYPYDVPDYVSLRSLVASSGTLEFNNESFNWTGVAQNGTSSACKRRSDKSFFSRLNWLHQLKYKYPALNVTMPNNEKFDKLYIWGVHHPGTDNDQISLYAQASGRVTVSTKRSQQTVIPNIGSRPWVRGVSSRISIYWTIVKPGDILLINSTGNLIAPRGYFKIRSGKSSIMRSDAPIGKCNSECITPNGSIPNDKPFQNVNRITYGPCPRYVKQNTLKLATGMRNVPEKQTRGIFGAIAGFIENGWEGMMDGWYGFRHQNSEGTGQAADLKSTQAAINQINGKLNRLIEKTNEKFHQIEKEFSEVEGRIQDLEKYVEDTKIDLWSYNAELLVALENQHTIDLTDSEMNKLFERTKKQLRENAEDMGNGCFKIYHKCDNACIGSIRNGTYDHDVYRDEALNNRFQIKGVELKSGYKDWILWISFAISCFLLCIVLLGFIMWACQKGNIRCNICI

SEQ ID NO: 134 - protein, 566 aa, synthetic construct
  REGION 1..566: note = hemagglutinin__InfluenzaA__AAY28295
MKTIIALSYILCLVFAQKLPGNDNSTATLCLGHHAVPNGTIVKTITNDQIEVTNATELVQSSSTGGICDSPHQILDGENCTLIDALLGDPQCDGFQNKKWDLFVERSKAYSNCYPYDVPDYASLRSLVASSGTLEFNNESFDWTGVTQNGTSSACKRRSNKSFFSRLNWLTHLKYKYPALNVTMPNNEKFDKLYIWGVHHPGTDSDQISLYAQASGKITVSTKRSQQTVIPNIGSRPRVRDVSSRISIYWTIVKPGDILLINSTGNLIAPRGYFKIQSGKSSIMRSDAPIGKCNSECITPNGSIPNDKPFQNVNRITYGACPRYVKQKTLKLATGMRNVPEKQTRGIFGAIAGFIENGWEGMVDGWYGFRHQNSEGTGQAADLKSTQAAINQINGKLNRLIGKTNEKFHQIEKEFSEVEGRIQDLEKYVEDTKIDLWSYNAELLVALENQHTIDLTDSEMNKLFERTKKQLRENAEDMGNGCFKIYHKCDNACIGSIRNGTYDHDVYRDEALNNRFQIKGVELKSGYKDWILWISFAISCFLLCVALLGFIMWACQKGNIRCNICI

SEQ ID NO: 135 - protein, 566 aa, synthetic construct
  REGION 1..566: note = hemagglutinin__InfluenzaA__AAY28305
MKAIIALSYILCLVFAQKLPGNDNSTATLCLGHHAVPNGTLVKTITNDQIEVTNATELVQSSSTGRICDSPHQILDGENCTLIDALLGDPHCDGFQNKEWDLFVERSKAYSNCYPYDVPDYVSLRSLVASSGTLEFNNESFNWTGVAQNGTSSACKRRSDKSFFSRLNWLHQLKYKYPALNVTMPNNEKFDKLYIWGVHHPGTDSDQISLYAQASGRVTVSTKRSQQTVIPNIGSGPWVRGVSSRISIYWTIVKPGDILLINSTGNLIAPRGYFKIRSGKSSIMRSDAPIGKCNSECITPNGSIPNDKPFQNVNRITYGACPRYVKQNTLKLATGMRNVPEKQTRGIFGAIAGFIENGWEGMMDGWYGFRHQNSEGTGQAADLKSTQAAINQINGKLNRLIEKTNEKFHQIEKEFSEVEGRIQDLEKYVEDTKIDLWSYNAELLVALENQHTIDLTDSEMNKLFERTKKQLRENAEDMGNGCFKIYHKCDNACIGSIRNGTYDHDVYRDEALNNRFQIKGVELKSGYKDWILWISFAISCFLLCIVLLGFIMWACQKGNIRCNICI

SEQ ID NO: 136 - protein, 566 aa, synthetic construct
  REGION 1..566: note = hemagglutinin__InfluenzaA__AAY28325
MKTIIALSYILCLVFAQKLPGNDNSTATLCLGHHAVPNGTLVKTITNDQIEVTNATELVQSSSTSRICDSPHQILDGENCTLIDALLGDPHCDGFQNKEWDLFVERSKAYSNCYPYDVPDYVSLRSLVASSGTLEFNNESFNWTGVAQNGTSSACKRRSDKSFFSRLNWLHQLKYKYPALNVTMPNNEKFDKLYIWGVHHPGTDSDQISLYAQASGRVIVSTKRSQQTVIPNIGSGPWVRGVSSRISIYWTIVKPGDILLINSTGNLIAPRGYFKIRSGKSSIMRSDAPIGKCNSECITPNGSIPNDKPFQNVNRITYGACPRYVKQNTLKLATGMRNVPEKQTRGIFGAIAGFIENGWEGMMDGWYGFRHQNSEGTGQAADLKSTQAAINQINGKLNRLIEKTNEKFHQIEKEFAEVEGRIQDLEKYVEDTKIDLWSYNAELLVALENQHTIDLTDSEMNKLFERTKKQLRENAEDMGNGCFKIYHKCDNACIGSIRNGTYDHDVYRDEALNNRFQIKGVELKSGYKDWILWISFAISCFLLCIVLLGFIMWACQKGNIRCNICI

SEQ ID NO: 137 - protein, 566 aa, synthetic construct
  REGION 1..566: note = hemagglutinin__InfluenzaA__AAY28335
MKTIIALSYILCLVSAQKLPGNDNSTATLCLGHHAVPNGTLVKTITNDQIEVTNATELVQSSSTSRICDSPHQILDGENCTLIDALLGDPHCDGFQNKEWDLFVERSKAYSNCYPYDVPDYVSLRSLVASSGTLEFNNESFNWTGVAQNGTSSACKRRSDKSFFSRLNWLHQLKYKYPALNVTMPNNEKFDKLYIWGVHHPGTDSDQISLYAQASGRVTVSTKRSQQTVIPNIGSRPWVRGVSSRISIYWTIVKPGDILLINSTGNLIAPRGYFKIRSGKSSIMRSDAPIGKCNSECITPNGSIPNDKPFQNVNRITYGACPRYVKQNTLKLATGMRNVPEKQTRGIFGAIAGFIENGWEGMMDGWYGFRHQNSEGTGQAADLKSTQAAINQINGKLNRLIEKTNEKFHQIEKEFSEVEGRIQDLEKYVEDTKVDLWSYNAELLVALENQHTIDLTDSEMNKLFERTKKQLRENAEDMGNGCFKIYHKCDNACIGSIRNGTYDHDVYRDEALNNRFQIKGVELKSGYKDWILWISFAISCFLLCIVLLGFIMWACQKGNIRCNICI

SEQ ID NO: 138 - protein, 566 aa, synthetic construct; identical to SEQ ID NO: 32
  REGION 1..566: note = hemagglutinin__InfluenzaA__AAY28345

SEQ ID NO: 139 - protein, 566 aa, synthetic construct; identical to SEQ ID NO: 72
  REGION 1..566: note = hemagglutinin__InfluenzaA__AAY28355

SEQ ID NO: 140 - protein, 566 aa, synthetic construct
  REGION 1..566: note = hemagglutinin__InfluenzaA__AAY28363
MKTIIALSYILCMVFAQKLPVNDNSTATLCLGHHAVPNGTLVKTITNDHIEVTNATELVQSSSTGRICDSPHQILDGENCTLIDALLGDPHCDGFQNKEWDLFVERSTAYSNCYPYDVPDYASLRSLVASSGTLEFNNESFNWTGVAQNGTSSACKRRSIKSFFSRLNWLHQLKYKYPSLNVTMPNNEKFDKLYIWGVHHPSTDSDQISLYAQASGRVTVSTKRSQQTVIPNIGSRPWVRGVSSRISIYWTIVKPGDILLINSTGNLIAPRGYFKIRSGKSSIMRSNAPIGKCNSECITPNGSIPNDKPFQNVNRITYGACPRYVKQNTLKLATGMRNVPEKQTRGIFGAIAGFIENGWEGMVDGWYGFRHQNSEGTGQAADLKSTQAAINQINGKLNRLIEKTNEKFHQIEKEFSEVEGRIQDLEKYVEDTKIDLWSYNAELLVALENQHTIDLTDSEMNKLFERTRKQLRENAEDMGNGCFKIYHKCDNACIGSIRNGTYDHDVYRDEALNNRFQIKGVELKSGYKDWILWISFAISCFLLCVVLLGFIMWACQKGNIRCNICI

SEQ ID NO: 141 - protein, 566 aa, synthetic construct; identical to SEQ ID NO: 72
  REGION 1..566: note = hemagglutinin__InfluenzaA__AAY28375

SEQ ID NO: 142 - protein, 566 aa, synthetic construct; identical to SEQ ID NO: 32
  REGION 1..566: note = hemagglutinin__InfluenzaA__AAY28385

SEQ ID NO: 143 - protein, 566 aa, synthetic construct
  REGION 1..566: note = hemagglutinin__InfluenzaA__AAY28395
MKTIIALSYILCLVFAQKLPGNDNSTATLCLGHHAVPNGTIVKTITNDQIEVTNATELVQSSSTGGICDSPHQILDGENCTLIDALLGDPQCDGFQNKKWDLFVERSKAYSNCYPYDVPDYASLRSLVASSGTLEFNNESFDWTGVTQNGTSSACKRRSNKSFFSRLNWLTHLKYKYPALNVTMPNNEKFDKLYIWGVHHPGTDSDQINLYAQASGRITVSTKRSQQTVIPNIGSRPRVRDVSSRISIYWTIVKPGDILLINSTGNLIAPRGYFKIRSGKSSIMRSDAPIGKCNSECITPNGSIPNDKPFQNVNRITYGACPRYIKQNTLKLATGMRNVPEKQTRGIFGAIAGFIENGWEGMVDGWYGFRHQNSEGTGQAADLKSTQAAINQINGKLNRLIGKTNEKFHQIEKEFSEVEGRIQDLEKYVEDTKIDLWSYNAELLVALENQHTIDLTDSEMNKLFERTKKQLRENAEDMGNGCFKIYHKCDNACIGSIRNGTYDHDVYRDEALNNRFQIKGVELKSGYKDWILWISFAISCFLLCVALLGFIMWACQKGNIRCNICI

SEQ ID NO: 144 - protein, 566 aa, synthetic construct
  REGION 1..566: note = hemagglutinin__InfluenzaA__AAY28405
MKTIIALSYILCLVFAQKLPGNDNSTATLCLGHHAVPNGTLVKTITNDQIEVTNATELVQISSTGRICDNPHQILDGENCTLIDALLGDPHCDGFQNKEWDLFVERSKAYSNCYPYDVPDYVSLRSLVASSGTLEFNNESFNWTGVAQNGTSSACKRRSDKSFFSRLNWLHQLKYKYPALNVTMPNNEKFDKLYIWGVHHPGTDSDQISLYAQASGRVTVSTKRSQQTVIPNIGSRPWVRGVSSRISIYWTIVKPGDILLINSTGNLIAPRGYFKIRSGKSSIMRSDAPIGKCNSECITPNGSIPNDKPFQNVNRITYGPCPRYVKQNTLKLATGMRNVPEKQTRGIFGAIAGFIENGWEGMMDGWYGFRHQNSEGTGQAADLKSTQAAINQINGKLNRLIEKTNEKFHQIEKEFSEVEGRIQDLEKYVEDTKIDLWSYNAELLVALENQHTIDLTDSEMNKLFERTKKQLRENAEDMGNGCFKIYHKCDNACIGSIRNGTYDHDVYRDEALNNRFQIKGVELKSGYKDWILWISFAISCFLLCIVLLGFIMWACQKGNIRCNICV

SEQ ID NO: 145 - protein, 566 aa, synthetic construct; identical to SEQ ID NO: 32
  REGION 1..566: note = hemagglutinin__InfluenzaA__AAY28486

SEQ ID NO: 146 - protein, 566 aa, synthetic construct; identical to SEQ ID NO: 32
  REGION 1..566: note = hemagglutinin__InfluenzaA__AAY28521

SEQ ID NO: 147 - protein, 566 aa, synthetic construct; identical to SEQ ID NO: 31
  REGION 1..566: note = hemagglutinin__InfluenzaA__AAY28531

SEQ ID NO: 148 - protein, 566 aa, synthetic construct; identical to SEQ ID NO: 32
  REGION 1..566: note = hemagglutinin__InfluenzaA__AAY28541

SEQ ID NO: 149 - protein, 566 aa, synthetic construct
  REGION 1..566: note = hemagglutinin__InfluenzaA__AAY28551
MKTIIALSYILCLVFAQKLPVNDNSTATLCLGHHAVPNGTLVKTITNDHIEVTNATELVQSSSTGRICDSPHQILDGENCTLIDALLGDPHCDGFQNKEWDLFVERSTAYSNCYPYDVPDYASLRSLVASSGTLEFNNESFNWTGVAQNGTSSACKRRSIKSFFSRLNWLHQLKYKYPALNVTMPNNEKFDKLYIWGVHHPSTDSDQISLYAQASGRVTVSTKRSQQTVIPNIGSGPWVRGVSSRISIYWTIVKPGDILLINSTGNLIAPRGYFKIRSGKSSIMRSNAPIGKCNSECITPNGSIPNDKPFQNVNRITYGACPRYVKQNTLKLATGMRNVPEKQTRGIFGAIAGFIENGWEGMVDGWYGFRHQNSEGTGQAADLKSTQAAINQINGKLNRLIEKTNEKFHQIEKEFSEVEGRIQDLEKYVEDTKIDLWSYNAELLVALENQHTIDLTDSEMNKLFERTRKQLRENAEDMGNGCFKIYHKCDNACIGSIRNGTYDHDVYRDEALNNRFQIKGVELKSGYKDWILWISFAISCFLLCVVLLGFIMWACQKGNIRCNICI

SEQ ID NO: 150 - protein, 566 aa, synthetic construct; identical to SEQ ID NO: 32
  REGION 1..566: note = hemagglutinin__InfluenzaA__AAY28561

SEQ ID NO: 151 - protein, 566 aa, synthetic construct; identical to SEQ ID NO: 47
  REGION 1..566: note = hemagglutinin__InfluenzaA__AAY28581

SEQ ID NO: 152 - protein, 566 aa, synthetic construct
  REGION 1..566: note = hemagglutinin__InfluenzaA__AAY28591
MKTIIALSYILCLVFAQKLPVNDNSTATLCLGHHAVPNGTLVKTITNDHIEVTNATELVQSSSTGRICDSPHQILDGENCTLIDALLGDPHCDGFQNKEWDLFVERSTAYSNCYPYDVPDYASLRSLVASSGTLEFNNESFNWTGVAQNGTSSACKRRSIKSFFSRLNWLHQLKYKYPALDVTMPNNEKFDKLYIWGVHHPSTDSDQISLYAQASGRVTVSTKRSQQTVIPNIGSRPWVRGVSSRISIYWTIVKPGDILLINSTGNLIAPRGYFKIRSGKSSIMRSNAPIGKCNSECITPNGSIPNDKPFQNVNRITYGACPRYVKQNTLKLATGMRNVPEKQTRGIFGAIAGFIENGWEGMVDGWYGFRHQNSEGTGQAADLKSTQAAINQINGKLNRLIEKTNEKFHQIEKEFSEVEGRIQDLEKYVEDTKIDLWSYNAELLVALENQHTIDLTDSEMNKLFERTRKQLRENAEDMGNGCFKIYHKCDNACIGSIRNGTYDHDVYRDEALNNRFQIKGVELKSGYKDWILWISFAISCFLLCVVLLGFIMWACQKGNIRCNICI

SEQ ID NO: 153 - protein, 566 aa, synthetic construct; identical to SEQ ID NO: 72
  REGION 1..566: note = hemagglutinin__InfluenzaA__AAY28608

SEQ ID NO: 154 - protein, 566 aa, synthetic construct
  REGION 1..566: note = hemagglutinin__InfluenzaA__AAY28618
MKTIIALSYILCLVFAQKLPGNDNSTATLCLGHHAVPNGTIVKTITNDQIEVTNATELVQSSSTGGICDSPHQILDGENCTLIDALLGDPQCDGFQNKKWDLFVERSKAYSNCYPYDVPDYASLRSLVASSGTLEFNNESFNWTGVTQNGTSSACKRRSNKSFFSRLNWLTHLKYKYPALNVTMPNNEKFDKLYIWGVHHPGTDSDQISLYAQASGRITVSTKRSQQTVIPNIGSRPRVRDVSSRMSIYWTIVKPGDILLINSTGNLIAPRGYFKIRSGKSSIMRSDAPIGKCNSECITPNGSIPNDKPFQNVNRITYGACPRYVKQNTLKLATGMRNVPEKQTRGIFGAIAGFIENGWEGMVDGWYGFRHQNSEGTGQAADLKSTQAAINQINGKLNRLIGKTNEKFHQIEKEFSEVEGRIQDLEKYVEDTKIDLWSYNAELLVALENQHTIDLTDSEMNKLFERTKKQLRENAEDMGNGCFKIYHKCDNACIESIRNGTYDHDVYRDEALNNRFQIKGVELKSGYKDWILWISFAISCFLLCVALLGFIMWACQKGNIRCNICI

SEQ ID NO: 155 - protein, 566 aa, synthetic construct; identical to SEQ ID NO: 47
  REGION 1..566: note = hemagglutinin__InfluenzaA__AAY28638

SEQ ID NO: 156 - protein, 566 aa, synthetic construct
  REGION 1..566: note = hemagglutinin__InfluenzaA__AAY28648
MKTIIALSYILCLVFAQKLPGNDNSTATLCLGHHAVPNGTLVKTITNDQIEVTNATELVQSSSTGRICDSPHQILDGENCTLIDALLGDPHCDGFQNKEWDLFVERSKAYSNCYPYDVPDYVSLRSLVASSGTLEFNNESFNWTGVAQNGTSSACKRRSDKSFFSRLNWLHQLKYKYPALNVTMPNNEKFDKLYIWGVHHPGTDSDQISLYAQASGRVTVSTKRSQQTVIPNIGSGPWVRGVSSRISIYWTIVKPGDILLINSTGNLIAPRGYFKIRSGKSSIMRSDAPIGKCNSECITPNGSIPNDKPFQNVNRITYGACPRYVKQNTLKLATGMRNVPEKQTRGIFGAIAGFIENGWEGMMDGWYGFRHQNSEGTGQAADLKSTQAAINQINGKLNRLIEKTNEKFHQIEKEFSEVEGRIQDLEKYVEDTKIDLWSYNAELLVALENQHTIDLTDSEMNKLFERTKKQLRENAEDMGNGCFKIYHKCDNACIGSIRNGTYDHDVYRDEALNNRFQIKGVELKSGYKDWILWISFAISCFLLCIVLLGFIMWACQKGNIRCNICI

SEQ ID NO: 157 - protein, 566 aa, synthetic construct
  REGION 1..566: note = hemagglutinin__InfluenzaA__AAY44610
MKTIIALSYILCLVFAQKLPGNDNSTATLCLGHHAVPNGTIVKTITNDQIEVTNATELVQSSSTGGICDSPHQILDGENCTLIDALLGDPQCDGFQNKKWDLFVERNKAYSNCYPYDVPDYASLRSLVASSGTLEFNNESFDWTGVTQNGTSSACKRRSNKSFFSRLNWLTHLKYKYPALNVTMPNNEKFDKLYIWGVHHPGTDSDQISLYAQASGRITVSTKRSQQTVIPNIGSRPRVRDVSSRISIYWTIVKPGDILLINSTGNLIAPRGYFKIRSGKSSIMRSDAPIGKCNSECITPNGSIPNDKPFQNVNRITYGACPRYVKQNTLKLATGMRNVPEKQTRGIFGAIAGFIENGWEGMVDGWYGFRHQNSEGTGQAADLKSTQAAINQINGKLNRLIGKTNEKFHQIEKEFSEVEGRIQDLEKYVEDTKIDLWSYNAELLVALENQHTIDLTDSEMNKLFERTKKQLRENAEDMGNGCFKIYHKCDNACIGSIRNGTYDHDVYRDEALNNRFQIKGVELKSGYKDWILWISFAISCFLLCVALLGFIMWACQKGNIRCNICI

SEQ ID NO: 158 - protein, 566 aa, synthetic construct
  REGION 1..566: note = hemagglutinin__InfluenzaA__AAY44620
MKTIIALSYILCLVFAQKLPGNDNSTATLCLGHHAVPNGTLVKTITNDQIEVTNATELVQSSSTGRICDSPHQILDGENCTLIDALLGDPHCDGFQNKEWDLFVERSKAYSNCYPYDVPDYVSLRSLVASSGTLEFNNESFNWTGVAQNGTSSACKRRSDKSFFSRLNWLHQLKYKYPALNVTMPNNEKFDKLYIWGVHHPGTDSDQISLYAQASGRVTVSTKRSQQTVIPNIGSRPWVRGVSSRISIYWTIVKPGDILLINSTGNLIAPRGYFKIRSGKSSIMRSDAPIGKCNSECITPNGSIPNDKPFQNVNRITYGPCPRYVKQNTLKLATGMRNVPEKQTRGIFGAIAGFIENGWEGMMDGWYGFRHQNSEGTGQAADLKSTQAAINQINEKLNRLIEKTNEKFHQIEKEFSEVEGRIQDLEKYVEDTKIDLWSYNAELLVALENQHTIDLTDSEMNKLFERTKKQLRENAEDMGNGCFKIYHKCDNACIGSIRNGTYDHDVYRDEALNNRFQIKGVELKSGYKDWILWISFAISCFLLCIVLLGFIMWACQKGNIRCNICI

SEQ ID NO: 159 - protein, 566 aa, synthetic construct; identical to SEQ ID NO: 80
  REGION 1..566: note = hemagglutinin__InfluenzaA__AAY44621

SEQ ID NO: 160 - protein, 566 aa, synthetic construct; identical to SEQ ID NO: 47
  REGION 1..566: note = hemagglutinin__InfluenzaA__AAY44631

SEQ ID NO: 161 - protein, 566 aa, synthetic construct
  REGION 1..566: note = hemagglutinin__InfluenzaA__AAY44641
MKTIIALSYILCLVFAQKLPGNDNSTATLCLGHHAVPNGTLVKTITNDQIEVTNATELVQSSSTGRICDSPHQILDGENCTLIDALLGDPHCDGFQNKEWDLFVERSKAYSNCYPYDVPDYVSLRSLVASSGTLEFNNESFNWTGVAQNGTSSACKRRSDKSFFSRLNWLHQLKYKYPALNVTMPNNEKFDKLYIWGVHHPGTDSDQISLYAQASGRVTVSTKRSQQTVIPNIGSRPWVRGVSSRISIYWTIVKPGDILLINSTGNLIAPRGYFKIRSGKSSIMRSDAPIGKCNSECITPNGSIPNDKPFQNVNRITYGPCPRYVKQNTLKLATGMRNVPEKQTRGIFGAIAGFIENGWEGMMDGWYGFRHQNSEGTGQAADLKSTQAAINQINGKLNRLIEKTNEKFHQIEKEFSEVEGRIQDLEKYVEDTKIDLWSYNAELLVALENQHTIDLTDSEMNKLFERTKKQLRENAEDMGNGCFKIYHKCDNACIGSIRNGTYDHDVYRDEALNNRFQIKGVELKSGYKDWILWISFAISCFLLCIGLLGFIMWACQKGNIRCNICI

SEQ ID NO: 162 - protein, 566 aa, synthetic construct
  REGION 1..566: note = hemagglutinin__InfluenzaA__AAY44651
MKTIIALSYILCLVFAQKLPVNDNSTATLCLGHHAVPNGTLVKTITNDHIEVTNATELVQSSSTGRICDSPHQILDGENCTLIDALLGDPHCDGFQNKEWDLFVERSTAYSNCYPYDVPDYASLRSLVASSGTLEFNNESFNWTGVAQNGTSSACKRRSIKSFFSRLNWLHQLKYKYPALNVTMPNNEKFDKLYIWGVHHPSTDSDQISLYAQASGRVTVSTKRSQQTVIPNIGSRPWERGVSSRISIYWTIVKPGDILLINSTGNLIAPRGYFKIRSGKSSIMRSNAPIGKCNSECITPNGSIPNDKPFQNVNRITYGACPRYVKQNTLKLATGMRNVPEKQTRGIFGAIAGFIENGWEGMVDGWYGFRHQNSEGTGQAADLKSTQAAINQINGKLNRLIEKTNEKFHQIEKEFSEVEGRIQDLEKYVEDTKIDLWSYNAELLVALENQHTIDLTDSEMNKLFERTRKQLKENAEDMGNGCFKIYHKCDNACIGSIRNGTYDHDVYRDEALNNRFQIKGVELKSGYKDWILWISFAISCFLLCVVLLGFIMWACQKGNIRCNICI

SEQ ID NO: 163 - protein, 566 aa, synthetic construct
  REGION 1..566: note = hemagglutinin__InfluenzaA__AAY44755
MKTIIALSYILCLVFAQKLPGNDNSTATLCLGHHAVPNGTLVKTITNDQIEVTNATELVQSSSTGRICDSPHQILDGENCTLIDALLGDPHCDGFQNKEWDLFVERSKAYSNCYPYDVPDYASLRSLVASSGTLEFNNESFNWTGVAQNGTSSACKRRSNKSFFSRLNWLHQLKYKYPALNVTMPNNEKFDKLYIWGVHHPSTDSDQISLYAQASGRVTVSTKRGQQTVIPNIGSRPWVRGVSSIISIYWTIVKPGDILLINSTGNLIAPRGYFKIRSGKSSVMRSDASIGKCNSECITPNGSIPNDKPFQNVNRITYGACPRYVKQNTLKLATGMRNVPEKQTRGIFGAIAGFIENGWEGMVDGWYGFRHQNSEGTGQAADLKSTQAAINQINGKLNRLIEKTNEKFHQIEKEFSEVEGRIQDLEKYVEDTKIDLWSYNAELLVALENQHTIDLTDSEMNKLFERTKKQLRENAEDMGNGCFKIYHKCDNACIGSIRNGTYDHDVYRDEALNNRFQIKGVELKSGYKDWILWISFAISCFLLCVVLLGFIMWACQKGNIRCNICI

SEQ ID NO: 164 - protein, 566 aa, synthetic construct
  REGION 1..566: note = hemagglutinin__InfluenzaA__AAY44775
MKTIIALSYILCLVFAQKLPVNDNSTATLCLGHHAVPNGTLVKTITNDHIEVTNATELVQSSSTGRICDSPHQILDGENCTLIDALLGDPHCDGFQDKEWDLFVERSTAYSNCYPYDVPDYASLRSLVASSGTLEFNNESFNWTGVAQNGTSSACKRRSIKSFFSRLNWLHQLKYKYPALNVTMPNNEKFDKLYIWGVHHPSTDSDQISLYAQASGRVTVSTKRSQQTVIPNIGSRPWVRGVSSRISIYWTIVKPGDILLINSTGNLIAPRGYFKIRSGKSSIMRSNAPIGKCNSECITPNGSIPNDKPFQNVNRITYGACPRYVKQTTLKLATGMRNVPEKQTRGIFGAIAGFIENGWEGMVDGWYGFRHQNSEGTGQAADLKSTQAAINQINGKLNRLIEKTNEKFHQIEKEFSEVEGRIQDLEKYVEDTKIDLWSYNAELLVALENQHTIDLTDSEMNKLFERTRKQLRENAEDMGNGCFKIYHKCDNACIGSIRNGTYDHDVYRDEALNNRFQIKGVELKSGYKDWILWISFAISCFLLCVVLLGFIMWACQKGNIRCNICI

SEQ ID NO: 165 - protein, 566 aa, synthetic construct; identical to SEQ ID NO: 72
  REGION 1..566: note = hemagglutinin__InfluenzaA__AAY44785

SEQ ID NO: 166 - protein, 566 aa, synthetic construct
  REGION 1..566: note = hemagglutinin__InfluenzaA__AAY44795
MKTIIALSYILCLVFAQKLPVNDNSTATLCLGHHAVPNGTLVKTITNDHIEVTNATELVQSSSTGRICDSTHQILDGENCTLIDALLGDPHCDGFQNKEWDLFVERSTAYSNCYPYDVPDYASLRSLVASSGTLEFNNESFNWTGVAQNGTSSACKRRSIKSFFSRLNWLHQLKYKYPALNVTMPNNEKFDKLYIWGVHHPSTDSDQISLYAQASGRVTVSTKRSQQTVIPNIGSRPWVRGVSSRISIYWTIVKPGDILLINSTGNLIAPRGYFKIRSGKSSIMRSNAPIGKCNSECITPNGSIPNDKPFQNVNRITYGACPRYVKQNTLKLATGMRNVPEKQTRGIFGAIAGFIENGWEGMVDGWYGFRHQNSEGTGQAADLKSTQAAINQINGKLNRLIEKTNEKFHQIEKEFSEVEGRIQDLEKYVEDTKIDLWSYNAELLVALENQHTIDLTDSEMNKLFERTRKQLRENAEDMGNGCFKIYHKCDNACIGSIRNGTYDHDVYRDEALNNRFQIKGVELKSGYKDWILWISFAISCFLLCVVLLGFIMWACQKGNIRCNICI

SEQ ID NO: 167 - protein, 566 aa, synthetic construct
  REGION 1..566: note = hemagglutinin__InfluenzaA__AAY44796
MKTIIALSYTLCLVFAQKLPGNDNSTATLCLGHHAVPNGTIVKTITNDQIEVTNATELVQSSSTGGICDSPHQILDGENCTLIDALLGDPQCDGFQNKKWDLFVERSKAYSNCYPYDVPDYASLRSLVASSGTLEFNNESFDWTGVTQNGTSSACKRRSNKSFFSRLNWLTHLKYKYPALNVTMPNNEKFDKLYIWGVHHPGTDSDQISLYAQASGRITVSTKRSQQTVIPNIGSRPRVRDVSSRISIYWTIVKPGDILLINSTGNLIAPRGYFKIRSGKSSIMRSDAPIGKCNSECITPNGSIPNDKPFQNVNRITYGACPRYIKQNTLKLATGMRNVPEKQTRGIFGAIAGFIENGWEGMVDGWYGFRHQNSEGTGQAADLKSTQAAINQINGKLNRLIGKTNEKFHQIEKEFSEVEGRIQDLEKYVEDTKIDLWSYNAELLVALENQHTIDLTDSEMNKLFERTKKQLRENAEDMGNGCFKIYHKCDNACIGSIRNGTYDHDVYRDEALNNRFQIKGVELKSGYKDWILWISFAISCFLLCVALLGFIMWACQKGNIRCNICI

SEQ ID NO: 168 - protein, 566 aa, synthetic construct; identical to SEQ ID NO: 47
  REGION 1..566: note = hemagglutinin__InfluenzaA__AAY44896

SEQ ID NO: 169 - protein, 566 aa, synthetic construct
  REGION 1..566: note = hemagglutinin__InfluenzaA__AAY44906
MKTIIALSYILCLVFAQKLPGNDNSTATLCLGHHAVPNGTIVKTITNDQIEVTNATELVQSSSTGGICDSPHQILDGENCTLIDALLGDPQCDGFQNKKWDLFVERSKAYSNCYPYDVPDYASLRSLVASSGTLEFNNESFDWTGVTQNGTSSACKRRSNKSFFSRLNWLTHLKYKYPALNVTMPNNEKFDKLYIWGVHHPGTDSDQISLYAQASGRITVSTKRSQQTVIPNIGSRPRVRDVSSRISIYWTIVKPGDILLINSTGNLIAPRGYFKIRSGKSSIMRSDAPIGKCNSECITPNGSIPNDKPFQNVNRITYGACPRYVKQNTLKLATGMRNVPERQTRGIFGAIAGFIENGWEGMVDGWYGFRHQNSEGTGQAADLKSTQAAINQINGKLNRLIGKTNEKFHQIEKEFSEVEGRIQDLEKYVEDTKIDLWSYNAELLVALENQHTIDLTDSEMNKLFERTKKQLRENAEDMGNGCFKIYHKCDNACIGSIRNGTYDHDVYRDEALNNRFQIKGVELKSGYKDWILWISFAISCFLLCVALLGFIMWACQKGNIRCNICI

SEQ ID NO: 170 - protein, 566 aa, synthetic construct
  REGION 1..566: note = hemagglutinin__InfluenzaA__AAY46371
MKTIIALSYILCLVFAQKLPGNDNSTATLCLGHHAVPNGTLVKTITSDQIEVTNATELVQSSSTGRICDSPHRILDGENCTLIDALLGDPHCDGFQNKEWDLFVERSKAYSNCYPYDVPDYASLRSLVASSGTLEFNNESFNWTGVAQNGTSFACKRRSIKSFFSRLNWLHQLKYKYPALNVTMPNNDKFDKLYIWGVHHPGTDSDQTSLYAQASGRVTVSTKRSQQTVIPNIGSRPWVRGVSSRISIYWTIVKPGDILLINSTGNLIAPRGYFKIRSGKSSIMRSDAPIGKCNSECITPNGSIPNGKPFQNVNRITYGACPRYVKQNTLKLATGMRNVPEKQTRGIFGAIAGFIENGWEGMVDGWYGFRHQNSEGTGQAADLKSTQAAINQINGKLNRLIEKTNEKFHQIEKEFTEVEGRIQDLEKYVEDTKIDLWSYNAELLVALENQHTIDLTDSEMNKLFERTRKQLRENAEDMGNGCFKIYHKCDNACIGSIRNGTYDHDVYRDEALNNRFQIKGVELKSGYKDWILWISFATSCFLLCVVLLGFIMWACQKGNIRCNICI

SEQ ID NO: 171 - protein, 566 aa, synthetic construct; identical to SEQ ID NO: 32
  REGION 1..566: note = hemagglutinin__InfluenzaA__AAY46381

SEQ ID NO: 172 - protein, 566 aa, synthetic construct
  REGION 1..566: note = hemagglutinin__InfluenzaA__AAY46391
MKTIIALSYILCLVFAQKLPVNDNSTATLCLGHHAVPNGTLVKTITNDHIEVTNATELVQSSSTGRICDSPHQILDGENCTLIDALLGDPHCDGFQNKEWDLFVERSTAYSNCYPYDVPDYASLRSLVASSGTLEFNNESFNWTGVAQNGTSSACKRRSIKSFFSRLNWLHQLKYKYPALNVTMPNNEKFDKLYIWGVHHPSTDSDQISLYAQASGRVTVSTKRSQQTVIPNIGSRPWVRGVSSIISIYWTIVKPGDILLINSTGNLIAPRGYFKIRSGKSSIMRSNAPIGKCNSECITPNGSIPNDKPFQNVNRITYGACPRYVKQNTLKLATGMRNVPEKQTRGIFGAIAGFIENGWEGMVDGWYGFRHQNSEGTGQAADLKSTQAAINQINGKLNRLIEKTNEKFHQIEKEFSEVEGRIQDLEKYVEDTKIDLWSYNAELLVALENQHTIDLTDSEMNKLFERTRKQLRENAEDMGNGCFKIYHKCDNACIGSIRNGTYDHDVYRDEALNNRFQIKGVELKSGYKDWILWISFAISCFLLCVVLLGFIMWACQKGNIRCNICI

SEQ ID NO: 173 - protein, 566 aa, synthetic construct
  REGION 1..566: note = hemagglutinin__InfluenzaA__AAY46426
MKTIIALSYILCLVFAQKLPGNDNSTATLCLGHHAVPNGTLVKTITNDQIEVTNATELVQSSSTGRICDSPHQILDGENCTLIDALLGDPHCDGFQNKEWDLFVERSKAYSNCYPYDVPDYASLRSLVASSGTLEFNNESFNWTGVAQNGTSSACKRRSNKSFFSRLNWLHQLKYKYPALNVTMPNNKKFDKLYIWGVHHPSTDSDQISLYAQASGRVTVSTKRSQQTVIPNIGSRPWVRGVSSRISIYWTIVKPGDILLINSTGNLIAPRGYFKIRSGKSSIMRSDAPIGKCNSECITPNGSIPNDKPFQNVNRITYGACPRYVKQNTLKLATGMRNIPEKQTRGIFGAIAGFIENGWEGMVDGWYGFRHQNSEGTGQAADLKSTQAAINQINGKLNRLIEKTNEKFHQIEKEFSEVEGRIQDLEKYVEDTKIDLWSYNAELLVALENQHTIDLTDSEMNKLFERTKKQLRENAEDMGNGCFKIYHKCDNACIGSIRNGTYDHDVYRDEALNNRFQIKGVELKSGYKDWILWISFAISCFLLCVVLLGFIMWACQKGNIRCNICI

SEQ ID NO: 174 - protein, 566 aa, synthetic construct
  REGION 1..566: note = hemagglutinin__InfluenzaA__AAY47013
MKTIIALSYILCLVFAQKLPGNDNSTATLCLGHHAVPNGTLVKTITNDQIEVTNATELVQSSSTGRICDSPHQILDGENCTLIDALLGDPHCDGFQNKEWDLFVERSKAYSNCYPYDVPDYVSLRSLVASSGTLEFNNESFNWTGVAQNGTSSACKRRSDKSFFSRLNWLHQLKYKYPALNVTMPNNEKFDKLYIWGVHHPGTDSDQISLYAQASGRVTVSTKRSQQTVIPNIGSGPWVRGVSSRISIYWTIVKPGDILLINSTGNLIAPRGYFKIRSGKSSIMRSDAPIGKCNSECITPNGSIPNDKPFQNVNRITYGPCPRYVKQNTLKLATGMRNVPEKQTRGIFGAIAGFIENGWEGMMDGWYGFRHQNSEGTGQAADLKSTQAAINQINGKLNRLIKKTNEKFHQIEKEFSEVEGRIQDLEKYVEDTKIDLWSYNAELLVALENQHTIDLTDSEMNKLFERTKKQLRENAEDMGNGCFKIYHKCDNACIGSIRNGTYDHDVYRDEALNNRFQIKGVELKSGYKDWILWISFAISCFLLCIVLLGFIMWACQKGNIRCNICI

SEQ ID NO: 175 - protein, 566 aa, synthetic construct
  REGION 1..566: note = hemagglutinin__InfluenzaA__AAY47023
MKTIIALSYILCLVFAQKLPGNDNSTATLCLGHHAVPNGTLVKTITNDQIEVTNATELVQSSSTSRICDSPHQILDGENCTLIDALLGDPHCDGFQNKEWGLFVERSKAYSNCYPYDVPDYVSLRSLVASSGTLEFNNESFNWTGVAQNGTSSACKRRSDKSFFSRLNWLHQLKYKYPALNVTMPNNEKFDKLYIWGVHHPGTDSDQISLYAQASGRVTVSTKRSQQTVIPNIGSRPWVRGVSSRISIYWTIVKPGDILLINSTGNLIAPRGYFKIRSGKSSIMRSDAPIGKCNSECITPNGSIPNDKPFQNVNRITYGACPRYVKQNTLKLATGMRNVPEKQARGIFGAIAGFIENGWEGMMDGWYGFRHQNSEGTGQAADLKSTQAAINQINGKLNRLIEKTNEKFHQIEKEFSEVEGRIQDLEKYVEDTKIDLWSYNAELLVALENQHTIDLTDSEMNKLFERTKKQLRENAEDMGNGCFKIYHKCDNACIGSIRNGTYDHDVYRDEALNNRFQIKGVELKSGYKDWILWISFAISCFLLCIVLLGFIMWACQKGNIRCNICI

SEQ ID NO: 176 - protein, 566 aa, synthetic construct; identical to SEQ ID NO: 172
  REGION 1..566: note = hemagglutinin__InfluenzaA__AAY47052

SEQ ID NO: 177 - protein, 566 aa, synthetic construct
  REGION 1..566: note = hemagglutinin__InfluenzaA__AAY47075
MKTIIALSYILCLVFAQKLPGNDNSMATLCLGHHAVPNGTLVKTITNDQIEVTNATELVQSSSTGRICDSPHQILDGENCTLIDALLGDPHCDGFQNKEWDLFVERSKAYSNCYPYDVPDYVSLRSLVASSGTLEFNNESFNWTGVAQNGTSSACKRRSNKSFFSRLNWLHQLKNKYPALNVTMPNNEKFDKLYIWGVHHPGTDSDQISLYAQASGRVTVSTKRSQQTVIPNIGSRPRVRDISSRISIYWTIVKPGDILLINSTGNLIAPRGYFKIRSGKSSIMRSDAPIGKCNSECITPNGSIPNDKPFQNVNRITYGACPRYVKQNTLKLATGMRNVPEKQTRGIFGAIAGFIENGWEGMMDGWYGFRHQNSEGTGQAADLKSTQAAINQINGKLNRLIEKTNEKFHQIEKEFSEVEGRIQDLEKYVEDTKIDLWSYNAELLVALENQHTIDLTDSEMNKLFERTKKQLRENAEDMGNGCFKIYHKCDNACIGSIRNGTYDHDVYRDEALNNRFQIKGVELKSGYKDWILWISFAISCFLLCIVLLGFIMWACQKGNIRCNICI

SEQ ID NO: 178 - protein, 566 aa, synthetic construct
  REGION 1..566: note = hemagglutinin__InfluenzaA__AAY47085
MKTIIALSYILCLVFAQKLPGNDNSTATLCLGHHAVPNGTIVKTITNDQIEVTNATELVQSSSTGGICDSPHQILDGENCTLIDALLGDPQCDGFQNKKWDLFVERSKAYSNCYPYDVPDYASLRSLVASSGTLEFNNESFNWTGVTQNGTSSACKRRSNKSFFSRLNWLTHLKYKYPALNVTMPNNEKFDKLYIWGVHHPGTDSDQISLYAQASGRITVSTKRSQQTVIPNVGSRPRVRDVSSRISIYWTIVKPGDILLINSTGNLIAPRGYFKIRSGKSSIMRSDAPIGKCNSECITPNGSIPNDKPFQNVNRITYGACPRYVKQNTLKLATGMRNVPEKQTRGIFGAIAGFIENGWEGMVDGWYGFRHQNSEGTGQAADLKSTQAAINQINGKLNRLIGKTNEKFHQIEKEFSEVEGRIQDLEKYVEDTKIDLWSYNAELLVALENQHTIDLTDSEMNKLFERTKKQLRENAEDMGNGCFKIYHKCDNACIESIRNGTYDHDVYRDEALNNRFQIKGVELKSGYKDWILWISFAISCFLLCVALLGFIMWACQKGNIRCNICI

SEQ ID NO: 179 - protein, 566 aa, synthetic construct
  REGION 1..566: note = hemagglutinin__InfluenzaA__AAY58320
MKTIIALSYILCLVFAQKLPGNDNSTATLCLGHHAVPNGTIVKTITNDQIEVTNATELVQSSSTGGICDSPHQILDGENCTLIDALLGDPQCDGFQNKKWDLFVERSKAYSNCYPYDVPDYASLRSLVASSGTLEFNNESFDWTGVTQNGTSSACKRRSNKSFFSRLNWLTHLKYKYPALNVTMPNNEKFDKLYIWGVHHPGTDSDQISLYAQASGRITVSTKRSQQTVIPNIGSRPRVRDISSRISIYWTIVKPGDILLINSTGNLIAPRGYFKIRSGKSSIMRSDAPIGKCNSECITPNGSIPNDKPFQNVNRITYGACPRYVKQNTLKLATGMRNVPEKQTRGIFGAIAGFIENGWEGMVDGWYGFRHQNSEGTGQAADLKSTQAAINQINGKLNRLIGKTNEKFHQIEKEFSEVEGRIQDLEKYVEDTKIDLWSYNAELLVALENQHTIDLTDSEMNKLFERTKKQLRENAEDMGNGCFKIYHKCDNACIGSIRNGTYDHDVYRDEALNNRFQIKGVELKSGYKDWILWISFAISCFLLCVALLGFIMWACQKGNIRCNICI

SEQ ID NO: 180 - protein, 566 aa, synthetic construct
  REGION 1..566: note = hemagglutinin__InfluenzaA__AAY59035
MKTIIALSYILCLVFAQKLTVNDNSTATLCLGHHAVPNGTLVKTITNDHIEVTNATELVQSSSTGRICDSPHQILDGENCTLIDALLGDPHCDGFQNKEWDLFVERSTAYSNCYPYDVPDYASLRSLVASSGTLEFNNESFNWTGVAQNGTSSACKRRSIKSFFSRLNWLHQLKYKYPALNVTMPNNEKFDKLYIWGVHHPSTDSDQISLYAQASGRVTVSTKRSQQTVIPNIGSRPWVRGVSSRISIYWTIVKPGDILLINSTGNLIAPRGYFKIRSGKSSIMRSNAPIGKCNSECITPNGSIPNDKPFQNVNRITYGACPRYVKQNTLKLATGMRNVPEKQTRGIFGAIAGFIENGWEGMVDGWYGFRHQNSEGTGQAADLKSTQAAINQINGKLNRLIEKTNEKFHQIEKEFSEVEGRIQDLEKYVEDTKIDLWSYNAELLVALENQHTIDLTDSEMNKLFERTRKQLRENAEDMGNGCFKIYHKCDNACIGSIRNGTYDHDVYRDEALNNRFQIKGVELKSGYKDWILWISFAISCFLLCVVLLGFIMWACQKGNIRCNICI

SEQ ID NO: 181 - protein, 566 aa, synthetic construct
  REGION 1..566: note = hemagglutinin__InfluenzaA__AAY64202
MKTIIALSYILCLVFAQKLPGNDNSTATLCLGHHAVPNGTIVKTITNDQIEVTNATELVQSSSTGGICDSPHQILDGENCTLIDALLGDPQCDGFQNKKWDLFVERSKAYSNCYPYDVPDYASLRSLVASSGTLEFNNESFNWTGVTQNGTSSACERRSNKSFFSRLNWLTHLKYKYPALNVTMPNNEKFDKLYIWGVHHPGTDSDQISLYAQASGRITVSTKRSQQTVIPNIGSRPRVRDVSSRISIYWTIVKPGDILLINSTGNLIAPRGYFKIRSGKSSIMRSDAPIGKCNSECITPNGSIPNDKPFQNVNRITYGACPRYVKQNTLKLATGMRNVPEKQNRGIFGAIAGFIENGWEGMVDGWYGFRHQNSEGTGQAADLKSTQAAINQINGKLNRLIGKTNEKFHQIEKEFSEVEGRIQDLEKYVEDTKIDLWSYNAELLVALENQHTIDLTDSEMNKLFERTKKQLRENAEDMGNGCFKIYHKCDNACIGSIRNGTYDHDVYRDEALNNRFQIKGVELKSGYKDWILWISFAISCFLLCVALLGFIMWACQKGNIRCDICI

SEQ ID NO: 182 - protein, 566 aa, synthetic construct
  REGION 1..566: note = hemagglutinin__InfluenzaA__AAY64212
MKTIIALSYILCLVFAQKIPVNDNSTATLCLGHHAVPNGTLVKTITNEHIEVTNATELVQSSSTGRICDSPHQILDGENCTLIDALLGDPHCDGFQNKEWDLFVERSTAYSNCYPYDVPDYASLRSLVASSGTLEFNNESFNWTGVAQNGTSSACKRRSIKSFFSRLNWLHQLKYKYPALNVTMPNNEKFDKLYIWGVHHPSTDSDQISLYAQASGRVTVSTKRSQQTVIPNIGSRPWVRGVSSRISIYWTIVKPGDILLINSTGNLIAPRGYFKIRSGKSSIMRSNALIGKCNSECITPNGSIPNDKPFQNVNRITYGACPRYVKQNTLKLATGMRNVPEKQTRGIFGAIAGFIENGWEGMVDGWYGFRHQNSEGTGQAADLKSTQAAINQINGKLNRLIEKTNEKFHQIEKEFSEVEGRIQDLEKYVEDTKIDLWSYNAELLVALENQHTIDLTDSEMNKLFERTRKQLRENAEDMGNGCFKIYHKCDNACIGSIRNGTYDHDVYRDEALNNRFQIKGVELKSGYKDWILWISFAISCFLLCVVLLGFIMWACQKGNIRCNICI

SEQ ID NO: 183 - protein, 566 aa, synthetic construct
  REGION 1..566: note = hemagglutinin__InfluenzaA__AAY64222
MKTIIALSYILCLVFAQKLPGNDNSTATLCLGHHAVPNGTLVKTITNDQIEVTNATELVQSSSIGRICDSPHQILDGENCTLIDALLGDPHCDGFQNKEWDLFVERSKAYSNCYPYDVPDYVSLRSLVASSGTLEFNNESFNWTGVAQNGTSSSCKRRSDKSFFSRLNWLHQLKYKYPALNVTMPNNEKFDKLYIWGVHHPGTDSDQISLYAQASGRVTVSTKRSQQTVIPNIGSRPWVRGVSSRISIYWTIVKPGDILLINSTGNLIAPRGYFKIRSGKSSIMRSDAPIGKCNSECITPNGSIPNDKPFQNVNRITYGPCPRYVKQNTLKLATGMRNVPEKQTRGIFGAIAGFIENGWEGMMDGWYGFRHQNSEGTGQAADLKSTQAAINQINGKLNRLIEKTNEKFHQIEKEFSEVEGRIQDLEKYVEDTKIDLWSYNAELLVALENQHTIDLTDSEMNKLFEKTKKQLRENAEDMGNGCFKIYHKCDNACIGSIRNGTYDHDVYRDEALNNRFQIKGVELKSGYKDWILWISFAISCFLLCIVLLGFIMWACQKGNIRCNICI

SEQ ID NO: 184 - protein, 566 aa, synthetic construct
  REGION 1..566: note = hemagglutinin__InfluenzaA__AAY64262
MKTIIALSYILCLVFAQKLPGNDNSTATLCLGHHAVPNGTLVKTITNDQIEVTNATELVQSSSTGRICDSPHQILDGENCTLIDALLGDPHCDGFQNKEWDLFVERSKAYSNCYPYDVPDYASLRSLVASSGTLEFNNESFNWTGVAQNGTSSACKRRSNKSFFSRLNWLHQLKYKYPALNVTMPNNEKFDKLYIWGVHHPSTDSDQISLYAQASGRVTVSTKRSQQTVIPNIGSRPWVRGVSSRISIYWTIVKPGDILLINSTGNLIAPRGYFKIRSGKSSIMRSDAPIGKCNSECITPNGSIPNDKPFQNVNRITYGACPRYVKQNTLKLATGMRNVPEKQTRGIFGAIAGFIENGWEGMVDGWYGFRHQNSEGTGQAADLKSTQAAINQINGKLNRLIEKTNEKFHQIEKEFSEVEGRIQDLEKYVEDTKIDLWSYNAELLVALENQHTIDLTDSEMNKLFERTKKQLRENAEDMGNGCFKIYHKCDNACMGSIRNGTYDHDVYRDEALNNRFQIKGVELKSGYKDWILWISFAISCFLLCVVLLGFIMWACQKGNIRCNICI

SEQ ID NO: 185 - protein, 566 aa, synthetic construct
  REGION 1..566: note = hemagglutinin__InfluenzaA__AAY64272
MKTIIALSYILCLVFAQKLPGNDNSTATLCLGHHAVPNGTIVKTITNDQIEVTNATELVQSSSTGGICDSPHQILDGENCTLIDALLGDPQCDGFQNKKWDLFVERSKAYSNCYPYDVPDYASLRSLVASSGTLEFNNESFNWTGVTQNGTSSACKRRSNKSFFSRLNWLTHLKYKYPALNVTMPNNEKFDKLYIWGVHHPGTDSDQISLYAQASGRITVSTKRSQQTVIPNIGSRPRVRDVSSRISIYWTIVKPGDILLINSTGNLIAPRGYFKIRSGKSSIMRSDAPIGKCNSECITPNGSIPNDKPFQNVNRITYGACPRYVKQNTLKLATGMRNVPEKQTRGIFGAIAGFIENGWEGMVDGWYGFRHQNSEGTGQAADLKSTQAAINQINGKLNRLIGKTNEKFHQIEKEFSEVEGRIQDLEKYVEDTKIDLWSYNAELLVALENQHTIDLTDSEMNKLFERTKKQLRENAEDMGNGCFKIYHKCDNACIESIRNGTYDHDVYRDEALNNRFQIKGVELKSGYKDWILWISFAISCFLLCVALLGFIMWACQKGNIRCNICI

SEQ ID NO: 186 - protein, 566 aa, synthetic construct
  REGION 1..566: note = hemagglutinin__InfluenzaA__AAY64282
MKTIIALSYILCLVFAQKLPGNDNSTATLCLGHHAVPNGTLVKTITNDQIEVTNATELVQSSSTGRICDSPHQILDGENCTLIDALLGDPHCDGFQNKEWDLFVERSKAYSNCYPYDVPDYASLRSLVASSGTLEFNNESFNWTGVAQNGTSSACKRRSNKSFFSRLNWLHQLKYKYPALNVTMPNNEKFDKLYIWGVHHPSTDSDQISLYAQASGRVTVSTKRSQQTVIPNIGSRPWVRGVSSRISIYWTIVKPGDILLINSTGNLIAPRGYFKIRSGKSSIMRSDAPIGKCNSECITPNGSIPNDKPFQNVNRITYGACPRYVKQNTLKLATGMRNVPEKQTRGIFGAIAGFIENGWEGMVDGWYGFRHQNSEGTGQAADLKSTQAAINQINGKLNRLIEKTNEKFHQIEKEFSEVEGRIQDLEKYVEDTKIDLWSYNAELLVALENQHTIDLTDSEMNKLFERTKKQLRENAEDMGNGCFKIYHKCDNACIGSIRNGTYDHDVYRDEALNNRFQIKGVELKSGYKDWILWISFAISCFLLCVVLLGFIMWACQKGNIRCNICI

SEQ ID NO: 187 - protein, 566 aa, synthetic construct
  REGION 1..566: note = hemagglutinin__InfluenzaA__AAY64292
MKTIIALSYILCLVFAQKLPGNDNSTATLCLGHHAVPNGTLVKTITNDQIEVTNATELVQSSSTDKICDSPHQILDGGNCTLIDALLGDPHCDGFQNKEWDLFVERSKAYSNCYPYDVPDYVSLRSLVASSGTLEFNNESFNWTGVAQNGTSSACKRRSDKSFFSRLNWLHQLKNKYPALNVTMPNNEKFDKLYIWGVHHPGTDSDQISLYAQASGRVTVSTKRSQQTVIPNIGSRPRVRDISSRISIYWTIVKPGDILLINSTGNLIAPRGYFKIRSGKSSIMRSDAPIGKCNSECITPNGSIPNDKPFQNVNRITYGACPRYVKQNTLKLATGMRNVPEKQTRGIFGAIAGFIENGWEGMVDGWYGFRHQNSEGTGQAADLKSTQAAINQINGKLNRLIEKTNEKFHQIEKEFSEVEGRIQDLEKYVEDTKIDLWSYNAELLVALENQHTIDLTDSEMNKLFERTKKQLRENAEDMGNGCFKIYHKCDNACIGSIRNGTYDHDVYRDEALNNRFQIKGVELKSGYKDWILWISFAISCFLLCIVLLGFIMWACQKGNIRCNICI

SEQ ID NO: 188 - protein, 566 aa, synthetic construct
  REGION 1..566: note = hemagglutinin__InfluenzaA__AAY64302
MKTIIALSYILCLVFAQKLPGNDNSTATLCLGHHAVPNGTLVKTITSDQIEVTNATELVQSSSTGRICDSPHRILDGENCTLIDALLGDPHCDGFQNKEWDLFVERSKAYSNCYPYDVPDYASLRSLVASSGTLEFNNESFNWTGVAQNGTSFACKRRSIKSFFSRLNWLHQLKYKYPALNVTMPNNDKFDKLYIWGVHHPSTDSDQTSLYAQASGRVTVSTKRSQQTVIPNIGSRPWVRGVSSRISIYWTIVKPGDILLINSTGNLIAPRGYFKIRSGKSSIMKSDAPIGKCNSECITPNGSIPNDKPFQNVNRITYGACPRYVKQNTLKLATGMRNVPEKQTRGIFGAIAGFIENGWEGMVDGWYGFRHQNSEGTGQAADLKSTQAAINQINGKLNRLIEKTNEKFHQIEKEFTEVEGRIQDLEKYVEDTKIDLWSYNAELLVALENQHTIDLTDSEMNKLFERTRKQLRENAEDMGNGCFKIYHKCDNVCIGSIRNGTYDHDVYRDEALNNRFQIKGVELKSGYKDWILWISFATSCFLLCVVLLGFIMWACQKGNIRCNICI

SEQ ID NO: 189 - protein, 566 aa, synthetic construct; identical to SEQ ID NO: 183
  REGION 1..566: note = hemagglutinin__InfluenzaA__AAY64312

SEQ ID NO: 190 - protein, 566 aa, synthetic construct; identical to SEQ ID NO: 186
  REGION 1..566: note = hemagglutinin__InfluenzaA__AAY64322

SEQ ID NO: 191 - protein, 566 aa, synthetic construct
  REGION 1..566: note = hemagglutinin__InfluenzaA__AAY64332
MKTIIALSYILCLVFTQKLPGNDNSTATLCLGHHAVPNGTIVKTITNDQIEVTNATELVQSSSTGGICDSPHQILDGENCTLIDALLGDPQCDGFQNKKWDLFVERSKAYSNCYPYDVPDYASLRSLVASSGTLEFNNESFDWTGVTQNGTSSACKRRSNKSFFSRLNWLTHLKFKYPALNVTMPNNEKFDKLYIWGVHHPGTDSDQISLYAQASGRITVSTKRSQQTVIPNIGSRPRVRDVSSRISIYWTIVKPGDILLINSTGNLIAPRGYFKIRSGKSSIMRSDAPIGKCNSECITPNGSIPNDKPFQNVNRITYGACPRYVKQNTLKLATGMRNVPEKQTRGIFGAIAGFIENGWEGMVDGWYGFRHQNSEGTGQAADLKSTQAAINQINGKLNRLIGKTNEKFHQIEKEFSEVEGRIQDLEKYVEDTKIDLWSYNAELLVALENQHTIDLTDSEMNKLFERTKKQLRENAEDMGNGCFKIYHKCDNACIGSIRNGTYDHDVYRDEALNNRFQIKGVELKSGYKDWILWISFAISCFLLCVALLGFIMWACQKGNIRCDICI

SEQ ID NO: 192 - protein, 566 aa, synthetic construct
  REGION 1..566: note = hemagglutinin__InfluenzaA__AAY64342
MKTIIALSYILCLVFAQKLPGNDNSTATLCLGHHAVPNGTLVKTITNDQIEVTNATELVQSSSTGRICDSPHQILDGENCTLIDALLGDPHCDGFQNKEWDLFVERSKAYSNCYPYDVPDYASLRSLVASSGTLEFNNESFNWTGVAQNGTSSACKRRSNKSFFSRLNWLHQLKYKYPALNVTMPNNEKFDKLYIWGVHHPSTDSDQISLYAQASGRVTVSTKRSQQTVIPNIGSRPWVRGVSSRISIYWTIVKPGDILLINSTGNLIAPRGYFKIRSGKSSIMRSDAPIGKCNSECITPNGSIPNDKPFQNVNRITYGACPRYVKQNTLKLATGMRNVPEKQTRGIFGAIAGFIENGWEGMVDGWYGFRHQNSEGTGQAADLKSTQAAINQINGKLNRLIEKTNEKFHQIEKEFSEVEGRIQDLEKYVEDTKIDLWSYNAELLVALENQHTIDLTDSEMNKLFERTKKQLRENAEDMGNGCFKIYHKCDNACIGSIRNGTYDHDVYRDEALNNRFQIKGVELKSGYKDWILWISFATSCFLLCVVLLGFIMWACQKGNIRCNICI

SEQ ID NO: 193 - protein, 566 aa, synthetic construct; identical to SEQ ID NO: 32
  REGION 1..566: note = hemagglutinin__InfluenzaA__AAY64352

SEQ ID NO: 194 - protein, 566 aa, synthetic construct
  REGION 1..566: note = hemagglutinin__InfluenzaA__AAY64362
MKTIIALSYILCLVFAQKLPGNDNSTATLCLGHHAVPNGTIVKTITNDQIEVTNATELVQSSSTGEICDSPHQILDGENCTLIDALLGDPQCDGFQNKKWDLFVERSKAYSNCYPYDVPDYASLRSLVASSGTLEFNNESFDWTGVTQNGTSSACKRRSNKSFFSRLNWLTHLKYKYPALNVTMPNNEKFDKLYIWGVHHPGTDSDQISLYAQASGRITVSTKRSQQTVIPNIGSRPRVRDISSRISIYWTIVKPGDILLINSTGNLIAPRGYFKIRSGKSSIMRSDAPIGKCNSECITPNGSIPNDKPFQNVNRITYGACPRYIKQNTLKLATGMRNVPEKQTRGIFGAIAGFIENGWEGMVDGWYGFRHQNSEGTGQAADLKSTQAAINQINGKLNRLIGKTNEKFHQIEKEFSEVEGRIQDLEKYVEDTKIDLWSYNAELLVALENQHTIDLTDSEMNKLFERTKKQLRENAEDMGNGCFKIYHKCDNACIGSIRNGTYDHDVYRDEALNNRFQIKGVELKSGYKDWILWISFAISCFLLCVALLGFIMWACQKGNIRCNICI

SEQ ID NO: 195 - protein, 566 aa, synthetic construct; identical to SEQ ID NO: 186
  REGION 1..566: note = hemagglutinin__InfluenzaA__AAY64382

SEQ ID NO: 196 - protein, 566 aa, synthetic construct
  REGION 1..566: note = hemagglutinin__InfluenzaA__AAY64392
MKTIIALSYILCLVFAQKLPGNDNSTATLCLGHHAVPNGTIVKTITNDQIEVTNATELVQSSSTGGICDSPHQILDGENCTLIDALLGDPQCDGFQNKKWDLFVERSKAYSNCYPYDVPDYASLRSLVASSGTLEFNNESFNWTGVTQNGTSSACKRRSNKSFFSRLNWLTHLKYKYPALNVTMPNNEKFDKLYIWGVHHPGTDNDQISLYAQASGRITVSTKRSQQTVIPNIGSRPRVRDVSSRISIYWTIVKPGDILLINSTGNLIAPRGYFKIRSGKSSIMRSDAPIGKCNSECITPNGSIPNDKPFQNVNRITYGACPRYVKQNTLKLATGMRNVPEKQTRGIFGAIAGFIENGWEGMVDGWYGFRHQNSEGTGQAADLKSTQAAINQINGKLNRLIGKTNEKFHQIEKEFSEVEGRIQDLEKYVEDTKIDLWSYNAELLVALENQHTIDLTDSEMNKLFERTKKQLRENAEDMGNGCFKIYHKCDNACIGSIRNGTYDHDVYRDEALNNRFQIKGVELKSGYKDWILWISFAISCFLLCVALLGFIMWACQKGNIRCNICI

SEQ ID NO: 197 - protein, 566 aa, synthetic construct; identical to SEQ ID NO: 188
  REGION 1..566: note = hemagglutinin__InfluenzaA__AAY64402

SEQ ID NO: 198 - protein, 566 aa, synthetic construct; identical to SEQ ID NO: 186
  REGION 1..566: note = hemagglutinin__InfluenzaA__AAY98037

SEQ ID NO: 199 - protein, 566 aa, synthetic construct; identical to SEQ ID NO: 186
  REGION 1..566: note = hemagglutinin__InfluenzaA__AAY98047

SEQ ID NO: 200 - protein, 566 aa, synthetic construct; identical to SEQ ID NO: 47
  REGION 1..566: note = hemagglutinin__InfluenzaA__AAY98057

SEQ ID NO: 201 - protein, 566 aa, synthetic construct
  REGION 1..566: note = hemagglutinin__InfluenzaA__AAY98067
MKTIIALSYILCLVFAQELPGNDNSTATLCLGHHAVPNGTLVKTITNDQIEVTNATELVQSSSTGRICDSPHQILDGENCTLIDALLGDPHCDGFQNKEWDLFVERSKAYSNCYPYDVPDYVSLRSLVASSGTLEFNNESFNWTGVAQNGTSSACKRRSDKSFFSRLNWLHQLKYKYPALNVTMPNNEKFDKLYIWGVHHPGTDSDQISLYAQASGRVTVSTKRSQQTVIPNIGSGPWVRGVSSRISIYWTIVKPGDILLINSTGNLIAPRGYFKIRSGKSSIMRSDAPIGKCNSECITPNGSIPNDKPFQNVNRITYGPCPRYVKQNTLKLATGMRNVPEKQTRGIFGAIAGFIENGWEGMMDGWYGFRHQNSEGTGQAADLKSTQAAINQINGKLNRLIEKTNEKFHQIEKEFSEVEGRIQDLEKYVEDTKIDLWSYNAELLVALENQHTIDLTDSEMNKLFERTKKQLRENAEDMGNGCFKIYHKCDNACIGSIRNGTYDHDVYRDEALNNRFQIKGVELKSGYKDWILWISFAISCFLLCIVLLGFIMWACQKGNIRCNICI

SEQ ID NO: 202 - protein, 566 aa, synthetic construct
  REGION 1..566: note = hemagglutinin__InfluenzaA__AAY98077
MKTIIALSYILCLVFAQKLPGNDNSTATLCLGHHAVPNGTLVKTITNDQIEVTNATELVQSSSASRICDSPHQILDGENCTLIDALLGDPHCDGFQNKEWDLFVERSKAYSNCYPYDVPDYVSLRSLVASSGTLEFNNESFNWTGVAQNGTSSACKRRSDKSFFSRLNWLHQLKYKYPALNVTMPNNEKFDKLYIWGVHHPGTDSDQISLYAQASGRVTVSTKRSQQTVIPNIGSRPWVRGVSSRISIYWTIVKPGDILLINSTGNLIAPRGYFKIRSGKSSIMRSDAPIGKCNSECITPNGSIPNDKPFQNVNRITYGACPRYVKQNTLKLATGMRNVPEKQTRGIFGAIAGFIENGWEGMMDGWYGFRHQNSEGTGQAADLKSTQAAINQINGKLNRLIEKTNEKFHQIEKEFSEVEGRIQDLEKYVEDTKIDLWSYNAELLVALENQHTIDLTDSEMNKLFERTKKQLRENAEDMGNGCFKIYHKCDNACIGSIRNGTYDHDVYRDEALNNRFQIKGVELKSGYKDWILWISFAISCFLLCIVLLGFIMWACQKGNIRCNICI

SEQ ID NO: 203 - protein, 566 aa, synthetic construct
  REGION 1..566: note = hemagglutinin__InfluenzaA__AAY98087
MKTIIALSYILCLVFAQKLPGNDNSTATLCLGHHAVPNGTLVKTITNDQIEVTNATELVQSSSTGRICDSPHRILDGENCTLIDALLGDPHCDGFQNKEWDLFVERSKAYSNCYPYDVPDYASLRSLVASSGTLEFNNESFNWTGVAQNGTSSACKRRSIKSFFSRLNWLHQLKYKYPALNVTMPNNDKFDKLYIWGVHHPSTDSDQTSLYAQASGRVTVSTKRSQQTVIPNIGSRPWVRGVSSRISIYWTIVKPGDILLINSTGNLIAPRGYFKIRSGKSSIMRSDAPIGKCNSECITPNGSIPNDKPFQNVNRITYGACPRYVKQNTLKLATGMRNVPEKQTRGIFGAIAGFIENGWEGMVDGWYGFRHQNSEGTGQAADLKSTQAAINQINGKLNRLIEKTNEKFHQIEKEFSEVEGRIQDLEKYVEDTKIDLWSYNAELLVALENQHTIDLTDSEMNKLFERTRKQLRENAEDMGNGCFKIYHKCDNACIGSIRNGTYDHDVYRDEALNNRFQIKGVELKSGYKDWILWISFAISCFLLCVVLLGFIMWACQKGNIRCNICI

SEQ ID NO: 204 - protein, 566 aa, synthetic construct; identical to SEQ ID NO: 186
  REGION 1..566: note = hemagglutinin__InfluenzaA__AAY98097

SEQ ID NO: 205 - protein, 566 aa, synthetic construct; identical to SEQ ID NO: 186
  REGION 1..566: note = hemagglutinin__InfluenzaA__AAY98107

SEQ ID NO: 206 - protein, 566 aa, synthetic construct
  REGION 1..566: note = hemagglutinin__InfluenzaA__AAY98117
MKTIIALSYILCLVFAQKLPGNDNSTATLCLGHHAVPNGTLVKTITNDQIEVTNATELVQSSSTGRICDSPHQILDGENCTLIDALLGDPHCDGFQNKEWDLFVERSKAYSNCYPYDVPDYASLRSLVASSGTLEFNNESFNWTGVAQNGTSSACKRGSNKSFFSRLNWLHQLKYKYPALNVTMPNNEKFEKLYIWGVHHPSTDSDQISLYAQASGRVTVSTKRSQQTVIPNIGSRPWVRGVSSRISIYWTIVKPGDILLINSTGNLIAPRGYFKIRSGKSSIMRSDAPIGKCNSECITPNGSIPNDKPFQNVNRITYGACPRYVKQNTLKLATGMRNVPEKQTRGIFGAIAGFIENGWEGMVDGWYGFRHQNSEGTGQAADLKSTQAAINQINGKLNRLIEKTNEKFHQIEKEFSEVEGRIQDLEKYVEDTKIDLWSYNAELLVALENQHTIDLTDSEMNKLFERTKKQLRENAEDMGNGCFKIYHKCDNACIGSIRNGTYDHDVYRDEALNNRFQIKGVELKSGYKDWILWISFAISCFLLCVVLLGFIMWACQKGNIRCNICI

SEQ ID NO: 207 - protein, 566 aa, synthetic construct; identical to SEQ ID NO: 186
  REGION 1..566: note = hemagglutinin__InfluenzaA__AAY98147

SEQ ID NO: 208 - protein, 566 aa, synthetic construct; identical to SEQ ID NO: 186
  REGION 1..566: note = hemagglutinin__InfluenzaA__AAY98157

SEQ ID NO: 209 - protein, 566 aa, synthetic construct
  REGION 1..566: note = hemagglutinin__InfluenzaA__AAY98167
MKTIIALSYILCLVFAQKLPGNDNSTATLCLGHHAVPNGTLVKTITNDQIEVTNATELVQSSSTGRICDSPHQILDGENCTLIDALLGDPHCDGFQNKEWDLFVERSKAYSNCYPYDVPDYASLRSLVASSGTLEFNNESFNWTGVAQNGTSSACKRRSNKSFFSRLNWLHQLKYKYPALNVTMPNNEKFDKLYIWGVHHPSTDSDQISLYAQASGRVTVSTQRSQQTVIPNIGSRPWVRGVSSRISIYWTIVKPGDILLINSTGNLIAPRGYFKIRSGKSSIMRSDAPIGKCNSECITPNGSIPNDKPFQNVNRITYGACPRYVKQNTLKLATGMRNVPEKQTRGIFGAIAGFIENGWEGMVDGWYGFRHQNSEGTGQAADLKSTQAAINQINGKLNRLIEKTNEKFHQIEKEFSEVEGRIQDLEKYVEDTKIDLWSYNAELLVALENQHTIDLTDSEMNKLFERTKKQLRENAEDMGNGCFKIYHKCDNACIGSIRNGTYDHDVYRDEALNNRFQIKGVELKSGYKDWILWISFAISCFLLCVVLLGFIMWACQKGNIRCNICI

SEQ ID NO: 210 - protein, 566 aa, synthetic construct
  REGION 1..566: note = hemagglutinin__InfluenzaA__AAY98177
MKTIIALSYILCLVFAQKLPGNDNSTATLCLGHHAVPNGTLVKTITNDQIEVTNATELVQSSSTGRICDSPHQILDGENCTLIDALLGDPHCDGFQNKEWDLFVERSKAYSNCYPYDVPDYASLRSLVASSGTLEFNNESFNWTGVAQNGTSSACKRRSNKSFFSRLNWLHQLKYKYPALNVTMPNNEKFDKLYIWGVHHPSTDSDQISLYAQASGRVTVSTKRSQQTVIPNIGSRPWVRGVSSRISIYWTIVKPGDILLINSTGNLIAPRGYFKIRSGKSSIMRSDAPIGKCNSECITPNGSIPNDKPFQNVNRITYGACPRYVKQNTLKLATGMRNVPEKQTRGIFGAIAGFIENGWEGMVDGWYGFRHQNSEGTGQAADLKSTQAAINQINGKLNRLIEKTNEKFHQIEKEFSEVEGRIQDLEKYVEDTKIDLWSYNAGLLVALENQHTIDLTDSEMNKLFERTKKQLRENAEDMGNGCFKIYHKCDNACIGSIRNGTYDHDVYRDEALNNRFQIKGVELKSGYKDWILWISFAISCFLLCVVLLGFIMWACQKGNIRCNICI

SEQ ID NO: 211 - protein, 566 aa, synthetic construct
  REGION 1..566: note = hemagglutinin__InfluenzaA__AAY98195
MKTIIALSYILCLVFAQKLPGNDNSTATLCLGHHAVPNGTLVKTITNDQIEVTNATELVQSSSTGRICDSPHQILDGENCTLIDALLGDPHCDGFQNKEWDLFVERSKAYSNCYPYDVPDYASLRSLVASSGTLEFNNESFNWTGVAQNGTSSACKRRSNKSFFSRLNWLHQLKYKYPALNVTMPNNEKFDKLYIWGVHHPSTDSDQISLYAQASGRVTVSTKRSQQTVIPNIGSRPWVRGVSSRISIYWTIVKPGDILLINSTGNLIAPRGYFKIRSGKSSIMRSDAPIGKCNSECITPNGSIPNDKPFQNVNRITYGACPRYVKQNTLKLATGMRNVPEKQTRGIFGAIAGFIENGWEGMVDGWYGFRHQNSEGTGQAADLKSTQAAINQINGKLNRLIEKTNEKFHQIEKEFSEVEGRIQDLEKYVEDTKIDLWSYNAELLVALENQHTIDLTDSEMNKLFERTRKQLRENAEDMGNGCFKIYHKCDNACIGSIRNGTYDHDVYRDEALNNRFQIKGVELKSGYKDWILWISFAISCFLLCVVLLGFIMWACQKGNIRCNICI

SEQ ID NO: 212 - protein, 566 aa, synthetic construct; identical to SEQ ID NO: 186
  REGION 1..566: note = hemagglutinin__InfluenzaA__AAY98207

SEQ ID NO: 213 - protein, 566 aa, synthetic construct; identical to SEQ ID NO: 188
  REGION 1..566: note = hemagglutinin__InfluenzaA__AAY98217

SEQ ID NO: 214 - protein, 566 aa, synthetic construct; identical to SEQ ID NO: 186
  REGION 1..566: note = hemagglutinin__InfluenzaA__AAY98227

SEQ ID NO: 215 - protein, 566 aa, synthetic construct; identical to SEQ ID NO: 186
  REGION 1..566: note = hemagglutinin__InfluenzaA__AAY98237

SEQ ID NO: 216 - protein, 566 aa, synthetic construct
  REGION 1..566: note = hemagglutinin__InfluenzaA__AAY98247
MKTIIALSYILCLVFAQKLPGNDNSTATLCLGHHAVPNGTLVKTITNDQIEVTNATELVQSSSTGRICDSPHQILDGENCTLIDALLGDPHCDGFQNKEWDLFVERSKAYSNCYPYDVPDYASLRSLVASSGTLEFNNESFNWTGVAQNGTSSACKRRSNKSFFSRLNWLHQLKYKYPALNVTMPNNEKFDKLYIWGVHHPSTDSDQISLYAQASGRVTVSTKRSQQTVIPNIGSRPWVRGVSSRISIYWTIVKPGDILLINSTGNLIAPRGYFKIRSGKSSIMRSDAPIGKCNSECITPNGSIPNDKPFQNVNRITYGACPRYIKQNTLKLATGMRNVPEKQTRGIFGAIAGFIENGWEGMVDGWYGFRHQNSEGTGQAADLKSTQAAINQINGKLNRLIEKTNEKFHQIEKEFSEVEGRIQDLEKYVEDTKIDLWSYNAELLVALENQHTIDLTDSEMNKLFERTKKQLRENAEDMGNGCFKIYHKCDNACIGSIRNGTYDHDVYRDEALNNRFQIKGVELKSGYKDWILWISFAISCFLLCVVLLGFIMWACQKGNIRCNICI

SEQ ID NO: 217 - protein, 566 aa, synthetic construct; identical to SEQ ID NO: 186
  REGION 1..566: note = hemagglutinin__InfluenzaA__AAY98319

SEQ ID NO: 218 - protein, 566 aa, synthetic construct
  REGION 1..566: note = hemagglutinin__InfluenzaA__AAY98329
MKTIIALSYILCLVFAQKLPGNDNSTATLCLGHHAVPNGTLVKTITNDQIEVTNATELVQSSSTGRICDSPHQILDGENCTLIDALLGDPHCDGFQNKEWDLFVERSKAYSNCYPYDVPDYASLRSLVASSGTLEFNNESFNWTGVAQNGTSSACKRRSNKSFFSRLNWLHQLKYKYPALNVTMPNNEKFDKLYIWGVHHPSTDSDQISLYAQALGRVTVSTKRSQQTVIPNIGSRPWVRGVSSRISIYWTIVKPGDILLINSTGNLIAPRGYFKIRSGKSSIMRSDAPIGKCNSECITPNGSIPNDKPFQNVNRITYGACPRYVKQNTLKLATGMRNVPEKQTRGIFGAIAGFIENGWEGMVDGWYGFRHLNSEGTGQAADLKSTQAAINQINGKLNRLIEKTNEKFHQIEKEFSEVEGRIQDLEKYVEDTKIDLWSYNAELLVALENQHTIDLTDSEMNKLFERTKKQLRENAEDMGNGCFKIYHKCDNACIGSIRNGTYDHDVYRDEALNNRFQIKGVELKSGYKDWILWISFAISCFLLCVVLLGFIMWACQKGNIRCNICI

SEQ ID NO: 219 - protein, 566 aa, synthetic construct; identical to SEQ ID NO: 186
  REGION 1..566: note = hemagglutinin__InfluenzaA__AAY98339

SEQ ID NO: 220 - protein, 566 aa, synthetic construct; identical to SEQ ID NO: 186
  REGION 1..566: note = hemagglutinin__InfluenzaA__AAY98353

SEQ ID NO: 221 - protein, 566 aa, synthetic construct
  REGION 1..566: note = hemagglutinin__InfluenzaA__AAY98366
MKTIIALSYILCLVFAQKLPGNDNSTATLCLGHHAVPNGTLVKTITSDQIEVTNATELVQSSSTGRICDSPHRILDGENCTLIDALLGDPHCDGFQNKEWDLFVERSKAYSNCYPYDVPDYASLRSLVASSGTLEFNNESFNWTGVAQNGTSFACKRRSIKSFFSRLNWLHQLKYKYPALNVTMPNNDKFDKLYIWGVHHPGTDSDQTSLYAQASGRVTVSTKRSQQTVIPNIGSRPWVRGVSSRISIYWTIVKPGDILLINSTGNLIAPRGYFKIRSGKSSIMRSDAPIGKCNSECITPNGSIPNDKPFQNVNRITYGACPRYVKQNTLKLATGMRNVPEKQTRGIFGAIAGFIENGWEGMVDGWYGFRHQNSEGTGQAADLKSTQAAINQINGKLNRLIEKTNEKFHQIEKEFTEVEGRIQDLEKYVEDTKIDLWSYNAELLVALENQHTIDLTDSEMNKLFERTRKQLRENAEDMGNGCFKIYHKCDNACIGSIRNGTYDHDVYRDEALNNRFQIKGVELKSGYKDWILWISFATSCFLLCVVLLGFIMWACQKGNIRCNICI

SEQ ID NO: 222 - protein, 566 aa, synthetic construct
  REGION 1..566: note = hemagglutinin__InfluenzaA__AAY98376
MKTIIALSYILCLVFAQKLPGNDNSTATLCLGHHAVPNGTLVKTITNDQIEVTNATELVQSSSTGRICDSPHQILDGENCTLIDALLGDPHCDGFQNKEWDLFVERSKAYSNCYPYDVPDYASLRSLVASSGTLEFNNESFNWTGVAQNGTSSACKRRSIKSFFSRLNWLHQLKYKYPALNVTMPNNDKFDKLYIWGVHHPSTDSDQTSLYAQASGRVTVSTKRSQQTVIPNIGSRPWVRGVSSRISIYWTIVKPGDILLINSTGNLIAPRGYFKIRSGKSSIMRSDAPIGKCNSECITPNGSIPNDKPFQNVNRITYGACPRYVKQNTLKLATGMRNVPEKQTRGIFGAIAGFIENGWEGMVDGWYGFRHQNSEGTGQAADLKSTQAAINQINGKLNRLIEKTNEKFHQIEKEFSEVEGRIQDLEKYVEDTKIDLWSYNAELLVALENQHTIDLTDSEMNKLFERTRKQLRENAEDMGNGCFKIYHKCDNACIGSIRNGTYDHDVYRDEALNNRFQIKGVELKSGYKDWILWISFAISCFLLCVVLLGFIMWACQKGNIRCNICI

SEQ ID NO: 223 - protein, 566 aa, synthetic construct
  REGION 1..566: note = hemagglutinin__InfluenzaA__AAY98386
MKTIIALSYILCLVFAQKLPGNDNSTATLCLGHHAVPNGTLVKTITNDQIEVTNATELVQSSSTGRICDSPHQILDGGNCTLIDALLGDPHCDGFQNKEWDLFVERSKVYSNCYPYDVPDYASLRSLVASSGTLEFNNESFNWTGVAQNGTSSACKRRSIKSFFSRLNWLHQLKYKYPALNVTMPNNEKFDKLYIWGVHHPSTDSDQISLYAQASGRVTVSTKRSQQTVIPNIGSRPWVRGVSSRISIYWTIVKPGDILLINSTGNLIAPRGYFKIRSGKSSIMRSDAPIGKCNSECITPNGSIPNDKPFQNVNRITYGACPRYVKQNTLKLATGMRNVPEKQTRGIFGAIAGFIENGWEGMVDGWYGFRHQNSEGTGQAADLKSTQAAINQINGKLNRLIEKTNEKFHQIEKEFSEVEGRIQDLEKYVEDTKIDLWSYNAELLVALENQHTIDLTDSEMNKLFERTKKQLRENAEDMGNGCFKIYHKCDNACIGSIRNGTYDHDVYRDEALNNRFQIKGVELKSGYKDWILWISFAISCFLLCVVLLGFIMWACQKGNIRCNICI

SEQ ID NO: 224 - protein, 566 aa, synthetic construct; identical to SEQ ID NO: 186
  REGION 1..566: note = hemagglutinin__InfluenzaA__AAY98396

SEQ ID NO: 225 - protein, 566 aa, synthetic construct; identical to SEQ ID NO: 186
  REGION 1..566: note = hemagglutinin__InfluenzaA__AAY98406

SEQ ID NO: 226 - protein, 566 aa, synthetic construct
  REGION 1..566: note = hemagglutinin__InfluenzaA__AAZ32946
MKTIIALSYILCLVFAQKLPGNDNSTATLCLGHHAVPNGTIVKTITNDQIEVTNATELVQSSSTGGICDSPHQILDGENCTLIDALLGDPQCDGFQNKKWDLFVERSEAYSNCYPYDVPDYASLRSLIASSGTLEFTNESFNWTGVTQNGTSSACKRRSNKSFFSRLNWLTHLKYKYPALNVTMPNNEKFDKLYIWGVHHPGTDSDQISLYAQASGRITVSTKRSQQTVIPNIGSRPRVRDVSSRISIYWTIVKPGDILLINSTGNLIAPRGYFKIRSGKSSIMRSDAPIGKCNSECITPNGSIPNDKPFQNINRITYGTCPRYVKQNTLKLATGMRNVPEKQTRGIFGAIAGFIENGWEGMVDGWYGFRHQNSEGTGQAADLKSTQAAINQINGKLNRLIGKTNEKFHQIEKEFSEVEGRIQDLEKYVEDTKIDLWSYNAELLVALENQHTIDLTDSEMNKLFERTKKQLRENAEDMGNGCFKIYHKCDNACIGSIRNGTYDHDVYRDEALNNRFQIKGVELKSGYKDWILWISFAISCFLLCVVLLGFIMWACQKGNIRCNICI

SEQ ID NO: 227 - protein, 566 aa, synthetic construct
  REGION 1..566: note = hemagglutinin__InfluenzaA__AAZ32949
MKTIIALSYILCLVFAQKLPGNDNSTATLCLGHHAVPNGTIVKTITNDQIEVTNATELVQSSSTGGICDSPHQILDGENCTLIDALLGDPQCDGFQNKKWDLFVERSEAYSNCYPYDVPDYASLRSLIASSGTLEFTNESFNWTGVTQNGTSSACKRRSNKSFFSRLNWLTHLKYKYPALNVTMPNNEKFDKLYIWGVHHPGTDSDQISLYAQASGRITVSTKRSQQTVIPNIGSRPRVRDISSRISIYWTIVKPGDILLINSTGNLIAPRGYFKIRSGKSSIMRSDAPIGKCNSECITPNGSIPNDKPFQNINRITYGACPRYVKQNTLKLATGMRNVPEKQTRGIFGAIAGFIENGWEGMVDGWYGFRHQNSEGTGQAADLKSTQAAINQINGKLNRLIGKTNEKFHQIEKEFSEVEGRIQDLEKYVEDTKIDLWSYNAELLVALENQHTIDLTDSEMNKLFERTKKQLRENAEDMGNGCFKIYHKCDNACIGSIRNGTYDHDVYRDEALNNRFQIKGVELKSGYKDWILWISFAISCFLLCVVLLGFIMWACQKGNIRCNICI

SEQ ID NO: 228 - protein, 566 aa, synthetic construct
  REGION 1..566: note = hemagglutinin__InfluenzaA__AAZ32950
MKTIIALSYILCLVFAQKLPGNDNSTATLCLGHHAVPNGTIVKTITNDQIEVTNATELVQSSSTGGICDSPHQILDGENCTLIDALLGDPQCDGFQNKKWDLFVERSEAYSNCYPYDVPDYASLRSLIASSGTLEFTNESFNWTGVTQNGTSSACKRRSNKSFFSRLNWLTHLKYKYPALNVTMPNNEKFDKLYIWGVHHPGTDSDQISLYAQASGRITVSTKRSQQTVIPNIGSRPRVRDVSSRISIYWTIVKPGDILLINSTGNLIAPRGYFKIRSGKSSIMRSDAPIGKCNSECITPNGSIPNDKPFQNINRITYGACPRYVKQNTLKLATGMRNVPEKQTRGIFGAIAGFIENGWEGMVDGWYGFRHQNSEGTGQAADLKSTQAAINQINGKLNRLIGKTNEKFHQIEKEFSEVEGRIQDLEKYVEDTKIDLWSYNAELLVALENQHTIDLTDSEMNKLFERTKEQLRENAEDMGNGCFKIYHKCDNACIGSIRNGTYDHDVYRDEALNNRFQIKGVELKSGYKDWILWISFAISCFLLCVVLLGFIMWACQKGNIRCNICI

SEQ ID NO: 229 - protein, 566 aa, synthetic construct
  REGION 1..566: note = hemagglutinin__InfluenzaA__AAZ32951
MKTIIALSYILCLVFAQKIPGNDNSTATLCLGHHAVPNGTLVKTITNDQIEVTNATELVQSSSTGGICDSPHQILDGENCTLIDALLGDPHCDGFQNKKWDLFVERSKAYSNCYPYDVPDYASLRSLVASSGTLEFNNESFNWTGVTQNGTSSACKRRSNKSFFSRLNWLHQLKYKYPALNVAMPNNEKFDKLYIWGVHHPGTDSDQISLYAQASGRITVSTKRSQQTVIPNIGSRPRVRDISSRISIYWTIVKPGDILLINSTGNLIAPRGYFKIRSGKSSIMRSDAPIGKCNSECITPNGSIPNDKPFQNVNRITYGACPRYVKQNTLKLATGMRNVPEKQTRGIFGAIAGFIENGWEGMVDGWYGFRHQNSEGTGQAADLKSTQAAINQINGKLNRLIGKTNEKFHQIEKEFSEVEGRIQDLEKYVEDTKIDLWSYNAELLVALENQHTIDLTDSEMNKLFERTKKQLRENAEDMGNGCFKIYHKCDNACIGSIRNGTYDHDVYRDEALNNRFQIKGVELKSGYKDWILWISFAISCFLLCVALLGFIMWACQKGNIRCNICI

SEQ ID NO: 230 - protein, 566 aa, synthetic construct
  REGION 1..566: note = hemagglutinin__InfluenzaA__AAZ32952
MKTIIALSYILCLVFAQKIPGNDNSTATLCLGHHAVPNGTLVKTITNDQIEVTNATELVQSSSTGGICDSPHQILDGENCTLIDALLGDPHCDGFQNKKWDLFVERSKAYSNCYPYDVPDYASLRSLVASSGTLEFNNESFNWTGVTQNGTSSACKRRSNKSFFSRLNWLHQLKYKYPALNVAMPNNEKFDKLYIWGVHHPGTDSDQISLYAQASGRITVSTKRSQQTVIPNIGSRPRVRDVSSRISIYWTIVKPGDILLINSTGNLIAPRGYFKIRSGKSSIMRSDAPIGKCNSECITPNGSIPNDKPFQNVNKITYGACPRYVKQNTLKLATGMRNVPEKQTRGIFGAIAGFIENGWEGMVDGWYGFRHQNSEGTGQAADLKSTQAAINQINGKLNRLIGKTNEKFHQIEKEFSEVEGRIQDLEKYVEDTKIDLWSYNAELLVALENQHTIDLTDSEMNKLFERTKKQLRENAEDMGNGCFKIYHKCDNACIGSIRNGTYDHDVYRDEALNNRFQIKGVELKSGYKDWILWISFAISCFLLCVALLGFIMWACQKGNIRCNICI

SEQ ID NO: 231 - protein, 566 aa, synthetic construct
  REGION 1..566: note = hemagglutinin__InfluenzaA__AAZ32953
MKTIIALSYILCLVFAQKIPGNDNSTATLCLGHHAVPNGTLVKTITNDQIEVTNATELVQSSSTGGICDSPHQILDGENCTLIDALLGDPHCDGFQNKKWDLFVERSKAYSNCYPYDVPDYASLRSLVASSGTLEFNNESFNWTGVTQNGTSSACKRRSNKSFFSRLNWLHQLKYKYPALNVAMPNNEKFDKLYIWGVHHPGTDSDQISLYAQASGRITVSTKRSQQTVIPNIGSRPRVRDVSSRISIYWTIVKPGDILLINSTGNLIAPRGYFKIRSGKSSIMRSDAPIGKCNSECITPNGSIPNDKPFQNVNRITYGACPRYVKQNTLKLATGMRNVPEKQTRGIFGAIAGFIENGWEGMVDGWYGFRHQNSEGTGQAADLKSTQAAINQINGKLNRLIGKTNEKFHQIEKEFSEVEGRIQDLEKYVEDTKIDLWSYNAELLVALENQHTIDLTDSEMNKLFERTKKQLRENAEDMGNGCFKIYHKCDNACIGSIRNGTYDHDVYRDEALNNRFQIKGVELKSGYKDWILWISFAISCFLLCVALLGFIMWACQKGNIRCNICI

SEQ ID NO: 232 - protein, 566 aa, synthetic construct
  REGION 1..566: note = hemagglutinin__InfluenzaA__AAZ38462
MKTIIALSYILCLVFAQKLPGNDNSTATLCLGHHAVPNGTLVKTITSDQIEVTNATELVQSSSTGRICDSPHRILDGENCTLIDALLGDPHCDGFQNKEWDLFVERSKAYSNCYPYDVPDYASLRSLVASSGTLEFNNESFNWTGVAQNGTSFACKRRSIKSFFSRLNWLHQLKYKYPALNVTMPNNDKFDKLYIWGVHYPGTDSDQTSLYAQASGRVTVSTKRSQQTVIPNIGSRPWVRGVSSRISIYWTIVKPGDILLINSTGNLIAPRGYFKIRSGKSSIMRSDAPIGKCNSECITPNGSIPNGKPFQNVNRITYGACPRYVKQNTLKLATGMRNVPEKQTRGIFGAIAGFIENGWEGMVDGWYGFRHQNSEGTGQAADLKSTQAAINQINGKLNRLIEKTNEKFHQIEKEFTEVEGRIQDLEKYVEDTKIDLWSYNAELLVALENQHTIDLTDSEMNKLFERTRRQLRENAEDMGNGCFKIYHKCDNACIGSIRNGTYDHDVYRDEALNNRFQIKGVELKSGYKDWILWISFATSCFLLCVVLLGFIMWACQKGNIRCNICI

SEQ ID NO: 233 - protein, 566 aa, synthetic construct
  REGION 1..566: note = hemagglutinin__InfluenzaA__AAZ38473
MKTIIALSYILCLVFAQKLPGNDNSTATLCLGHHAVPNGTLVKTITSDQIEVTNATELVQSSSTGRICDSPHRILDGENCTLIDALLGDPHCDGFQNKEWDLFVERSKAYSNCYPYDVPDYASLRSLVASSGTLEFNNESFNWTGVAQNGTSFTCKRRSIKSFFSRLNWLHQLKYKYPALNVTMPNNDKFDKLYIWGVHHPSTDSDQTSLYAQASGRVTVSTKRSQQTVIPNIGSRPWVRGVSSRISIYWTIVKPGDILLINSTGNLIAPRGYFKIRSGKSSIMKSDAPIGKCNSECITPNGSIPNDKPFQNVNRITYGACPRYVKQNTLKLATGMRNVPEKQTRGIFGAIAGFIENGWEGMVDGWYGFRHQNSEGTGQAADLKSTQAAINQINGKLNRLIEKTNEKFHQIEKEFTEVEGRIQDLEKYVEDTKIDLWSYNAELLVALENQHTIDLTDSEMNKLFERTRKQLRENAEDMGNGCFKIYHKCDNVCIGSIRNGTYDHDVYRDEALNNRFQIKGVELKSGYKDWILWISFATSCFLLCVVLLGFIMWACQKGNIRCNICI

SEQ ID NO: 234 - protein, 566 aa, synthetic construct; identical to SEQ ID NO: 186
  REGION 1..566: note = hemagglutinin__InfluenzaA__AAZ38484

SEQ ID NO: 235 - protein, 566 aa, synthetic construct
  REGION 1..566: note = hemagglutinin__InfluenzaA__AAZ38495
MKTIIALSYILCLVFAQKLPGNDNSTATLCLGHHAVPNGTLVKTITNDQIEVTNATELVQSSSTGRICDSPHQILDGENCTLIDALLGDPHCDGFQNKEWDLFVERSKAYSNCYPYDVPDYASLRSLVASSGTLEFNNESFNWTGVAQNGTSSACKRRSNKSFFSRLNWLHQLKYKYPALNVTMPNNEKFDKLYIWGVHHPSTDSDQISLYAQASGRVTVSTKRSQQTVIPNIGSRPWVRGVSSKISIYWTIVKPGDILLINSTGNLIAPRGYFKIRSGKSSIMRSDAPIGKCNSECITPNGSIPNDKPFQNVNRITYGACPRYVKQNTLKLATGMRNVPEKQTRGIFGAIAGFIENGWEGMVDGWYGFRHQNSEGTGQAADLKSTQAAINQINGKLNRLIEKTNEKFHQIEKEFSEVEGRIQDLEKYVEDTKIDLWSYNAELLVALENQHTIDLTDSEMNKLFERTKKQLRENAEDMGNGCFKIYHKCDNACIGSIRNGTYDHDVYRDEALNNRFQIKGVELKSGYKDWILWISFAISCFLLCVVLLGFIMWACQKGNIRCNICI

SEQ ID NO: 236 - protein, 566 aa, synthetic construct
  REGION 1..566: note = hemagglutinin__InfluenzaA__AAZ38517
MKTIIALSYILCLVFAQKLPGNDNSTATLCLGHHAVPNGTIVKTITNDQIEVTNATELVQSSSTGGICDSPHQILDGENCTLIDALLGDPQCDGFQNKKWDLFVERSKAYSNCYPYDVPDYASLRSLVASSGTLEFNNESFNWTGVTQNGTSSACKRRSNNSFFSRLNWLTHLKFKYPALNVTMPNNEKFDKLYIWGVHHPGTDNDQISLYAQASGRITVSTKRSQQTVIPNIGSRPRVRDIPSRISIYWTIVKPGDILLINSTGNLIAPRGYFKIRSGKSSIMRSDAPIGKCNSECITPNGSIPNDKPFQNVNRITYGACPRYVKQNTLKLATGMRNVPEKQTRGIFGAIAGFIENGWEGMVDGWYGFRHQNSEGIGQAADLKSTQAAINQINGKLNRLIGKTNEKFHQIEKEFSEVEGRIQDLEKYVEDTKIDLWSYNAELLVALENQHTIDLTDSEMNKLFERTKKQLRENAEDMGNGCFKIYHKCNNACIGSIRNGTYDHDVYRDEALNNRFQIKGVELKSGYKDWILWISFAISCFLLCVVLLGFIMWACQKGNIRCNICI

SEQ ID NO: 237 - protein, 566 aa, synthetic construct
  REGION 1..566: note = hemagglutinin__InfluenzaA__AAZ38539
MKTIIALSYILCLVFAQKLPGNDNSTATLCLGHHAVPNGTLVKTITNDQIEVTNATELVQSSSTGRICDSPHQILDGENCTLIDALLGDPHCDGFQNKEWDLFVERSKAYSNCYPYDVPDYVSLRSLVASSGTLEFNNESFNWTGVAQNGTSSACKRRSDKSFFSRLNWLHQLKYKYPALNVTMPNNEKFDKLYIWGVHHPGTDSDQISLYAQASGRVTVSTKRSQQTVIPNIGSRPWVRGVSSKISIYWTIVKPGDIFLINSTGNLIAPRGYFKIRSGKSSIMRSDAPIGKCNSECITPNGSIPNDKPFQNVNRITYGPCPRYVKQNTLKLATGMRNVPEKQTRGIFGAIAGFIENGWEGMMDGWYGFRHQNSEGTGQAADLKSTQAAINQINGKLNRLIEKTNEKFHQIEKEFSEVEGRIQDLEKYVEDTKIDLWSYNAELLVALENQHTIDLTDSEMNKLFERTKKQLRENAEDMGNGCFKIYHKCDNACIGSIRNGTYDHDVYRDEALNNRFQIKGVELKSGYKDWILWISFAISCFLLCIVLLGFIMWACQKGNIRCNICI

SEQ ID NO: 238 - protein, 566 aa, synthetic construct; identical to SEQ ID NO: 186
  REGION 1..566: note = hemagglutinin__InfluenzaA__AAZ38561

SEQ ID NO: 239 - protein, 566 aa, synthetic construct
  REGION 1..566: note = hemagglutinin__InfluenzaA__AAZ38583
MKTIIALSYILCLVFAQKIPGNDNSTATLCLGHHAVPNGTIVKTITNDQIEVTNATELVQSSSTGGICDSPHQILDGENCTLIDALLGDPQCDGFQNKKWDLFVERSKAYSNCYPYDVPDYASLRSLVASSGTLEFNNESFNWTGVTQNGTSSACKRRSNNSFFSRLNWLTHLKFKYPALNVTMPNNEKFDKLYIWGVHHPGTNNDQISLYAQASGRITVSTKRSQQTVIPNIGSRPRVRDIPSRISIYWTIVKPGDILLINSTGNLIAPRGYFKIRSGKSSIMRSDAPIGKCNSECITPNGSIPNDKPFQNVNRITYGACPRYVKQNTLKLATGMRNVPEKQTRGIFGAIAGFIENGWEGMVDGWYGFRHQNSEGIGQAADLKSTQAAINQINGKLNRLIGKTNEKFHQIEKEFSEVEGRIQDLEKYVEDTKIDLWSYNAELLVALENQHTIDLTDSEMNKLFERTKKQLRENAEDMGNGCFKIYHKCDNACIGSIRNGTYDHDVYRDEALNNRFQIKGVELKSGYKDWIIWISFAISCFLLCVALLGFIMWACQKGNIRCNICI

SEQ ID NO: 240 - protein, 566 aa, synthetic construct
  REGION 1..566: note = hemagglutinin__InfluenzaA__AAZ38594
MKTIIALSYILCLVFAQKLPGNDNSTATLCLGHHAVPNGTIVKTITNDQIEVTNATELVQSSSTGGICDSPHQILDGENCTLIDALLGDPQCDGFQNKKWDLFVERSKAYSNCYPYDVPDYASLRSLVASSGTLEFNNESFNWTGVTQNGTSSACKRRSNSSFFSRLNWLTHLKFKYPALNVTMPNNEKFDKLYIWGVHHPGTDNDQISLYAQASGRITVSTKRSQQTVIPNIGSRPRVRDIPSRISIYWTIVKPGDILLINSTGNLIAPRGYFKIRSGKSSIMRSDAPIGKCNSECITPNGSIPNDKPFQNVNRITYGACPRYVKQNTLKLATGMRNVPEKQTRGIFGAIAGFIENGWEGMVDGWYGFRHQNSEGIGQAADLKSTQAAINQINGKLNRLIGKTNEKFHQIEKEFSEVEGRIQDLEKYVEDTKIDLWSYNAELLVALENQHTIDLTDSEMNKLFERTKKQLRENAEDMGNGCFKIYHKCDNACIGSIRNGTYDHDVYRDEALNNRFQIKGVELKSGYKDWILWISFAISCFLLCVALLGFIMWACQKGNIRCNICI

SEQ ID NO: 241 - protein, 566 aa, synthetic construct
  REGION 1..566: note = hemagglutinin__InfluenzaA__AAZ38605
MKTIIALSYILCLVFTQKLPGNDNSTATLCLGHHAVPNGTIVKTITNDQIEVTNATELVQSSSTGGICDSPHQILDGENCTLIDALLGDPQCDGFQNKKWDLFVERSKAYSNCYPYDVPDYASLRSLVASSGTLEFNNESFNWTGVTQNGTSSACKRRSNNSFFSRLNWLTHLKFKYPALNVTMPNNEKFDKLYIWGVHHPGTDNDQISLYAQASGRITVSTKRSQQTVIPSIGSRPRIRDVPSRISIYWTIVKPGDILLINSTGNLIAPRGYFKIRSGKSSIMRSDAPIGKCNSECITPNGSIPNDKPFQNVNRITYGACPRYVKQNTLKLATGMRNVPEKQTRGIFGAIAGFIENGWEGMVDGWYGFRHQNSEGTGQAADLKSTQAAINQINGKLNRLIGKTNEKFHQIEKEFSEVEGRIQDLEKYVEDTKIDLWSYNAELLVALENQHTIDLTDSEMNKLFERTKKQLRENAEDMGNGCFKIYHKCDNACIGSIRNGTYDHDVYRDEALNNRFQIKGVELKSGYKDWILWISFAISCFLLCVALLGFIMWACQKGNIRCNICI

SEQ ID NO: 242 - protein, 565 aa, synthetic construct
  REGION 1..565: note = hemagglutinin__InfluenzaA__AAZ38627
MKAKLLVLLCTFTATYADTICIGYHANNSTDTVDTVLEKNVTVTHSVNLLEDSHNGKLCLLKGIAPLQLGNCSVAGWILGNPECELLISKESWSYIVETPNPENGTCYPGYFADYEELREQLSSVSSFERFEIFPKGSSWPNHTVTGVSASCSHNGKSSFYRNLLWLTGKNGLYPNLSMSYVNNKEKEVLVLWGVHHPPNIGDQRALYHTENAYVSVVSSHYSRRFTPEIAKRPKVRDQEGRINYYWTLLEPGDTIIFEANGNLIAPWYAFALSRGFGSGIITSNAPMDECDAKCQTPQGAINSSLPFQNVHPVTIGECPKYVRSAKLRMATGLRNIPSIQSRGLFGAIAGFIEGGWTGMVDGWYGYHHQNEQGSGYAADQKSTQNAINGITNKVNSVIEKMNTQFTAVGKEFNKLERRMENLNKKVDDGFLDIWTYNAELLVLLENERTLDFHDSNVKNLYEKVKSQLKNNAKEIGNGCFEFYHKCNNECMESVKNGTYDYPKYSEESKLNREKIDGVKLESMGVYQILAIYSTVASSLVLLVSLGAISFWMCSNGSLQCRICI

SEQ ID NO: 243 - protein, 566 aa, synthetic construct
  REGION 1..566: note = hemagglutinin__InfluenzaA__AAZ38638
MKTIIALSYILCLVFAQKLPGNDNSTATLCLGHHAVPNGTIVKTITNDQIEVTNATELVQSSSTGGICDSPHQILDGENCTLIDALLGDPQCDGFQNKKWDLFVERSKAYSNCYPYDVPDYASLRSLVASSGTLEFNNESFNWTGVTQNGTSSACKRRSNNSFFSRLNWLTHLKFKYPALNVTMPNNEKFDKLYIWGVHHPGTDNDQISLYAQASGRITVSTKRSQQTVIPNIGSRPRVRDIPSRISIYWTIVKPGDILLINSTGNLIAPRGYFKIRSGKSSIMRSDAPIGKCNSECITPNGSIPNDKPFQNVNRITYGACPRYVKQNTLKLATGMRNVPEKQTRGIFGAIAGFIENGWEGMVDGWYGFRHQNSEGIGQAADLKSTQAAINQINGKLNRLIGKTNEKFHQIEKEFSEVEGRIQDLEKYVEDTKIDLWSYNAELLVALENQHTIDLTDSEMNKLFERTKKQLRENAEDMGNGCFKIYHKCDNACIGSIRNGTYDHDVYRDEALNNRFQIKGVELKSGYKDWILWISFAISCFLLCVALLGFIMWACQKGNIRCNICI

SEQ ID NO: 244 - protein, 566 aa, synthetic construct; identical to SEQ ID NO: 243
  REGION 1..566: note = hemagglutinin__InfluenzaA__AAZ38650

SEQ ID NO: 245 - protein, 566 aa, synthetic construct
  REGION 1..566: note = hemagglutinin__InfluenzaA__AAZ43370
MKTIIALSYIFCLVFAQKLPGNDNSTATLCLGHHAVPNGTLVKTITNDQIEVTNATELVQSSSTGRICDSPHRILDGKNCTLIDALLGDPHCDGFQNEKWDLFIERSKAFSNCYPYDVPDYASLRSLVASSGTLEFINEGFNWTGVTQSGGSYACKRGSVKSFFSRLNWLYESEYKYPALNVTMPNNGKFDKLYIWGVHHPSTEKEQTNLYVRASGRVTVSTKRSQQTVIPNIGSRPWVRGLSSRISIYWTIVKPGDILLINSTGNLIAPRGYFKIRTGKSSIMRSDAPIGTCSSECITPNGSIPNDKPFQNVNKITYGACPRYVKQNTLKLATGMRNVPEKQTRGIFGAIAGFIENGWEGMVDGWYGFRHQNSEGTGQAADLKSTQAAIDQINGKLNRLIEKTNEKFHQIEKEFSEVEGRIQDLEKYVEDTKIDLWSYNAELLVALENQHTIDLTDSEMNKLFEKTRKQLRENAEDMGNGCFKIYHKCDNACIGSIRNGTYDHDVYRDEALNNRFQIKGVELKSGYKDWILWISFAISCFLLCVVLLGFIMWACQKGNIRCNICI

SEQ ID NO: 246 - protein, 566 aa, synthetic construct; identical to SEQ ID NO: 118
  REGION 1..566: note = hemagglutinin__InfluenzaA__AAZ43394

SEQ ID NO: 247 - protein, 566 aa, synthetic construct
  REGION 1..566: note = hemagglutinin__InfluenzaA__AAZ43405
MKTIIALSYILCLVFAQKLPGNDNSTATLCLGHHAVPNGTLVKTITNDQIEVTNATELVQSSSTGRICDSPHQILDGENCTLIDALLGDPHCDGFQNKEWDLFVERSKAYSNCYPYDVPDYASLRSLVASSGTLEFNNESFNWTGVAQNGTSSACKRRSNKSFFSRLNWLHQLKYKYPALNVTMPNNEKFDKLYIWGVHHPSTDSDQISLYAQASGRVTVSTKRSQQTVIPNIGSRPWVRGVSSRISIYWTIVKPGDILLINCTGNLIAPRGYFKIRSGKSSIMRSDASIGKCNSECITPNGSIPNDKPFQNVNRITYGACPRYVKQNTLKLATGMRNVPEKQTRGIFGAIAGFIENGWEGMVDGWYGFRHQNSEGTGQAADLKSTQAAINQINGKLNRLIEKTNEKFHQIEKEFSEVEGRIQDLEKYVEDTKIDLWSYNAELLVALENQHTIDLTDSEMNKLFERTKKQLRENAEDMGNGCFKIYHKCDNACIGSIRNGTYDHDVYRDEALNNRFQIKGVELKSGYKDWILWISFAISCFLLCVVLLGFIMWACQKGNIRCNICI

SEQ ID NO: 248 - protein, 566 aa, synthetic construct; identical to SEQ ID NO: 47
  REGION 1..566: note = hemagglutinin__InfluenzaA__AAZ74352

SEQ ID NO: 249 - protein, 566 aa, synthetic construct; identical to SEQ ID NO: 203
  REGION 1..566: note = hemagglutinin__InfluenzaA__AAZ74363

SEQ ID NO: 250 - protein, 565 aa, synthetic construct
  REGION 1..565: note = hemagglutinin__InfluenzaA__AAZ74374
MKVKLLILLCTFTATYADTICIGYHANNSTDTVDTVLEKNVTVTHSVNLLEDSHNGKLCLLKGIAPLQLGNCSVAGWILGNPECELLISKESWSYIVETPNPENGACYPGYFADYEELREQLSSVSSFERFEIFPKESSWPNHTVTGVSASCSHNGKSSFYRNLLWLTGKNGLYPNLSKSYANNKEKEVLILWGVHHPPNIGDQRTLYHTENAYVSVVSSHYGRRFTPEITKRPKVRDQEGRINYYWTLLEPGDTIIFEANGNLIAPWYAFALSRGFGSGIITSNAPMDECDAKCQTPQGAINSSLPFQNVHPVTIGECPKYVRSAKLRMVTGLRNIPSIQSRGLFGAIAGFIEGGWTGMVDGWYGYHHQNEQGSGYAADQKSTQNAINGITNKVNSVIEKMNTQFTAVGKEFNKLERRMENLNKKVDDGFLDVWTYNAELLVLLENERTLDFHDSNVKNLYEKVKSQLKNNAKEIGNGCFEFYHKCNNECMESVKNGTYDYPKYSEESKLNREKIDGVKLDSMGVYQILAIYSTVASSLVLLVSLGAISFWMCSNGSLQCRICI

SEQ ID NO: 251 - protein, 566 aa, synthetic construct
  REGION 1..566: note = hemagglutinin__InfluenzaA__AAZ74397
MNTIIALSYILCLVFAQKLPGNDNSTATLCLGHHAVPNGTLVKTITSDQIEVTNATELVQSSSTGRICDSPHRILDGENCTLIDALLGDPLCDGFQNKEWDLFVERSKAYSNCYPYDVPDYASLRSLVASSGTLEFNNESFNWTGVAQNGTSFACKRRSIKSFFSRLNWLHQLKYKYPALNVTMPNNDKFDKLYIWGVHHPGTDSDQTSLYAQASGRVTVSTKRSQQTVIPNIGSRPWVRGVSSRISIYWTIVKPGDILLINSTGNLIAPRGYFKIRSGKSSIMRSDAPIGKCNSECITPNGSIPNGKPFQNVNRITYGACPRYVKQNTLKLATGMRNVPEKQTRGIFGAIAGFIENGWEGMVDGWYGFRHQNSEGTGQAADLKSTQAAINQINGKLNRLIEKTNEKFHQIEKEFTEVEGRIQDLEKYVEDTKIDLWSYNAELLVALENQHTIDLTDSEMNKLFERTRKQLRENAEDMGNGCFKIYHKCDNACIGSIRNGTYDHDVYRDEALNNRFQIKGVELKSGYKDWILWISFATSCFLLCVVLLGFIMWACQKGNIRCNICI

SEQ ID NO: 252 - protein, 566 aa, synthetic construct
  REGION 1..566: note = hemagglutinin__InfluenzaA__AAZ74408
MKTIIALSYILCLVFAQKLPGNDNSTATLCLGHHAVPNGTLVKTITNDQIEVTNATELVQSSSTGRICDSPHQILDGENCTLIDALLGDPHCDGFQNKEWDLFVERSKAYSNCYPYDVPDYASLRSLVASSGTLEFNNESFNWTGVAQNGTSSACKRRSNKSFFSRLNWLHQLKYKYPALNVTMPNNEKFDKLYIWGVHHPSTDSDQISLYAQASGRVTVSTKRSQQTVIPNIGSRPWVRGVSSRISIYWTIVKPGDILLINSTGNLIAPRGYFKIRSGKSSIMRSDAPIGKCNSECITPNGSIPNDKPFQNVNRITYGACPRYVKQNTLKLATGMRNVPEKQTRGIFGAIAGFIENGWEGMVDGWYGFRHQNSEGTGQAADLKSTQAAINQINGKLNRLIEKTNEKFHQIEKEFSEVEGRIQDLEKYVEDTKIDLWSYNAELLVALENQHTIDLTDSEMNKLFERTKKQLRENAEDMGNGCFKIYHKCDNACIGSIRNGTYNHDVYRDEALNNRFQIKGVELKSGYKDWILWISFAISCFLLCVVLLGFIMWACQKGNIRCNICI

SEQ ID NO: 253 - protein, 566 aa, synthetic construct; identical to SEQ ID NO: 186
  REGION 1..566: note = hemagglutinin__InfluenzaA__AAZ74430

SEQ ID NO: 254 - protein, 566 aa, synthetic construct; identical to SEQ ID NO: 243
  REGION 1..566: note = hemagglutinin__InfluenzaA__AAZ74441

SEQ ID NO: 255 - protein, 566 aa, synthetic construct
  REGION 1..566: note = hemagglutinin__InfluenzaA__AAZ74452
MKTIIALSYILCLVFAQKLPGNDNSTATLCLGHHAVPNGTIVKTITNDQIEVTNATELVQSSSTGGICDSPHQILDGENCTLIDALLGDPQCDGFQNKKWDLFIERSKAYSNCYPYDVPDYASLRSLVASSGTLEFNNESFNWTGVTQNGTSSACKRRSNNSFFSRLNWLTHLKFKYPALNVTMPNNEKFDKLYIWGVHHPGTDNDQISLYAQASGRITVSTKRSQQTVIPNIGSRPRVRDIPSRISIYWTIVKPGDILLINSTGNLIAPRGYFKIRSGKSSIMRSDAPIGKCNSECITPNGSIPNDKPFQNVNRITYGACPRYVKQNTLKLATGMRNVPEKQTRGIFGAIAGFIENGWEGMVDGWYGFRHQNSEGIGQAADLKSTQAAINQINGKLNRLIGKTNEKFHQIEKEFSEVEGRIQDLEKYVEDTKIDLWSYNAELLVALENQHTIDLTDSEMNKLFERTKKQLRENAEDMGNGCFKIYHKCDNACIGSIRNGTYDHDVYRDEALNNRFQIKGVELKSGYKDWILWISFAISCFLLCVALLGFIMWACQKGNIRCNICI

SEQ ID NO: 256 - protein, 566 aa, synthetic construct
  REGION 1..566: note = hemagglutinin__InfluenzaA__AAZ74463
MKTIIALSYILCLVFAQKLPGNDNSTATLCLGHHAVPNGTIVKTITNDQIEVTNATELVQSSSTGGICDSPHQILDGENCTLIDALLGDPQCDGFQNKKWDLFVERSKAYSNCYPYDVPDYASLRSLVASSGTLEFNNESFNWTGVTQNGTSSACKRRSNNSFFSRLNWLTHLKFKYPALNVTMPNNEKFDKLYIWGVHHPGTDNDQISLYAQASGRITVSTKRSQQTVIPNIGSRPRVRDIPSRISIYWTIVKPGDILLINSTGNLIAPRGYFKIRSGKSSIMRSDAPIGKCNSECITPNGSIPNDKPFQNVNRITYGACPRYVKQNTLKLATGMRNVPEKQTRGIFGAIAGFIENGWEGMVDGWYGFRHQNSEGIGQAADLKSTQAAINQINGKLNRLIGKTNEKFHQIEKEFSEVEGRIQDLEKYVEDTKIDLWSYNAELLVALENQHTIDLTDSEMNKLFERTKKQLRENAEDMGNGCFKIYHKCDNACIGSIRNGTYDHDVYRDEALNNRFQIKGVELKSGYKDWILWISFAISCFLLCVVLLGFIMWACQKGNIRCNICI

SEQ ID NO: 257 - protein, 566 aa, synthetic construct
  REGION 1..566: note = hemagglutinin__InfluenzaA__AAZ74474
MKTIIALSYILCLVFAQKLPGNDNSTATLCLGHHAVPNGTIVKTITNDQIEVTNATELVQSSSTGGICDSPHQILDGENCTLIDALLGDPQCDGFQNKKWDLFVERSKAYSNCYPYDVPDYASLRSLVASSGTLEFNNESFNWTGVTQNGTSSACKKRSNNSFFSRLNWLTHLKFKYPALNVTMPNNEKFDKLYIWGVHHPGTDNDQISLYAQASGRITVSTKRSQQTVIPNIGSRPRVRDIPSRISIYWTIVKPGDILLINSTGNLIAPRGYFKIRSGKSSIMRSDAPIGKCNSECITPNGSIPNDKPFQNVNRITYGACPRYVKQNTLKLATGMRNVPEKQTRGIFGAIAGFIENGWEGMVDGWYGFRHQNSEGIGQAADLKSTQAAINQINGKLNRLIGKTNEKFHQIEKEFSEVEGRIQDLEKYVEDTKIDLWSYNAELLVALENQHTIDLTDSEMNKLFERTKKQLRENAEDMGNGCFKIYHKCDNACIGSIRNGTYDHDVYRDEALNNRFQIKGVELKSGYKDWILWISFAISCFLLCVALLGFIMWACQKGNIRCNICI

SEQ ID NO: 258 - protein, 566 aa, synthetic construct; identical to SEQ ID NO: 255
  REGION 1..566: note = hemagglutinin__InfluenzaA__AAZ74485

SEQ ID NO: 259 - protein, 566 aa, synthetic construct; identical to SEQ ID NO: 256
  REGION 1..566: note = hemagglutinin__InfluenzaA__AAZ74496

SEQ ID NO: 260 - protein, 566 aa, synthetic construct; identical to SEQ ID NO: 255
  REGION 1..566: note = hemagglutinin__InfluenzaA__AAZ74507

SEQ ID NO: 261 - protein, 566 aa, synthetic construct; identical to SEQ ID NO: 256
  REGION 1..566: note = hemagglutinin__InfluenzaA__AAZ74518

SEQ ID NO: 262 - protein, 566 aa, synthetic construct; identical to SEQ ID NO: 255
  REGION 1..566: note = hemagglutinin__InfluenzaA__AAZ74529

SEQ ID NO: 263 - protein, 566 aa, synthetic construct
  REGION 1..566: note = hemagglutinin__InfluenzaA__AAZ74551
MKTIIALSYILCLVFAQKLPGNDNSTATLCLGHHAVPNGTIVKTITNDQIEVTNATELVQSSSTGGICDSPHQILDGENCTLIDALLGDPQCDGFQNKKWDLFVERSKAYSNCYPYDVPDYASLRSLVASSGTLEFNNESFNWTGVTQNGTSSACKRRSNNSFFSRLNWLTHLKFKYPALNVTMPNNEKFDKLYIWGVHHPGTDNDQISLYAQASGRITVSTKRSQQTVIPNIGSRPRVRDIPSRISIYWTIVKPGDILLINSTGNLIAPRGYFKIRSGKSSIMRSDAPIGKCNSECITPNGSIPNDKPFQNVNRITYGACPRYVKQNTLKLATGMRNVPEKQTRGIFGAIAGFIENGWEGMVDGWYGFRHQNSEGIGQAADLKSTQAAINQINGKLNRLIGKTNEKFHQIEKEFSEVEGRIQDLEKYVEDTKIDLWSYNAELLVALENQHTLDLTDSEMNKLFERTKKQLRENAEDMGNGCFKIYHKCDNACIGSIRNGTYDHDVYRDEALNNRFQIKGVELKSGYKDWILWISFAISCFLLCVALLGFIMWACQKGNIRCNICI

SEQ ID NO: 264 - protein, 566 aa, synthetic construct; identical to SEQ ID NO: 186
  REGION 1..566: note = hemagglutinin__InfluenzaA__AAZ74562

SEQ ID NO: 265 - protein, 566 aa, synthetic construct
  REGION 1..566: note = hemagglutinin__InfluenzaA__AAZ74573
MKTIIALSYILCLVFAQKLPGNDNSTATLCLGHHAVPNGTIVKTITNDQIEVTNATELVQSSSTGGICDSPHQILDGENCTLIDALLGDPQCDGFQNKKWDLFIERSKAYSNCYPYDVPDYASLRSLVASSGTLEFNNESFNWTGVTQNGTSSACKRRSNNSFFSRLNWLTHLKFKYPALNVTMPNNEKFDKLYIWGVHHPGTGNDQISLYAQASGRITVSTKRSQQTVIPNIGSRPRVRDIPSRISIYWTIVKPGDILLINSTGNLIAPRGYFKIRSGKSSIMRSDAPIGKCNSECITPNGSIPNDKPFQNVNRITYGACPRYVKQNTLKLATGMRNVPEKQTRGIFGAIAGFIENGWEGMVDGWYGFRHQNSEGIGQAADLKSTQAAINQINGKLNRLIGKTNEKFHQIEKEFSEVEGRIQDLEKYVEDTKIDLWSYNAELLVALENQHTIDLTDSEMNKLFERTKKQLRENAEDMGNGCFKIYHKCDNACIGSIRNGTYDHDVYRDEALNNRFQIKGVELKSGYKDWILWISFAISCFLLCVALLGFIMWACQKGNIRCNICI

SEQ ID NO: 266 - protein, 566 aa, synthetic construct
  REGION 1..566: note = hemagglutinin__InfluenzaA__AAZ74584
MKTIIALSYILCLVFAQKLPGNDNSTATLCLGHHAVPNGTLVKTIANDQIEVTNATELVQSSSTGRICDSPHQILDGENCTLIDALLGDPHCDGFQNKEWDLFVERSKAYSNCYPYDVPDYASLRSLVASSGTLEFNNESFNWTGVAQNGTSSACKRRSNKSFFSRLNWLHQLKYKYPAQNVTMPNNEKFDKLYIWGVHHPSTDSDQISLYAQASGRVTVSTKRSQQTVIPNIGSRPWVRGVSSRISIYWTIVKPGDILLINSTGNLIAPRGYFKIRSGKSSIMRSDAPIGKCNSECITPNGSIPNDKPFQNVNRITYGACPRYVKQNTLKLATGMRNVPEKQTRGIFGAIAGFIENGWEGMVDGWYGFRHQNSEGTGQAADLKSTQAAINQINGKLNRLIEKTNEKFHQIEKEFSEVEGRIQDLEKYVEDTKIDLWSYNAELLVALENQHTIDLTDSEMNKLFERTKKQLRENAEDMGNGCFKIYHKCDNACIGSIRNGTYDHDVYRDEALNNRFQIKGVELKSGYKDWILWISFAISCFLLCVALLGFIMWACQKGNIRCNICI

SEQ ID NO: 267 - protein, 566 aa, synthetic construct; identical to SEQ ID NO: 243
  REGION 1..566: note = hemagglutinin__InfluenzaA__AAZ74595

SEQ ID NO: 268 - protein, 566 aa, synthetic construct
  REGION 1..566: note = hemagglutinin__InfluenzaA__AAZ74617
MKTIIALSYILCLVFAQKLPVNDNSTATLCLGHHAVPNGTLVKTITNDHIEVTNATELVQSSSTGRICDSPHQILDGENCTLIDALLGDPHCDGFQNKEWDLFVERSTAYSNCYPYDVPDYASLRSLVASSGTLEFNNESFNWTGVAQNGTSSACKRRSIKSFFSRLNWLHQLKYKYPALNVTMPNNEKFDKLYIWGVHHPSTDSDQISLYAQASGRVTVSTKRSQQTVIPNIGSRPWVRGVSSKISIYWTIVKPGDILLINSTGNLIAPRGYFKIRSGKSSIMRSNAPIGKCNSECITPNGSIPNDKPFQNVNRITYGACPRYVKQNTLKLATGMRNVPEKQTRGIFGAIAGFIENGWEGMVDGWYGFRHQNSEGTGQAADLKSTQAAINQINGKLNRLIEKTNEKFHQIEKEFSEVEGRIQDLEKYVEDTKIDLWSYNAELLVALENQHTIDLTDSEMNKLFERTRKQLRENAEDMGNGCFKIYHKCDNACIGSIRNGTYDHDVYRDEALNNRFQIKGVELKSGYKDWILWISFAISCFLLCVVLLGFIMWACQKGNIRCNICI

SEQ ID NO: 269 - protein, 566 aa, synthetic construct; identical to SEQ ID NO: 47
  REGION 1..566: note = hemagglutinin__InfluenzaA__AAZ79505

SEQ ID NO: 270 - protein, 566 aa, synthetic construct
  REGION 1..566: note = hemagglutinin__InfluenzaA__AAZ79516
MKTIIALSYILCLVFAQKLPGNDNSTATLCLGHHAVPNGTLVKTITNDQIEVTNATELVQSSSTGRICDSPHQILDGENCTLIDALLGDPHCDGFQNKEWDLFVERSKAYSNCYPYDVPDYASLRSLVASSGTLEFNNESFNWTGVAQNGTSSACKRRSNKSFFSRLNWLHQLKYKYPALNVTMPNNEKFDKLYIWGVHHPSTDSDQISLYAQASGRVTVSTKRSQQTVIPNIGSRPWVRGVSSRISIYWTIVKPGDILLINSTGNLIAPRGYFKIRSGKSSIMRSDAPIGKCNSECITPNGSIPNDKPFQNVNRITYGACPRYVKQNTLKLATGMRNVPEKQTRGIFGAIAGFIENGWEGMVDGWYGFRHQNSEGTGQAADLKSTQAAINQINGKLNRLIEKTNEKFHQIEKEFSEVEGRIQDLEKYVEDTKIDLWSYNAELLVALENQHTIDLTDSEMNKLFERTKKQLRENAEDMGNGCLKIYHKCDNACIGSIRNGTYDHDVYRDEALNNRFQIKGVELKSGYKDWILWISFAISCFLLCVVLLGFIMWACQKGNIRCNICI

SEQ ID NO: 271 - protein, 566 aa, synthetic construct
  REGION 1..566: note = hemagglutinin__InfluenzaA__AAZ79527
MKTIIALSYILCLVFAQKLPGNDNSTATLCLGHHAVPNGTIVKTITNDQIEVTNATELVQSSSTGGICDSPHQILDGENCTLIDALLGDPQCDGFQNKKWDLFVERSKAYSNCYPYDVPDYASLRSLVASSGTLEFNNESFDWTGVTQNGTSSACKRRSNKSFFSRLNWLTHLKYKYPALNVTMPNNEKFDKLYIWGVHHPGTDSDQISLYAQASGRITVSTKRSQQTVIPNIGSRPRVRDVSSRISIYWTIVKPGDILLINSTGNLIAPRGYFKIRSGKSSIMRSDAPIGKCNSECITPNGSIPNDKPFQNVNRITYGACPRYVKQNTLKLATGMRNVPERQTRGIFGAIAGFIENGWEGMVDGWYGFRHQNSEGTGQAADLKSTQAAINQINGKLNRLIGKTNEKFHQIEKEFSEVEGRIQDLERYVEDTKIDLWSYNAELLVALENQHTIDLTDSEMNKLFERTKKQLRENAEDMGNGCFKIYHKCDNACIGSIRNGTYDHDVYRDEALNNRFQIKGVELKSGYKDWILWISFAISCFLLCVALLGFIMWACQKGNIRCNICI

SEQ ID NO: 272 - protein, 565 aa, synthetic construct
  REGION 1..565: note = hemagglutinin__InfluenzaA__AAZ79549
MKVKLLILLCTFTATYADTICIGYHANNSTDTVDTVLEKNVTVTHSVNLLEDSHNGKLCLLKGIAPLQLGNCSVAGWILGNPECELLISKESWSYIVETPNPENGACYPGYFADYEELREQLSSVSSFERFEIFPKESSWPNHTVTGVSASCSHNGKSSFYRNLLWLTGKNGLYPNLSKSYANNKEKEVLILWGVHHPPNIGNQRTLYHTENAYVSVVSSHYSRRFTPEITKRPKVRDQEGRINYYWTLLEPGDTIIFEANGNLIAPWYAFALSRGFGSGIITSNAPMDECDAKCQTPQGAINSSLPFQNVHPVTIGECPKYVRSAKLRMVTGLRNIPSIQSRGLFGAIAGFIEGGWTGMVDGWYGYHHQNEQGSGYAADQKSTQNAINGITNKVNSVIEKMNTQFTAVGKEFNKLERRMENLNKKVDDGFLDIWTYNAELLVLLENERTLDFHDSNVKNLYEKVKSQLKNNAKEIGNGCFEFYHKCNNECMESVKNGTYDYPKYSEESKLNREKIDGVKLDSMGVYQILAIYSTVASSLVLLVSLGAISFWMCSNGSLQCRICI

SEQ ID NO: 273 - protein, 566 aa, synthetic construct
  REGION 1..566: note = hemagglutinin__InfluenzaA__AAZ79560
MKTIIALSYILCLVFAQKLPGNDNSTATLCLGHHAVPNGTLVKTITNDQIEVTNATELVQSSSTGRICDSPHQILDGENCTLIDALLGDPHCDGFQNKEWDLFVERSKAYSNCYPYDVPDYASLKSLVASSGTLEFNNESFNWTGVAQNGTSSACKRRSNKSFFSRLNWLHQLKYKYPALNVTMPNNEKFDKLYIWGVHHPSTDSDQISLYAQASGRVTVSTKRSQQTVIPNIGSRPWVRGVSSRISIYWTIVKPGDILLINSTGNLIAPRGYFKIRSGKSSIMRSNAPIGKCNSECITPNGSIPNDKPFQNVNRITYGACPRYVKQNTLKLATGMRNVPEKQTRGIFGAIAGFIENGWEGMVDGWYGFRHQNSEGTGQAADLKSTQAAINQINGKLNRLIEKTNEKFHQIEKEFSEVEGRIQDLEKYVEDTKIDLWSYNAELLVALENQHTIDLTDSEMNKLFERTKKQLRENAEDMGNGCFKIYHKCDNACIGSIRNGTYDHDVYRDEALNNRFQIKGVELKSGYKDWILWISFAISCFLLCVVLLGFIMWACQKGNIRCNICI

SEQ ID NO: 274 - protein, 566 aa, synthetic construct
  REGION 1..566: note = hemagglutinin__InfluenzaA__AAZ79571
MKTIIALSYILCLVFAQKLPGNDNSTATLCLGHHAVPNGTLVKTITNDQIEVTNATELVQSSSTGRICDSPHQILDGENCTLIDALLGDPRCDGFQNKEWDLFVERSKAYSNCYPYDVPDYASLRSLVASSGTLEFNNESFNWTGVAQNGTSSACKRRSNKSFFSRLNWLHQLKYKYPALNVTMPNNEKFDKLYIWGVHHPSTDSDQISLYAQASGRVTVSTKRSQQTVIPNIGSRPWVRGVSSRISIYWTIVKPGDILLINSTGNLIAPRGYFKIRSGKSSIMRSDAPIGKCNSECITPNGSIPNDKPFQNVNRITYGACPRYVKQNTLKLATGMRNVPEKQTRGIFGAIAGFIENGWEGMVDGWYGFRHQNSEGTGQAADLKSTQAAINQINGKLNRLIEKTNEKFHQIEKEFSEVEGRIQDLEKYVEDTKIDLWSYNAELLVALENQHTIDLTDSEMNKLFERTKKQLRENAEDMGNGCFKIYHKCDNACIGSIRNGTYDHDVYRDEALNNRFQIKGVELKSGYKDWILWISFAISCFLLCVVLLGFIMWACQKGNIRCNICI

SEQ ID NO: 275 - protein, 566 aa, synthetic construct
  REGION 1..566: note = hemagglutinin__InfluenzaA__AAZ79582
MKTIIALSYILCLVFAQKLPGNDNSTATLCLGHHAVPNGTLVKTITNDQIEVTNATELVQSSSTGRICDSPHQILDGENCTLIDALLGDPHCDGFQNKEWDLFVERSKAYSNCYPYDVPDYASLRSLVASSGTLEFNNESFNWTGVAQNGTSSACKRRSNKSFFSRLNWLHQLKYKYPALNVTMPNNEKFDKLYIWGVHHPSTDSDQISLYAQASGRVTVSTKRSQQTVIPNIGSGPWVRGVSSRISIYWTIVKPGDILLINSTGNLIAPRGYFKIRSGKSSIMRSDAPIGKCNSECITPNGSIPNDKPFQNVNRITYGACPRYVKQNTLKLATGMRNVPEKQTRGIFGAIAGFIENGWEGMVDGWYGFRHQNSEGTGQAADLKSTQAAINQINGKLNRLIEKTNEKFHQIEKEFSEVEGRIQDLEKYVEDTKIDLWSYNAELLVALENQHTIDLTDSEMNKLFERTKKQLRENAEDMGNGCFKIYHKCDNACIGSIRNGTYDHDVYRDEALNNRFQIKGVELKSGYKDWILWISFAISCFLLCVVLLGFIMWACQKGNIRCNICI

SEQ ID NO: 276 - protein, 565 aa, synthetic construct
  REGION 1..565: note = hemagglutinin__InfluenzaA__AAZ79604
MKAKLLVLLCTFTATYADTICIGYHANNSTDTVDTVLEKNVTVTHSVNLLEDSHNGKLCLLKGIAPLQLGNCSVAGWILGNPECELLISKESWSYIVETPNPENGTCYPGYFADYEELREQLSSVSSFERFEIFPKGSSWPNHTVTGVSASCSHNGKSSFYRNLLWLTGKNGLYPNLSMSYVNNKEKEVLVLWGVHHPPNIGDQRALYHTENAYVSVVSSHYSRRFTPEIAKRPKVRDQEGRINYYWTLLEPGDTIIFEANGNLIAPWYAFALSRGFGSGIITSNAPMDECDAKCQTPQGAINSSLPFQNVHPVTIGECPKYVRSAKLRMVTGLRNIPSIQSRGLFGAIAGFIEGGWTGMVDGWYGYHHQNEQGSGYAADQKSTQNAINRITNKVNSVIEKMNTQFTAVGKEFNKLERRMENLNKKVDDGFLDIWTYNAELLVLLENERTLDFHDSNVKNLYEKVKSQLKNNAKEIGNGCFEFYHKCNNECMESVKNGTYDYPKYSEESKLNREKIDGVKLESMGVYQILAIYSTVASSLVLLVSLGAISFWMCSNGSLQCRICI

SEQ ID NO: 277 - protein, 566 aa, synthetic construct
  REGION 1..566: note = hemagglutinin__InfluenzaA__AAZ79615
MKTIIALSYILCLVFAQKIPGNDNSTATLCVGHHAVPNGTIVKTITNDQIEVTNATELVQSSSTGGICDSPHQILDGENCTLIDALLGDPQCDGFQNKKWDLFVERSKAYSNCYPYDVPDYASLRSLVASSGTLEFNNESFNWTGVTQNGTSSACKRRSNNSFFSRLNWLTHLKFKYPALNVTMPNNEKFDKLYIWGVHHPGTDNDQISLYAQASGRITVSTKRSQQTVIPNIGSRPRVRDIPSRISIYWTIVKPGDILLINSTGNLIAPRGYFKIRSGKSSIMRSDAPIGKCNSECITPNGSIPNDKPFQNVNRITYGACPRYVKQNTLKLATGMRNVPEKQTRGIFGAIAGFIENGWEGMVDGWYGFRHQNSEGIGQAADLKSTQAAINQINGKLNRLIGKTNEKFHQIEKEFSEVEGRIQDLEKYVEDTKIDLWSYNAELLVALENQHTIDLTDSEMNKLFERTKKQLRENAEDMGNGCFKIYHKCDNACIGSIRNGTYDHDVYRDEALNNRFQIKGVELKSGYKDWILWISFAISCFLLCVVLLGFIMWACQKGNIRCNICI

SEQ ID NO: 278 - protein, 566 aa, synthetic construct
  REGION 1..566: note = hemagglutinin__InfluenzaA__AAZ79627
MKTIIALSYILCLVFAQKLPGNDNSTATLCLGHHAVPNGTIVKTITNDQIEVTNATELVQSSSTGGICDSPHQILDGENCTLIDALLGDPQCDGFQNKKWDLFVERSKAYSNCYPYDVPDYASLRSLVASSGTLEFNNESFNWTGVTQNGTSSACKRRSNSSFFSRLNWLTHLKFKYPALKVTMPNNEKFDKLYIWGVHHPGTDNDQISLYAQASGRITVSTKRSQQTVIPNIGSRPRVRDIPSRISIYWTIVKPGDILLINSTGNLIAPRGYFKIRSGKSSIMRSDAPIGKCNSECITPNGSIPNDKPFQNVNRITYGACPRYVKQNTLKLATGMRNVPEKQTRGIFGAIAGFIENGWEGMVDGWYGFRHQNSEGIGQAADLKSTQAAINQINGKLNRLIGKTNEKFHQIEKEFSEVEGRIQDLEKYVEDTKIDLWSYNAELLVALENQHTIDLTDSEMNKLFERTKKQLRENAEDMGNGCFKIYHKCDNACIGSIRNGTYDHDVYRDEALNNRFQIKGVELKSGYKDWILWISFAISCFLLCVALLGFIMWACQKGNIRCNICI

SEQ ID NO: 279 - protein, 566 aa, synthetic construct; identical to SEQ ID NO: 256
  REGION 1..566: note = hemagglutinin__InfluenzaA__AAZ79941

SEQ ID NO: 280 - protein, 566 aa, synthetic construct; identical to SEQ ID NO: 255
  REGION 1..566: note = hemagglutinin__InfluenzaA__AAZ79944

SEQ ID NO: 281 - protein, 566 aa, synthetic construct
  REGION 1..566: note = hemagglutinin__InfluenzaA__AAZ79963
MKTIIALSYILCLVFAQKLPGNDNSTATLCLGHHAVPNGTIVKTITNDQIEVTNATELVQSSSTGGICDSPHQILDGENCTLIDALLGDPQCDGFQNKKWDLFVERSKAYSNCYPYDVPDYASLRSLVASSGTLEFNNESFNWTGVTQNGTSSACKRRSNNSFFSRLNWLTHLKFKYPALNVTMPNNEKFDKLYIWGVHHPGTDNDQISLYAQASGRITVSTKRSQQTVIPSIGSRPRIRDVPSRISIYWTIVKPGDILLINSTGNLIAPRGYFKIRSGKSSIMRSDAPIGKCNSECITPNGSIPNDKPFQNVNRITYGACPRYVKQNTLKLATGMRNVPEKQTRGIFGAIAGFIENGWEGMVDGWYGFRHQNSEGTGQAADLKSTQAAINQINGKLNRLIGKTNEKFHQIEKEFSEVEGRIQDLEKYVEDTKIDLWSYNAELLVALENQHTIDLTDSEMNKLFERTKKQLRENAEDMGNGCFKIYHKCDNACIGSIRNGTYDHDVYRDEALNNRFQIKGVELKSGYKDWILWISFAISCFLLCVALLGFIMWACQKGNIRCNICI

SEQ ID NO: 282 - protein, 566 aa, synthetic construct
  REGION 1..566: note = hemagglutinin__InfluenzaA__AAZ79974
MKTIIALSYILCLVFAQKLPGNDNSTATLCLGHHAVPNGTIVKTITNDQIEVTNATELVQSSSTGGICDSPHQILDGENCTLIDALLGDPQCDGFQNKKWDLFVERSKAYSNCYPYDVPDYASLRSLVASSGTLEFNNESFNWTGVTQNGTSSACKRRSNNSFFSRLNWLTHLKFKYPALNVTMPNNEKFDKLYIWGVHHPGTNNDQISLYAQASGRITVSTKRSQQTVIPNIGSRPRVRDIPSRISIYWTIVKPGDILLINSTGNLIAPRGYFKIRSGKSSIMRSDAPIGKCNSECITPNGSIPNDKPFQNVNRITYGACPRYVKQNTLKLATGMRNVPEKQTRGIFGAIAGFIENGWEGMVDGWYGFRHQNSEGIGQAADLKSTQAAINQINGKLNRLIGKTNEKFHQIEKEFSEVEGRIQDLEKYVEDTKIDLWSYNAELLVALENQHTIDLTDSEMNKLFERTKKQLRENAEDMGNGCFKIYHKCDNACIGSIRNGTYDHDVYRDEALNNRFQIKGVELKSGYKDWILWISFAISCFLLCVALLGFIMWACQKGNIRCNICI

SEQ ID NO: 283 - protein, 566 aa, synthetic construct; identical to SEQ ID NO: 255
  REGION 1..566: note = hemagglutinin__InfluenzaA__AAZ79996

SEQ ID NO: 284 - protein, 566 aa, synthetic construct
  REGION 1..566: note = hemagglutinin__InfluenzaA__AAZ80007
MKTIIALSHIFCLVLGQYLPGNDNSTATLCLGHHAVPNGTLVKTITNDQIEVTNATELVQSSSTGKICNNPHRILDGIDCTLIDALLGDPHCDGFQNETWDLFVERSKAFSNCYPYDVPDYASLRSLVASSGTLEFITEGFTWTGVTQNGGSNACKRGPGSGFFSRLNWLTKSESTYPVLNVTMPNNDNFDKLYIWGVHHPSTNQEQTSLYVQASGRVTVSTRRSQQTIIPNIGSRPWVRGLSSRISIYWTIVKPGDVLVINSNGNLIAPRGYFKMRTGKSSIMRSDAPIDTCISECITPNGSIPNDKPFQNVNKITYGACPKYVKQNTLKLATGMRNVPEKQTRGLFGAIAGFIENGWEGMIDGWYGFRHQNSEGTGQAADLKSTQAAIDQINGKLNRVIEKTNEKFHQIEKEFSEVEGRIQDLEKYVEDTKIDLWSYNAELLVALENQHTIDLTDSEMNKLFEKTRRQLRENAEDMGNGCFKIYHKCDNACIESIRNGTYDHDVYRDEALNNRFQIKGVELKSGYKDWILWISFAISCFLLCVVLLGFIMWACQRGNIRCNICI

SEQ ID NO: 285 - protein, 566 aa, synthetic construct; identical to SEQ ID NO: 256
  REGION 1..566: note = hemagglutinin__InfluenzaA__AAZ80017

SEQ ID NO: 286 - protein, 566 aa, synthetic construct
  REGION 1..566: note = hemagglutinin__InfluenzaA__AAZ80030
MKTIIALSYILCLVFAQELPGNDNSTATLCLGHHAVPNGTIVKTITNDQIEVTNATELVQSSSTGGICDSPHQILDGENCTLIDALLGDPQCDGFQNKKWDLFVERSKAYSNCYPYDVPDYASLRSLVASSGTLEFNNESFNWTGVTQNGTSSACKRRSNNSFFSRLNWLTHLKFKYPALNVTMPNNEKFDKLYIWGVHHPGTDNDQTSLYAQASGRITVSTKRSQQTVIPNIGSRPRVRDIPSRISIYWTIVKPGDILLINSTGNLIAPRGYFKIRSGKSSIMRSDAPIGKCNSECITPNGSIPNDKPFQNVNRITYGACPRYVKQNTLKLATGMRNVPEKQTRGIFGAIAGFIENGWEGMVDGWYGFRHQNSEGIGQAADLKSTQAAINQINGKLNRLIGKTNEKFHQIEKEFSEVEGRIQDLEKYVEDTKIDLWSYNAELLVALENQHTIDLTDSEMNKLFERTKKQLRENAEDMGNGCFKIYHKCDNACIGSIRNGTYDHDVYRDEALNNRFQIKGVELKSGYKDWILWISFAISCFLLCVALLGFIMWACQKGNIRCNICI

SEQ ID NO: 287 - protein, 566 aa, synthetic construct
  REGION 1..566: note = hemagglutinin__InfluenzaA__AAZ83242
MKTIIALSYILCLVFAQKLPGNDNSTATLCLGHHAVPNGTIVKTITNDQIEVTNATELVQSSSTGEICDSPHQILDGENCTLIDALLGDPQCDGFQNKKWDLFVERNKAYSNCYPYDVPDYASLRSLVASSGTLEFNNESFNWTGVTQNGTSSACKRRSNKSFFSRLNWLTHLKYKYPALNVTMPNNEKFDKLYIWGVHHPGTDSDQINLYAQASGRITVSTKRSQQTVIPNIGYRPRVRDVPSRISIYWTIVKPGDILLINSTGNLIAPRGYFKIRSGKSSIMRSDAPIGKCNSECITPNGSIPNDKPFQNVNRITYGACPRYVKQNTLKLATGMRNVPEKQTRGIFGAIAGFIENGWEGMVDGWYGFRHQNSEGTGQAADLKSTQAAINQINGKLNRLIGKTNEKFHQIEKEFSEVEGRIQDLEKYVEDTKIDLWSYNAELLVALENQHTIDLTDSEMNKLFERTKKQLRENAEDMGNGCFKIYHKCDNACIGSIRNGTYDHDVYRDEALNNRFQIKGVELKSGYKDWILWISFAISCFLLCVALLGFIMWACQKGNIRCNICI

SEQ ID NO: 288 - protein, 566 aa, synthetic construct
  REGION 1..566: note = hemagglutinin__InfluenzaA__AAZ83266
MKTIIALSYILCLVFAQKLPGNDNSTATLCLGHHAVPNGTLVKTITNDQIEVTNANELVQSSSTGRICDSPHQILDGENCTLIDALLGDPRCDGFQNKEWDLFVERSKAYSNCYPYDVPDYASLRSLVASSGTLEFNNESFNWTGVAQNGTSSACKRRSNKSFFSRLNWLHQLKYKYPALNVTMPNNEKFDKLYIWGVHHPSTDSDQISLYAQASGRVTVSTKRSQQTVIPNIGSRPWVRGVSSRISIYWTIVKPGDILLINSTGNLIAPRGYFKIRSGKSSIMRSDAPIGKCNSECITPNGSIPNDKPFQNVNRITYGACPRYVKQNTLKLATGMRNVPEKQTRGIFGAIAGFIENGWEGMVDGWYGFRHQNSEGTGQAADLKSTQAAINQINGKLNRLIEKTNEKFHQIEKEFSEVEGRIQDLEKYVEDTKIDLWSYNAELLVALENQHTIDLTDSEMNKLFERTKKQLRENAEDMGNGCFKIYHKCDNACIGSIRNGTYDHDVYRDEALNNRFQIKGVELKSGYKDWILWISFAISCFLLCVVLLGFIMWACQKGNIRCNICI

SEQ ID NO: 289 - protein, 566 aa, synthetic construct; identical to SEQ ID NO: 186
  REGION 1..566: note = hemagglutinin__InfluenzaA__AAZ83277

SEQ ID NO: 290 - protein, 566 aa, synthetic construct; identical to SEQ ID NO: 72
  REGION 1..566: note = hemagglutinin__InfluenzaA__AAZ83288

SEQ ID NO: 291 - protein, 566 aa, synthetic construct
  REGION 1..566: note = hemagglutinin__InfluenzaA__AAZ83312
MKTIIALSYILCLVFAQKLPGNDNSTATLCLGHHAVPNGTLVKTITNDQIEVTNATELVQSSSTGRICDSPHQILDGENCTLIDALLGDPHCDGFQNKEWDLFVERSKAYSNCYPYDVPDYASLRSLVASSGTLEFNNESFNWTGVAQNGTSSACKRRSIKSFFSRLNWLHQLKYKYPALNVTMPNNDKFDKLYIWGVHHPSTDSDQTSLYAQASGRVTVSTKRSQQTVIPNIGSRPWVRGVSSRISIYWTIVKPGDILLINSTGNLIAPRGYFKIRSGKSSIIRSDAPIGKCNSECITPNGSIPNDKPFQNVNRITYGACPRYVKQNTLKLATGMRNVPEKQTRGIFGAIAGFIENGWEGMVDGWYGFRHQNSEGTGQAADLKSTQAAINQINGKLNRLIEKTNEKFHQIEKEFSEVEGRIQDLEKYVEDTKIDLWSYNAELLVALENQHTIDLTDSEMNKLFERTRKQLRENAEDMGNGCFKIYHKCDNACIGSIRNGTYDHDVYRDEALNNRFQIKGVELKSGYKDWILWISFAISCFLLCVVLLGFIMWACQKGNIRCNICI

SEQ ID NO: 292 - protein, 566 aa, synthetic construct
  REGION 1..566: note = hemagglutinin__InfluenzaA__AAZ83323
MKTIIALSYILCLVFAQKLPGNDNSTATLCLGHHAVPNGTLVKTITNDQIEVTNATELVQSSSTGRICDSPHRILDGENCTLIDALLGDPHCDGFQNKEWDLFVERSKAYSNCYPYDVQDYASLRSLVASSGTLEFNNESFNWTGVAQNGTSYACKRRSIKSFFSRLNWLHQLKYKYPALNVTMPNNDKFDKLYIWGVHHPSTDSDQTSLYAQASGRVTVSTKRSQQTVISNIGSRPWVRGVSSRISIYWTIVKPGDILLITSTGNLIAPRGYFKIRSGKSSIMRSDAPIGKCNSECITPNGSIPNDKPFQNVNRITYGACPRYVKQNTLKLATGMRNVPEKQTRGIFGAIAGFIENGWEGMVDGWYGFRHQNSEGTGQAADLKSTQAAINQINGKLNRLIEKTNEKFHQIEKEFSEVEGRIQDLEKYVEDTKIDLWSYNAELLVALENQHTIDLTDSEMNKLFERTRKQLRENAEDMGNGCFKIYHKCDNACIGSIRNGTYDHDVYRDEALNNRFQIKGVELKSGYKDWILWISFAISCFLLCVVLLGFIMWACQKGNIRCNICI

SEQ ID NO: 293 - protein, 566 aa, synthetic construct; identical to SEQ ID NO: 282
  REGION 1..566: note = hemagglutinin__InfluenzaA__AAZ83371

SEQ ID NO: 294 - protein, 566 aa, synthetic construct; identical to SEQ ID NO: 255
  REGION 1..566: note = hemagglutinin__InfluenzaA__AAZ83688

SEQ ID NO: 295 - protein, 565 aa, synthetic construct
  REGION 1..565: note = hemagglutinin__InfluenzaA__ABA06510
MKVKLLILLCTFTATYADTICIGYHANNSTDTVDTVLEKNVTVTHSVNLLEDSHNGKLCLLKGIAPLQLGNCSVAGWILGNPECELLIAKESWSYIVETPNPENGACYPGYFADYEELREQLSSVSSFERFEIFPKESSWPNHTVTGVSASCSHNGKSSFYRNLLWLTGKNGLYPNLSKSYANNKEKEVLILWGVHHPPNIGDQRTLYHTENAYVSVVSSHYSRRFTPEITKRPKVRDQEGRINYYWTLLEPGDTIIFEANGNLIAPWYAFALSRGFGSGIITSNAPMDECDAKCQTPQGAINSSLPFQNVHPVTIGECPKYVRSAKLRMVTGLRNIPSIQSRGLFGAIAGFIEGGWTGMVDGWYGYHHQNEQGSGYAADQKSTQNAINGITNKVNSVIEKMNTQFTAVGKEFNKLERRMENLNKKVDDGFLDIWTYNAELLVLLENERTLDFHDSNVKNLYEKVKSQLKNNAKEIGNGCFEFYHKCNNECMESVKNGTYDYPKYSEESKLNREKIDGVKLDSMGVYQILAIYSTVASSLVLLVSLGAISFWMCSNGSLQCRICI

SEQ ID NO: 296 - protein, 565 aa, synthetic construct
  REGION 1..565: note = hemagglutinin__InfluenzaA__ABA08464
MKAKLLVLLCTFTATYADTICIGYHANNSTDTVDTVLEKNVTVTHSVNLLEDSHNGKLCLLKGIAPLQLGNCSVAGWILGNPECELLISKESWSYIVETPNPENGTCYPGYFADYEELREQLSSVSSFERFEIFPKGSSWPNHTVTGVSASCSHNGKSSFYRNLLWLTGKNGLYPNLSMSYVNNKEKEVLVLWGVHHPPNIGDQRALYHTENAYVSVVSSHYSRRFTPEIAKRPKVRDQEGRINYYWTLLEPGDTIIFEANGNLIAPWYAFALSRGFGSGIITSNAPMDECDAKCQTPQGAINSSLPFQNVHPVTIGECPKYVRSAKLRMVTGLRNIPSIQSRGLFGAIAGFIEGGWTGMVDGWYGYHHQNEQGSGYAADQKSTQNAINGITNKVNSVIEKMNTQFTAVGKEFNKLERRMENLNKKVDDGFLDIWTYNAELLVLLENERTLDFHDSNVKNLYEKVKSQLKNNAKEIGNGCFEFYHKCNNECMESVKNGTYDYPKYSEESKLNREKIDGVKLESMGVYQILAIYSTVASSLVLLVSLGAISFWMCSNGSLQCRICI

SEQ ID NO: 297 - protein, 565 aa, synthetic construct; identical to SEQ ID NO: 296
  REGION 1..565: note = hemagglutinin__InfluenzaA__ABA08486

SEQ ID NO: 298 - protein, 565 aa, synthetic construct
  REGION 1..565: note = hemagglutinin__InfluenzaA__ABA08508
MKVKLLILLCTFTATYADTICIGYHANNSTDTVDTVLEKNVTVTHSVNLLEDSHNGKLCLLKGIAPLQLGNCSVAGWILGNPECELLISKESWSYIVETPNPENGACYPGYFADYEELREQLSSVSSFERFEIFPKESSWPNHTVTGVSASCSHNGKSSFYRNLLWLTGKNGLYPNLSKSYANNKKKEVLILWGVHHPPNIGVQRTLYYTENAYVSVVSSHYSRRFTPEITKRPKVRDQEGRINYYWTLLEPGDTIIFEANGNLIAPWYAFALSRGFGSGIITSNAPMDECDAKCQTPQGAINSSLPFQNVHPVTIGECPKYVRSAKLRMVTGLRNIPSIQSRGLFGAIAGFIEGGWTGMVDGWYGYHHQNEQGSGYAADQKSTQNAINGITNKVNSVIEKMNTQFTAVGKEFNKLERRMENLNKKVDDGFLDIWTYNAELLVLLENERTLDFHDSNVKNLYEKVKSQLKNNAKEIGNGCFEFYHKCNNECMESVKNGTYDYPKYSEESKLNREKIDGVKLDSMGVYQILAIYSTVASSLVLLVSLGAISFWMCSNGSLQCRICI

SEQ ID NO: 299 - protein, 565 aa, synthetic construct
  REGION 1..565: note = hemagglutinin__InfluenzaA__ABA12707
MKVKLLVLLCTFTATYADTICIGYHANNSTDTVDTVLEKNVTVTHSVNLLEDSHNGKLCLLKGIAPLQLGNCSVAGWILGNPECELLISKESWSYIVETPNPENGTCYPGYFADYEELREQLSSVSSFERFEIFPKESSWPNHTVTGVSASCSHNGKSSFYRNLLWLTGKNGLYPNLSKSYANNKEKEVLVLWGVHHPPNIGDQRALYHTENAYVSVVSSHYSRRFTPEIAKRPKVRDQEGRINYYWTLLEPGDTIIFEANGNLIAPRYAFALSRGFGSGIITSNAPMDECDAKCQTPQGAINSSLPFQNVHPVTIGECPKYVRSAKLRMVTGLRNIPSIQSRGLFGAIAGFIEGGWTGMVDGWYGYHHQNEQGSGYAADQKSTQNAINGITNKVNSVIEKMNTQFTAVGKEFNKLERRMENLNKKVDDGFLDIWTYNAELLVLLENERTLDFHDSNVKNLYEKVKSQLKNNAKEIGNGCFEFYHKCNDECMESVKNGTYDYPKYSEESKLNREKIDGVKLESMGVYQILAIYSTVASSLVLLVSLGAISFWMCSNGSLQCRICI

SEQ ID NO: 300 - protein, 565 aa, synthetic construct
  REGION 1..565: note = hemagglutinin__InfluenzaA__ABA12715
MKAKLLVLLCTFTATYADTICIGYHANNSTDTVDTVLEKNVTVTHSVNLLEDSHNGKLCLLKGIAPLQLGNCSVAGWILGNPECELLISKESWSYIVETPNPENGTCYPGYFADYEELREQLSSVSSFERFEIFPKGSSWPNHTVTGVSASCSHNGKSSFYRNLLWLTGKNGLYPNLSMSYVNNKEKEVLVLWGVHHPPNIGDQRALYHTENAYVSVVSSHYSRRFTPEIAKRPKVRDQEGRINYYWTLLEPGDTIIFEANGNLIAPWYAFALSRGFGSGIITSNAPMDECDAKCQTPQGAINSSLPFQNVHPVTIGECPKYVRSTKLRMVTGLRNIPSIQSRGLFGAIAGFIEGGWTGMVDGWYGYHHQNEQGSGYAADQKSTQNAINGITNKVNSVIEKMNTQFTAVGKEFNKLERRMENLNKKVDDGFLDIWTYNAELLVLLENERTLDFHDSNVKNLYEKVKSQLKNNAKEIGNGCFEFYHKCDNECMESVKNGTYDYPKYSEESKLNREKIDGVKLESMGVYQILAIYSTVASSLVFLVSLGAISFWMCSNGSLQCRICI

SEQ ID NO: 301 - protein, 565 aa, synthetic construct
  REGION 1..565: note = hemagglutinin__InfluenzaA__ABA12729
MKVKLLVLLCTFTATYADTICIGYHANNSTDTVDTVLEKNVTVTHSVNLLEDSHNGKLCLLKGIAPLQLGNCSVAGWILGNPECELLISKESWSYIVETPNPENGTCYPGYFADYEELREQLSSVSSFERFEIFPKESSWPNHTVTGVSASCSHNGKSSFYRNLLWLTGKNGLYPNLSKSYANNKEKEVLVLWGVHHPPNIGDQRALYHTENAYISVVSSHYSRRFTPEIAKRPKVRDQEGRINYYWTLLEPGDTIIFEANGNLIAPRYAFALSRGFGSGIITSNAPMDECDAKCQTPQGAINSSLPFQNVHPVTIGECPKYVRSAKLRMVTGLRNIPSIQSRGLFGAIAGFIEGGWTGMVDGWYGYHHQNEQGSGYAADQKSTQNAINGITNKVNSVIEKMNTQFTAVGKEFNKLERRMENLNKKVDDGFLDIWTYNAELLVLLENERTLDFHDSNVKNLYEKVKSQLKNNAKEIGNGCFEFYHKCNDECMESVKNGTYDYPRYSEESKLNREKIDGVKLESMGVYQILAIYSTVASSLVLLVSLGAISFWMCSNGSLQCRICI

SEQ ID NO: 302 - protein, 566 aa, synthetic construct; identical to SEQ ID NO: 286
  REGION 1..566: note = hemagglutinin__InfluenzaA__ABA12740

SEQ ID NO: 303 - protein, 566 aa, synthetic construct; identical to SEQ ID NO: 255
  REGION 1..566: note = hemagglutinin__InfluenzaA__ABA12751

SEQ ID NO: 304 - protein, 566 aa, synthetic construct
  REGION 1..566: note = hemagglutinin__InfluenzaA__ABA12762
MKTIIALSYILCLVFAQKFPGNDNSTATLCLGHHAVPNGTIVKTITNDQIEVTNATELVQSSSTGGICDSPHQILDGENCTLIDALLGDPQCDGFQNKKWDLFVERSKAYSNCYPYDVPDYASLRSLVASSGTLEFNNESFNWTGVTQNGTSSACKRRSNNSFFSRLNWLTHLKFKYPALNVTMPNNEKFDKLYIWGVHHPGTDNDQISLYAQASGRITVSTKRSQQTVIPNIGSRPRVRDIPSRISIYWTIVKPGDILLINSTGNLIAPRGYFKIRSGKSSIMRSDAPIGKCNSECITPNGSIPNDKPFQNVNRITYGACPRYVKQNTLKLATGMRNVPEKQTRGIFGAIAGFIENGWEGMVDGWYGFRHQNSEGIGQAADLKSTQAAINQINGKLNRLIGKTNEKFHQIEKEFSEVEGRIQDLEKYVEDTKIDLWSYNAELLVALENQHTIDLTDSEMNKLFERTKKQLRENAEDMGNGCFKIYHKCDNACIGSIRNGTYDHDVYRDEALNNRFQIKGVELKSGYKDWILWISFAISCFLLCVVLLGFIMWACQKGNIRCNICI

SEQ ID NO: 305 - protein, 566 aa, synthetic construct
  REGION 1..566: note = hemagglutinin__InfluenzaA__ABA12773
MKTIIALSYIFCLVLGQDFPGNDNSTATLCLGHHAVPNGTLVKTITNDQIEVTNATELVQSSSTGKICNNPHRILDGIDCTLIDALLGDPHCDGFQNETWDLFVERSKAFSNCYPYDVPDYASLRSLVASSGTLEFINEGFTWTGVTQNGGSNACKRGPDSGFFSRLNWLYKSGSTYPVLNVTMPNNDNFDKLYIWGVHHPSTDQEQTSLYVQASGRVTVSTKRSQQTIIPNIGSRPWVRGLSSRISIYWTIVKPGDILVINSNGNLIAPRGYFKMRTGKSSIMRSDAPIGTCISECITPNGSIPNDKPFQNVNKITYGACPKYVKQNTLKLATGMRNVPEKQTRGLFGAIAGFIENGWEGMIDGWYGFRHQNSEGTGQAADLKSTQAAIDQINGKLNRVIEKTNEKFHQIEKEFSEVEGRIQDLEKYVEDTKIDLWSYNAELLVALENQHTIDLTDSEMNKLFEKTRRQLRENAEDMGNGCFKIYHKCDNACIGSIRNGTYDHDVYRDEALNNRFQIKGVELKSGYKDWILWISFAISCFLLCVVLLGFIMWACQKGNIRCNICI

SEQ ID NO: 306 - protein, 566 aa, synthetic construct
  REGION 1..566: note = hemagglutinin__InfluenzaA__ABA12780
MKTIIALSYILCLVFAQKLPGNDNSTATLCLGHHAVPNGTIVKTITNDQIEVTNATELVQSSSTGGICDSPHQILDGENCTLIDALLGDPQCDGFQNKKWDLFVERSKAYSNCYPYDVPDYASLRSLVASSGTLEFNNESFNWTGVTQNGTSSACKRRSNNSFFSRLNWLTHLKFKYPALNVTMPNNEKFDKLYIWGVHHPGTNNDQISLYAQASGRITVSTKRSQQTVIPNIESRPRVRDIPSRISIYWTIVKPGDILLINSTGNLIAPRGYFKIRSGKSSIMRSDAPIGKCNSECITPNGSIPNDKPFQNVNRITYGACPRYVKQNTLKLATGMRNVPEKQTRGIFGAIAGFIENGWEGMVDGWYGFRHQNSEGIGQAADLKSTQAAINQINGKLNRLIGKTNEKFHQIEKEFSEVEGRIQDLEKYVEDTKIDLWSYNAELLVALENQHTIDLTDSEMNKLFERTKKQLRENAEDMGNGCFKIYHKCDNACIGSIRNGTYDHDVYRDEALNNRFQIKGVELKSGYKDWILWISFAISCFLLCVALLGFIMWACQKGNIRCNICI

SEQ ID NO: 307 - protein, 566 aa, synthetic construct
  REGION 1..566: note = hemagglutinin__InfluenzaA__ABA16214
MKTIIALSYISCLVFAQKLPGNDNSTATLCLGHHAVPNGTLVKTITNDQIEVTNATELVQSSSTGRICDSPHRILDGKNCTLIDALLGDPHCDGFQNEKWDLFVERSKAFSNCYPYDVPDYASLRSLVASSGTLEFINEGFNWTGVTQSGGSYACKRGSVKSFFSRLNWLYESESKYPALNVTMPNNGKFDKLYIWGVHHPSTDKEQTNLYVRASGRVTVSTKRSQQTVIPNIGPRPWVRGLSSRISIYWTIVKPGDILLINSTGNLIAPRGYFKIRTGKSSIMRSDAPIGTCSSGCITPNGSIPNDKPFQNVNKITYGACPRYVKQNTLKLATGMRNVPEKQTRGIFGAIAGFIENGWEGMVDGWYGFRHQNSEGTGQAADLKSTQAAIDQINGKLNRLIEKTNEKFHQIEKEFSEVEGRIQDLEKYVEDTKIDLWSYNAELLVALENQHTIDMTDSEMNKLFEKTRKQLRENAEDMGNGCFKIYHKCDNACIGSIRNGTYDHDVYRDEALNNRFQIKGVELKSGYKDWILWISFAISCFLLCVVLLGFIMWACQKGNIRCNICI

SEQ ID NO: 308 - protein, 566 aa, synthetic construct; identical to SEQ ID NO: 256
  REGION 1..566: note = hemagglutinin__InfluenzaA__ABA18026

SEQ ID NO: 309 - protein, 565 aa, synthetic construct
  REGION 1..565: note = hemagglutinin__InfluenzaA__ABA18037
MKAKLLVLLCTFTATYADTICIGYHANNSTDTVDTVLEKNVTVTHSVNLLEDSHNGKLCLLKGIAPLQLGNCSVAGWILGNPECELLISKESWSYIVETPNPENGTCYPGYFADYEELKEQLSSVSSFERFEIFPKGSSWPNHTVTGVSASCSHNGKSSFYRNLLWLTGKNGLYPNLSMSYVNNKEKEVLVLWGVHHPPNIGDQRALYHTENAYVSVVSSHYSRRFTPEIAKRPKVRDQEGRINYYWTLLEPGDTIIFEANGNLIAPWYAFALSRGFGSGIITSNAPMDECDAKCQTPQGAINSSLPFQNVHPVTIGECPKYVRSAKLRMVTGLRNIPSIQSRGLFGAIAGFIEGGWTGMVDGWYGYHHQNEQGSGYAADQKSTQNAINGITNKVNSVIEKMNTQFTAVGKEFNKLERRMENLNKKVDDGFLDIWTYNAELLVLLENERTLDFHDSNVKNLYEKVKSQLKNNAKEIGNGCFEFYHKCNNECMESVKNGTYDYPKYSEESKLNREKIDGVKLESMGVYQILAIYSTVASSLVLLVSLGAISFWMCSNGSLQCRICI

SEQ ID NO: 310 - protein, 566 aa, synthetic construct; identical to SEQ ID NO: 255
  REGION 1..566: note = hemagglutinin__InfluenzaA__ABA18048

SEQ ID NO: 311 - protein, 566 aa, synthetic construct
  REGION 1..566: note = hemagglutinin__InfluenzaA__ABA18123
MKTIIALSYILCLVFAQKLPGNDNSTATLCLGHHAVPNGTLVKTITNDQIEVTNATELVQSSSTGRICDSPHQILDGENCTLIDALLGDPHCDGFQNKEWDLFVERSKAYSNCYPYDVPDYVSLRSLVASSGTLEFNNESFNWTGVAQNGTSSACKRRSNKSFFSRLNWLHQLKYKYPALNVTMPNNEKFDKLYIWGVHHPGTDSDQISLYAQASGRVTVSTKRSQQTVIPNIGSGPWVRGVSSRISIYWTIVKPGDILLINSTGNLIAPRGYFKIRSGKSSIMRSDAPIGKCNSECITPNGSIPNDKPFQNVNRITYGACPRYVKQNTLKLATGMRNVPEKQTRGIFGAIAGFIENGWEGMMDGWYGFRHQNSEGTGQAADLKSTQAAINQINGKLNRLIEKTNEKFHQIEKEFSEVEGRIQDLEKYVEDTKIDLWSYNAELLVALENQHTIDLTDSEMNKLFERTKKQLRENAEDMGNGCFKIYHKCDNACIGSIRNGTYDHDVYRDEALNNRFQIKGVELKSGYKDWILWISFAISCFLLCIVLLGFIMWACQKGNIRCNICI

SEQ ID NO: 312 - protein, 566 aa, synthetic construct; identical to SEQ ID NO: 255
  REGION 1..566: note = hemagglutinin__InfluenzaA__ABA18134

SEQ ID NO: 313 - protein, 565 aa, synthetic construct; identical to SEQ ID NO: 299
  REGION 1..565: note = hemagglutinin__InfluenzaA__ABA18145

SEQ ID NO: 314 - protein, 566 aa, synthetic construct; identical to SEQ ID NO: 256
  REGION 1..566: note = hemagglutinin__InfluenzaA__ABA18156

SEQ ID NO: 315 - protein, 566 aa, synthetic construct
  REGION 1..566: note = hemagglutinin__InfluenzaA__ABA26700
MKTIIALSYILCLVFAQKLPGNDNSTATLCLGHHAVPNGTIVKTITNDQIEVTNATELVQSSSTGGICNSPHQILDGENCTLIDALLGDPQCDGFQNKKWDLFVERSKAYSNCYPYDVPDYASLRSLVASSGTLEFNNESFNWTGVTQNGTSSACKRRSNNSFFSRLNWLTHLKFKYPALNVTMPNNEKFDKLYIWGVHHPGTDNDQISLYAQAPGRITVSTKRSQQTVIPNIGSRPRVRDIPSRISIYWTIVKPGDILLINSTGNLIAPRGYFKIRSGKSSIMRSDAPIGKCNSECITPNGSIPNDKPFQNVNRITYGACPRYVKQNTLKLATGMRNVPEKQTRGIFGAIAGFIENGWEGMVDGWYGFRHQNSEGIGQAADLKSTQAAINQINGKLNRLIGKTNEKFHQIEKEFSEVEGRIQDLEKYVEDTKIDLWSYNAELLVALENQHTIDLTDSEMNKLFERTKKQLRENAEDMGNGCFKIYHKCDNACIGSIRNGTYDHDVYRDEALNNRFQIKGVELKSGYKDWILWISFAISCFLLCVALLGFIMWACQKGNIRCNICI

SEQ ID NO: 316 - protein, 566 aa, synthetic construct
  REGION 1..566: note = hemagglutinin__InfluenzaA__ABA26711
MKTIIALSYILCLVFAQKLPGNDNSTATLCLGHHAVPNGTIVKTITNDQIEVTNATELVQSSSTGGICDSPHQILDGENCTLIDALLGDPQCDGFQNKKWDLFVERSKAYSNCYPYDVPDYASLRSLVASSGTLEFNNESFNWTGVTQNGTSSACKRRSNNSFFSRLNWLTHLKFKYPALNVTMPNNEKFDKLYIWGVHHPGTDNDQISLYAQASGRITVSTKRSQQTVIPNIGSRPRVRDIPSRISIYWTIVKPGDILLINSTGNLIAPRGYFKIRSGKSSIMRSDAPIGKCKSECITPNGSIPNDKPFQNVNRITYGACPRYVKQNTLKLATGMRNVPEKQTRGIFGAIAGFIENGWEGMVDGWYGFRHQNSEGIGQAADLKSTQAAINQINGKLNRLIGKTNEKFHQIEKEFSEVEGRIQDLEKYVEDTKIDLWSYNAELLVALENQHTIDLTDSEMNKLFERTKKQLRENAEDMGNGCFKIYHKCDNACIGSIRNGTYDHDVYRDEALNNRFQIKGVELKSGYKDWILWISFAISCFLLCVALLGFIMWACQKGNIRCNICI

SEQ ID NO: 317 - protein, 566 aa, synthetic construct
  REGION 1..566: note = hemagglutinin__InfluenzaA__ABA26722
MKTIIALSYILCLVFAQKLPGNDNSTATLCLGHHAVPNGTIVKTITNDQIEVTNATELVQSSPTGGICDSPHQILDGENCTLIDALLGDPQCDGFQNKKWDLFVERSKAHSNCYPYDVPDYASLRSLVASSGTLEFNNESFNWTGVTQNGTSSACKRRSNKSFFSRLNWLTHLKFKYPALNVTMPNNEKFDKLYIWGVHHPGTDNDQISLYAQASGRITVSTKRSQQTVIPNIGSRPRVRDVPSRISIYWTIVKPGDILLINSTGNLIAPRGYFKIRSGKSSIMRSDAPIGKCNSGCITPNGSIPNDKPFQNVNRITYGACPRYVKQNTLKLATGMRNVPEKQTRGIFGAIAGFIENGWEGMVDGWYGFRHQNSEGTGQAADLKSTQAAINQINGKLNRLIGKTNEKFHQIEKEFSEVEGRIQDLEKYVEDTKIDLWSYNAELLVALENQHTIDLTDSEMNKLFERTKKQLRENAEDMGNGCFKIYHKCDNACIGSIRNGTYDHDVYRDEALNNRFQIKGVELKSGYKDWILWISFAISCFLLCVALLGFIMWACQKGNIRCNICI

SEQ ID NO: 318 - protein, 566 aa, synthetic construct; identical to SEQ ID NO: 243
  REGION 1..566: note = hemagglutinin__InfluenzaA__ABA26733

SEQ ID NO: 319 - protein, 566 aa, synthetic construct; identical to SEQ ID NO: 243
  REGION 1..566: note = hemagglutinin__InfluenzaA__ABA26755

SEQ ID NO: 320 - protein, 566 aa, synthetic construct; identical to SEQ ID NO: 282
  REGION 1..566: note = hemagglutinin__InfluenzaA__ABA26766

SEQ ID NO: 321 - protein, 566 aa, synthetic construct; identical to SEQ ID NO: 282
  REGION 1..566: note = hemagglutinin__InfluenzaA__ABA26788

SEQ ID NO: 322 - protein, 566 aa, synthetic construct; identical to SEQ ID NO: 282
  REGION 1..566: note = hemagglutinin__InfluenzaA__ABA26799

SEQ ID NO: 323 - protein, 565 aa, synthetic construct
  REGION 1..565: note = hemagglutinin__InfluenzaA__ABA42247
MKVKLLVLLCTFTATYADTICIGYHANNSTDTVDTVLEKNVTVTHSVNLLEDSHNGKLCLLKGIAPLQLGNCSVAGWILGNPECELLISKESWSYIVETPNPENGTCYPGYFADYEELREQLSSVSSFERFEIFPKESSWPNHTVTGVSASCSHNGKSSFYKNLLWLTGKNGLYPNLSKSYANNKEKEVLVLWGVHHPPNIGDQRALYHTENAYVSVVSSHYSRRFTPEIAKRPKVRDQEGRINYYWTLLEPGDTIIFEANGNLIAPRYAFALSRGFGSGIITSNAPMDECDAKCQTPQGAINSSLPFQNVHPVTIGECPKYVRSAKLRMVTGLRNIPSIQSRGLFGAIAGFIEGGWTGMVDGWYGYHHQNEQGSGYAADQKSTQNAINGITNKVNSVIEKMNTQFTAVGKEFNKLERRMENLNKKVDDGFLDIWTYNAELLVLLENERTLDFHDSNVKNLYEKVKSQLKNNAKEIGNGCFEFYHKCNDECMESVKNGTYDYPKYSEESKLNREKIDGVKLESMGVYQILAIYSTVASSLVLLVSLGAISFWMCSNGSLQCRICI

SEQ ID NO: 324 - protein, 565 aa, synthetic construct; identical to SEQ ID NO: 296
  REGION 1..565: note = hemagglutinin__InfluenzaA__ABA42258

SEQ ID NO: 325 - protein, 566 aa, synthetic construct; identical to SEQ ID NO: 255
  REGION 1..566: note = hemagglutinin__InfluenzaA__ABA42269

SEQ ID NO: 326 - protein, 565 aa, synthetic construct
  REGION 1..565: note = hemagglutinin__InfluenzaA__ABA42280
MKVKLLILLCTFTATYADTICIGYHANNSTDTVDTVLEKNVTVTHSVNLLEDSHNGKLCLLKGIAPLQLGNCSVAGWILGNPECELLISKESWSYIVETPNPENGACYPGYFADYEELREQLSSVSSFERFEIFPKESSWPNHTVTGVSASCSHNGKSSFYRNLLWLTGKNGLYPNLSKSYANNKEKEVLILWGVHHPPNIGDQRTLYHTENAYVSVVSSHYSRRFTPEITKRPKVRDQEGRINYYWTLLEPGDTIIFEANGNLIAPWYAFALSRGFGSGIITSNAPMDECDAKCQTPQGAINSSLPFQNVHPVTIGECPKYVRSAKLRMVTGLRNIPSIQSRGLFGAIAGFIEGGWTGMVDGWYGYHHQNEQGSGYAADQKSTQNAINGITNKVNSVIEKMNTQFTAVGKEFNKLERRMENLNKKVDDGFLDIWTYNAELLVLLENERTLDFHDSNVKNLYEKVKSQLKNNAKEIGNGCFEFYHKCNNECMESVKNGTYDYPKYSEESKLNREKIDGVKLDSMGVYQILAIYSTVASSLVLLVSLGAISFWMCSNGSLQCRICI

SEQ ID NO: 327 - protein, 566 aa, synthetic construct
  REGION 1..566: note = hemagglutinin__InfluenzaA__ABA42291
MKTIIALSYILCLVFAQKLPGNDNSTATLCLGHHAVPNGTIVKTITNDQIEVTNATELVQSSSTGGICDSPHQILDGENCTLIDALLGDPQCDGFQNKKWDLFVERSKAYSNCYPYDVPDYASLRSLVASSGTLEFNNESFNWTGVTQNGTSSACKRRSNNSFFSRLNWLTHLKFKYPALNVTMPNNEKFDKLYIWGVHHPGTDNDQISLYAQASGRITVSTKRSQQTVIPNIGSRPRVRDIPSRISIYWTIVKPGDILLINSTGNLIAPRGYFKIRSGKSSIMRSDAPIGKCKSECITPNGSIPNDKPFQNVNRITYGACPRYVKQNTLKLATGMRNVPEKQTRGIFGAIAGFIENGWEGMVDGWYGFRHQNSEGIGQAADLKSTQAAINQINGKLNRLIGKTNEKFHQIEKEFSEVEGRIQDLEKYVEDTKTDLWSYNAELLVALENQHTIDLTDSEMNKLFERTKKQLRENAEDMGNGCFKIYHKCDNACIGSIRNGTYDHDVYRDEALNNRFQIKGVELKSGYKDWILWISFAISCFLLCVALLGFIMWACQKGNIRCNICI

SEQ ID NO: 328 - protein, 566 aa, synthetic construct; identical to SEQ ID NO: 51
  REGION 1..566: note = hemagglutinin__InfluenzaA__ABA42302

SEQ ID NO: 329 - protein, 566 aa, synthetic construct; identical to SEQ ID NO: 105
  REGION 1..566: note = hemagglutinin__InfluenzaA__ABA42313

SEQ ID NO: 330 - protein, 566 aa, synthetic construct; identical to SEQ ID NO: 51
  REGION 1..566: note = hemagglutinin__InfluenzaA__ABA42346

SEQ ID NO: 331 - protein, 566 aa, synthetic construct; identical to SEQ ID NO: 105
  REGION 1..566: note = hemagglutinin__InfluenzaA__ABA42357

SEQ ID NO: 332 - protein, 566 aa, synthetic construct
  REGION 1..566: note = hemagglutinin__InfluenzaA__ABA42379
MKTIIALSYILCLVFAQKLPGNDNSTATLCLGHHAVPNGTLVKTITNDQIEVTNATELVQSSSTGRICDSPHQILDGENCTLIDALLGDPHCDGFQNKEWDLFVERSKAYSNCYPYDVPDYVSLRSLVASSGTLEFNNESFNWTGVAQNGTSSACKRRSDKSFFSRLNWLHQLKYKYPALNVTMPNNEKFDKLYIWGVHHPGTDSDQISLYAQASGRVTVSTKRSQQTVIPNIGSRPWVRGVSSKISIYWTIVKPGDILLINSTGNLIAPRGYFKIRSGKSSIMRSDAPIGKCNSECITPNGSIPNDKPFQNVNRITYGPCPRYVKQNTLKLATGMRNVPEKQTRGIFGAIAGFIENGWEGMMDGWYGFRHQNSEGTGQAADLKSTQAAINQINGKLNRLIEKTNEKFHQIEKEFSEVEGRIQDLEKYVEDTKIDLWSYNAELLVALENQHTIDLTDSEMNKLFERTKKQLRENAEDMGNGCFKIYHKCDNACIGSIRNGTYDHDVYRDEALNNRFQIKGVELKSGYKDWILWISFAISCFVLCIVLLGFIMWACQKGNIRCNICI

SEQ ID NO: 333 - protein, 566 aa, synthetic construct; identical to SEQ ID NO: 80
  REGION 1..566: note = hemagglutinin__InfluenzaA__ABA42390

SEQ ID NO: 334 - protein, 566 aa, synthetic construct
  REGION 1..566: note = hemagglutinin__InfluenzaA__ABA42401
MKTIIALSYILCLVFAQKLPGNDNSTATLCLGHHAVPNGTLVKTITNDQIEVTNATELVQSSSTSRICDSPHQILDGENCTLIDALLGDPHCDGFQNKEWDLFVERSKAYSNCYPYDVPDYVSLRSLVASSGTLEFNNESFNWTGVAQNGTSSACKRRSDKSFFSRLNWLHQLKYKYPALNVTMPNNEKFDKLYIWGVHHPGTDSDQISLYAQSSGRVTVSTKRSQQTVIPNIGSGPWVRGVSSRISIYWTIVKPGDILLINSTGNLIAPRGYFKIRSGKSSIMRSDAPIGKCNSKCITPNGSIPNDKPFQNVNRITYGACPRYVKQNTLKLATGMRNVPEKQTRGIFGAIAGFIENGWEGMMDGWYGFRHQNSEGTGQAADLKSTQAAINQINGKLNRLIEKTNEKFHQIEKEFSEVEGRIQDLEKYVEDTKIDLWSYNAELLVALENQHTIDLTDSEMNKLFERTKKQLRENAEDMGNGCFKIYHKCDNACIGSIRNGTYDHDVYRDEALNNRFQIKGVELKSGYKDWILWISFAISCFLLCIVLLGFIMWACQKGNIRCNICI

SEQ ID NO: 335 - protein, 566 aa, synthetic construct
  REGION 1..566: note = hemagglutinin__InfluenzaA__ABA42412
MKTIIALSYILCLVFAQKLPGNDNSTATLCLGHHAVPNGTLVKTITNDQIEVTNATELVQSSSTGRICDSPHQILDGENCTLIDALLGDPHCDGFQNKEWDLFVERSKAYSNCYPYDVPDYVSLRSLVASSGTLEFNNESFNWTGVAQNGTSSACKRRSDKSFFSRLNWLHQLKYKYPALNVTMPNNEKFDKLYIWGVHHPGTDSDQISLYAQASGRVTVSTKRSQQTVIPNIGSRPWVRGVSSKISIYWTIVKPGDILLINSTGNLIAPRGYFKIRSGKSSIMRSDAPIGKCNSECITPSGSIPNDKPFQNVNRITYGPCPRYVKQNTLKLATGMRNVPEKQTRGIFGAIAGFIENGWEGMMDGWYGFRHQNSEGTGQAADLKSTQAAINQINGKLNRLIEKTNEKFHQIEKEFSEVEGRIQDLEKYVEDTKIDLWSYNAELLVALENQHTIDLTDSEMNKLFERTKKQLRENAEDMGNGCFKIYHKCDNACIGSIRNGTYDHDVYRDEALNNRFQIKGVELKSGYKDWILWISFAISCFLLCIVLLGFIMWACQKGNIRCNICI

SEQ ID NO: 336 - protein, 566 aa, synthetic construct; identical to SEQ ID NO: 47
  REGION 1..566: note = hemagglutinin__InfluenzaA__ABA42443

SEQ ID NO: 337 - protein, 566 aa, synthetic construct; identical to SEQ ID NO: 51
  REGION 1..566: note = hemagglutinin__InfluenzaA__ABA42454

SEQ ID NO: 338 - protein, 566 aa, synthetic construct
  REGION 1..566: note = hemagglutinin__InfluenzaA__ABA42465
MKTIIALSYILCLVFAQKLPGNDNSTATLCLGHHAVPNGTLVKTITNDQIEVTNATELVQSSSTSRICDSPHQILDGENCTLIDALLGDPHCDGFQNKEWDLFVERSKAYSNCYPYDVPDYVSLRSLVASSGTLEFNNESFNWTGVAQNGTSSACKRRSDKSFFSRLNWLHQLKYKYPALNVTMPNNEKFDKLYIWGVHHPGTDSDQISLYAQASGRVTVSTKRSQQTVIPNIGSRPWGRGVSSRISIYWTIVKPGDILLINSTGNLIAPRGYFKIRSGKSSIMRSDAPIGKCNSECITPNGSIPNDKPFQNVNRITYGACPRYVKQNTLKLATGMRNVPEKQTRGIFGAIAGFIENGWEGMMDGWYGFRHQNSEGTGQAADLKSTQAAINQINGKLNRLIEKTNEKFHQIEKEFSEVEGRIQDLEKYVEDTKIDLWSYNAELLVALENQHTIDLTDSEMNKLFERTKKQLRENAEDMGNGCFKIYHKCDNACIGSIRNGTYDHDVYRDEALNNRFQIKGVELKSGYKDWILWISFAISCFLLCIVLLGFIMWACQKGNIRCNICI

SEQ ID NO: 339 - protein, 566 aa, synthetic construct
  REGION 1..566: note = hemagglutinin__InfluenzaA__ABA42476
MKTIIALSYILCLVFAQKLPGNDNSTATLCLGHHAVPNGTLVKTITNDQIEVTNATELVQSSSTGRICDSPHQILDGENCTLIDALLGDPHCDGFQNKEWDLFVERSKAYSNCYPYDVPDYVSLRSLVASSGTLEFNNESFNWTGVAQNGTSSACKRRSDKSFFSRLNWLHQLKYKYPALNVTMPNNEKFDKLYIWGVHHPGTDSDQISLYAQASGRVTVSTKRSQQTVIPNIGSRPWVRGVSSRISIYWTIVKPGDILLINSTGNLIAPRGYFKIRSGKSSIMRSDAPIGKCNSECITPNGSIPNDKPFQNVNRITYGPCPRYVKQNTLKLATGMRNVPEKQTRGIFGAIAGFIENGWEGMMDGWYGFRHQNSEGTGQAADLKSTQAAINQINGKLNRLIEKTNEKFHQIEKEFSEVEGRIQDLEKYVEDTKIDLWSYNAELLVALENQHTIDLTDSEMNKLFERTKKQLRENAEDMGNGCFKIYHKCDNACIGSIRNGTYDHDVYRNEALNNRFQIKGVELKSGYKDWILWISFAISCFLLCIVLLGFIMWACQKGNIRCNICI

SEQ ID NO: 340 - protein, 566 aa, synthetic construct
  REGION 1..566: note = hemagglutinin__InfluenzaA__ABA42498
MKTIIALSYILCLVFAQKLPGNDNSTATLCLGHHAVPNGTLVKTITNDQIEVTNATELVQSSSTSRICDSPHQILDGENCTLIDALLGDPHCDGFQNKEWDLFVERSKAYSNCYPYDVPDYVSLRSLVASSGTLEFNNESFNWTGVAQNGTSSACKRRSDKSFFSRLNWLHQLKYKYPALNVTMPNNEKFDKLYIWGVHHPGTDSDQISLYAQASGRVTVSTKRSQQTVIPNIGSRPWVRGVSSIISIYWTIVKPGDILLINSTGNLIAPRGYFKIRSGKSSIMRSDAPIGKCNSECITPNGSIPNDKPFQNVNRITYGACPRYVKQNTLKLATGMRNVPEKQTRGIFGAIAGFIENGWEGMMDGWYGFRHQNSEGTGQAADLKSTQAAINQINGKLNRLIEKTNEKFHQIEKEFSEVEGRIQDLEKYVEDTKIDLWSYNAELLVALENQHTIDLTDSEMNKLFERTKKQLRENAEDMGNGCFKIYHKCDNACIGSIRNGTYDHDVYRDEALNNRFQIKGVELKSGYKDWILWISFAISCFLLCIVLLGFIMWACQKGNIRCNICI

SEQ ID NO: 341 - protein, 566 aa, synthetic construct; identical to SEQ ID NO: 72
  REGION 1..566: note = hemagglutinin__InfluenzaA__ABA42509

SEQ ID NO: 342 - protein, 566 aa, synthetic construct
  REGION 1..566: note = hemagglutinin__InfluenzaA__ABA42520
MKTIIALSYILCLVFAQKLPVNDNSTATLCLGHHAVPNGTLVKTITNDYIEVTNATELVQSSSTGRICDSPHQILDGENCTLIDALLGDPHCDGFQNKEWDLFVERSTAYSNCYPYDVPDYASLRSLVASSGTLEFNNESFNWTGVAQNGTSSACKRRSIKSFFSRLNWLHQLKYKYPALNVTMPNNEKFDKLYIWGVHHPSTDSDQISLYAQASGRVTVSTKRSQQTVIPNIGSRPWVRGVSSIISIYWTIVKPGDILLINSTGNLIAPRGYFKIRSGKSSIMRSNAPIGKCNSECITPNGSIPNDKPFQNVNRITYGACPRYVKQNTLKLATGMRNVPEKQTRGIFGAIAGFIENGWEGMVDGWYGFRHQNSEGTGQAADLKSTQAAINQINGKLNRLIEKTNEKFHQIEKEFSEVEGRIQDLEKYVEDTKIDLWSYNAELLVALENQHTIDLTDSEMNKLFERTRKQLRENAEDMGNGCFKIYHKCDNACIGSIRNGTYDHDVYRDEALNNRFQIKGVELKSGYKDWILWISFAISCFLLCVVLLGFIMWACQKGNIRCNICI

SEQ ID NO: 343 - protein, 566 aa, synthetic construct
  REGION 1..566: note = hemagglutinin__InfluenzaA__ABA42531
MKTIIALSYILCLVFAQKLPVNDNSTATLCLGHHAVPNGTLVKTITNDHIEVTNATELVQSSSTGRICDSPHQILDGENCTLIDALLGDPHCDGFQNKEWDLFVERSTAYSNCYLYDVPDYASLRSLVASSGTLEFNNESFNWTGVAQNGTSSACKRRSIKSFFSRLNWLHQLKYKYPALNVTMPNNEKFDKLYIWGVHHPSTDSDQISLYAQASGRVTVSTKRSQQTVIPNIGSRPWVRGVSSRISIYWTIVKPGDILLINSTGNLIAPRGYFKIRSGKSSIMRSNAPIGKCNSECITPNGSIPNDKPFQNVNRITYGACPRYVKQNTLKLATGMRNVPEKQTRGIFGAIAGFIENGWEGMVDGWYGFRHQNSEGTGQAADLKSTQAAINQINGKLNRLIEKTNEKFHQIEKEFSEVEGRIQDLEKYVEDTKIDLWSYNAELLVALENQHTIDLTDSEMNKLFERTRKQLRENAEDMGNGCFKIYHKCDNACIGSIRNGTYDHDVYRDEALNNRFQIKGVELKSGYKDWILWISFAISCFLLCVVLLGFIMWACQKGNIRCNICI

SEQ ID NO: 344 - protein, 566 aa, synthetic construct; identical to SEQ ID NO: 72
  REGION 1..566: note = hemagglutinin__InfluenzaA__ABA42542

SEQ ID NO: 345 - protein, 566 aa, synthetic construct
  REGION 1..566: note = hemagglutinin__InfluenzaA__ABA42553
MKTIIALSYILCLVFAQKLPVNDNSTATLCLGHHAVPNGTLVKTITNDHIEVTNATELVQSSSTGRICDSPHQILDGENCTLIDALLGDPHCDGFQNKEWDLFVERSTAHSNCYPYDVPDYASLRSLVASSGTLEFNNESFNWTGVAQNGTSSACKRRSIKSFFSRLNWLHQLKYKYPALNVTMPNNEKFDKLYIWGVHHPSTDSDQISLYAQASGRVTVSTKRSQQTVIPNIGSRPWVRGVSSRISIYWTIVKPGDILLINSTGNLIAPRGYFKIRSGKSSIMRSNAPIGKCNSECITPNGSIPNDKPFQNVNRITYGACPRYVKQNTLKLATGMRNVPEKQTRGIFGAIAGFIENGWEGMVDGWYGFRHQNSEGTGQAADLKSTQAAINQINGKLNRLIEKTNEKFHQIEKEFSEVEGRIQDLEKYVEDTKIDLWSYNAELLVALENQHTIDLTDSEMNKLFERTRKQLRENAEDMGNGCFKIYHKCDNACIGSIRNGTYDHDVYRDEALNNRFQIKGVELKSGYKDWILWISFAISCFLLCVVLLGFIMWACQKGNIRCNICI

SEQ ID NO: 346 - protein, 566 aa, synthetic construct; identical to SEQ ID NO: 72
  REGION 1..566: note = hemagglutinin__InfluenzaA__ABA42564

SEQ ID NO: 347 - protein, 566 aa, synthetic construct
  REGION 1..566: note = hemagglutinin__InfluenzaA__ABA42928
MKTIIALSYILCLVFAQKLPVNDNSTATLCLGHHAVPNGTLVKTITNDHIEVTNATELVQSSSTGRICDSPHQILDGENCTLIDALLGDPHCDGFQNKEWDLFVERSTAYSNCYPYDVPDYASLRSLVASSGTLEFNNESFNWTGVAQNGTSSACKRRSIKSFFSRLNWLHQLKYKYPALNVTMPNNEKFDKLYIWGVHHPSTDSDQISLYAQASGRVTVSTKRSQQTVIPNIGSRPWVRGVSSKISIYWTIVKPGDILLINSTGNLIAPRGYFKIRSGKSSIMRSNAPIGKCNSECITPNGSIPNDKPFQNVNRITYGACPRYVKQNTLKLATGMRNVPEKQTRGIFGAIAGFIENGWEGMVNGWYGFRHQNSEGTGQAADLKSTQAAINQINGKLNRLIEKTNEKFHQIEKEFSEVEGRIQDLEKYVEDTKIDLWSYNAELLVALENQHTIDLTDSEMNKLFERTRKQLRENAEDMGNGCFKIYHKCDNACIGSIRNGTYDHDVYRDEALNNRFQIKGVELKSGYKDWILWISFAISCFLLCVVLLGFIMWACQKGNIRCNICI

SEQ ID NO: 348 - protein, 566 aa, synthetic construct; identical to SEQ ID NO: 72
  REGION 1..566: note = hemagglutinin__InfluenzaA__ABA42939

SEQ ID NO: 349 - protein, 566 aa, synthetic construct
  REGION 1..566: note = hemagglutinin__InfluenzaA__ABA42978
MKTIIALSYILCLVFAQKLPVNDNSTATLCLGHHAVPNGTLVKTITNDHIEVTNATELVQSSSTGRICDSPHQILDGENCTLIDALLGDPHCDGFQNKEWDLFVERSTAYSNCYPYDVPDYASLRSLVASSGTLEFNNESFNWTGVAQNGTSSACKRRSIKSFFSRLNWLHQLKYKYPALNVTIPNNEKFDKLYIWGVHHPSTDSDQISLYAQASGRVTVSTKRSQQTVIPNIGSRPWVRGVSSRISIYWTIVKPGDILLINSTGNLIAPRGYFKIRSGKSSIMRSNAPIGKCNSECITPNGSIPNDKPFQNVNRITYGACPRYVKQNTLKLATGMRNVPEKQTRGIFGAIAGFIENGWEGMVDGWYGFRHQNSEGTGQAADLKSTQAAINQINGKLNRLIEKTNEKFHQIEKEFSEVEGRIQDLEKYVEDTKIDLWSYNAELLVALENQHTIDLTDSEMNKLFERTRKQLRENAEDMGNGCFKIYHKCDNACIGSIRNGTYDHDVYRDEALNNRFQIKGVELKSGYKDWILWISFAISCFLLCVVLLGFIMWACQKGNIRCNICI

SEQ ID NO: 350 - protein, 566 aa, synthetic construct; identical to SEQ ID NO: 243
  REGION 1..566: note = hemagglutinin__InfluenzaA__ABA43167

SEQ ID NO: 351 - protein, 566 aa, synthetic construct
  REGION 1..566: note = hemagglutinin__InfluenzaA__ABA43178
MKTIIALSYILCLVFAQKLPGNDNSTATLCLGHHAVPNGTIVKTITNDQIEVTNATELVQSSSTGGICDSPHQILDGENCTLIDALLGDPQCDGFQNKKWDLFVERSKAYSNCYPYDVPDYASLRSLVASSGTLEFNNESFNWTGVTQNGTSSACKRRSNNSFFSRLNWLTHLKFKYPALNVTMPNNEKFDKLYIWGVHHPGTDNDQISLYAQASGRITVSTKRSQQTVIPNIGSRPRVRDIPSRISIYWTIVKPGDILLINSTGNLIAPRGYFKIRSGKSSIMRSDAPIGKCNSECITPNGSIPNDKPFQNVNRITYGACPRYVKQNTLKLATGMRNVPEKQTRGIFGAIAGFIENGWEGMVDGWYGFRHQNSEGIGQAADLKSTQAAINQINGKLNRLIGKTNEKFHQIEKEFSEVEGRIQDLEKYVEDTKIDLWSYNAELLVALENQHTIDLTDSEMNKLFERTKKQLRENAEDMGNGCFKIYHKCDNACIGSIRNGTYDHDVYRDEALNNRFQIKGVELKSGYKDWILWISFAISCFLLCIALLGFIMWACQKGNIRCNICI

SEQ ID NO: 352 - protein, 565 aa, synthetic construct
  REGION 1..565: note = hemagglutinin__InfluenzaA__ABA43189
MKAKLLVLLCTFTATYADTICVGYHANNSTDTVDTVLEKNVTVTHSVNLLEDSHNGKLCLLKGIAPLQLGNCSVAGWILGNPECELLISKESWSYIVETPNPENGTCYPGYFADYEELREQLSSVSSFERFEIFPKGSSWPNHTVTGVSASCSHNGKSSFYRNLLWLTGKNGLYPNLSMSYVNNKEKEVLVLWGVHHPPNIGDQRALYHTENAYVSVVSSHYSRRFTPEIAKRPKVRDQEGRINYYWTLLEPGDTIIFEANGNLIAPWYAFALSRGFGSGIITSNAPMDECDAKCQTPQGAINSSLPFQNVHPVTIGECPKYVRSAKLRMVTGLRNIPSIQSRGLFGAIAGFIEGGWTGMVDGWYGYHHQNEQGSGYAADQKSTQNAINGITNKVNSVIEKMNTQFTAVGKEFNKLERRMENLNKKVDDGFLDIWTYNAELLVLLENERTLDFHDSNVKNLYEKVKSQLKNNAKEIGNGCFEFYHKCNNECMESVKNGTYDYPKYSEESKLNREKIDGVKLESMGVYQILAIYSTVASSLVLLVSLGAISFWMCSNGSLQCRICI

SEQ ID NO: 353 - protein, 566 aa, synthetic construct
  REGION 1..566: note = hemagglutinin__InfluenzaA__ABA43200
MKTIIALSYILCLVFAQKLPGNDNSTATLCLGHHAVPNGTIVKTITNDQIEVTNATELVQSSSTGGICDSPHQILDGENCTLIDALLGDPQCDGFQNKKWDLFVERSKAYSNCYPYDVPDYASLRSLVASSGTLEFNNESFNWTGVTQNGTSSACKRRSNNSFFSRLNWLTHLKFKYPALNVTMPNNEKFDKLYIWGVHHPGTDNDQISLYAQASGRITVSTKRSQQTVIPNIGSRPRVRDIPSRISIYWTIVKPGDILLINSTGNLIAPRGYFKIRSGKSSIMRSDAPIGKCNSECITPNGSIPNDKPFQNVNRITYGACPRYVKQNTLKLATGMRNVPEKQTRGIFGAIAGFIENGWEGMVDGWYGFRHQNSEGIGQAADLKSTQAAINQINGKLNRLIGKTNEKFHQIEKEFSEVEGRIQDLEKYVEDTKIDLWSYNAELLVVLENQHTIDLTDSEMNKLFERTKKQLRENAEDMGNGCFKIYHKCDNACIGSIRNGTYDHDVYRDEALNNRFQIKGVELKSGYKDWILWISFAISCFLLCVVLLGFIMWACQKGNIRCNICI

SEQ ID NO: 354 - protein, 566 aa, synthetic construct
  REGION 1..566: note = hemagglutinin__InfluenzaA__ABA43336
MKTIIALSYIFCLVFAQKLPGNDNSTATLCLGHHAVPNGTLVKTITNDQIEVTNATELVQNSSTGRICDSPHRILDGKNCTLIDALLGDPHCDGFQNKEWDLFVERSKAYSNCYPYDVPDYASLRSLVASSGTLEFINEDFNWTGVAQSGGSYACKRGSVNSFFSRLNWLHESEYKYPALNVTMPNNGKFDKLYVWGVHHPITDREQTKLYVRASGRVTVSTKRSQQTVIPNIGSRPWVRGLSSRISIYWTIVKPGDILLINSTGNLIAPRGYFKIRTGKSSIMRSDAPIGTCSSECITPNGSIPNDKPFQNVNRITYGACPRYVKQNTLKLATGMRNVPEKQTRGIFGAIAGFIENGWEGMVDGWYGFRHQNSEGTGQAADLKSTQAAIDQINGKLNRLIEKTNEKFHQIEKEFSEVEGRIQDLEKYVEDTKIDLWSYNAELLVALENQHTIDLTDSEMNKLFEKTRKQLRENAEDMGNGCFKIYHKCDNACIGSIRNGTYDHDVYRDEALNNRFQIKGVELKSGYKDWILWISFAISCFLLCVVLLGFIMWACQKGNIRCNICI

SEQ ID NO: 355 - protein, 568 aa, synthetic construct
  REGION 1..568: note = hemagglutinin__InfluenzaA__ABA54915
MEKVVLLLATASLVKSDQICIGYHANNSTEQVDTIMEKNVTVTHAQDILEKTHNGKLCDLDGVKPLILRDCSVAGWLLGNPMCDEFINVPEWSYIVEKASPANDLCYPGDFNDYEELKHLLSRINHFEKIQIIPKSSWSNHEASSGVSAACPYHGKPSFFRNVVWLIKKNSAYPTIKRSYNNTNQEDLLVLWGIHHPNDAAEQTKLYQNPTTYISVGTSTLNQRLVPKIATRSKVNGQSGRMEFFWTILKPNDAINFESNGNFIAPEYAYKIVKKGDSAIMKSELEYGNCNTKCQTPMGAINSSMPFHNIHPLTIGECPKYVKSNRLVLATGLRNTPQRERRRKKRGLFGAIAGFIEGGWQGMVDGWYGYHHSNEQGSGYAADKESTQKAIDGVTNKVNSIIDKMNTQFEAVGREFNNLERRIENLNKKMEDGFLDVWTYNAELLVLMENERTLDFHDSNVKNLYNKVRLQLRDNAKELGNGCFEFYHKCDNECMESVKNGTYDYPQYSEEARLNREEISGVKLESMGTYQILSIYSTVASSLALAIMVAGLSLWMCSNGSLQCRICI

SEQ ID NO: 356 - protein, 565 aa, synthetic construct
  REGION 1..565: note = hemagglutinin__InfluenzaA__ABA87080
MKVKLLVLLCTFTATYADTICIGYHANNSTDTVDTVLEKNVTVTHSVNLLEDSHNGKLCLLKGIAPLQLGNCSVAGWILGNPECELLISKESWSYIIETPNPENGTCYPGYFADYEELREQLSSVSSFERFEIFPKESSWPNHTVTGVSASCSHNGKSSFYRNLLWLTGKNGLYPNLSKSYANNKEKEVLVLWGVHHPPNMGDQRALYHTENAYVSVVSSHYSRRFTPEIAKRPKVRDQEGRINYYWTLLEPGDTIIFEANGNLIAPRYAFALSRGFGSGIITSNAPMDECDAKCQTPQGAINSSLPFQNVHPVTIGECPKYVRSAKLRMVTGLRNIPSIQSRGLFGAIAGFIEGGWTGMVDGWYGYHHQNEQGSGYAADQKSTQNAINGITNKVNSVIEKMNTQFTAVGKEFNKLERRMENLNKKVDDGFLDIWTYNAELLVLLENERTLDFHDSNVKNLYEKVKSQLKNNAKEIGNGCFEFYHKCNDECMESVKNGTYDYPKYSEESKLNREKIDGVKLESMGVYQILAIYSTVASSLVLLVSLGAISFWMCSNGSLQCRICI

SEQ ID NO: 357 - protein, 565 aa, synthetic construct; identical to SEQ ID NO: 296
  REGION 1..565: note = hemagglutinin__InfluenzaA__ABA87091

SEQ ID NO: 358 - protein, 565 aa, synthetic construct; identical to SEQ ID NO: 296
  REGION 1..565: note = hemagglutinin__InfluenzaA__ABA87231

SEQ ID NO: 359 - protein, 566 aa, synthetic construct; identical to SEQ ID NO: 255
  REGION 1..566: note = hemagglutinin__InfluenzaA__ABA87242

SEQ ID NO: 360 - protein, 566 aa, synthetic construct; identical to SEQ ID NO: 256
  REGION 1..566: note = hemagglutinin__InfluenzaA__ABA87253

SEQ ID NO: 361 - protein, 565 aa, synthetic construct
  REGION 1..565: note = hemagglutinin__InfluenzaA__ABB02781
MKVKLLILLCTFTATYADTICIGYHANNSTDTVDTVLEKNVTVTHSVNLLEDSHNGKLCLLKGIAPLQLGNCSVAGWILGNPECELLISKESWSYIVETPNPENGACYPGYFADYEELREQLSSVSSFERFEIFPKESSWPNHTVTGVSASCSHNGKSSFYRNLLWLTGKNGLYPNLSKSYANNKEKEVLILWGVHHPPNIGDQRTLYHTENAYVSVVSSHYSRRFTPEITKRPKVRDQEGRINYYWTLLEPGDTIIFEANGNLIAPWYAFALSRGFGSGIITSNAPMDECDAKCQTPQGAINSSLPFQNVHPVTIGECPKYVRSAKLRMVTGLRNIPSIQSRGLFGAIAGFIEGGWTGMVDGWYGYHHQNEQGSGYAADQKSTQNAINGITNKVNSVIEKMNTQFTAVGKEFNKLERRMENLNKKVDDGFLDIWTYNAELLVLLENERTLDFHDSNVKNLYEKVKSQLKNNAKEIGNGCFEFYHKCNNECMESVKNGTYDYPKYSEESKLNREKIDGVKLDSMGVYQILAIYSTVASSLVLLVSLGAISFWMCSNGSLQCRVCI

SEQ ID NO: 362 - protein, 565 aa, synthetic construct; identical to SEQ ID NO: 301
  REGION 1..565: note = hemagglutinin__InfluenzaA__ABB02792

SEQ ID NO: 363 - protein, 565 aa, synthetic construct; identical to SEQ ID NO: 299
  REGION 1..565: note = hemagglutinin__InfluenzaA__ABB02803

SEQ ID NO: 364 - protein, 565 aa, synthetic construct
  REGION 1..565: note = hemagglutinin__InfluenzaA__ABB02814
MKAKLLVLLCTFTATYADTICIGYHANNSTDTVDTVLEKNVTVTHSVNLLEDSHNGKLCLLKGIAPLQLGNCSVAGWILGNPECELLISKESWSYIVETPNPENGTCYPGYFADYEELREQLSSVSSFERFEIFPKGSSWPNHTVTGVSASCSHNGKSSFYRNLLWLTGKNGLYPNLSMSYVNNKEKEVLVLWGVHHPPNIGDQRALYHTENAYVSVVSSHYSRRFTPEIAKRPKVRDQEGRINYYWTLLEPGDTIIFEANGNLIAPWYAFALSRGFGSGIITSNAPMDECDAKCQTPQGAINSSLPFQNVHPVTIGECPKYVRSAKLRMVTGLRNIPSIQSRGLFGAIAGFIEGGWTGMVDGWYGYHHQNEQGSGYAADQKSTQNAINGITNKVNSVIEKMNTQFTAVGKEFNKLERRMENLNKKVDDGFLDIWTYNAELLVLLENERTLDFHDSNVKNLYEKVKSQLKNNAKEIGNGCFEFYHKCDNECMESVKNGTYDYPKYSEESKLNREKIDGVKLESMGVYQILAIYSTVASSLVLLVSLGAISFWMCSNGSLQCRICI

SEQ ID NO: 365 - protein, 565 aa, synthetic construct
  REGION 1..565: note = hemagglutinin__InfluenzaA__ABB02825
MKAKLLVLLCTFTATYADTICIGYHANNSTDTVDTVLEKNVTVTHSVNLLEDSHNGKLCLLKGIAPLQLGNCSVAGWILGNPECELLISKESWSYIVETPNPENGTCYPGYFADYEELREQLSSVSSFERFEIFPKGSSWPNHTVTGVSASCSHNGKSSFYRNLLWLTGKNGLYPNLSMSYVNNKEKEVLVLWGVHHPPNIGDQRALYHTENAYVSVVSSHYSRRFTPEIAKRPKVRDQEGRINYYWTLLEPGDTIIFEANGNLIAPWYAFALSRGFGSGIITSNAPMDECDAKCQTPQGAINSSLPFQNVHPVTIGECPKYVRSAKLRMVTGLRNIPSIQSRGLFGAIAGFIEGGWTGMVDGWYGYHHQNEQGSGYAADQKSTQNAINGITNKVNSVIEKMNTQFTAVGKEFNKLERRMENLNKKVDDGFLDIWTYNAELLVLLENERTLDFHDSNVKNLYEKVKSQLKNNAKEIGNGCFEFYHKCDNECMESVKNGTYDYPKYSEESKLNRERIDGVKLESMGVYQILAIYSTVASSLVLLVSLGAISFWMCSNGSLQCRICI

SEQ ID NO: 366 - protein, 566 aa, synthetic construct
  REGION 1..566: note = hemagglutinin__InfluenzaA__ABB02836
MKTIIALSYILCLVFAQKLPGNDNSTATLCLGHHAVPNGTIVKTITNDQIEVTNATELVQSSSTGGICDSPHQILDGENCTLIDALLGDPQCDGFQNKKWDLFVERSKAYSNCYPYDVPDYASLRSLVASSGTLEFNNESFNWTGVTQNGTSSACKRRSNNSFFSRLNWLTHLKFKYPALNVTMPNNEKFDKLYIWGVHHPGTDNDQISLYAQASGRITVSTKRNQQTVIPNIGSRPRVRDIPSRISIYWTIVKPGDILLINSTGNLIAPRGYFKIRSGKSSIMRSDAPIGKCKSECITPNGSIPNDKPFQNVNRITYGACPRYVKQNTLKLATGMRNVPEKQTRGIFGAIAGFIENGWEGMVDGWYGFRHQNSEGIGQAADLKSTQAAINQINGKLNRLIGKTNEKFHQIEKEFSEVEGRIQDLEKYVEDTKIDLWSYNAELLVALENQHTIDLTDSEMNKLFERTKKQLRENAEDMGNGCFKIYHKCDNACIGSIRNGTYDHDVYRDEALNNRFQIKGVELKSGYKDWILWISFAISCFLLCVALLGFIMWACQKGNIRCNICI

SEQ ID NO: 367 - protein, 566 aa, synthetic construct
  REGION 1..566: note = hemagglutinin__InfluenzaA__ABB02847
MKTIIALSYILCLVFAQKLPGNDNSTATLCLGHHAVPNGTIVKTITNDQIEVTNATELVQSSSTGGICDSPHQILDGENCTLIDALLGDPQCDGFQNKKWDLFVERSKAYSNCYPYDVPDYASLRSLVASSGTLEFNNESFNWIGVTQNGTSSACKRRSNNSFFSRLNWLTHLKFKYPALNVTMPNNEKFDKLYIWGVHHPGTDNDQISLYAQASGRITVSTKRSQQTVIPNIGSRPRVRDIPSRISIYWTIVKPGDILLINSTGNLIAPRGYFKIRSGKSSIMRSDAPIGKCNSECITPNGSIPNDKPFQNVNRITYGACPRYVKQNTLKLATGMRNVPEKQTRGIFGAIAGFIENGWEGMVDGWYGFRHQNSEGIGQAADLKSTQAAINQINGKLNRLIGKTNEKFHQIEKEFSEVEGRIQDLEKYVEDTKIDLWSYNAELLVALENQHTIDLTDSEMNKLFERTKKQLRENAEDMGNGCFKIYHKCDNACIGSIRNGTYDHDVYRDEALNNRFQIKGVELKSGYKDWILWISFAISCFLLCVVLLGFIMWACQKGNIRCNICI

SEQ ID NO: 368 - protein, 566 aa, synthetic construct; identical to SEQ ID NO: 47
  REGION 1..566: note = hemagglutinin__InfluenzaA__ABB02858

SEQ ID NO: 369 - protein, 566 aa, synthetic construct
  REGION 1..566: note = hemagglutinin__InfluenzaA__ABB02869
MKTIIALSYILCLVFAQKLPVNDNSTATLCLGHHAVPNGTLVKTITNDHIEVTNATELVQSSSTGRICDSPHQILDGENCTLIDALLGDPHCDGFQNKEWDLFVERSTAYSNCYPYDVPDYASLRSLVASSGTLEFNNESFNWTGVAQNGTSSACKRRSIKSFFSRLNWLHQLKYKYPALNVTMPNNEKFDKLYIWGVHHPSTDSDQISLYAQASGRVTVSTKRSQQTVIPNIGSRPWVRGVSSRISIYWTIVKPGDILLINSTGNLIAPRGYFKIRSGKSSIMRSNAPIGKCNSECITPNGSIPNDKPFQNVNRITYGACPRYVKQNTLKLATGMRNVPEKQTRGIFGAIAGFVENGWEGMVDGWYGFRHQNSEGTGQAADLKSTQAAINQINGKLNRLIEKTNEKFHQIEKEFSEVEGRIQDLEKYVEDTKIDLWSYNAELLVALENQHTIDLTDSEMNKLFERTRKQLRENAEDMGNGCFKIYHKCDNACIGSIRNGTYDHDVYRDEALNNRFQIKGVELKSGYKDWILWISFAISCFLLCVVLLGFIMWACQKGNIRCNICI

SEQ ID NO: 370 - protein, 566 aa, synthetic construct
  REGION 1..566: note = hemagglutinin__InfluenzaA__ABB02880
MKTIIALSYILCLVFAQKLPVNDNSTATLCLGHHAVPNGTLVKTITNDHIEVTNATELVQSSSTGRICDSPHQILDGENCTLIDALLGDPHCDGFQNKEWDLFVERSTAYSNCYPYDVPDYASLRSLVASSGTLEFNNESFNWTGVAQNGTSSACKRRSIKSFFSRLNWLHQLKYKYPALNVTMPNNEKFDKLYIWGVHHPSTDSDQISLYAQASGRVTVSTKRSQQTVIPNIGSRPWVRGVSSRISIYWTIVKPGDILLINSTGNLIAPRGYFKIRSGKSSIMRSNAPIGKCNSECITPNGSIPNDKPFQNVNRITYGACPRYVKQNTLKLATGMRNVPEKQTRGIFGAIAGFIENGWEGMVDGWYGFRHQNSEGTGQAADLKSTQAAINQINRKLNRLIEKTNEKFHQIEKEFSEVEGRIQDLEKYVEDTKIDLWSYNAELLVALENQHTIDLTDSEMNKLFERTRKQLRENAEDMGNGCFKIYHKCDNACIGSIRNGTYDHDVYRDEALNNRFQIKGVELKSGYKDWILWISFAISCFLLCVVLLGFIMWACQKGNIRCNICI

SEQ ID NO: 371 - protein, 566 aa, synthetic construct
  REGION 1..566: note = hemagglutinin__InfluenzaA__ABB02891
MKTIIALSYILCLVFAQKLPVNDNSTATLCLGHHAVPNGTLVKTITNDHIEVTNATELVQSSSTGRICDSPHQILDGENCTLIDALLGDPHCDGFQNKEWDLFVERSTAYSNCYPYDVPDYASLRSLVASSGTLEFNNESFNWTGVAQNGTSSACKRRSIKSFFSRLNWLHQLKYKYPALNVTMPNNEKFDKLYIWGVHHPSTDSDQISLYAQASGRVTVSTKRSQQTVIPNIGSRPWVRGVSSIISIYWTIVKPGDILLINSTGNLIAPRGYFKIRSGKSSIMRSNAPIGECNSECITPNGSIPNDKPFQNVNRITYGACPRYVKQNTLKLATGMRNVPEKQTRGIFGAIAGFIENGWEGMVDGWYGFRHQNSEGTGQAADLKSTQAAINQINGKLNRLIEKTNEKFHQIEKEFSEVEGRIQDLEKYVEDTKIDLWSYNAELLVALENQHTIDLTDSEMNKLFERTRKQLRENAEDMGNGCFKIYHKCDNACIGSIRNGTYDHDVYRDEALNNRFQIKGVELKSGYKDWILWISFAISCFLLCVVLLGFIMWACQKGNIRCNICI

SEQ ID NO: 372 - protein, 566 aa, synthetic construct
  REGION 1..566: note = hemagglutinin__InfluenzaA__ABB02902
MKTIIALSYILCLVFAQKLPVNDNSTATLCLGHHAVPNGTLVKTITNDHIEVTNATELVQSSSTGRICDSPHQILDGENCTLIDALLGDPHCDGFQNKEWDLFVERSTAYSNCYPYDVPDYASLRSLVASSGTLEFNNESFNWTGVAQNGTSSACKRRSIKSFFSRLNWLHQLKYKYPALNVTMPNNEKFDKLYIWGVHHPSTDSDQISLYAQASGRVTVSTKRSQQTVIPNIGSRPWVRGVSSRISIYWTIVKPGDILLINSTGNLIAPRGYFKIRSGKSSIMRSNAPIGKCNSECITPNGSIPNDKPFQNVNRITYGACPRYVKQNTLKLATGMRNVPEKQTRGIFGAIAGFIENGWEGMMDGWYGFRHQNSEGTGQAADLKSTQAAINQINGKLNRLIEKTNEKFHQIEKEFSEVEGRIQDLEKYVEDTKIDLWSYNAELLVALENQHTIDLTDSEMNKLFERTRKQLRENAEDMGNGCFKIYHKCDNACIGSIRNGTYDHDVYRDEALNNRFQIKGVELKSGYKDWILWISFAISCFLLCVVLLGFIMWACQKGNIRCNICI

SEQ ID NO: 373 - protein, 565 aa, synthetic construct
  REGION 1..565: note = hemagglutinin__InfluenzaA__ABB02913
MKAKLLVLLCTFTATYADTICIGYHANNSTDTVDTVLEKNVTVTHSVNLLEDSHNGKLCLLKGIAPLQLGNCSVAGWILGNPECELLISKESWSYIVETPNPENGTCYPGYFADYEELREQLSSVSSFERFEIFPKGSSWPNHTVTGVSASCSHNGKSSFYRNLLWLTGKNGLYPNLSMSYVNNKEKEVLVLWGVHRPPNIGDQRALYHTENAYVSVVSSHYSRRFTPEIAKRPKVRDQEGRINYYWTLLEPGDTIIFEANGNLIAPWYAFALSRGFGSGIITSNAPMDECDAKCQTPQGAINSSLPFQNVHPVTIGECPKYVRSAKLRMVTGLRNIPSIQSRGLFGAIAGFIEGGWTGMVDGWYGYHHQNEQGSGYAADQKSTQNAINRITNKVNSVIEKMNTQFTAVGKEFNKLERRMENLNKKVDDGFLDIWTYNAELLVLLENERTLDFHDSNVKNLYEKVKSQLKNNAKEIGNGCFEFYHKCNNECMESVKNGTYDYPKYSEESKLNREKIDGVKLESMGVYQILAIYSTVASSLVLLVSLGAISFWMCSNGSLQCRICI

SEQ ID NO: 374 - protein, 565 aa, synthetic construct
  REGION 1..565: note = hemagglutinin__InfluenzaA__ABB02924
MKVKLLVLLCTFTATYADTICIGYHANNSTDTVDTVLEKNVTVTHSVNLLEDSHNGKLCLLKGIAPLQLGNCSVAGWILGNPECELLISKESWSYIVETPNPENGTCYPGYFADYEELREQLSSVSSFERFEIFPKESSWPNHTVTGVSASCSHNGKSSFYRNLLWLTGKNGLYPNLSKSYANNKEKEVLVLWGVHHPPNIGDQRALYHTENAYVSVVSSHYSRRFTPEIAKRPKVRDQEGRINYYWTLLEPGDTIIFEANGNLIAPRYAFALSRGFGSGIITSNAPMDECDAKCQTPQGAINSSLPFQNVHPVTIGECPKYVRSAKLRMVTGLRNIPSIQSRGLFGAIAGFIEGGWTGMVDGWYGYHHQNEQGSGYAADQKSTQNAINGITNKVNAVIEKMNTQFTAVGKEFNKLERRMENLNKKVDDGFLDIWTYNAELLVLLENERTLDFHDSNVKNLYEKVKSQLKNNAKEIGNGCFEFYHKCNDECMESVKNGTYDYPKYSEESKLNREKIDGVKLESMGVYQILAIYSTVASSLVLLVSLGAISFWMCSNGSLQCRICI

SEQ ID NO: 375 - protein, 565 aa, synthetic construct
  REGION 1..565: note = hemagglutinin__InfluenzaA__ABB02936
MKAKLLVLLCTFTATYADTICIGYHANNSTDTVDTVLEKNVTVTHSVNLLEDSHNGKLCLLKGIAPLQLGNCSVAGWILGNPECELLISKESWSYIVETPNPENGTCYPGHFADYEELREQLSSVSSFERFEIFPKGSSWPNHTVTGVSASCSHNGKSSFYRNLLWLTGKNGLYPNLSMSYVNNKEKEVLVLWGVHHPPNIGDQRALYHTENAYVSVVSSHYSRRFTPEIAKRPKVRDQEGRINYYWTLLEPGDTIIFEANGNLIAPWYAFALSRGFGSGIITSNAPMDECDAKCQTPQGAINSSLPFQNVHPVTIGECPKYVRSAKLRMVTGLRNIPSIQSRGLFGAIAGFIEGGWTGMVDGWYGYHHQNEQGSGYAADQKSTQNAINGITNKVNSVIEKMNTQFTAVGKEFNKLERRMENLNKKVDDGFLDIWTYNAELLVLLENERTLDFHDSNVKNLYEKVKSQLKNNAKEIGNGCFEFYHKCNNECMESVKNGTYDYPKYSEESKLNREKIDGVKLESMGVYQILAIYSTVASSLVLLVSLGAISFWMCSNGSLQCRICI

SEQ ID NO: 376 - protein, 566 aa, synthetic construct
  REGION 1..566: note = hemagglutinin__InfluenzaA__ABB02947
MKTIIALSYILCLVFAQKIPGNDNSTATLCLGHHAVPNGTLVKTITNDQIEVTNATELVQSSSTGRICDSPHRILDGENCTLIDALLGDPHCDGFQNKEWDLFVERSKAYSNCYPYDVQDYASLRSLVASSGTLEFNNESFNWTGVAQNGTSYACKRRSIKSFFSRLNWLHQLKYKYPALNVTMPNNDKFDKLYIWGVHHPSTDSDQTSLYAQASGRVTVSTKRSQQTVIPNIGSRPWVRGVSSRISIYWTIVKPGDILLINSTGNLIAPRGYFKIRSGKSSIMRSDAPIGKCNSECITPNGSIPNDKPFQNVNRITYGACPRYVKQNTLKLATGMRNVPEKQTRGIFGAIAGFIENGWEGMVDGWYGFRHQNSEGTGQAADLKSTQAAINQINGKLNRLIEKTNEKFHQIEKEFSEVEGRIQDLEKYVEDTKIDLWSYNAELLVALENQHTIDLTDSEMNKLFERTRKQLRENAEDMGNGCFKIYHKCDNACIGSIRNGTYDHDVYRDEALNNRFQIKGVELKSGYKDWILWISFAISCFLLCVVLLGFIMWACQKGNIRCNICI

SEQ ID NO: 377 - protein, 566 aa, synthetic construct; identical to SEQ ID NO: 186
  REGION 1..566: note = hemagglutinin__InfluenzaA__ABB02958

SEQ ID NO: 378 - protein, 566 aa, synthetic construct; identical to SEQ ID NO: 186
  REGION 1..566: note = hemagglutinin__InfluenzaA__ABB02969

SEQ ID NO: 379 - protein, 566 aa, synthetic construct
  REGION 1..566: note = hemagglutinin__InfluenzaA__ABB02980
MKTIIALSYILCLVFAQKLPGNDNSTATLCLGHHAVPNGTLVKTITNDQIEVTNATELVQSSSTGRICDSPHQILDGENCTLIDALLGDPHCDGFQNKEWDLFVERSKAYSNCYPYDVPDYASLRSLVASSGTLEFNNESFNWTGVAQNGTSSACKRRSNKSFFSRLNWLHQLKYKYPALNVTMPNNEKFDKLYIWGVHHPSTDSDQISLYAQASGRVTVSTKRSQQTVIPNIGSRPWVRGVSSIISIYWTIVKPGDILLINSTGNLIAPRGYFKIRSGKSSIMRSDAPIGKCNSECITPNGSIPNDKPFQNVNRITYGACPRYVKQNTLKLATGMRNVPEKQTRGIFGAIAGFIENGWEGMVDGWYGFRHQNSEGTGQAADLKSTQAAINQINGKLNRLIEKTNEKFHQIEKEFSEVEGRIQDLEKYVEDTKIDLWSYNAELLVALENQHTIDLTDSEMNKLFERTKKQLRENAEDMGNGCFKIYHKCDNACIGSIRNGTYDHDVYRDEALNNRFQIKGVELKSGYKDWILWISFAISCFLLCVVLLGFIMWACQKGNIRCNICI

SEQ ID NO: 380 - protein, 566 aa, synthetic construct
  REGION 1..566: note = hemagglutinin__InfluenzaA__ABB02991
MKTIIALSYILCLVFAQKLPGNDNSTATLCLGHHAVPNGTLVKTITNDQIEVTNATELVQSSSTGRICDNPHQILDGENCTLIDALLGDPHCDGFQNKEWDLFVERSKAYSNCYPYDVPDYASLRSLVASSGTLEFNNESFNWTGVAQNGTSSACKRRSNKSFFSRLNWLHQLKYKYPALNVTMPNNEKFDKLYIWGVHHPSTDSDQISLYAQASGRVTVSTKRSQQTVIPNIGSRPWVRGVSSIISIYWTIVKPGDILLINSTGNLIAPRGYFKIRSGKSSIMRSDAPIGKCNSECITPNGSIPNDKPFQNVNRITYGACPRYVKQNTLKLATGMRNVPEKQTRGIFGAIAGFIENGWEGMVDGWYGFRHQNSEGTGQAADLKSTQAAINQINGKLNRLIEKTNEKFHQIEKEFSEVEGRIQDLEKYVEDTKIDLWSYNAELLVALENQHTIDLTDSEMNKLFERTKKQLRENAEDMGNGCFKIYHKCDNACIGSIRNGTYDHDVYRDEALNNRFQIKGVELKSGYKDWILWISFAISCFLLCVVLLGFIMWACQKGNIRCNICI

SEQ ID NO: 381 - protein, 566 aa, synthetic construct
  REGION 1..566: note = hemagglutinin__InfluenzaA__ABB03002
MKTIIALSYILCLVFAQKLPGNDNSTATLCLGHHAVPNGTLVKTITNDQIEVTNATELVQSSSTGRICNSPHQILDGENCTLIDALLGDPHCDGFQNKEWDLFVERSKAYSNCYPYDVPDYASLRSLVASSGTLEFNNESFNWTGVAQNGTSSACKRRSNKSFFSRLNWLHQLKYKYPALNVTMPNNEKFDKLYIWGVHHPSTDSDQISLYAQASGRVTVSTKRSQQTVIPNIGSGPWVRGVSSRISIYWTIVKPGDILLINSTGNLIAPRGYFKIRSGKSSIMRSDAPIGKCNSECITPNGSIPNDKPFQNVNRITYGACPRYVKQNTLKLATGMRNVPEKQTRGIFGAIAGFIENGWEGMVDGWYGFRHQNSEGTGQAADLKSTQAAINQINGKLNRLIEKTNEKFHQIEKEFSEVEGRIQDLEKYVEDTKIDLWSYNAELLVALENQHTIDLTDSEMNKLFERTKKQLRENAEDMGNGCFKIYHKCDNACIGSIRNGTYDHDVYRDEALNNRFQIKGVELKSGYKDWILWISFAISCFLLCVVLLGFIMWACQKGNIRCNICI

SEQ ID NO: 382 - protein, 566 aa, synthetic construct
  REGION 1..566: note = hemagglutinin__InfluenzaA__ABB03013
MKTIIALSYILCLVFAQKLPGNDNSTATLCLGHHAVPNGTLVKTITSDQIEVTNATELVQSSSTGRICDSPHRILDGENCTLIDALLGDPHCDGFQNKEWDLFVERSKAYSNCYPYDVPDYASLRSLVASSGTLEFNNESFNWTGVAQNGTSFACKRRSIKSFFSRLNWLHQLKYKYPALNVTMPNNDKFDKLYIWGVHHPGTDSDQTSLYAQASGRVTVSTKRSQQTVIPNIGSGPWVRGVSSRISIYWTIVKPGDILLINSTGNLIAPRGYFKIRSGKSSIMRSDAPIGKCNSECITPNGSIPNDKPFQNVNRITYGACPRYVKQNTLKLATGMRNVPEKQTRGIFGAIAGFIENGWEGMVDGWYGFRHQNSEGTGQAADLKSTQAAINQINGKLNRLIEKTNEKFHQIEKEFTEVEGRIQDLEKYVEDTKIDLWSYNAELLVALENQHTIDLTDSEMNKLFERTRKQLRENAEDMGNGCFKIYHKCDNACIGSIRNGTYDHDVYRDEALNNRFQIKGVELKSGYKDWILWISFATSCFLLCVVLLGFIMWACQKGNIRCNICI

SEQ ID NO: 383 - protein, 566 aa, synthetic construct
  REGION 1..566: note = hemagglutinin__InfluenzaA__ABB03024
MKTIIALSYILCLVFAQKLPGNDNSTATLCLGHHAVPNGTLVKTITNDQIEVTNATELVQSSSTGRICDSPHQILDGENCTLIDALLGDPHCDGFQNKEWDLFVERSKAYSNCYPYDVPDYASLRSLVASSGTLEFNNESFNWTGVAQNGTSSACKRRSNKSFFSRLNWLHQLKYKYPALNVTMPNNEKFDKLYIWGVHHPSTDSDQISLYAQASGRVTVSTKRSQQTVIPNIGSRPWIRGVSSRISIYWTIVKPGDILLINSTGNLIAPRGYFKIRSGKSSIMRSDAPIGKCNSECITPNGSIPNDKPFQNVNRITYGACPRYVKQNTLKLATGMRNVPEKQTRGIFGAIAGFIENGWEGMVDGWYGFRHQNSEGTGQAADLKSTQAAINQINGKLNRLIEKTNEKFHQIEKEFSEVEGRIQDLEKYVEDTKIDLWSYNAELLVALENQHTIDLTDSEMNKLFERTKKQLRENAEDMGNGCFKIYHKCDNACIGSIRNGTYDHDVYRDEALNNRFQIKGVELKSGYKDWILWISFAISCFLLCVVLLGFIMWACQKGNIRCNICI

SEQ ID NO: 384 - protein, 566 aa, synthetic construct
  REGION 1..566: note = hemagglutinin__InfluenzaA__ABB03035
MKTIIALSYILCLVFAQKLPGNDNSTATLCLGHHAVPNGTLVKTITSDQIEVTNATELVQSSSTGRICDSPHRILDGENCTLIDALLGDPHCDGFQNKEWDLFVERSKAYSNCYPYDVPDYASLRSLVASSGTLEFNNESFNWTGVAQNGTSFACKRRSIKSFFSRLNWLHQLKYKYPALNVAMPNNDKFDKLYIWGVHHPGTDSDQTSLYAQASGRVTVSTKRSQQTVIPNIGSRPWVRGVSSRISIYWTIVKPGDILLINSTGNLIAPRGYFKIRSGKSSIMRSDAPIGKCNSECITPNGSIPNDKPFQNVNRITYGACPRYVKQNTLKLATGMRNVPEKQTRGIFGAIAGFIENGWEGMVDGWYGFRHQNSEGTGQAADLKSTQAAINQINGKLNRLIEKTNEKFHQIEKEFTEVEGRIQDLEKYVEDTKIDLWSYNAELLVALENQHTIDLTDSEMNKLFERTRKQLRENAEDMGNGCFKIYHKCDNACIGSIRNGTYDHDVYRDEALNNRFQIKGVELKSGYKDWILWISFATSCFLLCVVLLGFIMWACQKGNIRCNICI

SEQ ID NO: 385 - protein, 566 aa, synthetic construct
  REGION 1..566: note = hemagglutinin__InfluenzaA__ABB03046
MKTIIALSYILCLVFAQKLPGNDNSTATLCLGHHAVPNGTLVKTITNDQIEVTNATELVQSSSTGRICDSPHQILDGENCTLIDALLGDPHCDGFQNKEWDLFVERSKAYSNCYPYDVPDYASLRSLVASSGTLEFNNESFNWTGVAQNGTSSACKRRSNKSFFSRLNWLHQLKYKYPALNVTMPNNEKFDKLYIWGVHHPSTDSDQISLYAQASGRVTVSTKRSQQTVIPNIGSRPWVRGVSSGISIYWTIVKPGDILLINSTGNLIAPRGYFKIRSGKSSIMRSDAPIGKCNSECITPNGSIPNDKPFQNVNRITYGACPRYVKQNTLKLATGMRNVPEKQTRGIFGAIAGFIENGWEGMVDGWYGFRHQNSEGTGQAADLKSTQAAINQINGKLNRLIEKTNEKFHQIEKEFSEVEGRIQDLEKYVEDTKIDLWSYNAELLVALENQHTIDLTDSEMNKLFERTKKQLRENAEDMGNGCFKIYHKCDNACIGSIRNGTYDHDVYRDEALNNRFQIKGVELKSGYKDWILWISFAISCFLLCVALLGFIMWACQKGNIRCNICI

SEQ ID NO: 386 - protein, 566 aa, synthetic construct
  REGION 1..566: note = hemagglutinin__InfluenzaA__ABB03057
MKTIIALSYILCLVFAQELPGNDNSTATLCLGHHAVPNGTIVKTITNDQIEVTNATELVQSSSTGGICDSPHQILDGENCTLIDALLGDPQCDGFQNKKWDLFVERSKAYSNCYPYDVPDYASLRSLVASSGTLEFNNESFNWTGVTQNGTSSACKRRSNNSFFSRLNWLTHLKFKYPALNVTMPNNEKFDKLYIWGVHHPGTDNDQTSLYAQASGRITVSTKRSQQTVIPNIGSRPRVRDIPSRISIYWTIVKPGDILLINSTGNLIAPRGYFKIRSGKSSIMRSDAPIGKCNSECITPNGSIPNDKPFQNVNRITYGACPRYVKQNTLKLATGMRNVPEKQTRGIFGAIAGFIENGWEGMVDGWYGFRHQNSEGIGQAADLKSTQAAINQINGKLNRLIGKTNEKFHQIEKEFSEVEGRIQDLEKYVEDTKIDLWSYNAELLVALENQHTIDLTDSEMNKLFERTKKQLRENAEDMGNGCFKIYHKCDNACIGSIRNGTYDHDVYRDEALNNRFQIKGVELKLGYKDWILWISFAISCFLLCVALLGFIMWACQKGNIRCNICI

SEQ ID NO: 387 - protein, 566 aa, synthetic construct; identical to SEQ ID NO: 286
  REGION 1..566: note = hemagglutinin__InfluenzaA__ABB03068

SEQ ID NO: 388 - protein, 566 aa, synthetic construct; identical to SEQ ID NO: 243
  REGION 1..566: note = hemagglutinin__InfluenzaA__ABB03079

SEQ ID NO: 389 - protein, 566 aa, synthetic construct; identical to SEQ ID NO: 243
  REGION 1..566: note = hemagglutinin__InfluenzaA__ABB03090

SEQ ID NO: 390 - protein, 565 aa, synthetic construct
  REGION 1..565: note = hemagglutinin__InfluenzaA__ABB03101
MKVKLLILLCTFTATYADTICIGYHANNSTDTVDTVLEKNVTVTHSVNLLEDSHNGKLCLLKGIAPLQLGNCSVAGWILGNPECELLISKESWSYIVETPNPENGACYPGYFADYEELREQLSSVSSFERFEIFPKKSSWPNHTVTGVSASCSHNGKSSFYRNLLWLTGKNGLYPNLSKSYANNKEKEVLILWGVHHPPNIGDQRTLYHTENAYVSVVSSHYSRRFTPEITKRPKVRDQEGRINYYWTLLEPGDTIIFETNGNLIAPWYAFALSRGFGSGIITSNAPMDECDAKCQTPQGAINSSLPFQNVHPVTIGECPKYVRSAKLRMVTGLRNIPSIQSRGLFGAIAGFIEGGWTGMVDGWYGYHHQNEQGSGYAADQKSTQNAINGITNKVNSVIEKMNTQFTAVGKEFNKLERRMENLNKKVDDGFLDIWTYNAELLVLLENERTLDFHDSNVKNLYEKVKSQLKNNAKEIGNGCFEFYHKCNNECMESVKNGTYDYPKYSEESKLNREKIDGVKLDSMGVYQILAIYSTVASSLVLLVSLGAISFWMCSNGSLQCRICI

SEQ ID NO: 391 - protein, 566 aa, synthetic construct
  REGION 1..566: note = hemagglutinin__InfluenzaA__ABB03112
MKTIIALSYILCLVFAQKLPGNDNSTATLCLGHHAVPNGTIVKTITNDQIEVTNATELVQSSSTGGICDSPHQILDGENCTLIDALLGDPQCDGFQNKKWDLFVERSKAYSNCYPYDVPDYASLRSLVASSGTLEFNNESFNWTGVTQNGTSSACKRRSNKSFFSRLNWLTHLKYKYPALNVTMPNNEKFDKLYIWGVHHPGTDSDQISLYAQASGRITVSTKRSQQTVIPNIGSRPRVRDVSSRISIYWTIVKPGDILLINSTGNLIAPRGYFKIRSGKSSIMRSDAPIGKCNSECITPNGSIPNDKPFQNVNKITYGACPRYVKQNTLKLATGMRNVPEKQTRGIFGAIAGFIENGWEGMVDGWYGFRHQNSEGTGQAADLKSTQAAINQINGKLNRLIGKTNEKFHQIEKEFSEVEGRIQDLEKYVEDTKIDLWSYNAELLVALENQHTIDLTDSEMNKLFERTKKQLRENAEDMGNGCFKIYHKCDNTCIESIRNGTYDHDVYRDEALNNRFQIKGVELKSGYKDWILWISFAISCFLLCVALLGFIMWACQKGNIRCNICI

SEQ ID NO: 392 - protein, 565 aa, synthetic construct
  REGION 1..565: note = hemagglutinin__InfluenzaA__ABB03123
MKVKLLVLLCTFTATYADTICIGYHANNSTDTVDTVLEKNVTVTHFVNLLEDSHNGKLCLLKGIAPLQLGNCSVAGWILGNPECELLISKESWSYIVETPNPENGTCYPGYFADYEELREQLSSVSSFERFEIFPKESSWPNHTVTGVSASCSHNGKSSFYRNLLWLTGKNGLYPNLSKSYANNKEKEVLVLWGVHHPPNIGDQRALYHTENAYVSVVSSHYSRRFTPEIAKRPKVRDQEGRINYYWTLLEPGDTIIFEANGNLIAPRYAFALSRGFGSGIITSNAPMDECDAKCQTPQGAINSSLPFQNVHPVTIGECPKYVRSAKLRMVTGLRNIPSIQSRGLFGAIAGFIEGGWTGMVDGWYGYHHQNEQGSGYAADQKSTQNAINGITNKVNSVIEKMNTQFTAVGKEFNKLERRMENLNKKVDDGFLDIWTYNAELLVLLENERTLDFHDSNVKNLYEKVKSQLKNNAKEIGNGCFEFYHKCNDECMESVKNGTYDYPKYSEESKLNREKIDGVKLESMGVYQILAIYSTVASSLVLLVSLGAISFWMCSNGSLQCRICI

SEQ ID NO: 393 - protein, 565 aa, synthetic construct
  REGION 1..565: note = hemagglutinin__InfluenzaA__ABB03134
MKVKLLILLCTFTATYADTICIGYHANNSTDTVDTVLEKNVTVTHSVNLLEDSHNGKLCLLKGIAPLQLGNCSVAGWILGNPECELLISKESWSYIVETPNPENGTCYPGYFADYEELREQLSSVSSFERFEIFPKESSWPNHTVTGVSASCSHNGKSSFYRNLLWLTEKNGLYPTLSKSYANNKEKEVLILWGVHHPPNIGDQRTLYHTENAYVSVVSSHYSRRFTPEITKRPKVRDQEGRINYYWTLLEPGDTIIFEANGNLIAPWYAFALSRGFGSGIITSNAPMDECDAKCQTPQGAINSSLPFQNVHPVTIGECPKYVRSAKLRMVTGLRNIPSIQSRGLFGAIAGFIEGGWTGMVDGWYGYHHQNEQGSGYAADQKSTQNAINGITNKVNSVIEKMNTQFTAVGKEFNKLERRMENLNKKVDDGFLDIWTYNAELLVLLENERTLDFHDSNVKNLYEKVKSQLKNNAKEIGNGCFEFYHKCNNECMESVKNGTYDYPKYSEESKLNREKIDGVKLESMGVYQILAIYSTVASSLVLLVSLGAISFWMCSNGSLQCRICI

SEQ ID NO: 394 - protein, 565 aa, synthetic construct; identical to SEQ ID NO: 299
  REGION 1..565: note = hemagglutinin__InfluenzaA__ABB03145

SEQ ID NO: 395 - protein, 566 aa, synthetic construct
  REGION 1..566: note = hemagglutinin__InfluenzaA__ABB04283
MKTIIALSYIFCLVFAQNLPGNDNSTATLCLGHHAVPNGTLVKTITNDQIEVTNATELVQSSSTGRICDSPHRILDGKNCTLIDALLGDPHCDGFQNEKWDLFVERSKAFSNCYPYDVPDYASLRSLVASSGTLEFINEGFNWTGVTQSGGSYACKRGSDKSFFSRLNWLYESESKYPALNVTMPNNGNFDKLYIWGVHHPSTDKEQTNLYVRASGRVTVSTKRSQQTIIPNIGPRPWVRGLSSRISIYWTIVKPGDILLINSSGNLIAPRGYFKIRTGKSSIMRSDAPIGTCSSECITPNGSIPNDKPFQNVNKITYGACPKYVKQNTLKLATGMRNIPEKQTRGIFGAIAGFIENGWEGMVDGWYGFRHQNSEGTGQAADLKSTQAAIDQINGKLNRVIEKTNEKFHQIEKEFSEVEGRIQDLEKYVEDTKIDLWSYNAELLVALENQHTIDLTDSEMNKLFEKTRRQLRENAEDMGNGCFKIYHKCDNACIGSIRNGTYDHDVYRDEALNNRFQIKGVELKSGYKDWILWISFAISCFLLCVVLLGFIMWACQKGNIRCNICI

SEQ ID NO: 396 - protein, 566 aa, synthetic construct
  REGION 1..566: note = hemagglutinin__InfluenzaA__ABB04294
MKTIIALSYIFCLVLGQDLPGNDNSTATLCLGHHAVPNGTLVKTITNDQIEVTNATELVQSSSTGKICNNPHRILDGINCTLIDALLGDPHCDGFQNEKWDLFVERSKAFSNCYPYDVPDYASLRSLVASSGTLEFINEGFNWTGVTQNGGSNACKRGPDSGFFSRLNWLYKSGSTYPVLNVTMPNNDNFDKLYIWGVHHPSTDQEQTNLYVQASGRVTVSTKRSQQTIIPNIGSRPWVRGLSSRISIYWTIVKPGDILVINSNGNLIAPRGYFKMRTGKSSIMRSDAPIGTCISECITPNGSIPNDKPFQNVNKITYGACPKYVKQNTLKLATGMRNVPEKQTRGIFGAIAGFIENGWEGMIDGWYGFRHQNSEGTGQAADLKSTQAAIDQINGKLNRVIEKTNEKFHQIEKEFSEVEGRIQDLEKYVEDTKIDLWSYNAELLVALENQHTIDLTDSEMNKLFEKTRRQLRENAEDMGNGCFKIYHKCDNACIGSIRNGTYDHDVYRDEALNNRFQIKGVELKSGYKDWILWISFAISCFLLCVVLLGFIMWACQKGNIRCNICI

SEQ ID NO: 397 - protein, 566 aa, synthetic construct
  REGION 1..566: note = hemagglutinin__InfluenzaA__ABB04305
MKTIIALSYIFCLVFAQKLPENDNSTATLCLGHHAVPNGTLVKTITNDQIEVTNATELVQSSSTGRICDSPHRILDGKNCTLIDALLGDPHCDGFQNEKWDLFVERSKAFSNCYPYDVPDYASLRSLVASSGTLEFINEGFNWTGVTQSGGSYACKRGSVNSFFSRLNWLYKSESKYPVLNVTMPNNGKFDKLYIWGVHHPSTDKEQTNLYVRASGKVTVSTKRSQQTVIPNIGSRPWVRGLSSRISIYWTIVKPGDILLINSTGNLIAPRGYFKIRTGKSSIMRSDAPIGTCSSECITPNGSIPNDKPFQNVNKITYGACPRYVKQNTLKLATGMRNVPEKQTRGIFGAIAGFIENGWEGMVDGWYGFRHQNSEGTGQAADLKSTQAAIDQINGKLNRLIEKTNEKFHQIEKEFSEVEGRIQDLEKYVEDTKIDLWSYNAELLVALENQHTIDLTDSEMNKLFEKTRKQLRENAEDMGNGCFKIYHKCDNACIGSIRNGTYDHDVYRDEALNNRFQIKGVELKSGYKDWILWISFAISCFLLCVVLLGFIMWACQKGNIRCNICI

SEQ ID NO: 398 - protein, 566 aa, synthetic construct
  REGION 1..566: note = hemagglutinin__InfluenzaA__ABB04316
MKTIIALSYIFCLVFAQKLPGNDNSTATLCLGHHAVPNGTLVKTITNDQIEVTNATELVQSSSTGRICDSPHRILDGKNCTLIDALLGDPHCDGFQNEKWDLFVERSKAYSNCYPYDVPDYASLRSLVASSGTLEFINEDFNWTGVTQSGGSYACKRGSVKSFFSRLNWLHESEYKYPALNVTMPNNGKFDKLYIWGVHHPSTDREQTNLYVRASGRVTVSTKRSQQTVIPNIGSRPWVRGLSSRISIYWTIVKPGDILLINSTGNLIAPRGYFKIRTGKSSIMRSDAPIGTCSSECITPNGSIPNDKPFQNVNKITYGACPRYVKQNTLKLATGMRNVPEKQTRGIFGAIAGFIENGWEGMVDGWYGFRHQNSEGTGQAADLKSTQAAIDQINGKLNRLIEKTNEKFHQIEKEFSEVEGRIQDLEKYVEDTKIDLWSYNAELLVALENQHTIDLTDSEMNKLFEKTRKQLRENAEDMGNGCFKIYHKCDNACIGSIRNGTYDHDVYRDEALNNRFQIKGVELKSGYKNWILWISFAISCFLLCVVLLGFIMWACQKGNIRCNICI

SEQ ID NO: 399 - protein, 566 aa, synthetic construct
  REGION 1..566: note = hemagglutinin__InfluenzaA__ABB04327
MKTIIALSYIFCLVFAQKLPGNDNSTATLCLGHHAVPNGTLVKTITNDQIEVTNATELVQSSSTGRICDSPHRILDGKNCTLIDALLGDPHCDGFQNEKWDLFVERSKAFSNCYPYDVPDYASLRSLVASSGTLEFINEGFNWTGVTQSGGSYACKRGSVNSFFSRLNWLYKSEYKYPALNVTMPNNGKFDKLYIWGVHHPSTEKEQTNLYVRASGRVTVSTKRSQQTVIPNIGSIPWVRGLSSRISIYWTIVKPGDILLINSTGNLIAPRGYFKIRTGKSSIMRSDAPIGTCSSECITPNGSIPNDKPFQNVNKITYGACPRYVKQNTLKLATGMRNVPEKQTRGIFGAIAGFIENGWEGMVDGWYGFRHQNSEGTGQAADLKSTQAAIDQINGKLNRLIEKTNEKFHQIEKEFSEVEGRIQDLEKYVEDTKIDLWSYNAELLVALENQHTIDLTDSEMNKLFEKTRKQLRENAEDMGNGCFKIYHKCDNACIGSIRNGTYDHDVYRDEALNNRFQIKGVELKSGYKDWILWISFAISCFLLCVVLLGFIMWACQKGNIRCNICI

SEQ ID NO: 400 - protein, 566 aa, synthetic construct
  REGION 1..566: note = hemagglutinin__InfluenzaA__ABB04338
MKTIIALSYIFCLVLGQDFPGNDNSTATLCLGHHAVPNGTLVKTITNDQIEVTNATELVQSSSTGKICNNPHRILDGIDCTLIDALLGDPHCDGFQNETWDLFVERSKAFSNCYPYDVPDYASLRSLVASSGTLEFINEGFTWTGVTQNGGSNACKRGPDSGFFSRLNWLYKSGSTYPVLNVTMPNNDNFDKLYIWGVHHPSTDQEQTSLYVQASGRVTVSTKRSQQTIIPNIGSRPWVRGLSSRISIYWTIVKPGDILVLNSNGNLIAPRGYFKMRTGKSSIMRSDAPIGTCISECITPNGSIPNDKPFQNVNKITYGACPKYVKQNTLKLATGMRNVPEKQTRGLFGAIAGFIENGWEGMIDGWYGFRHQNSEGTGQAADLKSTQAAIDQINGKLNRVIEKTNEKFHQIEKEFSEVEGRIQDLEKYVEDTKIDLWSYNAELLVALENQHTIDLTDSEMNKLFEKTRRQLRENAEDMGNGCFKIYHKCDNACIGSIRNGTYDHDVYRDEALNNRFQIKGVELKSGYKDWILWISFAISCFLLCVVLLGFIMWACQKGNIRCNICI

SEQ ID NO: 401 - protein, 566 aa, synthetic construct
  REGION 1..566: note = hemagglutinin__InfluenzaA__ABB04349
MKTIIALSYIFCLVFAQKLPGNDNSTATLCLGHHAVPNGTLVKTITNDQIEVTNATELVQSSSTGRICDSPHRILDGKNCTLIDALLGDPHCDGFQNEKWDLFVERSKAFSNCYPYDVPDYASLRSLVASSGTLEFINEGFNWTGVTQSGGSYACKRGSVNSFFSRLNWLYKSESKYPVLNVTMPNNGKFDKLYIWGVHHPSTDKEQTNLYVRASGKVTVSTKRSQQTVIPNIGSRPWVRGLSSRISIYWTIVKPGDILLINSTGNLIAPRGYFKIRTGKSSIMRSDAPIGTCNSECITPNGSIPNDKPFQNVNKITYGACPRYVKQNTLKLATGMRNVPEKQTRGIFGAIAGFIENGWEGMVDGWYGFRHQNSEGTGQAADLKSTQAAIDQINGKLNRLIEKTNEKFHQIEKEFSEVEGRIQDLEKYVEDTKIDLWSYNAELLVALENQHTIDLTDSEMNKLFEKTRKQLRENAEDMGNGCFKIYHKCDNACIGSIRNGTYDHDVYRDEALNNRFQIKGVELKSGYKDWILWISFAISCFLLCVVLLGFIMWACQKGNIRCNICI

SEQ ID NO: 402 - protein, 566 aa, synthetic construct
  REGION 1..566: note = hemagglutinin__InfluenzaA__ABB04360
MKTIIALSYIFCLVFAQKLPGNDNSTATLCLGHHAVPNGTLVKTITNDQIEVTNATELVQSSSTGRICDSPHRILDGKNCTLIDALLGDPHCDGFQNEKWDLFVERSKAYSNCYPYDVPDYASLRSLVASSGTLEFINEDFNWTGVTQSGGSYACKRGSVNSFFSRLNWLHKSEYKYPALNVTMPNNGKFDKLYIWGVHHPSTDREQTNLYVRASGRVTVSTKRSQQTVIPNIGSRPWVRGLSSRISIYWTIVKPGDILLINSTGNLIAPRGYFKIRTGKSSIMRSDAPIGTCSSECITPNGSIPNDKPFQNVNKITYGACPRYVKQNTLKLATGMRNVPEKQTRGIFGAIAGFIENGWEGMVDGWYGFRHQNSEGTGQAADLKSTQAAIDQINGKLNRLIEKTNEKFHQIEKEFSEVEGRIQDLEKYVEDTKIDLWSYNAELLVALENQHTIDLTDSEMNKLFEKTRKQLRENAEDMGNGCFKIYHKCDNACIGSIRNGTYDHDVYRDEALNNRFQIKGVELKSGYKDWILWISFAISCFLLCVVLLGFIMWACQKGNIRCNICI

SEQ ID NO: 403 - protein, 566 aa, synthetic construct
  REGION 1..566: note = hemagglutinin__InfluenzaA__ABB04371
MKTIIALSYIFYLALGQDLPGNDNSKATLCLGHHAVPNGTLVKTITDDQTEVTNATELVQSSSTGKICNNPHRILDGMDCTLIDALLGDPHCDVFQNETWDLFVERSKAFSNCYPYDVPDYASLRSLVASSGTMEFITEGFTWTEVTQNGGSNACKRGPDSGFFSRLNWLTKSGRTYPVLNVTMPNNDNFDKLYIWGVHHPSTDQEQTNLYVQTSGRVTVSTRRSQQTIIPNIGSRPWVRGLSSRISIYWTIVKPGDVLVINSNGNLIAPRGYFKMRTGKSSIMRSDAPIDTCISECITPNGSIPNDKPFQNVNKITYGACPKYVKQNTLKLATGMRNVPEKQTRGLFGAIAGFIENGWEGMIDGWYGFRHQNSEGTGQAADLKSTQAAIDQINGKLNRIIEKTNEKFHQIEKEFSEVEGRIQDLEKYVEDTKIDLWSYNAELLVALENQHTIDLTDSEMNKLFEKTRRQLRENAEDMGNGCFKIYHKCDNACIESIRNGTYDHDVYRDEALNNRFQIKGVELKSGYKDWILWISFAISCFLLCVVLLGFIMWACQRGNIRCNICI

SEQ ID NO: 404 - protein, 566 aa, synthetic construct
  REGION 1..566: note = hemagglutinin__InfluenzaA__ABB04906
MKTIIALSYILCLVFAQKLPGNDNSTATLCLGHHAVPNGTLVKTITNDQIEVTNATELVQSSSTGRICDSPHRILDGKNCTLIDALLGDPHCDGFQNKEWDLFVERSKAYSNCYPYDVPDYASLRSLVASSGTLEFINEDFNWTGVAQNGDSYACKRGSVKSFFSRLNWLHKSEYKYPALNVTMPNNDKFDKLYIWGVHHPSTDREQTSLYIRASGKVTVSTKRSQQTVIPNIGSRPWVRGLSSRISIYWTIVKPGDILLINSTGNLIAPRGYFKIRTGKSSIMRSDAPIGTCSSECITPNGSIPNDKPFQNVNRITYGACPRYVKQNTLKLATGMRNVPEKQTRGIFGAIAGFIENGWEGMVDGWYGFRHQNSEGTGQAADLKSTQAAIDQINGKLNRLIEKTNEKFHQIEKEFSEVEGRIQDLEKYVEDTKIDLWSYNAELLVALENQHTIDLTDSEMNKLFEKTRKQLRENAEDMGNGCFKIYHKCDNACIGSIRNGTYDHDVYRDEALNNRFQIKGVELKSGYKDWILWISFAISCFLLCVVLLGFIMWACQKGNIRCNICI

SEQ ID NO: 405 - protein, 566 aa, synthetic construct
  REGION 1..566: note = hemagglutinin__InfluenzaA__ABB04917
MKTIIALSYIFCLVFAQKLPGNDNSTATLCLGHHAVPNGTLVKTITNDQIEVTNATELVQISSTGRICDSPHRILDGKNCTLIDALLGDPHCDGFQNEKWDLFVERSKAFSNCYPYDVPDYASLRSLVASSGTLEFINEGFNWTGVTQSGGSYTCKRGSVNSFFSRLNWLYESESKYPVLNVTMPNNGKFDKLYIWGVHHPSTDKEQTNLYVRASGRVTVSTKRSQQTVIPNIGSRPWVRGLSSRISIYWTIVKPGDILLINSTGNLIAPRGYFKIRTGKSSIMRSDAPIGTCSSECITPNGSIPNDKPFQNVNKITYGACPRYVKQNTLKLATGMRNVPEKQTRGIFGAIAGFIENGWEGMVDGWYGFRHQNSEGTGQAADLKSTQAAIDQINGKLNRLIEKTNEKFHQIEKEFSEVEGRIQDLEKYVEDTKIDLWSYNAELLVALENQHTIDLTDSEMNKLFEKTRKQLRENAEDMGNGCFKIYHKCDNACIGSIRNGTYDHDVYRDEALNNRFQIKGVELKSGYKDWILWISFAISCFLLCVVLLGFIMWACQKGNIRCNICI

SEQ ID NO: 406 - protein, 566 aa, synthetic construct
  REGION 1..566: note = hemagglutinin__InfluenzaA__ABB04928
MKTIIALSYIFCLVFAQDLPGNDNSTATLCLGHHAVPNGTLVKTITNDQIEVTNATELVQSSSTGKICNNPHRILDGINCTLIDALLGDPHCDGFQNEKWDLFVERSKAFSNCYPYDVPDYASLRSLVASSGTLEFINEGFNWIGVTQNGGSNACKRGTDSGFFSRLNWLYKSGSTYPVQNVTMPNNDNSDKLYIWGVHHPSTDKEQTDLYVQASGKVTVSTKRSQQTIIPNVGSRPWVRGLSSRISIYWTIVKPGDILVINSNGNLIAPRGYFKMRTGKSSIMRSDAPIGTCSSECITPNGSIPNDKPFQNVNKITYGACPKYVKQNTLKLATGMRNVPEKQTRGIFGAIAGFIENGWEGMIDGWYGFRHQNSEGTGQAADLKSTQAAIDQINGKLNRVIEKTNEKFHQIEKEFSEVEGRIQDLEKYVEDTKIDLWSYNAELLVALENQHTIDLTDSEMNKLFEKTRRQLRENAEDMGNGCFKIYHKCDNACIGSIRNGTYDHDVYRDEALNNRFQIKGVELKSGYKDWILWISFAISCFLLCVVLLGFIMWACQKGNIRCNICI

SEQ ID NO: 407 - protein, 566 aa, synthetic construct
  REGION 1..566: note = hemagglutinin__InfluenzaA__ABB04939
MKTIIALSYIFCLVFAQKLPGNDNSTATLCLGHHAVPNGTLVKTITNDQIEVTNATELVQSSSTGRICDSPHRILDGKNCTLIDALLGDPHCDGFQNEKWDLFVERSKAFSNCYPYDVPDYASLRSLVASSGTLEFINEGFNWTGVTQSGGSYTCKRGSVNSFFSRLNWLYESESKYPVLNVTMPNNGKFDKLYIWGVHHPSTDKEQTNLYVRASGRVTVSTKRSQQTVIPNIGSRPWVRGLSSRISIYWTIVKPGDILLINSIGNLIAPRGYFKIRTGKSSIMRSDAPIGICSSECITPNGSIPNDKPFQNVNKITYGACPRYVKQNTLKLATGMRNVPEKQTRGIFGAIAGFIENGWEGMVDGWYGFRHQNSEGTGQAADLKSTQAAVDQINGKLNRLIEKTNEKFHQIEKEFSEVEGRIQDLEKYVEDTKIDLWSYNAELLVALENQHTIDLTDSEMNKLFEKTRKQLRENAEDMGNGCFKIYHKCDNACIGSIRNGTYDHDVYRDEALNNRFQIKGVELKSGYKDWILWISFAISCFLLCVVLLGFIMWACQKGNIRCNICI

SEQ ID NO: 408 - protein, 566 aa, synthetic construct
  REGION 1..566: note = hemagglutinin__InfluenzaA__ABB04950
MKTIIALSYIFCLVFAQKLPGNDNSTATLCLGHHAVPNGTLVKTITNDQIEVTNATELVQSSSTGRICDSPHRILDGKNCTLIDALLGDPHCDGFQNEKWDLFVERSKAFSNCYPYDVPDYASLRSLVASSGTLEFINEGFNWTGVTQSGGSYTCKRGSVNSFFSRLNWLYESESKYPVLNVTMPNNGKFDKLYIWGVHHPSTDKEQTNLYVRASGKVTVSTKRSQQTVIPNIGSRPWVRGLSSRISIYWTIVKPGDILLINSTGNLIAPRGYFKIRTGKSSIMRSDAPIGTCSSECITPNGSIPNDKPFQNVNKITYGACPRYVKQNTLKLATGMRNVPEKQTRGIFGAIAGFIENGWEGMVDGWYGFRHQNSEGTGQAADLKSTQAAIDQINGKLNRLIEKTNEKFHQIEKEFSEVEGRIQDLEKYVEDTKIDLWSYNAELLVALENQHTIDLTDSEMNKLFEKTRKQLRENAEDMGNGCFKIYHKCDNACIGSIRNGTYDHDVYRDEALNNRFQIKGVELKSGYKDWILWISFAISCFLLCVVLLGFIMWACQKGNIRCNICI

SEQ ID NO: 409 - protein, 566 aa, synthetic construct
  REGION 1..566: note = hemagglutinin__InfluenzaA__ABB04983
MKTIIALSYILCLVFAQKLPGNDNSTATLCLGHHAVPNGTLVKTITNDQIEVTNATELVQSSSTDRICDSPHQILDGENCTLIDALLGDPHCDGFQNKEWDLFVERSKAYSNCYPYDVPDYVSLRSLVASSGTLEFNNESFNWTGVAQNGTSSACKRRSDKSFFSRLNWLHQLKYKYPALNVTMPNNEKFDKLYIWGVHHPGTDSDQISLYAQASGRVTVSTKRSQQTVIPNIGSRPWVRGVSSRISIYWTIVKPGDILLINSTGNLIAPRGYFKIRSGKSSIMRSDAPIGKCNSECITPNGSIPNDKPFQNVNRITYGPCPRYVKQNTLKLATGMRNVPEKQTRGIFGAIAGFIENGWEGMMDGWYGFRHQNSEGTGQAADLKSTQAAINQINGKLNRLIEKTNEKFHQIEKEFSEVEGRIQDLEKYVEDTKIDLWSYNAELLVALENQHTIDLTDSEMNKLFERTKKQLRENAEDMGNGCFKIYHKCDNACIGSIRNGTYDHDVYRDEALNNRFQIKGVELKSGYKDWILWISFAISCFLLCIVLLGFIMWACQKGNIRCNICI

SEQ ID NO: 410 - protein, 566 aa, synthetic construct; identical to SEQ ID NO: 172
  REGION 1..566: note = hemagglutinin__InfluenzaA__ABB04994

SEQ ID NO: 411 - protein, 566 aa, synthetic construct
  REGION 1..566: note = hemagglutinin__InfluenzaA__ABB05005
MKTIIALSHILCLVFAQKLPVNDNSTATLCLGHHAVPNGTLVKTITNDHIEVTNATELVQSSSTGRICDSPHQILDGENCTLIDALLGDPHCDGFQNKEWDLFVERSTAYSNCYPYDVPDYASLRSLVASSGTLEFNNESFNWTGVAQNGTSSACKRRSIKSFFSRLNWLHQLKYKYPALNVTMPNNEKFDKLYIWGVHHPSTDSDQISLYAQASGRVTVSTKRSQQTVIPDIGSRPWVRGVSSRISIYWTIVKPGDILLINSTGNLIAPRGYFKIRSGKSSIMRSNAPIGKCNSECITPNGSVPNDKPFQNVNRITYGACPRYVKQNTLKLATGMRNVPEKQTRGIFGAIAGFIENGWEGMVDGWYGFRHQNSEGTGQAADLKSTQAAINQINGKLNRLIEKTNEKFHQIEKEFSEVEGRIQDLEKYVEDTKIDLWSYNAELLVALENQHTIDLTDSEMNKLFERTRKQLRENAEDMGNGCFKIYHKCDNACIGSIRNGTYDHDVYRDEALNNRFQIKGVELKSGYKDWILWISFAISCFLLCVVLLGFIMWACQKGNIRCNICI

SEQ ID NO: 412 - protein, 566 aa, synthetic construct
  REGION 1..566: note = hemagglutinin__InfluenzaA__ABB05183
MKTIIALSYILCLVFAQKLPVNDNSTATLCLGHHAVPNGTLVKTITNEHIEVTNATELVQSSSTGRICDSPHQILDGENCTLIDALLGDPHCDGFQNKEWDLFVERSTAYSNCYPYDVPDYASLRSLVASSGTLEFNNESFNWTGVAQNGTSSACKRRSIKSFFSRLNWLHQLKYKYPALNVTMPNNEKFDKLYIWGVHHPSTDSDQISLYAQASGRVTVSTKRSQQTVIPNIGSRPWVRGVSSRISIYWTIVKPGDILLINSTGNLIAPRGYFKIRSGKSSIMRSNAPIGKCNSECITPNGSIPNDKPFQNVNRITYGACPRYVKQNTLKLATGMRNVPEKQTRGIFGAIAGFIENGWEGMVDGWYGFRHQNSEGTGQAADLKSTQAAINQINGKLNRLIEKTNEKFHQIEKEFSEVEGRIQDLEKYVEDTKIDLWSYNAELLVALENQHTIDLTDSEMNKLFERTRKQLRENAEDMGNGCFKVYHKCDNACIGSIRNGTYDHDVYRDEALNNRFQIKGVELKSGYKDWILWISFAISCFLLCVVLLGFIMWACQKGNIRCNICI

SEQ ID NO: 413 - protein, 566 aa, synthetic construct
  REGION 1..566: note = hemagglutinin__InfluenzaA__ABB05194
MKTIIALSYILCLVFAQKLPGNDNSTATLCLGHHAVPNGTLVKTITNDQIEVTNATELVQSSSTGRICDSPHQILDGENCTLIDALLGDPHCDGFQNKEWDLFVERSKAYSNCYPYDVPDYASLRSLVASSGTLEFNNESFNWTGVAQNGTSSACKRRSNKSFFSRLNWLHQLKYKYPALNVIMPNNEKFDKLYIWGVHHPSTDSDQISLYAQASGRVTVSTKRSQQTVIPNIGSRPWVRGVSSRISIYWTIVKPGDILLINSTGNLIAPRGYFKIRSGKSSVMRSDASIGKCNSECITPNGSIPNDKPFQNVNRITYGACPRYVKQNTLKLATGMRNVPEKQTRGIFGAIAGFIENGWEGMVDGWYGFRHQNSEGTGQAADLKSTQAAINQINGKLNRLIEKTNEKFHQIEKEFSEVEGRIQNLEKYVEDTKIDLWSYNAELLVALENQHTIDLTDSEMNKLFERTKKQLRENAEDMGNGCFKIYHKCDNACIGSIRNGTYDHDVYRDEALNNRFQIKGVELKSGYKDWILWISFAISCFLLCVVLLGFIMWACQKGNIRCNICI

SEQ ID NO: 414 - protein, 566 aa, synthetic construct
  REGION 1..566: note = hemagglutinin__InfluenzaA__ABB05205
MKTIIALSYILCLVFAQKLPGNDNSTATLCLGHHAVPNGTLVKTITNDQIEVTNATELVQSSSTGRICDSPHQILDGENCTLIDALLGDPHCDGFQNKEWDLFVERSNAYSNCYPYDVPDYASLRSLVASSGTLEFNSESFNWTGVAQNGTSSACKRRSNKSFFSRLNWLHQLKYKYPALNVTMPNNEKFDKLYIWGVHHPGTDSDQISLYAQASGRVTVSTKRSQQTVIPNIGSRPWVRGVSSRISIYWTIVKPGDILLINSTGNLIAPRGYFKIRSGKSSIMRSDAPIGKCNSECITPNGSIPNNKPFQNVNRITYGACPRYVKQNTLKLATGMRNVPEKQTRGIFGAIAGFIENGWEGMVDGWYGFRHQNSEGTGQAADLKSTQAAINQINGKLNRLIEKTNEKFHQIEKEFSEVEGRIQDLEKYVEDTKIDLWSYNAELLVALENQHTIDLTDSEMNKLFERTKKQLRENAEDMGNGCFKIYHKCDNACIGSIRNGTYDHDVYRDEALNNRFQIKGVELKSGYKDWILWISFAISCFLLCVVLLGFIMWACQKGNIRCNICI

SEQ ID NO: 415 - protein, 566 aa, synthetic construct; identical to SEQ ID NO: 72
  REGION 1..566: note = hemagglutinin__InfluenzaA__ABB05216

SEQ ID NO: 416 - protein, 566 aa, synthetic construct
  REGION 1..566: note = hemagglutinin__InfluenzaA__ABB46392
MKTIIALSYIFCLAFAQDLPGNDNSTATLCLGHHAVPNGTLVKTITNDQIEVTNATELVQSSSTGKICDNPHRILDGINCTLIDALLGDPHCDGFQNEKWDLFVERSKAFSNCYPYDVPDYASLRSLVASSGTLEFINEGFNWTGVTQNGGSSACKRGPDNGFFSRLNWLYKSGSTYPVQNVTMPNNDNSDKLYIWGVHHPNTDKEQTDLYVQASGKVTVSTKRSQQTIIPNVGSRPWVRGLSSRVSIYWTIVKPGDILVINSNGNLIAPRGYFKMRTGKSSIMRSDAPIGTCSSECITPNGSIPNDKPFQNVNKITYGACPKYVKQNTLKLATGMRNVPEKQTRGIFGAIAGFIENGWEGMIDGWYGFRHQNSEGTGQAADLKSTQTAIDQINGKLNRVIEKTNEKFHQIEKEFSEVEGRIQDLEKYVEDTKIDLWSYNAELLVALENQHTIDLTDSEMNKLFEKTRRQLRENAEDMGNGCFKIYHKCDNACIGSIRNGTYDHDVYRDEALNNRFQIKGVELKSGYKDWILWISFAISCFLLCVVLLGFIMWACQKGNIRCNICI

SEQ ID NO: 417 - protein, 566 aa, synthetic construct
  REGION 1..566: note = hemagglutinin__InfluenzaA__ABB46414
MKTIIALSYILCLVFAQKLPGNDNSTATLCLGHHAVPNGTLVKTITNDQIEVTNATELVQSSSTGRICDSPHRILDGENCTLIDALLGDPHCDGFQNKEWDLFVERSKAYSNCYPYDVPDYASLRSLVASSGTLEFNNESFNWTGVAQNGTSSACKRRSIKSFFSRLNWLHQLKYKYPALNVTMPNNDKFDKLYIWGVHHPSTDSDQTSLYAQASGRVTVSTKRSQQTVIPNIGSRPWVRGVSSRISIYWTIVKPGDILLINSTGNLIAPRGYFKIRSGKSSIMRSDAPIGKCNSECITPNGSIPNDKPFQNVNRITYGACPRYVKQNTLKLATGMRNVPEKQTRGIFGAIAGFIENGWEGMVDGWYGFRHQNSEGTGQAADLKSTQAAINQINGKLNRLIEKTNEKFHQIEKEFSEVEGRIQDLEKYVEDTKIDLWSYNAELLVALENQHTIDLTDSEMNKLFERTRKQLRENAEDMGNGCFKIYHKCDNACIGSIRNGTYDHDVYRDEALNNRFQIKGVELKSGYKDWILWISFAISCFLFCVVLLGFIMWACQKGNIRCNICI

SEQ ID NO: 418 - protein, 566 aa, synthetic construct
  REGION 1..566: note = hemagglutinin__InfluenzaA__ABB46425
MKTIIALSYILCLVFAQKLPGNDNSTATLCLGHHAVPNGTLVKTITSDQIEVTNATELVQSSSTGKICDSPHRILDGENCTLIDALLGDPHCDGFQNKEWDLFVERSKAYSNCYPYDVPDYASLRSLVASSGTLEFNNESFNWTGVAQNGTSFACKRRSIKSFFSRLNWLHQLKYKYPALNVTMPNNDKFDKLYIWGVHHPSTDSDQTSLYAQASGRVTVSTKRSQQTVIPNIGSRPWVRGVSSRISIYWTIVKPGDILLINSTGNLIAPRGYFKIRSGKSSIMRSDAPIGKCNSECITPNGSIPNDKPFQNVNRITYGACPRYVKQNTLKLATGMRNVPEKQTRGIFGAIAGFIENGWEGMVDGWYGFRHQNSEGTGQAADLKSTQAAINQINGKLNRLIEKTNEKFHQIEKEFSEVEGRIQDLEKYVEDTKIDLWSYNAELLVALENQHTIDLTDSEMNKLFERTRKQLRENAEDMGNGCFKIYHKCDNACIGSIRNGTYDHDVYRDEALNNRFQIKGVELKSGYKDWILWISFAISCFLLCVVLLGFIMWACQKGNIRCNICI

SEQ ID NO: 419 - protein, 566 aa, synthetic construct
  REGION 1..566: note = hemagglutinin__InfluenzaA__ABB46436
MKTIIALSYILCLVFAQKLPGNDNSTATLCLGHHAVPNGTIVKTITNDQIEVTNATELVQSSSTGGICDSPHQILDGENCTLIDALLGDPQCDGFQNKKWDLFVERSKAYSNCYPYDVPDYASLRSLVASSGTLEFNNESFNWTGVTQNGTSSACKRRSNNSFFSRLNWLTHLKFKYPALNVTMPNNEKYDKLYIWGVHHPGTDNDQISLYAQASGRITVSTKRSQQTVIPNIGSRPRVRDIPSRISIYWTIVKPGDILLINSTGNLIAPRGYFKIRSGKSSIMRSDAPIGKCNSECITPNGSIPNDKPFQNVNRITYGACPRYVKQNTLKLATGMRNVPEKQTRGIFGAIAGFIENGWEGMVDGWYGFRHQNSEGIGQAADLKSTQAAINQINGKLNRLIGKTNEKFHQIEKEFSEVEGRIQDLEKYVEDTKIDLWSYNAELLVALENQHTIDLTDSEMNKLFERTKKQLRENAEDMGNGCFKIYHKCDNACIGSIRNGTYDHDVYRDEALNNRFQIKGVELKSGYKDWILWISFAISCFLLCVALLGFIMWACQKGNIRCNICI

SEQ ID NO: 420 - protein, 566 aa, synthetic construct; identical to SEQ ID NO: 353
  REGION 1..566: note = hemagglutinin__InfluenzaA__ABB46447

SEQ ID NO: 421 - protein, 566 aa, synthetic construct
  REGION 1..566: note = hemagglutinin__InfluenzaA__ABB46458
MKTIIALSYILCLVFAQKLPGNDNSTATLCLGHHAVPNGTIVKTITNDQIEVTNATELVQSSSTGGICDSPHQILDGENCTLIDALLGDPQCDGFQNKKWDLFVERSKAYSNCYPYDVPDYASLRSLVASSGTLEFNNESFNWTGVTQNGTSSACKRRSNNSFFSRLNWLTHLKFKYPALNVTMPNNEKFDKLYIWGVHHPGTDNDQISLYAQASGRITVSTKRNQQTVIPNIGSRPRVRDIPSRISIYWTIVKPGDILLINSTGNLIAPRGYFKIRSGKSSIMRSDAPIGKCKSECITPNGSIPNDKPFQNVNRITYGACPRYVKQNTLKLATGMRNVPEKQTRGIFGAIAGFIENGWEGMVDGWYGFRHQNSEGIGQAADLKSTQAAINQINGKLNRLIGKTNEKFHQIEKEFSEVEGRIQDLEKYVEDTKIDLWSYNAELLVALENQHTIDLTDSEMNKLFERTKKQLRENAEDMGNGCFKIYHKCDNACIGSIRNGTYDHDVYRDEALNNRFQIKGVELKSGYKDWILWISFAISCFLLCVALLGFIMWGCQKGNIRCNICI

SEQ ID NO: 422 - protein, 566 aa, synthetic construct
  REGION 1..566: note = hemagglutinin__InfluenzaA__ABB51961
MKTIIALSYILCLVFAQKLPGNDNSTATLCLGHHAVPNGTIVKTITNDQIEVTNATELVQSFSTGGICDSPHQILDGENCTLIDALLGDPQCDGFQNKKWDLFVERSKAYSNCYPYDVPDYACVRSLVASSGTLEFNNESFNWAGVTQNGTSSACKRRSNKSFFSRLNWLTHLKYKYPALNVTMPNNEKFDKLYIWGVHHPGTDSDQISLYAQASGRITVSTQRCKQLVIPNIGSRPRVRDVSSRISIYWTIVNPGDILLINSTGNLIAPRGYFKIRSGKSSIMRSDAPIGKCNSECITPNGSIPNDKPFQNVNRITYGACPRYVKQNTLKLATGMRNVPEKQTRGIFGAIAGFIENGWEGMVDGWYGFRHQNSEGTGQAADLKSTQAAINQINGKLNRLIGKTNEKFHQIEKEFSEVEGRIQDLEKYVEDTKIDLWSYNAELLVALENQHTIDLTDSEMNKLFERTKKQLRENAEDMGNGCFKIYHKCDNACIESIRNGTYDHDVYRDEALNNRFQIKGVELKSGYKDWILWISFAISCFLLCVALLGFIMWACQKGNIRCNICI

SEQ ID NO: 423 - protein, 565 aa, synthetic construct
  REGION 1..565: note = hemagglutinin__InfluenzaA__ABB51962
MKAKLLVLLCTFTATYADTICIGYHANNSTDTVDTVLEKNVTVTHSVNLLEDSHNGKLCLLKGIAPLQLGNCSVAGWILGNPECELLISKESWSYIVETPNPENGTCYPGYFADYEELREQLSSVSSFERFEIFPKGSSWPNHTVTGVSASCSHNGKSSFYRNLLWLTGKNGLYPNLSMSYVNNKEKEVLVLWGVHHPPNIGNQRALYHTENAYVSVVSSHYSRRFTPEIAKRPKVRDQEGRINYYWTLLEPGDTIIFEANGNLIAPWYAFAMSRGFGSGISTSNAPMGECDAKFQTPQGGINISLPFQNVHPVTIGECPNYVRSAKLRMVTGLRNIPSIQSRGLFGAIAGFIEGGWTGMVDGWYGYHHQNEQGSGYAADQKSTQNAINGITNKVNSVIEKMNTQFTAVGKEFNKLERRMENLNKKVDDGFLDIWTYNAELLVLLENERTLDFHDSNVKNLYEKVKSQLKNNAKEIGNGCSEFYHKCNNECMESVKNGTYDYPKYSEESKLNREKIDGVKLESMGVYQILAIYSTVASSLVLLVSLGAISFWMCSNGSLQCRICI

SEQ ID NO: 424 - protein, 566 aa, synthetic construct
  REGION 1..566: note = hemagglutinin__InfluenzaA__ABB51963
MKTIIALSYILCLVFAQKLPGNDNSTATLCLGHHAVPNGTIVKTITNDRIEVTNATELVQSSSTGGICDSPHQILDGENCTLIDALLGDPQCDGFQNKKWDLFVERSKAYSNCYPYDVPDYASLRSLVASSGTLEFNNESFNWTGVTQNGTSSACKRRSNNSFFSRLNWLTHLKFKYPALNVTMPNNEKFDKLYIWGVHHPGTDNDQISLYAQASGRITVSTKRSQQTVIPNIGSRPRVRHIPSRISIYWTIVNPGDILLINSTGNLIAPRGYFKIRSGKSSIMRSDAPIGKCNSECITPNGSIPNDKPFQNVNRITYGACPRYVKQNTLKLATGMRNVPEKQNRGIFGAIAGFIENGWEGMVDGWYGFRHQNSEGIGQAADLKSTQAAINQINEKLNRLIGKTNEKFHQIEKEFSEVEGRIQDLEKYVEDTKIDLWSYNAELLVALENQHTIDLTDSEMNKLFERTKKQLRENAEDMGNGCFKVYHKCDNACIGSIRNGTYDHNVYRDEALNNRFQIKGVELKSGYKDWILWISFAISCFLLCVALLGFIMWACQKGNIRCNICI

SEQ ID NO: 425 - protein, 566 aa, synthetic construct; identical to SEQ ID NO: 282
  REGION 1..566: note = Hemagglutinin__InfluenzaA__ABB51964

SEQ ID NO: 426 - protein, 565 aa, synthetic construct
  REGION 1..565: note = hemagglutinin__InfluenzaA__ABB53603
MKVKLLILLCTFTATYADTICIGYHANNSTDTVDTVLEKNVTVTHSVNLLEDSHNGKLCLLKGIAPLQLGNCSVAGWILGNPECELLISKESWSYIVETPNPENGACYPGYFADYEELREQLSSVSSFERFEIFPKESSWPNHTVTGVSASCSHNGKSSFYRNLLWLTGKNGLYPNLSKSYANNKKKEVLILWGVHHPPNIGNQRTLYYTENAYVSVVSSHYSRRFTPEITKRPKVRDQEGRINYYWTLLEPGDTIIFEANGNLIAPWYAFALSRGFGSGIITSNAPMDECDAKCQTPQGAINSSLPFQNVHPVTIGECPKYVRSAKLRMVTGLRNIPSIQSRGLFGAIAGFIEGGWTGMVDGWYGYHHQNEQGSGYAADQKSTQNAINGITNKVNSVIEKMNTQFTAVGKEFNKLERRMENLNKKVDDGFLDIWTYNAELLVLLENERTLDFHDSNVKNLYEKVKSQLKNNAKEIGNGCFEFYHKCNNECMESVKNGTYDYPKYSEESKLNREKIDGVKLDSMGVYQILAIYSTVASSLVLLVSLGAISFWMCSNGSLQCRICI

SEQ ID NO: 427 - protein, 566 aa, synthetic construct; identical to SEQ ID NO: 255
  REGION 1..566: note = hemagglutinin__InfluenzaA__ABB53614

SEQ ID NO: 428 - protein, 566 aa, synthetic construct; identical to SEQ ID NO: 255
  REGION 1..566: note = hemagglutinin__InfluenzaA__ABB53625

SEQ ID NO: 429 - protein, 566 aa, synthetic construct; identical to SEQ ID NO: 282
  REGION 1..566: note = hemagglutinin__InfluenzaA__ABB53652

SEQ ID NO: 430 - protein, 566 aa, synthetic construct
  REGION 1..566: note = hemagglutinin__InfluenzaA__ABB53663
MKTIFALSYILCLVFAQKLPGNDNSTATLCLGHHAVPNGTIVKTITNDQIEVTNATELVQSSSTGGICDSPHQILDGENCTLIDALLGDPQCDGFQNKKWDLFVERSKAHSNCYPYDVPDYASLRSLVASSGTLEFNNESFNWTGVTQNGTSSACKRRSNNSFFSRLNWLTHLKFKYPALNVTMPNNENFDKLYIWGVHHPGTDNDQISLYAQASGRITVSTKRSQQTVIPNIGSRPRVRDIPSRISIYWTIVKPGDILLINSTGNLIAPRGYFKIRSGKSSIMRSDAPIGKCNSECITPNGSIPNDKPFQNVNRITYGACPRYVKQNTLKLATGMRNVPEKQTRGIFGAIAGFIENGWEGMVDGWYGFRHQNSEGIGQAADLKSTQAAINQINGKLNRLIGKTNEKFHQIEKEFSEVEGRIQDLEKYVEDTKIDLWSYNAELLVALENQHTIDLTDSEMNKLFERTKKQLRENAEDMGNGCFKIYHKCDNACIGSIRNGTYDHDVYRDEALNNRFQIKGVELKSGYKDWILWISFAISCFLLCVALLGFIMWACQKGNIRCNICI

SEQ ID NO: 431 - protein, 566 aa, synthetic construct; identical to SEQ ID NO: 255
  REGION 1..566: note = hemagglutinin__InfluenzaA__ABB53685

SEQ ID NO: 432 - protein, 566 aa, synthetic construct
  REGION 1..566: note = hemagglutinin__InfluenzaA__ABB53696
MKTIIALSYILCLVFAQKLPGNDNSTATLCLGHHAVPNGTLVKTITNDQIEVTNATELVQSSSTGRICDSPHQILDGENCTLIDALLGDPHCDGFQNKEWDLFVERSKAYSNCYPYDVPDYASLRSLVASSGTLEFNNESFNWTGVAQNGTSSACKRRSNKSFFSRLNWLHQLKYKYPALNVTMPNNEKFDKLYIWGVHHPSTDSDQISLYAQASGRVTVSTKRSQQTVIPNIGSRPWVRGVSSRISIYWTIVKPGDILLINSTGNLIAPRGYFKIRSGKSSIMRSDAPIGKCNSECITPNGSIPNDKPFQNVNRITYGACPRYVKQNTLKLATGMRNVPEKQTRGIFGAIAGFIENGWEGMVDGWYGFRHQNSEGTGQAADLKSTQAAINQINGKLNRLIEKTNEKFHQIEKEFSEVEGRIQDLEKYVEDTKIDLWSYNAELLVALENQHTIDLTDSEMNKLFERTKKQLRENAEDMGNGCFKIYHKCDNACIGSIRNGTYDHDVYRDEALNNRFQIKGVELKSGYKDWILWISFAISCFLLCIALLGFIMWACQKGNIRCNVCI

SEQ ID NO: 433 - protein, 565 aa, synthetic construct; identical to SEQ ID NO: 296
  REGION 1..565: note = hemagglutinin__InfluenzaA__ABB53707

SEQ ID NO: 434 - protein, 566 aa, synthetic construct; identical to SEQ ID NO: 243
  REGION 1..566: note = hemagglutinin__InfluenzaA__ABB53718

SEQ ID NO: 435 - protein, 565 aa, synthetic construct
  REGION 1..565: note = hemagglutinin__InfluenzaA__ABB53740
MKVKLLVLLCTFTATYADTICIGYHANNSTDTVDTVLEKNVTVTHSVNLLEDSHNGKLCLLKGIAPLQLGNCSVAGWILGNPECELLISKESWSYIVETPNPENGTCYPGYFADYEELREQLSSVSSFERFEIFPKESSWPNHTVTGVSASCSHNGKSSFYRNLLWLTGKNGLYPNLSKSYANNKEKEVLVLWGVHHPPNMGDQRALYHTENAYVSVVSSHYSRRFTPEIAKRPKVRDQEGRINYYWTLLEPGETIIFEANGNLIAPRYAFALSRGFGSGIITSNAPMDECDAKCQTPQGAINSSLPFQNVHPVTIGECPKYVRSTKLRMVTGLRNIPSIQSRGLFGAIAGFIEGGWTGMVDGWYGYHHQNEQGSGYAADQKSTQNAINGITNKVNSVIEKMNTQFTAVGKEFNKLERRMENLNKKVDDGFLDIWTYNAELLVLLENERTLDFHDSNVKNLYEKVKSQLKNNAKEIGNGCFEFYHKCNDECMESVKNGTYDYPKYSEESKLNREKIDGVKLESMGVYQILAIYSTVASSLVLLVSLGAISFWMCSNGSLQCRICI

SEQ ID NO: 436 - protein, 566 aa, synthetic construct
  REGION 1..566: note = hemagglutinin__InfluenzaA__ABB53751
MKTIIALSYISCLVFAQNLPGNDNSTATLCLGHHAVPNGTLVKTITNDQIEVTNATELVQSSSTGRICDSPHRILDGKNCTLIDALLGDPHCDGFQNEKWDLFVERSKAFSNCYPYDVPDYASLRSLVASSGTLEFINEGFNWTGVTQSGGSYACKRGSDNSFFSRLNWLYKSESKYPVLNVTMPNNGNFDKLYIWGVHHPSTDKEQTNLYVRASGRVTVSTKRSQQTIIPNIGSRPWVRGLSSGISIYWTIVKPGDILLINSNGNLIAPRGYFKIRTGKSSILRSDAPIGTCSSECITPNGSIPNDKPFQNVNKITYGACPKYVKQNTLKLATGMRNVPEKQTRGIFGAIAGFIENGWEGMVDGWYGFRHQNSEGTGQAADLKSTQAAIDQINGKLNRVIEKTNEKFHQIEKEFSEVEGRIQDLEKYVEDTKIDLWSYNAELLVALENQHTIDLTDSEMNKLFEKTRRQLRENAEDMGNGCFKIYHKCDNACIGSIRNGTYDHDVYRDEALNNRFQIKGVELKSGYKDWILWISFAISCFLLCVVLLGFIMWACQKGNIRCNICI

SEQ ID NO: 437 - protein, 566 aa, synthetic construct
  REGION 1..566: note = hemagglutinin__InfluenzaA__ABB60007
MKTIIALSYILCLVFAQKLPGNDNSTATLCLGHHAVPNGTLVKTITNDQIEVTNATELVQSSSTDRICDSPHRILDGENCTLIDALLGDPHCDGFQNKEWDLFVERSKAYSNCYPYDVPDYASLRSLVASSGTLEFNNESFNWTGVAQNGTSYACKRRSIKSFFSRLNWLHQLKYKYPALNVTMPNNDKFDKLYIWGVHHPSTDSDQTSLYAQASGRVTVSTKRSQQTVIPNIGSRPWVRGVSSRISIYWTIVKPGDILLINSTGNLIAPRGYFKIRSGKSSIMRSDAPIGKCNSECITPNGSIPNDKPFQNVNRITYGACPRYVKQNTLKLATGMRNVPEKQTRGIFGAIAGFIENGWEGMVDGWYGFRHQNSEGTGQAADLKSTQAAINQINGKLNRLIEKTNEKFHQIEKEFSEVEGRIQDLEKYVEDTKIDLWSYNAELLVALENQHTIDLTDSEMNKLFERTRKQLRENAEDMGNGCFKIYHKCDNACIGSIRNGTYDHDVYRDEALNNRFQIKGVELKSGYKDWILWISFAISCFLLCVVLLGFIMWACQKGNIRCNICI

SEQ ID NO: 438 - protein, 566 aa, synthetic construct
  REGION 1..566: note = hemagglutinin__InfluenzaA__ABB77853
MKTIIALSYISCLVFAQKLPGNDNSTATLCLGHHAVPNGTLVKTITNDQIEVTNATELVQSSSTGRICDSPHRILDGENCTLIDALLGDPHCDGFQNKEWDLFVERSKAYSNCYPYDVPDYASLRSLVASSGTLEFNNESFNWTGVAQNGTSYACKRRSIKSFFSRLNWLHQLKYKYPALNVTMPNNDKFDKLYIWGVHHPSTDSDQTSLYAQASGRVTVSTKRSQQTVIPNIGSRPWVRGVSSRISIYWTIVKPGDILLINSTGNLIAPRGYFKIRSGKSSIMRSDAPIGKCNSECITPDGSIPNDKPFQNVNRITYGACPRYVKQNTLKLATGMRNVPEKQTRGIFGAIAGFIENGWEGMVDGWYGFRHQNSEGTGQAADLKSTQAAINQINGKLNRLIEKTNEKFHQIEKEFSEVEGRIQDLEKYVEDTKIDLWSYNAELLVALENQHTIDLTDSEMNKLFERTRKQLRENAEDMGNGCFKIYHKCDNACIGSIRNGTYDHDVYRDEALNNRFQIKGVELKSGYKDWILWISFAISCFLLCVVLLGFIMWACQKGNIRCNICI

SEQ ID NO: 439 - protein, 566 aa, synthetic construct
  REGION 1..566: note = hemagglutinin__InfluenzaA__ABB79731
MKTIIALSYILCLVFAQELPGNDNSTATLCLGHHAVPNGTIVKTITNDQIEVTNATELVQNSSTGGICDSPHQILDGENCTLIDALLGDPQCDGFQNKKWDLFVERSKAYSNCYPYDVPDYASLRSLVASSGTLEFNNESFNWTGVTQNGTSSACKRRSNNSFFSRLNWLTHLKFKYPALNVTMPNNEKFDKLYIWGVHHPGTDNDQTSLYAQASGRITVSTKRSQQTVIPNIGSRPRVRDIPSRISIYWTIVKPGDILLINSTGNLIAPRGYFKIRSGKSSIMRSDAPIGKCNSECITPNGSIPNDKPFQNVNRITYGACPRYVKQNTLKLATGMRNVPEKQTRGIFGAIAGFIENGWEGMVDGWYGFRHQNSEGIGQAADLKSTQAAINQINGKLNRLIGKTNEKFHQIEKEFSEVEGRIQDLEKYVEDTKIDLWSYNAELLVALENQHTIDLTDSEMNKLFERTKKQLRENAEDMGNGCFKIYHKCDNACIGSIRNGTYDHDVYRDEALNNRFQIKGVELKSGYKDWILWISFAISCFLLCVALLGFIMWACQKGNIRCNICI

SEQ ID NO: 440 - protein, 566 aa, synthetic construct
  REGION 1..566: note = hemagglutinin__InfluenzaA__ABB79788
MKTIIALSYIFCLVFAQKLPGNDNSTATLCLGHHAVPNGTLVKTITNDQIEVTNATELVQSSSTGRICDSPHRILDGKNCTLIDALLGDPHCDGFQNEKWDLFVERSKAFSNCYPYDVPDYASLRSLVASSGTLEFINEGFNWTGVTQSGGSYACKRGSVNSFFSRLNWLYESESKYPVLNVTMPNNGKFDKLYIWGVHHPITDKEQTNLYVRASGRVTVSTKRSQQTVIPNIGSRPWVRGLSSRISIYWTIVKPGDILLINSTGNLIAPRGYFKIRTGKSSIMRSDAPIGTCSSECITPNGSIPNDKPFQNVNKITYGACPRYVKQNTLKLATGMRNVPEKQTRGIFGAIAGFIENGWEGMVDGWYGFRHQNSEGTGQAADLKSTQAAIDQINGKLNRLIEKTNEKFHQIEKEFSEVEGRIQDLEKYVEDTKIDLWSYNAELLVALENQHTIDLTDSEMNKLFEKTRKQLRENAEDMGNGCFKIYHKCDNACIGSIRNGTYDHDVYRDEALNNRFQIKGVELKSGYKDWILWISFAISCFLLCVVLLGFIMWACQKGNIRCNICI

SEQ ID NO: 441 - protein, 566 aa, synthetic construct
  REGION 1..566: note = hemagglutinin__InfluenzaA__ABB79799
MKTIIALSYIFCLVFAQKLPGNDNSTATLCLGHHAVPNGTLVKTITNDQIEVTNATELVQSSSTGRICDSPHRILDGKNCTLIDALLGDPHCDGFQNEKWDLFVERSKAFSNCYPYDVPDYASLRSLVASSGTLEFINEGFNWTGVTQSGGSYACKRGSVNSFFSRLNWLYESESKYPVLNVTMPNNGKFDKLYIWGVHHPSTDKEQTNLYVRASGKVTVSTKRSQQTVIPNIGSRPWVRGLSSRISIYWTIVKPGDILLINSTGNLIAPRGYFKIRTGKSSIMRSDAPIGTCSSECITPNGSIPNDKPFQNVNKITYGACPRYVKQNTLKLATGMRNVPEKQTRGIFGAIAGFIENGWEGMVDGWYGFRHQNSEGTGQAADLKSTQAAIDQINGKLNRLIEKTNEKFHQIEKEFSEVEGRIQDLEKYVEDTKIDLWSYNAELLVALENQHTIDLTDSEMNKLFEKTRKQLRENAEDMGNGCFKIYHKCDNACIGSIRNGTYDHDVYRDEALNNRFQIKGVELKSGYKDWILWISFAISCFLLCVVLLGFIMWACQKGNIRCNICI

SEQ ID NO: 442 - protein, 566 aa, synthetic construct
  REGION 1..566: note = hemagglutinin__InfluenzaA__ABB79810
MKTIIALSYILCLVFAQKLPGNDNSTATLCLGHHAVPNGTLVKTITNDQIEVTNATELVQSSSTGRLCDSPHRILDGKNCTLIDALLGDPHCDGFQNKEWDLFVERSKAYSNCYPYDVPDYASLRSLVASSGTLEFINEDFNWTGVAQDGGSYACRRGSVNSFFSRLNWLHKLEYKYPALNVTMPNNGKFDKLYIWGVHHPSTDSDQTSLYVRASGRVTVSTKRSQQTVIPNIGSRPWVRGQSSRISIYWTIVKPGDILLIDSTGNLIAPRGYFKIRNGKSSIMRSDAPIGNCSSECITPNGSIPNDKPFQNVNRITYGACPRYVKQHTLKLATGMRNVPEKQTRGIFGAIAGFIENGWEGMVDGWYGFRHQNSEGTGQAADLKSTQAAIDQINGKLNRLIEKTNEKFHQIEKEFSEVEGRIQDLEKYVEDTKIDLWSYNAELLVALENQHTIDLTDSEMNKLFERTRKQLRENAEDMGNGCFKIYHKCDNACIGSIRNGTYDHDVYRDEALNNRFQIKGVELKSGYKDWILWISFAISCFLLCVVLLGFIMWACQKGNIRCNICI

SEQ ID NO: 443 - protein, 566 aa, synthetic construct
  REGION 1..566: note = hemagglutinin__InfluenzaA__ABB79957
MKTIIALSYILCLVFAQKLPGNDNSTATLCLGHHAVPNGTLVKTITNDQIEVTNATELVQSSSTGRLCDSPHRILDGKNCTLIDALLGDPHCDGFQNKEWDLFVERSKAYSNCYPYDVPDYASLRSLVASSGTLEFINEDFNWTGVAQDGGSYACRRGSVNSFFSRLNWLHKLEYKYPALNVTMPNNGKFDKLYIWGVHHPSTDSDQTSLYVRASGRVTVSTKRSQQTVIPNIGSRPWVRGQSSRIGIYWTIVKPGDILLINSTGNLIAPRGYFKIRNGKSSIMRSDAPIGNCSSECITPNGSIPNDKPFQNVNRITYGACPRYVKQHTLKLATGMRNVPEKQTRGIFGAIAGFIENGWEGMVDGWYGFRHQNSEGTGQAADLKSTQAAIDQINGKLNRLIEKTNEKFHQIEKEFSEVEGRIQDLEKYVEDTKIDLWSYNAELLVALENQHTIDLTDSEMNKLFERTRKQLRENAEDMGNGCFKIYHKCDNACIGSIRNGTYDHDVYRDEALNNRFQIKGVELKSGYKDWILWISFAISCFLLCVVLLGFIMWACQKGNIRCNICI

SEQ ID NO: 444 - protein, 566 aa, synthetic construct
  REGION 1..566: note = hemagglutinin__InfluenzaA__ABB79968
MKTIIALSYILCLVFAQKLPGNDNSTATLCLGHHAVPNGTLVKTITNDQIEVTNATELVQSSSTGRLCDSPHRILDGKNCTLIDALLGDPHCDGFQNKEWDLFVERSKAYSNCYPYDVPDYASLRSLVASSGTLEFINEDFNWTGVAQDGGSYACRRGSVNSFFSRLNWLHKLEYKYPALNVTMPNNGKFDKLYIWGVHHPSTDSDQTSLYVRASGRVTVSTKRSQQTVIPNIGSRPWVRGQSSRISIYWTIVKPGDILLINSTGNLIAPRGYFKIRNGKSSIMRSDAPIGNCSSECITPNGSIPNDKPFQNVNRITYGACPRYVKQHTLKLATGMRNVPEKQTRGIFGAIAGFIENGWEGMVDGWYGFRHQNSEGTGQAADLKSTQAAIDQINGKLNRLIEKTNEKFHQIEKEFSEVEGRIQDLEKYVEDTKIDLWSYNAELLVALENQHTIDLTDSEMNKLFERTRKQLRENAEDMGNGCFKIYHKCDNACIGSIRNGTYDHDVYRDEALNNRFQIKGVELKSGYKDWILWISFAISCFLLCVVLLGFIMWACQKGNIRCNICI

SEQ ID NO: 445 - protein, 565 aa, synthetic construct
  REGION 1..565: note = hemagglutinin__InfluenzaA__ABB79979
MKAKLLVLLCTFTATYADTICIGYHANNSTDTVDTVLEKNVTVTHSVNLLEDSHNGKLCLLKGIAPLQLGNCSVAGWILGNPECELLISKESWSYIVETPNPENGTCYPGYFADYEELREQLSSVSSFERFEIFPKGSSWPNHTVTGVSASCSHNGKSSFYRNLLWLTGKNGLYPNLSMSYVNNKEKEVLVLWGVHHPPNIGDQRALYHTENAYVSVVSSHYSRRFTPEIAKRPKVRDQEGRINYHWTLLEPGDTIIFEANGNLIAPWYAFALSRGFGSGIITSNAPMDECDAKCQTPQGAINSSLPFQNVHPVTIGECPKYVRSAKLRMVTGLRNIPSIQSRGLFGAIAGFIEGGWTGMVDGWYGYHHQNEQGSGYAADQKSTQNAINGITNKVNSVIEKMNTQFTAVGKEFNKLERRMENLNKKVDDGFLDIWTYNAELLVLLENERTLDFHDSNVKNLYEKVKSQLKNNAKEIGNGCFEFYHKCNNECMESVKNGTYDYPKYSEESKLNREKIDGVKLESMGVYQILAIYSTVASSLVLLVSLGAISFWMCSNGSLQCRICI

SEQ ID NO: 446 - protein, 565 aa, synthetic construct
  REGION 1..565: note = hemagglutinin__InfluenzaA__ABB79990
MKAKLLVLLCTFTATYADTICIGYHANNSTDTVDTVLEKNVTVTHSVNLLEDSHNGKLCLLKGIAPLQLGNCSVAGWILGNPECELLISKESWSYIVETPNPENGTCYPGYFADYEELREQLSSVSSFERFEIFPKGSSWPNHTVTGVSASCSHNGKSSFYRNLLWLTGKNGLYPNLSMSYVNNKEKEVLVLWGVHHPPNIGDQKALYHTENAYVSVVSSHYSRRFTPEIAKRPKVRDQEGRINYYWTLLEPGDTIIFEANGNLIAPWYAFALSRGFGSGIITSNAPMDECDAKCQTPQGAINSSLPFQNVHPVTIGECPKYVRSAKLRMVTGLRNIPSIQSRGLFGAIAGFIEGGWTGMVDGWYGYHHQNEQGSGYAADQKSTQNAINGITNKVNSVIEKMNTQFTAVGKEFNKLERRMENLNKKVDDGFLDIWTYNAELLVLLENERTLDFHDSNVKNLYEKVKSQLKNNAKEIGNGCFEFYHKCNNECMESVKNGTYDYPKYSEESKLNREKIDGVKLESMGVYQILAIYSTVASSLVLLVSLGAISFWMCSNGSLQCRICI

SEQ ID NO: 447 - protein, 566 aa, synthetic construct
  REGION 1..566: note = hemagglutinin__InfluenzaA__ABB80001
MKTIIALSYTLCLVFAQKLPGNDNSTATLCLGHHAVPNGTIVKTITNDQIEVTNATELVQSSSTGGICDSPHQILDGENCTLIDALLGDPQCDGFQNKKWDLFVERSKAYSNCYPYDVPDYASLRSLVASSGTLEFNNESFNWTGVTQNGTSSACKRRSNNSFFSRLNWLTHLKFKYPALNVTMPNNEKFDKLYIWGVHHPGTDNDQISLYAQASGRITVSTKRSQQTVIPNIGSRPRVRDIPSRISIYWTIVKPGDILLINSTGNLIAPRGYFKIRSGKSSIMRSDAPIGKCNSECITPNGSIPNDKPFQNVNRITYGACPRYVKQSTLKLATGMRNVPEKQTRGIFGAIAGFIENGWEGMVDGWYGFRHQNSEGIGQAADLKSTQAAINQINGKLNRLIGKTNEKFHQIEKEFSEVEGRIQDLEKYVEDTKIDLWSYNAELLVALENQHTIDLTDSEMNKLFERTKKQLRENAEDMGNGCFKIYHKCDNACIGSIRNGTYDHDVYRDEALNNRFQIKGVELKSGYKDWILWISFAISCFLLCVALLGFIMWACQKGNIRCNICI

SEQ ID NO: 448 - protein, 566 aa, synthetic construct; identical to SEQ ID NO: 243
  REGION 1..566: note = hemagglutinin__InfluenzaA__ABB80012

SEQ ID NO: 449 - protein, 566 aa, synthetic construct
  REGION 1..566: note = hemagglutinin__InfluenzaA__ABB80023
MKTIIALSYIFYLALGQDLPGNDNSKATLCLGHHAVPNGTLVKTITNDQTEVTNATELVQSSSTGKICNNPHRILDGMDCTLIDALLGDPHCDVFQNETWDLFVERSKAFSNCYPYDVPDYASLRSLVASSGTLEFITEGFTWTEVTQNGGSNACKRGPDSGFFSRLNWLTKSGRTYPVLNVTMPNNDNFDKLYIWGVHHPSTDQEQTNLYVQTSGRVTVSTRRSQQTIIPNIGSRPWVRGLSSRISIYWTIVKPGDVLVINSNGNLIAPRGYFKMRTGKSSIMRSDAPIDTCISECITPNGSIPNDKPFQNVNKITYGACPKYVKQDTLKLATGMRNVPEKQTRGLFGAIAGFIENGWEGMIDGWYGFRHQNSEGTGQAADLKSTQAAIDQINGKLNRIIEKTNEKFHQIEKEFSEVEGRIQDLEKYVEDTKIDLWSYNAELLVALENQHTIDLTDSEMNKLFEKTRRQLRENAEDMGNGCFKIYHKCDNACIESIRNGTYDHDVYRDEALNNRFQIKGVELKSGYKDWILWISFAISCFLLCVVLLGFIMWACQRGNIRCNICI

SEQ ID NO: 450 - protein, 566 aa, synthetic construct
  REGION 1..566: note = hemagglutinin__InfluenzaA__ABB80034
MKTIIALSYIFCLVLGQDLPGNDNSTATLCLGHHAVPNGTLVKTITDDQIEVTNATELVQSSSTGKICNNPHRILDGLDCTLIDALLGDPHCDVFQNETWDLFVERSKAFSNCYPYDVPDYASLRSLVASSGTLEFITEGFTWTGVTQNGGSNACKRGPGSGFFSRLNWLTKSGSTYPVLNVTMPNNDNFDKLYIWGVHHPSTNQEQTSLYVQASGRVTVSTRRSQQTIIPNIGSRPWVRGLSSRISIYWTIVKPGDVLVINSNGNLIAPRGYFKMRTGKSSIMRSDATIDTCISECITPNGSIPNDKPFQNVNKITYGACPKYVKQNTLKLATGMRNVPEKQTRGLFGAIAGFIENGWEGMIDGWYGFRHQNSEGTGQAADLKSTQAAIDQINGKLNRVIEKTNEKFHQIEKEFSEVEGRIQDLEKYVEDTKIDLWSYNAELLVALENQHTIDLTDSEMNKLFEKTRRQLRENAEDMGNGCFKIYHKCDNACIESIRNGTYDHDVYRDEALNNRFQIKGVELKSGYKDWILWISFAISCFLLCVVLLGFIMWACQRGNIRCNICI

SEQ ID NO: 451 - protein, 565 aa, synthetic construct; identical to SEQ ID NO: 364
  REGION 1..565: note = hemagglutinin__InfluenzaA__ABB80045

SEQ ID NO: 452 - protein, 566 aa, synthetic construct
  REGION 1..566: note = hemagglutinin__InfluenzaA__ABB80081
MKTIIALSYISCLVFAQKLPGNDNSTATLCLGHHAVPNGTLVKTITNDQIEVTNATELVQSSSTGRICDSPHRILDGENCTLIDALLGDPHCDGFQNKEWDLFVERSKAYSNCYPYDVPDYASLRSLVASSGTLEFNNESFNWTGVAQNGTSYACKRRSIKSFFSRLNWLHQLKYKYPALNVTMPNNDKFDKLYIWGVHHPSTDSDQTSLYAQASGRVTVSTKRSQQTVIPNIGSRPWVRGVSSRISIYWTIVKPGDILLINSTGNLIAPRGYFKIRSGKSSIMRSDAPIGKCNSECITPNGSIPNDKPFQNVNRITYGACPRYVKQNTLKLATGMRNVPEKQTRGIFGAIAGFIENGWEGMVDGWYGFRHQNSEGTGQAADLKSTQAAINQINGKLNRLIEKTNEKFHQIEKEFSEVEGRIQDLEKYVEDTKIDLWSYNAELLVALENQHTIDLTDSEMNKLFERTRKQLRENAEDMGNGCFKIYHKCDNACIGSIRNGTYDHDVYRDEALNNRFQIKGVELKSGYKDWILWISFAISCFLLCVVLLGFIMWACQKGNIRCNICI

SEQ ID NO: 453 - protein, 566 aa, synthetic construct
  REGION 1..566: note = hemagglutinin__InfluenzaA__ABB80092
MKTIIALSYISCLVFAQKLPGNDNSTATLCLGHHAVPNGTLVKTITNDQIEVTNATELVQSSSTGRICDSPHRILDGENCTLIDALLGDPHCDGFQNKEWDLFVERSKAYSNCYPYDVPDYASLRSLVASSGTLEFNNESFNWTGVAQNGTSYACKRRSIKSFFSRLNWLHQLKYKYPALNVTMPNNDKFDKLYIWGVHHPSTDSDQTSLYAQASGRVTVSTKRSQQTVIPNIGSRPWVRGVSSRISIYWTLVKPGDILLINSTGNLIAPRGYFKIRSGKSSIMRSDAPIGKCNSECITPNGSIPNDKPFQNVNRITYGACPRYVKQNTLKLATGMRNVPEKQTRGIFGAIAGFIENGWEGMVDGWYGFRHQNSEGTGQAADLKSTQAAINQINGKLNRLIEKTNEKFHQIEKEFSEVEGRIQDLEKYVEDTKIDLWSYNAELLVALENQHTIDLTDSEMNKLFERTRKQLRENAEDMGNGCFKIYHKCDNACIGSIRNGTYDHDVYRDEALNNRFQIKGVELKSGYKDWILWISFAISCFLLCVVLLGFIMWACQKGNIRCNICI

SEQ ID NO: 454 - protein, 566 aa, synthetic construct; identical to SEQ ID NO: 255
  REGION 1..566: note = hemagglutinin__InfluenzaA__ABB80137

SEQ ID NO: 455 - protein, 566 aa, synthetic construct; identical to SEQ ID NO: 452
  REGION 1..566: note = hemagglutinin__InfluenzaA__ABB80159

SEQ ID NO: 456 - protein, 566 aa, synthetic construct; identical to SEQ ID NO: 23
  REGION 1..566: note = hemagglutinin__InfluenzaA__ABB80185

SEQ ID NO: 457 - protein, 566 aa, synthetic construct
  REGION 1..566: note = hemagglutinin__InfluenzaA__ABB80207
MKTIIALSYILCLVFAQKLPGNDNSTATLCLGHHAVPNGTLVKTITNDQIEVTNATELVQSSSTGRICDSPHRILDGENCTLIDALLGDPHCDDFQNKEWDLFVERSKAYSNCYPYDVPDYASLRSLVASSGTLEFNNESFNWTGVAQNGTSYACKRRSIKSFFSRLNWLHQLKYKYPALNVTMPNNDKFDKLYIWGVHHPSTDSDQTSLYAQASGRVTVSTKRSQQTVIPNIGSRPWVRGVSSRISIYWTIVKPGDILLINSTGNLIAPRGYFKIRSGKSSIMRSDAPIGKCNSECITPNGSIPNDKPFQNVNRITYGACPRYVKQNTLKLATGMRNVPEKQTRGIFGAIAGFIENGWEGMVDGWYGFRHQNSEGTGQAADLKSTQAAINQINGKLNRLIEKTNEKFHQIEKEFSEVEGRIQDLEKYVEDTKIDLWSYNAELLVALENQHTIDLTDSEMNKLFERTRKQLRENAEDMGNGCFKIYHKCDNACIGSIRNGTYDHDVYRDEALNNRFQIKGVELKSGYKDWILWISFAMSCFLLCVVLLGFIMWACQKGNIRCNICI

SEQ ID NO: 458 - protein, 566 aa, synthetic construct
  REGION 1..566: note = hemagglutinin__InfluenzaA__ABB80229
MKTIIALSYILCLVFAQKLPGNDNSTATLCLGHHAVPNGTLVKTITNDQIEVTNATELVQSSSTGRICDSPHRILDGENCTLIDALLGDPHCDGFQNKEWDLFVERSKAYSNCYPYDVPDYASLRSLVASSGTLEFNNESFNWTGVAQNGTSYACKRRSIKSFFSRLNWLHQLKYKYPALNVTMPNNDKFDKLYIWGVHHPSTDSDQTSLYAQASGRVTVSTKRSQQTVIPNIGSRPWVRGVSSRISIYWTIVKPGDILLINSTGNLIAPRGYFKIRSGKSSIMRSDAPIGKCNSECITPNGSIPNDKPFQNVNRITYGACPRYVKQNTLKLATGMRNVPEKQTRGIFGAIAGFIENGWEGMVDGWYGFRHQNSEGTGQAADLKSTQAAINQINGKLNRLIEKTNEKFHQIEKEFSEVEGRIQDLEKYVEDTKIDLWSYNAELLVALENQHTIDLTDSEMNKLFERTRKQLRENAEDMGNGCFKIYHKCDNACIGSIRNGTYDHDVYRDEALNNRFQIKGVELKSGYKDWILWISFAMSCFLLCVVLLGFIMWACQKGNIRCNICI

SEQ ID NO: 459 - protein, 566 aa, synthetic construct; identical to SEQ ID NO: 452
  REGION 1..566: note = hemagglutinin__InfluenzaA__ABB80240

SEQ ID NO: 460 - protein, 566 aa, synthetic construct
  REGION 1..566: note = hemagglutinin__InfluenzaA__ABB80251
MKTIIALSYILCLVFAQKLPGNDNSTATLCLGHHAVPNGTLVKTITNDQIEVTNATELVQSSSTGRICDSPHRILDGENCTLIDALLGDPHCDGFQNKEWDLFVERSKAYSNCYPYDVPDYASLRSLVASSGTLEFNNESFNWTGVAQNGTSSACKRRSIKSFFSRLNWLHQLKYKYPALNVTMPNNDKFDKLYIWGVHHPSTDSDQTSLYAQASGRVTVSTKRSQQTVIPNIGSRPWVRGVSSRISIYWTIVKPGDILLINSTGNLIAPRGYFKIRSGKSSIMRSDAPIGKCNSECITPNGSIPNDKPFQNVNRITYGACPRYVKQNTLKLATGMRNVPEKQTRGIFGAIAGFIENGWEGMVDGWYGFRHQNSEGTGQAADLKSTQAAINQINGKLNRLIEKTNEKFHQIEKEFSEVEGRIQDLEKYVEDTKIDLWSYNAELLVALENQHTIDLTDSEMNKLFERTRKQLRENAEDMGNGCFKIYHKCDNACIGSIRNGTYDHDVYRDEALNNRFQIKGVELKSGYKDWILWISFAISCFLLCVVLLGLIMWACQKGNIRCNICI

SEQ ID NO: 461 - protein, 566 aa, synthetic construct
  REGION 1..566: note = hemagglutinin__InfluenzaA__ABB80492
MKTIIALSYILCLVFAQKLPGNDNSTATLCLGHHAVPNGTLVKTITNDQIEVTNATELVQNSSTGRICDSPHRILDGENCTLIDALLGDPHCDGFQNKEWDLFVERSKAYSNCYPYDVPDYASLRSLVASSGTLEFNNESFNWTGVAQNGTSYACKRRSIKSFFSRLNWLHQLKYKYPALNVTMPNNDKFDKLYIWGVHHPSTDSDQTSLYAQASGRVTVSTKRSQQTVIPNIGSRPWVRGVSSRISIYWTIVKPGDILLINSTGNLIAPRGYFKIRSGKSSIMRSDAPIGKCNSECITPNGSIPNDKPFQNVNRITYGACPRYVKQNTLKLATGMRNVPEKQTRGIFGAIAGFIENGWEGMVDGWYGFRHQNSEGTGQAADLKSTQAAINQINGKLNRLIEKTNEKFHQIEKEFSEVEGRIQDLEKYVEDTKIDLWSYNAELLVALENQHTIDLTDSEMNKLFERTRKQLRENAEDMGNGCFKIYHKCDNACIGSIRNGTYDHDVYRDEALNNRFQIKGVELKSGYKDWILWISFAMSCFLLCVVLLGFIMWACQKGNIRCNICI

SEQ ID NO: 462 - protein, 566 aa, synthetic construct
  REGION 1..566: note = hemagglutinin__InfluenzaA__ABB80503
MKTIIALSYISCLVFAQKLPGNDNNTATLCLGHHAVPNGTLVKTITNDQIEVTNATELVQSSSTGRICDSPHRILDGENCTLIDALLGDPHCDGFQNKEWDLFVERSKAYSNCYPYDVPDYASLRSLVASSGTLEFNNESFNWTGVAQNGTSYACKRRSIKSFFSRLNWLHQLKYKYPALNVTMPNNDKFDKLYIWGVHHPSTDSDQTSLYAQASGRVTVSTKRSQQTVIPNIGSRPWVRGVSSRISIYWTIVKPGDILLINSTGNLIAPRGYFKIRSGKSSIMRSDAPIGKCNSECITPNGSIPNDKPFQNVNRITYGACPRYVKQNTLKLATGMRNVPEKQTRGIFGAIAGFIENGWEGMVDGWYGFRHQNSEGTGQAADLKSTQAAINQINGKLNRLIEKTNEKFHQIEKEFSEVEGRIQDLEKYVEDTKIDLWSYNAELLVALENQHTIDLTDSEMNKLFERTRKQLRENAEDMGNGCFKIYHKCDNACIGSIRNGTYDHDVYRDEALNNRFQIKGVELRSGYKDWILWISFAISCFLLCVVLLGFIMWACQKGNIRCNICI

SEQ ID NO: 463 - protein, 566 aa, synthetic construct; identical to SEQ ID NO: 452
  REGION 1..566: note = hemagglutinin__InfluenzaA__ABB80514

SEQ ID NO: 464 - protein, 566 aa, synthetic construct
  REGION 1..566: note = hemagglutinin__InfluenzaA__ABB80529
MKTIIALSYISCLVFAQKLPGNDNSTATLCLGHHAVPNGTLVKTITNDQIEVTNATELVQSSSTGRICDSPHRILDGENCTLIDALLGDPHCDGFQNKEWDLFVERSKAYSNCYPYDVPDYASLRSLVASSGTLEFNNESFNWTGVAQNGTSYACKRRSIKSFFSRLNWLHQLKYKYPALNVTMPNNDKFDKLYIWGVHHPSTDSDQTSLYAQASGRVTVSTKRSQQTVIPNIGSRPWVRGVSSRISIYWTIVKPGDILLINSTGNLIAPRGYFKIRSGKSSIMRSDAPIGKCNSECITPNGSIPNDKPFQNVNRITYGACPRYVKQNTLKLATGMRNVPDKQTRGIFGAIAGFIENGWEGMVDGWYGFRHQNSEGTGQAADLKSTQAAINQINGKLNRLIEKTNEKFHQIEKEFSEVEGRIQDLEKYVEDTKIDLWSYNAELLVALENQHTIDLTDSEMNKLFERTRKQLRENAEDMGNGCFKIYHKCDNACIGSIRNGTYDHDVYRDEALNNRFQIKGVELKSGYKDWILWISFAISCFLLCVVLLGFIMWACQKGNIRCNICI

SEQ ID NO: 465 - protein, 566 aa, synthetic construct
  REGION 1..566: note = hemagglutinin__InfluenzaA__ABB80641
MKTIIALSYILCLVFAQKIPGNDNSTATLCLGHHAVPNGTLVKTITNDQIEVTNATELVQSSSTGRICDSPHRILDGENCTLIDALLGDPHCDGFQNKEWDLFVERSKAYSNCYPYDVSDYASLRSLVASSGTLEFNNESFNWTGVAQNGTSYACKRRSIKSFFSRLNWLHQLKYKYPALNVTMPNNDKFDKLYIWGVHHPSTDSDQTSLYAQASGRVTVSTKRSQQTVIPNIGSRPWVRGVSSRISIYWTIVKPGDILLINSTGNLIAPRGYFKIRSGKSSIMRSDAPIGKCNSECITPNGSIPNDKPFQNVNRITYGACPRYVKQNTLKLATGMRNVPEKQTRGIFGAIAGFIENGWEGMVDGWYGFRHQNSEGTGQAADLKSTQAAINQINGKLNRLIEKTNEKFHQIEKEFSEVEGRIQDLEKYVEDTKIDLWSYNAELLVALENQHTIDLTDSEMNKLFERTRKQLRENAEDMGNGCFKIYHKCDNACIGSIRNGTYDHDVYRDEALNNRFQIKGVELKSGYKDWILWISFAISCFLLCVVLLGFIMWACQKGNIRCNICI

SEQ ID NO: 466 - protein, 566 aa, synthetic construct
  REGION 1..566: note = hemagglutinin__InfluenzaA__ABB80661
MKTIIALSYILCLVFAQKIPGNDNSTATLCLGHHAVPNGTLVKTITNDQIEVTNATELVQSSSTGRICDSPHRILDGENCTLIDALLGDPHCDGFQNKEWDLFVERSKAYSNCYPYDVPDYASLRSLVASSGTLEFNNESFNWTGVAQNGTSYACKRRSIKSFFSRLNWLHQLKYKYPALNVTMPNNDKFDKLYIWGVHHPSTDSDQASLYAQASGRVTVSTKRSQQTVIPNIGSRPWVRGVSSRISIYWTIVKPGDILLINSTGNLIAPRGYFKIRSGKSSIMRSDAPIGKCNSECITPNGSIPNDKPFQNVNRITYGACPRYVKQNTLKLATGMRNVPEKQTRGIFGAIAGFIENGWEGMVDGWYGFRHQNSEGTGQAADLKSTQAAINQINGKLNRLIEKTNEKFHQIEKEFSEVEGRIQDLEKYVEDTKIDLWSYNAELLVALENQHTIDLTDSEMNKLFERTRKQLRENAEDMGNGCFKIYHKCDNACIGSIRNGTYDHDVYRDEALNNRFQIKGVELKSGYKDWILWISFAISCFLLCVVLLGFIMWACQKGNIRCNICI

SEQ ID NO: 467 - protein, 566 aa, synthetic construct
  REGION 1..566: note = hemagglutinin__InfluenzaA__ABB80672
MKTIIALSYILCLVFAQKLPGNDNSTATLCLGHHAVPNGTLVKTITNDQIEVTNATELVQGSSTGRICDSPHQILDGKNCTLIDALLGDPHCDGFQNKEWDLFVERSTAYSNCYPYDVPDYASLRSLVASSGTLEFTKEGFNWTGVAQDGTSYACKRGSVKSFFSRLNWLHKLEYKYPALNVTMPNNDKFDKLYIWGVHHPSTDSDQTSLYVQASGRVTVSTKRSQQTVIPNIGSRPWVRGVSSRISIYWTIVKPGDILLINSTGNLIAPRGYFKIRSGKSSIMRSDAPIDNCNSECITPNGSIPNDKPFQNVNRITYGACPRYVKQNTLKLATGMRNVPEKQTRGIFGAIAGFIENGWEGMVDGWYGFRHQNSEGTGQAADLKSTQAAINQINGKLNRLIEKTNEKFHQIEKEFSEVEGRIQDLEKYVEDTKIDLWSYNAELLVALENQHTIDLTDSEMNKLFERTRKQLRENAEDMGNGCFKIYHKCDNACIGSIRNGTYDHDVYRDEALNNRFQIKGVELKSGYKDWILWISFAISCFLLCVVLLGFIMWACQKGNIRCNICI

SEQ ID NO: 468 - protein, 566 aa, synthetic construct
  REGION 1..566: note = hemagglutinin__InfluenzaA__ABB80682
MKTIIALSYISCLVFAQKLPGNDNSTATLCLGHHAVPNGTLVKTITNDQIEVTNATELVQSSSTGRICDSPHRILDGENCTLIDALLGDPHCDGFQNKEWDLFVERSKAYSNCYPYDVPDYASLRSLVASSGTLEFNNESFNWTGVAQNGTSYACKRRSIKSFFSRLNWLHQLKYKYPALNVTMPNNDKFDKLYIWGVHHPSTDSDQTSLYAQASGRVTVSTKRSQQTVIPNIGSRPWVRGVSSRISIYWTIVKPGDILLINSTGNLIAPRGYFKIRSGKSSIMRSDAPIGKCNSECITPNGSIPNDKPFQNVNRITYGACPRYVKQNTLKLATGMRNVPEKQTRGIFGAIAGFIENGWEGMVDGWYGFRHQNSEGTGQAADLKSTQAAINQINGKLNRLIEKTNEKFHQIEKEFSEVEGRIQDLEKYVEDTKIDLWSYNAELLVALENQHTIDLTDSEMNKLLERTRKQLRENAEDMGNGCFKIYHKCDNACIGSIRNGTYDHDVYRDEALNNRFQIKGVELKSGYKDWILWISFAISCFLLCVVLLGFIMWACQKGNIRCNICI

SEQ ID NO: 469 - protein, 566 aa, synthetic construct
  REGION 1..566: note = hemagglutinin__InfluenzaA__ABB80693
MKTIIALSYISCLVFAQKLPGNDNSTATLCLGHHAVPNGTLVKTITNDQIEVTNATELVQSSSTGRMCDSPHRILDGENCTLIDALLGDPHCDGFQNKEWDLFVERSKAYSNCYPYDVPDYASLRSLVASSGTLEFNNESFNWTGVAQNGTSYACKRRSIKSFFSRLNWLHQLKYKYPALNVTMPNNDKFDKLYIWGVHHPSTDSDQTSLYAQASGRVTVSTKRSQQTVIPNIGSRPWVRGVSSRISIYWTIVKPGDILLINSTGNLIAPRGYFKIRSGKSSIMRSDAPIGKCNSECITPNGSIPNDKPFQNVNRITYGACPRYVKQNTLKLATGMRNVPEKQTRGIFGAIAGFIENGWEGMVDGWYGFRHQNSEGTGQAADLKSTQAAINQINGKLNRLIEKTNEKFHQIEKEFSEVEGRIQDLEKYVEDTKIDLWSYNAELLVALENQHTIDLTDSEMNKLFERTRKQLRENAEDMGNGCFKIYHKCDNACIGSIRNGTYDHDVYRDEALNNRFQIKGVELKSGYKDWILWISFAISCFLLCVVLLGFIMWACQKGNIRCNICI

SEQ ID NO: 470 - protein, 566 aa, synthetic construct
  REGION 1..566: note = hemagglutinin__InfluenzaA__ABB80704
MKTIIALSYILCLVFAQKIPGNDNSTATLCLGHHAVPNGTLVKTITNDQIEVTNATELVQSSSTGRICDSPHRILDGENCTLIDALLGDPHCDGFQNKEWDLFVERSKAYSNCYPYDVPDYASLRSLVASSGTLEFNNESFNWTGVAQNGTSYACKRRSIKSFFSRLNWLHQLKYKYPALNVTMPNNDKFDKLYIWGVHHPSTDSDQTSLYAQASGRVTVSTKRSQQTVIPNIGSRPWVRGVSSRISIYWTIVKPGDILLINSTGNLIAPRGYFKIRSGKSSIMRSDAPIGKCNSECITPNGSIPNDKPFQNVNRITYGACPRYVKQNTLKLATGMRNVPEKQTRGIFGAIAGFIENGWEGMVDGWYGFRHQNSEGTGQAADLKSTQAAINQINGKLNRLIEKTNEKFHQIEKEFSEVEGRIQDLEKYVEDTKIDLWSYNAELLVALENQHTIDLTDSEMNKLFERTRKQLRENAEDMGNGCFKIYHKCDNACIGSIRNGTYDHDVYRDEALNNRFQIKGVELKSGYKDWILWISFAISCFLLCVVLLGFIMWACQKGNIRCNICI

SEQ ID NO: 471 - protein, 566 aa, synthetic construct; identical to SEQ ID NO: 452
  REGION 1..566: note = hemagglutinin__InfluenzaA__ABB80715

SEQ ID NO: 472 - protein, 566 aa, synthetic construct
  REGION 1..566: note = hemagglutinin__InfluenzaA__ABB80724
MKTIIALSYILCLVFAQKLPGNDNSTATLCLGHHAVPNGTLVKTITNDQIEVTNATELVQSSSTGRICDSPHRILDGENCTLIDALLGDPHCDGFQNKEWDLFVERSKAYSNCYPYDVPDYASLRSLVASSGTLEFNNESFNWTGVAQNGTSYACKRRSIKSFFSRLNWLHQLKYKYPALNVTMPNNDKFDKLYIWGVHHPSTDSDQASLYAQASGRVTVSTKRSQQTVIPNIGSRPWVRGVSSRISIYWTIVKPGDILLINSTGNLIAPRGYFKIRSGKSSIMRSDAPIGKCNSECITPNGSIPNDKPFQNVNRITYGACPRYVKQNTLKLATGMRNVPEKQTRGIFGAIAGFIENGWEGMVDGWYGFRHQNSEGTGQAADLKSTQAAINQINGKLNRLIEKTNEKFHQIEKEFSEVEGRIQDLEKYVEDTKIDLWSYNAELLVALENQHTIDLTDSEMNKLFERTRKQLRENAEDMGNGCFKIYHKCDNACIGSIRNGTYDHDVYRDEALNNRFQIKGVELKSGYKDWILWISFAMSCFLLCVVLLGFIMWACQKGNIRCNICI

SEQ ID NO: 473 - protein, 566 aa, synthetic construct; identical to SEQ ID NO: 458
  REGION 1..566: note = hemagglutinin__InfluenzaA__ABB80737

SEQ ID NO: 474 - protein, 566 aa, synthetic construct
  REGION 1..566: note = hemagglutinin__InfluenzaA__ABB80748
MKTIIALSYISCLVFAQKLPGNDNSTATLCLGHHAVPNGTLVKTITNDQIEVTNATELVQSSSTGRICDSPHRILDGENCTLIDALLGDPHCDGFQNKEWDLFVERSKAYSNCYPYDVPDYASLRSLVASSGTLEFNNESFNWTGVAQNGTSYACKRRSIKSFFSRLNWLHQLKYKYPALNVTMPNNDKFDKLYIWGVHHPSTDSDQTSLYAQASGRVTVSTQRSQQTVIPNIGSRPWVRGVSSRISIYWTIVKPGDILLINSTGNLIAPRGYFKIRSGKSSIMRSDAPIGKCNSECITPNGSIPNDKPFQNVNRITYGACPRYVKQNTLKLATGMRNVPEKQTRGIFGAIAGFIENGWEGMVDGWYGFRHQNSEGTGQAADLKSTQAAINQINGKLNRLIEKTNEKFHQIEKEFSEVEGRIQDLEEYVEDTKIDLWSYNAELLVALENQHTIDLTDSEMNKLFERTRKQLRENAEDMGNGCFKIYHKCDNACIGSIRNGTYDHDVYRDEALNNRFQIKGVELKSGYKDWILWISFAISCFLLCVVLLGFIMWACQKGNIRCNICI

SEQ ID NO: 475 - protein, 566 aa, synthetic construct
  REGION 1..566: note = hemagglutinin__InfluenzaA__ABB82183
MKTIIALSYILCLVFAQKLPGNDNSTATLCLGHHAVPNGTLVKTITNDQIEVTNATELVQSSSTGRICDSPHQILDGENCTLIDALLGDPHCDGFQNKEWDLFVERSKAYSNCYPYDVPDYASLRSLVASSGTLEFNNESFNWTGVAQNGTSSACKRRSNKSFFSRLNWLHQLKYKYPALNVTMPNNEKFDKLYIWGVHHPSTDSDQISLYAQASGRVTVSTKRSQQTVIPNIGSRPWVRGVSSRISIYWTIVKPGDILLINSTGNLIAPRGYFKIRSGKSSVMRSDASIGRCNSECITPNGSIPNDKPFQNVNRITYGACPRYVKQNTLKLATGMRNVPEKQTRGIFGAIAGFIENGWEGMVDGWYGFRHQNSEGTGQAADLKSTQAAINQINGKLNRLIEKTNEKFHQIEKEFSEVEGRIQDLEKYVEDTKIDLWSYNAELLVALENQHTIDLTDSEMNKLFERTKKQLRENAEDMGNGCFKIYHKCDNACIGSIRNGTYDHDVYRDEALNNRFQIKGVELKSGYKDWILWISFAISCFLLCVVLLGFIMWACQKGNIRCNICI

SEQ ID NO: 476 - protein, 565 aa, synthetic construct; identical to SEQ ID NO: 296
  REGION 1..565: note = hemagglutinin__InfluenzaA__ABB82194

SEQ ID NO: 477 - protein, 565 aa, synthetic construct
  REGION 1..565: note = hemagglutinin__InfluenzaA__ABB82205
MKVKLLVLLCTFTATYADTICIGYHANNSTDTVDTVLEKNVTVTHSVNLLEDSHNGKLCLLKGIAPLQLGNCSVAGWILGNPECELLISKESWSYIVETPNPENGTCYPGYFADYEELREQLSSVSSFERFEIFPKESSWPNHTVTGVSASCSHNGKSSFYKNLLWLTGKNGLYPNLSKSYANSKEKEVLVLWGVHHPPNIGDQRALYHTENAYVSVVSSHYSRRFTPEIAKRPKVRDQEGRINYYWTLLEPGDTIIFEANGNLIAPRYAFALSRGFGSGIITSNAPMDECDAKCQTPQGAINSSLPFQNVHPVTIGECPKYVRSAKLRMVTGLRNIPSIQSRGLFGAIAGFIEGGWTGMVDGWYGYHHQNEQGSGYAADQKSTQNAINGITNKVNSVIEKMNTQFTAVGKEFNKLERRMENLNKKVDDGFLDIWTYNAELLVLLENERTLDFHDSNVKNLYEKVKSQLKNNAKEIGNGCFEFYHKCNDECMESVKNGTYDYPKYSEESKLNREKIDGVKLESMGVYQILAIYSTVASSLVLLVSLGAISFWMCSNGSLQCRICI

SEQ ID NO: 478 - protein, 565 aa, synthetic construct
  REGION 1..565: note = hemagglutinin__InfluenzaA__ABB82216
MKVKLLVLLCTFTATYADTICIGYHANNSTDTVDTVLEKNVTVTHSVNLLEDSHNGKLCLLKGIAPLQLGNCSVAGWILGNPECELLISKESWSYIVETPNPENGTCYPGYFADYEELREQLSSVSSFERFEIFPKESSWPNHTVTGVSSSCSHNGKSSFYRNLLWLTGKNGLYPNLSKSYVNNKEKEVLVLWGVHHPPNIGDQRALYHTENAYVSVVSSHYSRRFTPEIAKRPKVRDQEGRINYYWTLLEPGDTIIFEANGNLIAPRYAFALSRGFGSGIITSNAPMDECDAKCQTPQGAINSSLPFQNVHPVTIGECPKYVRSAKLRMVTGLRNIPSIQSRGLFGAIAGFIEGGWTGMVDGWYGYHHQNEQGSGYAADQKSTQNAINGITNKVNSVIEKMNTQFTAVGKEFNKLERRMENLNKKVDDGFLDIWTYNAELLVLLENERTLDFHDSNVKNLYEKVKSQLKNNAKEIGNGCFEFYHKCNDECMESVKNGTYDYPKYSEESKLNREKIDGVKLESMGVYQILAIYSTVASSLVLLVSLGAISFWMCSNGSLQCRICI

SEQ ID NO: 479 - protein, 566 aa, synthetic construct
  REGION 1..566: note = hemagglutinin__InfluenzaA__ABB82227
MKTIIALSYIFCLTLGQDLPGNDNSKATLCLGHHAVPNGTLVKTITDDQTEVTNATELVQSSSTGKICNNPHRILDGMDCTLIDALLGDPHCDVFQNETWDLFVERSKAFSNCYPYDVPDYASLRSLAASSGTLEFITEGFTWTGVTQNGGSNACKRGPGSGFFSRLNWLTKSGNTYPVLNVTMPNNDNFDKLYIWGVHHPSTDQEQTSLYVQASGRVTVSTRRSQQTIIPNIGSRPWVRGLSSRISIYWTIVKPGDVLVINSNGNLIAPRGYFKMRTGKSSIMRSDAPIDTCISECITPNGSIPNDKPFQNINKITYGACPKYVKQNTLKLATGMRNVPEKQTRGLFGAIAGFIENGWEGMIDGWYGFRHQNSEGTGQAADLKSTQAAIDQINGKLNRIIEKTNEKFHQIEKEFSEVEGRIQDLEKYVEDTKIDLWSYNAELLVAMENQHTIDLTDSEMNKLFEKTRRQLRENAEDMGNGCFKIYHKCDNACIESIRNGTYDHDVYRDEALNNRFQIKGVELKSGYKDWILWISFAISCFLLCVVLLGFIMWACQRGNIRCNICI

SEQ ID NO: 480 - protein, 565 aa, synthetic construct
  REGION 1..565: note = hemagglutinin__InfluenzaA__ABB83026
MKVKLLILLCTFTATYADTICIGYHANNSTDTVDTVLEKNVTVTHSVNLLEDSHNGKLCLLKGIAPLQLGNCSVAGWILGNPECELLISKESWSYIVETPNPENGTCYPGYFADYEELREQLSSVSSFERFEIFPKESSWPNHTVTGVSASCSHNGKSSFYRNLLWLTEKNGLYPNLSKSYANNKEKEVLILWGVHHPPNIGDQRTLYHTENAYVSVVSSHYSRRFTPEITKRPKVRDQEGRINYYWTLLEPGDTIIFEANGNLIAPWYAFALSRGFGSGIITSNAPMDECDAKCQTPQGAINSSLPFQNVHPVTIGECPKYVRSAKLRMVTGLRNIPSIQSRGLFGAIAGFIEGGWTGMVDGWYGYHHQNEQGSGYAADQKSTQNAINGITNKVNSVIEKMNTQFTAVGKEFNKLERRMENLNKKVDDGFLDIWTYNAELLVLLENERTLDFHDSNVKNLYEKVKSQLKNNAKEIGNGCFEFYHKCNNECMESVKNGTYDYPKYSEESKLNREKIDGVKLESMGVYQILAIYSTVASSLVLLVSLGAISFWMCSNGSLQCRICI

SEQ ID NO: 481 - protein, 565 aa, synthetic construct
  REGION 1..565: note = hemagglutinin__InfluenzaA__ABB83127
MKVKLLILLCTFTATYADTICIGYHANNSTDTVDTVLEKNVTVTHSVNLLEDSHNGKLCLLKGIAPLQLGNCSVAGWILGNPECELLISKESWSYIVETPNPENGACYPGYFADYEELREQLSSVSSFERFEIFPKESSWPNHTVTGVSASCSHNGKSSFYRNLLWLTGKNGLYPNLSKSYANNKEKEVLILWGVHHPPNIGDQRTLYHTENAYVSVVSSHYSRRFTPEITKRPKVRDQEGRINYYWTLLEPGDTIIFEANGNLIAPWYAFALSRGFGSGIIISNAPMDECDAKCQTPQGAINSSLPFQNVHPVTIGECPKYVRSAKLRMVTGLRNIPSIQSRGLFGAIAGFIEGGWTGMVDGWYGYHHQNEQGSGYAADQKSTQNAINGITNKVNSVIEKMNTQFTAVGKEFNKLERRMENLNKKVDDGFLDIWTYNAELLVLLENERTLDFHDSNVKNLYEKVKSQLKNNAKEIGNGCFEFYHKCNNECMESVKNGTYDYPKYSEESKLNREKIDGVKLDSMGVYQILAIYSTVASSLVLLVSLGAISFWMCSNGSLQCRICI

SEQ ID NO: 482 - protein, 565 aa, synthetic construct
  REGION 1..565: note = hemagglutinin__InfluenzaA__ABB83138
MKVKLLILLCTFTATYADTICIGYHANNSTDTVDTVLEKNVTVTHSVNLLEDSHNGKLCLLKGIAPLQLGNCSVAGWILGNPECELLISKESWSYIVETPNPENGACYPGYFADYEELREQLSSISSFERFEIFPKESSWPNHTVTGVSASCSHNGKSSFYRNLLWLTGKNGLYPNLSKSYANNKEKEVLILWGVHHPPNIGDQRTLYHTENAYVSVVSSHYSRRFTPEITKRPKVRDQEGRINYYWTLLEPGDTIIFEANGNLIAPWYAFALSRGFGSGIITSNAPMDECDAKCQTPQGAINSSLPFQNVHPVTIGECPKYVRSAKLRMVTGLRNIPSIQSRGLFGAIAGFIEGGWTGMVDGWYGYHHQNEQGSGYAADQKSTQNAINGITNKVNSVIEKMNTQFTAVGKEFNKLERRMENLNKKVDDGFLDIWTYNAELLVLLENERTLDFHDSNVKNLYEKVKSQLKNNAKEIGNGCFEFYHKCNNECMESVKNGTYDYPKYSEESKLNREKIDGVKLDSMGVYQILAIYSTVASSLVLLVSLGAISFWMCSNGSLQCRICI

SEQ ID NO: 483 - protein, 566 aa, synthetic construct
  REGION 1..566: note = hemagglutinin__InfluenzaA__ABB86877
MKAILLILLYTFTATNADTLCIGYHANNSTDTVDTVLEKNVTVTHSVNLLEDRHNGKLCNLGGIAPLYLGNCNIAGWLLGNPECELLFTVSSWSYIVETSNSDNGTCYPGDFINYEELREQLSSMSSYERFEIFPKESSWPNHETNRGVTAACPYAGANSFYRNLIWLVKKGNSYPKINKSYVNNKEKEVLVLWGIHHPPTSADQQSLYQNADAYVSVESSKYNKKFKPEIATRPKVRGQAGRMNYYWTLVEPGDTITFEATGNLVVPRYAFAMNRGSGSGIIISDTPVHDCNTTCQTPKGAINTSLPFQNVHPVTIGECPKYVKSTKLRMATGLRNIPSIQSRGLFEAIAGFIEGGWTGMIDGWYGYHHQNEQGSGYAADRKSTQNAIDGITNKVNSVIEKMNTQFTAVGKEFNHLEKRIENLNKKVDDGFLDVWTYNAELLVLLENERTLDFHDSNVKNLYEKVRSQLRNNAKEIGNGCFEFYHKCDDTCMESVRNGTYDYLKYSEESKLNREKIEGVKLDSARIYQILAIYSTVASSLVLLVSLGAISFWMCSNGSLQCRICI

SEQ ID NO: 484 - protein, 566 aa, synthetic construct
  REGION 1..566: note = hemagglutinin__InfluenzaA__ABB86887
MKAILLILLYTFTATNADTLCIGYHANNSTDTVDTVLEKNVTVTHSVNLLEDRHNGKLCNLGGIAPLYLGNCNIAGWLLGNPECELLFTVSSWSYIVETSNSDNGTCYPGDFINYEELREQLSSMSSYERFEIFPKESSWPNHETNRGVTAACPYAGANSFYRNLIWLVKKGNSYPKINKSYVNNKEKEVLVLWGIHHPPTSADQQSLYQNADAYVSVESSKYNKKFKPEIATRPKVRGQAGRMNYYWTLVEPGDTITFEATGNLVVPRYAFAMKRGSGSGIIISDTPVHDCNTTCQTPKGAINTSLPFQNIHPVTIGECPKYVKSTKLRMATGLRNIPSIQSRGLFGAIAGFIEGGWTGMIDGWYGYHHQNEQGSGYAADRKSTQNAIDGITNKVNSVIEKMNTQFTAVGKEFNHLEKRIENLNKKVDDGFLDVWTYNAELLVLLENERTLDFHDSNVKNLYEKVRSQLRNNAKEIGNGCFEFYHKCDDTCMESVRNGTYDYLKYSEESKLNREKIEGVKLDSARIYQILAIYSTVASSLVLLVSLGAISFWMCSNGSLQCRICI

SEQ ID NO: 485 - protein, 565 aa, synthetic construct
  REGION 1..565: note = hemagglutinin__InfluenzaA__ABB86899
MKVKLLILLCTFTATYADTICIGYHANNSTDTVDTVLEKNVTVTHSVNLLEDSHNGKLCLLKGIAPLQLGNCSVAGWILGNPECELLISKESWSYIVETPNPENGACYPGHFADYEELREQLSSVSSFERFEIFPKESSWPNHTITGVSASCSHNGKRSFYRNLLWLTGKNGLYPNLSKSYANNKEKEVLILWGVHHPPNIGDQRTLYHTENAYVSVVSSHYSRRFTPEITKRPKVRDQEGRINYYWTLLEPGDTIIFEANGNLIAPWYAFALSRGFGSGIITSNAPMDECDAKCQTPQGAINSSLPFQNVHPVTIGECPKYVRSAKLRMVTGLRNIPSIQSRGLFGAIAGFIEGGWTGMVDGWYGYHHQNEQGSGYAADQKSTQNAINGITNKVNSVIEKMNTQFTAVGKEFSKLERRMENLNKKVDDGFLDIWTYNAELLVLLENERTLDFHDSNVKNLYEKVKGQLKNNAKEIGNGCFEFYHKCNNECMESVKNGTYDYPKYSEESKLNREKIDGVKLDSMGVYQILAIYSTVASSLILLVSLGAISFWMCSNGSLQCRICI

SEQ ID NO: 486 - protein, 566 aa, synthetic construct
  REGION 1..566: note = hemagglutinin__InfluenzaA__ABB86907
MKAILLVLLYTFTSTNADTLCIGYHANNSTDTVDTVLEKNVTVTHSVNLLEDKHNGKLCRLGGIAPLHLGKCNIAGWLLGNPECDLLLTVSSWSYIVETSNSYNGTCYPGDFTNYEELREQLSSVSSFERFEIFPKASSWPNHETNRGVTAACPHAGTNSFYRNLIWLVKKGNTYPKLSKSYVNNKGKEVLVLWGIHHPSTSTDQQSLYQNADTYVFVGTSKYNKKFKPEIAVRPKVKDQAGRMNYYWTLVEPGDTITFEATGNLVVPRYAFAMNRGHGSGIIISDTPVHDCNTTCQTPKGAINTSLPFQNVHPVTIGKCPKYVKSTRLRMATGLRNIPSIQSRGLFGAIAGFIEGGWTGMIDGWYGYHHQNGQGSGYAADQKSTQNAIDGITNKVNSVIEKMNTQFTAVGKEFNHLEKRIENLNKKVDDGFLDVWTYNAELLVLLENERTLDFHDSNVKNLYEKVRRQLKNNAKEIGNGCFEFYHNCDDACMESVKNGTYDYPKYSEESRLNREEINGIKLDSTRIYQILAIYSTVASSSVLLVSLGAISFWMCSNGSLQCRICI

SEQ ID NO: 487 - protein, 565 aa, synthetic construct
  REGION 1..565: note = hemagglutinin__InfluenzaA__ABB86917
MKVKLLILLCTFTATYADPICIGYHANNSTDTVDTVLEKNVAVTHSVNLLEDSHNGKLCLLKGIAPLQLGNCSVAGWILGNPECELLISKESWSYIVETPNPENGACYPGYFADYEELREQLSSVSSFERFEIFPKESSWPNHTVTGVSASCSHNGKSSFYRNLLWLTGKNGLYPNLSKSYANNKEKEVLILWGVHHPPNIGDQRTLYHTENAYVSVVSSHYSRRFTPEITKRPKVRDQEGRINYYWTLLEPGDTIIFEANGNLIAPWYAFALSRGFGSGIITSNAPMDECDAKCQTPQGAINSSLPFQNVHPVTIGECPKYVRSAKLRMVTGLRNIPSIQSRGLFGAIAGFIEGGWTGMVDGWYGYHHQNEQGSGYAADQKSTQNAINGITNKVNSVIEKMNTQFTAVGKEFNKLERRMENLNKKVDDGFLDIWTYNAELLVLLENERTLDFHDSNVKNLYEKVKSQLKNNAKEIGNGCFEFYHKCNNECMESVKNGTYDYPKYSEESKLNREKIDGVKLDSMGVYQILAIYSTVASSLVLLVSLGAISFWMCSNGSLQCRICI

SEQ ID NO: 488 - protein, 565 aa, synthetic construct
  REGION 1..565: note = hemagglutinin__InfluenzaA__ABB86929
MKVKLLILLYTFTATYADTICIGYHANNSTDTVDTVLEKNVTVTHSVNLLEDSHNGKLCLLKGIAPLQLGNCSVAGWILGNPECELLISKESWSYIVETPNPENGACYPGHFADYEELREQLSSVSSFERFEIFPKESSWPNHTITGVSASCSHNGKRSFYRNLLWLTGKNGLYPNLSKSYANNKEKEVLILWGVHHPPNIGDQRTLYHTENAYVSVVSSHYSRRFTPEITKRPKVRDQEGRINYYWTLLEPGDTIIFEANGNLIAPWYAFALSRGFGSGIITSNAPMDECDAKCQTPQGAINSSLPFQNVHPVTIGECPKYVRSAKLRMVTGLRNIPSIQSRGLFGAIAGFIEGGWTGMVDGWYGYHHQNEQGSGYAADQKSTQNAINGITNKVNSVIEKMNTQFTAVGKEFSKLERRMENLNKKVDDGFLDIWTYNAELLVLLENERTLDFHDSNVKNLYEKVKGQLKNNAKEIGNGCFEFYHKCNNECMESVKNGTYDYPKYSEESKLNREKIDGVKLDSMGVYQILAIYSTVASSLILLVSLGAISFWMCSNGSLQCRICI

SEQ ID NO: 489 - protein, 566 aa, synthetic construct
  REGION 1..566: note = hemagglutinin__InfluenzaA__ABB86937
MKAILLVLLYTFTSTNADTLCIGYHANNSTDTVDTVLEKNVTVTHSVNLLEDKHNGRLCKLGGIAPLHLGKCNIAGWLLGNPECELLFTVSSWSYIVETSNSYNGTCYPGDFINYEELREQLSSVSSFERFEIFPKASSWPNHETNRGVTAACPHAGTNSFYRNLIWLVKKGNTYPKISKSYVNNKGKEVLVLWGIHHPSTSNDQQSLYQNADTYVFVGPSKYNKKFKPEIATRPKVRDQAGRMNYYWTLVEPGDTITFEATGNLVVPRYAFAMNRGSESGIIISDTPVHDCNTTCQTPKGAINTSLPFQNVHPVTIGECPKYVKSTRLRMATGLRNIPSIQSRGLFGAIAGFIEEGWTGMIDGWYGYHHQNGQGSGYAADQKSTQNAIDGITNKVNSVIEKMNTQFTAVGKEFNHLEKRIENLNKKVDDGFLDVWTYNAELLVLLENERTLDFHDSNVKNLYEKVRRQLKNNAKEIGNGCFEFYHKCDDACMESVKNGTYDYPKYSEESRLNREEINGIKLDSTRIYQILAIYSTVASSSVLLVSLGAISFWMCSNGSLQCRICI

SEQ ID NO: 490 - protein, 566 aa, synthetic construct
  REGION 1..566: note = hemagglutinin__InfluenzaA__ABB86946
MKAILLVLLYTFTAANADTLCIGYHANNSTDTVDTVLEKNVTVTHSVNLLEDRHNGKLCKLRGIAPLHLGKCNIAGWLLGNPECESLSTVSSWSYIVETSNSDNGTCYPGDFINYEELREQLSSVSSFERFEIFPKASSWPNHETNRGTTAACPYAGANSFYRNLIWLVKKGNSYPKLNKSYVNNKGKEVLVLWGIHHPSTSNEQQSLYQNADTYVFVGSSKYNKKFKPEIATRPKVRDQAGRMNYYWTLIEPGDTITFEATGNLVVPRYAFAMNRGSGSGIIISDTPVHDCNTTCQTPKGAINTSLPFQNVHPVTIGECPKYVKSTKLRMATGLRNIPSIQSRGLFGAIAGFIEGGWTGMIDGWYGYHHQNEQGSGYAADQKSTQNAIDGITNKVNSVIEKMNTQFTAVGKEFNHLEKRIENLNKKVDDGFLDVWTYNAELLVLLENERTLDFHDSNVKNLYEKVRSQLKNNAKEIGNGCFEFYHKCDDACMESVKNGTYDYPKYSEESRLNREEIDGIKLDSTRIYQILAIYSTVASSSVLLVSLGAISFWMCSNGSLQCRICI

SEQ ID NO: 491 - protein, 566 aa, synthetic construct
  REGION 1..566: note = hemagglutinin__InfluenzaA__ABB96319
MKTIIALSYIFCQVFAQNLPGNDNSTATLCLGHHAVPNGTLVKTITNDQIEVTNATELVQSSSTGRICDNPHRILDGKNCTLIDALLGDPHCDGFQNEKWDLFVERSKAFSNCYPYDVPDYASLRSLVASSGTLEFFNEGFNWTGVTQNGGSYACKRGPDNSFFSRLNWLYKSESTYPVLNVTMPNNDNFDKLYIWGVHHPSTDKEQTNLYVQASGRVTVSTKRSQQTIIPNVGPRPWVRGLSSRISIYWTIVKPGDVLLINSNGNLIAPRGYFKIRTGKSSIMRSDAPIGTCSSECITPNGSIPNDKPFQNVNKITYGACPKYVKQNTLKLATGMRNVPEKQTRGIFGAIAGFIENGWEGMIDGWYGFRHQNSEGTGQAADLKSTQAAIDQINGKLNRVIEKTNEKFHQIEKEFSEVEGRIQDLEKYVEDTKIDLWSYNAELLVALENQHTIDLTDSEMNKLFEKTRRQLRENAEDMGNGCFKIYHKCDNACIGSIRNGTYDHDVYRDEALNNRFQIKGVELKSGYKDWILWISFAISCFLLCVVLLGFIMWACQKGNIRCNICI

SEQ ID NO: 492 - protein, 566 aa, synthetic construct
  REGION 1..566: note = hemagglutinin__InfluenzaA__ABB96330
MKTIIALSYIFCQVFAQNLPGNDNSTATLCLGHHAVPNGTLVKTITNDQIEVTNATELVQSSSTGRICDNPHRILDGKNCTLIDALLGDPHCDGFQNEKWDLFVERSKAFSNCYPYDVPDYASLRSLVASSGTLEFFNEGFNWTGVTQNGGSYACKRGPDNSFFSRLNWLYKSESTYPVLNVTMPNNDNFDKLYIWGVHHPSTDKEQTNLYVQASGRVTVSTKRSQQTIIPNVGSRPWVRGLSSRISIYWTIVKPGDVLLINSNGNLIAPRGYFKIRTGKSSIMRSDAPIGTCSSECITPNGSIPNDRPFQNVNKITYGACPKYVKQNTLKLATGMRNVPEKQTRGIFGAIAGFIENGWEGMVDGWYGFRHQNSEGTGQAADLKSTQAAIDQINGKLNRVIEKTNEKFHQIEKEFSEVEGRIQNLEKYVEDTKIDLWSYNAELLVALENQHTIDLTDSEMNKLFEKTRRQLRENAEDMGNGCFKIYHKCDNACIGSIRNGTYDHDVYRDEALNNRFQIKGVELKSGYKDWILWISFAISCFLLCVVLLGFIMWACQKGNIRCNICI

SEQ ID NO: 493 - protein, 566 aa, synthetic construct
  REGION 1..566: note = hemagglutinin__InfluenzaA__ABB96341
MKTIIALSYIFCQVFAQNLPGNDNSTATLCLGHHAVPNGTLVKTITNDQIEVTNATELVQSSSTGRICDNPHRILDGKNCTLIDALLGDPHCDGFQNEKWDLFVERSKAFSNCYPYDVPDYASLRSLVASSGTLEFFNEGFNWTGVTQNGGSYACKKGPDNSFFSRLNWLYKSESTYPVLNVTMPNNDNFDKLYIWGVHHPSTDKEQTNLYVQASGRVTVSTKRSQQTIIPNVGSRPWVRGLSSRISIYWTIVKPGDVLLINSNGNLIAPRGYFKIRTGKSSIMRSDAPIGTCSSECITPNGSIPNDKPFQNVNKITYGACPKYVKQNTLKLATGMRNVPEKQTRGIFGAIAGFIENGWEGMIDGWYGFRHQNSEGTGQAADLKSTQAAIDQINGKLNRVIEKTNEKFHQIEKEFSEVEGRIQDLEKYVEDTKIDLWSYNAELLVALENQHTIDLTDSEMNKLFEKTRRQLRENAEDMGNGCFKIYHKCDNACIGSIRNGTYDHDVYRDEALNNRFQIKGVELKSGYKDWILWISFAISCFLLCVVLLGFIMWACQKGNIRCNICI

SEQ ID NO: 494 - protein, 566 aa, synthetic construct
  REGION 1..566: note = hemagglutinin__InfluenzaA__ABB96395
MKTIIALSYIFCQVFAQNLPGNDNSTATLCLGHHAVPNGTLVKTITNDQIEVTNATELVQSSSTGRICDSPHRILDGKNCTLMDALLGDPHCDGFQNEKWDLFVERSKAFSNCYPYDVPDYASLRSLVASSGTLEFINEGFNWTGVTQNGGSYACKRGPDNSFFSRLNWLYKSESTYPVLNVTMPNNDNFDKLYIWGVHHPSTDKEQTNLYVQASGRVTVSTKRSQQTIIPNVGSRPWVRGLSSRISIYWTIVKPGDILLINSNGNLIAPRGYFKIRTGKSSIMRSDAPIGTCSSECITPNGSIPNDKPFQNVNKITYGACPKYVKQNTLKLATGMRNVPEKQTRGIFGAIAGFIENGWEGMIDGWYGFRHQNSEGTGQAADLKSTQAAIDQINGKLNRVIERTNEKFHQIEKEFSEVEGRIQDLEKYVEDTKIDLWSYNAELLVALENQHTIDLTDSEMNKLFEKTRRQLRENAEDMGNGCFKIYHKCDNACIGSIRNGTYDHDVYRDEALNNRFQIKGVELKSGYKDWILWISFAISCFLLCVVLLGFIMWACQKGNIRCNICI

SEQ ID NO: 495 - protein, 565 aa, synthetic construct
  REGION 1..565: note = hemagglutinin__InfluenzaA__ABB96487
MKVKLLILLCTFTATYADTICIGYHANNSTDTVDTVLEKNVTVTHSVNLLEDSHNGKLCLLKGIAPLQLGNCSVAGWILGNPECELLISKESWSYIVETPNPENGACYPGYFADYEELREQLSSVSSFERFEIFPKKSSWPNHTVTGVSASCSHDGKSSFYRNLLWLTGKNGLYPNLSKSYANNKEKEVLILWGVHHPPNIGDQRTLYHTENAYVSVVSSHYSRRFTPEITKRPKVRDQEGRINYYWTLLEPGDTIIFEANGNLIAPWYAFALSRGFGSGIITSNAPMDECDAKCQTPQGAINSSLPFQNVHPVTIGECPKYVRSAKLRMVTGLRNIPSIQSRGLFGAIAGFIEGGWTGMVDGWYGYHHQNEQGSGYAADQKSTQNAINGITNKVNSVIEKMNTQFTAVGKEFNKLERRMENLNKKVDDGFLDIWTYNAELLVLLENERTLDFHDSNVKNLYEKVKSQLKNNAKEIGNGCFEFYHKCNNECMESVKNGTYDYPKYSEESKLNREKIDGVKLDSMGVYQILAIYSTVASSLVLLVSLGAISFWMCSNGSLQCRICI

SEQ ID NO: 496 - protein, 566 aa, synthetic construct
  REGION 1..566: note = hemagglutinin__InfluenzaA__ABB96520
MKTIIALSYIFCLALGQDLPGNGNSTATLCLGHHAVPNGTLVKTITDDQIEVTNATELVQSSSTGKICNNPHRILDGIDCTLIDALLGDPHCDVFQNETWDLFVERSKAFSNCYPYDVPDYASLRSLVASSGTLEFITEGFTWTGVTQNGGSNACKRGPGSGFFSRLNWLTKSGSTYPVLNVTMPNNDNFDKLYIWGVHHPSTDQEQTSLYVQASGRVTVSTRRSQQTIIPNIGSRPWVRGLSSRISIYWTIVKPGDVLVINSNGNLIAPRGYFKMRTGKSSIMRSDAPIDTCISECITPNGSIPNDKPFQNVNKITYGACPKYVKQKTLKLATGMRNIPEKKTRGIFGAIAGFIENGWEGMIDGWYGFRHQNSEGTGQAADLKSTQAAIDQINGKLNRVIEKTNEKFHQIEKEFSEVEGRIQDLEKYVEDTKIDLWSYNAELLVALENQHTIDLTDSEMNKLFEKTRRQLRENAEDMGNGCFKIYHKCDNACIESIRNGTYDHDVYRDEALNNRFQIKGVELKSGYKDWILWISFAISCFLLCVVLLGFIMWACQRGNIRCNICI

SEQ ID NO: 497 - protein, 566 aa, synthetic construct
  REGION 1..566: note = hemagglutinin__InfluenzaA__ABB96531
MKTIIALSYILCLVSAQKIPGNDSSTATLCLGHHAVPNGTLVKTITNDQIEVTNATELVQSSSTGRICDSPHRILDGENCTLIDALLGDPHCDGFQNKEWDLFVERSKAYSNCYPYDVPDYASLRSLVASSGTLEFNNESFNWTGVAQNGTSYACKRRSIKSFFSRLNWLHQLKYKYPALNVTMPNNDKFDKLYIWGVHHPSTDSDQTSLYAQASGRVTVSTKRSQQTVIPNIGSRPWVRGVSSRISIYWTIVKPGDILLINSTGNLIAPRGYFKIRSGKSSIMRSDAPIGKCNSECITPNGSIPNDKPFQNVNRITYGACPRYVKQNTLKLATGMRNVPEKQTRGIFGAIAGFIENGWEGMVDGWYGFRHQNSEGTGQAADLKSTQAAINQINGKLNRLIEKTNEKFHQIEKEFSEVEGRIQDLEKYVEDTKIDLWSYNAELLVALENQHTIDLTDSEMNKLFERTRKQLRENAEDMGNGCFKIYHKCDNACIGSIRNGTYDHDVYRDEALNNRFQIKGVELKSGYKDWILWISFAISCFLLCVVLLGFIMWACQKGNIRCNICI

SEQ ID NO: 498 - protein, 566 aa, synthetic construct
  REGION 1..566: note = hemagglutinin__InfluenzaA__ABC02234
MKTIIALSYILCLVFAQKLPGNDNSTATLCLGHHAVPNGTLVKTITNDQIEVTNATELVQSSSTGRICDSPHRILDGENCTLIDALLGDPHCDGFQNKEWDLFVERSKAYSNCYPYDVPDYASLRSLVASSGTLEFNNESFNWTGVAQNGTSYACKRRSIKSFFSRLNWLHQLKYKYPALNVTMPNNDKFDKLYIWGVHHPSTDSDQTSLYAQASGRVTVSTKISQQTVIPNIGSRPWVRGVSSRISIYWTIVKPGDILLINSTGNLIAPRGYFKIRSGKSSIMRSDAPIGKCNSECITPNGSIPNDKPFQNVNRITYGACPRYVKQNTLKLATGMRNVPEKQTRGIFGAIAGFIENGWEGMVDGWYGFRHQNSEGTGQAADLKSTQAAINQINGKLNRLIEKTNEKFHQIEKEFSEVEGRIQDLEKYVEDTKIDLWSYNAELLVALENQHTIDLTDSEMNKLFERTRKQLRENAEDMGNGCFKIYHKCDNACIGSIRNGTYDHDVYRDEALNNRFQIKGVELKSGYKDWILWISFAMSCFLFCVVLLGFIMWACQKGNIRCNICI

SEQ ID NO: 499 - protein, 566 aa, synthetic construct
  REGION 1..566: note = hemagglutinin__InfluenzaA__ABC02255
MKTIIALSYIFCLVLAQDLPGNDNSTATLCLGHHAVPNGTLVKTITNDQIEVTNATELVQSSSTGKICNNPHRILDGINCTLIDALLGDPHCDGFQNEKWDLFVERSKAFSNCYPYDVPDYASLRSLVASSGTLEFINEGFNWTGVTQNGGSNACKRGPDSGFFSRLNWLYKSGSTYPVLNVTMPNNDNFDKLYIWGVHHPSTDQEQTNLYVQASGRVTVSTKRSQQTIIPNVGSRPWVRGLSSRISIYWTIVKPGDILVINSNGNLIAPRGHFKMRTGKSSIMRSDAPIGTCSSECITPNGSIPNDKPFQNVNKITYGACPKYVKQNTLKLATGMRNVPEKQTRGIFGAIAGFIENGWEGMIDGWYGFRHQNSEGTGQAADLKSTQAAIDQINGKLNRVIEKTNEKFHQIEKEFSEVEGRIQDLEKYVEDTKIDLWSYNAELLVALENQHTIDLTDSEMNKLFEKTRRQLRENAEDMGNGCFKIYHKCDNACIGSIRNGTYDHDVYRDEALNNRFQIKGVELKSGYKDWILWISFAISCFLLCVVLLGFIMWACQKGNIRCNICI

SEQ ID NO: 500 - protein, 566 aa, synthetic construct
  REGION 1..566: note = hemagglutinin__InfluenzaA__ABC02266
MKTIIALSYIFCLVFAQDLPGNDNSTATLCLGHHAVPNGTLVKTITNDQIEVTNATELVQSSSTGKICDNPHRILDGINCTLIDALLGDPHCDGFQNEKWDLFVERSKAFSNCYPYDVPDYASLRSLVASSGTLEFINEGFNWTGVTQNGGSRACKRGPDNGFFSRLNWLYKSGSTYPVQNVTMPNNDNSDKLYIWGVHHPSTDKEQTDLYVQASGKVTVSTKRSQQTVIPNVGSRPWVRGLSSRVSIYWTIVKPGDILVINSNGNLIAPRGYFKMRTGKSSIMRSDAPIGTCSSECITPNGSIPNDKPFQNVNKITYGACPKYVKQNTLKLATGMRNVPEKQTRGIFGAIAGFIENGWEGMIDGWYGFRHQNSEGTGQAADLKSTQAAIDQINGKLNRVIEKTNEKFHQIEKEFSEVEGRIQDLEKYVEDTKIDLWSYNAELLVALENQHTIDLTDSEMNKLFEKTRRQLRENAEDMGNGCFKIYHKCDNACIGSIRNGTYDHDVYRDEALNNRFQIKGVELKSGYKDWILWISFAISCFLLCVVLLGFIMWACQKGNIRCNICI

SEQ ID NO: 501 - protein, 566 aa, synthetic construct
  REGION 1..566: note = hemagglutinin__InfluenzaA__ABC02288
MKTIIALSYILCLVFAQKIPGNDNSTATLCLGHHAVPNGTLVKTITNDQIEVTNATELVQSSSTGRICDSPHRILDGENCTLIDALLGDPHCDGFQNKEWDLFVERSKAYSNCYPYDVPDYASLRSLVASSGTLEFNNESFNWTGVAQNGTSYACKRRSIKSFFSRLNWLHQLKYKYPALNVTMPNNDKFDKLYIWGVHHPSTDSDQTSLYAQASGRVTVSTKRSQQTVIPNIGSRPWVRGVSSRISIYWTIVKPGDILLINSTGNLIAPRGYFKIRSGKSSIMRSDAPIGKCNSECITPNGSIPNDKPFQNVNRITYGACPRYVKQNTLKLATGMRNVPEKQTRGIFGAIAGFIENGWEGMVDGWYGFRHQNSEGTGQAADLKSTQAAINQINGKLNRLIEKTNEKFHQIEKEFSEVEGRIQDLEKYVEDTKIDLWSYNAELLVALENQHTIDLTDSEMNKLFERTRKQLRENAEDMGNGCFKIYHKCDNACIGSIRNGTYDHDVYRDEALNNRFQIKGVELKSGHKDWILWISFAISCFLLCVVLLGFIMWACQKGNIRCNICI

SEQ ID NO: 502 - protein, 566 aa, synthetic construct; identical to SEQ ID NO: 470
  REGION 1..566: note = hemagglutinin__InfluenzaA__ABC02299

SEQ ID NO: 503 - protein, 566 aa, synthetic construct; identical to SEQ ID NO: 494
  REGION 1..566: note = hemagglutinin__InfluenzaA__ABC02310

SEQ ID NO: 504 - protein, 566 aa, synthetic construct; identical to SEQ ID NO: 499
  REGION 1..566: note = hemagglutinin__InfluenzaA__ABC02321

SEQ ID NO: 505 - protein, 566 aa, synthetic construct; identical to SEQ ID NO: 305
  REGION 1..566: note = hemagglutinin__InfluenzaA__ABC02332

SEQ ID NO: 506 - protein, 566 aa, synthetic construct
  REGION 1..566: note = hemagglutinin__InfluenzaA__ABC39805
MKTIIALSYILCLVFAQNLPGNDNSTATLCLGHHAVPNGTLVKTITNDQIEVTNATELVQSSSAGRICDSPHRILDGKNCTLIDALLGDPHCDGFQNEKWDLFVERSKAFSNCYPYDVQDYASLRSLVASSGTLEFINEGFNWTGVTQSGGSYACKRGSGNSFFSRLNWLYKSESKYPALNVTMPNNGNFDKLYIWGVHHPSTDKEQTNLYVRASGRVTVSTKRSQQTVIPNIGPRPWVRGLSSRISIYWTIVKPGDILLINSSGNLIAPRGYFKIRTGKSSIMRSDAPIGTCSSECITPNGSIPNDKPFQNVNKITYGACPKYVKQNTLKLATGMRNIPEKQTRGIFGAIAGFIENGWEGMVDGWYGFRHQNSEGTGQAADLKSTQAAIDQINGKLNRVIEKTNEKFHQIEKEFSEVEGRIQDLEKYVEDTKIDLWSYNAELLVALENQHTIDLTDSEMNKLFEKTRRQLRENAEDMGNGCFKIYHKCDNACIGSIRNGTYDHDVYRDEALNNRFQIKGVELKSGYKDWILWISFAISCFLLCVVLLGFIMWACQKGNIRCNICI

SEQ ID NO: 507 - protein, 565 aa, synthetic construct
  REGION 1..565: note = hemagglutinin__InfluenzaA__ABC40522
MKVKLLILLCTFTATYADTICIGYHANNSTDTVDTVLEKNVTVTHSVNLLEDSHNGKLCLLKGIAPLQLGNCSVAGWILGNPECELLISKESWSYIVETPNPENGACYPGYFADYEELREQLSSVSSFERFEIFPKESSWPNHTVTGVSASCSHNGKSSFYKNLLWLTGKNGLYPNLSKSYANNKEKEVLILWGVHHPPNIGDQRTLYHTENAYVSVVSSHYSRRFTPEITKRPKVRDQEGRINYYWTLLEPGDTIIFEANGNLIAPWYAFALSRGFGSGIITSNAPMDECDAKCQTPQGAINSSLPFQNVHPVTIGECPKYVRSAKLRMVTGLRNIPSIQSRGLFGAIAGFIEGGWTGMVDGWYGYHHQNEQGSGYAADQKSTQNAINGITNKVNSVIEKMNTQFTAVGKEFNKLERRMENLNKKVDDGFLDIWTYNAELLVLLENERTLDFHDSNVKNLYEKVKSQLKNNAKEIGNGCFEFYHKCNNECMESVKNGTYDYPKYSEESKLNREKIDGVKLDSMGVYQILAIYSTVASSLVLLVSLGAISFWMCSNGSLQCRICI

SEQ ID NO: 508 - protein, 565 aa, synthetic construct; identical to SEQ ID NO: 296
  REGION 1..565: note = hemagglutinin__InfluenzaA__ABC40533

SEQ ID NO: 509 - protein, 566 aa, synthetic construct [sequence omitted]

SEQ ID NO: 510 - protein, 566 aa, synthetic construct
  REGION 1..566: note = hemagglutinin__InfluenzaA__ABC40608
MKTIIALSYILCLVFAQKLPGNDNSTATLCLGHHAVPNGTLVKTITNDQIEVTNATELVQSSSTGRICDSPHRILDGENCTLIDALLGDPHCDGFQNKEWDLFVERSKAYSNCYPYDVPDYASLRSLVASSGTLEFNNESFNWTGVAQNGTSSACKRRSIKSFFSRLNWLHQLKYKYPALNVTMPNNDKFDKLYIWGVHHPSTDSDQTSLYAQASGRVTVSTRRSQQTVIPNIGSRPWVRGVSSRISIYWTIVKPGDILLINSTGNLIAPRGYFKIRSGKSSIMRSDAPIGKCNSECITPNGSIPNDKPFQSVNRITYGACPRYVKQNTLKLATGMRNVPEKQTRGIFGAIAGFIENGWEGMVDGWYGFRHQNSEGTGQAADLKSTQAAINQINGKLNRLIEKTNEKFHQIEKEFSEVEGRIQDLEKYVEDTKIDLWSYNAELLVALENQHTIDLTDSEMNKLFERTRKQLRENAEDMGNGCFKIYHKCDNACIGSIRNGTYDHDVYRDEALNNRFQIKGVELKSGYKDWILWISFAISCFLLCVVLLGFIMWACQKGNIRCNICI

SEQ ID NO: 511 - protein, 566 aa, synthetic construct
  REGION 1..566: note = hemagglutinin__InfluenzaA__ABC40619
MKTIIALSYIFCLVLGQDFSGNDNSTATLCLGHHAVPNGTLVKTITNDQIEVTNATELVQSSSTGKICNNPHRILDGIDCTLIDALLGDPHCDGFQNETWDLFVERSKAFSNCYPYDVPDYASLRSLVASSGTLEFINEGFNWTGVTQNGGSNACKRGPDSGFFSRLNWLYKSGSTYPVLNVSMPNNDNFDKLYIWGVHHPSTDQEQTNLYVQASGRVTVSTKRSQQTIIPNIGSRPWVRGLSSRISIYWTIVKPGDILVINSNGNLIAPRGYFKMRTGKSSIMRSDAPIGTCISECITPNGSIPNDKPFQNVNKITYGACPKYVKQNTLKLATGMRNVPEKQTRGIFGAIAGFIENGWEGMIDGWYGFRHQNSEGTGQAADLKSTQAAIDQINGKLNRIIEKTNEKFHQIEKEFSEVEGRIQDLEKYVEDTKIDLWSYNAELLVALENQHTIDLTDSEMNKLFEKTRRQLRENAEDMGNGCFKIYHKCDNACIGSIRNGTYDHDVYRDEALNNRFQIKGVELKSGYKDWILWISFAISCFLLCVVLLGFIMWACQKGNIRCNICI

SEQ ID NO: 512 - protein, 565 aa, synthetic construct
  REGION 1..565: note = hemagglutinin__InfluenzaA__ABC40631
MKVKLLILLCTFTATYADTICIGYHANNSTDTVDTVLEKNVTVTHSVNLLEDSHNGKLCLLKGIAPLQLGNCSVAGWILGNPECELLISKESWSYIVETPNPENGTCYPGYFADYEELREQLSSVSSFERFEIFPKESSWPNHTVTGVSASCSHNGKSSFYRNLLWLTGKNGLYPNLSKSYANNKEKEVLILWGVHHPPNIGDQRTLYHTENAYVSVVSSHYSRRFTPEITKRPKVRDQEGRINYYWTLLEPGDTIIFEANGNLIAPWYAFALSRGFGSGIITSNAPMDECDAKCQTPQGAINSSLPFQNVHPVTIGECPKYVRSAKLRMVTGLRNIPSIQSRGLFGAIAGFIEGGWTGMVDGWYGYHHQNEQGSGYAADQKSTQNAINGITNKVNSVIEKMNTQFTAVGKEFNKLERRMENLNKKVDDGFLDIWTYNAELLVLLENERTLDFHDSNVKNLYEKVKSQLKNNAKEIGNGCFEFYHKCNNECMESVKNGTYDYPKYSEESKLNREKIDGVKLESMGVYQILAIYSTVASSLVLLVSLGAISFWMCSNGSLQCRICI

SEQ ID NO: 513 - protein, 566 aa, synthetic construct
  REGION 1..566: note = hemagglutinin__InfluenzaA__ABC41692
MKTIIALSYILCLVFAQKPPGNDNSTATLCLGHHAVPNGTIVKTITNDQIEVTNATELVQSSSTGGICDSPHQILDGENCTLIDALLGDPQCDGFQNKKWDLFVERSKAYSNCYPYDVPDHASLRSLVASSGTLEFNNESFDWTGVTQNGTSSACKRRSNKSFFSRLNWLTHLKYKYPALNVTMPNNEKFDKLYIWGVHHPGTDSDQISLYAQASGRITVSTKRSQQTVIPNIGSRPRVRDVSSRISIYWTIVKPGDILLINSTGNLIAPRGYFKIRSGKSSIMRSDAPIGKCNSECITPNGSIPNDKPFQNVNRITYGACPRYVKQNTLKLATGMRNVPEKQTRGIFGAIAGFIENGWEGMVDGWYGFRHQNSEGTGQAADLKSTQAAINQINGKLNRLIGKTNEKFHQIEKEFSEVEGRIQDLEKYVEDTKIDLWSYNAELLVALENQHTIDLTDSEMNKLFERTKKQLRENAEDMGNGCFKIYHKCDNACIGSIRNGTYDHDVYRDEALNNRFQIKGVELKSGYKDWILWISFAISCFLLCVALLGFIMWACQKGNIRCNICI

SEQ ID NO: 514 - protein, 565 aa, synthetic construct; identical to SEQ ID NO: 299
  REGION 1..565: note = hemagglutinin__InfluenzaA__ABC41714

SEQ ID NO: 515 - protein, 566 aa, synthetic construct
  REGION 1..566: note = hemagglutinin__InfluenzaA__ABC41725
MKTTIALSYILCLVFAQKLPGNDNSTATLCLGHHAVPNGTIVKTITNDQIEVTNATELVQSSSTGGICDSPHQILDGENCTLIDALLGDPQCDGFQNKKWDLFVERSKAYSNCYPYDVPDHASLRSLVASSGTLEFNNESFDWTGVTQNGTSSACKRRSNKSFFSRLNWLTHLKYKYPALNVTMPNNEKFDKLYIWGVHHPGTDSDQISLYAQASGRITVSTKRSQQTVIPNIGSRPRVRDVSSRISIYWTIVKPGDILLINSTGNLIAPRGYFKIRSGKSSIMRSDAPIGKCNSECITPNGSIPNDKPFQNVNRITYGACPRYVKQNTLKLATGMRNVPEKQTRGIFGAIAGFIENGWEGMVDGWYGFRHQNSEGTGQAADLKSTQAAINQINGKLNRLIGKTNEKFHQIEKEFSEVEGRIQDLEKYVEDTKIDLWSYNAELLVALENQHTIDLTDSEMNKLFERTKKQLRENAEDMGNGCFKIYHKCDNACIGSIRNGTYDHDVYRDEALNNRFQIKGVELKSGYKDWILWISFAISCFLLCVALLGFIMWACQKGNIRCNICI

SEQ ID NO: 516 - protein, 566 aa, synthetic construct
  REGION 1..566: note = hemagglutinin__InfluenzaA__ABC41736
MKTIIALSYILCLVFAQKLPGNDNSTATLCLGHHAVPNGTIVKTITNDQIEVTNATELVQSSSTGGICDSPHQILDGENCTLIDALLGDPQCDGFQNKKWDLFVERSKAYSNCYPYDVPDHASLRSLVASSGTLEFNNESFDWTGVTQNGTSSACKRRSNKSFFSRLNWLTHLKYKYPALNVTMPNNEKFDKLYIWGVHHPGTDSDQISLYAQASGRITVSTKRSQQTVIPNIGSRPRVRDVSSRISIYWTIVKPGDILLINSTGNLIAPRGYFKIRSGKSSIMRSDAPIGKCNSECITPNGSIPNDKPFQNVNRITYGACPRYVKQNTLKLATGMRNVPEKQTRGIFGAIAGFIENGWEGMVDGWYGFRHQNSEGTGQAADLKSTQAAINQINGKLNRLIGKTNEKFHQIEKEFSEVEGRIQDLEKYVEDTKIDLWSYNAELLVALENQHTIDLTDSEMNKLFERTKKQLRENAEDMGNGCFKIYHKCDNACIGSIRNGTYDHDVYRDEALNNRFQIKGVELKSGYKDWILWISFAISCFLLCVALLGFIMWACQKGNIRCNICI

SEQ ID NO: 517 - protein, 566 aa, synthetic construct; identical to SEQ ID NO: 516
  REGION 1..566: note = hemagglutinin__InfluenzaA__ABC41952

SEQ ID NO: 518 - protein, 566 aa, synthetic construct; identical to SEQ ID NO: 516
  REGION 1..566: note = hemagglutinin__InfluenzaA__ABC41953

SEQ ID NO: 519 - protein, 566 aa, synthetic construct; identical to SEQ ID NO: 516
  REGION 1..566: note = hemagglutinin__InfluenzaA__ABC41964

SEQ ID NO: 520 - protein, 566 aa, synthetic construct; identical to SEQ ID NO: 516
  REGION 1..566: note = hemagglutinin__InfluenzaA__ABC42014

SEQ ID NO: 521 - protein, 566 aa, synthetic construct; identical to SEQ ID NO: 516
  REGION 1..566: note = hemagglutinin__InfluenzaA__ABC42114

SEQ ID NO: 522 - protein, 566 aa, synthetic construct; identical to SEQ ID NO: 516
  REGION 1..566: note = hemagglutinin__InfluenzaA__ABC42125

SEQ ID NO: 523 - protein, 566 aa, synthetic construct; identical to SEQ ID NO: 516
  REGION 1..566: note = hemagglutinin__InfluenzaA__ABC42136

SEQ ID NO: 524 - protein, 566 aa, synthetic construct
  REGION 1..566: note = hemagglutinin__InfluenzaA__ABC42147
MKTIIALSYILCLVFAQKLPGNDNSTATLCLGHHAVPNGTIVKTITNDQIEVTNATELVQSSSTGGICDSPHQILDGENCTLIDALLGDPQCDGFQNKKWDLFVERSKAYSNCYPYDVPDHASLRSLVASSGTLEFNNESFDWTGVTQNGTSSACKRRSNKSFFSRLNWLTHLKYKYPALNVTMPNNEKFDKLYIWGVHHPGTDSDQISLYAQASGRITVSTKRSQQTVIPNIGSRPRVRDVSSRISIYWTIVKPGDILLINSTGNLIAPRGYFKIRSGKSSIMRSDVPIGKCNSECITPNGSIPNDKPFQNVNRITYGACPRYVKQNTLKLATGMRNVPEKQTRGIFGAIAGFIENGWEGMVDGWYGFRHQNSEGTGQAADLKSTQAAINQINGKLNRLIGKTNEKFHQIEKEFSEVEGRIQDLEKYVEDTKIDLWSYNAELLVALENQHTIDLTDSEMNKLFERTKKQLRENAEDMGNGCFKIYHKCDNACIGSIRNGTYDHDVYRDEALNNRFQIKGVELKSGYKDWILWISFAISCFLLCVALLGFIMWACQKGNIRCNICI

SEQ ID NO: 525 - protein, 566 aa, synthetic construct; identical to SEQ ID NO: 516
  REGION 1..566: note = hemagglutinin__InfluenzaA__ABC42158

SEQ ID NO: 526 - protein, 566 aa, synthetic construct; identical to SEQ ID NO: 516
  REGION 1..566: note = hemagglutinin__InfluenzaA__ABC42169

SEQ ID NO: 527 - protein, 566 aa, synthetic construct; identical to SEQ ID NO: 516
  REGION 1..566: note = hemagglutinin__InfluenzaA__ABC42180

SEQ ID NO: 528 - protein, 566 aa, synthetic construct; identical to SEQ ID NO: 516
  REGION 1..566: note = hemagglutinin__InfluenzaA__ABC42192

SEQ ID NO: 529 - protein, 566 aa, synthetic construct; identical to SEQ ID NO: 516
  REGION 1..566: note = hemagglutinin__InfluenzaA__ABC42307

SEQ ID NO: 530 - protein, 566 aa, synthetic construct
  REGION 1..566: note = hemagglutinin__InfluenzaA__ABC42318
MKTIIALSYILCLVFAQKLPGNDNSTATLCLGHHAVPNGTIVKTITNDQIEVTNATELVQSSSTGGICDSPHQILDGENCTLIDALLGDPQCDGFQNKKWDLFVERSKAYSNCYPYDVPDHASLRSLVASSGTLEFNNESFDWTGVTQNGTSSACKRRSNKSFFSRLNWLTHLKYKYPALNVTMPNNEKFDKLYIWGVHHPGTDSDQISLYAQASGRITVSTKRSQQTVIPNIGSRPRVRDVSSRISIYWTIVKPGDILLINSTGNLIAPRGYFKIRSGKSSIMRSDAPIGKCNSECITPNGSIPNDKPFQNVNRITYGACPRYVKQNTLKLATGMRNVPEKQTRGIFGAIAGFIENGWEGMVDGWYGFRHQNSEGTGQAADLKSTQAAINQINGKLNRLIGKTNEKFHQIEKEFSEVEGRIQDLEKYVEDTKIDLWSYNAEFLVALENQHTIDLTDSEMNKLFERTKKQLRENAEDMGNGCFKIYHKCDNACIGSIRNGTYDHDVYRDEALNNRFQIKGVELKSGYKDWILWISFAISCFLLCVALLGFIMWACQKGNIRCNICI

SEQ ID NO: 531 - protein, 566 aa, synthetic construct; identical to SEQ ID NO: 516
  REGION 1..566: note = hemagglutinin__InfluenzaA__ABC42346

SEQ ID NO: 532 - protein, 566 aa, synthetic construct; identical to SEQ ID NO: 516
  REGION 1..566: note = hemagglutinin__InfluenzaA__ABC42461

SEQ ID NO: 533 - protein, 566 aa, synthetic construct; identical to SEQ ID NO: 516
  REGION 1..566: note = hemagglutinin__InfluenzaA__ABC42494

SEQ ID NO: 534 - protein, 566 aa, synthetic construct; identical to SEQ ID NO: 516
  REGION 1..566: note = hemagglutinin__InfluenzaA__ABC42505

SEQ ID NO: 535 - protein, 566 aa, synthetic construct
  REGION 1..566: note = hemagglutinin__InfluenzaA__ABC42516
MKTIIALSYILCLVFAQKLPGNDNSTATLCLGHHAVPNGTIVKTITNDQIEVTNATELVQSSSTGGICDSPHQILDGENCTLIDALLGDPQCDGFQNKKWDLFVERSKAYSNCYPYDVPDHASLRSLVASSGTLEFNNESFDWTGVTQNGTSSACKRRSNKSFFSRLNWLTHLKYKYPALNVTMPNNEKFDKLYIWGVHHPGTDSDQISLYAQASGRITVSTKRSQQTVIPNIGSRPRVRDVSSRISIYWTIVKPGDILLINSTGNLIAPRGYFKIRSGKSSIMRSDAPIGKCNSECITPNGSIPNDKPFQNVNRITYGACPRYVKQNTLKLATGMRNVPEKQTRGIFGAIAGFIENGWEGMVDGWYGFRHQNSEGTGQAADLKSTQAAINQINGKLNKLIGKTNEKFHQIEKEFSEVEGRIQDLEKYVEDTKIDLWSYNAELLVALENQHTIDLTDSEMNKLFERTKKQLRENAEDMGNGCFKIYHKCDNACIGSIRNGTYDHDVYRDEALNNRFQIKGVELKSGYKDWILWISFAISCFLLCVALLGFIMWACQKGNIRCNICI

SEQ ID NO: 536 - protein, 566 aa, synthetic construct; identical to SEQ ID NO: 516
  REGION 1..566: note = hemagglutinin__InfluenzaA__ABC42527

SEQ ID NO: 537 - protein, 566 aa, synthetic construct; identical to SEQ ID NO: 516
  REGION 1..566: note = hemagglutinin__InfluenzaA__ABC42574

SEQ ID NO: 538 - protein, 566 aa, synthetic construct; identical to SEQ ID NO: 516
  REGION 1..566: note = hemagglutinin__InfluenzaA__ABC42585

SEQ ID NO: 539 - protein, 566 aa, synthetic construct; identical to SEQ ID NO: 243
  REGION 1..566: note = hemagglutinin__InfluenzaA__ABC42596

SEQ ID NO: 540 - protein, 566 aa, synthetic construct; identical to SEQ ID NO: 282
  REGION 1..566: note = hemagglutinin__InfluenzaA__ABC42607

SEQ ID NO: 541 - protein, 566 aa, synthetic construct; identical to SEQ ID NO: 282
  REGION 1..566: note = hemagglutinin__InfluenzaA__ABC42618

SEQ ID NO: 542 - protein, 566 aa, synthetic construct
  REGION 1..566: note = hemagglutinin__InfluenzaA__ABC42629
MKTIIALSYILCLVFAQKLPGNDNSTATLCLGHHAVPNGTIVKTITNDQIEVTNATELVQSSSTGGICDSPHQILDGENCTLIDALLGDPQCDGFQNKKWDLFVERSKAYSNCYPYDVPDHASLRSLVASSGTLEFNNESFNWTGVTQNGTSSACKRRSNNSFFSRLNWLTHLKFKYPALNVTMPNNEKFDKLYIWGVHHPGTDNDQISLYAQASGRITVSTKRSQQTVIPNIGSRPRVRDIPSRISIYWTIVKPGDILLINSTGNLIAPRGYFKIRSGKSSIMRSDAPIGKCNSECITPNGSIPNDKPFQNVNRITYGACPRYVKQNTLKLATGMRNVPEKQTRGIFGAIAGFIENGWEGMVDGWYGFRHQNSEGTGQAADLKSTQAAINQINGKLNRLIGKTNEKFHQIEKEFSEVEGRIQDLEKYVEDTKIDLWSYNAELLVALENQHTIDLTDSEMNKLFERTKKQLRENAEDMGNGCFKIYHKCDNACIGSIRNGTYDHDVYRDEALNNRFQIKGVELKSGYKDWILWISFAISCFLLCVALLGFIMWACQKGNIRCNICI

SEQ ID NO: 543 - protein, 566 aa, synthetic construct
  REGION 1..566: note = hemagglutinin__InfluenzaA__ABC42640
MKTIIALSYILCLVFAQKIPGNDNSTATLCLGHHAVPNGTIVKTITNDQIEVTNATELVQSSSTGGICDSPHQILDGENCTLIDALLGDPQCDGFQNKKWDLFVERSKAYSNCYPYDVPDYASLRSLVASSGTLEFNNESFNWTGVTQNGTSSACKRRSNNSFFSRLNWLTHLKFKYPALNVTMPNNEKFDKLYIWGVHHPGTDNDQISLYAQASGRITVSTKRSQQTVIPNIGSRPRVRDIPSRISIYWTIVKPGDILLINSTGNLIAPRGYFKIRSGKSSIMRSDAPIGKCNSECITPNGSIPNDKPFQNVNRITYGACPRYVKQNTLKLATGMRNVPEKQTRGIFGAIAGFIENGWEGMVDGWYGFRHQNSEGIGQAADLKSTQAAINQINGKLNRLIGKTNEKFHQIEKEFSEVEGRIQDLEKYVEDTKIDLWSYNAELLVALENQHTIDLTDSEMNKLFERTKKQLRENAEDMGNGCFKIYHKCDNACIGSIRNGTYDHDVYRDEALNNRFQIKGVELKSGYKDWILWISFAISCFLLCVALLGFIMWACQKGNIRCNICI

SEQ ID NO: 544 - protein, 566 aa, synthetic construct; identical to SEQ ID NO: 243
  REGION 1..566: note = hemagglutinin__InfluenzaA__ABC42651

SEQ ID NO: 545 - protein, 566 aa, synthetic construct
  REGION 1..566: note = hemagglutinin__InfluenzaA__ABC42662
MKTIIALSYILCLVFAQKLPGNDNSTATLCLGHHAVPNGTIVKTITNDQIEVTNATELVQSSSTGGICDSPHQILDGENCTLIDALLGDPQCDGFQNKKWDLFVERSKAYSNCYPYDVPDYASLRSLVASSGTLEFNNESFNWTGVTQNGTSSACKRRSNNSFFSRLNWLTHLKFKYPALNVTMPNNEKFDKLYIWGVHHPGTDNDQISLYAQASGRITVSTKRSQQTVIPNIGSRPRVRDIPSRISIYWTIVKPGDILLINSTGNLIAPRGYFKIRSGKSSIMRSDAPIGKCNSECITPNGSIPNDKPFQNVNRITYGACPRYVKQNTLKLATGMRNVPEKQTRGIFGAIAGFIENGWEGMVDGWYGFRHQNSEGIGQAADLKSTQAAINQINGKLNRLIGKTNEKFHQIEKEFSEVEGRIQDLEKYVEDTKIDLWSYNAEFLVALENQHTIDLTDSEMNKLFERTKKQLRENAEDMGNGCFKIYHKCDNACIGSIRNGTYDHDVYRDEALNNRFQIKGVELKSGYKDWILWISFAISCFLLCVALLGFIMWACQKGNIRCNICI

SEQ ID NO: 546 - protein, 566 aa, synthetic construct
  REGION 1..566: note = hemagglutinin__InfluenzaA__ABC42673
MKTIIALSYILCLIFAQKLPGNDNSTATLCLGHHAVPNGTIVKTITNDQIEVTNATELVQSSSTGGICDSPHQILDGENCTLIDALLGDPQCDGFQNKKWDLFVERSKAYSNCYPYDVPDYASLRSLVASSGTLEFNNESFNWTGVTQNGTSSACKRRSNNSFFSRLNWLTHLKFKYPALNVTMPNNEKFDKLYIWGVHHPGTDNDQISLYAQASGRITVSTKRSQQTVIPNIGSRPRVRDIPSRISIYWTIVKPGDILLINSTGNLIAPRGYFKIRSGKSSIMRSDAPIGKCNSECITPNGSIPNDKPFQNVNRITYGACPRYVKQNTLKLATGMRNVPEKQTRGIFGAIAGFIENGWEGMVDGWYGFRHQNSEGIGQAADLKSTQAAINQINGKLNRLIGKTNEKFHQIEKEFSEVEGRIQDLEKYVEDTKIDLWSYNAELLVALENQHTIDLTDSEMNKLFERTKKQLRENAEDMGNGCFKIYHKCDNACIGSIRNGTYDHDVYRDEALNNRFQIKGVELKSGYKDWILWISFAISCFLLCVALLGFIMWACQKGNIRCNICI

SEQ ID NO: 547 - protein, 566 aa, synthetic construct; identical to SEQ ID NO: 243
  REGION 1..566: note = hemagglutinin__InfluenzaA__ABC42684

SEQ ID NO: 548 - protein, 566 aa, synthetic construct; identical to SEQ ID NO: 243
  REGION 1..566: note = hemagglutinin__InfluenzaA__ABC42695

SEQ ID NO: 549 - protein, 566 aa, synthetic construct
  REGION 1..566: note = hemagglutinin__InfluenzaA__ABC42706
MKTIIALSYILCLVFAQKLPGNDNSTATLCLGHHAVPNGTTVKTITNDQIEVTNATELVQSSSTGGICDSPHQILDGENCTLIDALLGDPQCDGFQNKKWDLFVERSKAYSNCYPYDVPDYASLRSLVASSGTLEFNNESFNWTGVTQNGTSSACKRRSNNSFFSRLNWLTHLKFKYPALNVTMPNNEKFDKLYIWGVHHPGTDNDQISLYAQASGRITVSTKRSQQTVIPNIGSRPRVRDIPSRISIYWTIVKPGDILLINSTGNLIAPRGYFKIRSGKSSIMRSDAPIGKCNSECITPNGSIPNDKPFQNVNRITYGACPRYVKQNTLKLATGMRNVPEKQTRGIFGAIAGFIENGWEGMVDGWYGFRHQNSEGIGQAADLKSTQAAINQINGKLNRLIGKTNEKFHQIEKEFSEVEGRIQDLEKYVEDTKIDLWSYNAELLVALENQHTIDLTDSEMNKLFERTKKQLRENAEDMGNGCFKIYHKCDNACIGSIRNGTYDHDVYRDEALNNRFQIKGVELKSGYKDWILWISFAISCFLLCVVLLGFIMWACQKGNIRCNICI

SEQ ID NO: 550 - protein, 566 aa, synthetic construct; identical to SEQ ID NO: 243
  REGION 1..566: note = hemagglutinin__InfluenzaA__ABC42717

SEQ ID NO: 551 - protein, 566 aa, synthetic construct
  REGION 1..566: note = hemagglutinin__InfluenzaA__ABC42728
MKTIIALSYILCLVFAQKLPGNDNSTATLCLGHHAVPNGTVVKTITNDQIEVTNATELVQSSSTGGICDSPHQILDGENCTLMDALLGDPQCDGFQNKKWDLFVERSRAYSNCYPYDVPDYASLRSLVASSGTLEFNNESFNWTGVTQNGTSSACKRRSNNSFFSRLNWLTHLKFKYPALNVTMPNNEKFDKLYIWGVHHPGTDNDQISLYAQASGRITVSTKRSQQTVIPNIGSRPRVRDIPSRISIYWTIVKPGDILLINSTGNLIAPRGYFKIRSGKSSIMRSDAPIGKCNSECITPNGSIPNDKPFQNVNRITYGACPRYVKQNTLKLATGMRNVPEKQTRGIFGAIAGFIENGWEGMVDGWYGFRHQNSEGTGQAADLKSTQAAINQINGKLNRLIGKTNEKFHQIEKEFSEVEGRIQDLEKYVEDTKIDLWSYNAELLVALENQHTIDLTDSEMNKLFERTKKQLRENAEDMGNGCFKIYHKCDNACIGSIRNGTYDHDVYRDEALNNRFQIKGVELKSGYKDWILWISFAISCFLLCVVLLGFIMWACQKGNIRCNICI

SEQ ID NO: 552 - protein, 566 aa, synthetic construct; identical to SEQ ID NO: 243
  REGION 1..566: note = hemagglutinin__InfluenzaA__ABC42739

SEQ ID NO: 553 - protein, 565 aa, synthetic construct
  REGION 1..565: note = hemagglutinin__InfluenzaA__ABC42750
MKVKLLVLLCTFTATYADTICIGYHANNSTDTVDTVLEKNVTVTHSVNLLEDSHNGKLCLLKGIAPLQLGNCSVAGWILGNPECELLISKESWSYIVEKPNPENGTCYPGHFADYEELREQLSSVSSFERFEIFPKESSWPNHTVTGVSASCSHNGKSSFYKNLLWLTGKNGLYPNLSKSYANNKEKEVLVLWGVHHPPNIGDQKALYHTENAYVSVVSSHYSRKFTPEIAKRPKVRDQEGRINYYWTLLEPGDTIIFEANGNLIAPRYAFALSRGFGSGIINSNAPMDECDAKCQTPQGAINSSLPFQNVHPVTIGECPKYVRSAKLRMVTGLRNIPSIQSRGLFGAIAGFIEGGWTGMVDGWYGYHHQNEQGSGYAADQKSTQNAINGITNKVNSVIEKMNTQFTAVGKEFNKLERRMENLNKKVDDGFIDIWTYNAELLVLLENERTLDFHDSNVKNLYEKVKSQLKNNAKEIGNGCFEFYHKCNDECMESVKNGTYDYPKYSEESKLNREKIDGVKLESMGVYQILAIYSTVASSLVLLVSLGAISFWMCSNGSLQCRICI

SEQ ID NO: 554 - protein, 566 aa, synthetic construct; identical to SEQ ID NO: 243
  REGION 1..566: note = hemagglutinin__InfluenzaA__ABC42761

SEQ ID NO: 555 - protein, 566 aa, synthetic construct
  REGION 1..566: note = hemagglutinin__InfluenzaA__ABC42772
MKTIIALSYILCLVFAQKLPGNDNSTATLCLGHHAVPNGTIVKTITNDQIEVTNATELVQSSSTGGICDSPHQILDGENCTLIDALLGDPQCDGFQNKKWDLFVERSKAYSNCYPYDVPDYASLRSLVASSGTLEFNNESFNWTGVTQNGTSSACKRRSNNSFFSRLNWLTHLKFKYPALNVTMPNNEKFDKLYIWGVHHPGTDNDQISLYAQASGRITVSTKRSQQTVIPNIGSRPRVRDIPSRISIYWTIVKPGDILLINSTGNLIAPRGYFKIRSGKSSIMRSDAPIGKCNSECITPNGSIPNDKPFQNVNRITYGACPRYVKQNTLKLATGMRNVPEKQTRGIFGAIAGFIENGWEGMVDGWYGFRHQNSEGIGQAADLKSTQAAINQINGKLNRLIGKTNEKFHQIEKEFSEVEGRIQDLEKYVEDTKIDLWSYNAELLVALENQHTIDLTDSEMNKLFERTKKQLRENAEDMGNGCFKIYHKCDNACIGSIRNGTYDHDVYRDEALNNRFQIKSVELKSGYKDWILWISFAISCFLLCVALLGFIMWACQKGNIRCNICI

SEQ ID NO: 556 - protein, 566 aa, synthetic construct; identical to SEQ ID NO: 243
  REGION 1..566: note = hemagglutinin__InfluenzaA__ABC42783

SEQ ID NO: 557 - protein, 566 aa, synthetic construct; identical to SEQ ID NO: 243
  REGION 1..566: note = hemagglutinin__InfluenzaA__ABC42794

SEQ ID NO: 558 - protein, 566 aa, synthetic construct; identical to SEQ ID NO: 243
  REGION 1..566: note = hemagglutinin__InfluenzaA__ABC42805

SEQ ID NO: 559 - protein, 566 aa, synthetic construct; identical to SEQ ID NO: 282
  REGION 1..566: note = hemagglutinin__InfluenzaA__ABC42816

SEQ ID NO: 560 - protein, 566 aa, synthetic construct
  REGION 1..566: note = hemagglutinin__InfluenzaA__ABC42827
MKTIIALSYILCLVFAQKLPGNDNSTATLCLGHHAVPNGTIVKTITNDQIEVTNATELVQSSSTGGICDSPHQILDGENCTLIDALLGDPQCDGFQNKKWDLFVERSKAYSNCYPYDVPDYASLRSLVASSGTLEFNNESFNWTGVTQNGTSSACKRRSNNSFFSRLNWLTHLKFKYPALNVTMPNNEKFDKLYIWGVHHPGTDNDQISLYAQASGRITVSTKRSQQTVIPNIGSRPRVRDIPSRMSIYWTIVKPGDILLINSTGNLIAPRGYFKIRSGKSSIMRSDAPIGKCNSECITPNGSIPNDKPFQNVNRITYGACPRYVKQNTLKLATGMRNVPEKQTRGIFGAIAGFIENGWEGMVDGWYGFRHQNSEGIGQAADLKSTQAAINQINGKLNRLIGKTNEKFHQIEKEFSEVEGRIQDLEKYVEDTKIDLWSYNAELLVALENQHTIDLTDSEMNKLFERTKKQLRENAEDMGNGCFKIYHKCDNACIGSIRNGTYDHDVYRDEALNNRFQIKGVELKSGYKDWILWISFAISCFLLCVALLGFIMWACQKGNIRCNICI

SEQ ID NO: 561 - protein, 566 aa, synthetic construct; identical to SEQ ID NO: 243
  REGION 1..566: note = hemagglutinin__InfluenzaA__ABC42849

SEQ ID NO: 562 - protein, 566 aa, synthetic construct
  REGION 1..566: note = hemagglutinin__InfluenzaA__ABC42882
MKTIIALSYILCLVFAQKLPGNDNSTATLCLGHHAVPNGTLVKTITNDQIEVTNATELVQSSSTGRICDSPHQILDGENCTLIDALLGDPHCDGFQNKEWDLFVERSKAYSNCYPYDVPDYVSLRSLVASSGTLEFNNESFNWTGVAQNGTSSACKRRSDKSFFSRLNWLHQLKYKYPALNVTMPNNEKFDKLYIWGVHHPGTDSDQISLYAQASGRVTVSTKRSQQTVIPNIGSRPWVRGVSSRISIYWTIVKPGDILLINSTGNLIAPRGYFKIRSGKSSIMRSDAPIGKCNSECITPNGSIPNDKPFQNVNRITYGACPRYVKQNTLKLATGMRNVPEKQTRGIFGAIAGFIENGWEGMMDGWYGFRHQNSEGTGQAADLKSTQAAINQINGKLNRLIEKTNEKFHQIEKEFSEVEGRIQDLEKYVEDTKIDLWSYNAELLVALENQHTIDLTDSEMNKLFERTKKQLRENAEDMGNGCFKIYHKCDNACIGSIRNGTYDHDVYRDEALNNRFQIKGVELKSGYKDWVLWISFAISCFLLCIVLLGFIMWACQKGNIRCNICI

SEQ ID NO: 563 - protein, 566 aa, synthetic construct; identical to SEQ ID NO: 562
  REGION 1..566: note = hemagglutinin__InfluenzaA__ABC42893

SEQ ID NO: 564 - protein, 566 aa, synthetic construct; identical to SEQ ID NO: 516
  REGION 1..566: note = hemagglutinin__InfluenzaA__ABC42929

SEQ ID NO: 565 - protein, 566 aa, synthetic construct; identical to SEQ ID NO: 516
  REGION 1..566: note = hemagglutinin__InfluenzaA__ABC42940

SEQ ID NO: 566 - protein, 566 aa, synthetic construct; identical to SEQ ID NO: 516
  REGION 1..566: note = hemagglutinin__InfluenzaA__ABC42951

SEQ ID NO: 567 - protein, 566 aa, synthetic construct; identical to SEQ ID NO: 516
  REGION 1..566: note = hemagglutinin__InfluenzaA__ABC42962

SEQ ID NO: 568 - protein, 566 aa, synthetic construct; identical to SEQ ID NO: 516
  REGION 1..566: note = hemagglutinin__InfluenzaA__ABC42973

SEQ ID NO: 569 - protein, 566 aa, synthetic construct; identical to SEQ ID NO: 516
  REGION 1..566: note = hemagglutinin__InfluenzaA__ABC42995

SEQ ID NO: 570 - protein, 566 aa, synthetic construct; identical to SEQ ID NO: 516
  REGION 1..566: note = hemagglutinin__InfluenzaA__ABC43006

SEQ ID NO: 571 - protein, 566 aa, synthetic construct; identical to SEQ ID NO: 516
  REGION 1..566: note = hemagglutinin__InfluenzaA__ABC43028

SEQ ID NO: 572 - protein, 566 aa, synthetic construct; identical to SEQ ID NO: 516
  REGION 1..566: note = hemagglutinin__InfluenzaA__ABC43039

SEQ ID NO: 573 - protein, 566 aa, synthetic construct; identical to SEQ ID NO: 516
  REGION 1..566: note = hemagglutinin__InfluenzaA__ABC43050

SEQ ID NO: 574 - protein, 566 aa, synthetic construct; identical to SEQ ID NO: 516
  REGION 1..566: note = hemagglutinin__InfluenzaA__ABC43061

SEQ ID NO: 575 - protein, 566 aa, synthetic construct
  REGION 1..566: note = hemagglutinin__InfluenzaA__ABC43072
MKTIIALSYILCLVFAQKLPGNDNSTATLCLGHHAVPNGTIVKTITNDQIEVTNATELVQSSSTGGICDSPHQILDGENCTLIDALLGDPQCDGFQNKKWDLFVERSKAYSNCYPYDVPDHASLRSLVASSGTLEFNNESFDWTGVTQNGTSSACKRRSNKSFFSRLNWLTHLKYKYPALNVTMPNNEKFDKLYIWGVHHPGTDSDQISLYAQASGRITVSTKRSQQTVIPNIGSRPRVRDVSSRISIYWTIVKPGDILLINSTGNLIAPRGYFKIRSGKSSIMRSDAPIGKCNSECITPNGSIPNDKPFQNVNRITYGACPRYVKQNTLKLATGMRNVPEKQTRGIFGAIAGFIENGWEGMVDGWYGFRHQNSEGTGQAADLKSTQAAINQINGKLNRLIGKTNEKFHQIEKEFSEVEGRIQDLEKYVEDTKIDLWSYNAELLVALENQHTIDLTDSEMNKLFEKTKKQLRENAEDMGNGCFKIYHKCDNACIGSIRNGTYDHDVYRDEALNNRFQIKGVELKSGYKDWILWISFTISCFLLCVALLGFIMWACQKGNIRCNICI

SEQ ID NO: 576 - protein, 566 aa, synthetic construct; identical to SEQ ID NO: 516
  REGION 1..566: note = hemagglutinin__InfluenzaA__ABC43083

SEQ ID NO: 577 - protein, 566 aa, synthetic construct; identical to SEQ ID NO: 516
  REGION 1..566: note = hemagglutinin__InfluenzaA__ABC43094

SEQ ID NO: 578 - protein, 566 aa, synthetic construct; identical to SEQ ID NO: 516
  REGION 1..566: note = hemagglutinin__InfluenzaA__ABC43116

SEQ ID NO: 579 - protein, 566 aa, synthetic construct; identical to SEQ ID NO: 243
  REGION 1..566: note = hemagglutinin__InfluenzaA__ABC43127

SEQ ID NO: 580 - protein, 566 aa, synthetic construct; identical to SEQ ID NO: 282
  REGION 1..566: note = hemagglutinin__InfluenzaA__ABC43138

SEQ ID NO: 581 - protein, 566 aa, synthetic construct; identical to SEQ ID NO: 243
  REGION 1..566: note = hemagglutinin__InfluenzaA__ABC43149

SEQ ID NO: 582 - protein, 566 aa, synthetic construct; identical to SEQ ID NO: 243
  REGION 1..566: note = hemagglutinin__InfluenzaA__ABC43160

SEQ ID NO: 583 - protein, 566 aa, synthetic construct; identical to SEQ ID NO: 243
  REGION 1..566: note = hemagglutinin__InfluenzaA__ABC43171

SEQ ID NO: 584 - protein, 566 aa, synthetic construct; identical to SEQ ID NO: 243
  REGION 1..566: note = hemagglutinin__InfluenzaA__ABC43182

SEQ ID NO: 585 - protein, 566 aa, synthetic construct
  REGION 1..566: note = hemagglutinin__InfluenzaA__ABC43475
MKTIIALSYILCLVFAQKLPGNDNSTATLCLGHHAVPNGTTVKTITNDQIEVTNATELVQSSSTGGICDSPHQILDGENCTLIDALLGDPQCDGFQNKKWDLFVERSKAYSNCYPYDVPDYASLRSLVASSGTLEFNNESFNWTGVTQNGTSSACKRRSNNSFFSRLNWLTHLKFKYPALNVTMPNNEKFDKLYIWGVHHPGTDNDQISLYAQASGRITVSTKRSQQTVIPNIGSRPRVRDIPSRISIYWTIVKPGDILLINSTGNLIAPRGYFKIRSGKSSIMRSDAPIGKCNSECITPNGSIPNDKPFQNVNRITYGACPRYVKQNTLKLATGMRNVPEKQTRGIFGAIAGFIENGWEGMVDGWYGFRHQNSEGIGQAADLKSTQAAINQINGKLNRLIGKTNEKFHQIEKEFSEVEGRIQDLEKYVEDTKIDLWSYNAELLVALENQHTIDLTDSEMNKLFERTKKQLRENAEDMGNGCFKIYHKCDNACIGSIRNGTYDHDVYRDEALNNRFQIKGVELKSGYKDWILWISFAISCFLLCVALLGFIMWACQKGNIRCNICI

SEQ ID NO: 586 - protein, 566 aa, synthetic construct; identical to SEQ ID NO: 243
  REGION 1..566: note = hemagglutinin__InfluenzaA__ABC43486

SEQ ID NO: 587 - protein, 566 aa, synthetic construct; identical to SEQ ID NO: 243
  REGION 1..566: note = hemagglutinin__InfluenzaA__ABC43497

SEQ ID NO: 588 - protein, 566 aa, synthetic construct; identical to SEQ ID NO: 282
  REGION 1..566: note = hemagglutinin__InfluenzaA__ABC43508

SEQ ID NO: 589 - protein, 566 aa, synthetic construct; identical to SEQ ID NO: 282
  REGION 1..566: note = hemagglutinin__InfluenzaA__ABC43519

SEQ ID NO: 590 - protein, 566 aa, synthetic construct; identical to SEQ ID NO: 282
  REGION 1..566: note = hemagglutinin__InfluenzaA__ABC43530

SEQ ID NO: 591 - protein, 566 aa, synthetic construct
  REGION 1..566: note = hemagglutinin__InfluenzaA__ABC43552
MKTIIALSYILCLVFAQKLPGNDNSTATLCLGHHAVPNGTIVKTITNDQIEVTNATELVQSSSTGGICDSPHQILDGENCTLIDALLGDPQCDGFQNKKWDLFVERSKAYSNCYPYDVPDYASLRSLVASSGTLEFNNESFNWTGVTQNGTSSACKRRSNNSFFSRLNWLTHLKFKYPALNVTMPNNEKFDKLYIWGVHHPGTDNDQISLYAQAPGRITVSTKRSQQTVIPNIGSRPRVRDIPSRISIYWTIVKPGDILLINSTGNLIAPRGYFKIRSGKSSIMRSDAPIGKCNSECITPNGSIPNDKPFQNVNRITYGACPRYVKQNTLKLATGMRNVPEKQTRGIFGAIAGFIENGWEGMVDGWYGFRHQNSEGIGQAADLKSTQAAINQINGKLNRLIGKTNEKFHQIEKEFSEVEGRIQDLEKYVEDTKIDLWSYNAELLVALENQHTIDLTDSEMNKLFERTKKQLRENAEDMGNGCFKIYHKCDNACIGSIRNGTYDHDVYRDEALNNRFQIKGVELKSGYKDWILWISFAISCFLLCVALLGFIMWACQKGNIRCNICI

SEQ ID NO: 592 - protein, 566 aa, synthetic construct
  REGION 1..566: note = hemagglutinin__InfluenzaA__ABC46554
MKTIIALSYIFCQVFAQNLPGNDNSTATLCLGHHAVPNGTLVKTITNDQIEVTNATELVQSSSTGRICDSPHRILDGKNCTLIDALLGDPHCDGFQNEKWDLFVERSKAFSNCYPYDVPDYASLRSLVASSGTLEFINEGFNWTGVTQDGGSYACKRGPDNSFFSRLNWLYKSESTYPVLNVTMPNNDNFDKLYIWGVHHPSTDKEQTNLYVQASGRVTVSTKRSQQTIIPNVGSRPWVRGLSSRISIYWTIVKPGDILLINSNGNLIAPRGYFKIRTGKSSIMRSDAPIGTCSSECITPNGSIPNDKPFQNVNKITYGACPKYVKQNTLKLATGMRNVPEKQTRGIFGAIAGFIENGWEGMIDGWYGFRHQNSEGTGQAADLKSTQAAIDQINGKLNRVIEKTNEKFHQIEKEFSEVEGRIQDLEKYVEDTKIDLWSYNAELLVALENQHTIDLTDSEMNKLFEKTRRQLRENAEDMGNGCFKIYHKCDNACIGSIRNGTYDHDVYRDEALNNRFQIKGVELKSGYKDWILWISFAISCFLLCVVLLGFIMWACQKGNIRCNICI

SEQ ID NO: 593 - protein, 566 aa, synthetic construct
  REGION 1..566: note = hemagglutinin__InfluenzaA__ABC46576
MKTIIALSYIFCLVFAQNLPGNDKSTATLCLGHHAVPNGTLVKTITNDQIEVTNATELVQSSSTGRICDSPHRILDGKNCTLVDALLGDPHCDGFQNEKWDLFVERSKAFSNCYPYDVPDYASLRSLVASSGTLEFINESFNWTGVTQSGGSYACKRGSDNSFFSRLNWLYESESKYPVLNVTMPNNGNFDKLYIWGVHHPSTDKEQTNLYVRASGRVTVSTKRSQQTIIPNIGSRPWVRGLSSRISIYWTIVKPGDILLINSNGNLIAPRGYFKIRTGKSSIMRSDAPIGTCSSECITPNGSIPNDKPFQNVNKITYGACPKYVKQNTLKLATGMRNVPEKQTRGIFGAIAGFIENGWEGMVDGWYGFRHQNSEGTGQAADLKSTQAAIDQINGKLNRVIEKTNEKFHQIEKEFSEVEGRIQDLEKYVEDTKIDLWSYNAELLVALENQHTIDLTDSEMNKLFEKTRRQLRENAEDMGNGCFKIYHKCDNACIGSIRNGTYDHDVYRDEALNNRFQIKGVELKSGYKDWILWISFAISCFLLCVVLLGFIMWACQKGNIRCNICI

SEQ ID NO: 594 - protein, 566 aa, synthetic construct; identical to SEQ ID NO: 452
  REGION 1..566: note = hemagglutinin__InfluenzaA__ABC50167

SEQ ID NO: 595 - protein, 566 aa, synthetic construct; identical to SEQ ID NO: 452
  REGION 1..566: note = hemagglutinin__InfluenzaA__ABC50178

SEQ ID NO: 596 - protein, 566 aa, synthetic construct; identical to SEQ ID NO: 452
  REGION 1..566: note = hemagglutinin__InfluenzaA__ABC50189

SEQ ID NO: 597 - protein, 566 aa, synthetic construct; identical to SEQ ID NO: 562
  REGION 1..566: note = hemagglutinin__InfluenzaA__ABC50200

SEQ ID NO: 598 - protein, 566 aa, synthetic construct; identical to SEQ ID NO: 562
  REGION 1..566: note = hemagglutinin__InfluenzaA__ABC50211

SEQ ID NO: 599 - protein, 566 aa, synthetic construct; identical to SEQ ID NO: 562
  REGION 1..566: note = hemagglutinin__InfluenzaA__ABC50222

SEQ ID NO: 600 - protein, 566 aa, synthetic construct; identical to SEQ ID NO: 562
  REGION 1..566: note = hemagglutinin__InfluenzaA__ABC50233

SEQ ID NO: 601 - protein, 566 aa, synthetic construct; identical to SEQ ID NO: 562
  REGION 1..566: note = hemagglutinin__InfluenzaA__ABC50244

SEQ ID NO: 602 - protein, 566 aa, synthetic construct; identical to SEQ ID NO: 562
  REGION 1..566: note = hemagglutinin__InfluenzaA__ABC50266

SEQ ID NO: 603 - protein, 566 aa, synthetic construct; identical to SEQ ID NO: 562
  REGION 1..566: note = hemagglutinin__InfluenzaA__ABC50277

SEQ ID NO: 604 - protein, 566 aa, synthetic construct
  REGION 1..566: note = hemagglutinin__InfluenzaA__ABC50299
MKTIIALSYILCLVFAQKLPGNDNSTATLCLGHHAVPNGTLVKTITNDQIEVTNATELVQSSSTGRICDSPHQILDGENCTLIDALLGDPHCDGFQNKEWDLFVERSKAYSNCYPYDVPDYVSLRSLVASSGTLEFNNESFNWTGVAQNGTSSACKRRSDKSFFSRLNWLHQLKYKYPALNVTMPNNEKFDKLYIWGVHHPGTDSDQISLYAQASGRVTVSTKRSQQTVIPNIGSRPWVRGVSSRISIYWTIVKPGDILLINSTGNLIAPRGYFKIRSGKSSIMRSDAPIGKCNSECITPNGSIPNDKPFQNVNRITYGACPRYVKQNTLKLATGMRNVPEKQTRGIFGAIAGFIENGWEGMMDGWYGFRHQNSEGTGQAADLKSTQAAINQINGKLNRLIEKTNEKFHQIEKEFSEVEGRIQDLEKYVEDTKIDLWSYNAELLVALENQHTIDLTDSEMNKLFERTKKQLRENAEDMGNGCFKIYHKCDNACIGSIRNGTYDHDVYRDEALNNRFQIKGVELKSGYKDWVLWISFATSCFLLCIVLLGFIMWACQKGNIRCNICI

SEQ ID NO: 605 - protein, 566 aa, synthetic construct; identical to SEQ ID NO: 562
  REGION 1..566: note = hemagglutinin__InfluenzaA__ABC50310

SEQ ID NO: 606 - protein, 566 aa, synthetic construct
  REGION 1..566: note = hemagglutinin__InfluenzaA__ABC50321
MKTIIALSYILCLVFAQKLPGNDNSTATLCLGHHAVPNGTLVKTITNDQIEVTNATELVQSSSTGRICDSPHQILDGENCTLIDALLGDPHCDGFQNKEWDLFVERSKAYSNCYPYDVPDYVSLRSLVASSGTLEFNNESFNWTGVAQNGTSSACKRRSDKSFFSRLNWLHQLKYKYPALNVTMPNNEKFDKLYIWGVHHPGTDSDQISLYAQASGRVTVSTKRSQQTVIPNIGSRPWVRGVSSRISIYWTIVKPGDILLINSTGNLIAPRGYFKIRSGKSSIMRSDAPIGKCNSECITPNGSIPNDKPFQNVNRITYGACPRYVKQNTLKLATGMRNVPGKQTRGIFGAIAGFIENGWEGMMDGWYGFRHQNSEGTGQAADLKSTQAAINQINGKLNRLIEKTNEKFHQIEKEFSEVEGRIQDLEKYVEDTKIDLWSYNAELLVALENQHTIDLTDSEMNKLFERTKKQLRENAEDMGNGCFKIYHKCDNACIGSIRNGTYDHDVYRDEALNNRFQIKGVELKSGYKDWVLWISFAISCFLLCIVLLGFIMWACQKGNIRCNICI

SEQ ID NO: 607 - protein, 566 aa, synthetic construct
  REGION 1..566: note = hemagglutinin__InfluenzaA__ABC50332
MKTIIALSYILCLVFAQKLPGNDNSTATLCLGHHAVPNGTLVKTITNDQIEVTNATELVQSSSTGRICDSPHQILDGENCTLIDALLGDPHCDGFQNKEWDLFVERSKAYSNCYPYDVPDYVSLRSLVASSGTLEFNNESFNWTGVAQNGTSSACKRRSDKSFFSRLNWLHQLKYKYPALNVTMPNNEKFDKLYIWGVHHPGTDSDQISLYAQASGRVTVSTKRSQQTVIPNIGSRPWVRGVSSRISIYWTIVKPGDILLINSTGNLIAPRGYFKIRSGKSSIMRSDAPIGKCNSECITPNGSIPNGKPFQNVNRITYGACPRYVKQNTLKLATGMRNVPEKQTRGIFGAIAGFIENGWEGMMDGWYGFRHQNSEGTGQAADLKSTQAAINQINGKLNRLIEKTNEKFHQIEKEFSEVEGRIQDLEKYVEDTKIDLWSYNAELLVALENQHTIDLTDSEMNKLFERTKKQLRENAEDMGNGCFKIYHKCDNACIGSIRNGTYDHDVYRDEALNNRFQIKGVELKSGYKDWILWISFAISCFLLCIVLLGFIMWACQKGNIRCNICI

SEQ ID NO: 608 - protein, 566 aa, synthetic construct; identical to SEQ ID NO: 562
  REGION 1..566: note = hemagglutinin__InfluenzaA__ABC50343

SEQ ID NO: 609 - protein, 566 aa, synthetic construct
  REGION 1..566: note = hemagglutinin__InfluenzaA__ABC50354
MKTIIALSYILCLVFAQKLPGNDNSTATLCLGHHAVPNGTLVKTITNDQIEVTNATELVQSSSTGRICDSPHQILDGENCTLIDALLGDPHCDGFQNKEWDLFVERSKAYSNCYPYDVPDYVSLRSLVASSGTLEFNNESFNWTGVAQNGTSSSCKRRSDKSFFSRLNWLHQLKYKYPALNVTMPNNEKFDKLYIWGVHHPGTDSDQISLYAQASGRVTVSTKRSQQTVIPNIGSRPWVRGVSSRISIYWTIVKPGDILLINSTGNLIAPRGYFKIRSGKSSIMRSDAPIGKCNSECITPNGSIPNDKPFQNVNRITYGACPRYVKQNTLKLATGMRNVPEKQTRGIFGAIAGFIENGWEGMMDGWYGFRHQNSEGTGQAADLKSTQAAINQINGKLNRLIEKTNEKFHQIEKEFSEVEGRIQDLEKYVEDTKIDLWSYNAELLVALENQHTIDLTDSEMNKLFERTKKQLRENAEDMGNGCFKIYHKCDNACIGSIRNGTYDHDVYRDEALNNRFQIKGVELKSGYKDWVLWISFAISCFLLCIVLLGFIMWACQKGNIRCNICI

SEQ ID NO: 610 - protein, 566 aa, synthetic construct
  REGION 1..566: note = hemagglutinin__InfluenzaA__ABC50376
MKTIIALSYILCLVFAQKLPGNDNSTATLCLGHHAVPNGTLVKTITNDQIEVTNATELVQSSSTGRICDSPHQILDGENCTLIDALLGDPHCDGFQNKEWDLFVERSKAYSNCYPYDVPDYVSLRSLVASSGTLEFNNESFNWTGVAQNGTSSACKRRSDKSFFSRLNWLHQLKYKYPALNVTMPNNEKFDKLYIWGVHHPGTDSDQISLYAQASGRVTVSTKRSQQTVIPNTGSRPWVRGVSSRISIYWTIVKPGDILLINSTGNLIAPRGYFKIRSGKSSIMRSDAPIGKCNSECITPNGSIPNDKPFQNVNRITYGACPRYVKQNTLKLATGMRNVPEKQTRGIFGAIAGFIENGWEGMMDGWYGFRHQNSEGTGQAADLKSTQAAINQINGKLNRLIEKTNEKFHQIEKEFSEVEGRIQDLEKYVEDTKIDLWSYNAELLVALENQHTIDLTDSEMNKLFERTKKQLRENAEDMGNGCFKIYHKCDNACIGSIRNGTYDHDVYRDEALNNRFQIKGVELKSGYKDWVLWISFAISCFLLCIVLLGFIMWACQKGNIRCNICI

SEQ ID NO: 611 - protein, 566 aa, synthetic construct
  REGION 1..566: note = hemagglutinin__InfluenzaA__ABC50387
MKTIIALSYILCLVFAQKLPGNDNSTATLCLGHHAVPNGTLVKTITNDQIEVTNATELVQSSSTGRICDSPHQILDGENCTLIDALLGDPHCDGFQNKEWDLFVERSKAYSNCYPYDVPDYVSLRSLVASSGTLEFNNESFNWTGVAQNGTSSACKRRSDKSFFSRLNWLHQLKYKYPALNVTMPNNEKFDKLYVWGVHHPGTDSDQISLYAQASGRVTVSTKRSQQTVIPNIGSRPWVRGVSSRISIYWTIVKPGDILLINSTGNLIAPRGYFKIRSGKSSIMRSDAPIGKCNSECITPNGSIPNDKPFQNVNRITYGACPRYVKQNTLKLATGMRNVPEKQTRGIFGAIAGFIENGWEGMMDGWYGFRHQNSEGTGQAADLKSTQAAINQINGKLNRLIEKTNEKFHQIEKEFSEVEGRIQDLEKYVEDTKIDLWSYNAELLVALENQHTIDLTDSEMNKLFERTKKQLRENAEDMGNGCFKIYHKCDNACIGSIRNGTYDHDVYRDEALNNRFQIKGVELKSGYKDWVLWISFAISCFLLCIVLLGFIMWACQKGNIRCNICI

SEQ ID NO: 612 - protein, 566 aa, synthetic construct
  REGION 1..566: note = hemagglutinin__InfluenzaA__ABC50409
MKTIIALSYILCLVFAQKLPGNDNSTATLCLGHHAVPNGTIVKTITNDQIEVTNATELVQSSSTGGICDSPHQILDGENCTLIDALLGDPQCDGFQNKKWDLFVERSKAYSNCYPYDVPDYVSLRSLVASSGTLEFNNESFNWTGVTQNGTSSACKRRSNNSFFSRLNWLTHLKFKYPALNVTMPNNEKFDKLYIWGVHHPGTDNDQISLYAQASGRITVSTKRSQQTVIPNIGSRPRVRDIPSRISIYWTIVKPGDILLINSTGNLIAPRGYFKIRSGKSSIMRSDAPIGKCNSECITPNGSIPNDKPFQNVNRITYGACPRYVKQNTLKLATGMRNVPEKQTRGIFGAIAGFIENGWEGMVDGWYGFRHQNSEGIGQAADLKSTQAAINQINGKLNRLIGKTNEKFHQIEKEFSEVEGRIQDLEKYVEDTKIDLWSYNAELLVALENQHTIDLTDSEMNKLFERTKKQLRENAEDMGNGCFKIYHKCDNACIGSIRNGTYDHDVYRDEALNNRFQIKGVELKSGYKDWILWISFAISCFLLCVALLGFIMWACQKGNIRCNICI

SEQ ID NO: 613 - protein, 566 aa, synthetic construct; identical to SEQ ID NO: 612
  REGION 1..566: note = hemagglutinin__InfluenzaA__ABC50420

SEQ ID NO: 614 - protein, 566 aa, synthetic construct
  REGION 1..566: note = hemagglutinin__InfluenzaA__ABC54668
MKTIIALSYILCLVFAQKLPGNDNSTATLCLGHHAVPNGTLVKTITNDQIEVTNATELVQSSSTGRICDSPHQILDGENCTLIDALLGDPHCDGFQNKEWDLFVERSKAYSNCYPYDVPDYASLRSLVASSGTLEFNNESFNWTGVAQNGTSSACKRRSNKSFFSRLNWLHQLKYKYPALNVTMPNNEKFDKLYIWGVHHPSTDSDQISLYAQASGRVTVSTKRSQQTVIPNIGSGPWVRGVSSRISIYWTIVKPGDILLINSTGNLIAPRGYFKIRSGKSSIMRSDAPIGKCNSECITPNGSLPNDKPFQNVNRITYGACPRYVKQNTLKLATGMRNVPEKQTRGIFGAIAGFIENGWEGMVDGWYGFRHQNSEGTGQAADLKSTQAAINQINGKLNRLIEKTNEKFHQIEKEFSEVEGRIQDLEKYVEDTKIDLWSYNAELLVALENQHTIDLTDSEMNKLFERTKKQLRENAEDMGNGCFKIYHKCDNACIGSIRNGTYDHDVYRDEALNNRFQIKGVELKSGYKDWILWISFAISCFLLCVVLLGFIMWACQKGNIRCNICI

SEQ ID NO: 615 - protein, 566 aa, synthetic construct
  REGION 1..566: note = hemagglutinin__InfluenzaA__ABC54679
MKTIIALSYILCLVFAQKLPGNDNSTATLCLGHHAVPNGTIVKTITNDQIEVTNATELVQSSPTGGICDSPHQILDGENCTLIDALLGDPQCDGFQNKKWDLFIERSKAYSNCYPYDVPDYASLRSLVASSGTLEFNNESFNWTGVTQNGTSSACKRRSNNSFFSRLNWLTHLKFKYPALNVTMPNNEKFDKLYIWGVHHPGTDNDQISLYAQASGRITVSTKRSQQTVIPNVGSRPRVRDIPSRISIYWTIVKPGDILLINSTGNLIAPRGYFKIRSGKSSIMRSDAPIGKCNSECITPNGSIPNDKPFQNVNRITYGACPRYVKQNTLKLATGMRNVPEKQTRGIFGAIAGFIENGWEGMVDGWYGFRHQNSEGIGQAADLKSTQAAINQINGKLNRLIGKTNEKFHQIEKEFSEVEGRIQDLEKYVEDTKIDLWSYNAELLVALENQHTIDLTDSEMNKLFERTKKQLRENAEDMGNGCFKIYHKCDNACIGSIRNGTYDHDVYRDEALNNRFQIKGVELKSGYKDWILWISFAISCFLLCVALLGFIMWACQKGNIRCNICI

SEQ ID NO: 616 - protein, 566 aa, synthetic construct; identical to SEQ ID NO: 516
  REGION 1..566: note = hemagglutinin__InfluenzaA__ABC67319

SEQ ID NO: 617 - protein, 566 aa, synthetic construct
  REGION 1..566: note = hemagglutinin__InfluenzaA__ABC67454
MKTIIALSYILCLVFAQELPGNDNSTATLCLGHHAVPNGTLVKTITNDQIEVTNATELVQSSSTGRICDSPHQILDGENCTLIDALLGDPHCDGFQNKEWDLFVERSKAYSNCYPYDVPDYVSLRSLVASSGTLEFNNESFNWTGVAQNGTSSACKRRSDKSFFSRLNWLHQLKYKYPALNVTMPNNEKFDKLYIWGVHHPGTDSDQISLYAQASGRVTVSTKRSQQTVIPNIGSRPWVRGVSSRISIYWTIVKPGDILLINSTGNLIAPRGYFKIRSGKSSIMRSDAPIGKCNSECITPNGSIPNDKPFQNVNRITYGACPRYVKQNTLKLATGMRNVPEKQTRGIFGAIAGFIENGWEGMMDGWYGFRHQNSEGTGQAADLKSTQAAINQINGKLNRLIEKTNEKFHQIEKEFSEVEGRIQDLEKYVEDTKIDLWSYNAELLVALENQHTIDLTDSEMNKLFERTKKQLRENAEDMGNGCFKIYHKCDNACIGSIRNGTYDHDVYRDEALNNRFQIKGVELKSGYKDWVLWISFAISCFLLCIVLLGFIMWACQKGNIRCNICI

SEQ ID NO: 618 - protein, 566 aa, synthetic construct; identical to SEQ ID NO: 562
  REGION 1..566: note = hemagglutinin__InfluenzaA__ABC67471

SEQ ID NO: 619 - protein, 566 aa, synthetic construct
  REGION 1..566: note = hemagglutinin__InfluenzaA__ABC67554
MKTIIALSYILCLVFAQKLPGNDNSTATLCLGHHAVPNGTIVKTITNDQIEVTNATELVQSSSTGGICDSPHQILDGENCTLIDALLGDPQCDGFQNKKWDLFVERSKAYSNCYPYDVPDYASLRSLIASSGTLEFNNESFNWTGVTQNGTSSACKRRSNSSFFSRLNWLTHLKFKYPALNVTMPNNEEFDKLYIWGVHHPGTDNDQISLYAQASGRITVSTKRSQQTVIPNIGSRPRVRDIPSRISIYWTIVKPGDILLINSTGNLIAPRGYFKIRSGKSSIMRSDAPIVKCNSECITPNGSIPNDKPFQNVNRITYGACPRYVKQNTLKLATGMRNVPEKQTRGIFGAIAGFIENGWEGMVDGWYGFRHQNSEGIGQAADLKSTQAAIDQINGKLNRLIGKTNEKFHQIEKEFSEVEGRIQDLEKYVEDTKIDLWSYNAELLVALENQHTIDLTDSEMNKLFERTKKQLRENAEDMGNGCFKIYHKCDNACIGSIRNGTYDHDVYRDEALNNRFQIKGVELKSGYKDWILWISFAISCFLLCVALLGFIMWACQKGNIRCNICI

SEQ ID NO: 620 - protein, 566 aa, synthetic construct
  REGION 1..566: note = hemagglutinin__InfluenzaA__ABC67565
MKTIIALSYIFCLVLGQDFPGNDNSTATLCLGHHAVPNGTLVKTITNDQIEVTNATELVQSSSTGKICNNPHRILDGIDCTLIDALLGDPHCDGFQNETWDLFVERSKAFSNCYPYDVPDYASLRSLVASSGTLEFINEGFTWTGVTQNGGSNACKRGPDIGFFSRLNWLYKSGSTYPVLNVTMPNNDNFDKLYIWGVHHPSTDQEQTSLYVQASGRVTVSTKRSQQTIIPNIGSRPWVRGLSSRISIYWTIVKPGDILVINSNGNLIAPRGYFKMRTGKSSIMRSDAPIGTCISECITPNGSIPNDKPFQNVNKITYGACPKYVKQNTLKLATGMRNVPEKQTRGLFGAIAGFIENGWEGMIDGWYGFRHQNSEGTGQAADLKSTQAAIDQINGKLNRVIEKTNEKFHQIEKEFSEVEGRIQDLEKYVEDTKIDLWSYNAELLVALENQHTIDLTDSEMNKLFEKTRRQLRENAEDMGNGCFKIYHKCDNACIGSIRNGTYDHDVYRDEALNNRFQIKGVELKSGYKDWILWISFAISCFLLCVVLLGFIMWACQKGNIRCNICI

SEQ ID NO: 621 - protein, 566 aa, synthetic construct
  REGION 1..566: note = hemagglutinin__InfluenzaA__ABC67576
MKTIIALSYILCLVFAQKLPGNDNSMATLCLGHHAVPNGTLVKTITNDQIEVTNATELVQSSSTGRICDSPHRILDGENCTLIDALLGDPHCDGFQNKEWDLFVERSKAYSNCYPYDVPDYASLRSLVASSGTLEFNNESFNWTGVAQNGTSYACKRRSIKSFFSRLNWLHQLKYKYPALNVTMPNNDEFDKLYIWGVHHPSTDSDQTSLYAQASGRVTVSTKRSQQTVIPNIGSRPWVRGVSSRISIYWTIVKPGDILLINSTGNLIAPRGYFKIRSGKSSIMRSDAPIGKCNSECITPNGSIPNDKPFQNVNRITYGACPRYVKQNTLKLATGMRNVPEKQTRGIFGAIAGFIENGWEGMVDGWYGFRHQNSEGTGQAADLKSTQAAINQINGKLNRLIEKTNEKFHQIEKEFSEVEGRIQDLEKYVEDTKIDLWSYNAELLVALENQHTIDLTDSEMNKLFERTRKQLRENAEDMGNGCFKIYHKCDNACIGSIRNGTYDHDVYRDEALNNRFQIKGVELKSGYKDWILWISFAISCFLLCVVLLGFIMWACQKGNIRCNICI

SEQ ID NO: 622 - protein, 566 aa, synthetic construct
  REGION 1..566: note = hemagglutinin__InfluenzaA__ABC67587
MKTIIALSYILCLVFAQKLPGNDNSTATLCLGHHAVPNGTIVKTITNDQIEVTNATELVQSSSTGGICDSPHQILDGENCTLIDALLGDPQCDGFQNKKWDLFVERSKAYSNCYPYDVPDYASLRSLVASSGTLEFNNESFNWTGVTQNGTSSACKRRSNNSFFSRLNWLTHLKFKYPALNVTMPNNEKFDKLYIWGVHHPGTDNDQISLYAQASGRITVSTKRSQQTVIPNIGSRPRVRDIPSRISIYWTIVKPGDILLINSTGNLIAPRGYFKIRSGKSSIMRSDAPIGKCNSECITPNGSIPNDKPFQNVNRITYGPCPRYVKQNTLKLATGMRNVPEKQTRGIFGAIAGFIENGWEGMVDGWYGFRHQNSEGIGQAADLKSTQAAINQINGKLNRLIGKTNEKFHQIEKEFSEVEGRIQDLEKYVEDTKIDLWSYNAELLVALENQHTIDLTDSEMNKLFERTKKQLRENAEDMGNGCFKIYHKCDNACIGSIRNGTYDHDVYRDEALNNRFQIKGVELKSGYKDWILWISFAISCFLLCVALLGFIMWACQKGNIRCNICI

SEQ ID NO: 623 - protein, 566 aa, synthetic construct; identical to SEQ ID NO: 243
  REGION 1..566: note = hemagglutinin__InfluenzaA__ABC67598

SEQ ID NO: 624 - protein, 566 aa, synthetic construct; identical to SEQ ID NO: 562
  REGION 1..566: note = hemagglutinin__InfluenzaA__ABC67609

SEQ ID NO: 625 - protein, 566 aa, synthetic construct; identical to SEQ ID NO: 562
  REGION 1..566: note = hemagglutinin__InfluenzaA__ABC67620

SEQ ID NO: 626 - protein, 566 aa, synthetic construct; identical to SEQ ID NO: 562
  REGION 1..566: note = hemagglutinin__InfluenzaA__ABC67631

SEQ ID NO: 627 - protein, 566 aa, synthetic construct; identical to SEQ ID NO: 562
  REGION 1..566: note = hemagglutinin__InfluenzaA__ABC67642

SEQ ID NO: 628 - protein, 566 aa, synthetic construct
  REGION 1..566: note = hemagglutinin__InfluenzaA__ABC67653
MKTIIALSYILCLVFAQKLPGNDNSTATLCLGHHAVPNGTLVKTITNDQIEVTNATELVQSSSTGRICDSPHQILDGENCTLIDALLGDPHCDGFQNKEWDLFVERSKAYSNCYPYDVPDYVSLRSLVASSGTLEFNNESFNWTGVAQNGTSSACKRRSDKSFFSRLNWLHQLKYKYPALNVTMPNNEKFDKLYIWGVHHPGTDSDQISLYAQASGRVTVSTKRSQQTVIPNIGSRPWVRGVSSRISIYWTIVKPGDILLINSTGNLIAPRGYFKIRSGKSSIMRSDAPIGKCNSECITPNGSIPNDKPFQNVNRITYGACPRYVKQNTLKLATGMRNVPEKQTRGIFGAIAGFIENGWEGMMDGWYGFRHQNSEGTGQAADLKSTQAAINQINGKLNRLIEKTNEKFHQIEKEFSEVEGRIQDLEKYVEDTKIDLWSYNAELLVALENQHTIDLTDSEMNKLFERTKKQLRENAEDMGNGCFKIYHKCDNACIGSIRNGTYDHDVYRDEALNNRFQIKGVELKSGYKDWVLWISFAISCFLLCVVLLGFIMWACQKGNIRCNICI

SEQ ID NO: 629 - protein, 566 aa, synthetic construct
  REGION 1..566: note = hemagglutinin__InfluenzaA__ABC67697
MKTIIALSYILCLVFAQKLPGNDNSTATLCLGHHAVPNGTIVKTITNDQIEVTNATELVQSSSTGEICDSPHQILDGENCTLIDALLGDPQCDGFQNKEWDLFVERSKAYSNCYPYDVPDYASLRSLVASSGTLEFNNESFNWTGVTQNGTSSACKRRSNNSFFSRLNWLTHLKFKYPALNVTMPNNEKFDKLYIWGVHHPGTDNDQIFLYAQASGRITVSTKRSQQTVIPNIGSRPRVRNIPSRISIYWTIVKPGDILLINSTGNLIAPRGYFKIRSGKSSIMRSDAPIGKCNSECITPNGSIPNDKPFQNVNRITYGACPRYVKQNTLKLATGMRNVPEKQTRGIFGAIAGFIENGWEGMVDGWYGFRHQNSEGIGQAADLKSTQAAINQINGKLNRLIGKTNEKFHQIEKEFSEVEGRIQDLEKYVEDTKIDLWSYNAELLVALENQHTIDLTDSEMNKLFERTKKQLRENAEDMGNGCFKIYHKCDNACIGSIRNGTYDHDVYRDEALNNRFQIKGVELKSGYKDWILWISFAISCFLLCVALLGFIMWACQKGNIRCNICI

SEQ ID NO: 630 - protein, 566 aa, synthetic construct
  REGION 1..566: note = hemagglutinin__InfluenzaA__ABC67708
MKTIIALSYILCLVFAQKLPGNDNSTATLCLGHHAVPNGTIVKTITNDQIEVTNATELVQSSSTGGICDSPHQILDGENCTLIDALLGDPQCDGFQNKKWDLFVERSKAYSNCYPYDVPDYASLRSLVASSGTLEFNNESFNWTGVTQNGTSSACKRRSNNSFFSRLNWLTHLKFKYPALNVTMPNNEKFDKLYIWGVHHPGTDNDQIFLYAQASGRITVSTKRSQQTVIPNIGSRPRVRNIPSRISIYWTIVKPGDILLINSTGNLIAPRGYFKIRSGKSSIMRSDAPIGKCNSECITPNGSIPNDKPFQNVNRITYGACPRYVKQNTLKLATGMRNVPEKQTRGIFGAIAGFIENGWEGMVDGWYGFRHQNSEGIGQAADLKSTQAAINQINGKLNRLIGKTNEKFHQIEKEFSEVEGRIQDLEKYVEDTKIDLWSYNAELLVALENQHTIDLTDSEMNKLFERTKKQLRENAEDMGNGCFKIYHKCDNACIGSIRNGTYDHDVYRDEALNNRFQIKGVELKSGYKDWILWISFAISCFLLCVALLGFIMWACQKGNIRCNICI

SEQ ID NO: 631 - protein, 566 aa, synthetic construct; identical to SEQ ID NO: 630
  REGION 1..566: note = hemagglutinin__InfluenzaA__ABC67719

SEQ ID NO: 632 - protein, 566 aa, synthetic construct; identical to SEQ ID NO: 630
  REGION 1..566: note = hemagglutinin__InfluenzaA__ABC67733

SEQ ID NO: 633 - protein, 566 aa, synthetic construct
  REGION 1..566: note = hemagglutinin__InfluenzaA__ABC67806
MKTIIALSYILCLVFAQKLPGNDNSTATLCLGHHAVPNGTIVKTITNDQIEVTNATELVQSSSTGGICDSPHQILDGENCTLIDALLGDPQCDGFQNKKWDLFVERSKAYSNCYPYDVPDYASLRSLIASSGTLEFNNESFNWTGVTQNGTSSACKRRSNSSFFSRLNWLTHLKFKYPALNVTMPNNEEFDKLYIWGVHHPGTYNDQISLYAQASGRITVSTKRSQQTVIPNIGSRPRVRDIPSRISIYWTIVKPGDILLINSTGNLIAPRGYFKIRSGKSSIMRSDAPIGKCNSECITPNGSIPNDKPFQNVNRITYGACPRYVKQNTLKLATGMRNVPEKQTRGIFGAIAGFIENGWEGMVDGWYGFRHQNSEGIGQAADLKSTQAAIDQINGKLNRLIGKTNEKFHQIEKEFSEVEGRIQDLEKYVEDTKIDLWSYNAELLVALENQHTIDLTDSEMNKLFERTKKQLRENAEDMGNGCFKIYHKCDNACIGSIRNGTYDHDVYRDEALNNRFQIKGVELKSGYKDWILWISFAISCFLLCVALLGFIMWACQKGNIRCNICI

SEQ ID NO: 634 - protein, 566 aa, synthetic construct; identical to SEQ ID NO: 516
  REGION 1..566: note = hemagglutinin__InfluenzaA__ABC67817

SEQ ID NO: 635 - protein, 566 aa, synthetic construct; identical to SEQ ID NO: 630
  REGION 1..566: note = hemagglutinin__InfluenzaA__ABC67828

SEQ ID NO: 636 - protein, 566 aa, synthetic construct; identical to SEQ ID NO: 494
  REGION 1..566: note = hemagglutinin__InfluenzaA__ABC67839

SEQ ID NO: 637 - protein, 566 aa, synthetic construct
  REGION 1..566: note = hemagglutinin__InfluenzaA__ABC67850
MKTIIALSYILCLVFAQKLPGNDNSTATLCLGHHAVPNGTLVKTITNDQIEVTNATELVQSSSTGRICDSPHQILDGENCTLIDALLGDPHCDGFQNKEWDLFVERSKAYSNCYPYDVPDYVSLRSLVASSGTLEFNNESFNWTGVAQNGTSSACKRRSDKSFFSRLNWLHQLKYKYPALNVTMPNNEKFDKLYIWGVHHPGTDSDQISLYAQASGRVTVSTKRSQQTVIPNIGSRPWARGVSSRISIHWTIVKPGDILLINSTGNLIAPRGYFKIRSGKSSIMRSDAPIGKCNSECITPNGSIPNDKPFQNVNRITYGACPRYVKQNTLKLATGMRNVPEKQTRGIFGAIAGFIENGWEGMMDGWYGFRHQNSEGTGQAADLKSTQAAINQINGKLNRLIEKTNEKFHQIEKEFSEVEGRIQDLEKYVEDTKIDLWSYNAELLVALENQHTIDLTDSEMNKLFERTKKQLRENAEDMGNGCFKIYHKCDNACIGSIRNGTYDHDVYRDEALNNRFQIKGVELKSGYKDWVLWISFAISCFLLCIVLLGFIMWACQKGNIRCNICI

SEQ ID NO: 638 - protein, 566 aa, synthetic construct; identical to SEQ ID NO: 494
  REGION 1..566: note = hemagglutinin__InfluenzaA__ABC67861

SEQ ID NO: 639 - protein, 566 aa, synthetic construct; identical to SEQ ID NO: 562
  REGION 1..566: note = hemagglutinin__InfluenzaA__ABC67883

SEQ ID NO: 640 - protein, 566 aa, synthetic construct
  REGION 1..566: note = hemagglutinin__InfluenzaA__ABC67894
MKTIIALSYILCLVFAQKLPGNDNSTATLCLGHHAVPNGTLVKTITNDQIEVTNATELVQSSSTGRICDSPHQILDGENCTLIDALLGDPHCDGFQNKEWDLFVERSKAYSNCYPYDVPDYVSLRSLVASSGTLEFNNESFNWTGVAQNGTSSACKRRSDKSFFSKLNWLHQLKYKYPALNVTMPNNEKFDKLYIWGVHHPGTDSDQISLYAQASGRVTVSTKRSQQTVIPNIGSRPWVRGVSSRISIYWTIVKPGDILLINSTGNLIAPRGYFKIRSGKSSIMRSDAPIGKCNSECITPNGSIPNDKPFQNVNRITYGACPRYVKQNTLKLATGMRNVPEKQTRGIFGAIAGFIENGWEGMMDGWYGFRHQNSEGTGQAADLKSTQAAINQINGKLNRLIEKTNEKFHQIEKEFSEVEGRIQDLEKYVEDTKIDLWSYNAELLVALENQHTIDLTDSEMNKLFERTKKQLRENAEDMGNGCFKIYHKCDNACIGSIRNGTYDHDVYRDEALNNRFQIKGVELKSGYKDWVLWISFAISCFLLCIVLLGFIMWACQKGNIRCNICI

SEQ ID NO: 641 - protein, 566 aa, synthetic construct; identical to SEQ ID NO: 562
  REGION 1..566: note = hemagglutinin__InfluenzaA__ABC67967

SEQ ID NO: 642 - protein, 566 aa, synthetic construct; identical to SEQ ID NO: 562
  REGION 1..566: note = hemagglutinin__InfluenzaA__ABC67978

SEQ ID NO: 643 - protein, 566 aa, synthetic construct
  REGION 1..566: note = hemagglutinin__InfluenzaA__ABC67989
MKTIIALSYILCLVFAQKLPGNDNSTATLCLGHHAVPNGTLVKTITNDQIEVTNATELVQSSSTGRICDSPHQILDGENCTLIDALLGDPHCDGFQNKEWDLFVERSKAYSNCYPYDVPDYVSLRSLVASSGTLEFNNESFNWTGVAQNGTSSACKRRSDKSFFSRLNWLHQLKYKYPALKVTMPNNEKFDKLYIWGVHHPGTDSDQISLYAQASGRVTVSTKRSQQTVIPNIGSRPWVRGVSSRISIYWTIVKPGDILLINSTGNLIAPRGYFKIRSGKSSIMRSDAPIGKCNSECITPNGSIPNDKPFQNVNRITYGACPRYVKQNTLKLATGMRNVPEKQTRGIFGAIAGFIENGWEGMMDGWYGFRHQNSEGTGQAADLKSTQAAINQINGKLNRLIEKTNEKFHQIEKEFSEVEGRIQDLEKYVEDTKIDLWSYNAELLVALENQHTIDLTDSEMNKLFERTKKQLRENAEDMGNGCFKIYHKCDNVCIGSIRNGTYDHDVYRDEALNNRFQIKGVELKSGYKDWVLWISFAISCFLLCIVLLGFIMWACQKGNIRCNICI

SEQ ID NO: 644 - protein, 566 aa, synthetic construct; identical to SEQ ID NO: 617
  REGION 1..566: note = hemagglutinin__InfluenzaA__ABC68000

SEQ ID NO: 645 - protein, 566 aa, synthetic construct
  REGION 1..566: note = hemagglutinin__InfluenzaA__ABC68049
MKTIIALSYILCLVFAQKLPGNDNSTATLCLGHHAVPNGTLVKTITDDQIEVTNATELVQSSSTGRICDSPHQILDGENCTLIDALLGDPHCDGFQNKEWDLFVERSKAYSNCYPYDVPDYVSLRSLVASSGTLEFNNESFNWTGVAQNGTSSACKRRSDKSFFSRLNWLHQLKYKYPALNVTMPNNEKFDKLYVWGVHHPGTDSDQISLYAQASGRVTVSTKRSQQTVIPNIGSRPWVRGVSSKISIYWTIVKPGDILLINSTGNLIAPRGYFKIRSGKSSIMRSDAPIGKCNSECITPNGSIPNDKPFQNVNRITYGACPRYVKQNTLKLATGMRNVPEKQTRGIFGAIAGFIENGWEGMMDGWYGFRHQNSEGTGQAADLKSTQAAINQINGKLNRLIEKTNEKFHQIEKEFSEVEGRIQDLEKYVEDTKIDLWSYNAELLVALENQHTIDLTDSEMNKLFERTKKQLRENAEDMGNGCFKIYHKCDNACIGSIRNGTYDHDVYRDEALNNRFQIKGVELKSGYKDWVLWISFAISCFLLCIVLLGFIMWACQKGNIRCNICI

SEQ ID NO: 646 - protein, 566 aa, synthetic construct; identical to SEQ ID NO: 562
  REGION 1..566: note = hemagglutinin__InfluenzaA__ABC68060

SEQ ID NO: 647 - protein, 566 aa, synthetic construct
  REGION 1..566: note = hemagglutinin__InfluenzaA__ABC68071
MKTIIALSYILCLVFAQKLPGNDNSTATLCLGHHAVPNGTLVKTITNDQIEVTNATELVQSSSTGRICDSPHQILDGENCTLIDALLGDPHCDGFQNKEWDLFVERSKAYSNCYPYDVPDYVSLRSLVASSGTLEFNNESFNWTGVAQNGTSSACKRRSDKSFFSRLNWLHQLKYKYPALNVTMPNNEKFDKLYIWGVHHPGTDSDQISLYAQASGRVTVSTKRSQQTVIPNIGSRPWVRGVSSRISIYWTIVKPGDILLINSTGNLIAPRGYFKIRSGKSSIMRSDAPIGKCNSECITPNGSIPNDKPFQNVNRITYGACPRYVKQNTLKLATGMRNVPEKQTRGIFGAIAGFIENGWEGMMDGWYGFRHQNSEGTGQAADLKSTQAAINQINGKLNRLIEKTNEKFHQIEKEFSEVEGRIQDLEKYVEDTKIDLWSYNAELLVALENQHTIDLTDSEMNKLFERTKKQLRENAEDMGNGCFKIYHKCDNACIGSIRNGTYDHNVYRDEALNNRFQIKGVELKSGYKDWVLWISFAISCFLLCIVLLGFIMWACQKGNIRCNICI

SEQ ID NO: 648 - protein, 566 aa, synthetic construct; identical to SEQ ID NO: 630
  REGION 1..566: note = hemagglutinin__InfluenzaA__ABC68082

SEQ ID NO: 649 - protein, 566 aa, synthetic construct
  REGION 1..566: note = hemagglutinin__InfluenzaA__ABC68093
MKTIIALSYILCLVFAQKLPGNDNSTATLCLGHHAVPNGTLVKTITNDQIEVTNATELVQSSSTSRICDSPHQILDGENCTLIDALLGDPHCDGFQNKEWDLFVERSKAYSNCYPYDVPDYVSLRSLVASSGTLEFNNESFNWTGVAQNGTSSACKRRSDKSFFSRLNWLHQLKYKYPALNVTMPNNEKFDKLYIWGVHHPGTDSDQISLYAQASGRVTVSTKRSQQTVIPNIGSRPWVRGVSSIISIYWTIVKPGDILLINSTGNLIAPRGYFKIRSGKSSIMRSDAPIGKCNSECITPNGSIPNGKPFQNVNRITYGACPRYVKQNTLKLATGMRNVPEKQTRGIFGAIAGFIENGWEGMMDGWYGFRHQNSEGTGQAADLKSTQAAINQINGKLNRLIEKTNEKFHQIEKEFSEVEGRIQDLEKYVEDTKIDLWSYNAELLVALENQHTIDLTDSEMNKLFERTKKQLRENAEDMGNGCFKIYHKCDNACIGSIRNGTYDHDVYRDEALNNRFQIKGVELKSGYKDWILWISFATSCFLLCIVLLGFIMWACQKGNIRCNICI

SEQ ID NO: 650 - protein, 566 aa, synthetic construct
  REGION 1..566: note = hemagglutinin__InfluenzaA__ABC68222
MKTIIALSYILCLVFAQKLPGNDNSTATLCLGHHAVPNGTLVKTITNDQIEVTNATELVQSSSTGGICDSPHQILDGENCTLIDALLGDPHCDGFQNKEWDLFVERSKAYSNCYPYDVPDYASLRSLVASSGTLEFNNESFNWTGVAQNGTSSACKRRSNKSFFSRLNWLHQLKYKYPALNVTMPNNEKFDKLYIWGVHHPSTDSDQISLYAQAPGRVTVSTKRSQQTVIPNIGSRPWVRGVSSRISIYWTIVKPGDILLINCTGNLIAPRGYFKIRSGKSSIMRSDASIGKCNSECITPNGSIPNDKPFQNVNRITYGACPRYVKQNTLKLATGMRNVPEKQTRGIFGAIAGFIENGWEGMVDGWYGFRHQNSEGTGQAADLKSTQAAINQINGKLNRLIEKTNEKFHQIEKEFSEVEGRIQDLEKYVEDTKIDLWSYNAELLVALENQHTIDLTDSEMNKLFERTKKQLRENAEDMGNGCFKIYHKCDNACIGSIRNGTYDHDVYRDEALNNRFQIKGVELKSGYKDWILWISFAISCFLLCVVLLGFIMWACQKGNIRCNICI

SEQ ID NO: 651 - protein, 566 aa, synthetic construct; identical to SEQ ID NO: 442
  REGION 1..566: note = hemagglutinin__InfluenzaA__ABC68233

SEQ ID NO: 652 - protein, 568 aa, synthetic construct
  REGION 1..568: note = hemagglutinin__InfluenzaA__ABC72655
MEKIVLLFAIVSLVKSDQICIGYHANNSTEQVDTIMEKNVTVTHAQDILEKTHNGKLCDLDGVKPLILRDCSVAGWLLGNPMCDEFINVPEWSYIVEKPNPANDLCYPGDFNDYEELKHLLSRINHFEKIQIIPKSSWSSHEASVGVSSVCPYQGKSSFFRNVVWLIKKNSTYPTIKRSYNNTNQEDLLVLWGIHHPNDAAEQTKLYQNPTTYISVGTSTLNQRLVPRIATRSKVNGQSGRMEFFWTILKPNDAINFESNGNFIAPEYAYKIVKKGDSTIMKSELEYGNCNTKCQTPMGAINSSMPFHNIHPLTIGECPKYVKSNRLVLATGLRNSPQREKRRKKRGLFGAIAGFIEGGWQGMVDGWYGYHHSNEQGSGYAADKESTQKAIDGVTNKVNSIIDKMNTQFEAVGREFNNLERRIENLNKKMEDGFLDVWTYNAELLVLMENERTLDFHDSNVKNLYDKVRLQLRDNAKELGNGCFEFYHKCDNECMESVRNGTYDYPQYSEEARLKREEISGVKLESIGIYQILSIYSTVASSLALAIMVAGLSLWMCSNGSLQCRICI

SEQ ID NO: 653 - protein, 566 aa, synthetic construct; identical to SEQ ID NO: 243
  REGION 1..566: note = hemagglutinin__InfluenzaA__ABC84400

SEQ ID NO: 654 - protein, 566 aa, synthetic construct; identical to SEQ ID NO: 452
  REGION 1..566: note = hemagglutinin__InfluenzaA__ABC84411

SEQ ID NO: 655 - protein, 566 aa, synthetic construct
  REGION 1..566: note = hemagglutinin__InfluenzaA__ABC84433
MKTIIALSYILCLVFAQKLPGNDNRTATLCLGHHAVPNGTIVKTITNDQIEVTNATELVQSSSTGGICDSPHQILDGENCTLIDALLGDPQCDGFQNKKWDLFVERSKAYSNCYPYDVPDYASLRSLVASSGTLEFNNESFNWTGVTQNGTSSACKRRSNNSFFSRLNWLTHLKFKYPALNVTMPNNEKFDKLYIWGVHHPGTNNDQISLYAQASGRITVSTKRSQQTVIPNIGSRPRVRDIPSRISIYWTIVKPGDILLINSTGNLIAPRGYFKIRSGKSSIMRSDAPIGKCNSECITPNGSIPNDKPFQNVNRITYGACPRYVKQNTLKLATGMRNVPEKQTRGIFGAIAGFIENGWEGMVDGWYGFRHQNSEGIGQAADLKSTQAAINQINGKLNRLIGKTNEKFHQIEKEFSEVEGRIQDLEKYVEDTKIDLWSYNAELLVALENQHTIDLTDSEMNKLFERTKKQLRENAEDMGNGCFKIYHKCDNACIGSIRNGTYDHDVYRDEALNNRFQIKGVELKSGYKDWILWISFAISCFLLCVALLGFIMWACQKGNIRCNICI

SEQ ID NO: 656 - protein, 566 aa, synthetic construct; identical to SEQ ID NO: 562
  REGION 1..566: note = hemagglutinin__InfluenzaA__ABC84444

SEQ ID NO: 657 - protein, 566 aa, synthetic construct; identical to SEQ ID NO: 633
  REGION 1..566: note = hemagglutinin__InfluenzaA__ABC84498

SEQ ID NO: 658 - protein, 566 aa, synthetic construct; identical to SEQ ID NO: 633
  REGION 1..566: note = hemagglutinin__InfluenzaA__ABC84509

SEQ ID NO: 659 - protein, 566 aa, synthetic construct
  REGION 1..566: note = hemagglutinin__InfluenzaA__ABC84520
MKTIIALSYILCLVFAQKLPGNDNSTATLCLGHHAVPNGTIVKTITNDQIEVTNATELVQSSSTGGICDSPHQILDGENCTLIDALLGDPQCDGFQNKKWDLFVERSKAYSNCYPYDVPDYASLRSLVASSGTLEFNNESFNWTGVTQNGTSSACKRRSNNSFFSRLNWLTHLKFKYPALNVTMPNNEKFDKLYIWGVHHPGTDNDQIFLYAQASGRITVSTKRSQQTVIPNIGSRPRVRDIPSRISIYWTIVKPGDILLINSTGNLIAPRGYFKIRSGKSSIMRSDAPIGKCNSECITPNGSIPNDKPFQNVNRITYGACPRYVKQNTLKLATGMRNVPEKQTRGIFGAIAGFIENGWEGMVDGWYGFRHQNSEGIGQAADLKSTQAAINQINGKLNRLIGKTNEKFHQIEKEFSEVEGRIQDLEKYVEDTKIDLWSYNAELLVALENQHTIDLTDSEMNKLFERTKKQLRENAEDMGNGCFKIYHKCDNACIGSIRNGTYDHDVYRDEALNNRFQIKGVELKSGYKDWILWISFAISCFLLCVALLGFIMWACQKGNIRCNICI

SEQ ID NO: 660 - protein, 566 aa, synthetic construct
  REGION 1..566: note = hemagglutinin__InfluenzaA__ABC84531
MKTIIALSYIFCLVFAQKLPGNDNSTATLCLGHHAVPNGTLVKTITNDQIEVTNATELVQSSSTGRICDSPHRILDGKNCTLIDALLGDPHCDGFQNEKWDLFVERSKAFSNCYPYDVPDYASLRSLVASSGTLEFINEGFNWTGVTQSGGSYACKRGSVNSFFSRLNWLYESESKYPALNVTMPNNGRFDKLYIWGVHHPSTDKEQTNLYVRAAGRVTVSTKRSQQTVIPNIGSRPWVRGLSSRISIYWTIVKPGDILLINSTGNLIAPRGYFKIRTGKSSIMRSDAPIGTCSSECITPNGSIPNDKPFQNVNKITYGACPRYVKQNTLKLATGMRNVPEKQTRGIFGAIAGFIENGWEGMVDGWYGFRHQNSEGTGQAADLKSTQAAIDQINGKLNRLIEKTNEKFHQIEKEFSEVEGRIQDLEKYVEDTKIDLWSYNAELLVALENQHTIDLTDSEMNKLFEKTRKQLRENAEDMGNGCFKIYHKCDNACIGSIRNGTYDHDVYRDEALNNRFQIKGVELKSGYKDWILWISFAISCFLLCVVLLGFIMWACQKGNIRCNICI

SEQ ID NO: 661 - protein, 566 aa, synthetic construct; identical to SEQ ID NO: 650
  REGION 1..566: note = hemagglutinin__InfluenzaA__ABC84560

SEQ ID NO: 662 - protein, 566 aa, synthetic construct
  REGION 1..566: note = hemagglutinin__InfluenzaA__ABC84571
MKTIIALSYILCLVFAQKLPGNDNSTATLCLGHHAVPNGTLVKTITNDQIEVTNATELVQSSSTGGICDSPHQIIDGENCTLIDALLGDPHCDGFQNKEWDLFVERSKAYSNCYPYDVPDYASLRSLVASSGTLEFNNESFNWTGVAQNGTSSACKRRSNKSFFSRLNWLHQLKYKYPALNVTMPNNEKFDKLYIWGVHHPSTDSDQISLYAQAPGRVTVSTKRSQQTVIPNIGSRPWVRGVSSRISIYWTIVKPGDILLINCTGNLIAPRGYFKIRSGKSSIMRSDASIGKCNSECITPNGSIPNDKPFQNVNRITYGACPRYVKQNTLKLATGMRNVPEKQTRGIFGAIAGFIENGWEGMVDGWYGFRHQNSEGTGQAADLKSTQAAINQINGKLNRLIEKTNEKFHQIEKEFSEVEGRIQDLEKYVEDTKIDLWSYNAELLVALENQHTIDLTDSEMNKLFERTKKQLRENAEDMGNGCFKIYHKCDNACIGSIRNGTYDHDVYRDEALNNRFQIKGVELKSGYKDWILWISFAISCFLLCVVLLGFIMWACQKGNIRCNICI

SEQ ID NO: 663 - protein, 566 aa, synthetic construct; identical to SEQ ID NO: 650
  REGION 1..566: note = hemagglutinin__InfluenzaA__ABC85754

SEQ ID NO: 664 - protein, 566 aa, synthetic construct; identical to SEQ ID NO: 630
  REGION 1..566: note = hemagglutinin__InfluenzaA__ABC85765

SEQ ID NO: 665 - protein, 566 aa, synthetic construct
  REGION 1..566: note = hemagglutinin__InfluenzaA__ABC85776
MKTIIALSYILCLVFAQKLPGNDNSTATLCLGHHAVPNGTLVKTITNDQIEVTNATELVQSSSTGGICDSPHQILDGENCTLIDALLGDPHCDGFQNKEWDLFVERSKAYSNCYPYDVPDYASLRSLVASSGTLEFNNESFNWTGVAQNGTSSACKRRSNKSFFSRLNWLHQLKYKYPALNVTMPNNEKFDKLYIWGVHHPSTDSDQISLYAQAPGRVTVSTKRSQQTVIPNIGSRPWVRGVSSRISIYWTIVKPGDILLINFTGNLIAPRGYFKIRSGKSSIMRSDASIGKCNSECITPNGSIPNDKPFQNVNRITYGACPRYVKQNTLKLATGMRNVPEKQTRGIFGAIAGFIENGWEGMVDGWYGFRHQNSEGTGQAADLKSTQAAINQINGKLNRLIEKTNEKFHQIEKEFSEVEGRIQDLEKYVEDTKIDLWSYNAELLVALENQHTIDLTDSEMNKLFERTKKQLRENAEDMGNGCFKIYHKCDNACIGSIRNGTYDHDVYRDEALNNRFQIKGVELKSGYKDWILWISFAISCFLLCVVLLGFIMWACQKGNIRCNICI

SEQ ID NO: 666 - protein, 566 aa, synthetic construct; identical to SEQ ID NO: 650
  REGION 1..566: note = hemagglutinin__InfluenzaA__ABC85787

SEQ ID NO: 667 - protein, 566 aa, synthetic construct; identical to SEQ ID NO: 633
  REGION 1..566: note = hemagglutinin__InfluenzaA__ABC85798

SEQ ID NO: 668 - protein, 566 aa, synthetic construct; identical to SEQ ID NO: 630
  REGION 1..566: note = hemagglutinin__InfluenzaA__ABC85820

SEQ ID NO: 669 - protein, 566 aa, synthetic construct; identical to SEQ ID NO: 630
  REGION 1..566: note = hemagglutinin__InfluenzaA__ABC85831

SEQ ID NO: 670 - protein, 566 aa, synthetic construct; identical to SEQ ID NO: 633
  REGION 1..566: note = hemagglutinin__InfluenzaA__ABC85842

SEQ ID NO: 671 - protein, 566 aa, synthetic construct; identical to SEQ ID NO: 630
  REGION 1..566: note = hemagglutinin__InfluenzaA__ABC85853

SEQ ID NO: 672 - protein, 566 aa, synthetic construct; identical to SEQ ID NO: 630
  REGION 1..566: note = hemagglutinin__InfluenzaA__ABC85864

SEQ ID NO: 673 - protein, 566 aa, synthetic construct; identical to SEQ ID NO: 633
  REGION 1..566: note = hemagglutinin__InfluenzaA__ABC85886

SEQ ID NO: 674 - protein, 566 aa, synthetic construct; identical to SEQ ID NO: 562
  REGION 1..566: note = hemagglutinin__InfluenzaA__ABC85908

SEQ ID NO: 675 - protein, 566 aa, synthetic construct
  REGION 1..566: note = hemagglutinin__InfluenzaA__ABC85919
MKTIIALSYILCLVFAQKLPGNDNSTATLCLGHHAVPNGTLVKTITNDQIEVTNATELVQSSSTGRICDSPHQILDGENCTLIDALLGDPHCDGFQNKEWDLFVERSKAYSNCYPYDVPDYVSLRSLVASSGTLEFNNESFNWTGVAQNGTSSACKRRSDKSFFSRLNWLHQLKYKYPALNVTMPNNEKFDKLYIWGVHHPGTDSDQISLYAQASGRVTVSTKRSQQTVIPNIGSRPWVRGVSSRISIYWTIVKPGDILLINSTGNLIAPRGYFKIRSGKSSIMRSDAPIGKCNSECITPNGSIPNDKPFQNVNRITYGACPRYVKQNTLKLATGMRNVPEKQTRGIFGAIAGFIENGWEGMMDGWYGFRHQNSEGTGQAADLKSTQAAINQINGKLNRLIEKTNEKFHQIEKEFSEVEGRIQDLEKYVEDTKIDLWSYNAELLVALENQHTIDLTDSEMNKLFERTKKQLRENAEDMGNGCFKIYHKCDNACIGSIRNGTYDHDVYRDEALNNRFQIKGVELKSGYKDWVLWISFAISCFLLCIVLMGFIMWACQKGNIRCNICI

SEQ ID NO: 676 - protein, 566 aa, synthetic construct; identical to SEQ ID NO: 562
  REGION 1..566: note = hemagglutinin__InfluenzaA__ABC85930

SEQ ID NO: 677 - protein, 566 aa, synthetic construct; identical to SEQ ID NO: 611
  REGION 1..566: note = hemagglutinin__InfluenzaA__ABC85941

SEQ ID NO: 678 - protein, 566 aa, synthetic construct
  REGION 1..566: note = hemagglutinin__InfluenzaA__ABC85952
MKTIIALSYILCLVFAQKLPGNDNSTATLCLGHHAVPNGTLVKTITNDQIEVTNATELVQSSSTGRICDSPHQILDGENCTLIDALLGDPHCDGFQNKKWDLFVERSKAYSNCYPYDVPDYVSLRSLVASSGTLEFNNESFNWTGVAQNGTSSACKRRSDKSFFSRLNWLHQLKYKYPALNVTMPNNEKFDKLYIWGVHHPGTDSDQISLYAQASGRVTVSTKRSQQTVIPNIGSRPWVRGVSSRISIYWTIVKPGDILLINSTGNLIAPRGYFKIRSGKSSIMRSDAPIGKCNSECITPNGSIPNDKPFQNVNRITYGACPRYVKQNTLKLATGMRNVPEKQTRGIFGAIAGFIENGWEGMMDGWYGFRHHNSEGTGQAADLKSTQAAINQINGKLNRLIEKTNEKFHQIEKEFSEVEGRIQDLEKYVEDTKIDLWSYNAELLVALENQHTIDLTDSEMNKLFERTKKQLRENAEDMGNGCFKIYHKCDNACIGSIRNGTYDHDVYRDEALNNRFQIKGVELKSGYKDWVLWISFAISCFLLCIVLLGFIMWACQKGNIRCNICI

SEQ ID NO: 679 - protein, 566 aa, synthetic construct; identical to SEQ ID NO: 562
  REGION 1..566: note = hemagglutinin__InfluenzaA__ABC85974

SEQ ID NO: 680 - protein, 566 aa, synthetic construct; identical to SEQ ID NO: 562
  REGION 1..566: note = hemagglutinin__InfluenzaA__ABC85985

SEQ ID NO: 681 - protein, 566 aa, synthetic construct
  REGION 1..566: note = hemagglutinin__InfluenzaA__ABC85996
MKTIIALSYILCLVFAQKLPGNDNSTATLCLGHHAVPNGTIVKTITNDQIEVTNATELVQSSSTGGICDSPHQILDGENCTLIDALLGDPQCDGFQNKKWDLFVERSKAYSNCYPYDVPDYASLRSLVASSGTLEFNNESFNWTGVTQNGTSSACKRRSNNSFFSRLNWLTHLKFKYPALNVTMPNNEKFDKLYIWGVHHPGTDNDQISLYAQASGRITVSTKRSQQTVIPNIGSRPRVRDIPSRISIYWTIVKPGDILLINSTGNLIAPRGYFKIRSGKSSIMRSDAPIGKCNSECITPNGSIPNDKPFQNVNRITYGACPRYVKQNTLKLATGMRNVPEKQTRGIFGAIAGFIENGWEGMMDGWYGFRHQNSEGIGQAADLKSTQAAINQINGKLNRLIGKTNEKFHQIEKEFSEVEGRIQDLEKYVEDTKIDLWSYNAELLVALENQHTIDLTDSEMNKLFERTKKQLRENAEDMGNGCFKIYHKCDNACIGSIRNGTYDHDVYRDEALNNRFQIKGVELKSGYKDWILWISFAISCFLLCVALLGFIMWACQKGNIRCNICI

SEQ ID NO: 682 - protein, 566 aa, synthetic construct; identical to SEQ ID NO: 243
  REGION 1..566: note = hemagglutinin__InfluenzaA__ABC86007

SEQ ID NO: 683 - protein, 566 aa, synthetic construct
  REGION 1..566: note = hemagglutinin__InfluenzaA__ABC86018
MKTIIALSYILCLVFAQKLPGNDNSTATLCLGHHAVPNGTIVKTITNDQIEVTNATELVQSSSTGGICDSPHQILDGENCTIIDALLGDPQCDGFQNKKWDLFVERSKAYSNCYPYDVPDYASLRSLVASSGTLEFNNESFNWTGVTQNGTSSACKRRSNNSFFSRLNWLTHLKFKYPALNVTMPNNEKFDKLYIWGVHHPGTDNDQISLYAQASGRITVSTKRSQQTVIPNIGSRPRVRDIPSRISIYWTIVKPGDILLINSTGNLIAPRGYFKIRSGKSSIMRSDAPIGKCNSECITPNGSIPNDKPFQNVNRITYGACPRYVKQNTLKLATGMRNVPEKQTRGIFGAIAGFIENGWEGMVDGWYGFRHQNSEGIGQAADLKSTQAAINQINGKLNRLIGKTNEKFHQIEKEFSEVEGRIQDLEKYVEDTKIDLWSYNAELLVALENQHTIDLTDSEMNKLFERTKKQLRENAEDMGNGCFKIYHKCDNACIGSIRNGTYDHDVYRDEALNNRFQIKGVELKSGYKDWILWISFAISCFLLCVALLGFIMWACQKGNIRCNICI

SEQ ID NO: 684 - protein, 566 aa, synthetic construct; identical to SEQ ID NO: 243
  REGION 1..566: note = hemagglutinin__InfluenzaA__ABC86029

SEQ ID NO: 685 - protein, 566 aa, synthetic construct; identical to SEQ ID NO: 282
  REGION 1..566: note = hemagglutinin__InfluenzaA__ABC86040

SEQ ID NO: 686 - protein, 566 aa, synthetic construct; identical to SEQ ID NO: 516
  REGION 1..566: note = hemagglutinin__InfluenzaA__ABC86124

SEQ ID NO: 687 - protein, 566 aa, synthetic construct; identical to SEQ ID NO: 593
  REGION 1..566: note = hemagglutinin__InfluenzaA__ABC86137

SEQ ID NO: 688 - protein, 566 aa, synthetic construct
  REGION 1..566: note = hemagglutinin__InfluenzaA__ABC97374
MKTIIALSYIFCLVLGQDFPGNDNSTATLCLGHHAVPNGTLVKTITNDQIEVTNATELVQSSSTGKICNNPHRILDGIDCTLIDALLGDPHCDGFQNETWDLFVERSKAFSNCYPYDVPDYASLRSLVASSGTLEFINEGFTWTGVTQNGGSNACKRGPDSGFFSRLNWLYKSGSTYPVLNVTMPNNDNFDKLYIWGVHHPSTDQEQTSLYVQASGRVTVSTKRSQQTIIPNIGSRPWVRGLSSRISIYWTIVKPGDILVINSNGNLIAPRGYFKMRTGKSSIMRSDAPIGTCISECITPNGSIPNDKPFQNVNKITYGACPKYVKQNTLKLATGMRNVPEKQTRGLFGAIAGFIENGWEGMVDGWYGFRHQNSEGTGQAADLKSTQAAIDQINGKLNRVIEKTNEKFHQIEKEFSEVEGRIQDLEKYVEDTKIDLWSYNAELLVALENQHTIDLTDSEMNKLFEKTRRQLRENAEDMGNGCFRIYHKCDNACIGSIRNGTYDHDVYRDEALNNRFQIKGVELKSGYKDWILWISFAISCFLLCVVLLGFIMWACQKGNIRCNICI

SEQ ID NO: 689 - protein, 566 aa, synthetic construct; identical to SEQ ID NO: 32
  REGION 1..566: note = hemagglutinin__InfluenzaA__ABD15449

SEQ ID NO: 690 - protein, 566 aa, synthetic construct
  REGION 1..566: note = hemagglutinin__InfluenzaA__ABD15460
MKTIIALSYILCLVFAQKLPGNDNSTATLCLGHHAVPNGTIVKTITNDQIEVTNATELVQISSTGGICDSPYQILDGENCTLIDALLGDPQCDGFQNKKWDLFVERSKAYSNCYPYDVPDYASLRSLVASSGTLEFNNESFDWTGVTQNGTSSACKRRSNKSFFSRLNWLTHLKYKYPALNVTMPNNEKFDKLYIWGVHHPGTDSDQISLYAQASGRITVSTKRSQQTVIPNIGSRPRVRDVSSRISIYWTIVKPGDILLINSTGNLIAPRGYFKIRSGKSSIMRSDAPIGKCNSECITPNGSIPNDKPFQNVNRITYGACPRYVKQNTLKLATGMRNVPEKQTRGIFGAIAGFIENGWEGMVDGWYGFRHQNSEGTGQAADLKSTQAAINQINGKLNRLIGKTNEKFHQIEKEFSEVEGRIQDLEKYVEDTKIDLWSYNAELLVALENQHTIDLTDSEMNKLFERTKKQLRENAEDMGNGCFKIYHKCDNACIGSIRNGTYDHDVYRDEALNNRFQIKGVELKSGYKDWILWISFAISCFLLCVALLGFIMWACQKGNIRCNICI

SEQ ID NO: 691 - protein, 566 aa, synthetic construct; identical to SEQ ID NO: 32
  REGION 1..566: note = hemagglutinin__InfluenzaA__ABD15471

SEQ ID NO: 692 - protein, 566 aa, synthetic construct; identical to SEQ ID NO: 32
  REGION 1..566: note = hemagglutinin__InfluenzaA__ABD15482

SEQ ID NO: 693 - protein, 566 aa, synthetic construct; identical to SEQ ID NO: 690
  REGION 1..566: note = hemagglutinin__InfluenzaA__ABD15493

SEQ ID NO: 694 - protein, 566 aa, synthetic construct; identical to SEQ ID NO: 243
  REGION 1..566: note = hemagglutinin__InfluenzaA__ABD15526

SEQ ID NO: 695 - protein, 566 aa, synthetic construct; identical to SEQ ID NO: 452
  REGION 1..566: note = hemagglutinin__InfluenzaA__ABD15537

SEQ ID NO: 696 - protein, 566 aa, synthetic construct; identical to SEQ ID NO: 452
  REGION 1..566: note = hemagglutinin__InfluenzaA__ABD15548

SEQ ID NO: 697 - protein, 566 aa, synthetic construct; identical to SEQ ID NO: 470
  REGION 1..566: note = hemagglutinin__InfluenzaA__ABD15559

SEQ ID NO: 698 - protein, 566 aa, synthetic construct; identical to SEQ ID NO: 452
  REGION 1..566: note = hemagglutinin__InfluenzaA__ABD15570

SEQ ID NO: 699 - protein, 566 aa, synthetic construct; identical to SEQ ID NO: 470
  REGION 1..566: note = hemagglutinin__InfluenzaA__ABD15581

SEQ ID NO: 700 - protein, 566 aa, synthetic construct; identical to SEQ ID NO: 452
  REGION 1..566: note = hemagglutinin__InfluenzaA__ABD15592

SEQ ID NO: 701 - protein, 566 aa, synthetic construct; identical to SEQ ID NO: 452
  REGION 1..566: note = hemagglutinin__InfluenzaA__ABD15603

SEQ ID NO: 702 - protein, 566 aa, synthetic construct; identical to SEQ ID NO: 452
  REGION 1..566: note = hemagglutinin__InfluenzaA__ABD15614

SEQ ID NO: 703 - protein, 566 aa, synthetic construct
  REGION 1..566: note = hemagglutinin__InfluenzaA__ABD15625
MKTIIALSYILCLVFAQKLPGNDNSTATLCLGHHAVPNGTIVKTITNDQIEVTNATELVQSSSTGGICDSPHQILDGENCTLIDALLGDPQCDGFQNKKWDLFVERSKAYSNCYPYDVPDYASLRSLVASSGTLEFNNESFDWTGVTQNGTSSACKRRSNKSFFSRLNWLTHLKYKYPALNVTMPNNEKFDKLYIWGVHHPGTDSDQISLYAQASGRITVSTKRSQQTVIPNIGSRPRVRDVSSQISIYWTIVKPGDILLINSTGNLIAPRGYFKIRSGKSSIMRSDAPIGKCNSECITPNGSIPNDKPFQNVNRITYGACPRYVKQNTLKLATGMRNVPEKQTRGIFGAIAGFIENGWEGMVDGWYGFRHQNSEGTGQAADLKSTQAAINQINGKLNRLIGKTNEKFHQIEKEFSEVEGRIQDLVKYVEDTKIDLWSYNAELLVALENQHTIDLTDSEMNKLFERTKKQLRENAEDMGNGCFKIYHKCDNACIGSIRNGTYDHDVYRDEALNNRFQIKGVELKSGYKDWILWISFAISCFLLCVALLGFIMWACQKGNIRCNICI

SEQ ID NO: 704 - protein, 566 aa, synthetic construct; identical to SEQ ID NO: 470
  REGION 1..566: note = hemagglutinin__InfluenzaA__ABD15636

SEQ ID NO: 705 - protein, 566 aa, synthetic construct; identical to SEQ ID NO: 650
  REGION 1..566: note = hemagglutinin__InfluenzaA__ABD15680

SEQ ID NO: 706 - protein, 566 aa, synthetic construct
  REGION 1..566: note = hemagglutinin__InfluenzaA__ABD15691
MKTIIALSYILCLVFAQKLPVNDKSTATLCLGHHAVPNGTLVKTITNDHIEVTNATELVQSSPTGRICDSPHQILDGENCTLIDALLGDPHCDGFQNKEWDLFVERSTAYSNCYPYDVPDYASLRSLVASSGTLEFNNESFNWTGVAQNGTSSACKRRSIKSFFSRLNWLHQLKYKYPALNVTMPNNEKFDKLYIWGVHHPSTDSDQISLYAQASGRVTVSTKRSQQTVIPNIGSRPWVRGVSSRISIYWTIVKPGDILLINSTGNLIAPRGYFKIRSGKSSIMRSNAPIGKCNSECITPNGSIPNDKPFQNVNRITYGACPRYVKQNTLKLATGMRNVPEKQTRGIFGAIAGFIENGWEGMVDGWYGFRHQNSEGTGQAADLKSTQAAINQINGKLNRLIEKTNEKFHQIEKEFSEVEGRIQDLEKYVEDTKIDLWSYNAELLVALENQHTIDLTDSEMNKLFERTRKQLRENAEDMGNGCFKIYHKCDNACIGSIRNGTYDHDVYRDEALNNRFQIKGVELKSGYKDWILWISFAISCFLLCVVLLGFIMWACQKGNIRCNICI

SEQ ID NO: 707 - protein, 566 aa, synthetic construct
  REGION 1..566: note = hemagglutinin__InfluenzaA__ABD15702
MKTIIALSYILCLVFAQKLPGNDNSTATLCLGHHAVPNGTLVKTITNDQIEVTNATELVQSSSTGGICDSPHQILDGENCTLIDALLGDPHCDGFQNKEWDLFVERSKAYSNCYPYDVPDYASLRSLVASSGTLEFNNESFNWTGVAQNGTSSACKRRSNKSFFSRLNWLHQLKYKYPALNVTMPNNEKFDKLYIWGVHHPSTDSDQTSLYAQAPGRVTVSTKRSQQTVIPNIGSRPWVRGVSSRISIYWTIVKPGDILLINCTGNLIAPRGYFKIRSGKSSIMRSDASIGKCNSECITPNGSIPNDKPFQNVNRITYGACPRYVKQNTLKLATGMRNVPEKQTRGIFGAIAGFIENGWEGMVDGWYGFRHQNSEGTGQAADLKSTQAAINQINGKLNRLIEKTNEKFHQIEKEFSEVEGRIQDLEKYVEDTKIDLWSYNAELLVALENQHTIDLTDSEMNKLFERTKKQLRENAEDMGNGCFKIYHKCDNACIGSIRNGTYDHDVYRDEALNNRFQIKGVELKSGYKDWILWISFAISCFLLCVVLLGFIMWACQKGNIRCNICI

SEQ ID NO: 708 - protein, 566 aa, synthetic construct
  REGION 1..566: note = hemagglutinin__InfluenzaA__ABD15724
MKTIIALSYILCLVFAQKLPGNDNSTATLCLGHHAVPNGTLVKTITNDQIEVTNATELVQSSSTGGICDSPHQILDGENCTLIDALLGDPHCDGFQNKEWDLFVERSKAYSNCYPYDVPDYASLRSLVASSGTLEFNNESFNWTGVAQNGTSSACKRRSNKSFFSRLNWLHQLKYKYPALNVAMPNNEKFDKLYIWGVHHPSTDSDQISLYAQAPGRVTVSTKRSQQTVIPNIGSRPWVRGVSSRISIYWTIVKPGDILLINCTGNLIAPRGYFKIRSGKSSIMRSDASIGKCNSECITPNGSIPNDKPFQNVNRITYGACPRYVKQNTLKLATGMRNVPEKQTRGIFGAIAGFIENGWEGMVDGWYGFRHQNSEGTGQAADLKSTQAAINQINGKLNRLIEKTNEKFHQIEKEFSEVEGRIQDLEKYVEDTKIDLWSYNAELLVALENQHTIDLTDSEMNKLFERTKKQLRENAEDMGNGCFKIYHKCDNACIGSIRNGTYDHDVYRDEALNNRFQIKGVELKSGYKDWILWISFAISCFLLCVVLLGFIMWACQKGNIRCNICI

SEQ ID NO: 709 - protein, 566 aa, synthetic construct
  REGION 1..566: note = hemagglutinin__InfluenzaA__ABD15746
MKTIIALSYILCLVFAQKLPVNDNSTATLCLGHHAVPNGTLVKTITNDHIEVTNATELVQSSSTGRICDSPHQILDGENCTLIDALLGDPHCDGFQNKEWDLFVERSTAYSNCYPYDVPDYASLRSLVASSGTLEFNNESFNWTGVAQNGTSSACKRRSIKSFFSRLNWLHQLKYKYPALNVTMPNNEKFDKLYIWGVHHPSTDSDQISLYAQASGRVTVSTKRSQQTVIPNIGSRPWVRGISSRISIYWTIVKPGDILLINSTGNLIAPRGYFKIRSGKSSIMRSNAPIGKCNSECITPNGSIPNDKPFQNVNRITYGACPRYVKQNTLKLATGMRNVPEKQTRGIFGAIAGFIENGWEGMVDGWYGFRHQNSEGTGQAADLKSTQAAINQINGKLNRLIEKTNEKFHQIEKEFSEVEGRIQDLEKYVEDTKIDLWSYNAELLVALENQHTIDLTDSEMNKLFERTRKQLRENAEEMGNGCFKIYHKCDNACIGSIRNGTYDHDVYRDEALNNRFQIKGVELKSGYKDWILWISFAISCFLLCVVLLGFIMWACQKGNIRCNICI

SEQ ID NO: 710 - protein, 566 aa, synthetic construct
  REGION 1..566: note = hemagglutinin__InfluenzaA__ABD15757
MKTIIALSYILCLVFAQKLPVNDNSTATLCLGHHAVPNGTLVKTITNDHIEVTNATELVQSSSTGRICDSPHQILDGENCTLIDALLGDPHCDGFQNKEWDLFVERSTAYSNCYPYDVPDYASLRSLVASSGTLEFNNESFNWTGVAQNGTSSACKRRSIKSFFSRLNWLHQLKYKYPALNVTMPNNEKFDKLYIWGVHHPSTDSDQISLYAQASGRVTVSTKRSQQTVIPNIGSRPWVRGVSSRISIYWTIVKPGDILLINSTGNLIAPRGYFKIRSGKSSIMRSNAPIGKCNSECITPNGSIPNDKPFQNVNRITYGACPRYVKQNTLKLATGMRNVPEKQTRGIFGAIAGFIENGWEGMVDGWYGFRHQNSEGTGQAADLKSTQAAINQINGKLNRLIEKTNEKFHQIEKEFSEVEGRIQDLEKYVEDTKIDLWSYNAELLVALENQHTIDLTDSEMNKLFERTRKQLRENAEEMGNGCFKIYHKCDNACIGSIRNGTYDHDVYRDEALNNRFQIKGVELKSGYKDWILWISFAISCFLLCVVLLGFIMWACQKGNIRCNICI

SEQ ID NO: 711 - protein, 566 aa, synthetic construct; identical to SEQ ID NO: 650
  REGION 1..566: note = hemagglutinin__InfluenzaA__ABD15779

SEQ ID NO: 712 - protein, 566 aa, synthetic construct; identical to SEQ ID NO: 650
  REGION 1..566: note = hemagglutinin__InfluenzaA__ABD15790

SEQ ID NO: 713 - protein, 566 aa, synthetic construct; identical to SEQ ID NO: 650
  REGION 1..566: note = hemagglutinin__InfluenzaA__ABD16292

SEQ ID NO: 714 - protein, 566 aa, synthetic construct; identical to SEQ ID NO: 633
  REGION 1..566: note = hemagglutinin__InfluenzaA__ABD16303

SEQ ID NO: 715 - protein, 566 aa, synthetic construct; identical to SEQ ID NO: 633
  REGION 1..566: note = hemagglutinin__InfluenzaA__ABD16325

SEQ ID NO: 716 - protein, 566 aa, synthetic construct
  REGION 1..566: note = hemagglutinin__InfluenzaA__ABD16336
MKTIIALSYTLCLVFAQKLPGNDNSTATLCLGHHAVPNGTIVKTITNDQIEVTNATELVQSSSTGGICDSPHQILDGENCTLIDALLGDPQCDGFQNKKWDLFVERSKAYSNCYPYDVPDYASLRSLIASSGTLEFNNESFNWTGVTQNGTSSACKRRSNSSFFSRLNWLTHLKFKYPALNVTMPNNEEFDKLYIWGVHHPGTYNDQISLYAQASGRITVSTKRSQQTVIPNIGSRPRVRDIPSRISIYWTIVKPGDILLINSTGNLIAPRGYFKIRSGKSSIMRSDAPIGKCNSECITPNGSIPNDKPFQNVNRITYGACPRYVKQNTLKLATGMRNVPEKQTRGIFGAIAGFIENGWEGMVDGWYGFRHQNSEGIGQAADLKSTQAAIDQINGKLNRLIGKTNEKFHQIEKEFSEVEGRIQDLEKYVEDTKIDLWSYNAELLVALENQHTIDLTDSEMNKLFERTKKQLRENAEDMGNGCFKIYHKCDNACIGSIRNGTYDHDVYRDEALNNRFQIKGVELKSGYKDWILWISFAISCFLLCVALLGFIMWACQKGNIRCNICI

SEQ ID NO: 717 - protein, 566 aa, synthetic construct; identical to SEQ ID NO: 633
  REGION 1..566: note = hemagglutinin__InfluenzaA__ABD16347

SEQ ID NO: 718 - protein, 566 aa, synthetic construct
  REGION 1..566: note = hemagglutinin__InfluenzaA__ABD16358
MKTIIALSYILCLVFAQKLPGNDNSTATLCLGHHAVPNGTIVKTITNDQIEVTNATELVQSSSTGGICDSPHQILDGENCTLIDALLGDPQCDGFQNKKWDLFVERSKAYSNCYPYDVPDYASLRSLIASSGTLEFNNESFNWTGVTQNGTSSACKRRSNSSFFSRLNWLTHLKFKYPALNVTMPNNEEFDKLYIWGVHHPGTYNDQISLYAQASGRITVSTKRSQQTVIPNIGSRPRVRDIPSRISIYWTIVKPGDILLINSTGNLIAPRGYFKIRSGKSSIMRSDAPIGKCNSECITPNGSIPNDKPFQNVNRITYGACPRYVKQNTLKLATGMRNVPEKQTRGIFGAIAGFIENGWEGMVDGWYGFRHQNSEGIGQAADLKSTQAAIDQINGKLNRLIGKTNEKFHQIEKEFSEVEGRIQDLEKYVEDTKIDLWSYNAELLVALENQHTIDLTDLEMNKLFERTKKQLRENAEDMGNGCFKIYHKCDNACIGSIRNGTYDHDVYRDEALNNRFQIKGVELKSGYKDWILWISFAISCFLLCVALLGFIMWACQKGNIRCNICI

SEQ ID NO: 719 - protein, 566 aa, synthetic construct; identical to SEQ ID NO: 633
  REGION 1..566: note = hemagglutinin__InfluenzaA__ABD16472

SEQ ID NO: 720 - protein, 566 aa, synthetic construct; identical to SEQ ID NO: 633
  REGION 1..566: note = hemagglutinin__InfluenzaA__ABD16483

SEQ ID NO: 721 - protein, 566 aa, synthetic construct; identical to SEQ ID NO: 630
  REGION 1..566: note = hemagglutinin__InfluenzaA__ABD16494

SEQ ID NO: 722 - protein, 566 aa, synthetic construct; identical to SEQ ID NO: 633
  REGION 1..566: note = hemagglutinin__InfluenzaA__ABD16505

SEQ ID NO: 723 - protein, 566 aa, synthetic construct
  REGION 1..566: note = hemagglutinin__InfluenzaA__ABD16516
MKTIIALSYILCMVFAQKLPGNDNSTATLCLGHHAVPNGTIVKTITNDQIEVTNATELVQSSSTGGICDSPHQILDGENCTLIDALLGDPQCDGFQNKKWDLFIERSKAYSNCYPYDVPDYASLRSLVASSGTLEFNNESFNWTGVTQNGTSSACKRRSNNSFFSRLNWLTHLKFKYPALNVTMPNNEKFDKLYIWGVHHPGTDNDQISLYAQASGRITVSTKRSQQTVIPNIGSRPRVRDIPSRISIYWTIVKPGDILLINSTGNLIAPRGYFKIRSGKSSIMRSDAPIDKCNSECITPNGSIPNDKPFQNVNRITYGACPRYVKQNTLKLATGMRNVPEKQTRGIFGAIAGFIENGWEGMVDGWYGFRHQNSEGIGQAADLKSTQAAINQINGKLNRLIGKTNEKFHQIEKEFSEVEGRIQDLEKYVEDTKVDLWSYNAELLVALENQHTIDLTDSEMNKLFERTKKQLRENAEDMGNGCFKIYHKCDNACIGSIRNGTYDHDVYRDEALNNRFQIKGVELKSGYKDWILWISFAISCFLLCVALLGFIMWACQKGNIRCNICI

SEQ ID NO: 724 - protein, 566 aa, synthetic construct
  REGION 1..566: note = hemagglutinin__InfluenzaA__ABD16527
MKTIIALSYILCLVFAQKLPENDNSTATLCLGHHAVPNGTIVKTITNDQIEVTNATELVQSSSTGGICDSPHQILDGENCTLIDALLGDPQCDGFQNKKWDLFVERSKAYSNCYPYDVPDHASLRSLVASSGTLEFNNESFDWTGVTQNGTSSACKRRSNKSFFSRLNWLTHLKYKYPALNVTMPNNEKFDKLYIWGVHHPGTDSDQISLYAQASGRITVSTKRSQQTVIPNIGSRPRVRDVSSRISIYWTIVKPGDILLINSTGNLIAPRGYFKIRSGKSSIMRSDAPIGKCNSECITPNGSIPNDKPFQNVNRITYGACPRYVKQNTLKLATGMRNVPEKQTRGIFGAIAGFIENGWEGMVDGWYGFRHQNSEGTGQAADLKSTQAAINQINGKLNRLIGKTNEKFHQIEKEFSEVEGRIQDLEKYVEDTKIDLWSYNAELLVALENQHTIDLTDSEMNKLFERTKKQLRENAEDMGNGCFKIYHKCDNACIGSIRNGTYDHDVYRDEALNNRFQIKGVELKSGYKDWILWISFAISCFLLCVALLGFIMWACQKGNIRCDICI

SEQ ID NO: 725 - protein, 566 aa, synthetic construct; identical to SEQ ID NO: 516
  REGION 1..566: note = hemagglutinin__InfluenzaA__ABD16538

SEQ ID NO: 726 - protein, 566 aa, synthetic construct
  REGION 1..566: note = hemagglutinin__InfluenzaA__ABD16549
MKTIIALSYILCLVFAQKLPGNDNSTATLCLGHHAVPNGTIVKTITNDQIEVTNATELVQSSSTGGICDSPHQILDGENCTLIDALLGDPQCDGFQNKKWDLFVERSKAYSNCYPYDVPDYASLRSLIASSGTLEFNNESFNWTGVTQNGTSSACKRRSNSSFFSRLNWLTHLKFKYPALNVTMPNNEEFDKLYIWGVHHPGTYNDQISLYAQASGRITVSTKRSQQTVIPNIGSRPRVRDIPSRISIYWTIVKPGDILLINSTGNLIAPRGYFKIRSGKSSIMRSDAPIGKCNSECITPNGSIPNDKPFQNVNRITYGACPRYVKQNTLKLATGMRNVPEKQTRGIFGAIAGFIENGWEGMVDGWYGFRHQNSEGIGQAADLKSTQAAIDQINGKLNRLIGKTNEKFHQIEKEFSEVEGRIQDLEKYVEDTKIDLWSYNAELLVALENQHTIDLTDSEMNKLFERTKKQLRENAEDMGNGCFKIYHKCDNACIGSIRNGTYDHDVYRDEALNNRFQIKGVELKSGYKDWILWISFAISCFLLCVALLGFIVWACQKGNIRCNICI

SEQ ID NO: 727 - protein, 566 aa, synthetic construct; identical to SEQ ID NO: 630
  REGION 1..566: note = hemagglutinin__InfluenzaA__ABD16560

SEQ ID NO: 728 - protein, 566 aa, synthetic construct
  REGION 1..566: note = hemagglutinin__InfluenzaA__ABD16571
MKTIIALSYIFCLVVAQKLPGNDNSTATLCLGHHAVPNGTIVKTITNDQIEVTNATELVQSSSTGRICNSPHRILDGKNCTLIDALLGDPHCDSFQNKEWDLFVERSKAYSNCYPYDVPDYASLRSLVASSGTLEFINEDFNWTGVAQSGGSYACKRGSVNSFFSRLNWLHESEYKYPALNVTMPNNGKFDKLYIWGVHHPSTDREQTNLYVRASGRVTVSTKRSQQTVIPNIGSRPWVRGLSSRISIYWTIVKPGDILLINSTGNLIAPRGYFKIRTGKSSIMRSDAPIGTCSSECITPNGSIPNDKPFQNVNRITYGACPRYVKQNTLKLATGMRNVPEKQTRGIFGAIAGFIENGWEGMVDGWYGFRHQNSEGTGQAADLKSTQAAIDQINGKLNRLIEKTNEKFHQIEKEFSEVEGRIQDLEKYVEDTKIDLWSYNAELLVALENQHTIDLTDSEMNKLFEKTRKQLRENAEDMGNGCFKIYHKCDNACIGSIRNGTYDHDVYRDEALNNRFQIKGVELKSGYKDWILWISFAISCFLLCVVLLGFIMWACQKGNIRCNICI

SEQ ID NO: 729 - protein, 566 aa, synthetic construct
  REGION 1..566: note = hemagglutinin__InfluenzaA__ABD16718
MKTIIALSYIFCLVFAQKLPGNDNSTATLCLGHHAVPNGTLVKTITNDQIEVTNATELVQSSSTGRICDSPHRILDGKNCTLIDALLGDPHCDGFQNEKWDLFIERSKAFSNCYPYDVPDYASLRSLVASSGTLEFINEGFNWTGVTQSGGSYACKRGSVNSFFSRLNWLYESEYKYPALNVTMPNNGKFDKLYIWGVHHPITEKEQTNLYVRASGRVTVSTKRSQQTVIPNIGSRPWVRGLSSRISIYWTIVKPGDILLINSTGNLIAPRGYFKIRTGKSSIMRSDAPIGTCSSECITPNGSIPNDKPFQNVNKITYGACPRYVKQNTLKLATGMRNVPEKQTRGIFGAIAGFIENGWEGMVDGWYGFRHQNSEGTGQAADLKSTQAAIDQINGKLNRLIEKTNEKFHQIEKEFSEVEGRIQDLEKYVEDTKIDLWSYNAELLVALENQHTIDLTDSEMNKLFEKTRKQLRENAEDMGNGCFKIYHKCDNACIGSIRNGTYDHDVYRDEALNNRFQIKGVELKSGYKDWILWISFAISCFLLCVVLLGFIMWACQKGNIRCNICI

SEQ ID NO: 730 - protein, 566 aa, synthetic construct
  REGION 1..566: note = hemagglutinin__InfluenzaA__ABD16729
MKTIIALSYIFCLVFAQKLPGNDNSTATLCLGHHAVPNGTLVKTITNDQIEVTNATELVQSSSTGRICDSPHRILDGKNCTLIDALLGDPHCDGFQNEKWDLFVERSKAFSNCYPYDVPDYASLRSLVASSGTLEFINEGFNWTGVTQNGGSYTCKRGSVNSFFSRLNWLYESESKYPVLNVTMPNNGKFDKLYIWGVHHPSTDKEQTNLYVRASGKVTVSTKRSQQTVIPNIGSRPWVRGLSSRISIYWTIVKPGDILLINSTGNLIAPRGYFKIRTGKSSIMRSDAPIGTCSSECITPNGSIPNDKPFQNVNKITYGACPRYVKQNTLKLATGMRNVPEKQTRGIFGAIAGFIENGWEGMVDGWYGFRHQNSEGTGQAADLKSTQAAIDQINGKLNRLIEKTNEKFHQIEKEFSEVEGRIQDLEKYVEDTKIDLWSYNAELLVALENQHTIDLTDSEMNKLFEKTRKQLRENAEDMGNGCFKIYHKCDNACIGSIRNGTYDHDVYRDEALNNRFQIKGVELKSGYKDWILWISFAISCFLLCVVLLGFIMWACQKGNIRCNICI

SEQ ID NO: 731 - protein, 566 aa, synthetic construct
  REGION 1..566: note = hemagglutinin__InfluenzaA__ABD16751
MKTIIALSYIFCLVFAQDLPGNDNSTATLCLGHHAVPNGTLVKTITNDQIEVTNATELVHSSSTGKICDNPHRILDGINCTLIDALLGDPHCDGFQNEKWDLFVERSKAFSNCYPYDVPDYASLRSLVASSGTLEFINEGFNWTGVTQNGGSSACKRGPDNGFFSRLNWLYKSGSTYPVQNVTMPNNDNSDKLYIWGVHHPSTDKEQTDLYVQASGKVTVSTKRSQQTVIPNVGSRPWVRGLSSRVSIYWTIVKPGDILVINSNGNLIAPRGYFKMRTGKSSIMRSDAPIGTCSSECITPNGSIPNDKPFQNVNKITYGACPKYVKQNTLKLATGMRNVPEKQTRGIFGAIAGFIENGWEGMIDGWYGFRHQNSEGTGQAADLKSTQAAIDQINGKLNRVIEKTNEKFHQIEKEFSEVEGRIQDLEKYVEDTKIDLWSYNAELLVALENQHTIDLTDSEMNKLFEKTRRQLRENAEDMGNGCFKIYHKCDNACIGSIRNGTYDHDVYRDEALNNRFQIKGVELKSGYKDWILWISFAISCFLLCVVLLGFIMWACQKGNIRCNICI

SEQ ID NO: 732 - protein, 566 aa, synthetic construct; identical to SEQ ID NO: 593
  REGION 1..566: note = hemagglutinin__InfluenzaA__ABD16762

SEQ ID NO: 733 - protein, 566 aa, synthetic construct; identical to SEQ ID NO: 305
  REGION 1..566: note = hemagglutinin__InfluenzaA__ABD17323

SEQ ID NO: 734 - protein, 566 aa, synthetic construct; identical to SEQ ID NO: 562
  REGION 1..566: note = hemagglutinin__InfluenzaA__ABD38134

SEQ ID NO: 735 - protein, 565 aa, synthetic construct; identical to SEQ ID NO: 301
  REGION 1..565: note = hemagglutinin__InfluenzaA__ABD60779

SEQ ID NO: 736 - protein, 566 aa, synthetic construct
  REGION 1..566: note = hemagglutinin__InfluenzaA__ABD60790
MKTIIALSYIFCLVLGQDFPGNDNSTATLCLGHHAVPNGTLVKTITNDQIEVTNATELVQSSSTGKICNNPHRILDGIDCTLIDALLGDPHCDGFQNETWDLFVERSKAFSNCYPYDVPDYASLRSLVASSGTLEFINEGFTWTGVTQNGGSNACKRGPDSGFFSRLNWLYKSGSTYPVLNVTMPNNDNFDKLYIWGVHHPSTDQEQTSLYVQASGRVTVSTKRSQQTIIPNIGSRPWVRGLSSRISIYWTIVKPGDILIINSNGNLIAPRGYFKMRTGKSSIMRSDAPIGTCISECITPNGSIPNDKPFQNVNKITYGACPKYVKQNTLKLATGMRNVPEKQTRGIFGAIAGFIENGWEGMIDGWYGFRHQNSEGTGQAADLKSTQAAIDQINGKLNRIIEKTNEKFHQIEKEFSEVEGRIQDLEKYVEDTKIDLWSYNAELLVALENQHTIDLTDSEMNKLFEKTRRQLRENAEDMGNGCFKIYHKCDNACIGSIRNGTYDHDVYRDEALNNRFQIKGVELKSGYKDWILWISFAISCFLLCVVLLGFIMWACQKGNIRCNICI

SEQ ID NO: 737 - protein, 566 aa, synthetic construct
  REGION 1..566: note = hemagglutinin__InfluenzaA__ABD60801
MKTIIALSYILCLVFAQKLPGNDNSTATLCLGHHAVPNGTLVKTITNDQIEVTNATELVQSSSTGRLCDSPHRILDGKNCTLIDALLGDPHCDGFQNKEWDLFVERSKAYSNCYPYDVPDYASLRSLVASSGTLEFINEDFNWTGVAQDGGSYACRRGSVNSFFSRLNWLHKLEYKYPALNVTMPNNGKFDKLYIWGVHHPSTDSDQTSLYVRASGRVTVSTKRSQQTVIPNIGSRPWVRGQSSRMSIYWTIVKPGDILLINSTGNLIAPRGYFKIRNGKSSIMRSDAPIGNCSSECITPNGSIPNDKPFQNVNRITYGACPRYVKQHTLKLATGMRNVPEKQTRGIFGAIAGFIENGWEGMVDGWYGFRHQNSEGTGQAADLKSTQAAIDQINGKLNRLIEKTNEKFHQIEKEFSEVEGRIQDLEKYVEDTKIDLWSYNAELLVALENQHTIDLTDSEMNKLFERTRKQLRENAEDMGNGCFKIYHKCDNACIGSIRNGTYDHDVYRDEALNNRFQIKGVELKSGYKDWILWISFAISCFLLCVVLLGFIMWACQKGNIRCNICI

SEQ ID NO: 738 - protein, 566 aa, synthetic construct
  REGION 1..566: note = hemagglutinin__InfluenzaA__ABD60812
MKTIIALSYILCLIFAQKLPGNDNSTATLCLGHHAVPNGTIVKTITNDQIEVTNATELVQSSSTGGICDSPHQILDGENCTLIDALLGDPQCDGFQNKKWDLFVERSKAYSNCYPYDVPDYASLRSLVASSGTLEFNNESFNWTGVTQNGTSSACKRRSNNSFFSRLNWLTHLKFKYPALNVTMPNNEKFDKLYIWGVHHPGTDNDQIFLYAQASGRITVSTKRSQQTVIPSIGSRPRVRNIPSRISIYWTIVKPGDILLINSTGNLIAPRGYFKIRSGKSSIMRSDAPIGKCNSECITPNGSIPNDKPFQNVNRITYGACPRYVKQNTLKLATGMRNVPEKQTRGIFGAIAGFIENGWEGMVDGWYGFRHQNSEGIGQAADLKSTQAAINQINGKLNRLIGKTNEKFHQIEKEFSEVEGRIQDLEKYVEDTKIDLWSYNAELLVALENQHTIDLTDSEMNKLFERTKKQLRENAEDMGNGCFKIYHKCDNACIGSIRNGTYDHDVYRDEALNNRFQIKGVELKSGYKDWILWISFAISCFLLCVALLGFIMWACQKGNIRCNICI

SEQ ID NO: 739 - protein, 566 aa, synthetic construct; identical to SEQ ID NO: 633
  REGION 1..566: note = hemagglutinin__InfluenzaA__ABD60823

SEQ ID NO: 740 - protein, 566 aa, synthetic construct
  REGION 1..566: note = hemagglutinin__InfluenzaA__ABD60845
MKTIIALSYILCLVFAQKLPVNDNSTATLCLGHHAVPNGTLVKTITNDHIEVTNATELVQSSSTGRICDSPHQILDGENCTLIDALLGDPHCDGFQNKEWDLFVERSTAYSNCYPYDVPDYASLRSLVASSGTLEFNNESFNWTGVDQNGTSSACKRRSTKSFFSRLNWLHQLKYKYPALNVTMPNNEKFDKLYIWGVHHPSTDSDQISLYAQASGRVTVSTKRSQQTVTPNIGSRPWVRGVSSRISIYWTIVKPGDILLINSTGNLIAPRGYFKIRSGKSSIMRSNALIGKCNSECITPNGSIPNDKPFQNVNRITYGACPRYVKQNTLKLATGMRNVPEKQTRGIFGAIAGFIENGWEGMVDGWYGFRHQNSEGTGQAADLKSTQAAINQINGKLNRLIEKTNEKFHQIEKEFSEVEGRIQDLEKYVEDTKIDLWSYNAELLVALENQHTIDLTDSEMNKLFERTRKQLRENAEDMGNGCFKIYHKCDNACIGSIRNGTYDHDVYRDEALNNRFQIKGVELKSGYKDWILWISFAISCFLLCVVLLGFIMWACQKGNIRCNICI

SEQ ID NO: 741 - protein, 565 aa, synthetic construct
  REGION 1..565: note = hemagglutinin__InfluenzaA__ABD60878
MKVKLLVLLCTFTATYADTICIGYHANNSTDTVDTVLEKNVTVTHSVNLLEDSHNGKLCLLKGIAPLQLGNCSVAGWILGNPECELLISKESWSYIVETPNPENGTCYPGYFADYEELREQLSSVSSFERFEIFPKESSWPNHTVTGVSASCSHNGKSSFYRNLLWLTGKNGLYPNLSKSYANNKEKEVLVLWGVHHPPNIGDQKALYHTENAYVSVVSSHYSRRFTPEIAKRPKVRDQEGRINYYWTLLEPGDTIIFEANGNLIAPRYAFALSRGFGSGIITSNAPMDECDAKCQTPQGAINSSLPFQNVHPVTIGECPKYVRSAKLRMVTGLRNIPSIQSRGLFGAIAGFIEGGWTGMVDGWYGYHHQNEQGSGYAADQKSTQNAINGITNKVNSVIEKMNTQFTAVGKEFNKLERRMENLNKKVDDGFLDIWTYNAELLVLLENERTLDFHDSNVKNLYEKVKSQLKNNAKEIGNGCFEFYHKCNNECMESVKNGTYDYPKYSEESKLNREKIDGVKLESMGVYQILAIYSTVASSLVLLVSLGAISFWMCSNGSLQCRICI

SEQ ID NO: 742 - protein, 565 aa, synthetic construct
  REGION 1..565: note = hemagglutinin__InfluenzaA__ABD60889
MKVKLLVLLCTFTATYADTICIGYHANNSTDTVDTVLEKNVTVTHSVNLLEDSHNGKLCLLKGIAPLQLGNCSVAGWILGNPECELLISKESWSYIVETPNPENGTCYPGYFADYEELREQLSSVSSFERFEIFPKESSWPNHTVTGVSASCSHNGKSSFYRNLLWLTGKNGLYPNLSKSYANNKEKEVLVLWGVHHPPNIGDQRALYHTENAYVSVVSSHYSRRFTPEIAKRPKVRDQEGRINYYWTLLEPGDTIIFEANGNLIAPRYAFALSRGFGSGIITSNAPMDECDAKCQTPQGAINSSLPFQNVHPVTIGECPKYVRSAKLRMVTGLRNIPSIQSRGLFGAIAGFIEGGWTGMVDGWYGYHHQNEQGSGYAADQKSTQNAINGITNKVNSVIEKMNTQFTAVGKEFNKLERRMENLNKKVDDGFLDIWTYNAELLVLLENERTLDFHDSNVKNLYEKVKSQLKNNAKEIGNGCFEFYHKCNNECMESVKNGTYDYPKYSEESKLNREKIDGVKLESMGVYQILAIYSTVASSLVLLVSLGAISFWMCSNGSLQCRICI

SEQ ID NO: 743 - protein, 565 aa, synthetic construct
  REGION 1..565: note = hemagglutinin__InfluenzaA__ABD60900
MKVKRLVLLCTFTATYADTICIGYHANNSTDTVDTVLEKNVTVTHSVNLLEDSHNGKLCLLKGIAPLQLGNCSVAGWILGNPECELLISKESWSYIVETPNPENGTCYPGYFADYEELREQLSSVSSFERFEIFPKESSWPNHTVTGVSASCSHNGKSSFYRNLLWLTGKNGLYPNLSKSYANNKEKEVLVLWGVHHPPNIGDQKALYHTENAYVSVVSSHYSRRFTPEIAKRPKVRDQEGRINYYWTLLEPGDTIIFEANGNLIAPRYAFALSRGFGSGIITSNAPMDECDAKCQTPQGAINSSLPFQNVHPVTIGECPKYVRSAKLRMVTGLRNIPSIQSRGLFGAIAGFIEGGWTGMVDGWYGYHHQNEQGSGYAADQKSTQNAINGITNKVNSVIEKMNTQFTAVGKEFNKLERRMENLNKKVDDGFLDIWTYNAELLVLLENERTLDFHDSNVKNLYEKVKSQLKNNAKEIGNGCFEFYHKCNNECMESVKNGTYDYPKYSEESKLNREKIDGVKLESMGVYQILAIYSTVASSLVLLVSLGAISFWMCSNGSLQCRICI

SEQ ID NO: 744 - protein, 565 aa, synthetic construct
  REGION 1..565: note = hemagglutinin__InfluenzaA__ABD60911
MKAKLMVLLCTFTATYADTICIGYHANNSTDTVDTVLEKNVTVTHSVNLLEDSHNGKLCLLKGIAPLQLGNCSVAGWILGNPECELLISKESWSYIVETPNPENGTCYPGYFADYEELREQLSSVSSFERFEIFPKESSWPNHTVTGVSASCSHNGKSSFYRNLLWLTGKNGLYPNLSKSYANNKEKEVLVLWGVHHPPNIGDQRALYHTENAYVSVVSSHYSRRFTPEIAKRPKVRDQEGRINYYWTLLEPGDTIIFEANGNLIAPWYAFALSRGFGSGIITSNAPMGECDAKCQTPQGAINSSLPFQNVHPVTIGECPKYVRSAKLRMVTGLRNIPSIQSRGLFGAIAGFIEGGWTGMVDGWYGYHHQNEQGSGYAADQKSTQNAIDGITNKVNSIIEKMNTQFTAVGKEFNKLERRMENLNKKVDDGFLDIWTYNAELLVLLENERTLDFHDSNVKNLYEKVKSQLKNNAKEIGNGCFEFYHKCNNECMESVKNGTYDYPKYSEESKLNREKIDGVKLESMGVYQILAIYSTVASSLVLLVSLGAISFWMCSNGSLQCRICI

SEQ ID NO: 745 - protein, 566 aa, synthetic construct; identical to SEQ ID NO: 32
  REGION 1..566: note = hemagglutinin__InfluenzaA__ABD60922

SEQ ID NO: 746 - protein, 566 aa, synthetic construct
  REGION 1..566: note = hemagglutinin__InfluenzaA__ABD60933
MKAKLLVLLCALSATDADTICIGYHANNSTDTVDTVLEKNVTVTHSVNLLEDSHNGKLCRLKGIAPLQLGKCSIAGWILGNPECESLVSKKSWSYIAETPNSENGTCYPGYFADYEELREQLSSVSSFERFEIFPKERSWPKHNVTRGVTASCSHKGKSSFYRNLLWLTEKNGSYPNLSKSYVNNKEKEVLVLWGVHHPSNIEDQKTIYRKENAYVSVVSSNYNRRFTPEIAERPKVRGQAGRINYYWTLLEPGDTIIFEANGNLIAPWHAFALNRGFGSGIITSNASMDECDTKCQTPQGAINSSLPFQNIHPVTIGECPKYVRSTKLRMVTGLRNIPSIQSRGLFGAIAGFIEGGWTGMIDGWYGYHHQNEQGSGYAADQKSTQNAINGITNKVNSVIEKMNTQFTAVGKEFNKLEKRMENLNKKVDDGFLDIWTYNAELLVLLENERTLDFHDSNVKNLYEKVKSQLKNNAKEIGNGCFEFYHKCNNECMESVKNGTYDYPKYSEESKLNREKIDGVKLESMGVYQILAIYSTVASSLVLLVSLGAISFWMCSNGSLQCRICI

SEQ ID NO: 747 - protein, 566 aa, synthetic construct
  REGION 1..566: note = hemagglutinin__InfluenzaA__ABD60944
MKAKLLVLLCALSATDADTICIGYHANNSTDTVDTVLEKNVTVTHSVNLLEDSHNGKLCRLKGIAPLQLGKCSIAGWILGNPECESLFSKKSWSYIAETPNSENGTCYPGYFADYEELREQLSSVSSFERFEIFPKERSWPKHNVTRGVTASCSHKGKSSFYRNLLWLTEKNGSYPNLSKSYVNNKEKEVLVLWGVHHPSNIEDQKTIYRKENAYVSVVSSNYNRRFTPEIAERPKVRGQAGRINYYWTLLEPGDTIIFEANGNLIAPWYAFALSRGFGSGIITSNASMDECDTKCQTPQGAINSSLPFQNVHPVTIGECPKYVRSTKLRMVTGLRNIPSIQSRGLFGAIAGFIEGGWTGMIDGWYGYHHQNEQGSGYAADQKSTQNAINGITNKVNSVIEKMNTQFTAVGKEFNKLEKRMENLNKKVDDGFLDIWTYNAELLVLLENERTLDFHDSNVKNLYEKVKSQLKNNAKEIGNGCFEFYHKCNNECMESVKNGTYDYPKYSEESKLNREKIDGVKLESMGVYQILAIYSTVASSLVLLVSLGAISFWMCSNGSLQCRICI

SEQ ID NO: 748 - protein, 566 aa, synthetic construct
  REGION 1..566: note = hemagglutinin__InfluenzaA__ABD60955
MKAKLLVLLCAFTATYADTICIGYHANNSTDTVDTVLEKNVTVTHSVNLLEDSHNGKLCRLKGIAPLQLGNCSVAGWILGNPKCESLFSKESWSYIAETPNPENGTCYPGYFADYEELREQLSSVSSFERFEIFPKESSWPNHTVTKGVTTSCSHNGKSSFYRNLLWLTEKNGLYPNLSKSYVNNKEKEVLVLWGVHHPSNIRDQRAIYHTENAYVSVVSSHYSRRFTPEIAKRPKVRDQEGRINYYWTLLEPGDTIIFEANGNLIAPWYAFALSRGFGSGIITSNASMDECDAKCQTPQGAINSSLPFQNVHPVTIGECPKYVRSTKLRMVTGLRNIPSIQSRGLFGAIAGFIEGGWTGMIDGWYGYHHQNEQGSGYAADQKSTQNAINGITNKVNSVIEKMNTQFTAVGKEFNKLERRMENLNKKVDDGFLDIWTYNAELLVLLENGRTLDFHDSNVKNLYEKVKSQLKNNAKEIGNGCFEFYHKCNNECMESVKNGTYDYPKYSEESKLNRGKIDGVKLESMGVYQILAIYSTVASSLVLLVSLGAISFWMCSNGSLQCRICI

SEQ ID NO: 749 - protein, 566 aa, synthetic construct; identical to SEQ ID NO: 32
  REGION 1..566: note = hemagglutinin__InfluenzaA__ABD61260

SEQ ID NO: 750 - protein, 566 aa, synthetic construct; identical to SEQ ID NO: 32
  REGION 1..566: note = hemagglutinin__InfluenzaA__ABD61271

SEQ ID NO: 751 - protein, 566 aa, synthetic construct; identical to SEQ ID NO: 286
  REGION 1..566: note = hemagglutinin__InfluenzaA__ABD61282

SEQ ID NO: 752 - protein, 566 aa, synthetic construct; identical to SEQ ID NO: 516
  REGION 1..566: note = hemagglutinin__InfluenzaA__ABD61293

SEQ ID NO: 753 - protein, 566 aa, synthetic construct; identical to SEQ ID NO: 738
  REGION 1..566: note = hemagglutinin__InfluenzaA__ABD61304

SEQ ID NO: 754 - protein, 566 aa, synthetic construct; identical to SEQ ID NO: 650
  REGION 1..566: note = hemagglutinin__InfluenzaA__ABD61315

SEQ ID NO: 755 - protein, 566 aa, synthetic construct; identical to SEQ ID NO: 72
  REGION 1..566: note = hemagglutinin__InfluenzaA__ABD61337

SEQ ID NO: 756 - protein, 566 aa, synthetic construct
  REGION 1..566: note = hemagglutinin__InfluenzaA__ABD61348
MKTIIALSYILCLVFAQKLPVNDNSTATLCLGHHAVPNGTLVKTITNDHIEVTNATELVQSSSTGRICDSPHQILDGENCTLIDALLGDPHCDGFQNKEWDLFVERSTAYSNCYPYDVPDYASLRSLVASSGTLEFNNESFNWTGVAQNGTSSACKRRSIKSFFSRLNWLHQLKYKYPALNVTMPNNEKFDKLYIWGVHHPSTDSDQISLYAQASGRVTVSTKRSQQTVIPNIGSRPWVRGVSSRISIYWTIVKPGDILLINSTGNLIAPRGYFKIRSGKSSIMRSNAPIGKCNSECITPNGSIPNNKPFQNVNRITYGACPRYVKQNTLKLATGMRNVPEKQTRGIFGAIAGFIENGWEGMVDGWYGFRHQNSEGTGQAADLKSTQAAINQINGKLNRLIEKTNEKFHQIEKEFSEVEGRIQDLEKYVEDTKIDLWSYNAELLVALENQHTIDLTDSEMNKLFERTRKQLRENAEDMGNGCFKIYHKCDNACIGSIRNGTYDHDVYRDEALNNRFQIKGVELKSGYKDWILWISFAISCFLLCVVLLGFIMWACQKGNIRCNICI

SEQ ID NO: 757 - protein, 566 aa, synthetic construct; identical to SEQ ID NO: 72
  REGION 1..566: note = hemagglutinin__InfluenzaA__ABD61359

SEQ ID NO: 758 - protein, 566 aa, synthetic construct; identical to SEQ ID NO: 710
  REGION 1..566: note = hemagglutinin__InfluenzaA__ABD61370

SEQ ID NO: 759 - protein, 566 aa, synthetic construct; identical to SEQ ID NO: 650
  REGION 1..566: note = hemagglutinin__InfluenzaA__ABD61381

SEQ ID NO: 760 - protein, 566 aa, synthetic construct
  REGION 1..566: note = hemagglutinin__InfluenzaA__ABD61392
MKTIIALSYILCLVFAQKLPGNDNSTATLCLGHHAVPNGTLVKTITNDQIEVTNATELVQSSSTGGICDSPHQILDGENCTLIDALLGDPHCDGFQNKEWDLFVERSKAYSNCYPYDVPDYASLRSLVASSGTLEFNNESFNWTGVAQNGTSSACKRGSNKSFFSRLNWLHQLKYKYPALNVTMPNNEKFDKLYIWGVHHPSTDSDQISLYAQAPGRVTVSTKRSQQTVIPNIGSRPWVRGVSSRISIYWTIVKPGDILLINCTGNLIAPRGYFKIRSGKSSIMRSDASIGKCNSECITPNGSIPNDKPFQNVNRITYGACPRYVKQNTLKLATGMRNVPEKQTRGIFGAIAGFIENGWEGMVDGWYGFRHQNSEGTGQAADLKSTQAAINQINGKLNRLIEKTNEKFHQIEKEFSEVEGRIQDLEKYVEDTKIDLWSYNAELLVALENQHTIDLTDSEMNKLFERTKKQLRENAEDMGNGCFKIYHKCDNACIGSIRNGTYDHDVYRDEALNNRFQIKGVELKSGYKDWILWISFAISCFLLCVVLLGFIMWACQKGNIRCNICI

SEQ ID NO: 761 - protein, 566 aa, synthetic construct; identical to SEQ ID NO: 740
  REGION 1..566: note = hemagglutinin__InfluenzaA__ABD61403

SEQ ID NO: 762 - protein, 566 aa, synthetic construct
  REGION 1..566: note = hemagglutinin__InfluenzaA__ABD61529
MKTIIALSYIFCLVFAQKLPGNDNSTATLCLGHHAVPNGTLVKTITNDQIEVTNATELVQSSSTGRICDSPHRILDGKNCTLIDALLGDPHCDGFQNEKWDLFVERSKAFSNCYPYDVPDYASLRSLVASSGTLEFINEGFNWTGVTQSGGSYACKRGSVNSFFSRLNWLYESESKYPVLNVTMPNNGKFDKLYIWGVHHPSTDKEQTNLYVRASGRVTVSTKRSQQTVIPNIGSRPWVRGLSSRISIYWTIVKPGDILLINSTGNLIAPRGYFKIRTGKSSIMRSDAPIGTCSSECITPNGSIPNDKPFQNVNKITYGACPRYVKQNTLKLATGMRNVPEKQTRGIFGAIAGFIENGWEGMVDGWYGFRHQNSEGTGQAADLKSTQAAIDQINGRLNRLIEKTNEKFHQIEKEFSEVEGRIQDLEKYVEDTKIDLWSYNAELLVALENQHTIDLTDSEMNKLFEKTRKQLRENAEDMGNGCFKIYHKCDNACIGSIRNGTYDHDVYRDEALNNRFQIKGVELKSGYKDWILWISFAISCFLLCVVLLGFIMWACQKGNIRCNICI

SEQ ID NO: 763 - protein, 565 aa, synthetic construct; identical to SEQ ID NO: 741
  REGION 1..565: note = hemagglutinin__InfluenzaA__ABD61540

SEQ ID NO: 764 - protein, 566 aa, synthetic construct
  REGION 1..566: note = hemagglutinin__InfluenzaA__ABD61757
MKTIIALSYIFCLVFAQDLPGNDNSTATLCLGHHAVPNGTLVKTITNDQIEVTNATELVQSSSTGKICDNPHRILDGINCTLIDALLGDPHCDGFQNEKWDLFVERSKAFSNCYPYDVPDYASLRSLVASSGTLEFINEGFNWTGVTQNGGSSACKRGPDNGFFSRLNWLYKSGSTYPVQNVTMPNNDNSDKLYIWGVHHPSTDKEQTDLYVQASGKVTVSTKRSQQTVIPNVGSRPWVRGLSSRVSIYWTIVKPGDILVINSNGNLIAPRGYFKMRTGKSSIMRSDAPIGTCSSECITPNGSIPNDKPFQNVNKITYGACPKYVKQNTLKLATGMRNVPEKQTRGIFGAIAGFIENGWEGMIDGWYGFRHQNSEGTGQAADLKSTQAAIDQINGKLNRVIEKTNEKFHQIEKEFSEVEGRIQDLEKYVEDTKIDLWSYNAELLVALENQHTIDLTDSEMNKLFEKTRRQLRENAEDMGNGCFKIYHKCDNACIGSIRNGTYDHDVYRDEALNNRFQIKGVELKSGYKDWILWISFAISCFLLCVVLLGFIMWACQKGNIRCNICI

SEQ ID NO: 765 - protein, 566 aa, synthetic construct
  REGION 1..566: note = hemagglutinin__InfluenzaA__ABD61777
MKTIIALSYIFCLGFAQKLPGNDNSTATLCLGHHAVPNGTLVKTITNDQIEVTNATELVQSSSTGRICDSPHRILDGKNCTLIDALLGDPHCDGFQNEKWDLFVERSKAFSNCYPYDVPDYASLRSLVASSGTLEFINEGFNWTGVTQSGGSYACKRGSVNSFFSRLNWLYESESKYPALNVTMPNNGKFDKLYIWGVHHPSTDKEQTNLYVRASGRVTVSTKRSQQTVIPNIGSRPWVRGLSSRISIYWTIVKPGDILLINSTGNLIAPRGYFKIRTGKSSIMRSDAPIGTCSSECITPNGSIPNDKPFQNVNKITYGACPRYVKQNTLKLATGMRNVPEKQTRGIFGAIAGFIENGWEGMVDGWYGFRHQNSEGTGQAADLKSTQAAIDQINGKLNRLIEKTNEKFHQIEKEFSEVEGRIQDLEKYVEDTKIDLWSYNAELLVALENQHTIDLTDSEMNKLFEKTRKQLRENAEDMGNGCFKIYHKCDNACIGSIRNGTYDHDVYRDEALNNRFQIKGVELKSGYKDWILWISFAISCFLLCVVLLGFIMWACQKGNIRCNICI

SEQ ID NO: 766 - protein, 566 aa, synthetic construct
  REGION 1..566: note = hemagglutinin__InfluenzaA__ABD77598
MKTIIALSYILCLVFAQKLPVNDNSTATLCLGHHAVPNGTLVKTITNDHIEVTNATELVQSSPTGRICDSPHQILDGENCTLIDALLGDPHCDGFQNKEWDLFVERSTAYSNCYPYDVPDYASLRSLVASSGTLEFNNESFNWTGVAQNGTSSACKRRSIKSFFSRLNWLHQLKYKYPALNVTMPNNEKFDKLYIWGVHHPSTDSDQISLYAQASGRVTVSTKRSQQTVIPNIGSRPWVRGVSSRISIYWTIVKPGDILLINSTGNLIAPRGYFKIRSGKSSIMRSNAPIGKCNSECITPNGSIPNDKPFQNVNRITYGACPRYVKQNTLKLATGMRNVPEKQTRGIFGAIAGFIENGWEGMVDGWYGFRHQNSEGTGQAADLKSTQAAINQINGKLNRLIEKTNEKFHQIEKEFSEVEGRIQDLEKYVEDTKIDLWSYNAELLVALENQHTIDLTDSEMNKLFERTRKQLRENAEDMGNGCFKIYHKCDNACIGSIRNGTYDHDVYRDEALNNRFQIKGVELKSGYKDWILWISFAISCFLLCVVLLGFIMWACQKGNIRCNICI

SEQ ID NO: 767 - protein, 566 aa, synthetic construct; identical to SEQ ID NO: 650
  REGION 1..566: note = hemagglutinin__InfluenzaA__ABD77609

SEQ ID NO: 768 - protein, 566 aa, synthetic construct; identical to SEQ ID NO: 650
  REGION 1..566: note = hemagglutinin__InfluenzaA__ABD77620

SEQ ID NO: 769 - protein, 566 aa, synthetic construct; identical to SEQ ID NO: 650
  REGION 1..566: note = hemagglutinin__InfluenzaA__ABD77631

SEQ ID NO: 770 - protein, 566 aa, synthetic construct; identical to SEQ ID NO: 650
  REGION 1..566: note = hemagglutinin__InfluenzaA__ABD77642

SEQ ID NO: 771 - protein, 566 aa, synthetic construct; identical to SEQ ID NO: 650
  REGION 1..566: note = hemagglutinin__InfluenzaA__ABD77653

SEQ ID NO: 772 - protein, 565 aa, synthetic construct; identical to SEQ ID NO: 741
  REGION 1..565: note = hemagglutinin__InfluenzaA__ABD77708

SEQ ID NO: 773 - protein, 565 aa, synthetic construct
  REGION 1..565: note = hemagglutinin__InfluenzaA__ABD77719
MKVKLLVLLCTFTATYADTICIGYHANNSTDTVDTVLEKNVTVTHSVNLLEDSHNGKLCLLKGIAPLQLGNCSVAGWILGNPECELLISKESWSYIVETPNPENGTCYPGYFADYEELREQLSSVSSFERFEIFPKESSWPNHTVTGVSASCSHNGKSSFYRNLLWLTGKNGLYPNLSKSYANNKEKEVLVLWGVHHPPNIGDQRALYHTENAYVSVVSSHYSRRFTPEIAKRPKVRNQEGRINYYWTLLEPGDTIIFEANGNLIAPRYAFALSRGFGSGIITSNAPMDECDAKCQTPQGAINSSLPFQNVHPVTIGECPKYVRSAKLRMVTGLRNIPSIQSRGLFGAIAGFIEGGWTGMVDGWYGYHHQNEQGSGYAADQKSTQNAINGITNKVNSVIEKMNTQFTAVGKEFNKLERRMENLNKKVDDGFLDIWTYNAELLVLLENERTLDFHDSNVKNLYEKVKSQLKNNAKEIGNGCFEFYHKCNNECMESVKNGTYDYPKYSEESKLNREKIDGVKLESMGVYQILAIYSTVASSLVLLVSLGAISFWMCSNGSLQCRICI

SEQ ID NO: 774 - protein, 565 aa, synthetic construct; identical to SEQ ID NO: 741
  REGION 1..565: note = hemagglutinin__InfluenzaA__ABD77730

SEQ ID NO: 775 - protein, 566 aa, synthetic construct; identical to SEQ ID NO: 650
  REGION 1..566: note = hemagglutinin__InfluenzaA__ABD77752

SEQ ID NO: 776 - protein, 566 aa, synthetic construct; identical to SEQ ID NO: 650
  REGION 1..566: note = hemagglutinin__InfluenzaA__ABD77763

SEQ ID NO: 777 - protein, 566 aa, synthetic construct
  REGION 1..566: note = hemagglutinin__InfluenzaA__ABD77774
MKTIIALSYILCLVFAQKLPVNDNSTATLCLGHHAVPNGTLVKTITNDNIEVTNATELVQSSSTGRICDSPHQILDGENCTLIDALLGDPHCDGFQNKEWDLFVERSTAYSNCYPYDVPDYASLRSLVASSGTLEFNNESFNWTGVDQNGTSSACKRRSNKSFFSRLNWLHQLKYKYPALNVTMPNNEKFDKLYIWGVHHPSTDSDQISLYAQASGRVTVSTKRSQQTVIPNIGSRPWVRGVSSRISIYWTIVKPGDILLINSTGNLIAPRGYFKIRSGKSSIMRSNAPIGKCNSECITQNGSIPNDKPFQNVNRITYGACPRYVKQNTLKLATGMRNVPEKQTRGIFGAIAGFIENGWEGMVDGWYGFRHQNSEGTGQAADLKSTQAAINQINGKLNRLIEKTNEKFHQIEKEFSEVEGRIQDLEKYVEDTKIDLWSYNAELLVALENQHTIDLTDSEMNKLFERTRKQLRENAEDMGNGCFKIYHKCDNACIGSIRNGTYDHDVYRDEALNNRFQIKGVELKSGYKDWILWISFAISCFLLCVVLLGFIMWACQKGNIRCNICI

SEQ ID NO: 778 - protein, 566 aa, synthetic construct; identical to SEQ ID NO: 777
  REGION 1..566: note = hemagglutinin__InfluenzaA__ABD77785

SEQ ID NO: 779 - protein, 566 aa, synthetic construct
  REGION 1..566: note = hemagglutinin__InfluenzaA__ABD77807
MKAKLLILLCALSATDADTICIGYHANNSTDTVDTVLEKNVTVTHSVNLLEDSHNGKLCRLKGIAPLQLGKCNIAGWILGNPECESLLSKRSWSYIAETPNSENGTCYPGDFADYEELREQLSSVSSFERFEIFPKERSWPKHNITRGVTAACSHAGKSSFYKNLLWLTETNGSYPKLSKSYVNNKEKEVLVLWGVHHPSNIEDQKTLYRKENAYVSVVSSNYNRRFTPEIAERPKVRGQAGRMNYYWTLLEPGDTIIFEANGNLIAPWYAFALSRGFGSGIITSNASMDECDTKCQTPQGAINSSLPFQNIHPVTIGECPKYVKSTKLRMVTGLRNIPSIQSRGLFGAIAGFIEGGWTGMIDGWYGYHHQNEQGSGYAADQKSTQNAINGITNKVNSVIEKMNTQFTAVGKEFNKLEKRMENLNKKVDDGFLDIWTYNAELLVLLENERTLDFHDSNVKNLYEKVKNQLRNNAKEIGNGCFEFYHKCNNECMESVKNGTYDYPKYSEESKLNREKIDGVKLESMGVYQILAIYSTVASSLVLLVSLGAISFWMCSNGSLQCRICI

SEQ ID NO: 780 - protein, 566 aa, synthetic construct
  REGION 1..566: note = hemagglutinin__InfluenzaA__ABD77818
MKAKLLVLLCALSATDADTICIGYHANNSTDTVDTVLEKNVTVTHSVNLLEDSHNGKLCRLKGIAPLQLGKCSIAGWILGNPECESLFSKKSWSYIAETPNSENGTCYPGYFADYEELREQLSSVSSFERFEIFPKESSWPKHTVTRGVTASCSHKGKSSFYRNLLWLTEKNGSYPNLSKSYVNNKEKEVLVLWGVHHPSNIEDQKTIYRKENAYVSVVSSHYNRRFTPEIAKRPKVRDQEGRINYYWTLLEPGDTIIFEANGNLIAPWYAFALSRGFGSGIITSNASMDECDAKCQTPQGAINSSLPFQNVHPVTIGECPKYVRSTKLRMVTGLRNIPSIQSRGLFGAIAGFIEGGWTGMIDGWYGYHHQNEQGSGYAADQKSTQNAINGITNKVNSVIEKMNTQFTAVGKEFNKLEKRMENLNKKVDDGFLDIWTYNAELLVLLENERTLDFHDSNVKNLYEKVKSQLKSNAKEIGNGCFEFYHKCNNECMESVKNGTYDYPKYSEESKLNREKIDGVKLESMGVYQILAIYSTVASSLVLLVSLGAISFWMCSNGSLQCRICI

SEQ ID NO: 781 - protein, 566 aa, synthetic construct
  REGION 1..566: note = hemagglutinin__InfluenzaA__ABD77829
MKTIIALSYILYLVFAQKLPGNDNSTATLCLGHHAVPNGTLVKTITNDQIEVTNATELVQSSSTGRLCDSPHRILDGKNCTLIDALLGDPHCDGFQNKEWDLFVERSKAYSDCYPYDVPDYASLRSLVASSGTLEFTNEGFNWTGVAQNGTSYACKRGSVKSFFSRLNWLHKLEYKYPALNVTMPNNDKFDKLYIWGVHHPSTDSDQTSLYVQASGRVTVSTKRSQQTVIPNIGSRPWVRGVSSRISIYWTIVKPGDILLINSTGNLIAPRGYFKIRSGKSSIMRSDAPIGNCNSECITPNGSIPNDKPFQNVNRITYGACPRYVKQNTLKLATGMRNVPEKQTRGIFGAIAGFIENGWEGMVDGWYGFRHQNSEGTGQAADLKSTQAAINQINGKLNRLIEKTNEKFHQIEKEFSEVEGRIQDLEKYVEDTKIDLWSYNAELLVALENQHTIDLTDSEMNKLFERTRKQLRENAEDMGNGCFKIYHKCDNACIGSIRNGTYDHDVYRDEALNNRFQIKGVELKSGYKDWILWISFAISCFLLCVVLLGFIMWACQKGNIRCNICI

SEQ ID NO: 782 - protein, 566 aa, synthetic construct
  REGION 1..566: note = hemagglutinin__InfluenzaA__ABD77862
MKTIIALSYILCLVFAQKLPGNDNSTATLCLGHHAVPNGTLVKTITNDQIEVTNATELVQSSSTGRICDSPHRILDGKNCTLIDALLGDPHCDGFQNKEWDLFVERSKAYSDCYPYDVPDYASLRSLVASSGTLEFTNEGFNWTGVAQDGTSYACKRGSVKSFFSRLNWLHKLEYKYPALNVTMPNNDKFDKLYIWGVHHPSTDSDQTSIYVQASGRVTVSTKRSQQTVIPNIGSRPWVRGVSSRISIYWTIVKPGDILLINSTGNLIAPRGYFKIRSGKSSIMRSDAPIGNCNSECITPNGSIPNDKPFQNVNRITYGACPRYVKQNTLKLATGMRNVPEKQTRGIFGAIAGFIENGWEGMVDGWYGFRHQNSEGTGQAADLKSTQAAINQINGKLNRLIEKTNEKFHQIEKEFSEVEGRIQDLEKYVEDTKIDLWSYNAELLVALENQHTIDLTDSEMNKLFERTRKQLRENAEDMGNGCFKIYHKCDNACIGSIRNGTYDHDVYRDEALNNRFQIKGVELKSGYKDWILWISFAISCFLLCVVLLGFIMWACQKGNIRCNICI

SEQ ID NO: 783 - protein, 566 aa, synthetic construct
  REGION 1..566: note = hemagglutinin__InfluenzaA__ABD77884
MKTIIALSYILCLVFAQKLPGNDNSTATLCLGHHAVPNGTLVKTITNDQIEVTNATELVQGSSTGRICDSPHRILDGKNCTLIDALLGDPHCDGFQNKEWDLFVERSKAYSNCYPYDVPDYASLRSLVASSGTLEFNNESFNWTGVAQNGTSYACKRRSVKSFFSRLNWLHKLEYKYPALNVTMPNNDKFDKLYIWGVHHPSTDSDQTSLYVQASGRVTVSTKRSQQTVIPNIGSRPWVRGVSSRISIYWTIVKPGDILLINSTGNLIAPRGYFKIRSGKSSIMRSDAPIDNCNSECITPNGSIPNDKPFQNVNRITYGACPRYVKQNTLKLATGMRNVPEKQTRGIFGAIAGFIENGWEGMVDGWYGFRHQNSEGTGQAADLKSTQAAINQINGKLNRLIEKTNEKFHQIEKEFSEVEGRIQDLEKYVEDTKIDLWSYNAELLVALENQHTIDLTDSEMNKLFERTRKQLRENAEDMGNGCFKIYHKCDNACIGSIRNGTYDHDVYRDEALNNRFQIKGVELKSGYKDWILWISFAISCFLLCVVLLGFIMWACQKGNIRCNICI

SEQ ID NO: 784 - protein, 566 aa, synthetic construct
  REGION 1..566: note = hemagglutinin__InfluenzaA__ABD77895
MKTIIALSYILCLVFAQKLPGNDNSTATLCLGHHAVPNGTLVKTITNDQIEVTNATELVQSSSTGRICDSPHRILDGKNCTLIDALLGDPHCDGFQNKEWDLFVERSKAYSNCYPYDVPDYASLRSLVASSGTLEFNNESFNWTGVAQNGTSYACKRRSVKSFFSRLNWLHKLEYKYPALNVTMPNNDKFDKLYIWGVHHPSTDSDQTSLYVQASGRVTVSTKRSQQTVIPNIGSRPWVRGISSRISIYWTIVKPGDILLINSTGNLIAPRGYFKIRSGKSSIMRSDAPIDNCNSECITPNGSIPNDKPFQNVNRITYGACPRYVKQNTLKLATGMRNVPEKQTRGIFGAIAGFIENGWEGMVDGWYGFRHQNSEGTGQAADLKSTQAAINQISGKLNRLIEKTNEKFHQIEKEFSEVEGRIQDLEKYVEDTKIDLWSYNAELLVALENQHTIDLTDSEMNKLFERTRKQLRENAEDMGNGCFKIYHKCDNACIGSIRNGTYDHDVYRDEALNNRFQIKGVELKSGYKDWILWISFAISCFLLCVVLLGFIMWACQKGNIRCNICI

SEQ ID NO: 785 - protein, 566 aa, synthetic construct; identical to SEQ ID NO: 783
  REGION 1..566: note = hemagglutinin__InfluenzaA__ABD77906

SEQ ID NO: 786 - protein, 565 aa, synthetic construct
  REGION 1..565: note = hemagglutinin__InfluenzaA__ABD77917
MKVKLLVLLCTFTATYADTICIGYHANNSTDTVDTVLEKNVTVTHSVNLLEDSHNGKLCLLKGIAPLQLGNCSVAGWILGNPECELLISKESWSYIVETPNPENGTCYPGYFADYEELREQLSSVSSFERFEIFPKESSWPNHTVTGVSASCSHNGKSSFYRNLLWLTGKNGLYPNLSKSYANNKEKEVLVLWGVHHPPNIGNQKALYHTENAYVSVVSSHYSRRFTPEIAKRPKVRDQEGRINYYWTLLEPGDTIIFEANGNLIAPRYAFALSRGFGSGIITSNAPMDECDAKCQTPQGAINSSLPFQNVHPVTIGECPKYVRSAKLRMVTGLRNIPSIQSRGLFGAIAGFIEGGWTGMVDGWYGYHHQNEQGSGYAADQKSTQNAINGITNKVNSVIEKMNTQFTAVGKEFNKLERRMENLNKKVDDGFLDIWTYNAELLVLLENERTLDFHDSNVKNLYEKVKSQLKNNAKEIGNGCFEFYHKCNNECMESVKNGTYDYPKYSEESKLNREKIDGVKLESMGVYQILAIYSTVASSLVLLVSLGAISFWMCSNGSLQCRICI

SEQ ID NO: 787 - protein, 565 aa, synthetic construct
  REGION 1..565: note = hemagglutinin__InfluenzaA__ABD77928
MKVKLLVLLCTFTATYADTICIGYHANNSTDTVDTVLEKNVTVTHSVNLLEDSHNGKLCLLKGIAPLQLGNCSVAGWILGNPECELLISKESWSYIVETPNPENGTCYPGYFADYEELREQLSSVSSFERFEIFPKESSWPNHTVTGVSASCSHNGKSSFYRNLLWLTGKNGLYPNLSKSYANNKEKKVLVLWGVHHPPNIGDQKALYHTENAYVSVVSSHYSRRFTPEIAKRPKVRDQEGRINYYWTLLEPGDTIIFEANGNLIAPRYAFALSRGFGSGIITSNAPMDECDAKCQTPQGAINSSLPFQNVHPVTIGECPKYVRSAKLRMVTGLRNIPSIQSRGLFGAIAGFIEGGWTGMVDGWYGYHHQNEQGSGYAADQKSTQNAINGITNKVNSVIEKMNTQFTAVGKEFNKLERRMENLNKKVDDGFLDIWTYNAELLVLLENERTLDFHDSNVKNLYEKVKSQLKNNAKEIGNGCFEFYHKCNNECMESVKNGTYDYPKYSEESKLNREKIDGVKLESMGVYQILAIYSTVASSLVLLVSLGAISFWMCSNGSLQCRICI

SEQ ID NO: 788 - protein, 565 aa, synthetic construct; identical to SEQ ID NO: 742
  REGION 1..565: note = hemagglutinin__InfluenzaA__ABD77939

SEQ ID NO: 789 - protein, 565 aa, synthetic construct; identical to SEQ ID NO: 742
  REGION 1..565: note = hemagglutinin__InfluenzaA__ABD77950

SEQ ID NO: 790 - protein, 565 aa, synthetic construct; identical to SEQ ID NO: 741
  REGION 1..565: note = hemagglutinin__InfluenzaA__ABD77961

SEQ ID NO: 791 - protein, 565 aa, synthetic construct; identical to SEQ ID NO: 742
  REGION 1..565: note = hemagglutinin__InfluenzaA__ABD77983

SEQ ID NO: 792 - protein, 565 aa, synthetic construct; identical to SEQ ID NO: 742
  REGION 1..565: note = hemagglutinin__InfluenzaA__ABD77994

SEQ ID NO: 793 - protein, 565 aa, synthetic construct; identical to SEQ ID NO: 741
  REGION 1..565: note = hemagglutinin__InfluenzaA__ABD78005

SEQ ID NO: 794 - protein, 565 aa, synthetic construct; identical to SEQ ID NO: 741
  REGION 1..565: note = hemagglutinin__InfluenzaA__ABD78016

SEQ ID NO: 795 - protein, 565 aa, synthetic construct; identical to SEQ ID NO: 742
  REGION 1..565: note = hemagglutinin__InfluenzaA__ABD78027

SEQ ID NO: 796 - protein, 565 aa, synthetic construct; identical to SEQ ID NO: 742
  REGION 1..565: note = hemagglutinin__InfluenzaA__ABD78038

SEQ ID NO: 797 - protein, 566 aa, synthetic construct; identical to SEQ ID NO: 777
  REGION 1..566: note = hemagglutinin__InfluenzaA__ABD78049

SEQ ID NO: 798 - protein, 565 aa, synthetic construct; identical to SEQ ID NO: 296
  REGION 1..565: note = hemagglutinin__InfluenzaA__ABD78060

SEQ ID NO: 799 - protein, 565 aa, synthetic construct
  REGION 1..565: note = hemagglutinin__InfluenzaA__ABD78071
MKAKLLVLLCTFTATYADTICIGYHANNSTDTVDTVLEKNVTVTHSVNLLEDSHNGKLCLLKGIAPLQLGNCSVAGWILGNPECELLISKESWSYIVETPNPENGTCYPGYFADYEELREQLSSVSSFERFEIFPKGSSWPNHTVTGVSASCSHNGKSSFYRNLLWLTGKNGLYPNLSMSYVNNKEKEVLVLWGVHHPPNIGDQRALYHTENAYVSVVSSHYSRRFTPEIAKRPKVRDQEGRINYYWTLLEPGDTIIFEANGNLIAPWYAFALSGGFGSGIITSNAPMGECDAKCQTPQGAINSSLPFQNVHPVTIGECPKYVRSAKLRMVTGLRNIPSIQSRGLFGAIAGFIEGGWTGMVDGWYGYHHQNEQGSGYAADQKSTQNAINGITNKVNSVIEKMNTQFTAVGKEFNKLERRMENLNKKVDDGFLDIWTYNAELLVLLENERTLDFHDSNVKNLYEKVKSQLKNNAKEIGNGCFEFYHKCNNECMESVKNGTYDYPKYSEESKLNREKIDGVKLESMGVYQILAIYSTVASSLVLLVSLGAISFWMCSNGSLQCRICI

SEQ ID NO: 800 - protein, 565 aa, synthetic construct
  REGION 1..565: note = hemagglutinin__InfluenzaA__ABD78093
MKAKLLVLLCTFTATYADTICIGYHANNSTDTVDTVLEKNVTVTHSVNLLEDSHNGKLCLLKGIAPLQLGNCSVAGWILGNPECELLISKESWSYIVETPNPENGTCYPGYFADYEELREQLSSVSSFERFEIFPKGSSWPNHTVTGVSASCSHNGKSSFYRNLLWLTGKNGLYPNLSMSYVNNKEKEVLVLWGVHHPPNIGDQRALYHTENAYVSVVSSHYSRRFTPEIAKRPKVRDQEGRINYYWTLLEPGDTIIFEANGNLIAPWYAFALSRGFGSGIITSNAPMGECDAKCQTPQGAINSSLPFQNVHPVTIGECPKYVRSAKLRMVTGLRNIPSIQSRGLFGAIAGFIEGGWTGMVDGWYGYHHQNEQGSGYAADQKSTQNAINGITNKVNSVIEKMNTQFTAVGKEFNKLERRMENLNKKVDDGFLDIWTYNAELLVLLENERTLDFHDSNVKNLYEKVKSQLKNNAKEIGNGCFEFYHKCNNECMESVKNGTYDYPKYSEESKLNREKIDGVKLESMGVYQILAIYSTVASSLVLLVSLGAISFWMCSNGSLQCRICI

SEQ ID NO: 801 - protein, 566 aa, synthetic construct
  REGION 1..566: note = hemagglutinin__InfluenzaA__ABD78115
MKTIIALSYILCLVFAQKLPGNDNSTATLCLGHHAVPNGTLVKTITNDQIEVTNATELVQSSSTGRICDSPHRILDGKNCTLIDALLGDPHCDGFQNKEWDLFVERSKAYSDCYPYDVPDYASLRSLVASSGTLEFTNEGFNWTGVAQDGTSYACKRGSVKSFFSRLNWLHKLEYKYPALNVTMPNNDKFDKLYIWGVHHPSTDSDQTSLYVQASGRVTVSTKRSQQTVIPNIGSRPWVRGVSSRISIYWTIVKPGDILLINSTGNLIAPRGYFKIRSGKSSIMRSDAPIGNCNSECITPNGSIPNDKPFQNVNRITYGACPRYVKQNTLKLATGMRNVPEKQTRGIFGAIAGFIENGWEGMVDGWYGFRHQNSEGTGQAADLKSTQAAINQINGKLNRLIEKTNEKFHQIEKEFSEVEGRIQDLEKYVEDTKIDLWSYNAELLVALENQHTIDLTDSEMNKLFERTRKQLRENAEDMGNGCFKIYHKCDNACIGSIRNGTYDHDVYRNEALNNRFQIKGVELKSGYKDWILWISFAISCFLLCVVLLGFIMWACQKGNIRCNICI

SEQ ID NO: 802 - protein, 566 aa, synthetic construct
  REGION 1..566: note = hemagglutinin__InfluenzaA__ABD78126
MKTIIALSYILCLVFAQKLPGNDNSTATLCLGHHAVPNGTLVKTITNDQIEVTNATELVQSSSTGRICDSPHRILDGKNCTLIDALLGDPHCDGFQNKEWDLFVERSKAYSDCYPYDVPDYASLRSLVASSGTLEFTNEGFNWTGVAQDGTSYACKRGSVKSFFSRLNWLHKLEYKYPALNVTMPNNDKFDKLYIWGVHHPSTDSDQTSLYVQASGRVTVSTKRSQQTVIPNIGSRPWVRGVSSIISIYWTIVKPGDILLINSTGNLIAPRGYFKIRSGKSSIMRSDAPIGNCNSECITPNGSIPNDKPFQNVNRITYGACPRYVKQNTLKLATGMRNVPEKQTRGIFGAIAGFIENGWEGMVDGWYGFRHQNSEGTGQAADLKSTQAAINQINGKLNRLIEKTNEKFHQIEKEFSEVEGRIQDLEKYVEDTKIDLWSYNAELLVALENQHTIDLTDSEMNKLFERTRKQLRENAEDMGNGCFKIYHKCDNACIGSIRNGTYDHDVYRDEALNNRFQIKGVELKSGYKDWILWISFAISCFLLCVVLLGFIMWACQKGNIRCNICI

SEQ ID NO: 803 - protein, 566 aa, synthetic construct
  REGION 1..566: note = hemagglutinin__InfluenzaA__ABD79032
MKTIIALSYIFCLVLGQDFPGNDNSTATLCLGHHAVPNGTLVKTITNDQIEVTNATELVQSSSTGKICNNPHRILDGIDCTLIDALLGDPHCDGFQNETWDLFVERSKAFSNCYPYDVPDYASLRSLVASSGTLEFISEGFTWTGVTQNGGSNACKRGPDIGFFSRLNWLYKSGSTYPVLNVTMPNNDNFDKLYIWGVHHPSTDQEQTSLYVQASGRVTVSTKRSQQTIIPNIGSRPWVRGLSSRISIYWTIVKPGDILVINSNGNLIAPRGYFKMRTGKSSIMRSDAPIGTCISECITPNGSIPNDKPFQNVNKITYGACPKYVKQNTLKLATGMRNVPEKQTRGLFSAIAGFIENGWEGMIDGWYGFRHQNSEGTGQAADLKSTQAAIDQINGKLNRVIEKTNEKFHQIEKEFSEVEGRIQDLEKYVEDTKIDLWSYNAELLVALENQHTIDLTDSEMNKLFEKTRRQLRENAEDMGNGCFKIYHKCDNACIGSIRNGTYDHDVYRDEALNNRFQIKGVELKSGYKDWILWISFAISCFLLCVVLLGFIMWACQKGNIRCNICI

SEQ ID NO: 804 - protein, 566 aa, synthetic construct
  REGION 1..566: note = hemagglutinin__InfluenzaA__ABD79112
MKAKLLILLCALSATDADTICIGYHANNSTDTVDTVLEKNVTVTHSVNLLEDSHNGKLCRLKGIAPLQLGKCNIAGWILGNPECESLLSKRSWSYIAETPNSENGACYPGDFADYEELREQLSSVSSFERFEIFPKGRSWPEHNIDIGVTAACSHAGKSSFYKNLLWLTEKDGSYPNLNKSYVNKKEKEVLILWGVHHPPNIENQKTLYRKENAYVSVVSSNYNRRFTPEIAERPKVRGQAGRINYYWTLLEPGDTIIFEANGNLIAPWYAFALNRGIGSGIITSNASMDECDTKCQTPQGAINSSLPFQNIHPFTIGECPKYVRSTKLRMVTGLRNIPSIQSRGLFGAIAGFIEGGWDGMIDGWYGYHHQNEQGSGYAADQKSTQNAINGITNKVNSVIEKMNTQFTAVGKEFNKLEKRMENLNKKVDDGFLDIWTYNAELLVLLENERTLDFHDSNVKNLYEKVKNQLRNNAKEIGNGCFEFYHKCNNECMESVKNGTYDYPKFSEESKLNREKIDGVKLESMGVYQILAIYSTVASSLVLLVSLGAISFWMCSNGSLQCRICI

SEQ ID NO: 805 - protein, 566 aa, synthetic construct
  REGION 1..566: note = hemagglutinin__InfluenzaA__ABD79123
MKTIIALSYILCLVFAQKLPGNDNSTATLCLGHHAVPNGTLVKTITNDQIEVTNATELVQSSSTGRICDSPHQILDGKNCTLIDALLGDPHCDGFQNKEWDLFVERSTAYSNCYPYDVPDYASLRSLVASSGTLEFTKEGFNWTGVAQDGTSYACKRGSVKSFFSRLNWLHKLEYKYPALNVTMPNNDKFDKLYIWGVHHPSTDSDQTSLYVQASGRVTVSTKRSQQTVIPNIGSRPWVRGVSSRISIYWTIVKPGDILLINSTGNLIAPRGYFKIRSGKSSIMRSDAPIDNCNSECITPNGSISNDKPFQNVNRITYGACPRYVKQNTLKLATGMRNVPEKQTRGIFGAIAGFIENGWEGMVDGWYGFRHQNSEGTGQAADLKSTQAAINQINGKLNRLIEKTNEKFHQIEKEFSEVEGRIQDLEKYVEDTKIDLWSYNAELLVALENQHTIDLTDSEMNKLFERTRKQLRENAEDMGNGCFRIYHKCDNACIGSIRNGTYDHDVYRDEALNNRFQIKGVELKSGYKDWILWISFAISCFLLCVVLLGFIMWACQKGNIRCNICI

SEQ ID NO: 806 - protein, 566 aa, synthetic construct
  REGION 1..566: note = hemagglutinin__InfluenzaA__ABD79134
MKTIIALSYILCLVFAQKLPGNDNSTATLCLGHHAVPNGTLVKTITNDQIEVTNATELVQSSSTGRICDSPHQILDGKNCTLIDALLGDPHCDGFQNKKWDLFVERSTAYSNCYPYDVPDYASLRSLVASSGTLEFTKEGFNWTGVAQDGTSYACKRGSVKSFFSRLNWLHKLEYKYPALNVTMPNNDKFDKLYIWGVHHPSTDSDQTSLYVQASGRVTVSTKRSQQTVIPNIGSRPWVRGVSSRISIYWTIVKPGDILLINSTGNLIAPRGYFKIRSGKSSIMRSDAPIDNCNSECITPNGSISNDKPFQNVNRITYGACPRYVKQNTLKLATGMRNVPEKQTRGIFGAIAGFIENGWEGMVDGWYGFRHQNSEGTGQAADLKSTQAAINQINGKLNRLIEKTNEKFHQIEKEFSEVEGRIQDLEKYVEDTKIDLWSYNAELLVALENQHTIDLTDSEMNKLFERTRKQLRENAEDMGNGCFKIYHKCDNACIGSIRNGTYDHDVYRDEALNNRFQIKGVELKSGYKDWILWISFAISCFLLCVVLLGFIMWACQKGNIRCNICI

SEQ ID NO: 807 - protein, 566 aa, synthetic construct
  REGION 1..566: note = hemagglutinin__InfluenzaA__ABD79145
MKTIIALSYILCLVFAQKLPGNDNSTATLCLGHHAVPNGTLVKTITNDQIEVTNATELVQSSSTGRICDSPHQILDGKNCTLIDALLGDPHCDGFQNKEWDLFVERSTAYSNCYPYDVPDYASLRSLVASSGTLEFTKEGFNWTGVAQDGTSYACKRGSVKSFFSRLNWLHKLEYKYPALNVTMPNNDKFDKLYIWGVHHPSTDSDQTSLYVQASGRVTVSTKRSQQTVIPNIGSRPWVRGVSSRISIYWTIVKPGDILLINSTGNLIAPRGYFKIRSGKSSIMRSDAPIDNCNSECITPNGSISNDKPFQNVNRITYGACPRYVKQNTLKLATGMRNVPEKQTRGIFGAIAGFIENGWEGMVDGWYGFRHQNSEGTGQAADLKSTQAAINQINGKLNRLIEKTNEKFHQIEKEFSEVEGRIQDLEKYVEDTKIDLWSYNAELLVALENQHTIDLTDSEMNKLFERTRKQLRENAEDMGNGCFKIYHKCDNACIGSIRNGTYDHDVYRDEALNNRFQIKGVELKSGYKDWILWISFAISCFLLCVVLLGFIMWACQKGNIRCNICI

SEQ ID NO: 808 - protein, 566 aa, synthetic construct; identical to SEQ ID NO: 807
  REGION 1..566: note = hemagglutinin__InfluenzaA__ABD79156

SEQ ID NO: 809 - protein, 566 aa, synthetic construct; identical to SEQ ID NO: 23
  REGION 1..566: note = hemagglutinin__InfluenzaA__ABD79167

SEQ ID NO: 810 - protein, 566 aa, synthetic construct; identical to SEQ ID NO: 807
  REGION 1..566: note = hemagglutinin__InfluenzaA__ABD79178

SEQ ID NO: 811 - protein, 566 aa, synthetic construct
  REGION 1..566: note = hemagglutinin__InfluenzaA__ABD79189
MKTIIALSYILCLVFAQKLPGNDNSTATLCLGHHAVPNGTLVKTITNDQIEVTNATELVQSSSTGRICDSPHQILDGKNCTLIDALLGDPHCDGFQNKEWDLFVERSTAYSNCYPYDVPDYASLRSLVASSGTLEFTKEGFNWTGVAQDGTSYACKRGSVKSFFSRLNWLHKLEYKYPALNVTMPNNDKFDKLYIWGVHHPSTDSDQTSLYVQASGRVTVSTKRSQQTVIPNIGSRPWVRGVSSRISIYWTVVKPGDILLINSTGNLIAPRGYFKIRSGKSSIMRSDAPIDSCNSECITPNGSISNDKPFQNVNRITYGACPRYVKQNTLKLATGMRNVPEKQTRGIFGAIAGFIENGWEGMVDGWYGFRHQNSEGTGQAADLKSTQAAINQINGKLNRLIEKTNEKFHQIEKEFSEVEGRIQDLEKYVEDTKIDLWSYNAELLVALENQHTIDLTDSEMNKLFERTRKQLRENAEDMGNGCFKIYHKCDNACIGSIRNGTYDHDVYRDEALNNRFQIKGVELKSGYKDWILWISFAISCFLLCVVLLGFIMWACQKGNIRCNICI

SEQ ID NO: 812 - protein, 566 aa, synthetic construct; identical to SEQ ID NO: 807
  REGION 1..566: note = hemagglutinin__InfluenzaA__ABD79200

SEQ ID NO: 813 - protein, 566 aa, synthetic construct
  REGION 1..566: note = hemagglutinin__InfluenzaA__ABD79211
MKTIIALSYILCLVFAQKLPGNDNSTATLCLGHHAVPNGTLVKTITNDQIEVTNATELVQSSSTGRICDSPHQILDGKNCTLIDALLGDPHCDGFQNKEWDLFVERSTAYSNCYPYDVPDYASLRSLVASSGTLEFTKEGFNWTGVAQDGTSYACKRGSVKSFFSRLNWLHKLEYKYPALNVTMPNNDKFDKLYIWGVHHPSTDSDQTSLYVQASGRVTVSTKRSQQTVIPNIGSRPWIRGVSSRISIYWTIVKPGDILLINSTGNLIAPRGYFKIRSGKSSIMRSDAPIDNCNSECITPNGSISNDKPFQNVNRITYGACPRYVKQNTLKLATGMRNVPEKQTRGIFGAIAGFIENGWEGMVDGWYGFRHQNSEGTGQAADLKSTQAAINQINGKLNRLIEKTNEKFHQIEKEFSEVEGRIQDLEKYVEDTKIDLWSYNAELLVALENQHTIDLTDSEMNKLFERTRKQLRENAEDMGNGCFKIYHKCDNACIGSIRNGTYDHDVYRDEALNNRFQIKGVELKSGYKDWILWISFAISCFLLCVVLLGFIMWACQKGNIRCNICI

SEQ ID NO: 814 - protein, 566 aa, synthetic construct; identical to SEQ ID NO: 23
  REGION 1..566: note = hemagglutinin__InfluenzaA__ABD79222

SEQ ID NO: 815 - protein, 566 aa, synthetic construct; identical to SEQ ID NO: 23
  REGION 1..566: note = hemagglutinin__InfluenzaA__ABD79233

SEQ ID NO: 816 - protein, 566 aa, synthetic construct
  REGION 1..566: note = hemagglutinin__InfluenzaA__ABD79244
MKTIIALSYILCLVFAQKLPGNDNSTATLCLGHHAVPNGTLVKTITNDQIEVTNATELVQSSSTGRICDSPHQILDGKNCTLIDALLGDPHCDGFKNKEWDLFVERSTAYSNCYPYDVPDYASLRSLVASSGTLEFTNEGFNWTGVAQDGTSYACKRGSVKSFFSRLNWLHKLEYKYPALNVTMPNNDKFDKLYIWGVHHPSTDSDQTSLYVQASGRVTVSTKRSQQTVIPNIGSRPWVRGVSSRISIYWTIVKPGDILLINSTGNLIAPRGYFKIRSGKSSIMRSDAPIDNCNSECITPNGSIPNDKPFQNVNRITYGACPRYVKQNTLKLATGMRNVPEKQTRGIFGAIAGFIENGWEGMVDGWYGFRHQNSEGTGQAADLKSTQAAINQINGKLNRLIEKTNEKFHQIEKEFSEVEGRIQDLEKYVEDTKIDLWSYNAELLVALENQHTIDLTDSEMNKLFERTRKQLRENAEDMGNGCFKIYHKCDNACIGSIRNGTYDHDVYRDEALNNRFQIKGVELKSGYKDWILWISFAISCFLLCVVLLGFIMWACQKGNIRCNICI

SEQ ID NO: 817 - protein, 566 aa, synthetic construct; identical to SEQ ID NO: 243
  REGION 1..566: note = hemagglutinin__InfluenzaA__ABD94734

SEQ ID NO: 818 - protein, 566 aa, synthetic construct; identical to SEQ ID NO: 630
  REGION 1..566: note = hemagglutinin__InfluenzaA__ABD94745

SEQ ID NO: 819 - protein, 566 aa, synthetic construct
  REGION 1..566: note = hemagglutinin__InfluenzaA__ABD94767
MKTIIALSYILCLVFAQKLPVNDNSTATLCLGHHAVPNGTLVKTITNDNIEVTNATELVQSSSTGRICDSPHQILDGENCTLIDALLGDPHCDGFQNKEWDLFVERSTAYSNCYPYDVPDYASLRSLVASSGTLEFNNESFNWTGVDQNGTSSACKRRSNKSFFSRLNWLHQLKYKYPALNVTMPNNEKFDKLYIWGVHHPSTDSDQISLYAQASGRVTVSTKRSQQNVIPNIGSRPWVRGVSSRISIYWTIVKPGDILLINSTGNLIAPRGYFKIRSGKSSIMRSNAPIGKCNSECITPNGSIPNDKPFQNVNRITYGACPRYVKQNTLKLATGMRNVPEKQTRGIFGAIAGFIENGWEGMVDGWYGFRHQNSEGTGQAADLKSTQAAINQINGKLNRLIEKTNEKFHQIEKEFSEVEGRIQDLEKYVEDTKIDLWSYNAELLVALENQHTIDLTDSEMNKLFERTRKQLRENAEDMGNGCFKIYHKCDNACIGSIRNGTYDHDVYRDEALNNRFQIKGVELKSGYKDWILWISFAISCFLLCVVLLGFIMWACQKGNIRCNICI

SEQ ID NO: 820 - protein, 565 aa, synthetic construct; identical to SEQ ID NO: 800
  REGION 1..565: note = hemagglutinin__InfluenzaA__ABD94778

SEQ ID NO: 821 - protein, 565 aa, synthetic construct; identical to SEQ ID NO: 800
  REGION 1..565: note = hemagglutinin__InfluenzaA__ABD94789

SEQ ID NO: 822 - protein, 566 aa, synthetic construct
  REGION 1..566: note = hemagglutinin__InfluenzaA__ABD94822
MKTIIALSYILCLVFAQKIPGNDNSTATLCLGHHAVPNGTLVKTITNDQIEVTNATELVQSSSTGRICDSPHRILDGENCTLIDALLGDPHCDGFQNKEWDLFVERSKAYSNCYPYDVPDYASLRSLVASSGTLEFNNESFNWTGVAQNGTSYACKRSSIKSFFSRLNWLHQLKYKYPALNVTMPNNDKFDKLYIWGVHHPSTDSDQTSLYAQASGRVTVSTKRSQQTVIPNIGSRPWVRGVSSRISIYWTIVKPGDILLINSTGNLIAPRGYFKIRSGKSSIMRSDAPIGKCNSECITPNGSIPNDKPFQNVNRITYGACPRYVKQNTLKLATGMRNVPEKQTRGIFGAIAGFIENGWEGMVDGWYGFRHQNSEGTGQAADLKSTQAAINQINGKLNRLIEKTNEKFHQIEKEFSEVEGRIQDLEKYVEDTKIDLWSYNAELLVALENQHTIDLTDSEMNKLFERTRKQLRENAEDMGNGCFKIYHKCDNACIGSIRNGTYDHDVYRDEALNNRFQIKGVELKSGYKDWILWISFAISCFLLCVVLLGFIMWACQKGNIRCNICI

SEQ ID NO: 823 - protein, 566 aa, synthetic construct
  REGION 1..566: note = hemagglutinin__InfluenzaA__ABD94833
MKTIIALSYILCLVFAQKLPGNDNSTATLCLGHHAVPNGTLVKTITNDQIEVTNATELVQSSSTGRICDSPHRILDGKNCTLIDALLGDPHCDGFQNKEWDLFVERSKAYSDCYPYDVPDYASLRSLVASSGTLEFTNEGFNWTGVAQDGTSYACKRGSVKSFFSRLNWLHKLEYKYPALNVTMPNNDKFDKLYIWGVHHPSTDSDQTSLYVQASGRVTVSTKRSQQTVIPNIGSRPWVRGVSSRISIYWTIVKPGDILLINSTGNLIAPRGYFKIRSGKSSIMRSDAPIGNCNSECITPNGSIPNDKPFQNVNRITYGACPRYVKQNTLKLATGMRNVPEKQTRGIFGAIAGFIENGWEGMVDGWYGFRHQNSEGTGQAADLKSTQAAINQINGKLNRLIEKTNEKFHQIEKEFSEVEGRIQDLEKYVEDTKIDLWSYNAELLVALENQHTIDLTDSEMNKLFERTRKQLRENAEDMGNGCFKIYHKCDNACIGSIRNGTYDHDVYRDEALNNRFQIKGVELKSGYKDWILWISFAISCFLLCVVLLGFIMWACQKGNIRCNICI

SEQ ID NO: 824 - protein, 566 aa, synthetic construct
  REGION 1..566: note = hemagglutinin__InfluenzaA__ABD94844
MKTIIALSYILCMVFAQKLPGNDNSTATLCLGHHAVPNGTLVKTITNDQIEVTNATELVQSSSTGRICDSPHRILDGKNCTLIDALLGDPHCDGFQNKEWDLFVERSKAYSNCYPYDVPDYASLRSLVASSGTLEFNNESFNWTGVAQNGTSYACKRRSVKSFFSRLNWLHKLEYKYPALNVTMPNNDKFDKLYIWGVHHPSTDSDQTSLYVQASGRVTVSTKRSQQTVIPNIGSRPWVRGVSSIISIYWTIVKPGDILLINSTGNLIAPRGYFKIRSGKSSIMRSDAPIGNCNSECITPNGSIPNDKPFQNVNRITYGACPRYVKQNTLKLATGMRNVPEKQTRGIFGAIAGFIENGWEGMVDGWYGFRHQNSEGTGQAADLKSTQAAINQINGKLNRLIEKTNEKFHQIEKEFSEVEGRIQDLEKYVEDTKIDLWSYNAELLVALENQHTIDLTDSEMNKLFERTRKQLRENAEDMGNGCFKIYHKCDNACIGSIRNGTYDHDVYRDEALNNRFQIKGVELKSGYKDWILWISFAISCFLLCVVLLGFIMWACQKGNIRCNICI

SEQ ID NO: 825 - protein, 566 aa, synthetic construct
  REGION 1..566: note = hemagglutinin__InfluenzaA__ABD94855
MKTIIALSYILCLVFAQKLPGNDNSTATLCLGHHAVPNGTLVKTITNDQIEVTNATELVQGSSTGRICDSPHRILDGKNCTLIDALLGDPHCDGFQNKEWDLFVERSKAYSNCYPYDVPDYASLRSLVASSGTLEFNNESFNWTGVAQNGTSYACKRGSVKSFFSRLNWLHKLEYKYPALNVTMPNNDKFDKLYIWGVHHPSTDSDQTSLYVQASGRVTVSTKRSQQTVIPNIGSRPWVRGVSSRISIYWTIVKPGDILLINSTGNLIAPRGYFKIRSGKSSIMRSDAPIDNCNSECITPNGSIPNDKPFQNVNRITYGACPRYVKQNTLKLATGMRNVPEKQTRGIFGAIAGFIENGWEGMVDGWYGFRHQNSEGTGQAADLKSTQAAINQINGKLNRLIEKTNEKFHQIEKEFSEVEGRIQDLEKYVEDTKIDLWSYNAELLVALENQHTIDLTDSEMNKLFERTRKQLRENAEDMGNGCFKIYHKCDNACIGSIRNGTYDHDVYRDEALNNRFQIKGVELKSGYKDWILWISFAISCFLLCVVLLGFIMWACQKGNIRCNICI

SEQ ID NO: 826 - protein, 566 aa, synthetic construct
  REGION 1..566: note = hemagglutinin__InfluenzaA__ABD94866
MKTIIALSYISCLVFAQKLPGNDNSTATLCLGHHAVPNGTLVKTITNDQIEVTNATELVQSSSTGRICDGPHQILDGKNCTLIDALLGDPHCDGFQNKEWDLFVERSKAYSNCYPYDVPDYASLRSLVASSGTLEFTNESFNWTGVAQNGTSYACKRGSVKSFFSRLNWLHKLEYKYPALNVTMPNNDKFDKLYIWGVHHPSTDSDQTSLYVQSSGRITVSTKRSQQTVTPNIGSRPWVRGVSSRISIYWTIVKPGDILLITSTGNLIAPRGYFKIRRGKSSIMRSDAPIDNCNSECITPNGSIPNDKPFQNVNRITYGACPRYVKQNTLKLATGMRNVPEKQTRGIFGAIAGFIENGWEGMVDGWYGFRHQNSEGTGQAADLKSTQAAINQINGKLNRLIEKTNEKFHQIEKEFSEVEGRIQDLEKYVEDTKIDLWSYNAELLVALENQHTIDLTDSEMNKLFERTRKQLRENAEDMGNGCFKIYHKCDNACIGSIRNGTYDHDVYRDEALNNRFQIKGVELKSGYKDWILWISFAISCFLLCVVLLGFIMWACQKGNIRCNICI

SEQ ID NO: 827 - protein, 566 aa, synthetic construct
  REGION 1..566: note = hemagglutinin__InfluenzaA__ABD94877
MKTIIALSYILCLVFAQKLPGNDNSTATLCLGHHAVPNGTLVKTITNDQIEVTNATELVQSSSTGRICDSPHRILDGKNCTLIDALLGDPHCDGFQNKEWDLFVERSKAYSNCYPYDVPDYASLRSLVASSGTLEFNNESFNWTGVAQNGTSYACKRRSVKSFFSRLNWLHKLEYKYPALNVTMPNNDKFDKLYIWGVHHPSTDSDQTSLYVQASGRVTVSTKRSQQTVIPNIGSRPWVRGVSSRISIYWTIVKPGDILLINSTGNLIAPRGYFKIRSGKSSIMRSDAPIDNCNSECITPNGSIPNDKPFQNVNRITYGACPRYVKQNTLKLATGMRNVPEKQTRGIFGAIAGFIENGWEGMVDGWYGFRHQNSEGTGQAADLKSTQAAINQINGKLNRLIEKTNEKFHQIEKEFSEVEGRIQDLEKYVEDTKIDLWSYNAELLVALENQHTIDLTDSEMNKLFERTRKQLRENAEDMGNGCFKIYHKCDNACIGSIRNGTYDHDVYRDEALNNRFQIKGVELKSGYKDWILWISFAISCFLLCVVLLGFIMWACQKGNIRCNICI

SEQ ID NO: 828 - protein, 566 aa, synthetic construct
  REGION 1..566: note = hemagglutinin__InfluenzaA__ABD94888
MKTIIALSYILCLVFAQKLPGNDNSTATLCLGHHAVPNGTLVKTITNDQIEVTNATELVQSSSTGRICDSPHRILDGKNCTLIDALLGDPHCDGFKNKEWDLFVERSTAYSNCYPYDVPDYASLRSLVASSGTLEFTNEGFNWTGVAQDGTSYACKRGSVKSFFSRLNWLHKLEYKYPALNVTMPNNDKFDKLYIWGVHHPSTDSDQTSLYVQASGRVTVSTKRSQQTVIPNIGSRPWVRGVSSRISIYWTIVKPGDILLINSTGNLIAPRGYFKIRSGKSSIMRSDAPIDNCNSECITPNGSIPNDKPFQNVNRITYGACPRYVKQNTLKLATGMRNVPEKQTRGIFGAIAGFIENGWEGMVDGWYGFRHQNSEGTGQAADLKSTQAAINQINGKLNRLIEKTNEKFHQIEKEFSEVEGRIQDLEKYVEDTKIDLWSYNAELLVALENQHTIDLTDSEMNKLFERTRKQLRENAEDMGNGCFKIYHKCDNACIGSIRNGTYDHDVYRDEALNNRFQIKGVELKSGYKDWILWISFAISCFLLCVVLLGFIMWACQKGNIRCNICI

SEQ ID NO: 829 - protein, 566 aa, synthetic construct; identical to SEQ ID NO: 807
  REGION 1..566: note = hemagglutinin__InfluenzaA__ABD94899

SEQ ID NO: 830 - protein, 566 aa, synthetic construct
  REGION 1..566: note = hemagglutinin__InfluenzaA__ABD94910
MKTIIALSYILCLVFAQKLPGNDNSTATLCLGHHAVPNGTLVKTITNDQIEVTNATELVQNSSTGRICDSPHRILDGKNCTLIDALLGDPHCDGFQNKEWDLFVERSKAYSNCYPYDVPDYASLRSLVASSGTLEFNNESFNWTGVAQNGTSYACKRRSVKSFFSRLNWLHKLEYKYPALNVTMPNNDKFDKLYIWGVHHPSTDSDQTSLYVQASGRVTVSTKRSQQTVIPNIGSRPWVRGVSSRISIYWTIVKPGDILLINSTGNLIAPRGYFKIRSGKSSIMRSDAPIGNCNSECITPNGSIPNDKPFQNVNRITYGACPRYVKQNTLKLATGMRNVPEKQTRGIFGAIAGFIENGWEGMVDGWYGFRHQNSEGTGQAADLKSTQAAINQINGKLNRLIEKTNEKFHQIEKEFSEVEGRIQDLEKYVEDTKIDLWSYNAELLVALENQHTIDLTDSEMNKLFERTRKQLRENAEDMGNGCFRIYHKCDNACIGSIRNGTYDHDVYRDEALNNRFQIKGVELKSGYKDWILWISFAISCFLLCVVLLGFIMWACQKGNIRCNICI

SEQ ID NO: 831 - protein, 566 aa, synthetic construct
  REGION 1..566: note = hemagglutinin__InfluenzaA__ABD94921
MKTIIALSYILCLVFAQKLPGNDNSTATLCLGHHAVPNGTLVKTITNDQIEVTNATELVQSSSTGRICDGPHQILDGKNCTLIDALLGDPHCDGFQNKEWDLFVERSKAYSNCYPYDVPDYASLRSLVASSGTLEFTNESFNWTGVAQNGTSYACKRGSVKSFFSRLNWLHKLEYKYPALNVTMPNNDKFDKLYIWGVHHPSTDSDQTSLYVQSSGRVTVSTKRSQQTVTPNIGSRPWVRGVSSRISIYWTIVKPGDILLINSTGNLIAPRGYFKIRRGKSSIMRSDAPIDNCNSECITPNGSIPNDKPFQNVNRITYGACPRYVKQNTLKLATGMRNVPEKQTRGIFGAIAGFIENGWEGMVDGWYGFRHQNSEGTGQAADLKSTQAAINQINGKLNRLIEKTNEKFHQIEKEFSEVEGRIQDLEKYVEDTKIDLWSYNAELLVALENQHTIDLTDSEMNKLFERTRKQLRENAEDMGNGCFKIYHKCDNACIGSIRNGTYDHDVYRDEALNNRFQIKGVELKSGYKDWILWISFAISCFLLCVVLLGFIMWACQKGNIRCNICI

SEQ ID NO: 832 - protein, 566 aa, synthetic construct; identical to SEQ ID NO: 807
  REGION 1..566: note = hemagglutinin__InfluenzaA__ABD94932

SEQ ID NO: 833 - protein, 565 aa, synthetic construct
  REGION 1..565: note = hemagglutinin__InfluenzaA__ABD94943
MKVKLLILLCTFTATYADTICIGYHANNSTDTVDTVLEKNVTVTHSVNLLEDSHNGKLCLLKGIAPLQLGNCSVAGWILGNPECELLISKESWSYIVETPNPENGACYPGYFADYEELREQLSSVSSFERFEIFPKESSWPNHTVTGVSASCSHNGKSSFYRNLLWLTGKNGLYPNLSKSYANNKKKEVLILWGVHHPPNIGDQRTLYHTENAYVSVVSSHYSRRFTPEITKRPKVRDQEGRINYYWTLLEPGDTIIFEANGNLIAPWYAFALSRGFGSGIITSNAPMDECDAKCQTPQGAINSSLPFQNVHPVTIGECPKYVRSAKLRMVTGLRNIPSIQSRGLFGAIAGFIEGGWTGMVDGWYGYHHQNEQGSGYAADQKSTQNAINGITNKVNSVIEKMNTQFTAVGKEFNKLERRMENLNKKVDDGFLDIWTYNAELLVLLENERTLDFHDSNVKNLYEKVKSQLKNNAKEIGNGCFEFYHKCNNECMESVKNGTYDYPKYSEESKLNREKIDGVKLDSMGVYQILAIYSTVASSLVLLVSLGAISFWMCSNGSLQCRICI

SEQ ID NO: 834 - protein, 566 aa, synthetic construct; identical to SEQ ID NO: 633
  REGION 1..566: note = hemagglutinin__InfluenzaA__ABD94954

SEQ ID NO: 835 - protein, 565 aa, synthetic construct; identical to SEQ ID NO: 742
  REGION 1..565: note = hemagglutinin__InfluenzaA__ABD94965

SEQ ID NO: 836 - protein, 565 aa, synthetic construct; identical to SEQ ID NO: 741
  REGION 1..565: note = hemagglutinin__InfluenzaA__ABD94987

SEQ ID NO: 837 - protein, 565 aa, synthetic construct; identical to SEQ ID NO: 741
  REGION 1..565: note = hemagglutinin__InfluenzaA__ABD94998

SEQ ID NO: 838 - protein, 565 aa, synthetic construct; identical to SEQ ID NO: 741
  REGION 1..565: note = hemagglutinin__InfluenzaA__ABD95009

SEQ ID NO: 839 - protein, 565 aa, synthetic construct; identical to SEQ ID NO: 742
  REGION 1..565: note = hemagglutinin__InfluenzaA__ABD95020

SEQ ID NO: 840 - protein, 565 aa, synthetic construct
  REGION 1..565: note = hemagglutinin__InfluenzaA__ABD95031
MKVKLLVLLCTFTATYADTICIGYHANNSTDTVDTVLEKNVTVTHSVNLLEDSHNGKLCLLKGIAPLQLGNCSVAGWILGNPECELLISKESWSYIVETPNPENGTCYPGYFTDYEELREQLSSVSSFERFEIFPKESSWPNHTVTGVSASCSHNGKSSFYRNLLWLTGKNGLYPNLRRSYANNKEKEVLVLWGVHHPPNIGDQKALYHTENAYVSVVSSHYSRRFTPEIAKRPKVRGQEGRINYYWTLLEPGDTIIFEANGNLIAPRYAFALSRGFGSGIITSNAPMDECDAKCQTPQGAINSSLPFQNVHPVTIGECPKYVRSAKLRMVTGLRNIPSIQSRGLFGAIAGFIEGGWTGMVDGWYGYHHQNEQGSGYAADQKSTQNAINGITNKVNSIIEKMNTQFTAVGKEFNKLERRMENLNKKVDDGFLDIWTYNAELLVLLENERTLDFHDSNVKNLYEKVKSQLKNNAKEIGNGCFEFYHKCNNECMESVKNGTYDYPKYSEESKLNREKIDGVKLESMGVYQILAIYSTVASSLVLLVSLGAISFWMCSNGSLQCRICI

SEQ ID NO: 841 - protein, 565 aa, synthetic construct
  REGION 1..565: note = hemagglutinin__InfluenzaA__ABD95042
MKAKLLVLLCTFTATYADTICIGYHANNSTDTVDTVLEKNVTVTHSVNLLEDSHNGKLCLLKGIAPLQLGNCSVAGWILGNPECELLISKESWSYIVETPNPENGTCYPGYFADYEELREQLSSVSSFERFEIFPKGSSWPNHTVTGVSASCSHNGKSSFYRNLLWLTGKNGLYPNLSMSYVNNKGKEVLVLWGVHHPPNIGDQRALYHTENAYVSVVSSHYSRRFTPEIAKRPKVRDQEGRINYYWTLLEPGDTIIFEANGNLIAPWYAFALSRGFGSGIITSNAPMGECDAKCQTPQGAINSSLPFQNVHPVTIGECPKYVRSAKLRMVTGLRNIPSIQSRGLFGAIAGFIEGGWTGMVDGWYGYHHQNEQGSGYAADQKSTQNAINGITNKVNSVIEKMNTQFTAVGKEFNKLERRMENLNKKVDDGFLDIWTYNAELLVLLENERTLDFHDSNVKNLYEKVKSQLKNNAKEIGNGCFEFYHKCNNECMESVKNGTYDYPKYSEESKLNREKIDGVKLESMGVYQILAIYSTVASSLVLLVSLGAISFWMCSNGSLQCRICI

SEQ ID NO: 842 - protein, 565 aa, synthetic construct; identical to SEQ ID NO: 841
  REGION 1..565: note = hemagglutinin__InfluenzaA__ABD95053

SEQ ID NO: 843 - protein, 565 aa, synthetic construct; identical to SEQ ID NO: 800
  REGION 1..565: note = hemagglutinin__InfluenzaA__ABD95064

SEQ ID NO: 844 - protein, 565 aa, synthetic construct
  REGION 1..565: note = hemagglutinin__InfluenzaA__ABD95075
MKAKLLVLLCTFTATYADTICIGYHANNSTDTVDTVLEKNVTVTHSVNLLEDSHNGKLCLLKGIAPLQLGNCSVAGWILGNPECELLISKESWSYIVETPNPENGTCYPGYFADYEELREQLSSVSSFERFEIFPKGSSWPNHTVTGVSASCSHNGKSSFYRNLLWLTGKNGLYPNLSMSYVNNKEKEVLVLWGVHHPPNIGDQRALYHTENAYVSVVSSHYSRRFTPEIAKRPKVRDQEGRINYYWTLLEPGDTIIFEANGNLIAPWYAFALSKGFGSGIITSNAPMGECDAKCQTPQGAINSSLPFQNVHPVTIGECPKYVRSAKLRMVTGLRNIPSIQSRGLFGAIAGFIEGGWTGMVDGWYGYHHQNEQGSGYAADQKSTQNAINGITNKVNSVIEKMNTQFTAVGKEFNKLERRMENLNKKVDDGFLDIWTYNAELLVLLENERTLDFHDSNVKNLYEKVKSQLKNNAKEIGNGCFEFYHKCNNECMESVKNGTYDYPKYSEESKLNREKIDGVKLESMGVYQILAIYSTVASSLVLLVSLGAISFWMCSNGSLQCRICI

SEQ ID NO: 845 - protein, 565 aa, synthetic construct; identical to SEQ ID NO: 841
  REGION 1..565: note = hemagglutinin__InfluenzaA__ABD95086

SEQ ID NO: 846 - protein, 565 aa, synthetic construct; identical to SEQ ID NO: 800
  REGION 1..565: note = hemagglutinin__InfluenzaA__ABD95097

SEQ ID NO: 847 - protein, 565 aa, synthetic construct
  REGION 1..565: note = hemagglutinin__InfluenzaA__ABD95119
MKAKLLILLCTFTATYADTICIGYHANNSTDTVDTVLEKNVTVTHSVNLLEDSHNGKLCLLKGIAPLQLGNCSVAGWILGNPECELLISKESWSYIVETPNPENGTCYPGYFADYEELREQLSSVSSFERFEIFPKGSSWPNHTVTGVSASCSHNGKSSFYRNLLWLTGKNGLYPNLSMSYVNNKEKEVLVLWGVHHPPNIGDQRALYHTENAYVSVVSSHYSRRFTPEIAKRPKVRDQEGRINYYWTLLEPGDTIIFEANGNLIAPWYAFALSRGFGSGIITSNAPMGECDAKCQTPQGAINSSLPFQNVHPVTIGECPKYVRSAKLRMVTGLRNIPSIQSRGLFGAIAGFIEGGWTGMVDGWYGYHHQNEQGSGYAADQKSTQNAINGITNKVNSVIEKMNTQFTAVGKEFNKLERRMENLNKKVDDGFLDIWTYNAELLVLLENERTLDFHDSNVKNLYEKVKSQLKNNAKEIGNGCFEFYHKCNNECMESVKNGTYDYPKYSEESKLNREKIDGVKLESMGVYQILAIYSTVASSLVLLVSLGAISFWMCSNGSLQCRICI

SEQ ID NO: 848 - protein, 565 aa, synthetic construct
  REGION 1..565: note = hemagglutinin__InfluenzaA__ABD95130
MKAKLLVLLCTFTATYADTICIGYHANNSTDTVDTVLEKNVTVTHSVNLLEDSHNGKLCLLKGIAPLQLGNCSVAGWILGNPECELLISKESWSYIVETPNPENGTCYPGYFADYEELREQLSSVSSFERFEIFPKGSSWPNHTVTGVSASCSHNGKSSFYRNLLWLTGKNGSYPNLSMSYVNNKEKEVLVLWGVHHPPNIGDQRALYHTENAYVSVVSSHYSRRFTPEIAKRPKVRDQEGRINYYWTLLEPGDTIIFEANGNLIAPWYAFALSRGFGSGIITSNAPMGECDAKCQTPQGAINSSLPFQNVHPVTIGECPKYVRSAKLRMVTGLRNIPSIQSRGLFGAIAGFIEGGWTGMVDGWYGYHHQNEQGSGYAADQKSTQNAINGITNKVNSVIEKMNTQFTAVGKEFNKLERRMENLNKKVDDGFLDIWTYNAELLVLLENERTLDFHDSNVKNLYEKVKSQLKNNAKEIGNGCFEFYHKCNNECMESVKNGTYDYPKYSEESKLNREKIDGVKLESMGVYQILAIYSTVASSLVLLVSLGAISFWMCSNGSLQCRICI

SEQ ID NO: 849 - protein, 565 aa, synthetic construct; identical to SEQ ID NO: 800
  REGION 1..565: note = hemagglutinin__InfluenzaA__ABD95141

SEQ ID NO: 850 - protein, 565 aa, synthetic construct; identical to SEQ ID NO: 800
  REGION 1..565: note = hemagglutinin__InfluenzaA__ABD95152

SEQ ID NO: 851 - protein, 565 aa, synthetic construct; identical to SEQ ID NO: 847
  REGION 1..565: note = hemagglutinin__InfluenzaA__ABD95163

SEQ ID NO: 852 - protein, 565 aa, synthetic construct; identical to SEQ ID NO: 841
  REGION 1..565: note = hemagglutinin__InfluenzaA__ABD95174

SEQ ID NO: 853 - protein, 565 aa, synthetic construct
  REGION 1..565: note = hemagglutinin__InfluenzaA__ABD95185
MKAKLLVLLCTFTATYADTICIGYHANNSTDTVDTVLEKNVTVTHSVNLLEDSHNGKLCLLKGIAPLQLGNCSVAGWILGNPECELLISKESWSYIVETPNPENGTCYPGYFADYEELREQLSSVSSFERFEIFPKGSSWPNHTVTGVSASCSHNGESSFYRNLLWLTGKNGLYPNLSMSYVNNKEKEVLVLWGVHHPPNIGDQRALYHTENAYVSVVSSHYSRRFTPEIAKRPKVRDQEGRINYYWTLLEPGDTIIFEANGNLIAPWYAFALSRGFGSGIITSNAPMGECDAKCQTPQGAINSSLPFQNVHPVTIGECPKYVRSAKLRMVTGLRNIPSIQSRGLFGAIAGFIEGGWTGMVDGWYGYHHQNEQGSGYAADQKSTQNAINGITNKVNSVIEKMNTQFTAVGKEFNKLERRMENLNKKVDDGFLDIWTYNAELLVLLENERTLDFHDSNVKNLYEKVKSQLKNNAKEIGNGCFEFYHKCNNECMESVKNGTYDYPKYSEESKLNREKIDGVKLESMGVYQILAIYSTVASSLVLLVSLGAISFWMCSNGSLQCRICI

SEQ ID NO: 854 - protein, 565 aa, synthetic construct; identical to SEQ ID NO: 841
  REGION 1..565: note = hemagglutinin__InfluenzaA__ABD95196

SEQ ID NO: 855 - protein, 565 aa, synthetic construct; identical to SEQ ID NO: 299
  REGION 1..565: note = hemagglutinin__InfluenzaA__ABD95207

SEQ ID NO: 856 - protein, 565 aa, synthetic construct; identical to SEQ ID NO: 800
  REGION 1..565: note = hemagglutinin__InfluenzaA__ABD95218

SEQ ID NO: 857 - protein, 565 aa, synthetic construct; identical to SEQ ID NO: 847
  REGION 1..565: note = hemagglutinin__InfluenzaA__ABD95229

SEQ ID NO: 858 - protein, 565 aa, synthetic construct; identical to SEQ ID NO: 800
  REGION 1..565: note = hemagglutinin__InfluenzaA__ABD95240

SEQ ID NO: 859 - protein, 565 aa, synthetic construct; identical to SEQ ID NO: 841
  REGION 1..565: note = hemagglutinin__InfluenzaA__ABD95251

SEQ ID NO: 860 - protein, 565 aa, synthetic construct; identical to SEQ ID NO: 299
  REGION 1..565: note = hemagglutinin__InfluenzaA__ABD95262

SEQ ID NO: 861 - protein, 565 aa, synthetic construct; identical to SEQ ID NO: 800
  REGION 1..565: note = hemagglutinin__InfluenzaA__ABD95273

SEQ ID NO: 862 - protein, 565 aa, synthetic construct; identical to SEQ ID NO: 296
  REGION 1..565: note = hemagglutinin__InfluenzaA__ABD95284

SEQ ID NO: 863 - protein, 565 aa, synthetic construct; identical to SEQ ID NO: 800
  REGION 1..565: note = hemagglutinin__InfluenzaA__ABD95295

SEQ ID NO: 864 - protein, 565 aa, synthetic construct
  REGION 1..565: note = hemagglutinin__InfluenzaA__ABD95306
MKAKLLVLLCTFTATYADTICIGYHANNSTDTVDTVLEKNVTVTHSVNLLEDSHNGKLCLLKGIAPLQLGNCSVAGWILGNPECELLISKESWSYIVETPNPENGTCYPGYFADYEELREQLSSVSSFERFEIFPKGSSWPNHTVTGVSASCSHNGKSSFYRNLLWLTGKNGLYPNLSMSYVNNKEKEILVLWGVHHPPNIGDQRALYHTENAYVSVVSSHYSRRFTPEIAKRPKVRDQEGRINYYWTLLEPGDTIIFEANGNLIAPWYAFALSRGFGSGIITSNAPMGECDAKCQTPQGAINSSLPFQNVHPVTIGECPKYVRSAKLRMVTGLRNIPSIQSRGLFGAIAGFIEGGWTGMVDGWYGYHHQNEQGSGYAADQKSTQNAINGITNKVNSVIEKMNTQFTAVGKEFNKLERRMENLNKKVDDGFLDIWTYNAELLVLLENERTLDFHDSNVKNLYEKVKSQLKNNAKEIGNGCFEFYHKCNNECMESVKNGTYDYPKYSEESKLNREKIDGVKLESMGVYQILAIYSTVASSLVLLVSLGAISFWMCSNGSLQCRICI

SEQ ID NO: 865 - protein, 565 aa, synthetic construct; identical to SEQ ID NO: 841
  REGION 1..565: note = hemagglutinin__InfluenzaA__ABD95328

SEQ ID NO: 866 - protein, 566 aa, synthetic construct
  REGION 1..566: note = hemagglutinin__InfluenzaA__ABD95339
MKAKLLVLLCALSATDADTICIGYHANNSTDTVDTVLEKNVTVTHSVNLLEDSHNGKLCRLKGIAPLQLGKCSIAGWILGNPECESLFSKKSWSYIAETPNSENGTCYPGYFADYEELREQLSSVSSFERFEIFPKESSWPKHSVTRGVTASCSHKGKSSFYRNLLWLTEKNGSYPNLSKSYVNDKEKEVLVLWGVHHPSNIEDQKTIYRKENAYVSVVSSHYNRRFTPEIAKRPKVRDQEGRINYYWTLLEPGDTIIFEANGNLIAPWYAFALSRGFGSGIITSNVSMDECDAKCQTPQGAINSSLPFQNVHPVTIGECPKYVRSTKLRMVTGLRNIPSIQSRGLFGAIAGFIEGGWTGMIDGWYGYHHQNEQGSGYAADQKSTQNAINGITNKVNSVIEKMNTQFTAVGKEFNKLEKRMENLNKKVDDGFLDIWTYNAELLVLLENERTLDFHDSNVKNLYEKVKSQLKNNAKEIGNGCFEFYHKCNNECMESVKNGTYDYPKYSEESKLNREKIDGVKLESMGVYQILAIYSTVASSLVLLVSLGAISFWMCSNGSLQCRICI

SEQ ID NO: 867 - protein, 565 aa, synthetic construct; identical to SEQ ID NO: 742
  REGION 1..565: note = hemagglutinin__InfluenzaA__ABE11657

SEQ ID NO: 868 - protein, 565 aa, synthetic construct
  REGION 1..565: note = hemagglutinin__InfluenzaA__ABE11668
MKAKLLVLLCTFTATYADTICIGYHANNSTDTVDTVLEKNVTVTHSVNLLEDSHNGKLCLLKGIAPLQLGNCSVAGWILGNPECELLISKESWSYIVETPNPENGTCYPGYFADYEELREQLSSVSSFERFEIFPKESSWPNHTVTGVSASCSHNGKSSFYRNLLWLTGKNGLYPNLSMSYVNNKEKEVLVLWGVHHPPNIGDQRALYHTENAYVSVVSSHYSRRFTPEIAKRPKVRDQEGRINYYWTLLEPGDTIIFEANGNLIAPWYAFALSRGFGSGIITSNAPMDECDAKCQTPQGAINSSLPFQNVHPVTIGECPKYVRSAKLRMVTGLRNIPSIQSRGLFGAIAGFIEGGWTGMVDGWYGYHHQNEQGSGYAADQKSTQNAINGITNKVNSVIEKMNTQFTAVGKEFNKLERRMENLNKKVDDGFLDIWTYNAELLVLLENERTLDFHDSNVKNLYEKVKSQLKNNAKEIGNGCFEFYHKCNNECMESVKNGTYDYPKYSEESKLNREKIDGVKLESMGVYQILAIYSTVASSLVLLVSLGAISFWMCSNGSLQCRICI

SEQ ID NO: 869 - protein, 565 aa, synthetic construct
  REGION 1..565: note = hemagglutinin__InfluenzaA__ABE11679
MKVKLLVLLCTFTATYADTICIGYHANNSTDTVDTVLEKNVTVTHSVNLLEDSHNGKLCLLKGIAPLQLGNCSVAGWILGNPECELLISKESWSYIVETPNPENGTCYPGYFADYEELREQLSSVSSFERFEIFPKESSWPNHTVTGVSASCSHNGKSSFYRNLLWLTGRNGLYPNLSKSYANNKEKEVLVLWGVHHPPNIGDQRALYHTENAYVSVVSSHYSRRFTPEIAKRPKVRDQEGRINYYWTLLEPGDTIIFEANGNLIAPRYAFALSRGFGSGIITSNAPMDECDAKCQTPQGAINSSLPFQNVHPVTIGECPKYVRSAKLRMVTGLRNIPSIQSRGLFGAIAGFIEGGWTGMVDGWYGYHHQNEQGSGYAADQKSTQNAINGITNKVNSVIEKMNTQFTAVGKEFNKLERRMENLNKKVDDGFLDIWTYNAELLVLLENERTLDFHDSNVKNLYEKVKSQLKNNAKEIGNGCFEFYHKCNDECMESVKNGTYDYPKYSEESKLNREKIDGVKLESMGVYQILAIYSTVASSLVLLVSLGAISFWMCSNGSLQCRICI

SEQ ID NO: 870 - protein, 565 aa, synthetic construct
  REGION 1..565: note = hemagglutinin__InfluenzaA__ABE11690
MKAKLLVLLCTFTATYADTICIGYHANNSTDTVDTVLEKNVTVTHSVNLLEDSHNGKLCLLKGIAPLQLGNCSVAGWILGNPECELLISKESWSYIVETPNPENGTCYPGYFADYEELREQLSSVSSFERFEIFPKGSSWPNHTVTGVSASCSHNGKSSFYRNLLWLTGKNGLYPNLSMSYVNNKEKEVLVLWGVHHPPNIGNQRALYHTENAYVSVVSSHYSRRFTPEIAKRPKVRDQEGRINYYWTLLEPGDTIIFEANGNLIAPWYAFALSRGFGSGIITSNAPMGECDAKCQTPQGAINSSLPFQNVHPVTIGECPKYVRSAKLRMVTGLRNIPSIQSRGLFGAIAGFIEGGWTGMVDGWYGYHHQNEQGSGYAADQKSTQNAINGITNKVNSVIEKMNTQFTAVGKEFNKLERRMENLNKKVDDGFLDIWTYNAELLVLLENERTLDFHDSNVKNLYEKVKSQLKNNAKEIGNGCFEFYHKCNNECMESVKNGTYDYPKYSEESKLNREKIDGVKLESMGVYQILAIYSTVASSLVLLVSLGAISFWMCSNGSLQCRICI

SEQ ID NO: 871 - protein, 565 aa, synthetic construct
  REGION 1..565: note = hemagglutinin__InfluenzaA__ABE11701
MKAKLLVLLCTFTATYADTICIGYHANNSTDTVDTVLEKNVTVTHSVNLLEDSHNGKLCLLKGIAPLQLGNCSVAGWILGNPECELLISKESWSYIVETPNPENGTCYPGYFADYEELREQLSSVSSFERFEIFPKGSSWPNHTVTGVSASCSHNGKSSFYRNLLWLTGKNGLYPNLSMSYVNNKEKEVLVLWGVHHPPNIGDQKALYHTENAYVSVVSSHYSRRFTPEIAKRPKVRDQEGRINYYWTLLEPGDTIIFEANGNLIAPWYAFALSRGFGSGIITSNAPMGECDAKCQTPQGAINSSLPFQNVHPVTIGECPKYVRSAKLRMVTGLRNIPSIQSRGLFGAIAGFIEGGWTGMVDGWYGYHHQNEQGSGYAADQKSTQNAINGITNKVNSIIEKMNTQFTAVGKEFNKLERRMENLNKKVDDGFLDIWTYNAELLVLLENERTLDFHDSNVKNLYEKVKSQLKNNAKEIGNGCFEFYHKCNNECMESVKNGTYDYPKYSEESKLNREKIDGVKLESMGVYQILAIYSTVASSLVLLVSLGAISFWMCSNGSLQCRICI

SEQ ID NO: 872 - protein, 565 aa, synthetic construct; identical to SEQ ID NO: 800
  REGION 1..565: note = hemagglutinin__InfluenzaA__ABE11712

SEQ ID NO: 873 - protein, 565 aa, synthetic construct; identical to SEQ ID NO: 841
  REGION 1..565: note = hemagglutinin__InfluenzaA__ABE11723

SEQ ID NO: 874 - protein, 565 aa, synthetic construct; identical to SEQ ID NO: 847
  REGION 1..565: note = hemagglutinin__InfluenzaA__ABE11734

SEQ ID NO: 875 - protein, 565 aa, synthetic construct; identical to SEQ ID NO: 800
  REGION 1..565: note = hemagglutinin__InfluenzaA__ABE11812

SEQ ID NO: 876 - protein, 565 aa, synthetic construct; identical to SEQ ID NO: 841
  REGION 1..565: note = hemagglutinin__InfluenzaA__ABE11823

SEQ ID NO: 877 - protein, 565 aa, synthetic construct; identical to SEQ ID NO: 841
  REGION 1..565: note = hemagglutinin__InfluenzaA__ABE11834

SEQ ID NO: 878 - protein, 565 aa, synthetic construct; identical to SEQ ID NO: 841
  REGION 1..565: note = hemagglutinin__InfluenzaA__ABE11845

SEQ ID NO: 879 - protein, 565 aa, synthetic construct; identical to SEQ ID NO: 847
  REGION 1..565: note = hemagglutinin__InfluenzaA__ABE11856

SEQ ID NO: 880 - protein, 566 aa, synthetic construct
  REGION 1..566: note = hemagglutinin__InfluenzaA__ABE11900
MKAKLLVLLCAFTATYADTICIGYHANNSTDTVDTVLEKNVTVTHSVNLLEDSHNGKLCRLKGTAPLQLGNCSVAGWILGNPECESLFSKESWSYIAETPNPENGTCYPGYFADYEELREQLSSVSSFERFEIFPKESSWPNHTVTKGVTASCSHNGKSSFYKNLLWLTEKNGLYPNLSKSYVNNKEKEVLVLWGVHHPSNIGDQRAIYHTENAYVSVVSSHYSRRFTPEIAKRPKVRDQEGRINYYWTLLEPGDTIIFEANGNLIAPWYAFALSRGFGSGIITSNASMGECDAKCQTPQGAINSSLPFQNVHPVTIGECPKYVRSTKLRMVTGLRNIPSIQSRGLFGAIAGFIEGGWTGMIDGWYGYHHQNEQGSGYAADQKSTQNAINGITNKVNSVIEKMNTQFTAVGKEFNKLERRMENLNKKVDDGFLDIWTYNAELLVLLENERTLDFHDSNVKNLYEKVKTQLKNNAKEIGNGCFEFYHKCNNECMESVKNGTYDYPKYSEESKLNREKIDGVKLESMGVYQILAIYSTVASSLVLLISLGAISFWMCSNGSLQCRICI

SEQ ID NO: 881 - protein, 566 aa, synthetic construct
  REGION 1..566: note = hemagglutinin__InfluenzaA__ABE11942
MKAKLLVLLCAFTATYADTICIGYHANNSTDTVDTVLEKNVTVTHSVNLLEDSHNGKLCRLKGTAPLQLGNCSVAGWILGNPECESLFSKESWSYIAETPNPENGTCYPGYFADYEELREQLSSVSSFERFEIFPKESSWPNHTVTKGVTASCSHNGKSSFYKNLLWLTEKNGLYPSLSKSYVNNKEKEVLVLWGVHHPSNIGDQRAIYHTENAYVSVVSSHYSRRFTPEIAKRPKVRDQEGRINYYWTLLEPGDTIIFEANGNLIAPWYAFALSRGFGSGIITSNASMGECDAKCQTPQGAINSSLPFQNVHPVTIGECPKYVRSTKLRMVTGLRNIPSIQSRGLFGAIAGFIEGGWTGMIDGWYGYHHQNEQGSGYAADQKSTQNAINGITNKVNSVIEKMNTQFTAVGKEFNKLERRMENLNKKVDDGFLDIWTYNAELLVLLENERTLDFHDSNVKNLYEKVKTQLKNNAKEIGNGCFEFYHKCNNECMESVKNGTYDYPKYSEESKLNREKIDGVKLESMGVYQILAIYSTVASSLVLLVSLGAISFWMCSNGSLQCRICI

SEQ ID NO: 882 - protein, 566 aa, synthetic construct
  REGION 1..566: note = hemagglutinin__InfluenzaA__ABE12078
MKTIIALSYILCLVFAQKLPGNDNSTATLCLGHHAVPNGTLVKTITNDQIEVTNATELVQSSSTGGICDSPHQILDGENCTLIDALLGDPHCDGFQNKEWDLFVERSKAYSNCYPYDVPDYASLRSLVASSGTLEFNNESFNWTGVAQNGTSSACKRRSNKSFFSRLNWLHQLKYKYPALNVTMPNNEKFDKLYIWGVHHPSTDSDQISLYAQAPGRVTVSTKRSQQTVIPNIGSRPWVRGVSSRISIYWTIVKPGDILLINCTGNLIAPRGYFKIRSGKSSIMRSDASIGKCNSECITPNGSIPNDKPFQNVNRITYGACPRYVKQNTLKLATGMRNVPEKQTRGIFGAIAGFIENGWEGMVDGWYGFRHQNSEGTGQAADLKSTQAAINQINGKLNRLIEKTNEKFHQIEKEFSEVEGRIQDLEKYVEDTKIDLWSYNAELLVALENQHTIDLTDSEMNKLFEKTKKQLRENAEDMGNGCFKIYHKCDNACIGSIRNGTYDHDVYRDEALNNRFQIKGVELKSGYKDWILWISFAISCFLLCVVLLGFIMWACQKGNIRCSICI

SEQ ID NO: 883 - protein, 566 aa, synthetic construct; identical to SEQ ID NO: 777
  REGION 1..566: note = hemagglutinin__InfluenzaA__ABE12123

SEQ ID NO: 884 - protein, 565 aa, synthetic construct; identical to SEQ ID NO: 800
  REGION 1..565: note = hemagglutinin__InfluenzaA__ABE12248

SEQ ID NO: 885 - protein, 566 aa, synthetic construct
  REGION 1..566: note = hemagglutinin__InfluenzaA__ABE12623
MKTIIALSYIFCLVLGQDLPGNDNSTATLCLGHHAVPNGTLVKTITNDQIEVTNATELVQSSSTGKICNNPHRILDGIDCTLIDALLGDPHCDGFQNETWDLFVERSKAFSNCYPYDVPDYASLRSLVASSGTLEFINEGFTWTGVTQNGGSNACKRGPDSGFFSRLNWLYKSGSTYPVLNVTMPNNDNFDKLYIWGVHHPSTNQEQTSLYVQASGRVTVSTKRSQQTIIPNIGSRPWVRGLSSRISIYWTIVKPGDILVINSNGNLIAPRGYFKMRTGKSSIMRSDAPIGTCISECITPNGSIPNDKPFQNVNKITYGACPKYVKQNTLKLATGMRNVPEKQTRGLFGAIAGFIENGWEGMIDGWYGFRHQNSEGTGQAADLKSTQAAIDQINGKLNRVIEKTNEKFHQIEKEFSEVEGRIQDLEKYVEDTKIDLWSYNAELLVALENQHTIDLTDSEMNKLFEKTRRQLRENAEDMGNGCFRIYHKCDNACIGSIRNGTYDHDVYRDEALNNRFQIKGVELKSGYKDWILWISFAISCFLLCVVLLGFIMWACQKGNIRCNICI

SEQ ID NO: 886 - protein, 566 aa, synthetic construct; identical to SEQ ID NO: 830
  REGION 1..566: note = hemagglutinin__InfluenzaA__ABE12645

SEQ ID NO: 887 - protein, 566 aa, synthetic construct; identical to SEQ ID NO: 807
  REGION 1..566: note = hemagglutinin__InfluenzaA__ABE13076

SEQ ID NO: 888 - protein, 566 aa, synthetic construct; identical to SEQ ID NO: 783
  REGION 1..566: note = hemagglutinin__InfluenzaA__ABE13323

SEQ ID NO: 889 - protein, 566 aa, synthetic construct
  REGION 1..566: note = hemagglutinin__InfluenzaA__ABE13471
MKTIIALSYILCLVFAQKLPGNDNSTATLCLGHHAVPNGTLVKTITNDQIEVTNATELVQNSSTGRICDSPHRILDGKNCTLIDALLGDPHCDGFQNKEWDLFVERSKAYSNCYPYDVPDYASLRSLVASSGTLEFYNESFNWTGVAQNGTSYACKRRSVKSFFSRLNWLHKLEYKYPALNVTMPNNDKFDKLYIWGVHHPSTDSDQTSLYVQASGRVTVSTKRSQQTVIPNIGSRPWVRGVSSRISIYWTIVKPGDILLINSTGNLIAPRGYFKIRSGKSSIMRSDAPIGNCNSECITPNGSIPNDKPFQNVNRITYGACPRYVKQNTLKLATGMRNVPEKQTRGIFGAIAGFIENGWEGMVDGWYGFRHQNSEGTGQAADLKSTQAAINQINGKLNRLIEKTNEKFHQIEKEFSEVEGRIQDLEKYVEDTKIDLWSYNAELLVALENQHTIDLTDSEMNKLFERTRKQLRENAEDMGNGCFRIYHKCDNACIGSIRNGTYDHDVYRDEALNNRFQIKGVELKSGYKDWILWISFAISCFLLCVVLLGFIMWACQKGNIRCNICI

SEQ ID NO: 890 - protein, 566 aa, synthetic construct
  REGION 1..566: note = hemagglutinin__InfluenzaA__ABE13555
MKTIIALSYILCLVFAQKLPGNDNSTATLCLGHHAVPNGTLVKTITNDQIEVTNATELVQGSSTGRICDSPHRILDGKNCTLIDALLGDPHCDGFQNKEWDLFVERSKAYSNCYPYDVPDYASLRSLVASSGTLEFNNESFNWTGVAQNGTSYACKRRSVKSFFSRLNWLHKLEYKYPALNVTMPNNDKFDKLYIWGVHHPSTDSDQTSLYVQASGRVTVSTKRSQQTVIPNIGSRPWVRGVSSRISIYWTIVKPGDILLISSTGNLIAPRGYFKIRSGKSSIMRSDAPIDNCNSECITPNGSIPNDKPFQNVNRITYGACPRYVKQNTLKLATGMRNVPEKQTKGIFGAIAGFIENGWEGMVDGWYGFRHQNSEGTGQAADLKSTQAAINQINGKLNRLIEKTNEKFHQIEKEFSEVEGRIQDLEKYVEDTKIDLWSYNAELLVALENQHTIDLTDSEMNKLFERTRKQLRENAEDMGNGCFKIYHKCDNACIGSIRNGTYDHDVYRDEALNNRFQIKGVELKSGYKDWILWISFAMSCFLLCVVLLGFIMWACQKGNIRCNICI

SEQ ID NO: 891 - protein, 566 aa, synthetic construct
  REGION 1..566: note = hemagglutinin__InfluenzaA__ABE13606
MKTIIALSYILCLVFAQKLPGNDNSTATLCLGHHAVPNGTLVKTITNDQIEVTNATEMVQSSSTGRICDSPHRILDGKNCTLIDALLGDPHCDGFQNKEWDLFVERSKAYSNCYPYDVPDYASLRSLVASSGTLEFTNEGFNWTGVAQDGTSYACKRGSVKSFFSRLNWLHKLEYKYPALNVTMPNNDKFDKLYIWGVHHPSTDSDQTSLYVQASGRVTVSTKRSQQTVIPNIGSRPWVRGVSSRISIYWTIVKPGDILLINSTGNLIAPRGYFKIRSGKSSIMRSDAPIGNCNSECITPNGSIPNDKPFQNVNRITYGACPRYVKQNTLKLATGMRNVPEKQTRGIFGAIAGFIENGWEGMVDGWYGFRHQNSEGTGQAADLKSTQAAINQINGKLNRLIEKTNEKFHQIEKEFSEVEGRIQDLEKYVEDTKIDLWSYNAELLIALENQHTIDLTDSEMNKLFERTRKQLRENAEDMGNGCFKIYHKCDNACIGSIRNGTYDHDVYRDEALNNRFQIKGVELKSGYKDWILWISFAISCFLLCVVLLGFIMWACQKGNIRCNICI

SEQ ID NO: 892 - protein, 566 aa, synthetic construct
  REGION 1..566: note = hemagglutinin__InfluenzaA__ABE13628
MKTIIALSYILCLVFAQKLPGNDNSTATLCLGHHAVPNGTLVKTITNDQIEVTNATELVQSSSTGRICDSPHRILDGKNCTLIDALLGDPHCDGFQNKEWDLFVERSKAYSNCYPYDVPDYASLRSLVASSGTLEFTNEGFNWTGVAQDGKSYACKRGSVNSFFSRLNWLHKLEYKYPALNVTMPNNDKFDKLYIWGVHHPSTDSDQTSLYVQASGRVTVSTKRSQQTVIPNIGSRPWVRGISSRISIYWTIVKPGDILLINSTGNLIAPRGYFKIRNGKSSIMRSDAPIDNCNSECITPNGSIPNDKPFQNVNRITYGACPRYVKQNTLKLATGMRNVPEKQTRGIFGAIAGFIENGWEGMVDGWYGFRHQNSEGTGQAADLKSTQAAIDQINGKLNRLIEKTNEKFHQIEKEFSEVEGRIQDLEKYVEDTKIDLWSYNAELLVALENQHTIDLTDSEMNKLFERTRKQLRENAEDMGNGCFKIYHKCDNACIGSIRNGTYDHDVYRDEALNNRFQIKGVELKSGYKDWILWISFAISCFLLCVVLLGFIMWACQKGNIRCNICI

SEQ ID NO: 893 - protein, 566 aa, synthetic construct
  REGION 1..566: note = hemagglutinin__InfluenzaA__ABE13824
MKTIIALSYILCQVFAQKLPGNDNSTATLCLGHHAVPNGTLVKTITNDQIEVTNATELVQSSSTGRICDSPHRILDGKNCTLIDALLGDPHCDGFQNKEWDLFVERSKAYSNCYPYDVPDYASLRSLVASSGTLEFTNEGFNWTGVAQDGKSYACKRGSVNSFFSRLNWLHKLEYKYPALNVTMPNNDKFDKLYIWGVHHPSTDSDQTSLYVQASGRVTVSTKRSQQTVIPNIGSRPWVRGISSRISIYWTIVKPGDILLINSTGNLIAPRGYFKIRNGKSSIMRSDAPIDNCNSECITPNGSIPNDKPFQNVNRITYGACPRYVKQNTLKLATGMRNVPEKQTRGIFGAIAGFIENGWEGMVDGWYGFRHQNSEGTGQAADLKSTQAAIDQINGKLNRLIEKTNEKFHQIEKEFSEVEGRIQDLEKYVEDTKIDLWSYNAELLVALENQHTIDLTDSEMNKLFERTRKQLRENAEDMGNGCFKIYHKCDNACIGSIRNGTYDHDVYRDEALNNRFQIKGVELKSGYKDWILWISFAISCFLLCVVLLGFIMWACQKGNIRCNICI

SEQ ID NO: 894 - protein, 566 aa, synthetic construct; identical to SEQ ID NO: 893
  REGION 1..566: note = hemagglutinin__InfluenzaA__ABE14019

SEQ ID NO: 895 - protein, 566 aa, synthetic construct
  REGION 1..566: note = hemagglutinin__InfluenzaA__ABE14030
MKTIIALSYILCLVFAQKLPGNDNSTATLCLGHHAVPNGTLVKTITNDQIEVTNATELVQSSSIGRICDSPHRILDGKNCTLIDALLGDPHCDGFQNKEWDLFVERSKAYSNCYPYDVPDYASLRSLVASSGTLEFTNEGFNWTGVAQDGKSYACKRGSVNSFFSRLNWLHKLEYKYPALNVTMPNNDKFDKLYIWGVHHPSTDSDQTSLYVQASGRVTVSTKRSQQTVIPNIGSRPWVRGISSRISIYWTIVKPGDILLINSTGNLIAPRGYFKIRNGKSSIMRSDAPIDNCNSECITPNGSIPNDKPFQNVNRITYGACPRYVKQNTLKLATGMRNVPEKQTRGIFGAIAGFIENGWEGMVDGWYGFRHQNSEGTGQAADLKSTQAAIDQINGKLNRLIEKTNEKFHQIEKEFSEVEGRIQDLEKYVEDTKIDLWSYNAELLVALENQHTIDLTDSEMNKLFERTRKQLRENAEDMGNGCFKIYHKCDNACIGSIRNGTYDHDVYRDEALNNRFQIKGVELKSGYKDWILWISFAISCFLLCVVLLGFIMWACQKGNIRCNICI

SEQ ID NO: 896 - protein, 566 aa, synthetic construct; identical to SEQ ID NO: 892
  REGION 1..566: note = hemagglutinin__InfluenzaA__ABE14041

SEQ ID NO: 897 - protein, 566 aa, synthetic construct; identical to SEQ ID NO: 893
  REGION 1..566: note = hemagglutinin__InfluenzaA__ABE14063

SEQ ID NO: 898 - protein, 566 aa, synthetic construct
  REGION 1..566: note = hemagglutinin__InfluenzaA__ABE14124
MKTIIALSYILCLVFAQKLPGNDNSTATLCLGHHAVPNGTLVKTITNDQIEVTNATELVQSSSTGRICDSPHRILDGKNCTLIDALLGDPHCDGFQNKEWDLFVERSKAYSNCYPYDVPDYASLRSLVASSGTLEFTNEGFNWTGVAQDGTSYACKRGSVKSFFSRLNWLHKLEYKYPALNVTMPNNDKFDKLYIWGVHHPSTDSDQTSLYVQASGRVTVSTKRSQQTVIPNIGSRPWVRGVSSRISIYWTIVKPGDILLINSTGNLIAPRGYFKIRSGKSSIMRSDAPIGNCNSECITPNGSIPNDKPFQNVNRITYGACPRYVKQNTLKLATGMRNVPEKQTRGIFGAIAGFIENGWEGMVDGWYGFRHQNSEGTGQAADLKSTQAAINQINGKLNRLIEKTNEKFHQIEKEFSEVEGRIQDLEKYVEDTKIDLWSYNAELLIALENQHTIDLTDSEMNKLFERTRKQLRENAEDMGNGCFKIYHKCDNACIGSIRNGTYDHDVYRDEALNNRFQIKGVELKSGYKDWILWISFAISCFLLCVVLLGFIMWACQKGNIRCNICI

SEQ ID NO: 899 - protein, 566 aa, synthetic construct
  REGION 1..566: note = hemagglutinin__InfluenzaA__ABE14464
MKTIIALSYILCQVFAQKLPGNDNSTATLCLGHHAVPNGTLVKTITNDQIEVTNATELVQSSSTGRICDSPHRILDGKNCTLIDALLGDPHCDGFQNKEWDLFVERSKAYSNCYPYDVPDYASLRSLVASSGTLEFTNEGFNWTGVAQDGKSYACKRGSVNSFFSRLNWLHKLEYKYPALNVTMPNNDKFDKLYIWGVHHPSTDSDQTSLYVQASGRVTVSTKRSQQTVIPNIGSRPWVRGISSRISIYWTIVKPGDILLINSTGNLIAPRGYFKIRNGKSSIMRSDAPIDNCNSECITPNGSIPNDKPFQNVNRITYGACPRYVKQNTLKLATGMRNVPEKQTRGIFGAIAGFIENGWEGMIDGWYGFRHQNSEGTGQAADLKSTQAAIDQINGKLNRLIEKTNEKFHQIEKEFSEVEGRIQDLEKYVEDTKIDLWSYNAELLVALENQHTIDLTDSEMNKLFERTRKQLRENAEDMGNGCFKIYHKCDNACIGSIRNGTYDHDVYRDEALNNRFQIKGVELKSGYKDWILWISFAISCFLLCVVLLGFIMWACQKGNIRCNICI

SEQ ID NO: 900 - protein, 566 aa, synthetic construct
  REGION 1..566: note = hemagglutinin__InfluenzaA__ABE14840
MKTIIALSYILCLVFAQKLPRNDNSTATLCLGHHAVPNGTLVKTITNDQIEVTNATELVQSSSTGRICDSPHRILDGKNCTLIDALLGDPHCDGFQNKEWDLFVERSKAYSNCYPYDVPDYASLRSLVASSGTLEFTNEGFNWTGVAQDGKSYACKRGSVNSFFSRLNWLHKLEYKYPALNVTMPNNDKFDKLYIWGVHHPSTDSDQTSLYVQASGRVTVSTKRSQQTVIPNIGSRPWVRGISSRISIYWTIVKPGDILLISSTGNLIAPRGYFKIRNGKSSIMRSDAPIDNCNSECITPNGSIPNDKPFQNVNRITYGACPRYVKQNTLKLATGMRNVPEKQTRGIFGAIAGFIENGWEGMVDGWYGFRHQNSEGTGQAADLKSTQAAIDQINGKLNRLIEKTNEKFHQIEKEFSEVEGRIQDLEKYVEDTKIDLWSYNAELLVALENQHTIDLTDSEMNKLFERTRKQLRENAEDMGNGCFKIYHKCDNACIGSIRNGTYDHDVYRDEALNNRFQIKGVELKSGYKDWILWISFAISCFLLCVVLLGFIMWACQKGNIRCSICI

SEQ ID NO: 901 - protein, 566 aa, synthetic construct
  REGION 1..566: note = hemagglutinin__InfluenzaA__ABE15578
MKTIIALSYILCLVFAQKLPGNDNSTATLCLGHHAVPNGTLVKTITNDQIEVTNATELVQSSSTGRICDSPHRILDGKNCTLIDALLGDPHCDGFQNKEWDLFVERSKAYSNCYPYDVPDYASLRSLVASSGTLEFTNEGFNWTGVAQDGKSYACKRGSVNSFFSRLNWLHKLEYKYPALNVTMPNNDKFDKLYIWGVHHPSTDSDQTSLYVQASGRVTVSTKRSQQTVIPNIGSRPWVRGISSRISIYWTIVKPGDILLINSTGNLIAPRGYFKIRNGKSSIMRSDAPIDNCNSECITPNGSIPNDKPFQNVNRITYGACPRYVKQNTLKLATGMRNVPEKQTRGIFGAIAGFIENGWEGMVDGWYGFRHQNSEGTGQAADLKSTQAAIDQINGKLNRLIEKTNEKFHQIEKEFSEVEGRIQDLEKYVEDTKIDLWSYNAELLVALENQHTIDLTDSEMNKLFERTRKQLRENAEDMGNGCFKIYHKCDNACIGSIRNGTYDHDVYRDEALNNRFQIKGVELKSGYKDWILWISFAISCFLLCVVLLGFIMWACQKGNIRCSICI

SEQ ID NO: 902 - protein, 566 aa, synthetic construct
  REGION 1..566: note = hemagglutinin__InfluenzaA__ABE26991
MKAKLLVLLCAFTATYADTICIGYHANNSTDTVDTVLEKNVTVTHSVNLLEDSHNGKLCRLKGTAPLQLGNCSVAGWILGNPECESLFSKESWSYIAETPNPENGTCYPGYFADYEELREQLSSVSSFERFEIFPKESSWPNHTVTKGVTASCSHNGKSSFYKNLLWLTEKNGLYPNLSKSYVNNKEKEVLVLWGVHHPSNIGDQRAIYHTENAYVSVVSSHYSRRFTPEIAKRPKVRDQEGRINYYWTLLEPGDTIIFEANGNLIAPWYAFALSRGFGSGIITSNASMGDCDAKCQTPQGAINSSLPFQNVHPVTIGECPKYVRSTKLRMVTGLRNIPSIQSRGLFGAIAGFIEGGWTGMIDGWYGYHHQNEQGSGYAADKKSTQNAIDGITNKVNSVIEKMNTQFTAVGKEFNKLERRMENLNKKVDDGFLDIWTYNAELLVLLENERTLDFHDSNVKNLYEKVKNQLKNNAKEIGNGCFEFYHKCNNECMESVKNGTYDYPKYSEESTLKREKIDGVKLESMGVYQILAIYSTVASSLVLLVSLGAISFWMCSNGSLQCRICI

SEQ ID NO: 903 - protein, 566 aa, synthetic construct
  REGION 1..566: note = hemagglutinin__InfluenzaA__ABF47550
MKTIIALSYIFCLVFAQKLPGNDNSTATLCLGHHAVPNGTLVKTITNDQIEVTNATELVQSSSTGRICDSPHRILDGKNCTLIDALLGDPHCDGFQNEKWDLFVERSKAYSNCYPYDVPDYASLRSLVASSGTLEFINEDFNWTGVTQSGGSYACKRGSVNSFFSRLNWLHESEYKYPALNVTMPNNGKFDKLYIWGVHHPSTDREQTNLYVRASGRVTVSTKRSQQTVIPNIGSRPWVRGLSSRISIYWTIVKPGDILLINSTGNLIAPRGYFKIRTGKSSIMRSDAPIGTCSSECITPNGSIPNDKPFQNVNKITYGACPRYVKQNTLKLATGMRNVPEKQTRGIFGAIAGFIENGWEGMVDGWYGFRHQNSEGTGQAADLKSTQAAIDQINGKLNRLIEKTNEKFHQIEKEFSEVEGRIQDLEKYVEDTKIDLWSYNAELLVALENQHTIDLTDSEMNKLFEKTRKQLRENAEDMGNGCFKIYHKCDNACIGSIRNGTYDHDVYRDEALNNRFQIKGVELKSGYKDWILWISFAISCFLLCVVLLGFIMWACQKGNIRCNICI

SEQ ID NO: 904 - protein, 565 aa, synthetic construct
  REGION 1..565: note = hemagglutinin__InfluenzaA__ABF47561
MKAKLLVLLCTFTATYADTICIGYHANNSTDTVDTVLEKNVTVTHSVNLLEDSHNGKLCLLKGIAPLQLGNCSVAGWILGNPECELLISKESWSYIVETPNPENGTCYPGYFADYEELREQLSSVSSFERFEIFPKGSSWPNHTVTGVSASCSHNGKSSFYRNLLWLTGKNGLYPKLSMSYVNNKEKEVLVLWGVHHPPNIGDQRALYHTENAYVSVVSSHYSRRFTPEIAKRPKVRDQEGRINYYWTLLEPGDTIIFEANGNLIAPWYAFALSRGFGSGIITSNAPMGECDAKCQTPQGAINSSLPFQNVHPVTIGECPKYVRSAKLRMVTGLRNIPSIQSRGLFGAIAGFIEGGWTGMVDGWYGYHHQNEQGSGYAADQKSTQNAINGITNKVNSVIEKMNTQFTAVGKEFNKLERRMENLNKKVDDGFLDIWTYNAELLVLLENERTLDFHDSNVKNLYEKVKSQLKNNAKEIGNGCFEFYHKCNNECMESVKNGTYDYPKYSEESKLNREKIDGVKLESMGVYQILAIYSTVASSLVLLVSLGAISFWMCSNGSLQCRICI

SEQ ID NO: 905 - protein, 565 aa, synthetic construct
  REGION 1..565: note = hemagglutinin__InfluenzaA__ABF47572
MKAKLLVLLCTFTATYADTICIGYHANNSTDTVDTVLEKNVTVTHSVNLLEDSHNGKLCLLKGIAPLQLGNCSVAGWILGNPECELLISKESWSYIVETPNPENGTCYPGYFADYEELREQLSSVSSFERFEIFPKGSSWPNHTVTGVSASCSHNGKSSFYRNLLWLTGKNGLYPNLSMSYVNNKDKEVLVLWGVHHPPNIGDQRALYHTENAYVSVVSSHYSRRFTPEIAKRPKVRDQEGRINYYWTLLEPGDTIIFEANGNLIAPWYAFALSRGFGSGIITSNAPMGECDAKCQTPQGAINSSLPFQNVHPVTIGECPKYVRSAKLRMVTGLRNIPSIQSRGLFGAIAGFIEGGWTGMVDGWYGYHHQNEQGSGYAADQKSTQNAINGITNKVNSVIEKMNTQFTAVGKEFNKLERRMENLNKKVDDGFLDIWTYNAELLVLLENERTLDFHDSNVKNLYEKVKSQLKNNAKEIGNGCFEFYHKCNNECMESVKNGTYDYPKYSEESKLNREKIDGVKLESMGVYQILAIYSTVASSLVLLVSLGAISFWMCSNGSLQCRICI

SEQ ID NO: 906 - protein, 565 aa, synthetic construct; identical to SEQ ID NO: 800
  REGION 1..565: note = hemagglutinin__InfluenzaA__ABF47583

SEQ ID NO: 907 - protein, 566 aa, synthetic construct
  REGION 1..566: note = hemagglutinin__InfluenzaA__ABF47594
MKTIIALSYILCLVFAQKLPGNDNSTATLCLGHHAVPNGTLVKTITNDQIEVTNATELVQSSSTGRICDSPHRILDGKNCTLIDALLGDPHCDGFQNKEWDLFVERSKAYSNCYPYDVPDYASLRSLVASSGTLEFNNESFNWTGVAQNGTSYACKRRSVKSFFSRLNWLHKLEYKYPAQNVTMPNNDKFDKLYIWGVHHPSTDSDQTSLYVQASGRVTVSTKRSQQTVIPNIGSRPWVRGVSSRISIYWTIVKPGDILLINSTGNLIAPRGYFKIRSGKSSIMRSDAPIGNCNSECITPNGSIPNDKPFQNVNRITYGACPRYVKQNTLKLATGMRNVPEKQTRGIFGAIAGFIENGWEGMVDGWYGFRHQNSEGTGQAADLKSTQAAINQINGKLNRLIEKTNEKFHQIEKEFSEVEGRIQDLEKYVEDTKIDLWSYNAELLVALENQHTIDLTDSEMNKLFERTRKQLRENAEDMGNGCFKIYHKCDNACIGSIRNGTYDHDVYRDEALNNRFQIKGVELKSGYKDWILWISFAISCFLLCVVLLGFIMWACQKGNIRCNICI

SEQ ID NO: 908 - protein, 566 aa, synthetic construct
  REGION 1..566: note = hemagglutinin__InfluenzaA__ABF47605
MKAKLLVLLCAFTATYADTICIGYHANNSTDTVDTVLEKNVTVTHSVNLLEDSHNGKLCRLKGTAPLQLGNCSVAGWILGNPECESLFSKESWSYIAETPNPENGTCYPGYFADYEELREQLSSVSSFERFEIFPKESSWPNHTVTKGVTASCSHNGKSSFYKNLLWLTEKNGLYPNLSKSYVNNKEKEVLVLWGVHHPSNIGDQRAIYHTENAYVSVVSSHYSRRFTPEIAKRPKVRDQEGRINYYWTLLEPGDTIIFEASGNLIAPWYAFALSRGFGSGIITSNASMGECDAKCQTPQGAINSSLPFQNVHPVTIGECPKYVRSTKLRMVTGLRNIPSIQSRGLFGAIAGFIEGGWTGMIDGWYGYHHQNEQGSGYAADKKSTQNAIDGITNKVNSVIEKMNTQFTAVGKEFNKLERRIENLNKKVDDGFLDIWTYNAELLVLLENERTLDFHDSNVKNLYEKVKNQLKNNAKEIGNGCFEFYHKCNNECMESVKNGTYDYPKYSEESKLKREKIDGVKLESMGVYQILAIYSTVASSLVLLVSLGAISFWMCSNGSLQCRICI

SEQ ID NO: 909 - protein, 566 aa, synthetic construct; identical to SEQ ID NO: 893
  REGION 1..566: note = hemagglutinin__InfluenzaA__ABF47616

SEQ ID NO: 910 - protein, 566 aa, synthetic construct
  REGION 1..566: note = hemagglutinin__InfluenzaA__ABF47627
MKAKLLVLLCAFTATYADTICIGYHANNSTDTVDTVLEKNVTVTHSVNLLEDSHNGKLCRLKGTAPLQLGNCSVAGWILGNPECESLFSKESWSYIAETPNPENGTCYPGYFADYEELREQLSSVSSFERFEIFPKESSWPNHTVTKGVTASCSHNGKSSFYKNLLWLTEKNGLYPNLSKSYVNNKEKEVLVLWGVHHPSNIGDQRAIYHTENAYVSVVSSHYSRRFTPEIAKRPKVRDQEGRINYYWTLLEPGDTIIFEANGNLIAPWYAFALSRGFGSGIITSNASMGDCDAKCQTPQGAINSSLPFQNVHPVTIGECPKYVRSTKLRMVTGLRNIPSIQSRGLFGAIAGFIEGGWTGMIDGWYGYHHQNEQGSGYAADKKSTQNAIDGITNKVNSVIEKMNTQFTAVGKEFNKLERRMENLNKKVDDGFLDIWTYNAELLVLLENERTLDFHDSNVKNLYEKVKNQLKNNAKEIGNGCFEFYHKCNNECMESVKNGTYDYPKYSEESKLKREKIDGVKLESMGVYQILAIYSTVASSLVLLVSLGAISFWMCSNGSLQCRICI

SEQ ID NO: 911 - protein, 566 aa, synthetic construct
  REGION 1..566: note = hemagglutinin__InfluenzaA__ABF47638
MKAKLLVLLCAFTATYADTICIGYHANNSTDTVDTVLEKNVTVTHSVNLLEDSHNGKLCRLKGTAPLQLGNCSVAGWILGNPECESLFSKESWSYIAETPNPENGTCYPGYFADYEELREQLSSVSSFERFEIFPKESSWPNHTVTKGVTASCSHNGKSSFYKNLLWLTEKNGLYPNLSKSYVNNKEKEVLVLWGVHHPSNIGDQRAIYHTENAYVSVVSSHYSRRFTPEITKRPKVRDQEGRINYYWTLLEPGDTIIFEANGNLIAPWYAFALSRGFGSGIITSNASMGECDAKCQTPQGAINSSLPFQNVHPVTIGECPKYVRSTKLRMVTGLRNIPSIQSRGLFGAIAGFIEGGWTGMIDGWYGYHHQNEQGSGYAADQKSTQNAIDGITNKVNSVIEKMNTQFTAVGKEFNKLERRMENLNKKVDDGFLDIWTYNAELLVLLENERTLDFHDSNVKNLYEKVKTQLKNNAKEIGNGCFEFYHKCNNECMESVKNGTYDYPKYSEESKLNREKIDGVKLESMGVYQILAIYSTVASSLVLLVSLGAISFWMCSNGSLQCRICI

SEQ ID NO: 912 - protein, 566 aa, synthetic construct; identical to SEQ ID NO: 911
  REGION 1..566: note = hemagglutinin__InfluenzaA__ABF47649

SEQ ID NO: 913 - protein, 566 aa, synthetic construct
  REGION 1..566: note = hemagglutinin__InfluenzaA__ABF47660
MKAKLLVLLCAFTATYADTICIGYHANNSTDTVDTVLEKNVTVTHSVNLLEDSHNGKLCRLKGTAPLQLGNCSVAGWILGNPECESLFSKESWSYIAETPNPENGTCYPGYFADYEELREQLSSVSSFERFEIFPKESSWPNHTVTKGVTASCSHNGKSSFYKNLLWLTEKNGLYPNLSKSYVNNKEKEVLVLWGIHHPSNIGDQRAIYHTENAYVSVVSSHYSRRFTPEIAKRPKVRDQEGRINYYWTLLEPGDTIIFEANGNLIAPWYAFALSRGFGSGIITSNASMGDCDAKCQTPQGAINSSLPFQNVHPVTIGECPKYVRSTKLRMVTGLRNIPSIQSRGLFGAIAGFIEGGWTGMIDGWYGYHHQNEQGSGYAADKKSTQNAIDGITNKVNSVIEKMNTQFTAVGKEFNKLERRMENLNKKVDDGFLDIWTYNAELLVLLENERTLDFHDSNVKNLYEKVKTQLKNNAKEIGNGCFEFYHKCNNECMESVKNGTYDYPKYSEESKLKREKIDGVKLESMGVYQILAIYSTVASSLVLLVSLGAISFWMCSNGSLQCRICI

SEQ ID NO: 914 - protein, 565 aa, synthetic construct
  REGION 1..565: note = hemagglutinin__InfluenzaA__ABF47671
MKAKLLVLLCTFTATYADTICIGYHANNSTDTVDTVLEKNVTVTHSVNLLEDSHNGKLCLLKGIAPLQLGNCSVAGWILGNPECELLISKESWSYIVETPNPENGTCYPGYFADYEELREQLSSVSSFERFEIFPKGSSWPNHTVTGVSASCSHNGKSSFYRNLLWLTGKNGLYPNLSMSYVNNKEKEVLVLWGVHHPPNIGDQRALYHTENAFVSVVSSHYSRRFTPEIAKRPKVRDQEGRINYYWTLLEPGDTIIFEANGNLIAPWYAFALSRGFGSGIITSNAPMDECDAKCQTPQGAINSSLPFQNVHPVTIGECPKYVRSAKLRMVTGLRNIPSIQSRGLFGAIAGFIEGGWTGMVDGWYGYHHQNEQGSGYAADQKSTQNAINGITNKVNSVIEKMNTQFTAVGKEFNKLERRMENLNKKVDDGFLDIWTYNAELLVLLENERTLDFHDSNVKNLYEKVKSQLKNNAKEIGNGCFEFYHKCNNECMESVKNGTYDYPKYSEESKLNREKIDGVKLESMGVYQILAIYSTVASSLVLLVSLGAISFWMCSNGSLQCRICI

SEQ ID NO: 915 - protein, 566 aa, synthetic construct
  REGION 1..566: note = hemagglutinin__InfluenzaA__ABF47693
MKAKLLVLLCALSATDADTICIGYHANNSTDTVDTVLEKNVTVTHSVNLLEDSHNGKLCRLKGIAPLQLGKCNIAGWILGNPECESLFSKKSWSYIAETPNSENGTCYPGYFADYEELREQLSSVSSFERFEIFPKERSWPKHNVTRGVTASCSHKGKSSFYRNLLWLTEKNGSYPNLSKSYVNNKEKEVLVLWGVHHPSNIEDQKTIYRKENAYVSVVSSNYNRRFTPEIAERPKVRGQAGRINYYWTLLEPGDTIIFEANGNLIAPWHAFALNRGFGSGIITSNASMDECDTKCQTPQGAINSSLPFQNIHPVTIGECPKYVRSTKLRMVTGLRNIPSIQSRGLFGAIAGFIEGGWTGMIDGWYGYHHQNEQGSGYAADQKSTQNAINGITNKVNSVIEKMNTQFTAVGKEFNKLEKRMENLNKKVDDGFLDIWTYNAELLVLLENERTLDFHDSNVKNLYEKVKSQLKNNAKEIGNGCFEFYHKCNNECMESVKNGTYDYPKYSEESKLNREKIDGVKLESMGVYQILAIYSTVASSLVLLVSLGAISFWMCSNGSLQCRICI

SEQ ID NO: 916 - protein, 566 aa, synthetic construct; identical to SEQ ID NO: 915
  REGION 1..566: note = hemagglutinin__InfluenzaA__ABF47704

SEQ ID NO: 917 - protein, 566 aa, synthetic construct
  REGION 1..566: note = hemagglutinin__InfluenzaA__ABF47715
MKAKLLVLLCALSATDADTICIGYHANNSTDTVDTVLEKNVTVTHSVNLLEDSHNGKLCRLKGIAPLQLGKCSIAGWILGNPECESLFSKKSWSYIAETPNSENGTCYPGYFADYEELREQLSSVSSFERFEIFPKERSWPKHNVTRGVTASCSHKGKSSFYRNLLWLTEKNGSYPNLSKSYVNNKEKEVLVLWGVHHPSNIEDQKTIYRKENAYVSVVSSNYNRRFTPEIAERPKVRGQAGRINYYWTLLEPGDTIIFEANGNLIAPWHAFALNRGFGSGIITSNASMDECDTKCQTPQGAINSSLPFQNIHPVTIGECPKYVRSTKLRMVTGLRNIPSIQSRGLFGAIAGFIEGGWTGMIDGWYGYHHQNEQGSGYAADQKSTQNAINGITNKVNSVIEKMNTQFTAVGKEFNKLEKRMENLNKKVDDGFLDIWTYNAELLVLLENERTLDFHDSNVKNLYEKVKSQLKNNAKEIGNGCFEFYHKCNNECMESVKNGTYDYPKYSEESKLNREKIDGVKLESMGVYQILAIYSTVASSLVLLVSLGAISFWMCSNGSLQCRICI

SEQ ID NO: 918 - protein, 566 aa, synthetic construct; identical to SEQ ID NO: 915
  REGION 1..566: note = hemagglutinin__InfluenzaA__ABF47726

SEQ ID NO: 919 - protein, 566 aa, synthetic construct; identical to SEQ ID NO: 915
  REGION 1..566: note = hemagglutinin__InfluenzaA__ABF47737

SEQ ID NO: 920 - protein, 566 aa, synthetic construct
  REGION 1..566: note = hemagglutinin__InfluenzaA__ABF47748
MKAKLLVLLCALSATDADTICIGYHANNSTDTVDTVLEKNVTVTHSVNLLEDSHNGKLCRLKGIAPLQLGKCSIAGWILGNPECESLFSKKSWSYIAETPNSENGTCYPGYFADYEELREQLSSVSSFERFEIFPKESSWPKHNVTRGVTASCSHKGKSSFYRNLLWLTEKNGSYPNLSKSYVNNKEKEVLVLWGVHHPSNIEDQKTIYRKENAYVSVVSSHYNRRFTPEIAKRPKVRDQEGRINYYWTLLEPGDTIIFEANGNLIAPWYAFALSRGFGSGIITSNASMDECDAKCQTPQGAINSSLPFQNVHPVTIGECPKYVRSTKLRMVTGLRNIPSIQSRGLFGAIAGFIEGGWTGMIDGWYGYHHQNEQGSGYAADQKSTQNAINGITNKVNSVIEKMNTQFTAVGKEFNKLEKRMENLNKKVDDGFLDIWTYNAELLVLLENERTLDFHDSNVKNLYEKVKSQLKNNAKEIGNGCFEFYHKCNNECMESVKNGTYDYPKYSEESKLNREKIDGVKLESMGVYQILAIYSTVASSLVLLVSLGAISFWMCSNGSLQCRICI

SEQ ID NO: 921 - protein, 566 aa, synthetic construct
  REGION 1..566: note = hemagglutinin__InfluenzaA__ABF47770
MKAKLLVLLCALSATDADTICIGYHANNSTDTVDTVLEKNVTVTHSVNLLEDNHNGKLCKLKGIAPLQLGKCSIAGWILGNPECESLFSKKSWSYIAETPNSENGTCYPGYFADYEELREQLSSVSSFERFEIFPKESSWPKHNVTKGVTASCSHKGKSSFYRNLLWLTEKNGSYPNLSKSYVNNKEKEVLVLWGVHHPSNIEDQKTIYRKENAYVSVVSSHYNRRFTPEIAKRPKVRNQEGRINYYWTLLEPGDTIIFEANGNLIAPWYAFALSRGFGSGIITSNASMDECDAKCQTPQGAINSSLPFQNVHPVTIGECPKYVRSTKLRMVTGLRNIPSIQSRGLFGAIAGFIEGGWTGMIDGWYGYHHQNEQGSGYAADQKSTQNAINGITNKVNSIIEKMNTQFTAVGKEFNKLEKRMENLNKKVDDGFLDIWTYNAELLVLLENERTLDFHDSNVKNLYEKVKSQLKNNAKEIGNGCFEFYHKCNNECMESVKNGTYDYPKYSEESKLNREKIDGVKLESMGVYQILAIYSTVASSLVLLVSLGAISFWMCSNGSLQCRICI

SEQ ID NO: 922 - protein, 566 aa, synthetic construct; identical to SEQ ID NO: 921
  REGION 1..566: note = hemagglutinin__InfluenzaA__ABF47781

SEQ ID NO: 923 - protein, 566 aa, synthetic construct; identical to SEQ ID NO: 921
  REGION 1..566: note = hemagglutinin__InfluenzaA__ABF47792

SEQ ID NO: 924 - protein, 566 aa, synthetic construct; identical to SEQ ID NO: 921
  REGION 1..566: note = hemagglutinin__InfluenzaA__ABF47803

SEQ ID NO: 925 - protein, 566 aa, synthetic construct; identical to SEQ ID NO: 921
  REGION 1..566: note = hemagglutinin__InfluenzaA__ABF47814

SEQ ID NO: 926 - protein, 566 aa, synthetic construct; identical to SEQ ID NO: 921
  REGION 1..566: note = hemagglutinin__InfluenzaA__ABF47825

SEQ ID NO: 927 - protein, 566 aa, synthetic construct; identical to SEQ ID NO: 921
  REGION 1..566: note = hemagglutinin__InfluenzaA__ABF47836

SEQ ID NO: 928 - protein, 566 aa, synthetic construct; identical to SEQ ID NO: 921
  REGION 1..566: note = hemagglutinin__InfluenzaA__ABF47847

SEQ ID NO: 929 - protein, 566 aa, synthetic construct
  REGION 1..566: note = hemagglutinin__InfluenzaA__ABF47858
MKTIIALSYILCLVFAQKLPGNDNGTATLCLGHHAVPNGTLVKTITNDQIEVTNATELVQSSSTGRICDSPHRILDGKNCTLIDALLGDPHCDGFQNKEWDLFVERSKAYSNCYPYDVPDYASLRSLVASSGTLEFINEDFNWTGVAQDGKSYACKRGSVNSFFSRLNWLHKLEYKYPALNVTMPNNGKFDKLYIWGVHHPSTDSDQTSLYVRASGRVTVSTKRSQQTVIPNIGFRPWVRGLSSRISIYWTIVKPGDILLINSTGNLIAPRGYFKIRNGKSSIMRSDAPIGNCSSECITPNGSIPNDKPFQNVNRITYGACPRYVKQNTLKLATGMRNVPEKQTRGIFGAIAGFIENGWEGMVDGWYGFRHQNSEGTGQAADLKSTQAAIDQINGKLNRLIEKTNEKFHQIEKEFSEVEGRIQDLEKYVEDTKIDLWSYNAGLLVALENQHTIDLTDSEMNKLFERTRKQLRENAEDMGNGCFKIYHKCDNACIGSIRNGTYDHDVYRDEALNNRFQIKGVELKSGYKDWILWISFAISCFLLCVVLLGFIMWACQKGNIRCNICI

SEQ ID NO: 930 - protein, 565 aa, synthetic construct; identical to SEQ ID NO: 742
  REGION 1..565: note = hemagglutinin__InfluenzaA__ABF47869

SEQ ID NO: 931 - protein, 565 aa, synthetic construct; identical to SEQ ID NO: 742
  REGION 1..565: note = hemagglutinin__InfluenzaA__ABF47880

SEQ ID NO: 932 - protein, 565 aa, synthetic construct
  REGION 1..565: note = hemagglutinin__InfluenzaA__ABF47891
MKVKLLVLLCTFTATYADTICIGYHANNSTDTVDTVLEKNVTVTHSVNLLEDSHNGKLCLLKGIAPLQLGNCSVAGWILGNPECELLISKESWSYIVETPNPENGTCYPGYFADYEELREQLSSVSSFERFEIFPKESSWPNHTVTGVSASCSHNGKSSFYRNLLWLTRKNGLYPNLSKSYANNKEKEVLVLWGVHHPPNIGDQRALYHTENAYVSVVSSHYSRRFTPEIAKRPKVRDQEGRINYYWTLLEPGDTIIFEANGNLIAPRYAFALSRGFGSGIITSNAPMDECDAKCQTPQGAINSSLPFQNVHPVTIGECPKYVRSAKLRMVTGLRNIPSIQSRGLFGAIAGFIEGGWTGMVDGWYGYHHQNEQGSGYAADQKSTQNAINGITNKVNSVIEKMNTQFTAVGKEFNKLERRMENLNKKVDDGFLDIWTYNAELLVLLENERTLDFHDSNVKNLYEKVKSQLKNNAKEIGNGCFEFYHKCNNECMESVKNGTYDYPKYSEESKLNREKIDGVKLESMGVYQILAIYSTVASSLVLLVSLGAISFWMCSNGSLQCRICI

SEQ ID NO: 933 - protein, 566 aa, synthetic construct
  REGION 1..566: note = hemagglutinin__InfluenzaA__ABF47902
MKTIIALSYILCLVFAQKLPGNDNSTATLCLGHHAVPNGTLVKTITNDQIEVTNATELVQSSSTGGICDSPHQILDGENCTLIDALLGDPHCDGFQNKEWDLFVERSKAYSNCYPYDVPDYASLRSLVASSGTLEFNNESFNWTGVAQNGTSSACKRRSNKSFFSRLNWLHQLKYKYPALNVTMPNNEKFDKLYIWGVHHPSTDSDQISLYAQAPGRVTVSTKRSQQTVIPNIGSRPWVRGVSSRISIYWTIVKSGDILLINCTGNLIAPRGYFKIRSGKSSIMRSDASIGKCNSECITPNGSIPNDKPFQNVNRITYGACPRYVKQNTLKLATGMRNVPEKQTRGIFGAIAGFIENGWEGMVDGWYGFRHQNSEGTGQAADLKSTQAAINQINGKLNRLIEKTNEKFHQIEKEFSEVEGRIQDLEKYVEDTKIDLWSYNAELLVALENQHTIDLTDSEMNKLFERTKKQLRENAEDMGNGCFKIYHKCDNACIGSIRNGTYDHDVYRDEALNNRFQIKGVELKSGYKDWILWISFAISCFLLCVVLLGFIMWACQKGNIRCNICI

SEQ ID NO: 934 - protein, 565 aa, synthetic construct
  REGION 1..565: note = hemagglutinin__InfluenzaA__ABF47955
MKAKLLVLLYAFVATDADTICIGYHANNSTDTVDTIFEKNVAVTHSVNLLEDRHNGKLCKLKGIAPLQLGKCNITGWLLGNPECDSLLPARSWSYIVETPNSENGACYPGDFIDYEELREQLSSVSSLERFEIFPKESSWPNHTFNGVTVSCSHRGKSSFYRNLLWLTKKGDSYPKLTNSYVNNKGKEVLVLWGVHHPSSSDEQQSLYSNGNAYVSVASSNYNRRFTPEIAARPKVKDQHGRMNYYWTLLEPGDTIIFEATGNLIAPWYAFALSRGFESGIITSNASMHECNTKCQTPQGSINSNLPFQNIHPVTIGECPKYVRSTKLRMVTGLRNIPSIQYRGLFGAIAGFIEGGWTGMIDGWYGYHHQNEQGSGYAADQKSTQNAINRITNKVNSVIEKMNTQFTAVGKEFNNLEKRMENLNKKVDDGFLDIWTYNAELLVLLENERTLDFHDLNVKNLYEKVKSQLKNNAKEIGNGCFEFYHKCDNECMESVRNGTYDYPKYSEESKLNREKIDGVKLESMGVYQILAIYSTVASSLVLLVSLGAISFWMCSNGSLQCRICI

SEQ ID NO: 935 - protein, 565 aa, synthetic construct
  REGION 1..565: note = hemagglutinin__InfluenzaA__ABF60576
MKTTIILILLTHAVDSQNPISGNNTATLCLGHHAVANGTLVKTITDDQIEVTNATELVQSTSIGKICNNPYRVLDGRNCTLIDAMLGDPHCDVFQYENWDLFIERSSAFSNCYPYDIPDYASLRSIVASSGTLEFTAEGFTWTGVTQNGGSGACRRGSADSFFSRLNWLTKSGNSYPTLNVTMPNNDNFDKLYIWGIHHPSTNNEQTKLYVQELGRVTVSTKRSQQTIIPNIGSRPGVRGQAGRISIYWTIVKPGDILMINSNGNLVAPRGYFKMRTGKSSIMRSDAPIDTCWSECITPNGSIPNDKPFQNVNKVTYGKCPKYIKQNTLKLATGMRNVPEKQIRGIFGAIAGFIENGWEGMVDGWYGFRYQNSEGTGQAADLKSTQAAIDQINGKLNRVIERTNEKFHQIEKEFSEVEGRIQDLEKYVEDTKIDLWSYNAELLVALENQHTIDLTDAEMNKLFEKTRRQLRENAEDMGGGCFKIYHKCDNACIGSIRNGTYDHYIYRDEALNNRFQIKGVELKSGYKDWILWISFAISCFLICVVLLGFIMWACEKGNIRCNICI

SEQ ID NO: 936 - protein, 566 aa, synthetic construct
  REGION 1..566: note = hemagglutinin__InfluenzaA__ABF60577
MKTIIVLSYFFCLALSQDYSESNNSTATLCLGHHAVPNGTIVKTITDDQIEVTNATELVQSSSTGKICNNPHRILDGRDCTLIDALLGDPHCDVFQDETWDLYVERSSAFSNCYPYDVPDYASLRSLVASSGTLEFITEGFTWTGVTQNGGSNACKRGPASGFFSRLNWLTKSGSTYPVLNVTMPNDDNFDKLYVWGVHHPSTNQEQTDLYVQASGRVTVSTRRSQQTIIPNIGSRPWVRGQSGRISIYWTIVKPGDVLVINSNGNLIAPRGYFKIRTGKSSIMRSDAPIDTCISECITPNGSIPNDKPFQNVNKITYGACPKYVKQSTLKLATGMRNVPEKKTRGLFVAIAGFIENGWEGMIDCWYGFRHQNSEGTGQAADLKSTQAAIDQINGKLNRVIEKTNEKFHQIEKEFSEVEGRIQDLENYVEDTKIDLWSYNAELLVALENQHTIDLTDSEMNKLFERTRRQLRENAEDMGSGCFKIYHKCDNACIESIRNGTYDHDIYRDEALNNRFQIKGVELKSGYKDWILWISFATSCFLLCVVLGGFIMWACQRGNIRCNICI

SEQ ID NO: 937 - protein, 566 aa, synthetic construct
  REGION 1..566: note = hemagglutinin__InfluenzaA__ABF60578
MKTIIVLSCFFCLAFSQDLSENNNNTATLCLGHHAVPNGTIVKTITDDQIEVTNATELVQSSSTGKICNNPHRILDGRDCTLIDALLGDPHCDVFQDETWDLYVERSKSFSNCYPYDVPDYASLRSLVASSGTLEFITEAFTWTGVTQNGGSGACKRGPGNGFFSRLNWLTKSGSAYPVLNVTMPNNDNFDKLYVWGVHHPSTNQEQTNLYVQASGRVTVSTRRSQQTIIPNIGSRPWVRGQSRRISIYWTIVKPGDILVINSNGNLIAPRGYFKMRTGKSSIMRSDAPIDTCISECITPNGSIPNDKPFQNVNKITYGACPKYIKQSTLKLATGMRNVPEKQTRGLFGAIAGFIENGWEGMIDGWYGFRHQNSEGTGQAADLKSTQAAIDQINGKLNRVIEKTNEKFHQIEKEFSEVEGRIQDLEKYVEDTKIDLWSYNADVLVALENQHTIDLTDSEMNKLFEKTRRQLRENAEDMGNGCFKIYHKCDNACIESIRNGTYDHDIYRDEALNNRFQIKGCGVKSGYKDWILWISFAISCFLLCVVLLGFIMWACQRGNIRCNICI

SEQ ID NO: 938 - protein, 566 aa, synthetic construct
  REGION 1..566: note = hemagglutinin__InfluenzaA__ABF60579
MKTLIALSYIFCLVLGQDLPGNGNSTATLCLGHHAVPNGTLVKTITDDQIEVTNATELVQNFSMDKICNNPHRILDGANCTLIDALLGDPHCDDFQNEKWDLFVERSKAFSNCYPYDVPDYTSLRSLIASSGTLEFINEDFNWTGVTQNGGSNACKRGPDSSFFSRLNWLYKSGNTYPMLNVTMPNSDNFDKLYIWGVHHPSTAREQTNLYVQASGKVTVSTKRSQQTIIPNIGSRPWVRGLSSRISIYWTIVKPGDILVINSNGNLIAPRGYFKMHTGRSSIMRSDAPIDTCSSECITPNGSIPNDKPFQNVNKITYGACPKYVKQNTLKLATGMRNIPEKQTRGIFGAIAGFIENGWEGMVDGWYGFRHQNSEGTGQAADLKSTQAAIDQINGKLNRVIEKTNEKFHQIEKEFSGVEGRIQDLEKYVEDTKIDLWSYNAELLVALENQHTIDLTDSEMNKLFEKTRRQLRENAEDMGNGCFKIYHKCDNACIESIRNGTYDHNEYRDEALNNRFQIKGVELKSGYKDWILWISFAISCFLLCVVLLGFIMWACQKGNIRCNICI

SEQ ID NO: 939 - protein, 566 aa, synthetic construct
  REGION 1..566: note = hemagglutinin__InfluenzaA__ABF60580
MKTIIALSYIFCLAFAQDLPGNDNSTATLCLGHHAVPNGTLVKTITNDQIEVTNATELVQSSSTGKICDNPHRILDGINCTLIDALLGDPHCDGFQNEKWDLFVERSKAFSNCYPYDVPDYASLRSLVASSGTLEFINEGFNWTGVTQNGGSSACKRGPDNGFFSRLNWLYKSGSTYPVQNVTMPNNDNSDKLYIWGVHHPSTDKEQTDLYVQASGKVTVSTKRIQQTVIPNVGSRPWVRGLSSRVSIYWTIVKPGDVLVINSNGNLIAPRGYYKMRTGKSSIMRSDAPIGTCSSECITPNGSIPNDKPFQNVNKITYGACPKYVKQNTLKLATGMRNVPEKQTRGIFGAIAGFIENGWEGMIDGWYGFRHQNSEGTGQAADLKSTQAAIDQINGKLNRVIEKTNEKFHQIEKEFSEVEGRIQDLEKYVEDTKIDLWSYNAEVLVALENQHTIDLTDSEMNKLFEKTRRQLRENAEDMGNGCFKIYHKCDNACIGSIRNGTYDHDVYRDEALNNRFQIKGVELKSGYKDWILWISFAISCFLLCVVLLGFIMWACQKGNIRCNICI

SEQ ID NO: 940 - protein, 566 aa, synthetic construct
  REGION 1..566: note = hemagglutinin__InfluenzaA__ABF60581
MKTIIVLSYFFCLALSQDYSESNNSTATLCLGHHAVPNGTIVKTITDDQIEVTNATELVQSSSTGKICNNPHRILDGRDCTLIDALLGDPHCDVFQDETWDLYVERSSAFSNCYPYDVPDYDSLRSLVASSGTLEFITEGFTWTGVTQNGGSNACKRGPASGFFSRLNWLTKSGSTYPVLNVTMPNNDNFDKLYVWGVHHPSTNQEQTNLYVQASGRVTVSTRRSQQTIIPNIGSRPWVRGQSGRISIYWTIVKPGDVLVINSNGNLIAPRGYFKMRTGKSSIMRSDAPIDTCISECITPNGSIPNDMPFQNVNKITYGACPKYVKQGTLKLATGMRNVPEKQTRGLFGAIAGFIENGWEGMIDGWYGFRHQNSEGTGQAADLKSTQAAIDQINGKLNRVIEKTNEKFHQIEKEFSEVEGRIQDLEKYVEDTKIDLWSDNAELLVALENQHTIDLTDSEMNKLFEKTRRQLRENAEVMGNGCFKIYHKCDNACIESIRNGTYDHDIYRDEALNNRFQIKGVELKSGYKDWILWISFAISCFLLCVVLLGFIMWACQRGNIRCNICI

SEQ ID NO: 941 - protein, 566 aa, synthetic construct; identical to SEQ ID NO: 740
  REGION 1..566: note = hemagglutinin__InfluenzaA__ABF82651

SEQ ID NO: 942 - protein, 565 aa, synthetic construct; identical to SEQ ID NO: 800
  REGION 1..565: note = hemagglutinin__InfluenzaA__ABF82662

SEQ ID NO: 943 - protein, 565 aa, synthetic construct
  REGION 1..565: note = hemagglutinin__InfluenzaA__ABF82673
MKAKLLVLLCTFTATYADTICIGYHANNSTDTVDTVLEKNVTVTHSVNLLEDSHNGKLCLLKGIAPLQLGNCSVAGWILGNPECELLISKGSWSYIVETPNPENGTCYPGYFADYEELREQLSSVSSFERFEIFPKGSSWPNHTVTGVSASCSHNGKSSFYRNLLWLTGKNGLYPNLSMSYVNNKEKEVLVLWGVHHPPNIGDQRALYHTENAYVSVVSSHYSRRFTPEIAKRPKVRDQEGRINYYWTLLEPGDTIIFEANGNLIAPWYAFALSRGFGSGIITSNAPMGECDAKCQTPQGAINSSLPFQNVHPVTIGECPKYVRSAKLRMVTGLRNIPSIQSRGLFGAIAGFIEGGWTGMVDGWYGYHHQNEQGSGYAADQKSTQNAINGITNKVNSVIEKMNTQFTAVGKEFNKLERRMENLNKKVDDGFLDIWTYNAELLVLLENERTLDFHDSNVKNLYEKVKSQLKNNAKEIGNGCFEFYHKCNNECMESVKNGTYDYPKYSEESKLNREKIDGVKLESMGVYQILAIYSTVASSLVLLVSLGAISFWMCSNGSLQCRICI

SEQ ID NO: 944 - protein, 565 aa, synthetic construct; identical to SEQ ID NO: 841
  REGION 1..565: note = hemagglutinin__InfluenzaA__ABF82684

SEQ ID NO: 945 - protein, 566 aa, synthetic construct; identical to SEQ ID NO: 807
  REGION 1..566: note = hemagglutinin__InfluenzaA__ABF82695

SEQ ID NO: 946 - protein, 566 aa, synthetic construct; identical to SEQ ID NO: 783
  REGION 1..566: note = hemagglutinin__InfluenzaA__ABF82706

SEQ ID NO: 947 - protein, 565 aa, synthetic construct; identical to SEQ ID NO: 299
  REGION 1..565: note = hemagglutinin__InfluenzaA__ABF82819

SEQ ID NO: 948 - protein, 565 aa, synthetic construct; identical to SEQ ID NO: 800
  REGION 1..565: note = hemagglutinin__InfluenzaA__ABF82830

SEQ ID NO: 949 - protein, 565 aa, synthetic construct; identical to SEQ ID NO: 800
  REGION 1..565: note = hemagglutinin__InfluenzaA__ABF82841

SEQ ID NO: 950 - protein, 565 aa, synthetic construct; identical to SEQ ID NO: 800
  REGION 1..565: note = hemagglutinin__InfluenzaA__ABF82852

SEQ ID NO: 951 - protein, 565 aa, synthetic construct
  REGION 1..565: note = hemagglutinin__InfluenzaA__ABF82863
MKAKLLVLLCTFTATYADTICIGYHANNSTDTVDTVLEKNVTVTHSVNLLEDSHNGKLCLLKGIAPLQLGNCSVAGWILGNPECELLISKESWSYIVETPNPENGTCYPGYFADYEELREQLSSVSSFERFEIFPKGSSWPNHTVTGVSASCSHNGKSSFYRNLLWLTGKNGLYPNLSMFYVNNKEKEVLVLWGVHHPPNIGDQRALYHTENAYVSVVSSHYSRRFTPEIAKRPKVRDQEGRINYYWTLLEPGDTIIFEANGNLIAPWYAFALSRGFGSGIITSNAPMGECDAKCQTPQGAINSSLPFQNVHPVTIGECPKYVRSAKLRMVTGLRNIPSIQSRGLFGAIAGFIEGGWTGMVDGWYGYHHQNEQGSGYAADQKSTQNAINGITNKVNSVIEKMNTQFTAVGKEFNKLERRMENLNKKVDDGFLDIWTYNAELLVLLENERTLDFHDSNVKNLYEKVKSQLKNNAKEIGNGCFEFYHKCNNECMESVKNGTYDYPKYSEESKLNREKIDGVKLESMGVYQILAIYSTVASSLVLLVSLGAISFWMCSNGSLQCRICI

SEQ ID NO: 952 - protein, 565 aa, synthetic construct
  REGION 1..565: note = hemagglutinin__InfluenzaA__ABF82874
MKAKLLVLLCTFTATYADTICIGYHANNSTDTVDTVLEKNVTVTHSVNLLEDSHNGKLCLLKGIAPLQLGNCSVAGWILGNPECELLISKESWSYIVETPNPENGTCYPGYFADYEELREQLSSVSSFERFEIFPKGSSWPNHTVTGVSASCSHNGKSSFYRNLLWLTGKNGLYPNLSMSYVNNKEKEVLVLWGVHHPPNIGDQRALYHTENAYVSVVSSHYSRRFTPEIAKRPKVRDQEGRINYYWTLLEPGDTIIFEANGNLIAPWYAFALSRGFGSGIITSNAPMGECDAKCQTPQGAINSSLPFQNVHPVTIGECPKYVRSAKLRMVTGLRNIPSIQSRGLFGAIAGFIEGGWTGMVDGWYGYHHQNEQGSGYAADQKSTQNAINGITNKVNSVIEKMNTQFTAVGKEFNKLERRMENLIKKVDDGFLDIWTYNAELLVLLENERTLDFHDSNVKNLYEKVKSQLKNNAKEIGNGCFEFYHKCNNECMESVKNGTYDYPKYSEESKLNREKIDGVKLESMGVYQILAIYSTVASSLVLLVSLGAISFWMCSNGSLQCRICI

SEQ ID NO: 953 - protein, 565 aa, synthetic construct; identical to SEQ ID NO: 800
  REGION 1..565: note = hemagglutinin__InfluenzaA__ABF82885

SEQ ID NO: 954 - protein, 565 aa, synthetic construct; identical to SEQ ID NO: 800
  REGION 1..565: note = hemagglutinin__InfluenzaA__ABF82896

SEQ ID NO: 955 - protein, 565 aa, synthetic construct; identical to SEQ ID NO: 800
  REGION 1..565: note = hemagglutinin__InfluenzaA__ABF82907

SEQ ID NO: 956 - protein, 565 aa, synthetic construct; identical to SEQ ID NO: 844
  REGION 1..565: note = hemagglutinin__InfluenzaA__ABF82929

SEQ ID NO: 957 - protein, 565 aa, synthetic construct; identical to SEQ ID NO: 800
  REGION 1..565: note = hemagglutinin__InfluenzaA__ABF82940

SEQ ID NO: 958 - protein, 566 aa, synthetic construct
  REGION 1..566: note = hemagglutinin__InfluenzaA__ABF83447
MKTIIALSYIFCLALGQDLPGNDNNTATLCLGHHAVPNGTLVKTITDDQIEVTNATELVQSSSTGKICNNPHRILDGIDCTLIDALLGDPHCDVFQNETWDLFVERSKAFSNCYPYDVPDYASLRSLVASSGTLEFITEGFTWTGVTQNGGSNACKRGPGSGFFSRLNWLTKSGSTYPVLNVTMPNNDNFDKLYIWGVHHPSTNQEQTSLYVQASGGVTVSTRRSQQTIIPNIGSRPWVRGLSSRISIYWTIVKPGDVLVINSNGNLIAPRGYFKMRTGKSSIMRSDAPIDTCISECITPNGSIPNDKPFQNVNKITYGACPKYVKQNTLKLATGMRNVPEKQTRGLFGAIAGFIENGWEGMIDGWYGFRHQNSEGTGQAADLKSTQAAIDQINGKLNRVIEKTNEKFHQIEKEFSEVEGRIQDLEKYVEDTKIDLWSYNAELLVALENQHTIDLTDSEMNKLFEKTRRQLRENAEDMGNGCFKIYHKCDNACIESIRNGTYDHDVYRDEALNNRFQIKGVELKSGYKDWILWISFAISCFLLCVVLLGFIMWACQRGNIRCNICI

SEQ ID NO: 959 - protein, 547 aa, synthetic construct
  REGION 1..547: note = hemagglutinin__InfluenzaA__ABG20468
MEKIVLLLAIVSLVKSDQICIGYHANNSTEQVDTIMEKNVTVTHAQDILEKTHNGKLCDLDGVKPLILRDCSVAGEKINPANDLCYPGNFNDYEELKHLLSRINHFEKIQIIPKSSWSDHEASSGVSSACPYQGRSSFFRNVVWLIKKNNAYPTIKRSYNNTNQEDLLVLWGIHHPNDAAEQTRLYQNPTTYISVGTSTLNQRLVPKIATRSKVNGQSGRMEFFWTILKPNDAINFESNGNFIAPENAYKIVKKGDSTIMKSELEYGNCNTKCETPIGAINSSMPFHNIHPLTIGECPKYVKSNRLVLATGLRNSPQGERRRKKRGLFGAIAGFIEGGWQGMVDGWYGYHHSNEQGSGYAADKESTQKAIDGVTNKVNSIIDKMNTQFEAVGREFNNLERRIENLNKKMEDGFLDVWTYNAELLVLMENERTLDFHDSNVKNLYDKVRLQLRDNAKELGNGCFEFYHRCDNECMESVRNGTYDYPQYSEEARLKREEISGVKLESIGTYQILSIYSTVASSLALAIMVAGLSLWMCSNGSLQCRICI

SEQ ID NO: 960 - protein, 568 aa, synthetic construct
  REGION 1..568: note = hemagglutinin__InfluenzaA__ABG20472
MEKIVLLLAIVSLVKSDQICIGYHANNSTEQVDTIMEKNVTVTHAQDILEKAHNGKLCDLDGVKPLILRDCSVAGWLLGNPMCDEFLNVPEWSYIVEKINPANDLCYPGNFNDYEELKHLLSRINHFEKIQIIPKSSWSDHEASSGVSSACPYQGRSSFFRNVVWLIKKDNAYPTIKRSYNNTNQEDLLVLWGIHHPNDAAEQTRLYQNPTTYISVGTSTLNQRLVPKIATRSKVNGQSGRMEFFWTILKPNDAINFESNGNFIAPENAYKIVKKGDSTIMKSELEYGNCNTKCQTPIGAINSSMPFHNIHPLTIGECPKYVKSNRLVLATGLRNSPQGERRRKKRGLFGAIAGFIEGGWQGMVDGWYGYHHSNEQGSGYAADKESTQKAIDGVTNKVNSIIDKMNTQFEAVGREFNNLERRIENLNKKMEDGFLDVWTYNAELLVLMENERTLDFHDSNVKNLYDKVRLQLRDNAKELGNGCFEFYHRCDNECMESVRNGTYDYPQYSEEARLKREEISGVKLESIGTYQILSIYSTVASSLALAIMVAGLSLWMCSNGSLQCRICI

SEQ ID NO: 961 - protein, 568 aa, synthetic construct
  REGION 1..568: note = hemagglutinin__InfluenzaA__ABG20478
MEKIVLLFAIVSLVKSDQICIGYHANNSTEQVDTIMEKNVTVTHAQDILEKTHNGKLCDLDGVKPLILRDCSVAGWLLGNPMCDEFLNVPEWSYIVEKINPANDLCYPGNFNDYEELKHLLSRINHFEKIQIIPKSSWSDHEASSGVSSACPYQGRSSFFRNVVWLIKKDNAYPTIKRSYNNTNQEDLLVLWGIHHPNDAAEQTRLYQNPTTYISVGTSTLNQRLVPKIATRSKVNGQSGRMEFFWTILKPNDAINFESNGNFIAPENAYKIVKKGDSTIMKSELEYGNCNTKCQTPIGAINSSMPFHNIHPLTIGECPKYVKSNRLVLATGLRNSPQGERRRKKRGLFGAIAGFIEGGWQGMVDGWYGYHHSNEQGSGYAADKESTQKAIDGVTNKVNSIIDKMNTQFEAVGREFNNLERRIENLNKKMEDGFLDVWTYNAELLVLMENERTLDFHDSNVKNLYDKVRLQLRDNAKELGNGCFEFYHRCDNECMESVRNGTYDYPQYSEEARLKREEISGVKLESIGTYQILSIYSTVASSLALAIMVAGLSLWMCSNGSLQCRICI

SEQ ID NO: 962 - protein, 566 aa, synthetic construct; identical to SEQ ID NO: 783
  REGION 1..566: note = hemagglutinin__InfluenzaA__ABG26758

SEQ ID NO: 963 - protein, 566 aa, synthetic construct
  REGION 1..566: note = hemagglutinin__InfluenzaA__ABG26769
MKTIIALSYILCLVFAQKLPGNDNSTATLCLGHHAVPNGTLVKTITNDQIEVTNATELVQNSSTGRICDSPHRILDGKNCTLIDALLGDPHCDGFQNKEWDLFVERSKAYSNCYPYDVPDYASLRSLVASSGTLEFNNESFNWTGVAQNGTSYACKRRSVKSFFSRLNWLHKLEYKYPALNVTMPNNDKFDKLYIWGVHHPSTDSDQTSLYVQASGRVTVSTKRSQQTVIPNIGSGPWVRGVSSRISIYWTIVKPGDILLINSTGNLIAPRGYFKIRSGKSSIMRSDAPIGNCNSECITPNGSIPNDKPFQNVNRITYGACPRYVKQNTLKLATGMRNVPEKQTRGIFGAIAGFIENGWEGMVDGWYGFRHQNSEGTGQAADLKSTQAAINQINGKLNRLIEKTNEKFHQIEKEFSEVEGRIQDLEKYVEDTKIDLWSYNAELLVALENQHTIDLTDSEMNKLFERTRKQLRENAEDMGNGCFRIYHKCDNACIGSIRNGTYDHDVYRDEALNNRFQIKGVELKSGYKDWILWISFAISCFLLCVVLLGFIMWACQKGNIRCNICI

SEQ ID NO: 964 - protein, 566 aa, synthetic construct; identical to SEQ ID NO: 911
  REGION 1..566: note = hemagglutinin__InfluenzaA__ABG26780

SEQ ID NO: 965 - protein, 566 aa, synthetic construct
  REGION 1..566: note = hemagglutinin__InfluenzaA__ABG26791
MKAKLLVLLCAFTATYADTICIGYHANNSTDTVDTVLEKNVTVTHSVNLLEDSHNGKLCRLKGTAPLQLGNCSVAGWILGNPECESLFSKESWSYIAETPNPENGTCYPGYFADYEELKEQLSSVSSFERFEIFPKESSWPNHTVTKGVTASCSHNGKSSFYKNLLWLTEKNGLYPNLSKSYVNNKEKEVLVLWGVHHPSNIGDQRAIYHTENAYVSVVSSHYSRRFTPEIAKRPKVRDQEGRINYYWTLLEPGDTIIFEANGNLIAPWYAFALSRGFGSGIITSNASMGECDAKCQTPQGAINSSLPFQNVHPVTIGECPKYVRSTKLRMVTGLRNIPSIQSRGLFGAIAGFIEGGWTGMIDGWYGYHHQNEQGSGYAADKKSTQNAIDGITNKVNSVIEKMNTQFTAVGKEFNKLERRMENLNKKVDDGFLDIWTYNAELLVLLENERTLDFHDSNVKNLYEKVKNQLKNNAKEIGNGCFEFYHKCNNECMESVKNGTYDYPKYSEESKLKREKIDGVKLESMGVYQILAIYSTVASSLVLLVSLGAISFWMCSNGSLQCRICI

SEQ ID NO: 966 - protein, 566 aa, synthetic construct
  REGION 1..566: note = hemagglutinin__InfluenzaA__ABG26802
MKTIIALSYISCLVFAQKLPGNDNSTATLCLGHHAVPNGTLVKTITNDQIEVTNATELVQSSSTGRICDSPHRILDGKNCTLIDALLGDPHCDGFQNEKWDLFVERSKAFSNCYPYDVPDYASLRSLVASSGTLEFINEGFNWTGVTQSGGSYACKRGSVNSFFSRLNWLYESESKYPALNVTMPNNGKFDKLYIWGVHHPSTDKEQTNLYVRASGRVTVSTKRSQQTVIPNIGPRPWVRGLSSRISIYWTIVKPGDILLINSTGNLIAPRGYFKIRTGKSSIMRSDAPIGTCSSGCITPNGSIPNDKPFQNVNKITYGACPRYVKQNTLKLATGMRNVPEKQTRGIFGAIAGFIENGWEGMVDGWYGFRHQNSEGTGQAADLKSTQAAIDQINGKLNRLIEKTNEKFHQIEKEFSEVEGRIQDLEKYVEDTKIDLWSYNAELLVALENQHTIDMTDSEMNKLFEKTRKQLRENAEDMGNGCFKIYHKCDNACIGSIRNGTYDHDVYRDEALNNRFQIKGVELKSGYKDWILWISFAISCFLLCVVLLGFIMWACQKGNIRCNICI

SEQ ID NO: 967 - protein, 566 aa, synthetic construct; identical to SEQ ID NO: 915
  REGION 1..566: note = hemagglutinin__InfluenzaA__ABG26813

SEQ ID NO: 968 - protein, 566 aa, synthetic construct
  REGION 1..566: note = hemagglutinin__InfluenzaA__ABG26824
MKAKLLVLLCALSATDADTICIGYHANNSTDTVDTVLEKNVTVTHSVNLLEDNHNGKLCKLKGIAPLQLGKCSIAGWILGNPECESLFSKKSWSYIAETPNSENGTCYPGYFADYEELREQLSSVSSFERFEIFPKESSWPKHNVTKGVTASCSHKGKSSFYRNLLWLTEKNGSYPNLSKSYVNNKEKEVLVLWGVHHPSNIEDQKTIYRKENAYVSVVSSHYNRRFTPEIAKRPKVRNQEGRINYYWTLLEPGDTIIFEANGNLIAPWYAFALSRGFGSGIITSNASMDECDAKCQTPQGAINSSLPFQNVHPVTIGECPKYVRSTKLRMVTGLRNIPSIQSRGLFGAIAGFIEGGWTGMIDGWYGYHHQNEQGSGYAADQKSTQNAINGITNKVNSIIEKMNTQFTAVGKEFNKLEKRMENLNKKVDDGFLDIWTYNAELLVLLENERTLDFHDSNVKNLYEKVKSQLKNNAKEIGNGCFEFYHKCNNECMESVKNGTYDYPKYSEESKLNREKIDGVKLESMGVYQILAIYSTVASSLVLLVSLGAISFWMCSNGSLQCKICI

SEQ ID NO: 969 - protein, 566 aa, synthetic construct; identical to SEQ ID NO: 921
  REGION 1..566: note = hemagglutinin__InfluenzaA__ABG26835

SEQ ID NO: 970 - protein, 566 aa, synthetic construct
  REGION 1..566: note = hemagglutinin__InfluenzaA__ABG26890
MKTIIALSYILCLVFAQKLPGNDNSTATLCLGHHAVPNGTLVKTITNDQIEVTNATELVQNSPTGRICDSPHRILDGKNCTLIDALLGDPHCDGFQNKEWDLFVERSKAYSNCYPYDVPDYASLRSLVASSGTLEFTNENFNWTGVAQDGKSYACKRGSVNSFFSRLNWLHKLEYKYPALNVTMPNNGKFDKLYIWGVHHPSTDSDQTSLYVRASGKVTVSTKRSQQTVIPDIGYRPWVRGLSSRISIYWTIVKPGDILLINSTGNLIAPRGYFKIRNGKSSIMRSDAPIGNCSSECITPNGSIPNDKPFQNVNRITYGACPRYVKQNTLKLATGMRNVPEKQTRGIFGAIAGFIENGWEGMVDGWYGFRHQNSEGTGQAADLKSTQAAIDQINGKLNRLVEKTNEKFHQIEKEFSEVEGRIQDLEKYVEDTKIDLWSYNAELLVALENQHTIDLTDSEMNKLFERTRKQLRENAEDMGNGCFKIYHKCDNACIGSIRNGTYDHDVYRDEALNNRFQIKGVELKSGYKDWILWISFAISCFLLCVVLLGFIMWACQKGNIRCNICI

SEQ ID NO: 971 - protein, 566 aa, synthetic construct
  REGION 1..566: note = hemagglutinin__InfluenzaA__ABG26901
MKTIIALSYILCLVFAQKLPGNDNSTATLCLGHHAVPNGTLVKTITNDQIEVTNATELVQNSPTGRICDSPHRILDGKNCTLIDALLGDPHCDGFQNKEWDLFVERSKAYSNCYPYDVPDYASLRSLVASSGTLEFTNENFNWTGVAQDGKSYSCKRGSVNSFFSRLNWLHKSEYKYPALNVTMPNNGKFDKLYIWGVHHPSTDSDQTSLYVRASGKVTVSTKRSQQTVIPDIGYRPWVRGLSSRISIYWTIVKPGDILLINSTGNLIAPRGYFKIRNGKSSIMRSDAPIGNCSSECITPNGSIPNDKPFQNVNRITYGACPRYVKQNTLKLATGMRNVPEKQTRGIFGAIAGFIENGWEGMVDGWYGFRHQNSEGTGQAADLKSTQAAIDQINGKLNRLVEKTNEKFHQIEKEFSEVEGRIQDLEKYVEDTKIDLWSYNAELLVALENQHTIDLTDSEMNKLFERTRKQLRENAEDMGNGCFKIYHKCDNACIGSIRNGTYDHDVYRDEALNNRFQIKGVELKSGYKDWILWISFAISCFLLCVVLLGFIMWACQKGNIRCNICI

SEQ ID NO: 972 - protein, 566 aa, synthetic construct
  REGION 1..566: note = hemagglutinin__InfluenzaA__ABG26912
MKTIIALSYILCLVFAQKLPGNDNSTATLCLGHHAVPNGTLVKTITNDQIEVTNATELVQSSSTGRICDSPHRILDGKNCTLIDALLGDPHCDGFQNKEWDLFVERSKAYSNCYPYDVPDYASLRSLVASSGTLEFTKEGFNWTGVAQDGKSYACKRGSVNSFFSRLNWLHKLEYKYPALNVTMPNNDKFDKLYIWGVHHPSTDSDQTSLYVQASGRVTVSTKRSQQTVIPNIGSRPWVRGISSRISIYWTIVKPGDILLINSTGNLIAPRGYFKIRNGKSSIMRSDAPISNCNSECITPNGSIPNDKPFQNVNRITYGACPRYVKQNTLKLATGMRNVPEKQTRGIFGAIAGFIENGWEGMVDGWYGFRHQNSEGTGQAADLKSTQAAIDQINGKLNRLIEKTNEKFHQIEKEFSEVEGRIQDLEKYVEDTKIDLWSYNAELLVALENQHTIDLTDSEMNKLFERTRKQLRENAEDMGNGCFKIYHKCDNACIGSIRNGTYDHDVYRDEALNNRFQIKGVELKSGYKDWILWISFAISCFLLCVVLLGFIMWACQKGNIRCNICI

SEQ ID NO: 973 - protein, 565 aa, synthetic construct
  REGION 1..565: note = hemagglutinin__InfluenzaA__ABG26945
MKAKLLVLLCTFTATYADTICIGYHANNSTDTVDTVLEKNVTVTHSVNLLEDSHNGKLCLLKGIAPLQLGNCSVAGWILGNPECELLISKESWSYIVETPNPENGTCYPGYFADYEELREQLSSVSSFERFEIFPKGSSWPNHTVTGVSASCSHNGKSSFYRNLLWLTGKNGLYPNLSMSYVNNKEKEVLVLWGVHHPPNIGNQRALYHTENAYVSVVSSHYSRRFTPEIAKRPKVRDQEGRINYYWTLLEPGDTIIFEASGNLIAPWYAFALSRGFGSGIITSNAPMGECDAKCQTPQGAINSSLPFQNVHPVTIGECPKYVRSAKLRMVTGLRNIPSIQSRGLFGAIAGFIEGGWTGMVDGWYGYHHQNEQGSGYAADQKSTQNAINGITNKVNSVIEKMNTQFTAVGKEFNKLERRMENLNKKVDDGFLDIWTYNAELLVLLENERTLDFHDSNVKNLYEKVKSQLKNNAKEIGNGCFEFYHKCNNECMESVKNGTYDYPKYSEESKLNREKIDGVKLESMGVYQILAIYSTVASSLVLLVSLGAISFWMCSNGSLQCRICI

SEQ ID NO: 974 - protein, 566 aa, synthetic construct
  REGION 1..566: note = hemagglutinin__InfluenzaA__ABG26956
MKTIIALSYILCLVFAQKLPGNDNRTATLCLGHHAVPNGTLVKTITNDQIEVTNATELVQSSSTGRICDSPHQILDGENCTLIDALLGDPHCDGFQNKEWDLFVERSKAYSNCYPYDVPDYVSLRSLVASSGTLEFNNESFNWTGVAQNGTSSACKRRSDKSFFSKLNWLHQLKYKYPALNVTMPNNEKFDKLYIWGVHHPGTDSDQISLYAQASGRVTVSTKRSQQTVIPNIGSRPWVRGVSSRISIYWTIVKPGDILLINSTGNLIAPRGYFKIRSGKSSIMRSDAPIGKCNSECITPNGSIPNDKPFQNVNRITYGACPRYVKQNTLKLATGMRNVPEKQTRGIFGAIAGFIENGWEGMMDGWYGFRHQNSEGTGQAADLKSTQAAINQINGKLNRLIEKTNEKFHQIEKEFSEVEGRIQDLEKYVEDTKIDLWSYNAELLVALENQHTIDLTDSEMNKLFERTKKQLRENAEDMGNGCFKIYHKCDNACIGSIRNGTYDHDVYRDEALNNRFQIKGVELKSGYKDWVLWISFAISCFLLCIVLLGFIMWACQKGNIRCNICI

SEQ ID NO: 975 - protein, 565 aa, synthetic construct
  REGION 1..565: note = hemagglutinin__InfluenzaA__ABG37120
MKAKLLVLLCTFTATYADTICIGYHANNSTDTVDTVLEKNVTVTHSVNLLEDSHNGKLCLLKGIAPLQLGNCSVAGWILGNPECELLISKESWSYIVETPNPENGTCYPGYFADYEELREQLSSVSSFERFEIFPKGSSWPNHTVTGVSASCSHNGESSFYRNLLWLTGKNGLYPNLSMSYVNNKEKEVLVLWGVHHPPNIGNQRALYHTENAYVSVVSSHYSRRFTPEIAKRPKVRDQEGRINYYWTLLEPGDTIIFEANGNLIAPWYAFALSRGFGSGIITSNAPMGECDAKCQTPQGAINSSLPFQNVHPVTIGECPKYVRSAKLRMVTGLRNIPSIQSRGLFGAIAGFIEGGWTGMVDGWYGYHHQNEQGSGYAADQKSTQNAINGITNKVNSVIEKMNTQFTAVGKEFNKLERRMENLNKKVDDGFLDIWTYNAELLVLLENERTLDFHDSNVKNLYEKVKSQLKNNAKEIGNGCFEFYHKCNNECMESVKNGTYDYPKYSEESKLNREKIDGVKLESMGVYQILAIYSTVASSLVLLVSLGAISFWMCSNGSLQCRICI

SEQ ID NO: 976 - protein, 566 aa, synthetic construct
  REGION 1..566: note = hemagglutinin__InfluenzaA__ABG37131
MKTIIALSYISCLVFAQKLPGNDNSTATLCLGHHAVPNGTLVKTITNDQIEVTNATELVQSSSTGRICDGPHQILDGKNCTLIDALLGDPHCDGFQNKEWDLFVERSKAYSNCYPYDVPDYASLRSLVASSGTLEFTNESFNWTGVAQNGTSYACKRGSVKSFFSRLNWLHKLEYKYPALNVTMPNNDKFDKLYIWGVHHPSTDSDQTSLYVQSSGRVTVSTKRSQQTVTPNIGSRPWVRGISSRISIYWTIVKPGDILLINSTGNLIAPRGYFKIRRGKSSIMRSDAPIDNCNSECITPNGSIPNDKPFQNVNRITYGACPRYVKQNTLKLATGMRNVPEKQTRGIFGAIAGFIENGWEGMVDGWYGFRHQNSEGTGQAADLKSTQAAINQINGKLNRLIEKTNEKFHQIEKEFSEVEGRIQDLEKYVEDTKIDLWSYNAELLVALENQHTIDLTDSEMNKLFERTRKQLRENAEDMGNGCFKIYHKCDNACIGSIRNGTYDHDVYRDEALNNRFQIKGVELKSGYKDWILWISFAISCFLLCVVLLGFIMWACQKGNIRCNICI

SEQ ID NO: 977 - protein, 566 aa, synthetic construct; identical to SEQ ID NO: 783
  REGION 1..566: note = hemagglutinin__InfluenzaA__ABG37142

SEQ ID NO: 978 - protein, 566 aa, synthetic construct
  REGION 1..566: note = hemagglutinin__InfluenzaA__ABG37164
MKTIIALSYILCLVFAQKLPGNDNSTATLCLGHHAVPNGTLVKTITNDQIEVTNATELVQSSSTGRICDSPHRILDGKNCTLIDALLGDPHCDDFQNKEWDLFVERSKAYSNCYPYDVPDYASLRSLVASSGTLEFTKEGFNWTGVAQDGKSYACKRGSVNSFFSRLNWLHKLEYKYPALNVTMPNNDKFDKLYIWGVHHPSTDSDQTSLYVQASGRVTVSTKRSQQTVIPNIGSRPWVRGISSRISIYWTIVKPGDILLINSTGNLIAPRGYFKIRNGKSSIMRSDAPIGNCNSECITPNGSIPNDKPFQNVNRITYGACPRYVKQNTLKLATGMRNVPEKQTRGIFGAIAGFIENGWEGMVDGWYGFRHQNSEGTGQAADLKSTQAAIDQINGKLNRLIEKTNEKFHQIEKEFSEVEGRIQDLEKYVEDTKIDLWSYNAELLVALENQHTIDLTDSEMNKLFERTRKQLRENAEDMGNGCFKIYHKCDNACIGSIRNGTYDHDVYRDEALNNRFQIKGVELKSGYKDWILWISFAISCFLLCVVLLGFIMWACQKGNIRCNICI

SEQ ID NO: 979 - protein, 566 aa, synthetic construct
  REGION 1..566: note = hemagglutinin__InfluenzaA__ABG37175
MKTIIALSYILCQVFAKKLPGNDNSTATLCLGHHAVPNGTLVKTITNDQIEVTNATELVQSSSTGRICDSPHRILDGKNCTLIDALLGDPHCDGFQNKEWDLFVERSKAYSNCYPYDVPDYASLRSLVASSGTLEFTNEGFNWTGVAQDGKSYSCKRGSVNSFFSRLNWLHKLEYKYPALNVTMPNNDKFDKLYIWGVHHPSTDSDQTSLYVQASGRVTVSTKRSQQTVIPNIGSRPWVRGISSRISIYWTIVKPGDILLINSTGNLIAPRGYFKIRNGKSSIMRSDAPIDNCNSECITPNGSIPNDKPFQNVNRITYGACPRYVKQNTLKLATGMRNVPEKQTRGIFGAIAGFIENGWEGMVDGWYGFRHQNSEGTGQAADLKSTQAAIDQINGKLNRLIEKTNEKFHQIEKEFSEVEGRIQDLEKYVEDTKIDLWSYNAELLVALENQHTIDLTDSEMNKLFERTRKQLRENAEDMGNGCFKIYHKCDNACIGSIRNGTYDHDVYRDEALNNRFQIKGVELKSGYKDWILWISFAISCFLLCVVLLGFIMWACQKGNIRCNICI

SEQ ID NO: 980 - protein, 566 aa, synthetic construct
  REGION 1..566: note = hemagglutinin__InfluenzaA__ABG37186
MKTIIALSYILCQVFAQKLPGNDNSTATLCLGHHAVPNGTLVKTITNDQIEVTNATELVQSSSTGRICDSPHRILDGKNCTLIDALLGDPHCDGFQNKEWDLFVERSKAYSNCYPYDVPDYASLRSLVASSGTLEFTNEGFNWTGVAQDGKSYACKRGSVNSFFSRLNWLHKLEYKYPALNVTMPNNDKFDKLYIWGVHHPSTDSDQTSLYVQASGRVTVSTKRSQQTVIPNIGSRPWVRGISSRISIYWTIVKPGDILLISSTGNLIAPRGYFKIRNGKSSIMRSDAPIDNCNSECITPNGSIPNDKPFQNVNRVTYGACPRYVKQNTLKLATGMRNVPEKQTRGIFGAIAGFIENGWEGMVDGWYGFRHQNSEGTGQAADLKSTQAAIDQINGKLNRLIEKTNEKFHQIEKEFSEVEGRIQDLEKYVEDTKIDLWSYNAELLVALENQHTIDLTDSEMNKLFERTRKQLRENAEDMGNGCFKIYHKCDNACIGSIRNGTYDHDVYKDEALNNRFQIKGVVLKSGYKDWILWISFAISCFLLCVVLLGFIMWACQKGNIRCNICI

SEQ ID NO: 981 - protein, 566 aa, synthetic construct
  REGION 1..566: note = hemagglutinin__InfluenzaA__ABG37197
MKTIIALSYILCQVFAQKLPGNDNSTATLCLGHHAVPNGTLVKTITNDQIEVTNATELVQSSSTGRICDSPHRILDGKNCTLIDALLGDPHCDGFQNKEWDLFVERSKAYSNCYPYDVPDYASLRSLVASSGTLEFTNEGFNWNGVAQDGKSYACKRGSVKSFFSRLNWLHKLEYKYPALNVTMPNNDKFDKLYIWGVHHPSTDSDQTSLYVQASGRVTVSTKRSQQTVIPNIGSRPWVRGISSRISIYWTIVKPGDILLINSTGNLIAPRGYFKIRNGKSSIMRSDAPIDNCNSECITPNGSIPNDKPFQNVNRITYGACPRYVKQNTLKLATGMRNVPEKQTRGIFGAIAGFIENGWEGMVDGWYGFRHQNSEGTGQAADLKSTQAAIDQINGKLNRLIEKTNEKFHQIEKEFSEVEGRIQDLEKYVEDTKIDLWSYNAELLVALENQHTIDLTDSEMNKLFERTRKQLRENAEDMGNGCFKIYHKCDNACIGSIRNGTYDHDVYRDEALNNRFQIKGVELKSGYKDWILWISFAISCFLLCVVLLGFIMWACQKGNIRCNICI

SEQ ID NO: 982 - protein, 566 aa, synthetic construct
  REGION 1..566: note = hemagglutinin__InfluenzaA__ABG37208
MKTIIALSYISCLVFAQKLPGNDNSTATLCLGHHAVPNGTLVKTITNDQIEVTNATELVQSSSTGRICDSPHRILDGKNCTLIDALLGDPHCDGFQNEKWDLFVERSKAFSNCYPYDVPDYASLRSLVASSGTLEFINEGFNWTGVTQSGGSYACKRGSVNSFFSRLNWLYKSESKYPALNVTMPNNGKFDKLYIWGVHHPSTDKEQTNLYVRASGRVTVSTKRSQQTVIPNIGPRPWVRGLSSRISIYWTIVKPGDILLINSTGNLIAPRGYFKIRTGKSSIMRSDAPIGTCSSGCITPNGSIPNDKPFQNVNKITYGACPRYVKQNTLKLATGMRNVPEKQTRGIFGAIAGFIENGWEGMVDGWYGFRHQNSEGTGQAADLKSTQAAIDQINGKLNRLIEKTNEKFHQIEKEFSEVEGRIQDLEKYVEDTKIDLWSYNAELLVALENQHTIDMTDSEMNKLFEKTRKQLRENAEDMGNGCFKIYHKCDNACIGSIRNGTYDHDVYRDEALNNRFQIKGVELKSGYKDWILWISFAISCFLLCVVLLGFIMWACQKGNIRCNICI

SEQ ID NO: 983 - protein, 566 aa, synthetic construct
  REGION 1..566: note = hemagglutinin__InfluenzaA__ABG37230
MKTIIALSYILCLVFAQKLPGNDNSTATLCLGHHAVPNGTLVKTITNDQIEVTNATELVQSSSTGRICDSPHRILDGKNCTLIDALLGDPHCDGFQNKEWDLFVERSKAYSNCYPYDVPDYASLRSLVASSGTLEFINEDFNWTGVAQDGKSYACKRGSVNSFFSRLNWLHQSKYKYPELNVTMPNNGKFDKLYIWGVHHPSTDSDQTSLYARASGRVTVSTKRSQQTVIPNIGFRPWVRGLSSRISIYWTIVKPGDILLINSTGNLIAPRGYFKIRNGKSSIMRSDAPIGNCSSECITPNGSIPNDKPFQNVNRITYGACPRYVKQNTLKLATGMRNVPEKQTRGIFGAIAGFIENGWEGMVDGWYGFRHQNSEGTGQAADLKSTQAAIDQINGKLNRLIEKTNEKFHQIEKEFSEVEGRIQDLEKYVEDTKIDLWSYNAGLLVALENQHTIDLTDSEMNKLFERTRKQLRENAEDMGNGCFKIYHKCDNACIGSIRNGTYDHDVYRDEALNNRFQIKGVELKSGYKDWILWISFAISCFLLCVVLLGFIMWACQKGNIRCNICI

SEQ ID NO: 984 - protein, 566 aa, synthetic construct
  REGION 1..566: note = hemagglutinin__InfluenzaA__ABG37241
MKTIIALSYILCLVFAQKLPGNDNSTATLCLGHHAVPNGTLVKTITNDQIEVTNATELVQSSPTGRICDSPHRILDGKNCTLIDALLGDPHCDGFQNKEWDLFVERSKAYSNCYPYDVPDYASLRSLVASSGTLEFTNENFNWTGVAQDGKSYACKRGSVNSFFSRLNWLHKLEYKYPALNVTMPNNGKFDKLYIWGVHHPSTDSDQTSLYVRASGKVTVSTKRSQQTVIPDIGYRPWVRGLSSRISIYWTIVKPGDILLINSTGNLIAPRGYFKIRNGKSSIMRSDAPIGNCSSECITPNGSIPNDKPFQNVNRITYGACPRYVKQNTLKLATGMRNVPEKQTRGIFGAIAGFIENGWEGMVDGWYGFRHQNSEGTGQAADLKSTQAAIDQINGKLNRLVEKTNEKFHQIEKEFSEVEGRIQDLEKYVEDTKIDLWSYNAELLVALENQHTIDLTDSEMNKLFERTRKQLRENAEDMGNGCFKIYHKCDNACIGSIRNGTYDHDVYRDEALNNRFQIKGVELKSGYKDWILWISFAISCFLLCVVLLGFIMWACQKGNIRCNICI

SEQ ID NO: 985 - protein, 566 aa, synthetic construct
  REGION 1..566: note = hemagglutinin__InfluenzaA__ABG37252
MKTIIALSYILCLVFAQKLTGNDNSTATLCLGHHAVPNGTLVKTITNDQIEVTNATELVQSSPTGRICDSPHRILDGKNCTLIDALLGDPHCDGFQNKEWDLFVERSKAYSNCYPYDVPDYASLRSLVASSGTLEFTNENFNWTGVAQDGKSYACKRGSVNSFFSRLNWLHKLEYKYPALNVTMPNNGKFDKLYIWGVHHPSTDSDQTSLYVRASGKVTVSTKRSQQTVIPDIGYRPWVRGLSSRISIYWTIVKPGDILLINSTGNLIAPRGYFKIRNGKSSIMRSDAPIGNCSSECITPNGSIPNDKPFQNVNRITYGACPRYVKQNTLKLATGMRNVPEKQTRGIFGAIAGFIENGWEGMVDGWYGFRHQNSEGTGQAADLKSTQAAIDQINGKLNRLVEKTNEKFHQIEKEFSEVEGRIQDLEKYVEDTKIDLWSYNAELLVALENQHTIDLTDSEMNKLFERTRKQLRENAEDMGNGCFKIYHKCDNACIGSIRNGTYDHDVYRDEALNNRFQIKGVELKSGYKDWILWISFAISCFLLCVVLLGFIMWACQKGNIRCNICI

SEQ ID NO: 986 - protein, 566 aa, synthetic construct
  REGION 1..566: note = hemagglutinin__InfluenzaA__ABG37263
MKTIIALSYILCLVFAQKLPGNDNSTATLCLGHHAVPNGTLVKTITNDQIEVTNATELVQSSSTGRICDSPHRILDGKNCTLIDALLGDPHCDGFQNKEWDLFVERSKAYSNCYPYDVPDYASLRSLVASSGTLEFTKEGFNWTGVAQDGKSYACKRGSVNSFFSRLNWLHKLEYKYPALNVTMPNNDKFDKLYIWGVHHPSTDSDQTSLYVQASGRVTVSTKRSQQTVIPNIGSRPWVRGISSRISIYWTIVKPGDILLINSTGNLIAPRGYFKIRNGKSSIMRSDAPIGNCNSECITPNGSIPNDKPFQNVNRITYGACPRYVKQNTLKLATGMRNVPEKQTRGIFGAIAGFIENGWEGMVDGWYGFRHQNSEGTGQAADLKSTQAAIDQINGKLNRLIEKTNEKFHQIEKEFSEVEGRIQDLEKYVEDTKIDLWSYNAELLVALENQHTIDLTDSEMNKLFERTRKQLRENAEDMGNGCFKIYHKCDNTCIGSIRNGTYDHDVYRDEALNNRFQIKGVELKSGYKDWILWISFAISCFLLCVVLLGFIMWACQKGNIRCNICI

SEQ ID NO: 987 - protein, 566 aa, synthetic construct
  REGION 1..566: note = hemagglutinin__InfluenzaA__ABG37274
MKTIIALSYILCLVFAQKLPGNDNSTATLCLGHHAVPNGTLVKTITNDQIEVTNATELVQSSPTGRICDSPHRILDGKNCTLIDALLGDPHCDGFQNKEWDLFVERSKAYSNCYPYDVPDYASLRSLVASSGTLEFTNENFNWTGVAQDGKSYACKRGSVNSFFSRLNWLHKLEYKYPALNVTMPNNGKFDKLYIWGVHHPSTDSDQISLYVRASGKVTVSTKRSQQTVIPDIGYRPWVRGLSSRISIYWTIVKPGDILLISSTGNLIAPRGYFKIRNGKSSIMRSDAPIGNCSSECITPNGSIPNDKPFQNVNRITYGACPRYVKQNTLKLATGMRNVPEKQTRGIFGAIAGFIENGWEGMVDGWYGFRHQNSEGTGQAADLKSTQAAIDQINGKLNRLVEKTNEKFHQIEKEFSEVEGRIQDLEKYVEDTKIDLWSYNAELLVALENQHTIDLTDSEMNKLFERTRKQLRENAEDMGNGCFKIYHKCDNACIGSIRNGTYDHDVYRDEALNNRFQIKGVELKSGYKDWILWISFAISCFLLCVVLLGFIMWACQKGNIRCNICI

SEQ ID NO: 988 - protein, 566 aa, synthetic construct
  REGION 1..566: note = hemagglutinin__InfluenzaA__ABG37285
MKTIIALSYILCLVFAQKLPGNDNSTATLCLGHHAVPNGTLVKTITNDQIEVTNATELVQSSPTGRICDSPHRILDGKNCTLIDALLGDPHCDGFQNKEWDLFVERSKAYSNCYPYDVPDYASLRSLVASSGTLEFTNENFNWTGVAQDGKSYACKRGSVNSFFSRLNWLHKLDYKYPALNVTMPNNGKFDKLYIWGVHHPSTDSDQTSLYVRASGKVTVSTKRSQQTVIPDIGYRPWVRGLSSRISIYWTIVKPGDILLINSTGNLIAPRGYFKIRNGKSSIMRSDAPIGNCSSECITPNGSIPNDKPFQNVNRITYGACPRYVKQNTLKLATGMRNVPEKQTRGIFGAIAGFIENGWEGMVDGWYGFRHQNSEGTGQAADLKSTQAAIDQINGKLNRLVEKTNEKFHQIEKEFSEVEGRIQDLEKYVEDTKIDLWSYNAELLVALENQHTIDLTDSEMNKLFERTRKQLRENAEDMGNGCFKIYHKCDNACIGSIRNGTYDHDVYRDEALNNRFQIKGVELKSGYKDWILWISFAISCFLLCFVLLGFIMWACQKGNIRCNICI

SEQ ID NO: 989 - protein, 566 aa, synthetic construct
  REGION 1..566: note = hemagglutinin__InfluenzaA__ABG37296
MKTIIALSYILCLVFAQKLPGNDNSTATLCLGHHAVPNGTLVKTITNDQIEVTNATELVQSSSTGRICDSPHRILDGKNCTLIDALLGDPHCDGFQNKEWDLFVERSKAYSNCYPYDVPDYASLRSLVASSGTLEFTKEGFNWTGVAQDGKSYACKRGSVNSFFSRLNWLHKLEYKYPALNVTMPNNDKFDKLYIWGVHHPSTDSDQTSLYVQASGRVTVSTKRSQQTVIPNIGSRPWVRGISSRISIYWTIVKPGDILLINSTGNLIAPRGYFKIRNGKSSIMRSDAPIGNCNSECITPNGSIPNDKPFQNVNRITYGACPRYVKQNTLKLATGMRNVPEKQTRGIFGAIAGFIENGWEGMVDGWYGFRHQNSEGTGQAADLKSTQAAIDQINGKLNRLIEKTNEKFHQIEKEFSEVEGRIQDLEKYVEDTKIDLWSYNAELLVALENQHTIDLTDSEMNKLFERTRKQLRENAEDMGNGCFKIYHKCDNACIGSIRNGTYDHDVYRDEALNNRFQIKGVELKSGYKDWILWISFAISCFLLCVVLLGFIMWACQKGNIRCNICI

SEQ ID NO: 990 - protein, 566 aa, synthetic construct; identical to SEQ ID NO: 984
  REGION 1..566: note = hemagglutinin__InfluenzaA__ABG37307

SEQ ID NO: 991 - protein, 566 aa, synthetic construct; identical to SEQ ID NO: 989
  REGION 1..566: note = hemagglutinin__InfluenzaA__ABG37318

SEQ ID NO: 992 - protein, 566 aa, synthetic construct
  REGION 1..566: note = hemagglutinin__InfluenzaA__ABG37329
MKTIIALSYILCLVFAQKLPENDNSTATLCLGHHAVPNGTLVKTITNDQIEVTNATELVQSSPTGRICDSPHRILDGKNCTLIDALLGDPHCDGFQNKEWDLFVERSKAYSNCYPYDVPDYASLRSLVASSGTLEFTNENFNWTGVAQDGKSYACKRGSVNSFFSRLNWLHKLEYKYPALNVTMPNNGKFDKLYIWGVHHPSTDSDQTSLYVRASGKVTVSTKRSQQTVIPDIGYRPWVRGLSSRISIYWTIVKPGDILLINSTGNLIAPRGYFKIRNGKSSIMRSDAPIGNCSSECITPNGSIPNDKPFQNVNRITYGACPRYVKQNTLKLATGMRNVPEKQTRGIFGAIAGFIENGWEGMVDGWYGFRHQNSEGTGQAADLKSTQAAIDQINGKLNRLVEKTNEKFHQIEKEFSEVEGRIQDLEKYVEDTKIDLWSYNAELLVALENQHTIDLTDSEMNKLFERTRKQLRENAEDMGNGCFKIYHKCDNACIGSIRNGTYDHDVYRDEALNNRFQIKGVELKSGYKDWILWISFAISCFLLCVVLLGFIMWACQKGNIRCNICI

SEQ ID NO: 993 - protein, 566 aa, synthetic construct
  REGION 1..566: note = hemagglutinin__InfluenzaA__ABG37340
MKTIIALSYILCLVFAQKLPGNDNSTATLCLGHHAVPNGTLVKTITNDQIEVTNATELVQSFPTGRICDSPHRILDGKNCTLIDALLGDPHCDGFQNKEWDLFVERSKAYSNCYPYDVPDYASLRSLVASSGTLEFTNENFNWTGVAQDGKSYSCKRGSVNSFFSRLNWLHKLEYKYPALNVTMPNNGKFDKLYIWGVHHPSTDSDQTSLYVRASGKVTVSTKRSQQTVIPDIGYRPWVRGLSSRISIYWTIVKPGDILLINSTGNLIAPRGYFKIRNGKSSIMRSDAPIGNCSSECITPNGSIPNDKPFQNVNRITYGACPRYVKQNTLKLATGMRNVPEKQTRGIFGAIAGFIENGWEGMVDGWYGFRHQNSEGTGQAADLKSTQAAIDQINGKLNRLVEKTNEKFHQIEKEFSEVEGRIQDLEKYVEDTKIDLWSYNAELLVALENQHTIDLTDSEMNKLFERTRKQLRENAEDMGNGCFKIYHKCDNACIGSIRNGTYDHDVYRDEALNNRFQIKGVELKSGYKDWILWISFAISCFLLCVVLLGFIMWACQKGNIRCNICI

SEQ ID NO: 994 - protein, 566 aa, synthetic construct
  REGION 1..566: note = hemagglutinin__InfluenzaA__ABG37351
MKTIIALSYILCLVFAQKLPGNDNSTATLCLGHHAVPNGTLVKTITNDQIEVTNATELVQSSSTGRICDSPHRILDGKNCTLIDALLGDPHCDGFQNKEWDLFVERSKAYSNCYPYDVPDYASLRSLVASSGTLEFINEDFNWTGVAQDGKSYACKRGSVNSFFSRLNWLHKLEYKYPALNVTMPNNGKFDKLYIWGVHHPSTDSDQTSLYVRASGRVTVSTKRSQQTVIPNIGFRPWVRGLSSRISIYWTIVKPGDILLIDSTGNLIAPRGYFKIRNGKSSIMRSDAPIGNCSSECITPNGSIPNDKPFQNVNRITYGACPRYVKQNTLKLATGMRNVPEKQTRGIFGAIAGFIENGWEGMVDGWYGFRHQNSEGTGQAADLKSTQAAIDQINGKLNRLIEKTNEKFHQIEKEFSEVEGRIQDLEKYVEDTKIDLWSYNAGLLVALENQHTIDLTDSEMNKLFERTRKQLRENAEDMGNGCFKIYHKCDNACIGSIRNGTYDHDVYRDEALNNRFQIKGVELKSGYKDWILWISFAISCFLLCVVLLGFIMWACQKGNIRCNICI

SEQ ID NO: 995 - protein, 565 aa, synthetic construct
  REGION 1..565: note = hemagglutinin__InfluenzaA__ABG37362
MKVKLLVLLCTFTATYADTICIGYHANNSTDTVDTVLEKNVTVTHSVNLLEDSHNGKLCLLKGIAPLQLGNCSVAGWILGNPECELLISKESWSYIVETPNPENGTCYPGYFADYEELREQLSSVSSFERFEIFPKESSWPNHTVTGVSASCSHNGKSSFYRNLLWLTGKNGLYPNLSKSYANNKEKEVLVLWGVHHPPNIGNQRALYHTENAYVSVVSSHYSRRFTPEIAKRPKVRDQEGRINYYWTLLEPGDTIIFEANGNLIAPWYAFALSRGFGSGIITSNAPMDECDAKCQTPQGAINSSLPFQNVHPVTIGECPKYVRSAKLRMVTGLRNIPSIQSRGLFGAIAGFIEGGWTGMVDGWYGYHHQNEQGSGYAADQKSTQNAINGITNKVNSVIEKMNTQFTAVGKEFNKLERRMENLNKKVDDGFLDIWTYNAELLVLLENERTLDFHDSNVKNLYEKVKSQLKNNAKEIGNGCFEFYHKCNNECMESVKNGTYDYPKYSEESKLNREKIDGVKLESMGVYQILAIYSTVASSLVLLVSLGAISFWMCSNGSLQCRICI

SEQ ID NO: 996 - protein, 565 aa, synthetic construct; identical to SEQ ID NO: 800
  REGION 1..565: note = hemagglutinin__InfluenzaA__ABG37384

SEQ ID NO: 997 - protein, 565 aa, synthetic construct; identical to SEQ ID NO: 870
  REGION 1..565: note = hemagglutinin__InfluenzaA__ABG37395

SEQ ID NO: 998 - protein, 566 aa, synthetic construct; identical to SEQ ID NO: 777
  REGION 1..566: note = hemagglutinin__InfluenzaA__ABG37406

SEQ ID NO: 999 - protein, 566 aa, synthetic construct
  REGION 1..566: note = hemagglutinin__InfluenzaA__ABG37428
MKTIIALSYILCLVFAQKLPGNDNSTATLCLGHHAVPNGTLVKTITNDQIEVTNATELVQSSSTGRICDSPHQILDGENCTLIDALLGDPHCDGFQNKEWDLFVERSKAYSNCYPYDVPDYVSLRSLVASSGTLEFNNESFNWTGVAQNGTSSACKRRSDKSFFSRLNWLHQLKYKYPALNVTMPNNEKFDKLYIWGVHHPGTDSDQISLYAQASGRVTVSTKRSQQTVIPNIGSRPWVRGVSSRISIYWTIVKPGDILLINSTGNLIAPRGYFKIRSGKSSIMRSDAPIGKCNSECITPNGSIPNDKPFQNVNRITYGACPRYVKQNTLKLATGMRNVPEKQTRGIFGAIAGFIENGWEGMMDGWYGFRHQNSEGTGQAADLKSTQAAINQINGKLNRLIEKTNEKSHQIEKEFSEVEGRIQDLEKYVEDTKIDLWSYNAELLVALENQHTIDLTDSEMNKLFERTKKQLRENAEDMGNGCFKIYHKCDNACIGSIRNGTYDHDVYRDEALNNRFQIKGVELKSGYKDWVLWISFAISCFLLCIVLLGFIMWACQKGNIRCNICI

SEQ ID NO: 1000 - protein, 566 aa, synthetic construct; identical to SEQ ID NO: 562
  REGION 1..566: note = hemagglutinin__InfluenzaA__ABG37439

SEQ ID NO: 1001 - protein, 566 aa, synthetic construct; identical to SEQ ID NO: 640
  REGION 1..566: note = hemagglutinin__InfluenzaA__ABG37461

SEQ ID NO: 1002 - protein, 566 aa, synthetic construct
  REGION 1..566: note = hemagglutinin__InfluenzaA__ABG37472
MKTIIALSYILCLVFAQKLPGNDNSTATLCLGHHAVPNGTLVKTITNDQIEVTNATELVQSSSTGRICDSPHQVLDGENCTLIDALLGDPHCDGFQNKEWDLFVERSKAYSNCYPYDVPDYVSLRSLVASSGTLEFNNESFNWTGVAQNGTSSACKRRSDKSFFSRLNWLHQLKYKYPALNVTMPNNEKFDKLYIWGVHHPGTDSDQISLYAQASGRVTVSTKRSQQTVIPNIGSRPWVRGVSSRISIYWTIVKPGDILLINSTGNLIAPRGYFKIRSGKSSIMRSDAPIGKCNSECITPNGSIPNDKPFQNVNRITYGPCPRYVKQNTLKLATGMRNVPEKQTRGIFGAIAGFIENGWEGMMDGWYGFRHQNSEGTGQAADLKSTQAAINQINGKLNRLIEKTNEKFHQIEKEFSEVEGRIQDLEKYVEDTKIDLWSYNAELLVALENQHTIDLTDSEMNKLFERTKKQLRENAEDMGNGCFKIYHKCDNACIGSIRNGTYDHDVYRDEALNNRFQIKGVELKSGYKDWILWISFAISCFLLCIVLLGFIMWACQKGNIRCNICI

SEQ ID NO: 1003 - protein, 566 aa, synthetic construct; identical to SEQ ID NO: 562
  REGION 1..566: note = hemagglutinin__InfluenzaA__ABG37483

SEQ ID NO: 1004 - protein, 566 aa, synthetic construct; identical to SEQ ID NO: 640
  REGION 1..566: note = hemagglutinin__InfluenzaA__ABG37494

SEQ ID NO: 1005 - protein, 566 aa, synthetic construct
  REGION 1..566: note = hemagglutinin__InfluenzaA__ABG37505
MKTIIALSYILCLVFAQKLPGNDNSMATLCLGHHAVPNGTLVKTITNDQIEVTNATELVQSSSTGRICDSPHQILDGENCTLIDALLGDPHCDGFQNKEWDLFVERSKAYSNCYPYDVPDYVSLRSLVASSGTLEFNNESFNWTGVAQNGTSSACKRRSDKSFFSRLNWLHQLKYKYPALNVTMPNNEKFDKLYIWGVHHPGTDSDQISLYAQASGRVTVSTKRSQQTVIPNIGSRPWVRGVSSRISIYWTIVKPGDILLINSTGNLIAPRGYFKIRSGKSSIMRSDAPIDKCNSECITPNGSIPNDKPFQNVNRITYGLCPRYVKQNTLKLATGMRNVPEKQTRGIFGAIAGFIENGWEGMMDGWYGFRHQNSEGTGQAADLKSTQAAINQINGKLNRLIEKTNEKFHQIEKEFSEVEGRIQDLEKYVEDTKIDLWSYNAELLVALENQHTIDLTDSEMNKLFERTKKQLRENAEDMGNGCFKIYHKCDNACIGSIRNGTYDHDVYRDEALNNRFQIKGVELKSGYKDWILWISFAISCFLLCIVLLGFIMWACQKGNIRCNICI

SEQ ID NO: 1006 - protein, 566 aa, synthetic construct; identical to SEQ ID NO: 516
  REGION 1..566: note = hemagglutinin__InfluenzaA__ABG37516

SEQ ID NO: 1007 - protein, 566 aa, synthetic construct; identical to SEQ ID NO: 516
  REGION 1..566: note = hemagglutinin__InfluenzaA__ABG37527

SEQ ID NO: 1008 - protein, 566 aa, synthetic construct; identical to SEQ ID NO: 516
  REGION 1..566: note = hemagglutinin__InfluenzaA__ABG37538

SEQ ID NO: 1009 - protein, 566 aa, synthetic construct; identical to SEQ ID NO: 516
  REGION 1..566: note = hemagglutinin__InfluenzaA__ABG37549

SEQ ID NO: 1010 - protein, 566 aa, synthetic construct; identical to SEQ ID NO: 516
  REGION 1..566: note = hemagglutinin__InfluenzaA__ABG37560

SEQ ID NO: 1011 - protein, 566 aa, synthetic construct; identical to SEQ ID NO: 516
  REGION 1..566: note = hemagglutinin__InfluenzaA__ABG37571

SEQ ID NO: 1012 - protein, 566 aa, synthetic construct
  REGION 1..566: note = hemagglutinin__InfluenzaA__ABG37582
MKTIIALSYILCLVFAQKLPGNDNSTATLCLGHHAVPNGTIVKTITNDQIEVTNATELVQISSTGGICDSPHQILDGENCTLIDALLGDPQCDGFQNKKWDLFVERSKAYSNCYPYDVPDHASLRSLVASSGTLEFNNESFDWTGVTQNGTSSACKRRSNKSFFSRLNWLTHLKYKYPALNVTMPNNEKFDKLYIWGVHHPGTDSDQISLYAQASGRITVSTKRSQQTVIPNIGSRPRVRDVSSRISIYWTIVKPGDILLINSTGNLIAPRGYFKIRSGKSSIMRSDAPIGKCNSECITPNGSIPNDKPFQNVNRITYGACPRYVKQNTLKLATGMRNVPEKQTRGIFGAIAGFIENGWEGMVDGWYGFRHQNSEGTGQAADLKSTQAAINQINGKLNRLIGKTNEKFHQIEKEFSEVEGRIQDLEKYVEDTKIDLWSYNAELLVALENQHTIDLTDSEMNKLFERTKKQLRENAEDMGNGCFKIYHKCDNACIGSIRNGTYDHDVYRDEALNNRFQIKGVELKSGYKDWILWISFAISCFLLCVALLGFIMWACQKGNIRCNICI

SEQ ID NO: 1013 - protein, 566 aa, synthetic construct; identical to SEQ ID NO: 516
  REGION 1..566: note = hemagglutinin__InfluenzaA__ABG37604

SEQ ID NO: 1014 - protein, 566 aa, synthetic construct; identical to SEQ ID NO: 516
  REGION 1..566: note = hemagglutinin__InfluenzaA__ABG37615

SEQ ID NO: 1015 - protein, 565 aa, synthetic construct; identical to SEQ ID NO: 742
  REGION 1..565: note = hemagglutinin__InfluenzaA__ABG47807

SEQ ID NO: 1016 - protein, 565 aa, synthetic construct; identical to SEQ ID NO: 741
  REGION 1..565: note = hemagglutinin__InfluenzaA__ABG47818

SEQ ID NO: 1017 - protein, 566 aa, synthetic construct
  REGION 1..566: note = hemagglutinin__InfluenzaA__ABG47829
MKAKLLVLLCAFTATYADTICIGYHANNSTDTVDTVLEKNVTVTHSVNLLEDSHNGKLCRLKGTAPLQLGNCSVAGWILGNPECESLFSKESWSYIAETPNPENGTCYPGYFADYEELREQLSSVSSFERFEIFPKESSWPNHTVTKGVTASCSHNGKSSFYKNLLWLTEKNGLYPNLSKSYVNNKEKEVLVLWGVHHPSNIGDQRAIYHTENAYVSVVSSHYSRRFTPEITKRPKVRNQEGRINYYWTLLEPGDTIIFEANGNLIAPWYAFALSRGFGSGIITSNASMGECDAKCQTPQGAINSSLPFQNVHPVTIGECPKYVRSTKLRMVTGLRNIPSIQSRGLFGAIAGFIEGGWTGMIDGWYGYHHQNEQGSGYAADQKSTQNAIDGITNKVNSVIEKMNTQFTAVGKEFNKLERRMENLNKKVDDGFLDIWTYNAELLVLLENERTLDFHDSNVKNLYEKVKTQLKNNAKEIGNGCFEFYHKCNNECMESVKNGTYDYPKYSEESKLNREKIDGVKLESMGVYQILAIYSTVASSLVLLVSLGAISFWMCSNGSLQCRICI

SEQ ID NO: 1018 - protein, 566 aa, synthetic construct
  REGION 1..566: note = hemagglutinin__InfluenzaA__ABG47840
MKVKLLVLLCAFTATYADTICIGYHANNSTDTVDTVLEKNVTVTHSVNLLEDSHNGKLCRLKGTAPLQLGNCSVAGWILGNPECESLFSKESWSYIAETPNPENGTCYPGYFADYEELREQLSSVSSFERFEIFPKESSWPNHTVTKGVTASCSHNGKSSFYKNLLWLTEKNGLYPNLSKSYVNNKEKEVLVLWGVHHPSNIGDQRAIYHTENAYVSVVSSHYSRRFTPEIAKRPKVRDQEGRINYYWTLLEPGDTIIFEANGNLIAPWYAFALSRGFGSGIITSNASMSECDAKCQTPQGAINSSLPFQNVHPVTIGECPKYVRSTKLRMVTGLRNIPSIQSRGLFGAIAGFIEGGWTGMIDGWYGYHHQNEQGSGYAADQKSTQNAIDGITNKVNSVIEKMNTQFTAVGKEFNKLERRMENLNKKVDDGFLDIWTYNAELLVLLENERTLDFHDSNVKNLYEKVKNQLKNNAKEIGNGCFEFYHKCNNECMESVKNGTYDYPKYSEESKLNREKIDGVKLESMGVYQILAIYSTVASSLVLLVSLGAISFWMCSNGSLQCRICI

SEQ ID NO: 1019 - protein, 566 aa, synthetic construct
  REGION 1..566: note = hemagglutinin__InfluenzaA__ABG47851
MKTIIALSYILCLVFAQKLPGNDNSTATLCLGHHAVPNGTLVKTITNDQIEVTNATELVQSSSTGRICDSPHRILDGKNCTLIDALLGDPHCDGFQNKEWDLFVERSKAYSNCYPYDVPDYASLRSLVASSGTLEFTNEGFNWTGVAQDGKSYACKRGSVNSFFSRLNWLHKLEYKYPALNVTMPNNDKFDKLYIWGVHHPSTDSDQTSLYVQASGRVTVSTKRSQQTVIPNIGSRPWVRGISSRISIYWTIVKPGDILLINSTGNLIAPRGYFKIRNGKSSIMRSDAPIDNCNSECITPNGSIPNDKPFQNVNRITYGACPRYVKQNTLKLATGMRNVPEKQTRGIFGAIAGFIENGWEGMVDGWYGFRHQNSEGTGQAADLKSTQAAIDQINGKLNRLIEKTNEKFHQIEKEFSEVEGRIQDLEKYVEDTKIDLWSYNAELLVALENQHTIDLTDSEMNKLFERTRKQLRENAEDMGNGCFKIYHKCDNACIGSIRNGTYNHDVYRDEALNNRFQIKGVELKSGYKDWILWISFAISCFLLCVVLLGFIMWACQKGNIRCSICI

SEQ ID NO: 1020 - protein, 566 aa, synthetic construct
  REGION 1..566: note = hemagglutinin__InfluenzaA__ABG47862
MRTIIALSYILCLVFAQKLPGNDNSTATLCLGHHAVPNGTLVKTITNDQIEVTNATELVQSSSTGRICNSPHRILDGKNCTLIDALLGDPHCDGFQNKEWDLFVERSKAYSNCYPYDVPDYASLRSLIASSGTLEFTNEGFNWTGVAQDGTSYACKRGSVKSFFSRLNWLHKLEYKYPALNVTMPNNDKFDKLYIWGVHHPSTDSDQTSLYVQASGRVTVSTKRSQQTVIPNIGSRPWVRGVSSRISIYWTIVKPGDILLINSTGNLIAPRGYFKIRSGKSSIMRSDAPIGNCNSECITPNGSIPNDKPFQNVNRITYGACPRYVKQNTLKLATGMRNVPEKQTRGIFGAIAGFIENGWEGMVDGWYGFRHQNSEGTGQAADLKSTQAAINQINGKLNRLIEKTNEKFHQIEKEFSEVEGRIQDLEKYVEDTKIDLWSYNAELLVALENQHTIDLTDSEMNKLFERTRKQLRENAEDMGNGCFKIYHKCDNACIGSIRNGTYDHDVYRDEALNNRFQIKGVELKSGYKDWILWISFAISCFLLCVVLLGFIMWACQKGNIRCNICI

SEQ ID NO: 1021 - protein, 566 aa, synthetic construct; identical to SEQ ID NO: 984
  REGION 1..566: note = hemagglutinin__InfluenzaA__ABG47873

SEQ ID NO: 1022 - protein, 566 aa, synthetic construct; identical to SEQ ID NO: 989
  REGION 1..566: note = hemagglutinin__InfluenzaA__ABG47895

SEQ ID NO: 1023 - protein, 566 aa, synthetic construct; identical to SEQ ID NO: 984
  REGION 1..566: note = hemagglutinin__InfluenzaA__ABG47906

SEQ ID NO: 1024 - protein, 566 aa, synthetic construct
  REGION 1..566: note = hemagglutinin__InfluenzaA__ABG47917
MKTIIALSYILCLVFAQKLPGNDNSTATLCLGHHAVPNGTLVKTITNDQIEVTNATELVQSSSTGRICDSPHRILDGKNCTLIDALLGDPHCDGFQNKEWDLFVERSKAYSNCYPYDVPDYASLRSLVASSGTLEFINEDFNWTGVAQDGKSYACKRGSVNSFFSRLNWLHKLEYKYPALNVTMPNNGKFDKLYIWGVHHPSTDSDQTSLYVRASGRVTVSTKRSQQTVIPNIGFRPWVRGLSSRISIYWTIVKPGDILLINSTGNLIAPRGYFKIRNGKSSIMRSDAPIGNCSSECITPNGSIPNDKPFQNVNRITYGACPRYVKQNTLKLATGMRNVPEKQTRGIFGAIAGFIENGWEGMVDGWYGFRHQNSEGTGQAADLKSTQAAIDQINGKLNRLIEKTNEKFHQIEKEFSEVEGRIQDLEKYVEDTKIDLWSYNAGLLVALENQHTIDLTDSEMNKLFERTRKQLRENAEDMGNGCFKIYHKCDNACIGSIRNGTYDHDVYRDEALNNRFQIKGVELKSGYKDWILWISFAISCFLLCVVLLGFIMWACQKGNIRCNICI

SEQ ID NO: 1025 - protein, 566 aa, synthetic construct; identical to SEQ ID NO: 1024
  REGION 1..566: note = hemagglutinin__InfluenzaA__ABG47928

SEQ ID NO: 1026 - protein, 566 aa, synthetic construct
  REGION 1..566: note = hemagglutinin__InfluenzaA__ABG47939
MKTIIALSYILCLVFAQKLPGNDNSTATLCLGHHAVPNGTLVKTITNDQIEVTNATELVQSSSTGRICDSPYRILDGKNCTLIDALLGDPHCDGFQNKEWDLFVERSKAYSNCYPYDVPDYASLRSLVASSGTLEFINEDFNWTGVAQDGKSYACKRGSVNSFFSRLNWLHKLEYKYPALNVTMPNNGKFDKLYIWGVHHPSTDSDQTSLYVRASGRVTVSTKRSQQTVIPNIGFRPWVRGLSSRISIYWTIVKPGDILLINSTGNLIAPRGYFKIRNGKSSIMRSDAPIGNCSSECITPNGSIPNDKPFQNVNRITYGACPRYVKQNTLKLATGMRNVPEKQTRGIFGAIAGFIENGWEGMVDGWYGFRHQNSEGTGQAADLKSTQAAIDQINGKLNRLIEKTNEKFHQIEKEFSEVEGRIQDLEKYVEDTKIDLWSYNAGLLVALENQHTIDLTDSEMNKLFERTRKQLRENAEDMGNGCFKIYHKCDNACIGSIRNGTYDHDVYRDEALNNRFQIKGVELKSGYKDWILWISFAISCFLLCVVLLGFIMWACQKGNIRCNICI

SEQ ID NO: 1027 - protein, 566 aa, synthetic construct
  REGION 1..566: note = hemagglutinin__InfluenzaA__ABG47950
MKTIIALSYILCLVFAQKLPGNDNSTATLCLGHHAVPNGTLVKTITNDQIEVTNATELVQSSSTGRICDSPHRILDGKNCTLIDALLGDPHCDGFQNKEWDLFVERSKAYSNCYPYDVPDYASLRSLVASLGTLEFINEDFNWTGVAQDGKSYSCKRGSVNSFFSRLNWLHKLEYKYPALNVTMPNNGKFDKLYIWGVHHPSTDSDQTSLYARASGRVTVSTKRSQQTVIPNIGFRPWVRGLSSRISIYWTIVKPGDILLINSTGNLIAPRGYFKIRTGKSSIMRSDAPIGNCSSECITPNGNIPNDKPFQNVNRITYGACPRYVKQNTLKLATGMRNVPEKQTRGIFGAIAGFIENGWEGMVDGWYGFRHQNSEGTGQAADLKSTQAAIDQINGKLNRLIEKTNEKFHQIEKEFSEVEGRIQDLEKYVEDTKIDLWSYNAGFLVALENQHTIDLTDSEMNKLFERTRKQLRENAEDMGNGCFKIYHKCDNACIGSIRNGTYDHDVYRDEALNNRFQIKGVELKSGYKDWILWISFAISCFLLCVVLLGFIMWACQKGNIRCNICI

SEQ ID NO: 1028 - protein, 566 aa, synthetic construct
  REGION 1..566: note = hemagglutinin__InfluenzaA__ABG47961
MKTIIALSYILCLVFAQKLPGNDNSTATLCLGHHAVPNGTLVKTITNDQIEVTNATELVQSSSTGRICDSPHRILDGKNCTLIDALLGDPHCDGFQNKEWDLFVERSKAYSNCYPYDVPDYASLRSLVASSGTLEFINEDFNWTGVAQDGKSYSCKRGSVNSFFSRLNWLHKLEYKYPALNVTMPNNGKFDKLYIWGVHHPSTDSDQTSLYVRASGGVTVSTKRSQQTVIPNIGSRPWVRGLSSRISIYWTIVKPGDILLINSTGNLIAPRGYFKMRNGKSSIMRSDAPIGNCSSECITPNGSIPNDKPFQNVNRITYGACPRYVKQNTLKLATGMRNVPEKQTRGIFGAIAGFIENGWEGMVDGWYGFRHQNSEGTGQAADLKSTQAAIDQINGKLNRLIGKTNEKFHQIEKEFSEVEGRIQDLEKYVEDTKIDLWSYNAELLVALENQHTIDLTDSEMNKLFERTRKQLRENAEDMGNGCFKIYHKCDNACIGSIRNGTYDHDVYRDEALNNRFQIKGVELKSGYKDWILWISFAISCFLLCVVLLGFIMWACQKGNIRCNICI

SEQ ID NO: 1029 - protein, 566 aa, synthetic construct; identical to SEQ ID NO: 1024
  REGION 1..566: note = hemagglutinin__InfluenzaA__ABG47972

SEQ ID NO: 1030 - protein, 566 aa, synthetic construct; identical to SEQ ID NO: 1024
  REGION 1..566: note = hemagglutinin__InfluenzaA__ABG47983

SEQ ID NO: 1031 - protein, 566 aa, synthetic construct; identical to SEQ ID NO: 1024
  REGION 1..566: note = hemagglutinin__InfluenzaA__ABG47994

SEQ ID NO: 1032 - protein, 566 aa, synthetic construct
  REGION 1..566: note = hemagglutinin__InfluenzaA__ABG48005
MKTIIALSYILCLVFAQKLPGNDNSTATLCLGHHAVPNGTLVKTITNDQIEVTNATELVQSSSTGRICDSPHRILDGKNCTLIDALLGDPHCDGFQNKEWDLFVERSKAYSNCYPYDVPDYASLRSLVASSGTLEFINEDFNWTGVAQDGKSYACKRGSVNSFFSRLNWLHKLEYKYPALNVTMPNNGKFDKLYIWGVHHPSTDSDQTSLYVRASGRVTVSTKRSQQTVIPNIGFRPWVRGLSSRISIYWTIVKPGDILLINSTGNLIAPRGYFKIRNGKSSIMRSDAPIGNCSSECITPNGSIPNDKPFQNVNRITYGACPRYVKQNTLKLATGMRNVPEKQTRGIFGAIAGFIENGWEGMVDGWYGFRHQNSEGTGQAADLKSTQAAINQINGKLNRLIEKTNEKFHQIEKEFSEVEGRIQDLEKYVEDTKIDLWSYNAGLLVALENQHTIDLTDSEMNKLFERTRKQLRENAEDMGNGCFKIYHKCDNACIGSIRNGTYDHDVYRDEALNNRFQIKGVELKSGYKDWILWISFAISCFLLCVVLLGFIMWACQKGNIRCNICI

SEQ ID NO: 1033 - protein, 566 aa, synthetic construct; identical to SEQ ID NO: 1024
  REGION 1..566: note = hemagglutinin__InfluenzaA__ABG48016

SEQ ID NO: 1034 - protein, 566 aa, synthetic construct; identical to SEQ ID NO: 1024
  REGION 1..566: note = hemagglutinin__InfluenzaA__ABG48027

SEQ ID NO: 1035 - protein, 565 aa, synthetic construct
  REGION 1..565: note = hemagglutinin__InfluenzaA__ABG48049
MKVKLLVLLCTFTATYADTICIGYHANNSTDTVDTVLEKNVTVTHSVNLLEDSHNGKLCLLKGIAPLQLGNCSVAGWILGNPECELLISKESWSYIVETPNPENGTCYPGYFADYEELREQLSSVSSFERFEIFPKESSWPNHTVTGVSASCSHNGKSSFYRNLLWLTGKNGLYPNLSKSYANNKEKEVLVLWGVHHPPNIGDQRALYHTENAYVSVVSTHYSRRFTPEIAKRPKVRDQEGRINYYWTLLEPGDTIIFEANGNLIAPRYAFALSRGFGSGIITSNAPMDECDAKCQTPQGAINSSLPFQNVHPVTIGECPKYVRSAKLRMVTGLRNIPSIQSRGLFGAIAGFIEGGWTGMVDGWYGYHHQNEQGSGYAADQKSTQNAINGITNKVNSVIEKMNTQFTAVGKEFNKLERRMENLNKKVDDGFLDIWTYNAELLVLLENERTLDFHDSNVKNLYEKVKSQLKNNAKEIGNGCFEFYHKCNNECMESVKNGTYDYPKYSEESKLNREKIDGVKLESMGVYQILAIYSTVASSLVLLVSLGAISFWMCSNGSLQCRICI

SEQ ID NO: 1036 - protein, 566 aa, synthetic construct; identical to SEQ ID NO: 650
  REGION 1..566: note = hemagglutinin__InfluenzaA__ABG48060

SEQ ID NO: 1037 - protein, 566 aa, synthetic construct; identical to SEQ ID NO: 650
  REGION 1..566: note = hemagglutinin__InfluenzaA__ABG48071

SEQ ID NO: 1038 - protein, 566 aa, synthetic construct
  REGION 1..566: note = hemagglutinin__InfluenzaA__ABG48082
MKTIIALSYILCLVFAQKLPGNDNSTATLCLGHHAVPNGTLVKTITNDQIEVTNATELVQSSSTGRICDSPHQILDGENCTLIDALLGDPHCDGFQNKEWDLFVERSKAYSNCYPYDVPDYVSLRSLVASSGTLEFNNESFNWTGVAQNGTSSACKRRSDKSFFSRLNWLHQLKYKYPALNVTMPNNEKFDKLYIWGVLHPGTDSDQISLYAQASGRVTVSTKRSQQTVIPNIGSRPWVRGVSSRISIYWTIVKPGDILLINSTGNLIAPRGYFKIRSGKSSIMRSDAPIGKCNSECITPNGSIPNGKPFQNVNRITYGACPRYVKQNTLKLATGMRNVPEKQTRGIFGAIAGFIENGWEGMMDGWYGFRHQNSEGTGQAADLKSTQAAINQINGKLNRLIEKTNEKFHQIEKEFSEVEGRIQDLEKYVEDTKIDLWSYNAELLVALENQHTIDLTDSEMNKLFERTKKQLRENAEDMGNGCFKIYHKCDNACIGSIRNGTYDHDVYRDEALNNRFQIKGVELKSGYKDWILWISFAISCFLLCIVLLGFIMWACQKGNIRCNICI

SEQ ID NO: 1039 - protein, 566 aa, synthetic construct
  REGION 1..566: note = hemagglutinin__InfluenzaA__ABG48104
MKTIIALSYILCLVFAQKLPGNDNSTATLCLGHHAVPNGTLVKTITNDQIEVTNATELVQSSSTGRICDSPHQILDGENCTLIDALLGDPHCDGFQNKEWDLFVERSRAYSNCYPYDVPDYVSLRSLVASSGTLEFNNESFNWTGVAQNGTSSACKRRSDKSFFSRLNWLHQLKYKYPALNVTMPNNEKFDKLYIWGVHHPGTDSDQISLYAQASGRVTVSTKRSQQTVIPNIGSRPWVRGVSSRISIYWTIVKPGDILLINSTGNLIAPRGYFKIRSGKSSIMRSDAPIGKCNSECITPNGSIPNDKPFQNVNRITYGPCPRYVKQNTLKLATGMRNVPEKQTRGIFGAIAGFIENGWEGMMDGWYGFRHQNSEGTGQAADLKSTQAAINQINGKLNRLIEKTNEKFHQIEKEFSEVEGRIQDLEKYVEDTKIDLWSYNAELLVALENQHTIDLTDSEMNKLFERTKKQLRENAEDMGNGCFKIYHKCDNACIGSIRNGTYDHDVYRDEALNNRFQIKGVELKSGYKDWILWISFAISCFLLCIVLLGFIMWACQKGNIRCNICI

SEQ ID NO: 1040 - protein, 566 aa, synthetic construct; identical to SEQ ID NO: 640
  REGION 1..566: note = hemagglutinin__InfluenzaA__ABG48115

SEQ ID NO: 1041 - protein, 566 aa, synthetic construct; identical to SEQ ID NO: 647
  REGION 1..566: note = hemagglutinin__InfluenzaA__ABG48126

SEQ ID NO: 1042 - protein, 566 aa, synthetic construct; identical to SEQ ID NO: 562
  REGION 1..566: note = hemagglutinin__InfluenzaA__ABG48148

SEQ ID NO: 1043 - protein, 566 aa, synthetic construct; identical to SEQ ID NO: 562
  REGION 1..566: note = hemagglutinin__InfluenzaA__ABG48159

SEQ ID NO: 1044 - protein, 566 aa, synthetic construct
  REGION 1..566: note = hemagglutinin__InfluenzaA__ABG48170
MKTIIALSYILCLVFAQKLPGNDNSTATLCLGHHAVPNGTLVKTITNDQIEVTNATELVQSSSTGRICDSPHQILDGENCTLIDALLGDPHCDGFQNKEWDLFVERSKAYSNCYPYDVPDYVSLRSLVASSGTLEFNNESFNWTGVAQNGTSSACKRRSDKSFFSRLNWLHQLKYKYPALNVTMPNNEKFDKLYIWGVHHPGTDSDQISLYAQASGRVTVSTKRSQQTVIPNIGSRPWVRGVSSRISIYWTIVKPGDILLINSTGNLIAPRGYFKIRSGKSSIMKSDAPIGKCNFECITPNGSIPNGKPFQNVNRITYGACPRYVKQNTLKLATGMRNVPEKQTRGIFGAIAGFIENGWEGMMDGWYGFRHQNSEGTGQAADLKSTQAAINQINGKLNRLIEKTNEKFHQIEKEFSEVEGRIQDLEKYVEDTKIDLWSYNAELLVALENQHTIDLTDSEMNKLFERTKKQLRENAEDMGNGCFKIYHKCDNACIGSIRNGTYDHDVYRDEALNNRFQIKGVELKSGYKDWILWISFAISCFLLCIVLLGFIMWACQKGNIRCNICI

SEQ ID NO: 1045 - protein, 566 aa, synthetic construct
  REGION 1..566: note = hemagglutinin__InfluenzaA__ABG48181
MKTIIALSYILCLVFAQKLPGNDNSTATLCLGHHAVPNGTLVKTITNDQIEVTNATELVQSSSTGRICDSPHQILDGENCTLIDALLGDPHCDGFQNKEWDLFVERSKAYSNCYPYDVPDYVSLRSLVASSGTLEFNNESFNWTGVAQNGTSYACKRRSDKSFFSRLNWLHQLKYKYPALNVTMPNNEKFDKLYIWGVHHPGTDSDQISLYAQASGRVTVSTKRSQQTVIPNIGSRPWVRGVSSRISIYWTIVKPGDILLINSTGNLIAPRGYFKIRSGKSSIMRSDAPIGKCNSECITPNGSIPNDKPFQNVNRITYGACPRYVKQNTLKLATGMRNVPEKQTRGIFGAIAGFIENGWEGMMDGWYGFRHQNSEGTGQAADLKSTQAAINQINGKLNRLIEKTNEKFHQIEKEFSEVEGRIQDLEKYVEDTKIDLWSYNAELLVALENQHTIDLTDSEMNKLFERTKKQLRENAEDMGNGCFKIYHKCDNACIGSIRNGTYDHDVYRDEALNNRFQIKGVELKSGYKDWVLWISFAISCFLLCIVLLGFIMWACQKGNIRCNICI

SEQ ID NO: 1046 - protein, 566 aa, synthetic construct; identical to SEQ ID NO: 562
  REGION 1..566: note = hemagglutinin__InfluenzaA__ABG48192

SEQ ID NO: 1047 - protein, 566 aa, synthetic construct
  REGION 1..566: note = hemagglutinin__InfluenzaA__ABG48203
MKTIIALSYILCLVFAQKLPGNDNSTATLCLGHHAVPNGTIVKTITNDQIEVTNATELVQSSSTGGICDSPHQILDGENCTLIDALLGDPQCDGFQNKKWDLFVERSKAYSNCYPYDVPDHASLRSLVASSGTLEFNNESFDWTGVTQNGTSSACKRRSNKSFFSRLNWLTHLKYKYPALNVTMPNNEKFDKLYIWGVHHPGTDSDQISLYAQASGRITVSTKRSQQTVIPNIGSRPRVRDVSSRISIYWTIVKPGDILLINSTGNLIAPRGYFKIRSGKSSIMRSDAPIGKCNSECITPNGSIPNDKPFQNVNRITYGACPRYVKQNTLKLATGMRNVPEKQTRGIFGAIAGFIENGWEGMVDGWYGFRHQNSEGTGQAADLKSTQAAINQINGKLNRLIGKTNEKFHQIEKEFSEVEGRIQDLEKYVEDTKIDLWSYNAELLVALENQHTIDLTDSEMNKLFERTKKQLRENAEDMGNGCFKIYHKCDNACIGSIRNGTYDHDVYRDEALNNRFQIKGVELKSGYKDWILWISFAISCFLLCVALLGFIMWACQKGNIRCNVCI

SEQ ID NO: 1048 - protein, 566 aa, synthetic construct; identical to SEQ ID NO: 516
  REGION 1..566: note = hemagglutinin__InfluenzaA__ABG48214

SEQ ID NO: 1049 - protein, 566 aa, synthetic construct; identical to SEQ ID NO: 516
  REGION 1..566: note = hemagglutinin__InfluenzaA__ABG48236

SEQ ID NO: 1050 - protein, 566 aa, synthetic construct
  REGION 1..566: note = hemagglutinin__InfluenzaA__ABG48247
MKTIIALSYILCLVFAQKLPGNDNNTATLCLGHHAVPNGTIVKTITNDQIEVTNATELVQSSSTGGICDSPHQILDGENCTLIDALLGDPQCDGFQNKKWDLFVERSKAYSNCYPYDVPDHASLRSLVASSGTLEFNNESFDWTGVTQNGTSSACKRRSNKSFFSRLNWLTHLKYKYPALNVTMPNNEKFDKLYIWGVHHPGTDSDQISLYAQASGRITVSTKRSQQTVIPNIGSRPRVRDVSSRISIYWTIVKPGDILLINSTGNLIAPRGYFKIRSGKSSIMRSDAPIGKCNSECITPNGSIPNDKPFQNVNRITYGACPRYVKQNTLKLATGMRNVPEKQTRGIFGAIAGFIENGWEGMVDGWYGFRHQNSEGTGQAADLKSTQAAINQINGKLNRLIGKTNEKFHQIEKEFSEVEGRIQDLEKYVEDTKIDLWSYNAELLVALENQHTIDLTDSEMNKLFERTKKQLRENAEDMGNGCFKIYHKCDNACIGSIRNGTYDHDVYRDEALNNRFQIKGVELKSGYKDWILWISFAISCFLLCVALLGFIMWACQKGNIRCNICI

SEQ ID NO: 1051 - protein, 566 aa, synthetic construct
  REGION 1..566: note = hemagglutinin__InfluenzaA__ABG48269
MKTIIALSYILCLVFAQKLPGNDNSTATLCLGHHAVPNGTIVKTITNDQIEVTNATELVQSSPTGGICDSPHQILDGENCTLIDALLGDPQCDGFQNKKWDLFVERSKAHSNCYPYDVPDYASLRSLVASSGTLEFNNESFNWTGVTQNGTSSACKRRSNKSFFSRLNWLTHLKFKYPALNVTMPNNEKFDKLYIWGVHHPGTDNDQISLYAQASGRITVSTKRSQQTVIPNIGSRPRVRDVPSRISIYWTIVKPGDILLINSTGNLIAPRGYFKIRSGKSSIMRSDAPIGKCNSECITPNGSIPNDKPFQNVNRITYGACPRYVKQNTLKLATGMRNVPEKQTRGIFGAIAGFIENGWEGMVDGWYGFRHQNSEGTGQAADLKSTQAAINQINGKLNRLIGKTNEKFHQIEKEFSEVEGRIQDLEKYVEDTKIDLWSYNAELLVALENQHTIDLTDSEMNKLFERTKKQLRENAEDMGNGCFKIYHKCDNACIGSIRNGTYDHDVYRDEALNNRFQIKGVELKSGYKDWILWISFAISCFLLCVALLGFIMWACQKGNIRCNICI

SEQ ID NO: 1052 - protein, 566 aa, synthetic construct
  REGION 1..566: note = hemagglutinin__InfluenzaA__ABG48291
MKTIIALSYILCLVFAQKLPGNDNSTATLCLGHHAVPNGTLVKTITNDQIEVTNATELVQSSSTGRICDSPHRILDGKNCTLIDALLGDPHCDGFQNKEWDLFVERSKAYSNCYPYDVPDYASLRSLVASSGTLEFINEDFNWTGVAQDGGSYACKRGSVNSFFSRLNWLHKSEYKYPALNVSMPNNGKFNKLYIWGVHHPSTDSDQTSLYVRASGRVTVSTKRSQQTVTPNIGSRPWVRGLSSRISIYWTIVKPGDILLINSTGNLIAPRGYFKIRNGKSSIMRSDAPIGTCSFECITPNGSIPNDKPFQNVNRITYGACPRYVKQNTLKLATGMRNVPEKQTRGIFGAIAGFIENGWEGMVDGWYGFRHQNSEGTGQAADLKSTQAAIDQINGKLNRLIEKTNEKFHQIEKEFSEVEGRIQDLEKYVEDTKIDLWSYNAELLVALENQHTIDLTDSEMNKLFEKTRKQLRENAEDMGNGCFKIYHKCDNACIGSIRNGTYDHDVYRDEALNNRFQIKGVELKSGYKDWILWISFAISCFLLCVVLLGFIMWACQKGNIRCNICI

SEQ ID NO: 1053 - protein, 566 aa, synthetic construct
  REGION 1..566: note = hemagglutinin__InfluenzaA__ABG48335
MKTIIALSYILCLVFAQKLPGNDNSTATLCLGHHAVPNGTLVKTITNDQIEVTNATELVQSSSTGRICDSPHRILDGKNCTLIDALLGDPHCDGFQNKEWDLFVERSKAYSNCYPYDVPDYASLRSLVASSGTLEFINEDFNWTGVAQDGKSYACKRGSVNSFFSRLNWLHKLEYKYPALNVTMPNNGKFDKLYIWGVHHPSTDSDQTSLYVRASGRVTVSTKRSQQTVIPNIGSRPWVRGLSSRISIYWTIVKPGDILLINSTGNLIAPRGYFKIRNGKSSIMRSDAPIGNCSSECITPNGSIPNDKPFQNVNRITYGACPRYVKQNTLKLATGMRNVPEKQTRGIFGAIAGFIENGWEGMVDGWYGFRHQNSEGTGQAADLKSTQAAIDQINGKLNRLIEKTNEKFHQIEKEFSEVEGRIQDLEKYVEDTKIDLWSYNAELLVALENQHTIDLTDSEMNKLFERTRKQLRENAEDMGNGCFKIYHKCDNACIGSIRNGTYDHDVYRDEALNNRFQIKGVELKSGYKDWILWISFAISCFLLCVVLLGFIMWACQKGNIRCNICI

SEQ ID NO: 1054 - protein, 566 aa, synthetic construct
  REGION 1..566: note = hemagglutinin__InfluenzaA__ABG48346
MKTIIALSYILCLVFAQKLPGNDNSTATLCLGHHAVPNGTLVKTITNDQIEVTNATELVQSSSTGRICDSPHRILDGKNCTLIDALLGDPHCDGFQNKEWDLFVERNKAYSNCYPYDVPDYASLRSLVASSGTLEFINEDFNWTGVAQDGKSYACKRGSVNSFFSRLNWLHKLEYKYPALNVTMPNNGKFDKLYIWGVHHPSTDSDQTSLYVRASGRVTVSTKRSQQTVIPNIGSRPWVRGLSSRISIYWTIVKPGDILLINSTGNLIAPRGYFKIRNGKSSIMRSDAPIGNCSSECITPNGSIPNDRPFQNVNRITYGACPRYVKQNTLKLATGMRNVPEKQTRGIFGAIAGFIENGWEGMVDGWYGFRHQNSEGTGQAADLKSTQAAIDQINGKLNRLIEKTNEKFHQIEKEFSEVEGRIQDLEKYVEDTKIDLWSYNAELLVALENQHTIDLTDSEMNKLFERTRKQLRENAEDMGNGCFKIYHKCDNACIGSIRNGTYDHDVYRDEALNNRFQIKGVELKSGYKDWILWISFAISCFLLCVVLLGFIMWACQKGNIRCNICI

SEQ ID NO: 1055 - protein, 566 aa, synthetic construct; identical to SEQ ID NO: 1053
  REGION 1..566: note = hemagglutinin__InfluenzaA__ABG48357

SEQ ID NO: 1056 - protein, 566 aa, synthetic construct
  REGION 1..566: note = hemagglutinin__InfluenzaA__ABG48368
MKTIIALSYILCLVFAQKLPGNDNSTATLCLGHHAVPNGTLVKTITNDQIEVTNATELVQSSSTGRICDSPHRILDGKNCTLIDALLGDPHCDGFQNKEWDLFVERSKAYSNCYPYDVPDYASLRSLVASSGTLEFINEDFNWTGVAQDGKSYACKRGSVNSFFSRLNWLHKLEYKYPALNVTMPNNGKFDKLYIWGVHHPSTDSDQTSLYVRASGRVTVSTKRSQQTVIPNIGSRPWVRGLSSRISIYWTIVKPGDILLINSTGNLIAPRGYFKIRNGKSSIMRSDAPIGNCSSECITPNGSIPNDKPFQNVNRITYGACPRYVKQNTLKLATGMRNVPEKQTRGIFGAIAGFIENGWEGMVDGWYGFRHQNSEGTGQAADLKSTQAAIDQINGKLNRLIEKTNEKFHQIEKEFSEVEGRIQDLEKYVEDTKIDLWSYNAELLVALENQHTIDLTDSEMNKLFERTRKQLRENAEDMGNGCFKVYHKCDNACIESIRNGTYDHDVYRDEALNNRFQIKGVELKSGYKDWILWISFAISCFLLCVVLLGFIMWACQKGNIRCNICI

SEQ ID NO: 1057 - protein, 566 aa, synthetic construct; identical to SEQ ID NO: 907
  REGION 1..566: note = hemagglutinin__InfluenzaA__ABG67135

SEQ ID NO: 1058 - protein, 566 aa, synthetic construct; identical to SEQ ID NO: 783
  REGION 1..566: note = hemagglutinin__InfluenzaA__ABG67146

SEQ ID NO: 1059 - protein, 566 aa, synthetic construct
  REGION 1..566: note = hemagglutinin__InfluenzaA__ABG67157
MKTIIALSYILCLVFAQKLPGNDNSTATLCLGHHAVPNGTLVKTITNDQIEVTNATELVQSSPTGRICNSPHRIIDGKNCTLIDALLGDPHCDGFQNKEWDLFVERSKAYSNCYPYDVPDYASLRSLVASSGTLEFINENFNWTGVAQDGKSYACKRGSVNSFFSRLNWLHKLEYKYPALNVTMPNNGKFDKLYIWGVHHPSTDSDQTSLYVRASGRVTVSTKRSQQTVIPDIGYRPWVRGLSSRISIYWTIVKPGDILLINSTGNLIAPRGYFKLRNGKSSIMRSDAPIGNCSSECITPNGSIPNDKPFQNVNRITYGACPRYIKQNTLKLATGMRNVPEKQTRGIFGAIAGFIENGWEGMVDGWYGFRHQNSEGTGQAADLKSTQAAIDQINGKLNRLVEKTNEKFHQIEKEFSEVEGRIQDLEKYVEDTKIDLWSYNAELLVALENQHTIDLTDSEMNKLFERTKKQLRENAEDMGNGCFKIYHKCDNACIGSIRNGTYDHDVYRDEALNNRFQIKGVELKSGYKDWILWISFAISCFLLCVVLLGFIMWACQKGNIRCNICI

SEQ ID NO: 1060 - protein, 566 aa, synthetic construct; identical to SEQ ID NO: 984
  REGION 1..566: note = hemagglutinin__InfluenzaA__ABG67168

SEQ ID NO: 1061 - protein, 566 aa, synthetic construct; identical to SEQ ID NO: 984
  REGION 1..566: note = hemagglutinin__InfluenzaA__ABG67179

SEQ ID NO: 1062 - protein, 566 aa, synthetic construct
  REGION 1..566: note = hemagglutinin__InfluenzaA__ABG67190
MKTIIALSYILCLVFAQKLPGNDNSTATLCLGHHAVPNGTLVKTITNDQIEVTNATELVQSFPTGRICDSPHRILDGKNCTLIDALLGDPHCDGFQNKEWDLFVERSKAYSNCYPYDVPDYASLRSLVASSGTLEFTNENFNWTGVAQDGKSYACKRGSVNSFFSRLNWLHKLEYKYPALNVTMPNNGKFDKLYIWGVHHPSTDSDQTSLYVRASGKVTVSTKRSQQTVIPDIGYRPWVRGLSSRISIYWTIVKPGDILLINSTGNLIAPRGYFKIRNGKSSIMRSDAPIGNCSSECITPNGSIPNDKPFQNVNRITYGACPRYVKQNTLKLATGMRNVPEKQTRGIFGAIAGFIENGWEGMVDGWYGFRHQNSEGTGQAADLKSTQAAIDQINGKLNRLVEKTNEKFHQIEKEFSEVEGRIQDLEKYVEDTKIDLWSYNAELLVALENQHTIDLTDSEMNKLFERTRKQLRENAEDMGNGCFKIYHKCDNACIGSIRNGTYDHDVYRDEALNNRFQIKGVELKSGYKDWILWISFAISCFLLCVVLLGFIMWACQKGNIRCNICI

SEQ ID NO: 1063 - protein, 566 aa, synthetic construct
  REGION 1..566: note = hemagglutinin__InfluenzaA__ABG67212
MKTIIALSYILCLVFAQKLPGNDNSTATLCLGHHAVPNGTLVKTITNDQIEVTNATELVQSSSTGRICDSPHRILDGKNCTLIDALLGDPHCDGFQNKEWDLFVERSKAYSNCYPYDVPDYASLRSLVASSGTLEFINEDFNWTGVAQDGKSYACKRGSVNSFFSRLNWLHKLEYRYPALNVTMPNNGKFDKLYIWGVHHPSTDSDQTSLYVRASGRVTVSTKRSQQTVIPNIGFRPWVRGLSSRISIYWTIVKPGDILLINSTGNLIAPRGYFKIRNGKSSIMRSDAPIGNCSSECITPNGSIPNDKPFQNVNRITYGACPRYVKQNTLKLATGMRNVPEKQTRGIFGAIAGFIENGWEGMVDGWYGFRHQNSEGTGQAADLKSTQAAIDQINGKLNRLIEKTNEKFHQIEKEFSEVEGRIQDLEKYVEDTKIDLWSYNAGLLVALENQHTIDLTDSEMNKLFERTRKQLRENAEDMGNGCFKIYHKCDNACIGSIRNGTYDHDVYRDEALNNRFQIKGVELKSGYKDWILWISFAISCFLLCVVLLGFIMWACQKGNIRCNICI

SEQ ID NO: 1064 - protein, 566 aa, synthetic construct; identical to SEQ ID NO: 1024
  REGION 1..566: note = hemagglutinin__InfluenzaA__ABG67223

SEQ ID NO: 1065 - protein, 566 aa, synthetic construct
  REGION 1..566: note = hemagglutinin__InfluenzaA__ABG67234
MKTIIALSYILCLVFAQKLPGDDNSTATLCLGHHAVPNGTLVKTITNDQIEVTNATELVQSSSTGRICDSPHRILDGKNCTLIDALLGDPHCDGFQNKEWDLFVERSKAYSNCYPYDVPDYASLRSLVASSGTLEFINEDFNWTGVAQDGKSYACKRGSVNSFFSRLNWLHKLEYKYPALNVTMPNNGKFDKLYIWGVHHPSTDSDQTSLYVRASGRVTVSTKRSQQTVIPNIGFRPWVRGLSSRISIYWTIVEPGDILLINSTGNLIAPRGYFKIRNGKSSIMRSDAPIGNCSSECITPNGSIPNDKPFQNVNRITYGACPRYVKQNTLKLATGMRNVPEKQTRGIFGAIAGFIENGWEGMVDGWYGFRHQNSEGTGQAADLKSTQAAIDQINGKLNRLIEKTNEKFHQIEKEFSEVEGRIQDLEKYVEDTKIDLWSYNAGLLVALENQHTIDLTDSEMNKLFERTRKQLRENAEDMGNGCFKIYHKCDNACIGSIRNGTYDHDVYRDEALNNRFQIKGVELKSGYKDWILWISFAISCFLLCVVLLGFIMWACQKGNIRCNICI

SEQ ID NO: 1066 - protein, 566 aa, synthetic construct
  REGION 1..566: note = hemagglutinin__InfluenzaA__ABG67245
MKTIIALSYILCLVFAQKLPGNDNSTATLCLGHHAVPNGTLVKTITNDQIEVTNATELVQSSSTGRICDSPHRILDGKNCTLIDALLGDPHCDGFQNKEWDLFVERSKAYSNCYPYDVPDYASLRSLVASSGTLEFINEDFNWTGVAQDGKSYACKRGSVNSFFSRLNWLHKLEYKYPALNVTMPNNGKFDKLYIWGVHHPSTDSDQTSLYVRASGRVTVSTKRSQQTVIPNIGFRPWVRGLSSRISIYWTIVKPGDILLINSTGNLIAPRGYFKIRNGKSSIMRSDAPIGNCSSECITPNGSIPNDKPFQNVNRITYGACPRYVKQNTLKLATGMRNVPEKQTRGIFGAIAGFIENGWEGMVDGWYGFRHQNSEGTGQAADLKSTQAAIDQIDGKLNRLIEKTNEKFHQIEKEFSEVEGRIQDLEKYVEDTKIDLWSYNAGLLVALENQHTIDLTDSEMNKLFERTRKQLRENAEDMGNGCFKIYHKCDNACIGSIRNGTYDHDVYRDEALNNRFQIKGVELKSGYKDWILWISFAISCFLLCVVLLGFIMWACQKGNIRCNICI

SEQ ID NO: 1067 - protein, 565 aa, synthetic construct; identical to SEQ ID NO: 742
  REGION 1..565: note = hemagglutinin__InfluenzaA__ABG67477

SEQ ID NO: 1068 - protein, 565 aa, synthetic construct; identical to SEQ ID NO: 800
  REGION 1..565: note = hemagglutinin__InfluenzaA__ABG67491

SEQ ID NO: 1069 - protein, 566 aa, synthetic construct
  REGION 1..566: note = hemagglutinin__InfluenzaA__ABG67502
MKTIIALSYILCLVFAQKLPGNDNSTATLCLGHHAVPNGTLVKTITNDQIEVTNATELVQSSSTGRICDSPHQILDGENCTLIDALLGDPHCDGFQNKEWDLFVERSKAYSNCYPYDVSDYVSLRSLVASSGTLEFNNESFNWTGVAQNGTSSACKRRSDKSFFSRLNWLHQLKYKYPALNVTMPNNEKFDKLYIWGVHHPGTDSDQISLYAQASGRVTVSTKRSQQTVIPNIGSRPWVRGISSRISIYWTIVKPGDILLINSTGNLIAPRGYFKIRSGKSSIMRSDAPIGKCNSECITPNGSIPNDKPFQNVNRITYGPCPRYVKQNTLKLATGMRNVPEKQTRGIFGAIAGFIENGWEGMMDGWYGFRHQNSEGTGQAADLKSTQAAINQINGKLNRLIEKTNEKFHQIEKEFSEVEGRIQDLEKYVEDTKIDLWSYNAELLVALENQHTIDLTDSEMNKLFERTKKQLRENAEDMGNGCFKIYHKCDNACIGSIRNGTYDHDVYRDEALNNRFQIKGVELKSGYKDWILWISFAISCFLLCIVLLGFIMWACQKGNIRCNICI

SEQ ID NO: 1070 - protein, 566 aa, synthetic construct
  REGION 1..566: note = hemagglutinin__InfluenzaA__ABG67524
MKTIIALSYILCLVFAQKLPGNDNSTATLCLGHHAVPNGTLVKTITNDQIEVTNATELVQSSSTGRICDSPHQILDGENCTLIDALLGDPHCDGFQNKEWDLFVERSRAYSNCYPYDVPDYVSLRSLVASSGTLEFNNESFNWTGVAQNGTSSACKRRSDKSFFSRLNWLHQLKYKYPALNVTMPNNEKFDKLYIWGVHHPGTDSDQISLYAQASGRVTVSTKRSQQTVIPNIGSRPWVRGVSSRISIYWTIVKPGDILLINSTGNLIAPRGYFKIRSGKSSIMRSDAPIGKCNSECITPNGSIPNDKPFQNVNRITYGPCPRYVKQNTLKLATGMRNVPEKQTRGIFGAIAGFIENGWEGMMDGWYGFRHQNSEGTGQAADLKSTQAAVNQINGKLNRLIEKTNEKFHQIEKEFSEVEGRIQDLEKYVEDTKIDLWSYNAELLVALENQHTIDLTDSEMNKLFERTKKQLRENAEDMGNGCFKIYHKCDNACIGSIRNGTYDHDVYRDEALNNRFQIKGVELKSGYKDWILWISFAISCFLLCIVLLGFIMWACQKGNIRCNICI

SEQ ID NO: 1071 - protein, 566 aa, synthetic construct; identical to SEQ ID NO: 562
  REGION 1..566: note = hemagglutinin__InfluenzaA__ABG67535

SEQ ID NO: 1072 - protein, 566 aa, synthetic construct; identical to SEQ ID NO: 516
  REGION 1..566: note = hemagglutinin__InfluenzaA__ABG67546

SEQ ID NO: 1073 - protein, 566 aa, synthetic construct
  REGION 1..566: note = hemagglutinin__InfluenzaA__ABG67557
MKTIIALSYILCLVFAQKLPGNDNSTATLCLGHHAVPNGTIVKTITNDQIEVTNATELVQSSSTGGICDSPHQILDGENCTLIDALLGDPQCDGFQNKKWDLFVERSKAYSNCYPYDVPDHASLRSLVASSGTLEFNNESFDWTGVTQNGTSSACKRRSNKSFFSRLNWLTHLKYKYPALNVTMPNNEKFDKLYIWGVHHPGTDSDQISLYAQASGRITVSTKRSQQTVIPNIGSRPRVRDVSSRISIYWTIVKPGDILLINSTGNLIAPRGYFKIRSGKSSIMRSDAPIGKCNSECITPNGSIPNDKPFQNVNRITYGACPRYVKQNTLKLATGMRNVPEKQTRGIFGAIAGFIENGWEGMVDGWYGFRHQNSEGTGQAADLKSTQATINQINGKLNRLIGKTNEKFHQIEKEFSEVEGRIQDLEKYVEDTKIDLWSYNAELLVALENQHTIDLTDSEMNKLFERTKKQLRENAEDMGNGCFKIYHKCDNACIGSIRNGTYDHDVYRDEALNNRFQIKGVELKSGYKDWILWISFAISCFLLCVALLGFIMWACQKGNIRCNICI

SEQ ID NO: 1074 - protein, 566 aa, synthetic construct; identical to SEQ ID NO: 516
  REGION 1..566: note = hemagglutinin__InfluenzaA__ABG67568

SEQ ID NO: 1075 - protein, 566 aa, synthetic construct; identical to SEQ ID NO: 516
  REGION 1..566: note = hemagglutinin__InfluenzaA__ABG67579

SEQ ID NO: 1076 - protein, 566 aa, synthetic construct; identical to SEQ ID NO: 516
  REGION 1..566: note = hemagglutinin__InfluenzaA__ABG67590

SEQ ID NO: 1077 - protein, 566 aa, synthetic construct; identical to SEQ ID NO: 516
  REGION 1..566: note = hemagglutinin__InfluenzaA__ABG67601

SEQ ID NO: 1078 - protein, 566 aa, synthetic construct; identical to SEQ ID NO: 516
  REGION 1..566: note = hemagglutinin__InfluenzaA__ABG67612

SEQ ID NO: 1079 - protein, 566 aa, synthetic construct; identical to SEQ ID NO: 516
  REGION 1..566: note = hemagglutinin__InfluenzaA__ABG67623

SEQ ID NO: 1080 - protein, 566 aa, synthetic construct
  REGION 1..566: note = hemagglutinin__InfluenzaA__ABG67634
MKTIIALSYILCLVFAQKLPGNDNNTATLCLGHHAVPNGTIVKTITNDQIEVTNATELVQSSSTGGICDSPHQILDGENCTLIDALLGDPQCDGFQNKKWDLFVERSKAYSNCYPYDVPDHASLRSLVASSGTLEFNNESFDWTGVTQNGTSSACKRRSNKSFFSRLNWLTHLKYKYPALNVTMPNNEKFDKLYIWGVHHPGTDSDQISLYAQASGRITVSTKRSQQTVIPNIGSRPRVRDVSSRISIYWTIVKPGDILLINSTGNLIAPRGYFKIRSGKSSIMRSDAPIGKCNSECITPNGSIPNDKPFQNVNRITYGACPRYVKQNTLKLATGMRNVPEKQTRGIFGAIAGFIENGWEGMVDGWYGFRHQNSEGTGQAADLKSTQAAINQINGKLNRLIGKTNEKFHQIEKEFSEVEGRIQDLEKYVEDTKIDLWSYNAELLVALENQHTIDLTDSKMNKLFERTKKQLRENAEDMGNGCFKIYHKCDNACIGSIRNGTYDHDVYRDEALNNRFQIKGVELKSGYKDWILWISFAISCFLLCVALLGFIMWACQKGNIRCNICI

SEQ ID NO: 1081 - protein, 566 aa, synthetic construct; identical to SEQ ID NO: 516
  REGION 1..566: note = hemagglutinin__InfluenzaA__ABG67645

SEQ ID NO: 1082 - protein, 566 aa, synthetic construct
  REGION 1..566: note = hemagglutinin__InfluenzaA__ABG67656
MKTIIALSYILCLVFAQKLPGNDNSTATLCLGHHAVPNGTIVKTITNDQIEVTNATELVQSSSTGGICDSPHQILDGENCTLIDALLGDPQCDGFQNKKWDLFVERSKAYSNCYPYDVPDHASLRSLVASSGTLEFNNESFDWAGVTQNGTSSACKRRSNKSFFSRLNWLTHLKYKYPALNVTMPNNEKFDKLYIWGVHHPGTDSDQISLYAQASGRITVSTKRSQQTVIPNIGSRPRVRDVSSRISIYWTIVKPGDILLINSTGNLIAPRGYFKIRSGKSSIMRSDAPIGKCNSECITPNGSIPNDKPFQNVNRITYGACPRYVKQNTLKLATGMRNVPEKQTRGIFGAIAGFIENGWEGMVDGWYGFRHQNSEGTGQAADLKSTQAAINQINGKLNRLIGKTNEKFHQIEKEFSEIEGRIQDLEKYVEDTKIDLWSYNAELLVALENQHTIDLTDSEMNKLFERTKKQLRENAEDMGNGCFKIYHKCDNACIGSIRNGTYDHDVYRDEALNNRFQIKGVELKSGYKDWILWISFAISCFLLCVALLGFIMWACQKGNIRCNICI

SEQ ID NO: 1083 - protein, 566 aa, synthetic construct
  REGION 1..566: note = hemagglutinin__InfluenzaA__ABG67667
MKTIIALSYILCQVFAQKLPGNDNSTATLCLGHHAVPNGTLVKTITNDQIEVTNATELVQSSSTGRICDSPHRILDGKNCTLIDALLGDPHCDGFQNKEWDLFVERSKAYSNCYPYDVPDYASLRSLVASSGTLEFTNEGFNWIGVAQDGKSYACKRGSVNSFFSRLNWLHKLEYKYPALNVTMPNNDKFDKLYIWGVHHPSTDSDQTSLYVQASGRVTVSTKRSQQTVIPNIGSRPWVRGISSRISIYWTIVKPGDILLINSTGNLIAPRGYFKIRNGKSSIMRSDAPIDNCNSECITPNGSIPNDKPFQNVNRITYGACPRYVKQNTLKLATGMRNVPEKQTRGIFGAIAGFIENGWEGMIDGWYGFRHQNSEGTGQAADLKSTQAAIDQINGKLNRLIEKTNEKFHQIEKEFSEVEGRIQDLEKYVEDTKIDLWSYNAELLVALENQHTIDLTDSEMNKLFERTRKQLRENAEDMGNGCFKIYHKCDNACIGSIRNGTYDHDVYRDEALNNRFQIKGVELKSGYKDWILWISFAISCFLLCVVLLGFIMWACQKGNIRCNICI

SEQ ID NO: 1084 - protein, 566 aa, synthetic construct
  REGION 1..566: note = hemagglutinin__InfluenzaA__ABG79941
MKTIIALSYILCLVFAQKLPGNDNSTATLCLGHHAVPNGTLVKTITNDQIEVTNATELVQSSSTGGICDSPHQILDGENCTLIDALLGDPHCDGFQNKEWDLFVERSKAYSNCYPYDVPDYASLRSLVASSGTLEFNNESFNWTGVAQNGTSSACKRRSNKSFFSRLNWLHQLKYKYPALNVTMPNNEKFDKLYIWGVHHPSTDSDQISLYAQAPGRVTVSTKRSQQTVIPNIGSRPWVRGVSSRISIYWTIVKPGDILLINCTGNLIAPRGYFKIRSGKSSIMRSDASIGKCNSECITPNGSIPNDKPFQNVNRITYGACPRYVKQNTLKLATGMRNVPEKQTRGIFGAIAGFIENGWEGMVDGWYGFRHQNSEGTGQAADLKSTQAAINQINGKLNRLIEKTNEKFHQIEKEFSEVEGRIQDLEKYVEDTKIDLWSYNAELLVALENQHTIDLTDSEMNKLFERTKKQLRENAEDMGNGCFKIYHKCDNACIGSIRNGTYDHDVYRDEALNNRFQIKGVELKSGYKDWILWISFAISCFLLCVVLLGFIMWACQKGNIRCSICI

SEQ ID NO: 1085 - protein, 566 aa, synthetic construct; identical to SEQ ID NO: 921
  REGION 1..566: note = hemagglutinin__InfluenzaA__ABG79952

SEQ ID NO: 1086 - protein, 566 aa, synthetic construct; identical to SEQ ID NO: 984
  REGION 1..566: note = hemagglutinin__InfluenzaA__ABG79974

SEQ ID NO: 1087 - protein, 566 aa, synthetic construct; identical to SEQ ID NO: 984
  REGION 1..566: note = hemagglutinin__InfluenzaA__ABG79985

SEQ ID NO: 1088 - protein, 566 aa, synthetic construct
  REGION 1..566: note = hemagglutinin__InfluenzaA__ABG79996
MKTIIALSYILCLVFAQKLPGNDNSTATLCLGHHAVPNGTLVKTITNDQIEVTNATELVQSSPTGRICDSPHRILDGKNCTLIDALLGDPHCDGFQNKEWDLFVERSKAYSNCYPYDVPDYASLRSLVASSGTLEFTNENFNWTGVAQDGKSYSCKRGSVNSFFSRLNWLHKLEYKYPALNVTMPNNGKFDKLYIWGVHHPSTDSDQTSLYVRASGKVTVSTKRSQQTVIPDIGYRPWVRGLSSRISIYWTIVKPGDILLINSTGNLIAPRGYFKIRNGKSSIMRSDAPIGNCSSECITPNGSIPNDKPFQNVNRITYGACPRYVKQNTLKLATGMRNVPEKQTRGIFGAIAGFIENGWEGMVDGWYGFRHQNSEGTGQAADLKSTQAAIDQINGKLNRLVEKTNEKFHQIEKEFSEVEGRIQDLEKYVEDTKIDLWSYNAELLVALENQHTIDLTDSEMNKLFERTRKQLRENAEDMGNGCFKIYHKCDNACIGSIRNGTYDHDVYRDEALNNRFQIKGVELKSGYKDWILWISFAISCFLLCVVLLGFIMWACQKGNIRCNICI

SEQ ID NO: 1089 - protein, 566 aa, synthetic construct; identical to SEQ ID NO: 984
  REGION 1..566: note = hemagglutinin__InfluenzaA__ABG80007

SEQ ID NO: 1090 - protein, 566 aa, synthetic construct; identical to SEQ ID NO: 984
  REGION 1..566: note = hemagglutinin__InfluenzaA__ABG80018

SEQ ID NO: 1091 - protein, 566 aa, synthetic construct; identical to SEQ ID NO: 989
  REGION 1..566: note = hemagglutinin__InfluenzaA__ABG80029

SEQ ID NO: 1092 - protein, 566 aa, synthetic construct; identical to SEQ ID NO: 989
  REGION 1..566: note = hemagglutinin__InfluenzaA__ABG80040

SEQ ID NO: 1093 - protein, 566 aa, synthetic construct; identical to SEQ ID NO: 984
  REGION 1..566: note = hemagglutinin__InfluenzaA__ABG80051

SEQ ID NO: 1094 - protein, 566 aa, synthetic construct
  REGION 1..566: note = hemagglutinin__InfluenzaA__ABG80062
MKTIIALSYILCLVFAQKLPGNDNSTATLCLGHHAVPNGTLVKTITNDQIEVTNATELVQSSSTGRICDSPHRILDGKNCTLIDALLGDPHCDGFQNKEWDLFVERSKAYSNCYPYDVPDYASLRSLVASSGTLEFTKEGFNWTGVAQDGKSYACKRGSVNSFFSRLNWLHKLEYKYPALNVTMPNNDKFDKLYIWGVHHPSTDSDQTSLYVQASGRVTVSTKRSQQTVIPNIGSRPWVRGISSRISIYWTIVKPGDILLINSTGNLIAPRGYFKIRNGKSSIMRSDAPIGNCNSECITPNGSIPNDKPFQNVNRITYGACPRYVKQNTLKLATGMRNVPEKQTRGIFGAIAGFIENGWEGMVDGWYGFRHQNSEGTGQAADLKSTQAAIDQINGKLNRLIEKTNEKFHQIEKEFSEVEGRIQDLEKYVEDTKIDLWSYNAELLVALENQHTIDLTDSEMNKLFERTRKQLRENAEDMGNGCFKIYHKCDNACIGSIRNGTYDHDVYRDEALNNRFQIKGVELKTGYKDWILWISFAISCFLLCVVLLGFIMWACQKGNIRCNICI

SEQ ID NO: 1095 - protein, 566 aa, synthetic construct
  REGION 1..566: note = hemagglutinin__InfluenzaA__ABG80073
MKTIIALSYILCLVFAQKLPGNDNSTATLCLGHHAVPNGTLVKTITNDQIEVTNATELVQSSSTGRICDSPHRILDGKNCTLIDALLGDPNCDGFQNKEWDLFVERSKAYSNCYPYDVPDYASLRSLVASSGTLEFTNEDFNWTGVAQDGGSYACKRGSVNSFFSRLNWLHKLEYKYPALNVTMPNNGKFDKLYIWGVHHPSTDSDQTSLYVRASGRVTVSTKRSQQTVTPNIGSRPWVRGLSSRISIYWTIVKPGDILLINSTGNLIAPRGYFKIRNGKSSIMRSDAPIGTCSSECITPNGSIPNDKPFQNVNRITYGACPRYVKQNTLKLATGMRNVPEKQTRGIFGAIAGFIENGWEGMVDGWYGFRHQNSEGTGQAADLKSTQAAIDQINGKLNRLIEKTNEKFHQIEKEFSEVEGRIQDLEKYVEDTKIDLWSYNAELLVALENQHTIDLTDSEMNKLFEKTRKQLRENAEDMGNGCFKIYHKCDNACIGSIRNGTYDHDVYRDEALNNRFQIKGVELKSGYKDWILWISFAISCFLLCVVLLGFIMWACQKGNIRCNICI

SEQ ID NO: 1096 - protein, 566 aa, synthetic construct
  REGION 1..566: note = hemagglutinin__InfluenzaA__ABG80084
MKTIIALSYILCLVFAQKLPGNDNSTATLCLGHHAVPNGTLVKTITNDQIEVTNATELVQSSSTGRICDSPHRILDGKNCTLIDALLGDPHCDGFQNKEWDLFVERSKAYSNCYPYDVPDYASLRSLVASSGTLEFINEDFNWTGVAQDGKSYACKRGSVNSFFSRLNWLHKLEYKYPALNVTMPNNGKFDKLYIWGVHHPSTDSDQTSLYVRASGRVTVSTKRSQQTVIPNIGFRPWVRGLSSGISIYWTIVKPGDILLINSTGNLIAPRGYFKIRNGKSSIMRSDAPIGNCSSECITPNGSIPNDKPFQNVNRITYGACPRYVKQNTLKLATGMRNVPEKQTRGIFGAIAGFIENGWEGMVDGWYGFRHQNSEGTGQAADLKSTQAAIDQINGKLNRLIEKTNEKFHQIEKEFSEVEGRIQDLEKYVEDTKIDLWSYNAGLLVALENQHTIDLTDSEMNKLFERTRKQLRENAEDMGNGCFKIYHKCDNACIGSIRNGTYDHDIYRDEALNNRFQIKGVELKSGYKDWILWISFAISCFLLCVVLLGFIMWACQKGNIRCNICI

SEQ ID NO: 1097 - protein, 566 aa, synthetic construct
  REGION 1..566: note = hemagglutinin__InfluenzaA__ABG80095
MKTIIALSYILCLVFAQKLPGNDNSTATLCLGHHAVPNGTLVKTITNDQIEVTNATELVQSSSTGRICDSPHRILDGKNCTLIDALLGDPHCDGFQNKEWDLFVERSKAYSNCYPYDVPDYASLRSLVASSGTLEFINEDFNWTGVAQDGKSYACKRGSVNSFFSRLNWLHKLEYKYPALNVTMPNNGKVDKLYIWGVHHPSTDSDQTSLYVRASGRVTVSTKRSQQTVIPNIGFRPWVRGLSSRISIYWTIVKPGDILLINSTGNLIAPRGYFKIRNGKSSIMRSDAPIGNCSSECITPNGSIPNDKPFQNVNRITYGACPRYVKQNTLKLATGMRNVPEKQTRGIFGAIAGFIENGWEGMVDGWYGFRHQNSEGTGQAADLKSTQAAIDQINGKLNRLIEKTNEKFHQIEKEFSEVEGRIQDLEKYVEDTKIDLWSYNAGLLVALENQHTIDLTDSEMNKLFERTRKQLRENAEDMGNGCFKIYHKCDNACIGSIRNGTYDHDVYRDEALNNRFQIKGVELKSGYKDWILWISFAISCFLLCVVLLGFIMWACQKGNIRCNICI

SEQ ID NO: 1098 - protein, 566 aa, synthetic construct; identical to SEQ ID NO: 1024
  REGION 1..566: note = hemagglutinin__InfluenzaA__ABG80106

SEQ ID NO: 1099 - protein, 566 aa, synthetic construct
  REGION 1..566: note = hemagglutinin__InfluenzaA__ABG80117
MKTIIALSYILCLVFAQKLPGNDNSTATLCLGHHAVPNGTLVKTITNDQIEVTNATELVQSSSTGRICDSPHRILDGKNCTLIDALLGDPHCDGFQNKEWDLFVERSKAYSNCYPYDVPDYASLRSLVASSGTLEFINEDFNWTGVAQDGKSYACKRGSVNSFFSRLNWLHKLEYKYPALNVTMPNNGKFDKLYIWGVHHPSTDSDQTSLYVRASGRVTVSTKRSQQTVIPNIGFRPWVRGLSSRISIYWTIVKPGDILLINSTGNLIAPRGYFKIRNGKSSIMRSDAPIGNCSSECITPNGSIPNDKPFQNVNRITYGACPRYVKQNTLKLATGMRNVPVKQTRGIFGAIAGFIENGWEGMVDGWYGFRHQNSEGTGQAADLKSTQAAIDQINGKLNRLIEKTNEKFHQIEKEFSEVEGRIQDLEKYVEDTKIDLWSYNAGLLVALENQHTIDLTDSEMNKLFERTRKQLRENAEDMGNGCFKIYHKCDNACIGSIRNGTYDHDVYRDEALNNRFQIKGVELKSGYKDWILWISFAISCFLLCVVLLGFIMWACQKGNIRCNICI

SEQ ID NO: 1100 - protein, 566 aa, synthetic construct
  REGION 1..566: note = hemagglutinin__InfluenzaA__ABG80128
MKTIIALSYILCLVFAQKLPGNDNSTATLCLGHHAVPNGTLVKTITNDRIEVTNATELVQSSSTGRICDSPHRILDGKNCTLIDALLGDPHCDGFQNKEWDLFVERSKAYSNCYPYDVPDYASLRSLVASSGTLEFINEDFNWTGVAQDGKSYACKRGSVNSFFSRLNWLHKLEYKYPALNVTMPNNGKFDKLYIWGVHHPSTDSDQTSLYVRASGRVTVSTKRSQQTVIPNIGFRPWVRGLSSRISIYWTIVKPGDILLINSTGNLIAPRGYFKIRNGKSSIMRSDAPIGNCSSECITPNGSIPNDKPFQNVNRITYGACPRYVKQNTLKLATGMRNVPEKQTRGIFGAIAGFIENGWEGMVDGWYGFRHQNSEGTGQAADLKSTQAAIDQINGKLNRLIEKTNEKFHQIEKEFSEVEGRIQDLEKYVEDTKIDLWSYNAGLLVALENQHTIDLTDSEMNKLFERTRKQLRENAEDMGNGCFKIYHKCDNACIGSIRNGTYDHDVYRDEALNNRFQIKGVELKSGYKDWILWISFAISCFLLCVVLLGFIMWACQKGNIRCNICI

SEQ ID NO: 1101 - protein, 566 aa, synthetic construct
  REGION 1..566: note = hemagglutinin__InfluenzaA__ABG80139
MKTIIALSYILCLVFAQKLPGNDNSTATLCLGHHAVPNGTLVKTITNDQIEVTNATELVQSSSTGRICDSPHRILDGKNCTLIDALLGDPHCDGFQNKEWDLFVERSKAYSNCYPYDVPDYASLRSLVASSGTLEFINEDFNWTGVAQDGKSYACKRGSVNSFFSRLNWLHKLEYKYPALNVTMPNNGKFDKLYIWGVHHPSTDSDQTSLYVRASGRVTVSTKRSQQTVIPNIGFRPWVRGLSSRISIYWTIVKPGDILLINSTGNLIAPRGYFKIRNGKSSIMRSDAPIGNCSYECITPNGSIPNDKPFQNVNRITYGACPRYVKQNTLKLATGMRNVPEKQTRGIFGAIAGFIENGWEGMVDGWYGFRHQNSEGTGQAADLKSTQAAIDQINGKLNRLIEKTNEKFHQIEKEFSEVEGRIQDLEKYVEDTKIDLWSYNAGLLVALENQHTIDLTDSEMNKLFERTRKQLRENAEDMGNGCFKIYHKCDNTCIGSIRNGTYDHDVYRDEALNNRFQIKGVELKSGYKDWILWISFAISCFLLCVVLLGFIMWACQKGNIRCNICI

SEQ ID NO: 1102 - protein, 566 aa, synthetic construct
  REGION 1..566: note = hemagglutinin__InfluenzaA__ABG80150
MKTIIALSYILCLVFAQKLPGNDNSTATLCLGHHAVPNGTLVKTITNDQIEVTNATELVQSSSTGRICDSPHRILDGKNCTLIDALLGDPHCDGFQNKEWDLFVERSKAYSNCYPYDVPDYASLRSLVASSGTLEFINENFNWTGVAQDGKSYACKRGSVNSFFSRLNWLHKLEYKYPALNVTMPNNGKFDKLYIWGVHHPSTDSDQTSLYVRASGRVTVSTKRSQQTVIPNIGFRPWVRGLSSGISIYWTIVKPGDILLINSTGNLIAPRGYFKIRNGKSSIMRSDAPIGNCSSECITPNGSIPNDKPFQNVNRITYGACPRYVKQNTLKLATGMRNVPEKQTRGIFGAIAGFIENGWEGMVDGWYGFRHQNSEGTGQAADLKSTQAAIDQINGKLNRLIEKTNEKFHQIEKEFSEVEGRIQDLEKYVEDTKIDLWSYNAGLLVALENQHTIDLTDSEMNKLFERTRKQLRENAEDMGNGCFKIYHKCDNACIGSIRNGTYDHDVYRDEALNNRFQIKGVELKSGYKDWILWISFAISCFLLCVVLLGFIMWACQKGNIRCNICI

SEQ ID NO: 1103 - protein, 566 aa, synthetic construct
  REGION 1..566: note = hemagglutinin__InfluenzaA__ABG80161
MKTIIALSYISCLVFAQKLPGNDNSTATLCLGHHAVPNGTLVKTITNDQIEVTNATELVQSSSTGRICDSPHRILDGKNCTLIDALLGDPHCDGFQNKEWDLFVERSKAYSNCYPYDVPDYASLRSLVASSGTLEFINEDFNWTGVAQDGKSYACKRGSVNSFFSRLNWLHKLEYKYPALNVTMPNNGKFDKLYIWGVHHPSTDSDQTSLYVQASGRVTVSTKRSQQTVIPNIGFRPWVRGLSSRISIYWTIVKPGDILLINSTGNLIAPRGYFKIRNGKSSIMRSDAPIGNCSSECITPNGSIPNDKPFQNVNRITYGACPRYVKQNTLKLATGMRNVPEKQTRGIFGAIAGFIENGWEGMVDGWYGFRHQNSEGTGQAADLKSTQAAIDQINGKLNRLIEKTNEKFHQIEKEFSEVEGRIQDLEKYVEDTKIDLWSYNAGLLVALENQHTIDLTDSEMNKLFERTRKQLRENAEDMGNGCFKIYHKCDNACIGSIRNGTYDHDVYRDEALNNRFQIKGVELKSGYKDWILWISFAISCFLLCVVLLGFIMWACQKGNIRCNICI

SEQ ID NO: 1104 - protein, 565 aa, synthetic construct
  REGION 1..565: note = hemagglutinin__InfluenzaA__ABG80172
MKVKLLVLLCTFTATYADTICIGYHANNSTDTVDTVLEKNVTVTHSVNLLEDSHNGKLCLLKGIAPLQLGNCSVAGWILGNPECELLISKESWSYIVETPNPENGTCYPGYFADYEELREQLSSVSSFERFEIFPKESSWPNHTVTGVSASCSHNGKSSFYRNLLWLTGKNGLYPNLSKSYANNKEKEVLVLWGVHHPPNIGDQRALYHTENAYVSVVSSHYSRRFTPEIAKRPKVRDQEGRINYYWTLLEPGDTIIFEANGNLIAPRYAFALSRGFGSGIITSNAPMDECDAKCQTPQGAINSSLPFQNVHPVTIGECPKYVRSAKLRMVTGLRNIPSIQSRGLFGAIAGFIEGGWTGMVDGWYGYHHQNEQGSGYAADQKSTQNAINGITNKVNSVIEKMNTQFTAVGKEFNKLERRMENLNKKVDDGFLDIWTYNAELLVLLENERTLDFHNSNVKNLYEKVKSQLKNNAKEIGNGCFEFYHKCNNECMESVKNGTYDYPKYSEESKLNREKIDGVKLESMGVYQILAIYSTVASSLVLLVSLGAISFWMCSNGSLQCRICI

SEQ ID NO: 1105 - protein, 565 aa, synthetic construct
  REGION 1..565: note = hemagglutinin__InfluenzaA__ABG80183
MKVKLLVLLCTFTATYADTICIGYHANNSTDTVDTVLEKNVTVTHSVNLLEDSHNGKLCLLKGIAPLQLGNCSVAGWILGNPECELLISKESWSYIVETPNPENGTCYPGYFADYEELREQLSSVSSFERFEIFPKESSWPNHTVTGVSASCSHNGKSSFYRNLLWLTGKNGLYPNLSKSYANNKEKEVLVLWGVHHPPNIGGQRALYHTENAYVSVVSSHYSRRFTPEIAKRPKVRDQEGRINYYWTLLEPGDTIIFEANGNLIAPRYAFALSRGFGSGIITSNAPMDECDAKCQTPQGAINSSLPFQNVHPVTIGECPKYVRSAKLRMVTGLRNIPSIQSRGLFGAIAGFIEGGWTGMVDGWYGYHHQNEQGSGYAADQKSTQNAINGITNKVNSVIEKMNTQFTAVGKEFNKLERRMENLNKKVDDGFLDIWTYNAELLVLLENERTLDFHDSNVKNLYEKVKSQLKNNAKEIGNGCFEFYHKCNNECMESVKNGTYDYPKYSEESKLNREKIDGVKLESMGVYQILAIYSTVASSLVLLVSLGAISFWMCSNGSLQCRICI

SEQ ID NO: 1106 - protein, 566 aa, synthetic construct
  REGION 1..566: note = hemagglutinin__InfluenzaA__ABG80194
MKTIIALSYILCLVFAQKLPVNDNSTATLCLGHHAVPNGTLVKTITNDHIEVTNATELVQSSSTGRICDSPHQILDGENCTLIDALLGDPHCDGFQNKEWNLFVERSTAYSNCYPYDVPDYASLRSLVASSGTLEFNNESFNWTGVAQNGTSSACKRRSIKSFFSRLNWLHQLKYKYPALNVTMPNNEKFDKLYIWGVHHPSTDSDQISLYAQASGRVTVSTKRSQQTVIPNIGSRPWVRGVSSIISIYWTIVKPGDILLINSTGNLIAPRGYFKIRSGKSSIMRSNAPIGKCNSECITPNGSIPNDKPFQNVNRITYGACPRYVKQNTLKLATGMRNVPEKQTRGIFGAIAGFIENGWEGMVDGWYGFRHQNSEGTGQAADLKSTQAAINQINGKLNRLIEKTNEKFHQIEKEFSEVEGRIQDLEKYVEDTKIDLWSYNAELLVALENQHTIDLTDSEMNKLFERTRKQLRENAEDMGNGCFKIYHKCDNACIGSIRNGTYDHDVYRDEALNNRFQIKGVELKSGYKDWILWISFAISCFLLCVVLLGFIMWACQKGNIRCNICI

SEQ ID NO: 1107 - protein, 566 aa, synthetic construct
  REGION 1..566: note = hemagglutinin__InfluenzaA__ABG80205
MKTIIALSYILCLVFAQKLPGNDNSTATLCLGHHAVPNGTLVKTITNDQIEVTNATELVQSSSTGGICDSPHQILDGENCTLIDALLGDPHCDGFQNKEWDLFVERSKAYSNCYPYDVPDYASLRSLVASSGTLEFNNESFNWTGVAQNGTSSACKRRSNKSFFSRLNWLHQLKYKYPALNVAMPNNEKFDKLYIWGVHHPSTDSDQISLYAQAPGRVTVSTKRSQQTVIPNIGSRPWVRGVSSRISIYWTIVKPGDILLINCTGNLIAPRGYFKIRSGKSSIMRSDASIGKCNSECITPNGSIPNDKPFQNVNRITYGACPRYVKQNTLKLATGMRNVPEKQTRGIFGAIAGFIENGWEGMVDGWYGFRHQNSEGTGQAADLKSTQAAINQINGKLNRLIEKTNEKFHQIEKEFSEVEGRIQDLEKYVEDTKINLWSYNAELLVALENQHTIDLTDSEMNKLFERTKKQLRENAEDMGNGCFKIYHKCDNACIGSIRNGTYDHDVYRDEALNNRFQIKGVELKSGYKDWILWISFAISCFLLCVVLLGFIMWACQKGNIRCNICI

SEQ ID NO: 1108 - protein, 566 aa, synthetic construct
  REGION 1..566: note = hemagglutinin__InfluenzaA__ABG80216
MKTIIALSYILCLVFAQKLPVNDNSTATLCLGHHAVPNGTLVKTITNDHIEVTNATELVQSSPTGRICDSPHQILDGENCTLIDALLGDPHCDGFQNKEWDLFVERSTAYSNCYPYDVPDYASLRSLVASSGTLEFNNESFNWTGVAQNGTSSACKRRSIKSFFSRLNWLHQLKYKYPALNVTMPNNEKFDKLYIWGVHHPSTDSDQISLYAQAPGRVTVSTKRSQQTVIPNIGSRPWVRGVSSRISIYWTIVKPGDILLINSTGNLIAPRGYFKIRSGKSSIMRSNTPIGKCNSECITPNGSIPNDKPFQNVNRITYGACPRYVKQNTLKLATGMRNVPEKQTRGIFGAIAGFIENGWEGMVDGWYGFRHQNSEGTGQAADLKSTQAAINQINGKLNRLIEKTNEKFHQIEKEFSEVEGRIQDLEKYVEDTKIDLWSYNAELLVALENQHTIDLTDSEMNKLFERTRKQLRENAEDMGNGCFKIYHKCDNACIGSIRNGTYDHDVYRDEALNNRFQIKGVELKSGYKDWILWISFAISCFLLCVVLLGFIMWACQKGNIRCNICI

SEQ ID NO: 1109 - protein, 566 aa, synthetic construct; identical to SEQ ID NO: 640
  REGION 1..566: note = hemagglutinin__InfluenzaA__ABG80227

SEQ ID NO: 1110 - protein, 566 aa, synthetic construct; identical to SEQ ID NO: 516
  REGION 1..566: note = hemagglutinin__InfluenzaA__ABG80238

SEQ ID NO: 1111 - protein, 566 aa, synthetic construct; identical to SEQ ID NO: 516
  REGION 1..566: note = hemagglutinin__InfluenzaA__ABG80249

SEQ ID NO: 1112 - protein, 566 aa, synthetic construct; identical to SEQ ID NO: 516
  REGION 1..566: note = hemagglutinin__InfluenzaA__ABG80260

SEQ ID NO: 1113 - protein, 566 aa, synthetic construct
  REGION 1..566: note = hemagglutinin__InfluenzaA__ABG80271
MKTIIALSYILCLVFAQKLPGNDNSTATLCLGHHAVPNGTVVKTITNDQIEVTNATELVQSSSTGGICDSPHQILDGENCTLMDALLGDPQCDGFQNKKWDLFVERSKAYSNCYPYDVPDYASLRSLVASSGTLEFNNESFNWTGVTQNGTSSACKRRSNNSFFSRLNWLTHLKFKYPALNVTMPNNEKFDKLYIWGVHHPGTDNDQISLYAQASGRITVSTKRSQQTVIPNIGSRPRVRDIPSRISIYWTIVKPGDILLINSTGNLIAPRGYFKIRSGKSSIMRSDAPIGKCNSECITPNGSIPNDKPFQNVNRITYGACPRYVKQNTLKLATGMRNVPEKQTRGIFGAIAGFIENGWEGMVDGWYGFRHQNSEGTGQAADLKSTQAAINQINGKLNRLIGKTNEKFHQIEKEFSEVEGRIQDLEKYVEDTKIDLWSYNAELLVALENQHTIDLTDSEMNKLFERTKKQLRENAEDMGNGCFKIYHKCDNACIGSIRNGTYDHDVYRDEALNNRFQIKGVELKSGYKDWILWISFAISCFLLCVALLGFIMWACQKGNIRCNICI

SEQ ID NO: 1114 - protein, 566 aa, synthetic construct; identical to SEQ ID NO: 591
  REGION 1..566: note = hemagglutinin__InfluenzaA__ABG80282

SEQ ID NO: 1115 - protein, 566 aa, synthetic construct; identical to SEQ ID NO: 243
  REGION 1..566: note = hemagglutinin__InfluenzaA__ABG80293

SEQ ID NO: 1116 - protein, 566 aa, synthetic construct
  REGION 1..566: note = hemagglutinin__InfluenzaA__ABG80304
MKTIIALSYILCLVFAQKLPGNDNSTATLCLGHHAVPNGTIVKTITNDQIEVTNATELVQSSSTGGICDSPHQILDGENCTLIDALLGDPQCDGFQNKKWDLFVERSKAYSNCYPYDVPDYASLRSLVASSGTLEFNNESFNWTGVTQNGTSSACKRRSNNSFFSRLNWLTHLKFKYPALNVTMPNNEKFDKLYIWGVHHPGTNNDQINLYAQASGRITVSTKRSQQTVIPNIGSRPRVRDIPSRISIYWTIVKPGDILLINSTGNLIAPRGYFKIRSGKSSIMRSDAPIGKCNSECITPNGSIPNDKPFQNVNRITYGACPRYVKQNTLKLATGMRNVPEKQTRGIFGAIAGFIENGWEGMVDGWYGFRHQNSEGIGQAADLKSTQAAINQINGKLNRLIGKTNEKFHQIEKEFSEVEGRIQDLEKYVEDTKIDLWSYNAELLVALENQHTIDLTDSEMNKLFERTKKQLRENAEDMGNGCFKIYHKCDNACIGSIRNGTYDHDVYRDEALNNRFQIKGVELKSGYKDWILWISFAISCFLLCVALLGFIMWACQKGNIRCNICI

SEQ ID NO: 1117 - protein, 566 aa, synthetic construct
  REGION 1..566: note = hemagglutinin__InfluenzaA__ABG80315
MKTIIALSYILCLVFAQKLPGNDNSTATLCLGHHAVPNGTIVKTITNDQIEVTNATELIQSSSTGGICDSPHQILDGENCTLIDALLGDPQCDGFQNKKWDLFVERSKAYSNCYPYDVPDYASLRSLVASSGTLEFNNESFNWTGVTQNGTSSACKRRSNNSFFSRLNWLTHLKFKYPALNVTMPNNEKFDKLYIWGVHHPGTDNDQISLYAQASGRITVSTKRSQQTVIPNIGSRPRVRDIPSRISIYWTIVKPGDMLLINSTGNLIAPRGYFKIRSGKSSIMRSDAPIGKCNSECITPNGSIPNDKPFQNVNRITYGACPRYVKQNTLKLATGMRNVPEKQTRGIFGAIAGFIENGWEGMVDGWYGFRHQNSEGTGQAADLKSTQAAINQINGKLNRLIGKTNEKFHQIEKEFSEVEGRIQDLEKYVEDTKIDLWSYNAELLVALENQHTIDLTDSEMNKLFERTKKQLRENAEDMGNGCFKIYHKCDNACIGSIRNGTYDHDVYRDEALNNRFQIKGVELKSGYKDWILWISFAISCFLLCVALLGFIMWACQKGNIRCNICI

SEQ ID NO: 1118 - protein, 566 aa, synthetic construct; identical to SEQ ID NO: 282
  REGION 1..566: note = hemagglutinin__InfluenzaA__ABG80326

SEQ ID NO: 1119 - protein, 566 aa, synthetic construct; identical to SEQ ID NO: 282
  REGION 1..566: note = hemagglutinin__InfluenzaA__ABG80337

SEQ ID NO: 1120 - protein, 566 aa, synthetic construct
  REGION 1..566: note = hemagglutinin__InfluenzaA__ABG80359
MKTIIALSYILCLVFAQKLPGNDNSTATLCLGHHAVPNGTLVKTITNDQIEVTNATELVQSSSTGRICDSPHRILDGKNCTLIDALLGDPHCDGFQNKEWDLFVERSKAYSNCYPYDVPDYASLRSLVASSGTLEFINEDFNWTGVAQDGGSYACKRGSVNSFFSRLNWLHKLEYKYPALNVTMPNNGKFDKLYIWGVHHPSTDSDQTSLYVRASGRVTVSTKRSQQTVTPNIGSRPWVRGLSSRISIYWTIVKPGDILLINSTGNLIAPRGYFKIRNGKSSIMRSDAPIGNCSSECITPNGSIPSDKPFQNVNRITYGACPRYVKQNTLKLATGMRNVPEKQTRGIFGAIAGFIENGWEGMVDGWYGFRHQNSEGTGQAADLKSTQAAVDQINGKLNRLIERTNEKFHQIEKEFSEVEGRIQDLEKYVEDTKIDLWSYNAELLVALENQHTIDLTDSEMNKLFEKTRKQLRENAEDMGNGCFKIYHKCDNACIGSIRNGTYDHDVYRDEALNNRFQIKGVELKSGYKDWILWISFAISCFLLCVVLLGFIMWACQKGNIRCNICI

SEQ ID NO: 1121 - protein, 566 aa, synthetic construct
  REGION 1..566: note = hemagglutinin__InfluenzaA__ABG80370
MKTIIALSYILCLVFAQKLPGNDNSTATLCLGHHAVPNGTLVKTITNDQIEVTNATELVQSSSTGRICDSPHRILDGKNCTLIDALLGDPHCDGFQNKEWDLFVERSKAYSNCYPYDVPDYASLRSLVASSGTLEFINEDFNWTGVAQDGKSYACKRGSVKSFFSRLNWLHKLEYKYPALNVTMPNNGKFDKLYIWGVHHPSTDSDQTSLYVRASGRVTVSTKRSQQTVIPNIGSRPWVRGLSSRISIYWTIVKPGDILLINSTGNLIAPRGYFKIRNGKSSIMRSDAPIGNCSSECITPNGSIPNDKPFQNVNRITYGACPRYVKQNTLKLATGMRNVPEKQTRGIFGAIAGFIENGWEGMVDGWYGFRHQNSEGTGQAADLKSTQAAIDQINGKLNRLIEKTNEKFHQIEKEFSEVEGRIQDLEKYVEDTKIDLWSYNAELLVALENQHTIDLTDSEMNKLFERTRKQLRENAEDMGNGCFKIYHKCDNACIGSIRNGTYDHDVYRDEALNNRFQIKGVELKSGYKDWILWISFAISCFLLCVVLLGFIMWACQKGNIRCNICI

SEQ ID NO: 1122 - protein, 566 aa, synthetic construct; identical to SEQ ID NO: 1053
  REGION 1..566: note = hemagglutinin__InfluenzaA__ABG80392

SEQ ID NO: 1123 - protein, 566 aa, synthetic construct; identical to SEQ ID NO: 1053
  REGION 1..566: note = hemagglutinin__InfluenzaA__ABG80403

SEQ ID NO: 1124 - protein, 566 aa, synthetic construct; identical to SEQ ID NO: 1053
  REGION 1..566: note = hemagglutinin__InfluenzaA__ABG80414

SEQ ID NO: 1125 - protein, 566 aa, synthetic construct; identical to SEQ ID NO: 1053
  REGION 1..566: note = hemagglutinin__InfluenzaA__ABG80425

SEQ ID NO: 1126 - protein, 566 aa, synthetic construct; identical to SEQ ID NO: 783
  REGION 1..566: note = hemagglutinin__InfluenzaA__ABG88289

SEQ ID NO: 1127 - protein, 566 aa, synthetic construct
  REGION 1..566: note = hemagglutinin__InfluenzaA__ABG88300
MKAKLLVLLCAFTATYADTICIGYHANNSTDTVDTVLEKNVTVTHSVNLLEDSHNGKLCRLKGTAPLQLGNCSVAGWILGNPECESLFSKESWSYIAETPNPENGTCYPGYFADYEELREQLSSVSSFERFEIFPKESSWPNHTVTKGVTASCSHNGKSSFYKNLLWLTEKNGLYPDLSKSYVNNKEKEVLVLWGVHHPSNIGDQRAIYHTENAYVSVVSSHYSRRFTPEITKRPKVRDQEGRINYYWTLLEPGDTIIFEANGNLIAPWYAFALSRGFGSGIITSNASMGECDAKCQTPQGAINSSLPFQNVHPVTIGECPKYVRSTKLRMVTGLRNIPSIQSRGLFGAIAGFIEGGWTGMIDGWYGYHHQNEQGSGYAADQKSTQNAIDGITNKVNSVIEKMNTQFTAVGKEFNKLERRMENLNKKVDDGFLDIWTYNAELLVLLENERTLDFHDSNVKNLYEKVKTQLKNNAKEIGNGCFEFYHKCNNECMESVKNGTYDYPKYSEESKLNREKIDGVKLESMGVYQILAIYSTVASSLVLLVSLGAISFWMCSNGSLQCRICI

SEQ ID NO: 1128 - protein, 566 aa, synthetic construct; identical to SEQ ID NO: 911
  REGION 1..566: note = hemagglutinin__InfluenzaA__ABG88311

SEQ ID NO: 1129 - protein, 566 aa, synthetic construct
  REGION 1..566: note = hemagglutinin__InfluenzaA__ABG88322
MKAKLLVLLCAFTATYADTICIGYHANNSTDTVDTVLEKNVTVTHSVNLLEDSHNGKLCRLKGTAPLQLGNCSVAGWILGNPECESLFSKESWSYIAETPNPENGTCYPGYFADYEELREQLSSVSSFERFEIFPKESSWPNHTVTKGVTASCSHNGKSSFYKNLLWLTEKNGLYPILSKSYVNNKEKEVLVLWGVHHPSNIGDQRAIYHTENAYVSVVSSHYSRRFTPEIAKRPKVRDQEGRINYYWTLLEPGDTIIFEANGNLIAPWYAFALSRGFGSGIITSNASMGECDAKCQTPQGAINSSLPFQNVHPVTIGECPKYVRSTKLRMVTGLRNIPSIQSRGLFGAIAGFIEGGWTGMIDGWYGYHHQNEQGSGYAADQKSTQNAIDGITNKVNSVIEKMNTQFTAVGKEFNKLERRMENLNKKVDDGFLDIWTYNAELLVLLENERTLDFHDSNVKNLYEKVKNQLKNNAKEIGNGCFEFYHKCNNECMESVKNGTYDYPKYSEESKLNREKIDGVKLESMGVYQILAIYSTVASSLVLLVSLGAISFWMCSNGSLQCRICI

SEQ ID NO: 1130 - protein, 566 aa, synthetic construct
  REGION 1..566: note = hemagglutinin__InfluenzaA__ABG88333
MKAKLLVLLCALSATDADTICIGYHANNSTDTVDTVLEKNVTVTHSVNLLEDSHNGKLCRLKGIAPLQLGKCSIAGWILGNPECESLFSKKSWSYIAETPNSENGTCYPGYFADYEELREQLSSVSSFERFEIFPKESSWPKHNVTRGVTASCSHKGKSSFYRNLLWLTEKNGSYPNLSKSYVNNKEKEVLVLWGVHHPSNIEDQKTIYRKENAYVSVVSSHYNRRFTPEISKRPKVRGQEGRINYYWTLLEPGDTIIFEANGNLIAPWYAFALSRGFGSGIITSNASMDECDAKCQTPQGAINSSLPFQNVHPVTIGECPKYVRSTKLRMVTGLRNIPSIQSRGLFGAIAGFIEGGWTGMIDGWYGYHHQNEQGSGYAADQKSTQNAINGITNKVNSVIEKMNTQFTAVGKEFNKLEKRMENLNKKVDDGFLDIWTYNAELLVLLENERTLDFHDSNVKNLYEKVKSQLKNNAKEIGNGCFEFYHKCNNECMESVKNGTYDYPKYSEESKLNREKIDGVKLESMGVYQILAIYSTVASSLVLLVSLGAISFWMCSNGSLQCRICI

SEQ ID NO: 1131 - protein, 566 aa, synthetic construct
  REGION 1..566: note = hemagglutinin__InfluenzaA__ABG88344
MKAKLLVLLCALSATDADTICIGYHANNSTDTVDTVLEKNVTVTHSVNLLEDSHNGKLCRLKGIAPLQLGKCSIAGWILGNPECESLFSKKSWSYIAETPNSENGTCYPGYFADYEELREQLSSVSSFERFEIFPKESSWPKHNVTRGVTASCSHKGKSSFYRNLLWLTEKNGSYPNLSKSYVNNKEKEVLVLWGVHHPSNIEDQKTIYRKENAYVSVVSSHYNRRFTPEISKRPKVRNQEGRINYYWTLLEPGDTIIFEANGNLIAPWYAFALSRGFGSGIITSNASMDECDAKCQTPQGAINSSLPFQNVHPVTIGECPKYVRSTKLRMVTGLRNIPSIQSRGLFGAIAGFIEGGWTGMIDGWYGYHHQNEQGSGYAADQKSTQNAINGITNKVNSVIEKMNTQFTAVGKEFNKLEKRMENLNKKVDDGFLDIWTYNAELLVLLENERTLDFHDSNVKNLYEKVKSQLKNNAKEIGNGCFEFYHKCNNECMESVKNGTYDYPKYSEESKLNREKIDGVKLESMGVYQILAIYSTVASSLVLLVSLGAISFWMCSNGSLQCRICI

SEQ ID NO: 1132 - protein, 566 aa, synthetic construct
  REGION 1..566: note = hemagglutinin__InfluenzaA__ABG88355
MKTIIALSYILCLVFAQKLPGNDNSTATLCLGHHAVPNGTLVKTITNDQIEVTNATELVQSSPTGRICDSPHRILDGKNCTLIDALLGDPHCDGFQNKEWDLFVERSKAYSNCYPYDVPDYASLRSLVASSGTLEFTNENFNWTGVAQDGKSYACKRGSVNSFFSRLNWLHKLEYKYPALNVTMPNNGKFDKLYIWGVHHPSTDSDQTSLYVRASGKVTVSTKRSQQTVIPDIGYRPWVRGLSSRISIYWTIVKPGDILLINSTGNLIAPRGYFKIRNGESSIMRSDAPIGNCSSECITPNGSIPNDKPFQNVNRITYGACPRYVKQNTLKLATGMRNVPEKQTRGIFGAIAGFIENGWEGMVDGWYGFRHQNSEGTGQAADLKSTQAAIDQINGKLNRLVEKTNEKFHQIEKEFSEVEGRIQDLEKYVEDTKIDLWSYNAELLVALENQHTIDLTDSEMNKLFERTRKQLRENAEDMGNGCFKIYHKCDNACIGSIRNGTYDHDVYRDEALNNRFQIKGVELKSGYKDWILWISFAISCFLLCVVLLGFIMWACQKGNIRCNICI

SEQ ID NO: 1133 - protein, 566 aa, synthetic construct
  REGION 1..566: note = hemagglutinin__InfluenzaA__ABG88366
MKTIIALSYFLCLVFAQKLPGNDNSTATLCLGHHAVPNGTLVKTITNDQIEVTNATELVQNSPTGRICDSPHRILDGKNCTLIDALLGDPHCDGFQNKEWDLFVERSKAYSNCYPYDVPDYASLRSLVASSGTLEFTNENFNWTGVAQDGKSYACKRGSVNSFFSRLNWLHKLEYKYPALNVTMPNNGKFDKLYIWGVHHPSTDSDQTSLYVRASGKVTVSTKRSQQTVIPDIGYRPWVRGLSSRISIYWTIVKPGDILLINSTGNLIAPRGYFKIRNGKSSIMRSDAPIGNCSSECITPNGSIPNDKPFQNVNRITYGACPRYVKQNTLKLATGMRNVPEKQTRGIFGAIAGFIENGWEGMVDGWYGFRHQNSEGTGQAADLKSTQAAIDQINGKLNRLVEKTNEKFHQIEKEFSEVEGRIQDLEKYVEDTKIDLWSYNAELLVALENQHTIDLTDSEMNKLFERTRKQLRENAEDMGNGCFKIYHKCDNACIGSIRNGTYDHDVYRDEALNNRFQIKGVELKSGYKDWILWISFAISCFLLCVVLLGFIMWACQKGNIRCNICI

SEQ ID NO: 1134 - protein, 566 aa, synthetic construct; identical to SEQ ID NO: 984
  REGION 1..566: note = hemagglutinin__InfluenzaA__ABG88377

SEQ ID NO: 1135 - protein, 566 aa, synthetic construct; identical to SEQ ID NO: 984
  REGION 1..566: note = hemagglutinin__InfluenzaA__ABG88388

SEQ ID NO: 1136 - protein, 566 aa, synthetic construct
  REGION 1..566: note = hemagglutinin__InfluenzaA__ABG88399
MKTIIALSYILCLVFAQKLPGNDNSTATLCLGHHAVPNGTLVKTITNDQIEVTNATELVQSSSTGRICDSPHRILDGKNCTLIDALLGDPHCDGFQNKEWDLFVERSKAYSNCYPYDVPDYASLRSLVASSGTLEFTKESFNWTGVAQDGKSYACKRGSVNSFFSRLNWLHKLEYKYPALNVTMPNNDKFDKLYIWGVHHPSTDSDQTSLYVQASGRVTVSTKRSQQTVIPNIGSRPWVRGISSRISIYWTIVKPGDILLINSTGNLIAPRGYFKIRNGKSSIMRSDAPIGNCNSECITPNGSIPNDKPFQNVNRITYGACPRYVKQNTLKLATGMRNVPEKQTRGIFGAIAGFIENGWEGMVDGWYGFRHQNSEGTGQAADLKSTQAAIDQINGKLNRLIEKTNEKFHQIEKEFSEVEGRIQDLEKYVEDTKIDLWSYNAELLVALENQHTIDLTDSEMNKLFERTRKQLRENAEDMGNGCFKIYHKCDNACIGSIRNGTYDHDVYRDEALNNRFQIKGVELKSGYKDWILWISFAISCFLLCVVLLGFIMWACQKGNIRCNICI

SEQ ID NO: 1137 - protein, 566 aa, synthetic construct; identical to SEQ ID NO: 1024
  REGION 1..566: note = hemagglutinin__InfluenzaA__ABG88410

SEQ ID NO: 1138 - protein, 566 aa, synthetic construct; identical to SEQ ID NO: 1024
  REGION 1..566: note = hemagglutinin__InfluenzaA__ABG88421

SEQ ID NO: 1139 - protein, 566 aa, synthetic construct
  REGION 1..566: note = hemagglutinin__InfluenzaA__ABG88432
MKTIIALSYILCLVFAQKLPGNDNSTATLCLGHHAVPNGTLVKTITNDQIEVTNATELVQSSSTGRICDSPHRILDGKNCTLIDALLGDPHCDGFQNKEWDLFVERSKAYSNCYPYDVPDYASLRSLVASSGTLEFINEDFNWTGVAQDGKSYACKRGSVNSFFSRLNWLHKLEYKYPALNVTMPNNGKFDKLYIWGVHHPSTDSDQTSLYVRASGRVTVSTKRSQQTVIPNIGFRPWVRGLSSRISIYWTIVKPGDILLINSTGNLIAPRGYFKMRNGKSSIMRSDAPIGNCSSECITPNGSIPNDKPFQNVNRITYGACPRYVKQNTLKLATGMRNVPEKQTRGIFGAIAGFIENGWEGMVDGWYGFRHQNSEGTGQAADLKSTQAAIDQINGKLNRLIEKTNEKFHQIEKEFSEVEGRIQDLEKYVEDTKIDLWSYNAGLLVALENQHTIDLTDSEMNKLFERTRKQLRENAEDMGNGCFKIYHKCDNACIGSIRNGTYDHDVYRDEALNNRFQIKGVELKSGYKDWILWISFAISCFLLCVVLLGFIMWACQKGNIRCNICI

SEQ ID NO: 1140 - protein, 566 aa, synthetic construct; identical to SEQ ID NO: 1024
  REGION 1..566: note = hemagglutinin__InfluenzaA__ABG88443

SEQ ID NO: 1141 - protein, 566 aa, synthetic construct
  REGION 1..566: note = hemagglutinin__InfluenzaA__ABG88454
MKTIIALSYILCLVFAQKLPGNDNSTATLCLGHHAVPNGTLVKTITNDQIEVTNATELVQSSSTGRICDSPHRILDGKNCTLIDALLGDPHCDGFQNKEWDLFVERSKAYSNCYPYDVPDYASLRSLVASSGTLEFINEDFNWTGVAQDGKSYACKRGSANSFFSRLNWLHKLEYKYPALNVTMPNNGKFDKLYIWGVHHPSTDSDQTSLYVRASGGVTVSTKRSQQTVIPNIGSRPWVRGLSSRISIYWTIVKPGDILLINSTGNLIAPRGYFKIRSGKSSIMRSDASIGNCSSECITPNGSIPNDKPFQNVNRITYGACPRYVKQNTLKLATGMRNVPEKQTRGIFGAIAGFIENGWEGMVDGWYGFRHQNSEGTGQAADLKSTQAAIDQINGKLNRLIGKTNDKFHQIEKEFSEVEGRIQDLEKYVEDTKIDLWSYNAELLVALENQHTIDLTDSEMNKLFERTRKQLRENAEDMGNGCFKIYHKCDNACIGSIRNGTYDHDVYRDEALNNRFQIKGVELKSGYKDWILWISFAISCFLLCVVLLGFIMWACQKGNIRCNICI

SEQ ID NO: 1142 - protein, 566 aa, synthetic construct
  REGION 1..566: note = hemagglutinin__InfluenzaA__ABG88465
MKTIIALSYILCLVFAQKLPGNDNSTATLCLGHHAVPNGTLVKTITNDQIEVTNATELVQSSSTGRICDSPHRILDGKNCTLIDALLGDPHCDGFQNKEWDLFVERSKAYSNCYPYDVPDYASLRSLVASSGTLEFINEDFNWTGVAQDGKSYACKRGSVNSFFSRLNWLHKLEYKYPALNVTMPNNGKFDKLYIWGVHHPSTDSDQTSLYVRASGRVTVSTKRSQQTVIPNIGFRPWVRGLSSRISIYWTIVKPGDILLINSTGNLIAPRGYFKIRNGKSSIMRSDAPIGNCSSECITPNGSIPNDKPFQNVNRITYGACPRYVKQNTLKLATGMRNIPEKQTRGIFGAIAGFIENGWEGMVDGWYGFRHQNSEGTGQAADLKSTQAAIDQINGKLNRLIEKTNEKFHQIEKEFSEVEGRIQDLEKYVEDTKIDLWSYNAGLLVALENQHTIDLTDSEMNKLFERTRKQLRENAEDMGNGCFKIYHKCDNACIGSIRNGTYDHDVYRDEALNNRFQIKGVELKSGYKDWILWISFAISCFLLCVVLLGFIMWACQKGNIRCNICI

SEQ ID NO: 1143 - protein, 566 aa, synthetic construct; identical to SEQ ID NO: 1024
  REGION 1..566: note = hemagglutinin__InfluenzaA__ABG88476

SEQ ID NO: 1144 - protein, 566 aa, synthetic construct; identical to SEQ ID NO: 1024
  REGION 1..566: note = hemagglutinin__InfluenzaA__ABG88487

SEQ ID NO: 1145 - protein, 566 aa, synthetic construct; identical to SEQ ID NO: 1024
  REGION 1..566: note = hemagglutinin__InfluenzaA__ABG88498

SEQ ID NO: 1146 - protein, 566 aa, synthetic construct; identical to SEQ ID NO: 1024
  REGION 1..566: note = hemagglutinin__InfluenzaA__ABG88509

SEQ ID NO: 1147 - protein, 566 aa, synthetic construct
  REGION 1..566: note = hemagglutinin__InfluenzaA__ABG88520
MKTIIALSYISCLVFAQKLPGNDNSTATLCLGHHAVPNGTLVKTITNDQIEVTNATELVQSSSTGRICDSPHRILDGKNCTLIDALLGDPHCDGFQNKEWDLFVERSKAYSNCYPYDVPDYASLRSLVASSGTLEFINEDFNWTGVAQDGKSYACKRGSVNSFFSRLNWLHKLEYKYPALNVTMPNNGKFDKLYIWGVHHPSTDSDQTSLYVRASGRVTVSTKRSQQTVIPNIGFRPWVRGLSSRISIYWTIVKPGDILLINSTGNLIAPRGYFKIRNGKSSIMRSDAPIGNCSSECITPNGSIPNDKPFQNVNRITYGACPRYVKQNTLKLATGMRNVPEKQTRGIFGAIAGFIENGWEGMVDGWYGFRHQNSEGTGQAADLKSTQAAIDQINGKLNRLIEKTNEKFHQIEKEFSEVEGRIQDLEKYVEDTKIDLWSYNAGLLVALENQHTIDLTDSEMNKLFERTRKQLRENAEDMGNGCFKIYHKCDNACIGSIRNGTYDHDVYRDEALNNRFQIKGVELKSGYKDWILWISFAISCFLLCVVLLGFTMWACQKGNIRCNICI

SEQ ID NO: 1148 - protein, 566 aa, synthetic construct
  REGION 1..566: note = hemagglutinin__InfluenzaA__ABG88531
MKTIIALSYILCLVFAQKLPGNDNSTATLCLGHHAVPNGTLVKTITNDQIEVTNATELVQSSSTGRICDSPHRILDGKNCTLIDALLGDPHCDGFQNKEWDLFVERSKAYSNCYPYDVPDYASLRSLVASSGTLEFINEDFNWTGVAQDGKSYACKRGSVNSFFSRLNWLHKLEYKYPALNVTMPNNGKFDKLYIWGVHHPSTDSVQTSLYVRASGRVTVSTKRSQQTVIPNIGFRPWVRGLSSRISIYWTIVKPGDILLINSTGNLIAPRGYFKIRNGKSSIMRSDAPIGNCSSECITPNGSIPNDKPFQNVNRITYGACPRYVKQNTLKLATGMRNVPEKQTRGIFGAIAGFIENGWEGMVDGWYGFRHQNSEGTGQAADLKSTQAAIDQINGKLNRLIEKTNEKFHQIEKEFSEVEGRIQDLEKYVEDTKIDLWSYNAGLLVALENQHTIDLTDSEMNKLFERTRKQLRENAEDMGNGCFKIYHKCDNACIGSIRNGTYDHDVYRDEALNNRFQIKGVELKSGYKDWILWISFAISCFLLCVVLLGFIMWACQKGNIRCNICI

SEQ ID NO: 1149 - protein, 565 aa, synthetic construct; identical to SEQ ID NO: 1035
  REGION 1..565: note = hemagglutinin__InfluenzaA__ABG88553

SEQ ID NO: 1150 - protein, 566 aa, synthetic construct; identical to SEQ ID NO: 710
  REGION 1..566: note = hemagglutinin__InfluenzaA__ABG88564

SEQ ID NO: 1151 - protein, 566 aa, synthetic construct; identical to SEQ ID NO: 740
  REGION 1..566: note = hemagglutinin__InfluenzaA__ABG88575

SEQ ID NO: 1152 - protein, 566 aa, synthetic construct; identical to SEQ ID NO: 650
  REGION 1..566: note = hemagglutinin__InfluenzaA__ABG88586

SEQ ID NO: 1153 - protein, 566 aa, synthetic construct
  REGION 1..566: note = hemagglutinin__InfluenzaA__ABG88597
MKTIIALSYILCLVFAQKLPANDNSTATLCLGHHAVPNGTLVKTITNDNIEVTNATELVQSSSTGRICDSPHQILDGENCTLIDALLGDPHCDGFQNKEWDLFVERSTAYSNCYPYDVPDYASLRSLVASSGTLEFNNESFNWTGVDQNGTSSACKRRSNKSFFSRLNWLHQLKYKYPALNVTMPNNEKFDKLYIWGVHHPSTDSDQISLYAQASGRVTVSTKRSQQTVIPNIGSRPWVRGVSSRISIYWTIVKPGDILLINSTGNLIAPRGYFKIRSGKSSIMRSNAPIGKCNSECITPNGSIPNDKPFQNVNRITYGACPRYVKQNTLKLATGMRNVPEKQTRGIFGAIAGFIENGWEGMVDGWYGFRHQNSEGTGQAADLKSTQAAINQINGKLNRLIEKTNEKFHQIEKEFSEVEGRIQDLEKYVEDTKIDLWSYNAELLVALENQHTIDLTDSEMNKLFERTRKQLRENAEDMGNGCFKIYHKCDNACIGSIRNGTYDHDVYRDEALNNRFQIKGVELKSGYKDWILWISFAISCFLLCVVLLGFIMWACQKGNIRCNICI

SEQ ID NO: 1154 - protein, 566 aa, synthetic construct
  REGION 1..566: note = hemagglutinin__InfluenzaA__ABG88608
MKTIIALSYILCLVFAQKLPGNDNSTATLCLGHHAVPNGTLVKTITNDQIEVTNATELVQSSSTGRICDSPHQILDGENCTLIDALLGDPHCDGFQNKEWDLFVERSRAYSNCYPYDVPDYVSLRSLVASSGTLEFNNESFNWTGVAQNGTSSACKRRSDKSFFSRLNWLHQLKYKYPALNVTMPNNEKFDKLYIWGVHHPGTDSDQISLYAQASGRVTVSTKRSQQTVIPNIGSRPWVRGVSSRISIYWTIVKPGDILLINSTGNLIAPRGYFKIRSGKSSIMRSDAPIGKCNSECITPNGSIPNDKPFQNVNRITYGPCPRYVKQNTLKLATGMRNVPEKQTRGIFGAIAGFIENGWEGMMDGWYGFRHQNSEGTGQAADLKSTQAAINQINGKLNRLIEKTNEKFHQIEKEFSEVEGRIQDLEKYVEDTKIDLWSYNAELLVALENQHTIDLTDSEMNKLFERTKKQLRENAEDMGNGCFKIYHKCDNACIGSIRNGTYDHDVYRDEALNTRFQIKGVELKSGYKDWILWISFAISCFLLCIVLLGFIMWACQKGNIRCNICI

SEQ ID NO: 1155 - protein, 566 aa, synthetic construct; identical to SEQ ID NO: 562
  REGION 1..566: note = hemagglutinin__InfluenzaA__ABG88619

SEQ ID NO: 1156 - protein, 566 aa, synthetic construct
  REGION 1..566: note = hemagglutinin__InfluenzaA__ABG88630
MKTIIALSYILCLVFAQKLPGNDNSTATLCLGHHAVPNGTLVKTITNDQIEVTNATELVQSSSTGRICDSPHQVLDGENCTLIDALLGDPHCDGFQNKEWDLFVERSKAYSNCYPYDVPDYVSLRSLVASSGTLEFNNESFNWTGVAQNGTSSACKRRSDKSFFSRLNWLHQLKYKYPALNVTMPNNEKFDKLYIWGVHHPGTDSDQISLYAQASGRVTVSTKRSQQTVIPNIGSRPWVRGVSSRISIYWTIVKPGDILLINSTGNLIAPRGYFKIRSGKSSIMRSDAPIGKCNSECITPNGSIPNDKPFQNVNRITYGACPRYVKQKTLKLATGMRNVPEKQTRGIFGAIAGFIENGWEGMMDGWYGFRHQNSEGTGQAADLKSTQAAINQINGKLNRLIEKTNEKFHQIEKEFSEVEGRIQDLEKYVEDTKIDLWSYNAELLVALENQHTIDLTDSEMNKLFERTKKQLRENAEDMGNGCFKIYHKCDNACIGSIRNGTYDHDVYRDEALNNRFQIKGVELKSGYKDWILWISFAISCFLLCIVLLGFIMWACQKGNIRCNICI

SEQ ID NO: 1157 - protein, 566 aa, synthetic construct
  REGION 1..566: note = hemagglutinin__InfluenzaA__ABG88641
MKTIIALSYILCLVFAQKLPGNDNSTATLCLGHHAVPNGTLVKTITNDQIEVTNATELVQSSSTSRICDSPHQILDGENCTLIDALLGDPHCDGFQNKEWDLFVERSKAYSNCYPYDVPDYVSLRSLVASSGTLEFNNESFNWTGVAQNGTSSACKRRSDKSFFSRLNWLHQLKYKYPALNVTMPNNEKFDKLYIWGVHHPGTDSDQISLYAQASGRVTVSTKRSQQTVIPNIGSGPWVRGVSSRISIYWTIVKPGDILLINSTGNLIAPRGYFKIRSGKSSIMRSDAPIGKCNSECITPNGSIPNGKPFQNVNRITYGACPRYVKQNTLKLATGMRNVPEKQTRGIFGAIAGFIENGWEGMMDGWYGFRHQNSEGTGQAADLKSTQAAINQINGKLNRLIEKTNEKFHQIEKEFSEVEGRIQDLEKYVEDTKIDLWSYNAELLVALENQHTIDLTDSEMNKLFERTKKQLRENAEDMGNGCFKIYHKCDNACIGSIRNGTYDHDVYRDEALNNRFQIKGVELKSGYKDWILWISFATSCFLLCIVLLGFIMWACQKGNIRCNICI

SEQ ID NO: 1158 - protein, 566 aa, synthetic construct; identical to SEQ ID NO: 516
  REGION 1..566: note = hemagglutinin__InfluenzaA__ABG88652

SEQ ID NO: 1159 - protein, 566 aa, synthetic construct; identical to SEQ ID NO: 516
  REGION 1..566: note = hemagglutinin__InfluenzaA__ABG88663

SEQ ID NO: 1160 - protein, 566 aa, synthetic construct; identical to SEQ ID NO: 516
  REGION 1..566: note = hemagglutinin__InfluenzaA__ABG88674

SEQ ID NO: 1161 - protein, 566 aa, synthetic construct; identical to SEQ ID NO: 516
  REGION 1..566: note = hemagglutinin__InfluenzaA__ABG88685

SEQ ID NO: 1162 - protein, 566 aa, synthetic construct; identical to SEQ ID NO: 516
  REGION 1..566: note = hemagglutinin__InfluenzaA__ABG88696

SEQ ID NO: 1163 - protein, 566 aa, synthetic construct; identical to SEQ ID NO: 282
  REGION 1..566: note = hemagglutinin__InfluenzaA__ABG88707

SEQ ID NO: 1164 - protein, 566 aa, synthetic construct; identical to SEQ ID NO: 282
  REGION 1..566: note = hemagglutinin__InfluenzaA__ABG88718

SEQ ID NO: 1165 - protein, 566 aa, synthetic construct
  REGION 1..566: note = hemagglutinin__InfluenzaA__ABG88729
MKTIIALSYILCLVFAQKLPGNDNSTATLCLGHHAVPNGTLVKTITNDQIEVTNATELVQSSSTGRICDSPHRILDGKNCTLIDALLGDPHCDGFQNKEWDLFVERSKAYSNCYPYDVPDYASLRSLVASSGTLEFINEDFNWTGVAQDGGSYACKRGSVNSFFSRLNWLHKLEYKYPALNVTMPNSGKFDKLYIWGVHHPSTDSDQTSLYVRASGRVTVSTKRSQQTVTPNIGSRPWVRGLSSRISIYWTIVKPGDILLINSTGNLIAPRGYFKIRNGKSSIMRSDAPIGNCSSECITPNGSIPNDKPFQNVNRITYGACPRYVKQNTLKLATGMRNVPEKQTRGIFGAIAGFIENGWEGMVDGWYGFRHQNSEGTGQAADLKSTQAAIDQINGKLNRLIEKTNEKFHQIEKEFSEVEGRIQDLEKYVEDTKIDLWSYNAELLVALENQHTIDLTDSEMNKLFEKTRKQLRENAEDMGNGCFKIYHKCDNACIGSIRNGTYDHDVYRDEALNNRFQIKGVELKSGYKDWILWISFAISCFLLCVVLLGFIMWACQKGNIRCNICI

SEQ ID NO: 1166 - protein, 566 aa, synthetic construct
  REGION 1..566: note = hemagglutinin__InfluenzaA__ABG88740
MKTIIALSYILCLVFAQKLPGNDNSTATLCLGHHAVPNGTLVKTITNDQIEVTNATELVQSSSTGRICDSPHRILDGKNCTLIDALLGDPHCDGFQNKEWDLFVERSKAYSNCYPYDVPDYASLRSLVASSGTLEFINEDFNWTGVAQDGKSYACKRGSVNSFFSRLNWLHKLEYKYPALNVTMPNNGKFDKLYIWGVHHPSTDSDQTSLYVRASGRVTVSTKRSQQTVIPNIGSRPWVRGLSSRISIYWTIVKPGDILLINSTGNLIAPRGYFKIRNGKSSIMRSDAPIGNCSSECITPNGSIPNDKPFQNVNRITYGACPRYIKQNTLKLATGMRNVPEKQTRGIFGAIAGFIENGWEGMVDGWYGFRHQNSEGTGQAADLKSTQAAIDQINGKLNRLIEKTNEKFHQIEKEFSEVEGRIQDLEKYVEDTKIDLWSYNAELLVALENQHTIDLTDSEMNKLFERTRKQLRENAEDMGNGCFKIYHKCDNACIGSIRNGTYDHDVYRDEALNNRFQIKGVELKSGYKDWILWISFAISCFLLCVVLLGFIMWACQKGNIRCNICI

SEQ ID NO: 1167 - protein, 566 aa, synthetic construct; identical to SEQ ID NO: 1053
  REGION 1..566: note = hemagglutinin__InfluenzaA__ABG88751

SEQ ID NO: 1168 - protein, 566 aa, synthetic construct
  REGION 1..566: note = hemagglutinin__InfluenzaA__ABG88762
MKTIIALSYILCLVFTQKLPGNDNSTATLCLGHHAVPNGTLVKTITNDQIEVTNATELVQSSSTGRICDSPHRILDGKNCTLIDALLGDPHCDGFQNKEWDLFVERSKAYSNCYPYDVPDYASLRSLVASSGTLEFINEDFNWTGVAQDGGSYACKRGSVNSFFSRLNWLHKLEYKYPALNVTMPNNGKFDKLYIWGVHHPSTDSDQTSLYVRASGRVTVSTKRSQQTVIPNIGSRPWVRGLSSRISIYWTIVKPGDILLINSTGNLIAPRGYFKIRNGKSSIMRSDASIGNCSSECITPNGSIPNDKPFQNVNRITYGACPRYVKQNTLKLATGMRNVPEKQTRGIFGAIAGFIENGWEGMVDGWYGFRHQNSEGTGQAADLKSTQAAIDQINGKLNRLIEKTNEKFHQIEKEVSEVEGRIQDLEKYVEDTKIDLWSYNAELLVALENQHTIDLTDSEMNKLFERTRKQLRENAEDMGNGCFKIYHKCDNACIGSIRNGTYDHDVYRDEALNNRFQIKSVELKSGYKDWILWISFAISCFLLCVVLLGFIMWACQKGNIRCNICI

SEQ ID NO: 1169 - protein, 566 aa, synthetic construct
  REGION 1..566: note = hemagglutinin__InfluenzaA__ABG88773
MKTIIALSYILCLVFAQKLPGNDNSTATLCLGHHAVPNGTLVKTITNDQIEVTNATELVQSSSAGRICDSPHRILDGKNCTLIDALLGDPHCDGFQNKEWDLFVERSKAYSNCYPYDVPDYASLRSLVASSGTLEFINEDFNWTGVAQDGKSYACKRGSVNSFFSRLNWLHKLEYKYPALNVTMPNNGKFDKLYIWGVHHPSTDSDQTSLYVRASGRVTVSTKRSQQTVIPNIGSRPWVRGLSSRISIYWTIVKPGDILLINSTGNLIAPRGYFKIRNGKSSIMRSDAPIGNCSSECITPNGSIPNDKPFQNVNRITYGACPRYVKQNTLKLATGMRNVPEKQTRGIFGAIAGFIENGWEGMVDGWYGFRHQNSEGTGQAADLKSTQAATDQINGKLNRLIEKTNEKFHQIEKEFSEVEGRIQDLEKYVEDTKIDLWSYNAELLVALENQHTIDLTDSEMNKLFERTRKQLRENAEDMGNGCFKIYHKCDNACIGSIRNGTYDHDVYRDEALNNRFQIKGVELKSGYKDWILWISFAISCFLLCVVLLGFIMWACQKGNIRCNICI

SEQ ID NO: 1170 - protein, 566 aa, synthetic construct
  REGION 1..566: note = hemagglutinin__InfluenzaA__ABG88784
MKTIIALSYILCLVFAQKLPGNDNSTATLCLGHHAVPNGTLVKTITNDQIEVTNATELVQSSSTGRICDSPHRILDGKNCTLIDALLGDPHCDGFQNKEWDLFVERSKAYSNCYPYDVPDYASLRSLVASSGTLEFINEDFNWTGVAQDGKSYACKRGSVNSFFSRLNWLHKLEYKYPALNVTMPNNGKFDKLYIWGVHHPSTDSDQTSLYVRASGRVTVSTKRSQQTVIPNIGSRPWVRGLSSRISIYWTIVKPGDILLINSTGNLIAPRGYFKIRNGKSSIMRSDAPIGNCSSECITPNGSIPNDKPFQNVNRITYGACPRYVKQNTLKLATGMRNVPEKQTRGIFGAIAGFIENGWEGMVDGWYGFRHQNSEGTGQAADLKSTQAAIDQINGKLNRLIKKTNEKFHQIEKEFSEVEGRIQDLEKYVEDTKIDLWSYNAELLVALENQHTIDLTDSEMNKLFERTRKQLRENAEDMGNGCFKIYHKCDNACIGSIRNGTYDHDVYRDEALNNRFQIKGVELKSGYKDWILWISFAISCFLLCVVLLGFIMWACQKGNIRCNICI

SEQ ID NO: 1171 - protein, 566 aa, synthetic construct
  REGION 1..566: note = hemagglutinin__InfluenzaA__ABG88806
MKTIIALSYILCLVFAQKLPGNDNSTATLCLGHHAVPNGTLVKTITNDQIEVTNATELVQSSSTGRICDSPHQILDGENCTLIDALLGDPHCDGFQNKEWDLFVERSKAYSNCYPYDVPDYVSLRSLVASSGTLEFNNESFNWTGVAQNGTSSACKRRSDKSFFSRLNWLHQLKYKYPALNVTVPNNEKFDKLYIWGVHHPGTDSDQISLYAQASGRVTVSTKRSQQTVIPNIGSRPWVRGVSSRISIYWTIVKPGDILLINSTGNLIAPRGYFKIRSGKSSIMRSDAPIGKCNSECITPNGSIPNDKPFQNVNRITYGACPRYVKQNTLKLATGMRNVPEKQTRGIFGAIAGFIENGWEGMMDGWYGFRHQNSEGTGQAADLKSTQAAINQINGKLNRLIEKTNEKFHQIEKEFSEVEGRIQDLEKYVEDTKIDLWSYNAELLVALENQHTIDLTDSEMNKLFERTKKQLRENAEDMGNGCFKIYHKCDNACIGSIRNGTYDHDVYRDEALNNRFQIKGVELKSGYKDWILWISFAISCFLLCIVLLGFIMWACQKGNIRCNICI

SEQ ID NO: 1172 - protein, 567 aa, synthetic construct
  REGION 1..567: note = hemagglutinin__InfluenzaA__ABI16504
MEKIVLLLAIVSLVKSDQICIGYHANNSTEQVDTIMEKNVTVTHAQDILEKTHNGKLCDLDGVKPLILRDCSVAGWLLGNPMCDEFINVPEWSYIVEKANPANDLCYPGNFNDYEELKHLLSRINHFEKIQIISKSSWSDHEASSGVSSACPYQGTPSFFRNVVWLIKKNNTYPTIKRSYNNTNQEDLLILWGIHHSNNAAEQTKLYQNPTTYISVGTSTLNLRLVPKIATRSKVNGQSGRMDFFWTILKPNDAINFESNGNFIAPEYAYKIVKKGDSAIMKSEVEYGNCNTKCQTPIGAINSSMPFHNIHPLTIGECPKYVKSNKLVLATGLRNSPLRERRRKRGLFGAIAGFIEGGWQGMVDGWYGYHHSNEQGSGYAADKESTQKAIDGVTNKVNSIIDKMNTQFEAVGREFNNLERRIENLNKKMEDGFLDVWTYNAELLVLMENERTLDFHDSNVKNLYDKVRLQLRDNAKELGNGCFEFYHKCDNECMESVRNGTYDYPQYSEEARLKREEISGVKLESIGTYQILSIYSTVASSLALAIMVAGLSLWMCSNGSLQCRICI

SEQ ID NO: 1173 - protein, 566 aa, synthetic construct; identical to SEQ ID NO: 633
  REGION 1..566: note = hemagglutinin__InfluenzaA__ABI20793

SEQ ID NO: 1174 - protein, 566 aa, synthetic construct
  REGION 1..566: note = hemagglutinin__InfluenzaA__ABI20837
MKAKLLVLLCAFTATYADTICIGYHANNSTDTVDTVLEKNVTVTHSVNLLEDSHNGKLCRLKGTAPLQLGNCSVAGWILGNPECESLFSKESWSYIAETPNPENGTCYPGYFADYEELREQLSSVSSFERFEIFPKESSWPNHTVTKGVTASCSHNGKSSFYKNLLWLTEKNGLYPNLSKSYVNNKEKEVLVLWGVHHPSNIGDQRAIYHTENAYVSVVSSHYSRRFTPEIAKRPKVRDQEGRINYYWTLLEPGDTIIFEANGNLIAPWYAFALSRGFGSGIITSNASMGECDAKCQTPQGAINSSLPFQNVHPVTIGECPKYVRSTKLRMVTGLRNIPSIQSRGLFGAIAGFIEGGWTGMIDGWYGYHHQNEQGSGYAADQKSTQNAINGITNKVNSVIEKMNTQFTAVGKEFNKLERRMENLNKKVDDGFLDIWTYNAELLVLLENERTLDFHDSNVKNLYEKVKTQLKNNAKEIGNGCFEFYHKCNNECMESVKNGTYDYPKYSEESKLNREKIDGVKLESMGVYQILAIYSTVASSLVLLVSLGAISFWMCSNGSLQCRICI

SEQ ID NO: 1175 - protein, 566 aa, synthetic construct
  REGION 1..566: note = hemagglutinin__InfluenzaA__ABI20848
MKAKLLVLLCAFTATYADTICIGYHANNSTDTVDTVLEKNVTVTHSVNLLEDSHNGKLCRLKGTAPLQLGNCSVAGWILGNPECESLFSKESWSYIAETPNPENGTCYPGYFADYEELKEQLSSVSSFERFEIFPKESSWPNHTVTKGVTASCSHNGKSSFYKNLLWLTEKNGLYPNLSKSYVNNKEKEVLVLWGVHHPSNIGDQRAIYHTENAHVSVVSSHYSRRFTPEIAKRPKVRDQEGRINYYWTLLEPGDTIIFEANGNLIAPWYAFALSRGFGSGIITSNASMGECDAKCQTPQGAINSSLPFQNVHPVTIGECPKYVRSTKLRMVTGLRNIPSIQSRGLFGAIAGFIEGGWTGMIDGWYGYHHQNEQGSGYAADKKSTQNAIDGITNKVNSVIEKMNTQFTAVGKEFNKLERRMENLNKKVDDGFLDIWTYNAELLVLLENERTLDFHDSNVKNLYEKVKNQLKNNAKEIGNGCFEFYHKCNNECMESVKNGTYDYPKYSEESKLKREKIDGVKLESMGVYQILAIYSTVASSLVLLVSLGAISFWMCSNGSLQCRICI

SEQ ID NO: 1176 - protein, 566 aa, synthetic construct; identical to SEQ ID NO: 921
  REGION 1..566: note = hemagglutinin__InfluenzaA__ABI20859

SEQ ID NO: 1177 - protein, 566 aa, synthetic construct
  REGION 1..566: note = hemagglutinin__InfluenzaA__ABI20870
MKAKLLVLLCAFTATYADTICIGYHANNSTDTVDTVLEKNVTVTHSVNLLEDSHNGKLCRLKGIAPLQLGNCSVAGWILGNPECESLFSKESWSYIAETPNPENGTCYPGNFADYEELREQLSSVSSFERFEIFPKESSWPNHTVTKGVTVSCSHNGKSSFYRNLLWLTEKNGLYPNLSKSYVNNKEKEVLVLWGVHHPSNMRDQRAIYHTENAYVSVVSSHYSRRFTPEIAKRPKVRDQEGRINYYWTLLEPGDTIIFEANGNLIAPRYAFALSRGFGSGIITSNASMDECDAKCQTPQGAINSSLPFQNVHPVTIGECPKYVRSTKLRMVTGLRNIPSIQSRGLFGAIAGFIEGGWTGMIDGWYGYHHQNEQGSGYAADQKSTQNAINGITNKVNSVIEKMNTQFTAVGKEFNKLERRMENLNKKVDDGFLDIWTYNAELLVLLENERTLDFHDSNVKNLYEKVKSQLKNNAKEIGNGCFEFYHKCNNECMESVKNGTYDYPKYSEESKLNREKIDGVKLESMGVYQILAIYSTVASSLVLLVSLGAISFWMCSNGSLQCRICI

SEQ ID NO: 1178 - protein, 566 aa, synthetic construct; identical to SEQ ID NO: 989
  REGION 1..566: note = hemagglutinin__InfluenzaA__ABI20881

SEQ ID NO: 1179 - protein, 566 aa, synthetic construct
  REGION 1..566: note = hemagglutinin__InfluenzaA__ABI20892
MKTIIALSYILCLVFAQKLPGNDNSTATLCLGHHAVPNGTLVKTITNDQIEVTNATELVQSSSTGRICDSPHRILDGKNCTLIDALLGDPHCDGFQNKEWDLFVERSKAYSNCYPYDVPDYASLRSLVASSGTLEFTKEGFNWTGVAQDGKSYACKRGSVNSFFSRLNWLHKLEYKYPALNVTMPNNDKFDKLYIWGVHHPSTDSDQTSLYVQASGRVTVSTKRSQQTVIPNIGSRPWVRGISSRISIHWTIVKPGDILLITSTGNLIAPRGYFKIRNGKSSIMRSDAPIGNCNSECITPNGSIPNDKPFQNVNRITYGACPRYVKQNTLKLATGMRNVPEKQTRGIFGAIAGFIENGWEGMVDGWYGFRHQNSEGTGQAADLKSTQAAIDQINGKLNRLIEKTNEKFHQIEKEFSEVEGRIQDLEKYVEDTKIDLWSYNAELLVALENQHTIDLTDSEMNKLFERTRKQLRENAEDMGNGCFKIYHKCDNACIGSIRNGTYDHDVYRDEALNNRFQIKGVELKSGYKDWILWISFAISCFLLCVVLLGFIMWACQKGNIRCNICI

SEQ ID NO: 1180 - protein, 566 aa, synthetic construct
  REGION 1..566: note = hemagglutinin__InfluenzaA__ABI20903
MKTIIALSYILCLVFAQKLPGNDNSTATLCLGHHAVPNGTLVKTITNDQIEVTNATELVQNSPTGRICDSPHRILDGKNCTLIDALLGDPHCDGFQNKEWDLFVERSKAYSNCYPYDVPDYASLRSLVASSGTLEFTNENFNWTGVAQDGKSYACKRGSVNSFFSRLNWLHKLEYKYPALNVTMPNNGKFDKLYIWGVHHPSTDSDQTSLYVRASGKVTVSTKRSQQTVIPDIGYRPWVRGLSSRISIYWTIVKPGDILLIHSTGNLIAPRGYFKIRNGKSSIMRSDAPIGNCSSECITPNGSIPNDKPFQNVNRITYGACPRYVKQNTLKLATGMRNVPEKQTRGIFGAIAGFIENGWEGMVDGWYGFRHQNSEGTGQAADLKSTQAAIDQINGKLNRLVEKTNEKFHQIEKEFSEVEGRIQDLEKYVEDTKIDLWSYNAELLVALENQHTIDLTDSEMNKLFERTRKQLRENAEDMGNGCFKIYHKCDNACIGSIRNGTYDHDVYRDEALNNRFQIKGVELKSGYKDWILWISFAISCFLLCVVLLGFIMWACQKGNIRCNICI

SEQ ID NO: 1181 - protein, 566 aa, synthetic construct
  REGION 1..566: note = hemagglutinin__InfluenzaA__ABI20914
MKTIIALSYILCLVFAQKLPGNDNSTATLCLGHHAVPNGTLVKTITNDQIEVTNATELVQSSSTGRICDSPHRILDGKNCTLIDALLGDPHCDGFQNKEWDLFVERSKAYSNCYPYDVPDYASLRSLVASSGTLEFINEDFNWTGVAQDGKSYACKRGSVNSFFSRLNWLHKLEYKYPALNVTMPNNGKFDKLYIWGVHHPSTDSDQTSLYVRASGRVTVSTKRSQQTVIPNIGFRPWVRGLSSRISIYWTIVKPGDILLINSTGNLIAPRGYFKIRNGKSSIMRSDAPIGNCSSECITPNGSIPNDKPFQNVNRITYGACPRYVKQNTLKLATGMRNVPEKQTRGIFGAIAGFIENGWEGMVDGWYGFRHQNSEGTGQAADLKSTQAAIDQINGKLNRLIEKTNEKFHQIEKEFSEVEGRIQDLEKYVEDTKIDLWSYNAGLLVALENQHTIDLTDSEMNKLFERTRKQLRENAEDMGNGCFKIYHKCDNACIGSIRNGTYDHDVYRDEALNNRFQIKGVELKSGYKDWILWISFAISCFLLCVVSLGFIMWACQKGNIRCNICI

SEQ ID NO: 1182 - protein, 566 aa, synthetic construct; identical to SEQ ID NO: 1066
  REGION 1..566: note = hemagglutinin__InfluenzaA__ABI20925

SEQ ID NO: 1183 - protein, 566 aa, synthetic construct; identical to SEQ ID NO: 1066
  REGION 1..566: note = hemagglutinin__InfluenzaA__ABI20936

SEQ ID NO: 1184 - protein, 566 aa, synthetic construct
  REGION 1..566: note = hemagglutinin__InfluenzaA__ABI20947
MKTIIALSYILCLVFAQKLPGNDNSTATLCLGHHAVPNGTLVKTITNDQIEVTNATELVQSSSTGRICDSPHRILDGKNCTLIDALLGDPHCDGFQNKEWDLFVERSKAYSNCYPYDVPDYASLRSLVASSGTLEFINEDFNWTGVAQDGKSYACKRGSVNSFFSRLNWLHKLEYKYPALNVTMPNNGKFDKLYIWGVHHPSTDSDQTSLYVRASGRVTVSTKRSQQTVIPNIGFRPWVRGLSSRISIYWTIVKPGDILLINSTGNLIAPRGYFKIRNGKSSIMRSDAPIGNCSSECITPNGSIPNDKPFQNVNRITYGACPRYVKQNTLKLATGMRNVPEKQTRGIFGAIAGFIENGWEGMVDGWYGFRHQNSEGTGQAADLKSTQAAIDQINGKLNRLIEKTNEKFHQIEQEFSEVEGRIQDLEKYVEDTKIDLWSYNAGLLVALENQHTIDLTDSEMNKLFERTRKQLRENAEDMGNGCFKIYHKCDNACIGSIRNGTYDHDVYRDEALNNRFQIKGVELKSGYKDWILWISFAISCFLLCVVLLGFIMWACQKGNIRCNICI

SEQ ID NO: 1185 - protein, 566 aa, synthetic construct
  REGION 1..566: note = hemagglutinin__InfluenzaA__ABI20958
MKTIIALSYILCLVFAQKLPGNDNSTATLCLGHHAVPNGTLVKTITNDQIEVTNATELVQSSSTGRICDSPHRILDGKNCTLIDALLGDPHCDGFQNKEWDLFVERSKAYSNCYPYDVPDYASLRSLVASSGTLEFINEDFNWTGVAQDGKSYACKRGSVNSFFSRLNWLYKLEYKYPALNVTMPNNGKFDKLYIWGVHHPSTDSDQTSLYVRASGRVTVSTKRSQQTVIPNIGFRPWVRGLSSRISIYWTIVKPGDILLINSTGNLIAPRGYFKIRNGKSSIMRSDAPIGNCSSECITPNGSIPNDKPFQNVNRITYGACPRYVKQNTLKLATGMRNVPEKQTRGIFGAIAGFIENGWEGMVDGWYGFRHQNSEGTGQAADLKSTQAAIDQINGKLNRLIEKTNEKFHQIEKEFSEVEGRIQDLEKYVEDTKIDLWSYNAGLLVALENQHTIDLTDSEMNKLFERTRKQLRENAEDMGNGCFKIYHKCDNACIGSIRNGTYDHDVYRDEALNNRFQIKGVELKSGYKDWILWISFAISCFLLCVVLLGFIMWACQKGNIRCNICI

SEQ ID NO: 1186 - protein, 566 aa, synthetic construct
  REGION 1..566: note = hemagglutinin__InfluenzaA__ABI20969
MKTIIALSYILCLVFAQKLPVNDNSTATLCLGHHAVPNGTLVKTITNDHIEVTNATELVQSSSTGRICDSPHQILDGENCTLIDALLGDPHCDGFQNKEWNLFVERSTAYSNCYPYDVPDYASLRSLVASSGTLEFNNESFNWTGVAQNGTSSACKRRSIKSFFSRLNWLHQLKYKYPALNVTMPNNEKFDKLYIWGVHHPSTDSDQISLYAQASGRVTVSTKRSQQTVIPNIGSRPWVRGVSSRISIYWTIVKPGDILLINSTGNLIAPRGYFKIRSGKSSIMRSNAPIGKCNSECITPNGSIPNDKPFQNVNRITYGACPRYVKQNTLKLATGMRNVPEKQTRGIFGAIAGFIENGWEGMVDGWYGFRHQNSEGTGQAADLKSTQAAINQINGKLNRLIEKTNEKFHQIEKEFSEVEGRIQDLEKYVEDTKIDLWSYNAELLVALENQHTIDLTDSEMNKLFERTRKQLRENAEDMGNGCFKIYHKCDNACIGSIRNGTYDHDVYRDEALNNRFQIKGVELKSGYKDWILWISFAISCFLLCVVLLGFIMWACQKGNIRCNICI

SEQ ID NO: 1187 - protein, 566 aa, synthetic construct
  REGION 1..566: note = hemagglutinin__InfluenzaA__ABI20980
MKTIIALSYILCLVFAQKLPVNDNSTATLCLGHHAVPNGTLVKTITNDHIEVTNATELVQSSSTGRICDSPHQILDGENCTLIDALLGDPHCDGFQNKEWDLFVERSTAYSNCYPYDVPDYASLRSLVASSGTLEFNNESFNWTGVDQNGTSSACKRRSTKSFFSRLNWLHQLKYKYPALNVTMPNNEKFDKLYIWGVHHPSTDSDQISLYAQASGRVTVSTKRSQQTVTPNIGSRPWVRGVSSRISIYWTIVKPGDILLINSTGNLIAPRGYFKIRSGKSSIMRSNALIGKCNSECITPNGSIPNDKPFQNVNRITYGACPRYVKQNTLKLATGMRNVPEKQTRGIFGAIAGFIENGWEGMVDGWYGFRHQNSEGTGQAADLKSTQAAINQINGKLNRLIEKTNEKFHQIEKEFSEVEGRIQDLEKYVEDTKIDLWSYNAEILVALENQHTIDLTDSEMNKLFERTRKQLRENAEDMGNGCFKIYHKCDNACIGSIRNGTYDHDVYRDEALNNRFQIKGVELKSGYKDWILWISFAISCFLLCVVLLGFIMWACQKGNIRCNICI

SEQ ID NO: 1188 - protein, 566 aa, synthetic construct
  REGION 1..566: note = hemagglutinin__InfluenzaA__ABI20991
MKTIIALSYILCLVFAQKLPGNDNSTATLCLGHHAVPNGTLVKTITNDQIEVTNATELVQSSSTGGICDSPHQILDGENCTLIDALLGDPHCDGFQNKEWDLFVERSKAYSNCYPYDVPDYASLRSLVASSGTLEFNNESFNWTGVAQNGTSSACKRRSNKSFFSRLNWLHQLKYKYPALNVTMPNNEKFDKLYIWGVHHPSTDSDQISLYAQAPGRVTVSTKRSQQTVIPNIGSRPWVRGVSSRISIYWTIVKPGDILLINCTGNLIAPRGYFKIRSGKSSIMRSDASIGKCNSECITPNGSIPNDKPFQNVNRITYGACPRYVKQNTLKLATGMRNVPEKQTRGIFGAIAGFIENGWEGMVDGWYGFRHQNSEGTGQAADLKSTQAAINQINGKLNRLIEKTNEKFHQIEKEFSEVEGRIQDLEKYVEDTKIDLWSYNAELLVALENQHTIDLTDSEINKLFERTKKQLRENAEDMGNGCFKIYHKCDNACIGSIRNGTYDHDVYRDEALNNRFQIKGVELKSGYKDWILWISFAISCFLLCVVLLGFIMWACQKGNIRCNICI

SEQ ID NO: 1189 - protein, 566 aa, synthetic construct; identical to SEQ ID NO: 710
  REGION 1..566: note = hemagglutinin__InfluenzaA__ABI21002

SEQ ID NO: 1190 - protein, 566 aa, synthetic construct; identical to SEQ ID NO: 1154
  REGION 1..566: note = hemagglutinin__InfluenzaA__ABI21013

SEQ ID NO: 1191 - protein, 566 aa, synthetic construct; identical to SEQ ID NO: 640
  REGION 1..566: note = hemagglutinin__InfluenzaA__ABI21024

SEQ ID NO: 1192 - protein, 566 aa, synthetic construct; identical to SEQ ID NO: 516
  REGION 1..566: note = hemagglutinin__InfluenzaA__ABI21035

SEQ ID NO: 1193 - protein, 566 aa, synthetic construct
  REGION 1..566: note = hemagglutinin__InfluenzaA__ABI21046
MKTIIALSYILCLVFAQKLPGNDNSTATLCLGHHAVPNGTIVKTITNDQIEVTNATELVQSSSTGGICDSPHQILDGENCTLIDALLGDPQCDGFQNKKWDLFVERSKAYSNCYPYDVPDHASLRSLVASSGTLEFNNESFDWTGVTQNGTSSACKRRSNKSFFSRLNWLTHLKYKYPALNVTMPNNEKFDKLYIWGVHHPGTDNDQISLYAQASGRITVSTKRSQQTVIPNIGSRPRVRDVSSRISIYWTIVKPGDILLINSTGNLIAPRGYFKIRSGKSSIMRSDAPIGKCNSECITPNGSIPNDKPFQNVNRITYGACPRYVKQNTLKLATGMRNVPEKQTRGIFGAIAGFIENGWEGMVDGWYGFRHQNSEGTGQAADLKSTQAAINQINGKLNRLIGKTNEKFHQIEKEFSEVEGRIQDLEKYVEDTKIDLWSYNAELLVALENQHTIDLTDSEMNKLFERTKKQLRENAEDMGNGCFKIYHKCDNACIGSIRNGTYDHDVYRDEALNNRFQIKGVELKSGYKDWILWISFAISCFLLCVALLGFIMWACQKGNIRCNICI

SEQ ID NO: 1194 - protein, 566 aa, synthetic construct
  REGION 1..566: note = hemagglutinin__InfluenzaA__ABI21057
MKTIIALSYILCLVFAQKLPGNDNSTATLCLGHHAVPNGTIVKTITNDQIEVTNATELVQNSSTGGICDSPHQILDGENCTLIDALLGDPQCDGFQNKKWDLFVERSKAYSNCYPYDVPDHASLRSLVASSGTLEFNNESFDWTGVTQNGTSSACKRRSNKSFFSRLNWLTHLKYKYPALNVTMPNNEKFDKLYIWGVHHPGTDSDQISLYAQASGRITVSTKRSQQTVIPNIGSRPRVRDVSSRISIYWTIVKPGDILLINSTGNLIAPRGYFKIRSGKSSIMRSDAPIGKCNSECITPNGSIPNDKPFQNVNRITYGACPRYVKQNTLKLATGMRNVPEKQTRGIFGAIAGFIENGWEGMVDGWYGFRHQNSEGTGQAADLKSTQAAINQINGKLNRLIGKTNEKFHQIEKEFSEVEGRIQDLEKYVEDTKIDLWSYNAELLVALENQHTIDLTDSEMNKLFERTKKQLRENAEDMGNGCFKIYHKCDNACIGSIRNGTYDHDVYRDEALNNRFQIKGVELKSGYKDWILWISFAISCFLLCVALLGFIMWACQKGNIRCNICI

SEQ ID NO: 1195 - protein, 566 aa, synthetic construct; identical to SEQ ID NO: 243
  REGION 1..566: note = hemagglutinin__InfluenzaA__ABI21068

SEQ ID NO: 1196 - protein, 566 aa, synthetic construct; identical to SEQ ID NO: 282
  REGION 1..566: note = hemagglutinin__InfluenzaA__ABI21079

SEQ ID NO: 1197 - protein, 566 aa, synthetic construct; identical to SEQ ID NO: 1113
  REGION 1..566: note = hemagglutinin__InfluenzaA__ABI21090

SEQ ID NO: 1198 - protein, 566 aa, synthetic construct; identical to SEQ ID NO: 1113
  REGION 1..566: note = hemagglutinin__InfluenzaA__ABI21101

SEQ ID NO: 1199 - protein, 566 aa, synthetic construct
  REGION 1..566: note = hemagglutinin__InfluenzaA__ABI21123
MKTIIALSYILCLVFAQKLPGNDNSTATLCLGHHAVPNGTIVKTITNDQIEVTNATELVQSSSTGGICDSPHQILDGENCTLIDALLGDPQCDGFQNKKWDLFVERSKAYSNCYPYDVPDYASLRSLVASSGTLEFNNESFNWTGVTQNGTSSACKRRSNNSFFSRLNWLTHLKFKYPALNVTMPNNEKFDKLYIWGVHHPGTNNDQISLYAQASGRITVSTKRSQQTVIPNIGSRPRVRDIPSRISIYWTIVKPGDILLINSTGNLIAPRGYFKIRSGKSSIMRSDAPIGKCNSECITPNGSIPNDKPFQNVNRITYGACPRYVKQNTLKLATGMRNVPEKQTRGIFGAIAGFIENGWEGMVDGWYGFRHQNSEGIGQAADLKSTQAAINQINGKLNRLIGKTNEKFHQIEKEFSEVEGRIQDLEKHVEDTKIDLWSYNAELLVALENQHTIDLTDSEMNKLFERTKKQLRENAEDMGNGCFKIYHKCDNACIGSIRNGTYDHDVYRDEALNNRFQIKGVELKSGYKDWILWISFAISCFLLCVALLGFIMWACQKGNIRCNICI

SEQ ID NO: 1200 - protein, 566 aa, synthetic construct
  REGION 1..566: note = hemagglutinin__InfluenzaA__ABI21134
MKTIIALSYILCLVFAQKLPGNDNSTATLCLGHHAVPNGTVVKTITNDQIEVTNATELVQSSSTGGICDSPHQILDGENCTLMDALLGDPQCDGFQNKKWDLFVERSKAYSNCYPYDVPDYASLRSLVASSGTLEFNNESFNWTGVTQNGTSSACKRRSNNSFFSRLNWLTHLKFKYPALNVTMPNNEKFDKLYIWGVHHPGTDNDQISLYAQASGRITVSTKRSQQTVIPNIGSRSRVRDIPSRISIYWTIVKPGDILLINSTGNLIAPRGYFKIRSGKSSIMRSDAPIGKCNSECITPNGSIPNDKPFQNVNRITYGACPRYVKQNTLKLATGMRNVPEKQTRGIFGAIAGFIENGWEGMVDGWYGFRHQNSEGTGQAADLKSTQAAINQINGKLNRLIGKTNEKFHQIEKEFSEVEGRIQDLEKYVEDTKIDLWSYNAELLVALENQHTIDLTDSEMNKLFERTKKQLRENAEDMGNGCFKIYHKCDNACIGSIRNGTYDHDVYRDEALNNRFQIKGVELKSGYKDWILWISFAISCFLLCVALLGFIMWACQKGNIRCNICI

SEQ ID NO: 1201 - protein, 566 aa, synthetic construct; identical to SEQ ID NO: 282
  REGION 1..566: note = hemagglutinin__InfluenzaA__ABI21156

SEQ ID NO: 1202 - protein, 566 aa, synthetic construct
  REGION 1..566: note = hemagglutinin__InfluenzaA__ABI21167
MKTIIALGYILCLVFAQKLPGNDNSTATLCLGHHAVPNGTIVKTITNDQIEVTNATELVQSSSTGGICDSPHQILDGENCTLIDALLGDPQCDGFQNKKWDLFVERSKAYSNCYPYDVPDYASLRSLVASSGTLEFNNESFNWTGVTQNGTSSACKRRSNNSFFSRLNWLTHLKFKYPALNVTMPNNEKFDKLYIWGVHHPGTNNDQISLYAQASGRITVSTKRSQQTVIPNIGSRPRVRDIPSRISIYWTIVKPGDILLINSTGNLIAPRGYFKIRSGKSSIMRSDAPIGKCNSECITPNGSIPNDKPFQNVNRITYGACPRYVKQNTLKLATGMRNVPEKQTRGIFGAIAGFIENGWEGMVDGWYGFRHQNSEGIGQAADLKSTQAAINQINGKLNRLIGKTNEKFHQIEKEFSEVEGRIQDLEKYVEDTKIDLWSYNAELLVALENQHTIDLTDSEMNKLFERTKKQLRENAEDMGNGCFKIYHKCDNACIGSIRNGTYDHEVYRDEALNNRFQIKGVELKSGYKDWILWISFAISCFLLCVALLGFIMWACQKGNIRCNICI

SEQ ID NO: 1203 - protein, 566 aa, synthetic construct
  REGION 1..566: note = hemagglutinin__InfluenzaA__ABI21178
MKTIIALSYILCLVFAQKLPGNDNSTATLCLGHHAVPNGTIVKTITNDQIEVTNATELVQSSSTGGICDSPHQILDGENCTLIDALLGDPQCDGFQNKKWDLFVERSKAYSSCYPYDVPDYASLRSLVASSGTLEFNNESFNWTGVTQNGTSSACKRRSNNSFFSRLNWLTHLKFKYPALNVTMPNNEKFDKLYIWGVHHPGTNNDQISLYAQASGRITVSTKRSQQTVIPNIGSRPRVRDIPSRISIYWTIVKPGDILLINSTGNLIAPRGYFKIRSGKSSIMRSDAPIGKCNSECITPNGSIPNDKPFQNVNRITYGACPRYVKQNTLKLATGMRNVPEKQTRGIFGAIAGFIENGWEGMVDGWYGFRHQNSEGIGQAADLKSTQAAINQINGKLNRLIGKTNEKFHQIEKEFSEVEGRIQDLEKYVEDTKIDLWSYNAELLVALENQHTIDLTDSEMNKLFERTKKQLRENAEDMGNGCFKIYHKCDNACIGSIRNGTYDHDVYRDEALNNRFQIKGVELKSGYKDWILWISFAISCFLLCVALLGFIMWACQKGNIRCNICI

SEQ ID NO: 1204 - protein, 565 aa, synthetic construct
  REGION 1..565: note = hemagglutinin__InfluenzaA__ABI21200
MKVKLLVLLCTFTATYADTICIGYHANNSTDTVDTVLEKNVTVTHSVNLLEDSHNGKLCLLKGIAPLQLGNCSVAGWILGNPECELLISKESWSYIVETPNPENGTCYPGYFADYEELREQLSSVSSFERFEIFPKESSWPNHTVTGVSASCSHNGKSSFYRNLLWLTGKNGLYPNLSKSYANNKEKEVLVLWGVHHPPNIGDQRALYHTENAYVSVVSSHYSRRFTPEIAKRPKVRDQEGRINYYWTLLEPGDTIIFEANGNLIAPRFAFALSRGFGSGIITSNAPMDECDAKCQTPQGAINSSLPFQNVHPVTIGECPKYVRSAKLRMVTGLRNIPSIQSRGLFGAIAGFIEGGWTGMVDGWYGYHHQNEQGSGYAADQKSTQNAINGITNKVNSVIEKMNTQFTAVGKEFNKLERRMENLNKKVDDGFLDIWTYNAELLVLLENERTLDFHDSNVKNLYEKVKSQLKNNAKEIGNGCFEFYHKCNDECMESVKNGTYDYPKYSEESKLNRERIDGVKLESMGVYQILAIYSTVASSLVLLVSLGAISFWMCSNGSLQCRICI

SEQ ID NO: 1205 - protein, 565 aa, synthetic construct; identical to SEQ ID NO: 1204
  REGION 1..565: note = hemagglutinin__InfluenzaA__ABI21211

SEQ ID NO: 1206 - protein, 565 aa, synthetic construct
  REGION 1..565: note = hemagglutinin__InfluenzaA__ABI21233
MKVKLLVLLCTFTATYADTICIGYHANNSTDTVDTVLEKNVTVTHSVNLLEDSHNGKLCLLKGIAPLQLGNCSVAGWILGNPECELLISKESWSYIVETPNPENGTCYPGYFADYEELREQLNSVSSFERFEIFPKESSWPNHTVTGVSASCSHNGKSSFYRNLLWLTGKNGLYPNLSKSYANNKEKEVLVLWGVHHPPNIGDQRALYHTENAYVSVVSSHYSRRFTPEIAKRPKVRDQEGRINYYWTLLEPGDTIIFEANGNLIAPRFAFALSRGFGSGIITSNAPMDECDAKCQTPQGAINSSLPFQNVHPVTIGECPKYVRSAKLRMVTGLRNIPSIQSRGLFGAIAGFIEGGWTGMVDGWYGYHHQNEQGSGYAADQKSTQNAINGITNKVNSVIEKMNTQFTAVGKEFNKLERRMENLNKKVDDGFLDIWTYNAELLVLLENERTLDFHDSNVKNLYEKVKSQLKNNAKEIGNGCFEFYHKCNDECMESVKNGTYDYPKYSEESKLNRERIDGVKLESMGVYQILAIYSTVASSLVLLVSLGAISFWMCSNGSLQCRICI

SEQ ID NO: 1207 - protein, 566 aa, synthetic construct
  REGION 1..566: note = hemagglutinin__InfluenzaA__ABI21244
MKTIIALSYILCLVFAQKLPGNDNSTATLCLGHHAVPNGTLVKTITNDQIEVTNATELVQSSSTGRICDSPHRILDGKNCTLIDALLGDPHCDGFQNKEWDLFVERSKAYSNCYPYDVPDYASLRSLVASSGTLKFINEDFNWTGVAQDGKSYACKRGSVNSFFSRLNWLHKLEYKYPALNVTMPNNGKFDKLYIWGVHHPSTDSDQTSLYVRASGRVTVSTKRSQQTVIPNIGSRPWVRGLSSRISIYWTIVKPGDILLINSTGNLIAPRGYFKIRSGKSSIMRSDAPIGNCSSECITPNGSIPNDKPFQNVNRITYGACPRYVKQNTLKLATGMRNVPEKQTRGIFGAIAGFIENGWEGMVDGWYGFRHQNSEGTGQAADLKSTQAAIDQINGKLNRLIEKTNEKFHQIEKEFSEVEGRIQDLEKYVEDTKIDLWSYNAELLVALENQHTIDLTDSEMNKLFERTRKQLRENAEDMGNGCFKIYHKCDNACIGSIRNGTYDHDVYRDEALNNRFQIKGVELKSGYKDWILWISFAISCFLLCVVLLGFIMWACQKGNIRCNICI

SEQ ID NO: 1208 - protein, 566 aa, synthetic construct; identical to SEQ ID NO: 1053
  REGION 1..566: note = hemagglutinin__InfluenzaA__ABI21255

SEQ ID NO: 1209 - protein, 566 aa, synthetic construct; identical to SEQ ID NO: 1053
  REGION 1..566: note = hemagglutinin__InfluenzaA__ABI21266

SEQ ID NO: 1210 - protein, 566 aa, synthetic construct; identical to SEQ ID NO: 1053
  REGION 1..566: note = hemagglutinin__InfluenzaA__ABI21277

SEQ ID NO: 1211 - protein, 566 aa, synthetic construct
  REGION 1..566: note = hemagglutinin__InfluenzaA__ABI21299
MKTIIALSYILCLVFAQKLPGNDNSTATLCLGHHAVPNGTLVKTITNDQIEVTNATELVQSSSTGRICDSPHRILDGKNCTLIDALLGDPHCDGFQNKEWDLFVERSKAYSNCYPYDVPDYASLRSLVASSGTLEFINEDFNWTGVAQDGKSYACKRGSVNSFFSRLNWLHKLEYKYPALNVTMPNNDKFDKLYIWGVHHPSTDSDQTSLYVRASGRVTVSTKRSQQTVIPNIGSRPWVRGLSSRISIYWTIVKPGDILLINSTGNLIAPRGYFKIRNGKSSIMRSDAPIGNCSSECITPNGSIPNDKPFQNVNRITYGACPRYVKQNTLKLATGMRNVPEKQTRGIFGAIAGFIENGWEGMVDGWYGFRHQNSEGTGQAADLKSTQAAIDQINGKLNRLIEKTNEKFHQIEKEFSEVEGRIQDLEKYVEDTKIDLWSYNAELLVALENQHTIDLTDSEMNKLFERTRKQLRENAEDMGNGCFKIYHKCDNACIGSIRNGTYDHDVYRDEALNNRFQIKGVELKSGYKDWILWISFAISCFLLCVVLLGFIMWACQKGNIRCNICI

SEQ ID NO: 1212 - protein, 566 aa, synthetic construct; identical to SEQ ID NO: 1053
  REGION 1..566: note = hemagglutinin__InfluenzaA__ABI21310

SEQ ID NO: 1213 - protein, 566 aa, synthetic construct
  REGION 1..566: note = hemagglutinin__InfluenzaA__ABI21321
MKTIIALSYILCLVFAQKLPGNDNSTATLCLGHHAVPNGTLVKTITNDQIEVTNATELVQSSSTGRICDSPHRILDGKNCTLIDALLGDPHCDGFQNKEWDLFVERSKAYSNCYPYDVPDYASLRSLVASSGTLEFINEDFNWTGVAQDGKSYACKRGSVNSFFSRLNWLHKLEYKYPALNVTMPNNGKFDKLYIWGVHHPSTDSDQTSLYVRASGRVTVSTKRSQQTVIPNIGSRPWVRGLSSRISIYWTIVKPGDILLINSTGNLIAPRGYFKIRNGKSSIMRSDAPIGNCSSECITPNGSIPNDKPFQNVNRITYGACPRYVKQNTLKLATGMRNVPEKQTRGIFGAIAGFIENGWEGMVDGWYGFRHQNSEGTGQAADLKSTQAAIDQINGKLNRLIEKTNEKFHQIEKEFSEVEGRIQDLEKYVEDTKIDLWSYNAELLVALENQHTIDLTDSEMNKLFEKTRKQLRENAEDMGNGCFKIYHKCDNACIGSIRNGTYDHDVYRDEALNNRFQIKGVELKSGYKDWILWISFAISCFLLCVVLLGFIMWACQKGNIRCNICI

SEQ ID NO: 1214 - protein, 566 aa, synthetic construct
  REGION 1..566: note = hemagglutinin__InfluenzaA__ABI21332
MKTIIALSYILCLVFAQKLPGNDNSTATLCLGHHAVPNGTLVKTITNDQIEVTNATELVQSSSTGRICDSPHRILDGKNCTLIDALLGDPHCDGFQNKEWDLFVERSKAYSNCYPYDVPDYASLRSLVASSGTLEFINEDFNWTGVAQDGKSYACKRGSVNSFFSRLNWLHKLEYKYPALNVTMPNNGKFDKLYIWGVHHPSTDSDQTSLYVQASGRVTVSTKRSQQTVIPNIGSRPWVRGLSSRISIYWTIVKPGDILLINSTGNLIAPRGYFKIRNGKSSIMRSDAPIGNCSSECITPNGSIPNDKPFQNVNRITYGACPRYVKQNTLKLATGMRNVPEKQTRGIFGAIAGFIENGWEGMVDGWYGFRHQNSEGTGQAADLKSTQAAIDQINGKLNRLIEKTNEKFHQIEKEFSEVEGRIQDLEKYVEDTKIDLWSYNAELLVALENQHTIDLTDSEMNKLFERTRKQLRENAEDMGNGCFKIYHKCDNACIGSIRNGTYDHDVYRDEALNNRFQIKGVELKSGYKDWILWISFAISCFLLCVVLLGFIMWACQKGNIRCNICI

SEQ ID NO: 1215 - protein, 566 aa, synthetic construct; identical to SEQ ID NO: 1053
  REGION 1..566: note = hemagglutinin__InfluenzaA__ABI21343

SEQ ID NO: 1216 - protein, 566 aa, synthetic construct
  REGION 1..566: note = hemagglutinin__InfluenzaA__ABI21354
MKTIIALSYISCLVFAQKLPGNDNSTATLCLGHHAVPNGTLVKTITNDQIEVTNATELVQSSSTGRICDSPHRILDGKNCTLIDALLGDPHCDGFQNKEWDLFVERSKAYSNCYPYDVPDYASLRSLVASSGTLEFINEDFNWTGVAQDGKSYACKRGSVNSFFSRLNWLHKLEYKYPALNVTMPNNGKFDKLYIWGVHHPSTDSDQTSLYVRASGRVTVSTKRSQQTVIPNIGSRPWVRGLSSRISIYWTIVKPGDILLINSTGNLIAPRGYFKIRNGKSSIMRSDAPIGNCSSECITPNGSIPNDKPFQNVNRITYGACPRYVKQNTLKLATGMRNVPEKQTRGIFGAIAGFIENGWEGMVDGWYGFRHQNSEGTGQAADLKSTQAAIDQINGKLNRLIEKTNEKFHQIEKEFSEVEGRIQDLEKYVEDTKIDLWSYNAELLVALENQHTIDLTDSEMNKLFERTRKQLRENAEDMGNGCFKIYHKCDNACIGSIRNGTYDHDVYRDEALNNRFQIKGVELKSGYKDWILWISFAISCFLLCVVLLGFIMWACQKGNIRCNICI

SEQ ID NO: 1217 - protein, 566 aa, synthetic construct
  REGION 1..566: note = hemagglutinin__InfluenzaA__ABI21365
MKTIIALSYILCLVFAQKLPGNDNSTATLCLGHHAVPNGTLVKTITNDQIEVTNATELVQSSSTGRICDSPHRILDGKNCTLIDALLGDPHCDGFQNKEWDLFVERSKAYSNCYPYDVPDYASLRSLVASSGTLEFINEDFNWTGVAQDGKSYACKRGSVNSFFSRLNWLHKLEYKYPALNVTMPNNGKFDKLYIWGVHHPSTDSDQTSLYVRASGRVTVSTKRSQQTVIPNIGSRPWVRGLSSRISIYWTIVKPGDILLINSTGNLIAPRGYFKIRNGKSSIMRSDAPIGNCSSECITPNGSIPNDKPFQNVNRITYGACPRYVKQNTLKLATGMRNVPEKQTRGIFGAIAGFIENGWEGMVDGWYGFRHQNSEGTGQAADLKSTQAAIDQINGKLNRLIEKTNEKFHQIEKEFSEVEGRIQDLEKYVEDTKIDLWSYNAELLVALENQHTIDLTDSEMDKLFERTRKQLRENAEDMGNGCFKIYHKCDNACIGSIRNGTYDHDVYRDEALNNRFQIKGVELKSGYKDWILWISFAISCFLLCVVLLGFIMWACQKGNIRCNICI

SEQ ID NO: 1218 - protein, 566 aa, synthetic construct
  REGION 1..566: note = hemagglutinin__InfluenzaA__ABI21376
MKTIIALSYILCLVFAQKLPGNDNSTATLCLGHHAVPNGTLVKTITNDQIEVTNATELVQSSSTGRICDSPHRILDGKNCTLIDALLGDPHCDGFQNKEWDLFVERSKAYSNCYPYDVPDYASLRSLVASSGTLEFINEDFNWTGVAQDGKSYSCKRGSVNSFFSRLNWLHKLEYKYPALNVTMPNNDKFDKLYIWGVHHPSTDSDQTSLYVRASGRVTVSTKRSQQTVIPNIGSRPWVRGLSSRISIYWTIVKPGDILLINSTGNLIAPRGYFKIRNGKSSIMRSDAPIGNCSSECITPNGSIPNDKPFQNVNRITYGACPRYVKQNTLKLATGMRNVPEKQTRGIFGAIAGFIENGWEGMVDGWYGFRHQNSEGTGQAADLKSTQAAIDQINGKLNRLIEKTNEKFHQIEKEFSEVEGRIQDLEKYVEDTKIDLWSYNAELLVALENQHTIDLTDSEMNKLFERTRKQLRENAEDMGNGCFKIYHKCDNACIGSIRNGTYDHDVYRDEALNNRFQIKGVELKSGYKDWILWISFAISCFLLCVVLLGFIMWACQKGNIRCNICI

SEQ ID NO: 1219 - protein, 566 aa, synthetic construct; identical to SEQ ID NO: 1053
  REGION 1..566: note = hemagglutinin__InfluenzaA__ABI21387

SEQ ID NO: 1220 - protein, 566 aa, synthetic construct
  REGION 1..566: note = hemagglutinin__InfluenzaA__ABI21398
MKTIIALSYILCLVFAQKLPGNDNSTATLCLGHHAVPNGTLVKTITNDQIEVTNATELVQSSSTGRICDSPHRILDGKNCTLIDALLGDPHCDGFQNKEWDLFVERSKAYSNCYPYDVPDYASLRSLVASSGTLEFVNEDFNWTGVAQDGKSYACKRGSVNSFFSRLNWLHKLEYKYPALNVTMPNNGKFDKLYIWGVHHPSTDSDQTSLYVRASGRVTVSTKRSQQTVIPNIGSRPWVRGLSSRISIYWTIVKPGDILLINSTGNLIAPRGYFKIRNGKSSIMRSDAPIGNCSSECITPNGSIPNDKPFQNVNRITYGACPRYVKQNTLKLATGMRNVPEKQTRGIFGAIAGFIENGWEGMVDGWYGFRHQNSEGTGQAADLKSTQAAIDQINGKLNRLIEKTNEKFHQIEKEFSEVEGRIQDLEKYVEDTKIDLWSYNAELLVALENQHTIDLTDSEMNKLFERTRKQLRENAEDMGNGCFKIYHKCDNACIGSIRNGTYDHDVYRDEALNNRFQIKGVELKSGYKDWILWISFAISCFLLCVVLLGFIMWACQKGNIRCNICI

SEQ ID NO: 1221 - protein, 566 aa, synthetic construct; identical to SEQ ID NO: 1053
  REGION 1..566: note = hemagglutinin__InfluenzaA__ABI21409

SEQ ID NO: 1222 - protein, 566 aa, synthetic construct
  REGION 1..566: note = hemagglutinin__InfluenzaA__ABI21420
MKTIIALSYILCLVFTQKLPGNDNSTATLCLGHHAVPNGTLVKTITNDQIEVTNATELVQSSSTGRICDSPHRILDGKNCTLIDALLGDPHCDGFQNKEWDLFVERSKAYSNCYPYDVPDYASLRSLVASSGTLEFINEDFNWTGVAQDGGSYSCKRGSVNSFFSRLNWLHKLEYKYPALNVTMPNNGKFDKLYIWGVHHPSTDSDQTSLYVRASGRVTVSTKRSQQTVIPNIGSRPWVRGLSSRISIYWTIVKPGDILLINSTGNLIAPRGYFKIRNGKSSIMRSDAPIGNCSSECITPNGSIPNDKPFQNVNRITYGACPRYVKQNTLKLATGMRNVPEKQTRGIFGAIAGFIENGWEGMVDGWYGFRHQNSEGTGQAADLKSTQAAIDQINGKLNRLIEKTNEKFHQIEKEFSEVEGRIQDLEKYVEDTKIDLWSYNAELLVALENQHTIDLTDSEMNKLFERTRKQLRENAEDMGNGCFKIYHKCDNACIGSIRNGTYDHDVYRDEALNNRFQIKSVELKSGYKDWILWISFAISCFLLCVVLLGFIMWACQKGNIRCNICI

SEQ ID NO: 1223 - protein, 566 aa, synthetic construct; identical to SEQ ID NO: 1053
  REGION 1..566: note = hemagglutinin__InfluenzaA__ABI21431

SEQ ID NO: 1224 - protein, 566 aa, synthetic construct; identical to SEQ ID NO: 1053
  REGION 1..566: note = hemagglutinin__InfluenzaA__ABI21442

SEQ ID NO: 1225 - protein, 566 aa, synthetic construct; identical to SEQ ID NO: 1053
  REGION 1..566: note = hemagglutinin__InfluenzaA__ABI21453

SEQ ID NO: 1226 - protein, 566 aa, synthetic construct; identical to SEQ ID NO: 1053
  REGION 1..566: note = hemagglutinin__InfluenzaA__ABI21464

SEQ ID NO: 1227 - protein, 566 aa, synthetic construct; identical to SEQ ID NO: 1053
  REGION 1..566: note = hemagglutinin__InfluenzaA__ABI21475

SEQ ID NO: 1228 - protein, 566 aa, synthetic construct
  REGION 1..566: note = hemagglutinin__InfluenzaA__ABI21486
MKTIIALSYILCLVFAQKLPGNDNSTATLCLGHHAVPNGTLVKTITNDQIEVTNATELVQSSSTGRICDSPHRILDGKNCTLIDALLGDPHCDGFQNKEWDLFVERSKAYSNCYPYDVPDYASLRSLVASSGTLEFINEDFNWTGVAQDGKSYACKRGSVNSFFSRLNWLHKLEYKYPALNVTMPNNGKFDKLYIWGVHHPSTDSDQTSLYVRASGRVTVSTKRSQQTVIPNIGSRPWVRGLSSRISIYWTIVKPGDILLINSTGNLIAPRGYFKIRNGKSSIMRSDAPIGNCSSECITPNGSIPNDKPFQNVNRITYGACPRYVKQNTLKLATGMRNVPEKQTRGIFGAIAGFIENGWEGMVDGWYGFRHQNSEGTGQAADLKSTQEAIDQINGKLNRLIEKTNEKFHQIEKEFSEVEGRIQDLEKYVEDTKIDLWSYNAELLVALENQHTIDLTDSEMNKLFERTRKQLRENAEDMGNGCFKIYHKCDNACIGSIRNGTYDHDVYRDEALNNRFQIKGVELKSGYKDWILWISFAISCFLLCVVLLGFIMWACQKGNIRCNICI

SEQ ID NO: 1229 - protein, 566 aa, synthetic construct; identical to SEQ ID NO: 1053
  REGION 1..566: note = hemagglutinin__InfluenzaA__ABI21497

SEQ ID NO: 1230 - protein, 565 aa, synthetic construct
  REGION 1..565: note = hemagglutinin__InfluenzaA__ABI21530
MKAKLLVLLCTFTATYADTICIGYHANNSTDTVDTVLEKNVTVTHSVNLLEDSHNGKLCLLKGIAPLQLGNCSVAGWILGNPECESLISKESWSYIVETPNPENGTCYPGYFADYEELREQLSSVSSFERFEIFPKESSWPNHTVTGVSASCSHNGKSSFYRNLLWLTEKNGLYPNLSKSYVNNKEKEVLVLWGVHHPSNIGVQRAIYRTENAYVSVVSSHYSRRFTPEIAKRPKVRDQEGRINYYWTLLEPGDTIIFEANGNLIAPWYAFALSRGFESGIITSNAPMNECDAKCQTPQGAINSSLPFQNVHPVTIGECPKYVRSAKLRMVTGLRNIPSIQSRGLFGAIAGFIEGGWTGMIDGWYGYHHQNEQGSGYAADQKSTQNAINGITNKVNSVIEKMNTQFTAVGKEFNKLERRMENLNKKVDDGFLDIWTYNAELLVLLENERTLDFHDSNVKNLYEKVKSQLKNNAKEIGNGCFEFYHKCNNECMESVKNGTYDYPKYSEESKLNREKIDGVKLESMGVYQILAIYSTVASSLVLLVSLGAISFWMCSNGSLQCRICI

SEQ ID NO: 1231 - protein, 565 aa, synthetic construct
  REGION 1..565: note = hemagglutinin__InfluenzaA__ABI21552
MKAKLLVLLCTFTATYADTICIGYHANNSTDTVDTVLEKNVTVTHSVNLLEDSHNGKLCLLKGIAPLQLGNCSVAGWILGNPECESLISKESWSYIVETPNPENGTCYPGYFADYEELREQLSSVSSFERFEIFPKESSWPNHTVTGVSASCSHNGKSSFYRNLLWLTEKNGLYPNLSKSYVNNKEKEVLVLWGVHHPSNIGVQRAIYHTENAYVSVVSSHYSRRFTPEIAKRPKVRDQEGRINYYWTLLEPGDTIIFEANGNLIAPWYAFALSRGFESGIITSNAPMDECDAKCQTPQGAINSSLPFQNVHPVTIGECPKYVRSAKLRMVTGLRNIPSIQSRGLFGAIAGFIEGGWTGMIDGWYGYHHQNEQGSGYAADQKSTQNAINGITNKVNSVIEKMNTQFTAVGKEFNKLERRMENLNKKVDDGFLDIWTYNAELLVLLENERTLDFHDSNVKNLYEKVKSQLKNNAKEIGNGCFEFYHKCNNECMESVKNGTYDYPKYSEESKLNREKIDGVKLESMGVYQILAIYSTVASSLVLLVSLGAISFWMCSNGSLQCRICI

SEQ ID NO: 1232 - protein, 565 aa, synthetic construct
  REGION 1..565: note = hemagglutinin__InfluenzaA__ABI21563
MKAKLLVLLCTFTATYADTICIGYHANNSTDTVDTVLEKNVTVTHSVNLLEDSHNGKLCLLKGIAPLQLGNCSVAGWILGNPECESLISKESWSYIVETPNPENGTCYPGYFADYEELREQLSSVSSFERFEIFPKESSWPNHTVTGVSASCSHNGKSSFYRNLLWLTEKNGLYPNLSKSYVNNKEKEVLVLWGVHHPSNIGVQRAIYHTENAYVSVVSSHYSRRFTPEIAKRPKVRGQEGRINYYWTLLEPGDTIIFEANGNLIAPWYAFALSRGFESGIITSNAPMNECDAKCQTPQGAINSSLPFQNVHPVTIGECPKYVRSAKLRMVTGLRNIPSIQSRGLFGAIAGFIEGGWTGMIDGWYGYHHQNEQGSGYAADQKSTQNAINGITNKVNSVIEKMNTQFTAVGKEFNKLERRMENLNKKVDDGFLDIWTYNAELLVLLENERTLDFHDSNVKNLYEKVKSQLKNNAKEIGNGCFEFYHKCNNECMESVKNGTYDYPKYSEESKLNREKIDGVKLESMGVYQILAIYSTVASSLVLLVSLGAISFWMCSNGSLQCRICI

SEQ ID NO: 1233 - protein, 565 aa, synthetic construct; identical to SEQ ID NO: 1232
  REGION 1..565: note = hemagglutinin__InfluenzaA__ABI21574

SEQ ID NO: 1234 - protein, 566 aa, synthetic construct
  REGION 1..566: note = hemagglutinin__InfluenzaA__ABI21736
MKTIIALSYILCLVFAQKLPGNDNSTATLCLGHHAVPNGTLVKTITNDQIEVTNATELVQSSSTGGICDSPHQILDGENCTLIDALLGDPHCDGFQNKEWDLFVERSKAYSNCYPYDVPDYASLRSLVASSGTLEFNNESFNWTGVAQNGTSSACKRRSNKSFFSRLNWLHQLKYKYPALNVTMPNNEKFDKLYIWGVHHPSTDSDQISLYAQAPGRVTVSTKRSQQTVIPNIGSRPWVRGVSSRISIYWTIVKPGDILLINCTGNLIAPRGYFKIRSGKSSIMRSDASIGKCNSECITPNGSIPNDKPFQNVNRITYGACPRYVKQNTLKLATGMRNVPEKQTRGIFGAIAGFIENGWEGMVDGWYGFRHQNSEGTGQAADLKSTQAAINQINGKLNRLIEKTNEKFHQIEKEFSEVEGRIQDLEKYVEDTKIDLWSYNAELLVALENQHTIDLTDSEMNKLFERTKKQLRENAEDVGNGCFKIYHKCDNACIGSIRNGTYDHDVYRDEALNNRFQIKGVELKSGYKDWILWISFAISCFLLCVVLLGFIMWACQKGNIRCNICI

SEQ ID NO: 1235 - protein, 566 aa, synthetic construct
  REGION 1..566: note = hemagglutinin__InfluenzaA__ABI22159
MKTIIALSYILCLVFAQKLPGNDNSTATLCLGHHAVPNGTIVKTITNDQIEVTNATELVQSSSTGEICDSPHQILDGENCTLIDALLGDPQCDGFQNKKWDLFVERSNAYSNCYPYDVPDYASLRSLVASSGTLEFNNESFNWTGVTQNGTSSACKRRSNNSFFSRLNWLTHLKFKYPALNVTMPNNEKFDKLYIWGVHHPGTDNDQIFLYAQASGRITVSTKRSQQTVIPNIGSRPRVRNIPSRISIYWTIVKPGDILLINSTGNLIAPRGYFKIRSGKSSIMRSDAPIGKCNSECITPNGSIPNDKPFQNVNRITYGACPRYVKQNTLKLATGMRNVPEKQTRGIFGAIAGFIENGWEGMVDGWYGFRHQNSEGIGQAADLKSTQAAINQINGKLNRLIGKTNEKFHQIEKEFSEVEGRIQDLEKYVEDTKIDLWSYNAELLVALENQHTIDLTDSEMNKLFERTKKQLRENAEDMGNGCFKIYHKCDNACIGSIRNGTYDHDVYRDEALNNRFQIKGVELKSGYKDWILWISFAISCFLLCVALLGFIMWACQKGNIRCNICI

SEQ ID NO: 1236 - protein, 568 aa, synthetic construct
  REGION 1..568: note = hemagglutinin__InfluenzaA__ABI23979
MEKIVLLLAIISLVKSDQICIGYHANNSTEQVDTIMEKNVTVTHAQDILEKTHNGKLCDLDGVKPLILRDCSVAGWLLGNPMCDEFLNVPEWSYIVEKINPANDLCYPGNFNDYEELKHLLSRINHFEKIQIIPKSSWSDHEASSGVSSACPYQGRSSFFRNVVWLIKKDNAYPTIKRSYNNTNQEDLLVLWGIHHPNDAAEQTRLYQNPTTYISVGTSTLNQRLVPKIATRSKVNGQSGRMEFFWTILKPNDAINFESNGNFIAPENAYKIVKKGDSTIMKSELEYGNCNTKCQTPIGAINSSMPFHNIHPLTIGECPKYVKSNRLVLATGLRNSPQGERRRKKRGLFGAIAGFIEGGWQGMVDGWYGYHHSNEQGSGYAADKESTQKAIDGVTNKVNSIIDKMNTQFEAVGREFNNLERRIENLNKKMEDGFLDVWTYNAELLVLMENERTLDFHDSNVKNLYDKVRLQLRDNAKELGNGCFEFYHRCDNECMESVRNGTYDYPQYSEESRLKREEISGVKLESIGTYQILSIYSTVASSLALAIMVAGLSLWMCSNGSLQCRICI

SEQ ID NO: 1237 - protein, 566 aa, synthetic construct; identical to SEQ ID NO: 282
  REGION 1..566: note = hemagglutinin__InfluenzaA__ABI26646

SEQ ID NO: 1238 - protein, 566 aa, synthetic construct; identical to SEQ ID NO: 911
  REGION 1..566: note = hemagglutinin__InfluenzaA__ABI30367

SEQ ID NO: 1239 - protein, 566 aa, synthetic construct; identical to SEQ ID NO: 921
  REGION 1..566: note = hemagglutinin__InfluenzaA__ABI30378

SEQ ID NO: 1240 - protein, 566 aa, synthetic construct; identical to SEQ ID NO: 650
  REGION 1..566: note = hemagglutinin__InfluenzaA__ABI30400

SEQ ID NO: 1241 - protein, 566 aa, synthetic construct
  REGION 1..566: note = hemagglutinin__InfluenzaA__ABI30411
MKTIIALSYILCLVFAQKLPGNDNSTATLCLGHHAVPNGTLVKTITNDQIEVTNATELVQSSSTGGICDSPHQILDGENCTLIDALLGDPHCDGFQNKEWDLFVERSKAYSNCYPYDVPDYASLRSLVASSGTLEFNNESFNWTGVAQNGTSSACKRRSNKSFFSRLNWLHQLKYKYPALNVTMPNNEKFDKLYIWGVHHPSTDSDQISLYAQAPGRVTVSTKRSQQTVIPNIGSRPWVRGVSSRISIYWTIVKPGDILLINCTGNLIAPRGYFKIRSGKSSIMRSDASIGKCNSECITPNGSIPNDKPFQNVNRITYGACPRYVKQNTLKLATGMRNVPEKQTRGIFGAIAGFIENGWEGMVDGWYGFRHQNSEGTGQAADLKSTQAAINQINGKLNRLIEKTNEKFHQIEKEFSEVEGRIQDLEKYVEDTKIDLWSYNAELLVALENQHTIDLTDSEMDKLFERTKKQLRENAEDMGNGCFKIYHKCDNACIGSIRNGTYDHDVYRDEALNNRFQIKGVELKSGYKDWILWISFAISCFLLCVVLLGFIMWACQKGNIRCNICI

SEQ ID NO: 1242 - protein, 566 aa, synthetic construct; identical to SEQ ID NO: 591
  REGION 1..566: note = hemagglutinin__InfluenzaA__ABI30422

SEQ ID NO: 1243 - protein, 566 aa, synthetic construct; identical to SEQ ID NO: 282
  REGION 1..566: note = hemagglutinin__InfluenzaA__ABI30433

SEQ ID NO: 1244 - protein, 566 aa, synthetic construct; identical to SEQ ID NO: 591
  REGION 1..566: note = hemagglutinin__InfluenzaA__ABI30444

SEQ ID NO: 1245 - protein, 566 aa, synthetic construct; identical to SEQ ID NO: 282
  REGION 1..566: note = hemagglutinin__InfluenzaA__ABI30455

SEQ ID NO: 1246 - protein, 566 aa, synthetic construct; identical to SEQ ID NO: 282
  REGION 1..566: note = hemagglutinin__InfluenzaA__ABI30466

SEQ ID NO: 1247 - protein, 566 aa, synthetic construct; identical to SEQ ID NO: 282
  REGION 1..566: note = hemagglutinin__InfluenzaA__ABI30477

SEQ ID NO: 1248 - protein, 566 aa, synthetic construct; identical to SEQ ID NO: 282
  REGION 1..566: note = hemagglutinin__InfluenzaA__ABI30488

SEQ ID NO: 1249 - protein, 566 aa, synthetic construct; identical to SEQ ID NO: 282
  REGION 1..566: note = hemagglutinin__InfluenzaA__ABI30499

SEQ ID NO: 1250 - protein, 566 aa, synthetic construct; identical to SEQ ID NO: 243
  REGION 1..566: note = hemagglutinin__InfluenzaA__ABI30510

SEQ ID NO: 1251 - protein, 566 aa, synthetic construct
  REGION 1..566: note = hemagglutinin__InfluenzaA__ABI30521
MKTIIALSYILCLVFAQKLPGNDNSTATLCLGHHAVPNGTIVKTITNDQIEVTNATELVQSSSTGGICDSPHQILDGENCTLIDALLGDPQCDGFQNKKWDLFVERSKAYSNCYPYDVPDYASLRSLVASSGTLEFNNESFNWTGVTQNGTSSACKRRSNNSFFSRLNWLTHLKFKYPALNVTMPNNEKFDKLYIWGVHHPGTNNDQISLYAQASGRITVSTKRSQQTVIPNIGSRPRVRDIPSRISIYWTIVKPGDILLINSTGNLIAPRGYFKIRSGKSSIMRSDASIGKCNSECITPNGSIPNDKPFQNVNRITYGACPRYVKQNTLKLATGMRNVPEKQTRGIFGAIAGFIENGWEGMVDGWYGFRHQNSEGIGQAADLKSTQAAINQINGKLNRLIGKTNEKFHQIEKEFSEVEGRIQDLEKYVEDTKIDLWSYNAELLVALENQHTIDLTDSEMNKLFERTKKQLRENAEDMGNGCFKIYHKCDNACIGSIRNGTYDHDVYRDEALNNRFQIKGVELKSGYKDWILWISFAISCFLLCVALLGFIMWACQKGNIRCNICI

SEQ ID NO: 1252 - protein, 566 aa, synthetic construct; identical to SEQ ID NO: 282
  REGION 1..566: note = hemagglutinin__InfluenzaA__ABI30532

SEQ ID NO: 1253 - protein, 566 aa, synthetic construct; identical to SEQ ID NO: 1113
  REGION 1..566: note = hemagglutinin__InfluenzaA__ABI30543

SEQ ID NO: 1254 - protein, 566 aa, synthetic construct; identical to SEQ ID NO: 282
  REGION 1..566: note = hemagglutinin__InfluenzaA__ABI30554

SEQ ID NO: 1255 - protein, 565 aa, synthetic construct; identical to SEQ ID NO: 1204
  REGION 1..565: note = hemagglutinin__InfluenzaA__ABI30565

SEQ ID NO: 1256 - protein, 566 aa, synthetic construct; identical to SEQ ID NO: 633
  REGION 1..566: note = hemagglutinin__InfluenzaA__ABI30587

SEQ ID NO: 1257 - protein, 566 aa, synthetic construct
  REGION 1..566: note = hemagglutinin__InfluenzaA__ABI30609
MKTIIALSYILCLVFAQKLPGNDNSTATLCLGHHAVPNGTIVKTIMNDQIEVTNATELVQSSSTGGICDSPHQILDGENCTLIDALLGDPQCDGFQNKKWDLFVERSKAYSNCYPYDVPDYASLRSLVASSGTLEFNNESFNWTGVTQNGTSSACKRRSNNSFFSRLNWLTHLKFKYPALNVTMPNNEKFDKLYIWGVHHPGTDNDQIFLYAQASGRITVSTKRSQQTVIPNIGSRPRVRNIPSRISIYWTIVKPGDILLINSTGNLIAPRGYFKIRSGKSSIMRSDAPIGKCNSECITPNGSIPNDKPFQNVNRITYGACPRYVKQNTLKLATGMRNVPEKQTRGIFGAIAGFIENGWEGMVDGWYGFRHQNSEGTGQAADLKSTQAAINQINGKLNRLIGKTNEKFHQIEKEFSEVEGRIQDLEKYVEDTKIDLWSYNAELLVALENQHTIDLTDSEMNKLFERTKKQLRENAEDMGNGCFKIYHKCDNACIGSIRNGTYDHDVYRDEALNNRFQIKGVELKSGYKDWILWISFAISCFLLCVALLGFIMWACQKGNIRCNICI

SEQ ID NO: 1258 - protein, 566 aa, synthetic construct
  REGION 1..566: note = hemagglutinin__InfluenzaA__ABI30620
MKTIIALSYILCLVFAQKLPGNDNSTATLCLGHHAVPNGTIVKTITNDQIEVTNATELVQSSSTGGICDSPHQILDGENCTLIDALLGDPQCDGFQNKKWDLFIERSKAYSNCYPYDVPDYASLRSLVASSGTLEFNNESFNWTGVTQNGTSSACKRRSNNSFFSRLNWLTHLKFKYPALNVTMPNNEKFDKLYIWGVHHPGTDNDQISLYAQASGRITVSTKRSQQTVIPNIGSRPRVRDIPSRISIYWTIVKPGDILLINSTGNLIAPRGYFKIRSGKSSIMRSDAPIGKCNSECITPNGSIPNDKPFQNVNRITYGACPRYVKQNTLKLATGMRNVPEKQTRGIFGAIAGFIENGWEGMVDGWYGFRHQNSEGIGQAADLKSTQAAINQINGKLNRLIGKTNEKFHQIEKEFSEVEGRIQDLEKYVEDTKVDLWSYNAELLVALENQHTIDLTDSEMNKLFERTKKQLRENAEDMGNGCFKIYHKCDNACIGSIRNGTYDHDVYRDEALNNRFQIKGVELKSGYKDWILWISFAISCFLLCVALLGFIMWACQKGNIRCNICI

SEQ ID NO: 1259 - protein, 566 aa, synthetic construct; identical to SEQ ID NO: 633
  REGION 1..566: note = hemagglutinin__InfluenzaA__ABI30733

SEQ ID NO: 1260 - protein, 566 aa, synthetic construct; identical to SEQ ID NO: 633
  REGION 1..566: note = hemagglutinin__InfluenzaA__ABI30744

SEQ ID NO: 1261 - protein, 566 aa, synthetic construct; identical to SEQ ID NO: 633
  REGION 1..566: note = hemagglutinin__InfluenzaA__ABI30755

SEQ ID NO: 1262 - protein, 566 aa, synthetic construct; identical to SEQ ID NO: 633
  REGION 1..566: note = hemagglutinin__InfluenzaA__ABI30766

SEQ ID NO: 1263 - protein, 566 aa, synthetic construct; identical to SEQ ID NO: 633
  REGION 1..566: note = hemagglutinin__InfluenzaA__ABI30777

SEQ ID NO: 1264 - protein, 566 aa, synthetic construct
  REGION 1..566: note = hemagglutinin__InfluenzaA__ABI30788
MKTIIALSYILCLVFAQKLSGNDNSTATLCLGHHAVPNGTIVKTITNDQIEVTNATELVQSSSTGGICDSPHQILDGENCTLIDALLGDPQCDGFQNKKWDLFVERSKAYSNCYPYDVPDYASLRSLIASSGTLEFNNESFNWTGVTQNGTSSACKRRSNSSFFSRLNWLTHLKFKYPALNVTMPNNEEFDKLYIWGVHHPGTYNDQISLYAQASGRITVSTKRSQQTVIPNIGSRPRVRDIPSRISIYWTIVKPGDILLINSTGNLIAPRGYFKIRSGKSSIMRSDAPIGKCNSECITPNGSIPNDKPFQNVNRITYGACPRYVKQNTLKLATGMRNVPEKQTRGIFGAIAGFIENGWEGMVDGWYGFRHQNSEGIGQAADLKSTQAAIDQINGKLNRLIGKTNEKFHQIEKEFSEVEGRIQDLEKYVEDTKIDLWSYNAELLVALENQHTIDLTDSEMNKLFERTKKQLRENAEDMGNGCFKIYHKCDNACIGSIRNGTYDHDVYRDEALNNRFQIKGVELKSGYKDWILWISFAISCFLLCVALLGFIMWACQKGNIRCNICI

SEQ ID NO: 1265 - protein, 566 aa, synthetic construct; identical to SEQ ID NO: 633
  REGION 1..566: note = hemagglutinin__InfluenzaA__ABI30799

SEQ ID NO: 1266 - protein, 566 aa, synthetic construct
  REGION 1..566: note = hemagglutinin__InfluenzaA__ABI30810
MKTIIALSYILCLVFAQKLPGNDNSTATLCLGHHAVPNGTIVKTITNDQIEVTNATELVQSSSTGGICDSPHQILDGENCTLIDALLGDPQCDGFQNKKWDLFVERSKAYSNCYPYDVPDYASLRSLIASSGTLEFNNESFNWTGVTQNGTSSACKRRSNSSFFSRLNWLTHLKFKYPALNVTMPNNEEFDKLYIWGVHHPGTYNDQISLYAQASGRITVSTKRSQQTVIPNIGSRPRVRDIPSRISIYWTIVKPGDILLINSTGNLIAPRGYFKIRSGKSSIMRSDAPIGKCNSECITPNGSIPNDKPFQNVNRITYGACPRYVKQNTLKLATGMRNVPEKQTRGIFGAIAGFIENGWEGMVDGWYGFRHQNSEGIGQAADLKSTQAAIDQINGKLNRLIGKTNEKFHQIEKEFSEVEGRIQDLEKYVEDTKIDLWSYNAELLVALENQHTIDLTDSEMNKLFERTKKQLRENAEDMGNGCFKIYHKCDNACIGSIKNGTYDHDVYRDEALNNRFQIKGVELKSGYKDWILWISFAISCFLLCVALLGFIMWACQKGNIRCNICI

SEQ ID NO: 1267 - protein, 566 aa, synthetic construct
  REGION 1..566: note = hemagglutinin__InfluenzaA__ABI30821
MKTIIALSYILCLVFAQKLPGNDNSTATLCLGHHAVPNGTIVKTITNDQIEVTNATELVQSSSTGGICDSPHQILDGENCTLIDALLGDPQCDGFQNKKWDLFVERSKAYSNCYPYDVPDYASLRSLIASSGTLEFNNESFNWTGVTQNGTSSACKRRSNSSFFSRLNWLTHLKFKYPALNVAMPNNEEFDKLYIWGVHHPGTYNDQISLYAQASGRITVSTKRSQQTVIPNIGSRPRVRDIPSRISIYWTIVKPGDILLINSTGNLIAPRGYFKIRSGKSSIMRSDAPIGKCNSECITPNGSIPNDKPFQNVNRITYGACPRYVKQNTLKLATGMRNVPEKQTRGIFGAIAGFIENGWEGMVDGWYGFRHQNSEGIGQAADLKSTQAAIDQINGKLNRLIGKTNEKFHQIEKEFSEVEGRIQDLEKYVEDTKIDLWSYNAELLVALENQHTIDLTDSEMNKLFERTKKQLRENAEDMGNGCFKIYHKCDNACIGSIRNGTYDHDVYRDEALNNRFQIKGVELKSGYKDWILWISFAISCFLLCVALLGFIMWACQKGNIRCNICI

SEQ ID NO: 1268 - protein, 566 aa, synthetic construct; identical to SEQ ID NO: 633
  REGION 1..566: note = hemagglutinin__InfluenzaA__ABI30832

SEQ ID NO: 1269 - protein, 566 aa, synthetic construct
  REGION 1..566: note = hemagglutinin__InfluenzaA__ABI30843
MKTIIALSYILCLVFAQKLPGNDNSTATLCLGHHAVPNGTIVKTITNDQIEVTNATELVQSSSTGGICDSPHQILDGENCTLIDALLGDPQCDGFQNKKWDLFVERSKAYSNCYPYDVPDYASLRSLIASSGTLEFNNESFNWTGVTQNGTSSACKRRSNSSFFSRLNWLTHLKFKYPALNVTMPNNEEFDKLYIWGVHHPGTYNDQISLYAQASGRITVSTKRSQQTVIPNIGSRPRVRDIPSRISIYWTIVKPGDILLINSTGNLIAPRGYFKIRSGKSSIMRSDAPIGKCNSECITPNGSIPNDKPFQNVNRITYGACPRYVKQNTLKLATGMRNVPEKQTRGIFGAIAGFIENGWEGMVDGWYGFRHQNSEGIGQAADLKSTQAAIDQINGKLNRLIGKTNEKFHQIEKEFSEVEGRIQDLEKYVEDTKIDLWSYNAELLVALENQHTIDLTDSEMNKLFERTRKQLRENAEDMGNGCFKIYHKCDNACIGSIRNGTYDHDVYRDEALNNRFQIKGVELKSGYKDWILWISFAISCFLLCVALLGFIMWACQKGNIRCNICI

SEQ ID NO: 1270 - protein, 566 aa, synthetic construct; identical to SEQ ID NO: 1213
  REGION 1..566: note = hemagglutinin__InfluenzaA__ABI30865

SEQ ID NO: 1271 - protein, 568 aa, synthetic construct
  REGION 1..568: note = hemagglutinin__InfluenzaA__ABI36155
MEKIVLLLATVSLVKSDQICIGYHANNSTEQVDTIMEKNVTVTHAQDILEKTHNGKLCDLDGVKPLILRDCSVAGWLLGNPMCDEFINVPEWSYIVEKANPANGLCYPGNFNDYEELKHLLSRINHFEKLQIIPKSSWSDHEASLGVSSACPYLGRSSFFRNVVWLIKKNNTYPTIKRSYNNTNQEDLLVLWGIHHPNDAAEQTRLYQNPTTYISVGTSTLNQRLVPKIATRSKVNGQSGRMEFFWTILKPNDAINFESNGNFIAPEYAYKIVKKGDSAIMKSELEYGDCNTKCQTPMGAINSSMPLHNIHPLTIGECPKYVKSNRLVLATGLRNSPQRERRRKKRGLFGAIAGFIEGGWQGMVDGWYGYHHSNEQGSGYAADKESTQKAIDGVTNKVNSIIDKMNTQFEAVGREFNNLERRIENLNKKMEDGFLDVWTYNAELLVLMENERTLDFHDSNVKNLYDKVRLQLRDNAKELGNGCFEFYHKCDNECMESIRNGTYNYPQYSEEARLKREEISGVKLESIGIYQILSIYSTVASSLALAIMMAGLSLWMCSNGSLQCRVCI

SEQ ID NO: 1272 - protein, 568 aa, synthetic construct
  REGION 1..568: note = hemagglutinin__InfluenzaA__ABI36166
MEKIVLLLATVSLVKSDQICIGYHANNSTEQVDTIMEKNVTVTHAQDILEKTHNGKLCDLDGVKPLILRDCSVAGWLLGNPMCDEFINVPEWSYIVEKANPANGLCYPGNFNDYEELKHLLSRINHFEKLQIIPKSSWSDHEASLGVSSACPYLGRSSFFRNVVWLIKKNNTYPTIKRSYNNTNQEDLLVLWGIHHPNDAAEQTRLYQNPTTYISVGTSTLNQRLVPKIATRSKVNGQSGRMEFFWTILKPNDAINFESNGNFIAPEYAYKIVKKGDSAIMKSELEYGDCNTKCQTPMGAINSSMPFHNIHPLTIGECPKYVKSNRLVLATGLRNSPQRERRRKKRGLFGAIAGFIEGGWQGMVDGWYGYHHSNEQGSGYAADKESTQKAIDGVTNKVNSIIDKMNTQFEAVGREFNNLERRIENLNKKMEDGFLDVWTYNAELLVLMENERTLDFHDSNVKNLYDKVRLQLRDNAKELGNGCFEFYHKCDNECMESIRNGTYNYPQYSEEARLKREEISGVKLESIGIYQILSIYSTVASSLALAIMMAGLSLWMCSNGSLQCRVCI

SEQ ID NO: 1273 - protein, 568 aa, synthetic construct; identical to SEQ ID NO: 1272
  REGION 1..568: note = hemagglutinin__InfluenzaA__ABI36177

SEQ ID NO: 1274 - protein, 568 aa, synthetic construct
  REGION 1..568: note = hemagglutinin__InfluenzaA__ABI36406
MEKIVLLLATVSLVKSDQICIGYHANNSTEQVDTIMEKNVTVTHAQDILEKTHNGKLCDLDGVKPLILRDCSVAGWLLGNPMCDEFINVPEWSYIVEKANPANGLCYPGNFNDYEELKHLLSRINHFEKLQIIPKSSWSDHEASLGVSSACPYLGRSSFFRNVVWLIKKNNTYPTIKRSYNNTNQEDLLVLWGLHHPNDAAEQTRLYQNPTTYISVGTSTLNQRLVPKIATRSKVNGQSGRMEFFWTILKPNDAINFESNGNFIAPEYAYKIVKKGDSAIMKSELEYGDCNTKCQTPMGAINSSMPFHNIHPLTIGECPKYVKSNRLVLATGLRNSPQRERRRKKRGLFGAIAGFIEGGWQGMVDGWYGYHHSNEQGSGYAADKESTQKAIDGVTNKVNSIIDKMNTQFEAVGREFNNLERRIENLNKKMEDGFLDVWTYNAELLVLMENERTLDFHDSNVKNLYDKVRLQLRDNAKELGNGCFEFYHKCDNECMESIRNGTYNYPQYSEEARLKREEISGVKLESIGIYQILSIYSTVASSLALAIMMAGLSLWMCSNGSLQCRVCI

SEQ ID NO: 1275 - protein, 568 aa, synthetic construct
  REGION 1..568: note = hemagglutinin__InfluenzaA__ABI36450
MEKIVLLLAIVSLVKSDQICIGYHANNSTEQVDTIMEKNVTVTHAQDILGKTHNGKLCDLDGVKPLILRDCSVAGWLLGNPMCDEFINVPEWSYIVEKANPTNDLCYPGSFNDYEELKHLLSRINHFEKIQIIPKSSWSDHEASSGVSSACPYLGSPSFFRNVVWLIKKNSTYPTIKTSYNNTNQEDLLVLWGIHHSNDAAEQTRLYQNPTTYISIGTSTLNQRLVPKIATRSKVNGQSGRMEFFWTILKPNDAINFESNGNFIAPEYAYKIVKKGDSAIMKSELEYGNCNTKCQTPMGAINSSMPFHNIHPLTIGECPKYVKSNRLVLATGLRNSPQRESRRKKRGLFGAIAGFIEGGWQGMVDGWYGYHHSNEQGSGYAADKESTQKAIDGVTNKVNSIIDKMNTQFEAVGREFNNLERRIENLNKKMEDGFLDVWTYNAELLVLMENERTLDFHDSNVKNLYDKVRLQLRDNAKELGNGCFEFYHKCDNECMESIRNGTYNYPQYSEEARLKREEISGVKLESIGTYQILSIYSTVASSLALAIMIAGLSLWMCSNGSLQCRICI

SEQ ID NO: 1276 - protein, 568 aa, synthetic construct
  REGION 1..568: note = hemagglutinin__InfluenzaA__ABI49396
MEKIVLLLAIVSLVKSDQICIGYHANNSTEQVDTIMEKNVTVTHAQDILGKTHNGKLCDLDGVKPLILRDCSVAGWLLGNPMCDEFINVPEWSYIVEKANPTNDLCYPGSFNDYEELKHLLSRINHFEKIQIIPKSSWSDHEASSGVSSACPYLGSPSFFRNVVWLIKKNSTYPTIKKSYNNTNQEDLLVLWGIHHPNDAAEQTRLYQNPTTYISIGTSTLNQRLVPKIATRSKVNGQSGRMEFFWAILKPNDAINFESNGNFIAPEYAYKIVKKGDSAIMKSELEYGNCNTKCQTPMGAINSSMPFHNIHPLTIGECPKYVKSNRLVLATGLRNSPQRESRRKKRGLFGAIAGFIEGGWQGMVDGWYGYHHSNEQGSGYAADKESTQKAIDGVTNKVNSIIDKMNTQFEAVGREFNNLERRIENLNKKMEDGFLDVWTYNAELLVLMENERTLDFHDSNVKNLYDKVRLQLRDNAKELGNGCFEFYHKCDNECMESIRNGTYNYPQYSEEARLKREEISGVKLESIGTYQILSIYSTVASSLALAIMIAGLSLWMCSNGSLQCRICI

SEQ ID NO: 1277 - protein, 567 aa, synthetic construct
  REGION 1..567: note = hemagglutinin__InfluenzaA__ABI85000
MNTQILAFIACMLIGTKGDKICLGHHAVANGTKVNTLTERGIEVVNATETVETVNIKKICTQGKRPTDLGQCGLLGTLIGPPQCDQFLEFDANLIIERREGTDVCYPGKFTNEESLRQILRGSGGIDKESMGFTYSGIRTNGATSACRRSGSSFYAEMKWLLSNSDNAAFPQMTKSYRNPRNKPALIIWGVHHSGSATEQTKLYGSGNKLITVGSSKYQQSFTPSPGARPQVNGQSGRIDFHWLLLDPNDTVTFTFNGAFIAPDRASFFRGESLGVQSDVPLDSGCEGDCFHSGGTIVSSLPFQNINPRTVGKCPRYVKQTSLLLATGMRNVPENPKQAYQKRMTRGLFGAIAGFIENGWEGLIDGWYGFRHQNAQGEGTAADYKSTQSAIDQITGKLNRLIDKTNQQFELIDNEFSEIEQQIGNVINWTRDSMTEVWSYNAELLVAMENQHTIDLADSEMNKLYERVRKQLRENAEEDGTGCFEIFHKCDDQCMESIRNNTYDHTQYRTESLQNRIQIDPVKLSSGYKDIILWFSFGASCFLLLAIAMGLVFICIKNGNMRCTICI

SEQ ID NO: 1278 - protein, 566 aa, synthetic construct; identical to SEQ ID NO: 830
  REGION 1..566: note = hemagglutinin__InfluenzaA__ABI92291

SEQ ID NO: 1279 - protein, 566 aa, synthetic construct
  REGION 1..566: note = hemagglutinin__InfluenzaA__ABI92302
MKAKLLVLLCALSATDADTICIGYHANNSTDTVDTVLEKNVTVTHSVNLLEDSHNGKLCRLKGIAPLQLGKCSIAGWILGNPECESLFSKKSWSYIAETPNSENGTCYPGYFADYEELREQLSSVSSFERFEIFPKESSWPKHNVTRGVTASCSHKGKSSFYRNLLWLTEKNGSYPNLSKSYVNNKEKEVLVLWGVHHPSNIEDQKTIYRKENAYVSVVSSHYNRRFTPEIAKRPKVRDQEGRINYYWTLLEPGDTIIFEANGNLIAPWYAFALSRGFGSGIITSNASMDECDAKCQTPQGAINSSLPFQNVHPVTIGECPKYVRSTKLRMVTGLRNIPSIQSRGLFGAIAGFIEGGWTGMIDGWYGYHHQNEQGSGYAADQKSTQNAINGITNKVNSVIEKMNIQFTAVGKEFNKLEKRMENLNKKVDDGFLDIWTYNAELLVLLENERTLDFHDSNVKNLYEKVKSQLKNNAKEIGNGCFEFYHKCNNECMESVKNGTYDYPKYSEESKLNREKIDGVKLESMGVYQILAIYSTVASSLVLLVSLGAISFWMCSNGSLQCRICI

SEQ ID NO: 1280 - protein, 566 aa, synthetic construct
  REGION 1..566: note = hemagglutinin__InfluenzaA__ABI92313
MKAKLLVLLCAFTATYADTICIGYHANNSTDTVDTVLEKNVTVTHSVNLLEDSHNGKLCRLKGTAPLQLGNCSVAGWILGNPECESLFSKESWSYIAETPNPENGTCYPGYFADYEELREQLSSISSFERFEIFPKESSWPNHTVTKGVTASCSHNGKSSFYKNLLWLTEKNGLYPNLSKSYVNNKEKEVLVLWGVHHPSNIGDQRAIYHTENAYVSVVSSHYSRRFTPEITKRPKVRDQEGRINYYWTLLEPGDTIIFEANGNLIAPWYAFALSRGFGSGIITSNASMGECDAKCQTPQGAINSSLPFQNVHPVTIGECPKYVRSTKLRMVTGLRNIPSIQSRGLFGAIAGFIEGGWTGMIDGWYGYHHQNEQGSGYAADQKSTQNAIDGITNKVNSVIEKMNTQFTAVGKEFNKLERRMENLNKKVDDGFLDIWTYNAELLVLLENERTLDFHDSNVKNLYEKVKNQLKNNAKEIGNGCFEFYHKCNNECMESVKNGTYDYPKYSEESKLNREKIDGVKLESMGVYHILAIYSTVASSLVLLVSLGAISFWMCSNGSLQCRICI

SEQ ID NO: 1281 - protein, 566 aa, synthetic construct
  REGION 1..566: note = hemagglutinin__InfluenzaA__ABI92324
MKTIIALSYILCLVFAQKLPGNDNSTATLCLGHHAVPNGTLVKTITNDQIEVTNATELVQSSSTGRICDSPHRILDGKNCTLIDALLGDPHCDGFQNKEWDLFVERSKAYSNCYPYDVPDYASLRSLVASSGTLEFINEDFNWTGVAQDGKSYACKRGSVNSFFSRLNWLHKLEYKYPALNVTMPNNGKFDKLYIWGVHHPSTDSDQTSLYVRASGKVTVSTKRSQQTVIPNIGFRPWVRGLSSRISIYWTIVKPGDILLINSTGNLIAPRGYFKIRNGKSSIMRSDAPIGNCSSECITPNGSIPNDKPFQNVNRITYGACPRYVKQNTLKLATGMRNVPEKQTRGIFGAIAGFIENGWEGMVDGWYGFRHQNSEGTGQAADLKSTQAAIDQINGKLNRLIEKTNEKFHQIEKEFSEVEGRIQDLEKYVEDTKIDLWSYNAGLLVALENQHTIDLTDSEMNKLFERTRKQLRENAEDMGNGCFKIYHKCDNACIGSIRNGTYDHDVYRDEALNNRFQIKGVELKSGYKDWILWISFAISCFLLCVVLLGFIMWACQKGNIRCNICI

SEQ ID NO: 1282 - protein, 566 aa, synthetic construct
  REGION 1..566: note = hemagglutinin__InfluenzaA__ABI92335
MKTIIALSYILCLVFAQKLPGNDNSTATLCLGHHAVPNGTLVKTITNDQIEVTNATELVQSSSTSRICDSPHQILDGENCTLIDALLGDPHCDGFQNKEWDLFVERSKAYSNCYPYDVPDYVSLRSLVASSGTLEFNNESFNWTGVAQNGTSSACKRRSDKSFFSRLNWLHQLKYKYPALNVTMPNNEKFDKLYIWGVHHPGTDSDQISLYAQASGRVTVSTKRSQQTVIPNIGSRPWVRGVSSRISIYWTIVKPGDILLINSTGNLIAPRGYFKIRSGKSSIMRSDAPIGKCNSECITPNGSIPNDKPFQNVNRITYGACPRYVKQNTLKLATGMRNVPEKQTRGIFGAIAGFIENGWEGMMDGWYGFRHQNSEGTGQAADLKSTQAAINQINGKLNRLIEKTNEKFHQIEKEFSEVEGRIQDLEKYVEDTKIDLWSYNAELLVALENQHTIDLTDSEMNKLFERTKKQLRENAEDMGNGCFKIYHKCDNACMGSIRNGTYDHDVYRDEALNNRFQIKGVELKSGYKDWILWISFAISCFLLCIVLMGFIMWACQKGNIRCNICI

SEQ ID NO: 1283 - protein, 566 aa, synthetic construct
  REGION 1..566: note = hemagglutinin__InfluenzaA__ABI92346
MKTIIALSYILCLVFAQKLPGNDNSTATLCLGHHAVPNGTLVKTITNDQIEVTNATELVQSSSTGRICDSPHQILDGENCTLIDALLGDPHCDGFQNKEWDLFVERSKAYSNCYPYDVPDYVSLRSLVASSGTLEFNNESFNWTGVAQNGTSSACKRRSDKSFFSRLNWLHQLKYKYPALNVTMPNNEKFDKLYIWGVHHPGTDSDQISLYAQASGRVTVSTKRSQQTVIPNIGSRPWVRGVSSRISIYWTIVKPGDILLINSTGNLIAPRGYFKIRSGKSSIMRSDAPIGKCNSECITPNGSIPNDKPFQNVNRITYGACPRYVKQNTLKLATGMRNVPEKQTRGIFGAIAGFIENGWEGMMDGWYGFRHQNSEGTGQAADLKSTQAAINQINGKLNRLIEKTNEKFHQIEKEFSEVEGRIQDLEKYVEDTKIDLWSYNAELLVALENQHTIDLTDSEMNKLFERTKKQLRENAEDMGNGCFKIYHKCDNACIGSIRNGTYDHDVYRDEALNNRFHIKGVELKSGYKDWVLWISFAISCFLLCIVLLGFIMWACQKGNIRCNICI

SEQ ID NO: 1284 - protein, 566 aa, synthetic construct; identical to SEQ ID NO: 282
  REGION 1..566: note = hemagglutinin__InfluenzaA__ABI92357

SEQ ID NO: 1285 - protein, 566 aa, synthetic construct; identical to SEQ ID NO: 282
  REGION 1..566: note = hemagglutinin__InfluenzaA__ABI92368

SEQ ID NO: 1286 - protein, 565 aa, synthetic construct; identical to SEQ ID NO: 1204
  REGION 1..565: note = hemagglutinin__InfluenzaA__ABI92379

SEQ ID NO: 1287 - protein, 566 aa, synthetic construct
  REGION 1..566: note = hemagglutinin__InfluenzaA__ABI92390
MKTIIAFSYILCLVFAQKLPGNDNSTATLCLGHHAVPNGTIVKTITNDQIEVTNATELVQSSSTGGICDSPHQILDGENCTLIDALLGDPQCDGFQNKKWDLFVERSKAYSNCYPYDVPDYASLRSLVASSGTLEFNNESFNWTGVTQNGTSSACKRRSNNSFFSRLNWLTHLKFKYPALNVTMPNNEKFDKLYIWGVHHPGTDNDQTSLYAQASGRITVSTKRSQQTVTPNIGSRPRVRDIPSRISIYWTIVKPGDILLINSTGNLIAPRGYFKIRSGKSSIMRSDAPIGKCNSECITPNGSIPNDKPFQNVNRITYGACPRYVKQNTLKLATGMRNVPEKQTRGIFGAIAGFIENGWEGMVDGWYGFRHQNSEGTGQAADLKSTQAAINQINGKLNRLIGKTNEKFHQIEKEFSEVEGRIQDLEKYVEDTKIDLWSYNAELLVALENQHTIDLTDSEMNKLFERTKKQLRENAEDMGNGCFKIYHKCDNACIGSIRNGTYDHDVYRDEALNNRFQIKGVELKSGYKDWILWISFAISCFLLCVALLGFIMWACQKGNIRCNICI

SEQ ID NO: 1288 - protein, 566 aa, synthetic construct; identical to SEQ ID NO: 282
  REGION 1..566: note = hemagglutinin__InfluenzaA__ABI92401

SEQ ID NO: 1289 - protein, 566 aa, synthetic construct
  REGION 1..566: note = hemagglutinin__InfluenzaA__ABI92412
MKTIIALSYILCLVFAQKLPGNDNSTATLCLGHHAVPNGTLVKTITNDQIEVTNATELVQSSSTGGICDSPHQILDGENCTLIDALLGDPQCDGFQNKKWDLFVERSKAYSNCYPYDVPDYASLRSLIASSGTLEFNNESFNWTGVTQNGTSSACKRRSNSSFFSRLNWLTHLKFKYPALNVTMPNNEEFDKLYIWGVHHPGTYNDQISLYAQASGRITVSTKRSQQTVIPNIGSRPRVRDIPSRISIYWTIVKPGDILLINSTGNLIAPRGYFKIRSGKSSIMRSDAPIGKCNSECITPNGSIPNDKPFQNINRITYGACPRYVKQNTLKLATGMRNVPEKQTRGIFGAIAGFIENGWEGMVDGWYGFRHQNSEGIGQAADLKSTQAAIDQINGKLNRLIGKTNEKFHQIEKEFSEVEGRIQDLEKYVEDTKIDLWSYNAELLVALENQHTIDLTDSEMNKLFERTKKQLRENAEDMGNGCFKIYHKCDNACIGSIRNGTYDHDVYRDEALNNRFQIKGVELKSGYKDWILWISFAISCFLLCVALLGFIMWACQKGNIRCNICI

SEQ ID NO: 1290 - protein, 566 aa, synthetic construct
  REGION 1..566: note = hemagglutinin__InfluenzaA__ABI92423
MKTIIALSYILCLVFAQKLPGNDNSTATLCLGHHAVPNGTIVKTITNDQIEVTNATELVQSSSTGGICDSPHQILDGENCTLIDALLGDPQCDGFQNKKWDLFVERSKAYSNCYPYDVPDYASLRSLIASSGTLEFNNESFNWTGVTQNGTSSACKRRSNSSFFSRLNWLTHLKFKYPALNVTMPNNEEFDKLYIWGVHHPGTYNDQISLYAQASGRITVSTKRSQQTVIPNIGSRPRVRDIPSRISIYWTIVKPGDILLINSTGNLIAPRGYFKIRSGKSSIMRSDAPIGKCNSECITPNGSIPNDKPFQNVNRITYGACPRYVKQNTLKLATGMRNVPDKQTRGIFGAIAGFIENGWEGMVDGWYGFRHQNSEGIGQAADLKSTQAAIDQINGKLNRLIGKTNEKFHQIEKEFSEVEGRIQDLEKYVEDTKIDLWSYNAELLVALENQHTIDLTDSEMNKLFERTKKQLRENAEDMGNGCFKIYHKCDNACIGSIRNGTYDHDVYRDEALNNRFQIKGVELKSGYKDWILWISFAISCFLLCVALLGFIMWACQKGNIRCNICI

SEQ ID NO: 1291 - protein, 566 aa, synthetic construct; identical to SEQ ID NO: 633
  REGION 1..566: note = hemagglutinin__InfluenzaA__ABI92434

SEQ ID NO: 1292 - protein, 566 aa, synthetic construct
  REGION 1..566: note = hemagglutinin__InfluenzaA__ABI92445
MKTIIALSYILCLVFTQKLPGNDNSTATLCLGHHAVPNGTIVKTITNDQIEVTNATELVQSSSTGGICDSPHQILDGENCTLIDALLGDPQCDGFQNKKWDLFVERSKAYSNCYPYDVPDYASLRSLIASSGTLEFNNESFNWTGVNQNGTSSACKRRSNSSFFSRLNWLTHLKFKYPALNVTMPNNEEFDKLYIWGVHHPGTYNDQISLYAQASGRITVSTKRSQQTVIPNIGSRPRVRDIPSRISIYWTIVKPGDILLINSTGNLIAPRGYFKIRSGKSSIMRSDAPIGKCNSECITPNGSIPNDKPFQNVNRITYGACPRYVKQNTLKLATGMRNVPEKQTRGIFGAIAGFIENGWEGMVDGWYGFRHQNSEGIGQAADLKSTQAAIDQINGKLNRLIGKTNEKFHQIEKEFSEVEGRIQDLEKYVEDTKIDLWSYNAELLVALENQHTIDLTDSEMNKLFERTKKQLRENAEDMGNGCFKIYHKCDNTCIGSIRNGTYDHDVYRDEALNNRFQIKGVELKSGYKDWILWISFAISCFLLCVALLGFIMWACQKGNIRCNICI

SEQ ID NO: 1293 - protein, 566 aa, synthetic construct; identical to SEQ ID NO: 633
  REGION 1..566: note = hemagglutinin__InfluenzaA__ABI92456

SEQ ID NO: 1294 - protein, 566 aa, synthetic construct; identical to SEQ ID NO: 1241
  REGION 1..566: note = hemagglutinin__InfluenzaA__ABI92467

SEQ ID NO: 1295 - protein, 566 aa, synthetic construct; identical to SEQ ID NO: 650
  REGION 1..566: note = hemagglutinin__InfluenzaA__ABI92478

SEQ ID NO: 1296 - protein, 566 aa, synthetic construct; identical to SEQ ID NO: 1241
  REGION 1..566: note = hemagglutinin__InfluenzaA__ABI92489

SEQ ID NO: 1297 - protein, 566 aa, synthetic construct
  REGION 1..566: note = hemagglutinin__InfluenzaA__ABI92500
MKTIIALSYILCLVFAQKLPGNDNSTATLCLGHHAVPNGTLVKTITNDQIEVTNATELVQSSSTGGICDSPHQILDGENCTLIDALLGDPHCDGFQNKEWDLFVERSKAYSNCYPYDVPDYASLRSLVASSGTLEFNNESFNWTGVAQNGTSSACKRRSNKSFFSRLNWLHQLKYKYPALNVTMPNNEKFDKLYIWGVHHPSTDSDQISLYAQAPGRVTVSTKRSQQTVIPNIGSRPWVRGVSSRISIYWTIVKPGDILLINCTGNLIAPRGYFKIRSGKSSIMRSDASIGKCNSECITPNGSIPNDKPFQNVNRITYGACPRYVKQNTLKLATGMRNVPEKQTRGIFGAIAGFIENGWEGMVDGWYGFRHQNSEGTGQAADLKSTQAVINQINGKLNRLIEKTNEKFHQIEKEFSEVEGRIQDLEKYVEDTKIDLWSYNAELLVALENQHTIDLTDSEMNKLFERTKKQLRENAEDMGNGCFKIYHKCDNACIGSIRNGTYDHDVYRDEALNNRFQIKGVELKSGYKDWILWISFAISCFLLCVVLLGFIMWACQKGNIRCNICI

SEQ ID NO: 1298 - protein, 566 aa, synthetic construct
  REGION 1..566: note = hemagglutinin__InfluenzaA__ABI92511
MKTIIALSYILCLVFAQKLPGNDNSTATLCLGHHAVPNGTLVKTITNDQIEVTNATELVQNSSTGIICDSPHQILDGENCTLIDALLGDPHCDGFQNKEWDLFVERSKAYSNCYPYDVPDYASLRSLVASSGTLEFNNESFNWTGVAQNGTSSACKRRSDKSFFSRLNWLHQLKYKYPALNVTMPNTEKFDKLYIWGVHHPSTDSDQISLYAQASGRVTVSTKRSQQTVIPNIGSRPWVRGVSSRVSIYWTIVKPGDILLINSTGNLIAPRGYFKIRSGKSSIMRSDASIGKCNSKCITPNGSIPNDKPFQNVNRITYGACPRYVKQNTLKLATGMRNVPEKQTRGIFGAIAGFIENGWEGMVDGWYGFRHQNSEGTGQAADLKSTQAAINQINGKLNRLIEKTNEKFHQIEKEFSEVEGRIQDLEKYVEDTKIDLWSYNAELLVALENQHTIDLTDSEMNKLFERTKKQLRENAEDMGNGCFKIYHKCDNTCIGSIRNGTYDHDVYRDEALNNRFQIKGVELKSGYKDWILWISFAISCFLLCVVLLGFIMWACQKGNIRCNICI

SEQ ID NO: 1299 - protein, 566 aa, synthetic construct
  REGION 1..566: note = hemagglutinin__InfluenzaA__ABI92522
MKTIIALSYILCLVFAQKLPGNDNSTATLCLGHHAVPNGTLVKTITNDQIEVTNATELVQSSSTGRICDSPHQILDGENCTLIDALLGDPHCDGFQNKEWDLFVERSKAYSNCYPYDVPDYVSLRSLVASSGTLEFNNESFNWTGVAQNGTSSACKRRSNKSFFSRLNWLHQLKYKYPALNVTMPNNEKFDKLYIWGVHHPGTDSDQISLYAQASGRVTVSTKRSQQTVIPNIGSRPWVRGVSSRISIYWTIVKPGDILLINSTGNLIAPRGYFKIRSGKSSIMKSDAPIGKCNSECITPNGSIPNDKPFQNVNRITYGACPRYVKQNTLKLATGMRNVPEKQTRGIFGAIAGFIENGWEGMMDGWYGFRHQNSEGTGQAADLKSTQAAINQINGKLNRLIEKTNEKFHQIEKEFSEVEGRIQDLEKYVEDTKIDLWSYNAELLVALENQHTIDLTDSEMNKLFERTKKQLRENAEDMGNGCFKIYHKCDNACIGSIRNGTYDHDVYRDEALNNRFQIKGVELKSGYKDWILWISFAISCFLLCIVLLGFIMWACQKGNIRCNICI

SEQ ID NO: 1300 - protein, 566 aa, synthetic construct
  REGION 1..566: note = hemagglutinin__InfluenzaA__ABI92533
MKTIIALSYILCLVFAQKLPGNDNSRATLCLGHHAVPNGTLVKTITNDQIEVTNATELVQSSSTGRICDSPHQILDGENCTLIDALLGDPHCDGFQNKEWDLFVERSKAYSNCYPYDVPDYVSLRSLVASSGTLEFNNESFNWTGVAQNGTSSACKRRSDKSFFSRLNWLHQLKYKYPALNVTMPNNEKFDKLYIWGVHHPGTDSDQISLYAQASGRVTVSTKRSQQTVIPNIGSRPWVRGVSSRISIYWTIVKPGDILLINSTGNLIAPRGYFKIRSGKSSIMRSDAPIGKCNSECITPNGSIPNDKPFQNVNRITYGPCPRYVKQNTLKLATGMRNVPEKQTRGIFGAIAGFIENGWEGMMDGWYGFRHQNSEGTGQAADLKSTQAAINQINGKLNRLIEKTNEKFHQIEKEFSEVEGRIQDLEKYVEDTKIDLWSYNAELLVALENQHTIDLTDSEMNKLFERTKKQLRENAEDMGNGCFKIYHKCDNACIGSIRNGTYDHDVYRDEALNNRFQIKGVELKSGYKDWILWISFAISCFLLCIVLLGFIMWACQKGNIRCNICI

SEQ ID NO: 1301 - protein, 566 aa, synthetic construct; identical to SEQ ID NO: 1300
  REGION 1..566: note = hemagglutinin__InfluenzaA__ABI92544

SEQ ID NO: 1302 - protein, 566 aa, synthetic construct
  REGION 1..566: note = hemagglutinin__InfluenzaA__ABI92577
MKTIIALSYILCLVFAQKLPGNDNSTATLCLGHHAVPNGTLVKTITNDQIEVTNATELVQSSSTGRICDSPHQILDGENCTLIDALLGDPHCDGFQNKEWDLFVERSRAYSNCYPYDVPDYVSLRSLVASSGTLEFNNESFNWTGVAQNGTSSACKRRSDKSFFSRLNWLHQLKYKYPALNVTMPNNEKFDKLYIWGVHHPGTDSDQISLYAQASGRVTVSTKRSQQTVIPNIGSRPWVRGVSSKISIYWTIVKPGDILLINSTGNLIAPRGYFKIRSGKSSIMRSDAPIGKCNSECITPNGSIPNDKPFQNVNRITYGPCPRYVKQNTLKLATGMRNVPEKQTRGIFGAIAGFIENGWEGMMDGWYGFRHQNSEGTGQAADLKSTQAAINQINGKLNRLIEKTNEKFHQIEKEFSEVEGRIQDLEKYVEDTKIDLWSYNAELLVALENQHTIDLTDSEMNKLFERTKKQLRENAEDMGNGCFKIYHKCDNACIGSIRNGTYDHDVYRDEALNNRFQIKGVELKSGYKDWILWISFAISCFLLCIVLLGFIMWACQKGNIRCNICI

SEQ ID NO: 1303 - protein, 566 aa, synthetic construct; identical to SEQ ID NO: 1039
  REGION 1..566: note = hemagglutinin__InfluenzaA__ABI92588

SEQ ID NO: 1304 - protein, 566 aa, synthetic construct
  REGION 1..566: note = hemagglutinin__InfluenzaA__ABI92599
MKTIIALSYILCLVFAQKLPGNDNSTATLCLGHHAVPNGTLVKTITNDQIEVTNATELVQSSSTGRICNSPHQILDGENCTLIDALLGDPHCDGFQNKEWDLFVERSKAYSNCYPYDVPDYVSLRSLVASSGTLEFNNESFNWTGVAQNGTSSACKRRSDKSFFSRLNWLHQLKYKYPALNVTMPNNEKFDKLYIWGVHHPGTDSDQISLYAQASGRVTVSTKRSQQTVIPNIGSRPWVRGVSSRISIYWTIVKPGDILLINSTGNLIAPRGYFKIRSGKSSIMRSDAPIGKCNSECITPNGSIPNDKPFQNVNRITYGACPRYVKQKTLKLATGMRNVPEKQTRGIFGAIAGFIENGWEGMMDGWYGFRHQNSEGTGQAADLKSTQAAINQINGKLNRLIEKTNEKFHQIEKEFSEVEGRIQDLEKYVEDTKIDLWSYNAELLVALENQHTIDLTDSEMNKLFERTKKQLRENAEDMGNGCFKIYHKCDNACIGSIRNGTYDHDVYRDEALNNRFQIKGVELKSGYKDWILWISFAISCFLLCIVLLGFIMWACQKGNIRCNICI

SEQ ID NO: 1305 - protein, 566 aa, synthetic construct
  REGION 1..566: note = hemagglutinin__InfluenzaA__ABI92610
MKTIIALSYILCLVFAQKLPGNDNSTATLCLGHHAVPNGTLVKTITNDQIEVTNATELVQSSSTGRICDSPHQILDGENCTLIDALLGDPHCDGFQNKEWDLFVERSKAYSNCYPYDVPDYVSLRSLVASSGTLEFNNESFNWTGVAQNGTSSACKRRSDKSFFSRLNWLHQLKYKYPALNVTMPNNEKFDKLYIWGVHHPGTDSDQISLYAQASGRVTVSTKRSQQTVIPNIGSRPWVRGVSSRISIYWTIVKPGDILLINSTGNLIAPRGYFKIRSGKSSIMRSDAPIGKCNSECITPNGSIPNDKPFQNVNRITYGACPRYVKQNTLKLATGMRNVPEKQTRGIFGAIAGFIENGWEGMMDGWYGFRHQNSEGTGQAADLKSTQAAINQINGKLNRLIEKTNEKFHQIEKEFSEVEGRIQDLEKYVEDTKIDLWSYNAELLVALENQHTIDLTDSEMNKLFERTKKQLRENAEDMGNGCFKIYHKCDNACIGSIRNGTYDHDVYRDEALNNRFQIKGVELKSGYKDWILWISFAISCFLLCIVLLGFIMWACQKGNIRCNICI

SEQ ID NO: 1306 - protein, 566 aa, synthetic construct
  REGION 1..566: note = hemagglutinin__InfluenzaA__ABI92621
MKTIIALSYILCLVFAQKLPGNDNSMATLCLGHHAVPNGTLVKTITNDQIEVTNATELVQSSSTGRICNSPHQILDGENCTLIDALLGDPHCEGFQNKEWDLFVERSKAYSNCYPYDVPDYVSLRSLVASSGTLEFNNESFNWTGVAQNGTSSACKRRSDKSFFSRLNWLHQLKYKYPALNVTMPNNEKFDKLYIWGVHHPGTDSDQISLYAQASGRVTVSTKRSQQTVIPNIGSRPWVRGVSSKISIYWTIVKPGDILLINSTGNLIAPRGYFKIRSGKSSIMRSDAPIDKCNSECITPNGSIPNDKPFQNVNRITYGLCPRYVKQNTLKLATGMRNVPEKQTRGIFGAIAGFIENGWEGMMDGWYGFRHQNSEGTGQAADLKSTQAAINQINGKLNRLIEKTNEKFHQIEKEFSEVEGRIQDLEKYVEDTKIDLWSYNAELLVALENQHTIDLTDSEMNKLFERTKKQLRENAEDMGNGCFKIYHKCDNACIGSIRNGTYDHDVYRDEALNNRFQIKGVELKSGYKDWILWISFAISCFLLCIVLLGFIMWACQKGNIRCNICI

SEQ ID NO: 1307 - protein, 566 aa, synthetic construct; identical to SEQ ID NO: 562
  REGION 1..566: note = hemagglutinin__InfluenzaA__ABI92632

SEQ ID NO: 1308 - protein, 566 aa, synthetic construct
  REGION 1..566: note = hemagglutinin__InfluenzaA__ABI92643
MKTIIALSYILCLVFAQKLPGNDNSTATLCLGHHAVPNGTIVKTITNDQIEVTNATELVQSSSTGGICDSPHQILDGENCTLIDALLGDPQCDGFQNKKWDLFVERSKAYSNCYPYDVPDYASLRSLVASSGTLEFNNESFDWTGVTQNGTSSACKRRSNKSFFSRLNWLTHLKYKYPALNVTIPNNEKFDKLYIWGVHHPGTDSDQISLYAQASGRITVSTKRSQQTVIPNIGSRPRVRDVSSRISIYWTIVKPGDILLINSTGNLIAPRGYFKIRSGKSSIMRSDAPIGKCNSECITPNGSIPNDKPFQNVNRITYGACPRYVKQNTLKLATGMRNVPEKQTRGIFGAIAGFIENGWEGMVDGWYGFRHQNSEGTGQAADLKSTQAAINQINGKLNRLIGKTNEKFHQIEKEFSEVEGRIQDLEKYVEDTKIDLWSYNAELLVALENQHTIDLTDSEMNKLFERTKRQLRENAEDMGNGCFKIYHKCDNACIGSIRNGTYDHDVYRDEALNNRFQIKGVELKSGYKDWILWISFAISCFLLCVALLGFIMWACQKGNIRCNICI

SEQ ID NO: 1309 - protein, 566 aa, synthetic construct
  REGION 1..566: note = hemagglutinin__InfluenzaA__ABI92665
MKTIIALSYILCLVFAQKLPGNDNSTATLCLGHHAVPNGTIVKTITNDQIEVTNATELVQSSSTGGICDSPHQILDGENCTLIDALLGDPQCDGFQNKKWDLFVERSKAYSNCYPYDVPDYASLRSLVASSGTLEFNNESFDWTGVTQNGTSSACKRGSNKSFFSRLNWLTHLKYKYPALNVTMPNNEKFDKLYIWGVHHPGTDSDQISLYAQASGRITVSTKRSQQTVIPNIGSRPRVRDVSSRISIYWTIVKPGDILLINSTGNLIAPRGYFKIRSGKSSIMRSDAPIGKCNSECITPNGSIPNDKPFQNVNRITYGACPRYVKQNTLKLATGMRNVPEKQTRGIFGAIAGFIENGWEGMVDGWYGFRHQNSEGTGQAADLKSTQAAINQINGKLNRLIGKTNEKFHQIEKEFSEVEGRIQDLEKYVEDTKIDLWSYNAELLVALENQHTIDLTDSEMNKLFERTKRQLRENAEDMGNGCFKIYHKCDNACIGSIRNGTYDHDVYRNEALNNRFQIKGVELKSGYKDWILWISFAISCFLLCVALLGFIMWACQKGNIRCNICI

SEQ ID NO: 1310 - protein, 566 aa, synthetic construct
  REGION 1..566: note = hemagglutinin__InfluenzaA__ABI92676
MKTIIALSYILCLVFAQKLPGNDNSTATLCLGHHAVPNGTIVKTITNDQIEVTNATELVQSSSTGGICDSPHQILDGENCTLIDALLGDPQCDGFQNKKWDLFVERSKAYSNCYPYDVPDHASLRSLVASSGTLEFNNESFDWTGVTQNGTSSACKRRSNKSFFSRLNWLTHLKYKYPALNVTMPNNEKFDKLYIWGVHHPGTDSDQISLYAQASGRITVSTKRSQQTVIPNIGSRPRVRDVSSRISIYWTIVKPGDILLINSTGNLIAPRGYFKIRNGKSSIMRSDAPIGKCNSECITPNGSIPNDKPFQNVNRITYGACPRYVKQNTLKLATGMRNVPEKQTRGIFGAIAGFIENGWEGMVDGWYGFRHQNSEGTGQAADLKSTQAAINQINGKLNRLIGKTNEKFHQIEKEFSEVEGRIQDLEKYVEDTKIDLWSYNAELLVALENQHTIDLTDSEMNKLFERTKKQLRENAEDMGNGCFKIYHKCDNACIGSIRNGTYDHDVYRDEALNNRFQIKGVELKSGYKDWILWISFAISCFLLCVALLGFIMWACQKGNIRCNICI

SEQ ID NO: 1311 - protein, 566 aa, synthetic construct
  REGION 1..566: note = hemagglutinin__InfluenzaA__ABI92687
MKTIIALSYILCLVFAQKLPGNDNSTATLCLGHHAVPNGTIVKTITNDQIEVTNATELVQSSSTGGICDSPHQILDGENCTLIDALLGDPQCDGFQNKKWDLFVERSKAYSNCYPYDVPDYASLRSLVASSGTLEFNNESFDWTGVTQNGTSSACKRGSNKSFFSRLNWLTHLKYKYPALNVTMPNNEKFDKLYIWGVHHPGTDSDQISLYAQASGRITVSTKRSQQTVIPNIGSRPRVRDVSSRISIYWTIVKPGDILLINSTGNLIAPRGYFKIRSGKSSIMRSDAPIGKCNSECITPNGSIPNDKPFQNVNRITYGACPRYVKQNTLKLATGMRNVPEKQTRGIFGAIAGFIENGWEGMVDGWYGFRHQNSEGTGQAADLKSTQAAINQINGKLNRLIGKTNEKFHQIEKEFSEVEGRIQDLEKYVEDTKIDLWSYNAELLVALENQHTIDLTDSEMNKLFERTKRQLRENAEDMGNGCFKIYHKCDNACIGSIRNGTYDHDVYRDEALNNRFQIKGVELKSGYKDWILWISFAISCFLLCVALLGFIMWACQKGNIRCNICI

SEQ ID NO: 1312 - protein, 566 aa, synthetic construct; identical to SEQ ID NO: 1311
  REGION 1..566: note = hemagglutinin__InfluenzaA__ABI92698

SEQ ID NO: 1313 - protein, 566 aa, synthetic construct; identical to SEQ ID NO: 516
  REGION 1..566: note = hemagglutinin__InfluenzaA__ABI92709

SEQ ID NO: 1314 - protein, 566 aa, synthetic construct
  REGION 1..566: note = hemagglutinin__InfluenzaA__ABI92720
MKTIIALSYILCLVFAQKLPGNDNSTATLCLGHHAVPNGTIVKTITNDQIEVTNATELVQSSSTGGICDSPHQILDGENCTLIDALLGDPQCDGFQNKKWDLFVERSKAYSNCYPYDVPDHASLRSLVASSGTLEFNNESFDWTGVTQNGTSSACKRRSNKSFFSRLNWLTHLKYKYPALNVTMPNNEKFDKLYIWGVHHPGTESDQISLYAQASGRITVSTKRSQQTVIPNIGSRPRVRDVSSRISIYWTIVKPGDILLINSTGNLIAPRGYFKIRSGKSSIMRSDAPIGKCNSECITPNGSIPNDKPFQNVNRITYGACPRYVKQNTLKLATGMRNVPEKQTRGIFGAIAGFIENGWEGMVDGWYGFRHQNSEGTGQAADLKSTQAAINQINGKLNRLIGKTNEKFHQIEKEFSEVEGRIQDLEKYVEDTKIDLWSYNAELLVALENQHTIDLTDSEMNKLFERTKKQLRENAEDMGNGCFKIYHKCDNACIGSIRNGTYDHDVYRDEALNNRFQIKGVELKSGYKDWILWISFAISCFLLCVALLGFIMWACQKGNIRCNICI

SEQ ID NO: 1315 - protein, 566 aa, synthetic construct
  REGION 1..566: note = hemagglutinin__InfluenzaA__ABI92731
MKTIIALSYILCLVFAQKLPGNDNSTATLCLGHHAVPNGTIVKTITNDQIEVTNATELVQSSSTGGICDSPHQILDGENCTLIDALLGDPQCDGFQNKKWDLFVERSKAYSNCYPYDVPDYASLRSLVASSGTLEFNNESFDWTGVTQNGTSSACKRRSNKSFFSRLNWLTHLKYKYPALNVTMPNNEKFDKLYIWGVHHPGTDSDQISLYAQASGRITVSTKRSQQTVIPNIGSRPRVRDVSSRISIYWTIVKPGDILLINSTGNLIAPRGYFKIRSGKSSIMRSDAPIGKCNSECITPNGSIPNDKPFQNVNRITYGACPRYVKQNTLKLATGMRNVPEKQTRGIFGAIAGFIENGWEGMVDGWYGFRHQNSEGTGQAADLKSTQAAINQINGKLNRLIGKTNEKFHQIEKEFSEVEGRIQDLEKYVEDTKIDLWSYNAELLVALENQHTIDLTDSEMNKLFERTKRQLRENAEDMGNGCFKIYHKCDNACIGSIRNGTYDHDVYRDEALNNRFQIKGVELKSGYKDWILWISFAISCFLLCVALLGFIMWACQKGNIRCNICI

SEQ ID NO: 1316 - protein, 566 aa, synthetic construct
  REGION 1..566: note = hemagglutinin__InfluenzaA__ABI92742
MKTIIALSYILCLVFSQKLPGNDNSTATLCLGHHAVPNGTIVKTITNDQIEVTNATELVQSSSTGGICDSPHQILDGENCTLIDALLGDPQCDGFQNKKWDLFVERSKAYSNCYPYDVPDHASLRSLVASSGTLEFNNESFDWTGVTQNGTSSACKRRSNKSFFSRLNWLTHLKYKYPALNVTMPNNEKFDKLYIWGVHHPGTDSDQISLYAQASGRITVSTKRSQQTVIPNIGSRPRVRDVSSRISIYWTIVKPGDILLINSTGNLIAPRGYFKIRSGKSSIMRSDAPIGKCNSECITPNGSIPNDKPFQNVNRITYGACPRYVKQNTLKLATGMRNVPEKQTRGIFGAIAGFIENGWEGMVDGWYGFRHQNSEGTGQAADLKSTQAAINQINGKLNRLIGKTNEKFHQIEKEFSEVEGRIQDLEKYVEDTKIDLWSYNAELLVALENQHTIDLTDSEMNKLFERTKKQLRENAEDMGNGCFKIYHKCDNACIGSIRNGTYDHDVYRDEALNNRFQIKGVELKSGYKDWILWISFAISCFLLCVALLGFIMWACQKGNIRCNICI

SEQ ID NO: 1317 - protein, 566 aa, synthetic construct
  REGION 1..566: note = hemagglutinin__InfluenzaA__ABI92753
MKTIIALSYILCLVFAQKLPGNDNSTATLCLGHHAVPNGTIVKTITNDQIEVTNATELVQSSSTGGICDSPHQILDGENCTLIDALLGDPQCDGFQNKKWDLFVERSKAYSNCYPYDVPDYAYLRSLVASSGTLEFNNESFDWTGVTQNGTSSACKRRSNKSFFSRLNWLTHLKYKYPALNVTMPNNEKFDKLYIWGVHHPGTDSDQISLYAQASGRITVSTKRSQQTVIPNIGSRPRVRDVSSRISIYWTIVKPGDILLINSTGNLIAPRGYFKIRSGKSSIMRSDAPIGKCNSECITPNGSIPNDKPFQNVNRITYGACPRYVKQNTLKLATGMRNVPEKQTRGIFGAIAGFIENGWEGMVDGWYGFRHQNSEGTGQAADLKSTQAAINQINGKLNRLIGKTNEKFHQIEKEFSEVEGRIQDLEKYVEDTKIDLWSYNAELLVALENQHTIDLTDSEMNKLFERTKRQLRENAEDMGNGCFKIYHKCDNACIGSIRNGTYDHDVYRDEALNNRFQIKGVELKSGYKDWILWISFAISCFLLCVALLGFIMWACQKGNIRCNICI

SEQ ID NO: 1318 - protein, 566 aa, synthetic construct
  REGION 1..566: note = hemagglutinin__InfluenzaA__ABI92764
MKTIIALSYILCLVFAQKLPGNDNSTATLCLGHHAVPNGTIVKTITNDQIEVTNATELVQSSSTGEICDSPHQILDGENCTLIDALLGDPQCDGFQNKKWDLFVERSKAYSNCYPYDVPDYASLRSLVASSGTLEFNNESFDWTGVTQNGTSSACKRGSNKSFFSRLNWLTHLKYKYPALNVTMPNNEKFDKLYIWGVHHPGTDSDQISLYAQASGRITVSTKRSQQTVIPNIGSRPRVRDVSSRISIYWTIVKPGDILLINSTGNLIAPRGYFKIRSGKSSIMRSDAPIGKCNSECITPNGSIPNDKPFQNVNRITYGACPRYVKQNTLKLATGMRNVPEKQTRGIFGAIAGFIENGWEGMVDGWYGFRHQNSEGTGQAADLKSTQAAINQINGKLNRLIGKTNEKFHQIEKEFSEVEGRIQDLEKYVEDTKIDLWSYNAELLVALENQHTIDLTDSEMNKLFERTKRQLRENAEDMGNGCFKIYHKCDNACIGSIRNGTYDHDVYRDEALNNRFQIKGVELKSGYKDWILWISFAISCFLLCVALLGFIMWACQKGNIRCNICI

SEQ ID NO: 1319 - protein, 566 aa, synthetic construct; identical to SEQ ID NO: 1311
  REGION 1..566: note = hemagglutinin__InfluenzaA__ABI92775

SEQ ID NO: 1320 - protein, 566 aa, synthetic construct; identical to SEQ ID NO: 243
  REGION 1..566: note = hemagglutinin__InfluenzaA__ABI92786

SEQ ID NO: 1321 - protein, 566 aa, synthetic construct
  REGION 1..566: note = hemagglutinin__InfluenzaA__ABI92797
MKTIIALSYILCLVFAQKLPGNDNSTATLCLGHHAVPNGTIVKTITNDQIEVTNATELVQSSSTGGICDSPHQILDGENCTLIDALLGDPQCDGFQNKKWDLFVERSKAYSNCYPYDVPDYASLRSLVASSGTLEFNNESFNWTGVTQNGTSSACKRRSNNSFFSRLNWLTHLKFKYPALNVTMPNNEKFDKLYIWGVHHPGTDNDQISLYAQASGRITVSTKRSQQTVISNIGSRPRVRDIPSRISIYWTIVKPGDILLINSTGNLIAPRGYFKIRSGKSSIMRSDAPIGKCNSECITPNGSIPNDKPFQNVNRITYGACPRYVKQNTLKLATGMRNVPEKQTRGIFGAIAGFIENGWEGMVDGWYGFRHQNSEGIGQAADLKSTQAAINQINGKLNRLIGKTNEKFHQIEKEFSEVEGRIQDLEKYVEDTKIDLWSYNAELLVALENQHTIDLTDSEMNKLFERTKKQLRENAEDMGNGCFKIYHKCDNACIGSIRNGTYDHDVYRDEALNNRFQIKGVELKSGYKDWILWISFAISCFLLCVALLGFIMWACQKGNIRCNICI

SEQ ID NO: 1322 - protein, 566 aa, synthetic construct; identical to SEQ ID NO: 243
  REGION 1..566: note = hemagglutinin__InfluenzaA__ABI92808

SEQ ID NO: 1323 - protein, 566 aa, synthetic construct; identical to SEQ ID NO: 243
  REGION 1..566: note = hemagglutinin__InfluenzaA__ABI92819

SEQ ID NO: 1324 - protein, 566 aa, synthetic construct; identical to SEQ ID NO: 243
  REGION 1..566: note = hemagglutinin__InfluenzaA__ABI92841

SEQ ID NO: 1325 - protein, 566 aa, synthetic construct
  REGION 1..566: note = hemagglutinin__InfluenzaA__ABI92852
MKTIIALSYILCLVFAQKLPGNDNSTATLCLGHHAVPNGTIVKTITNDQIEVTNATELVQSSSTGGICDSPHQILDGENCTLIDALLGDPQCDGFQNKKWDLFVERSKAYSNCYPYDVPDYASLRSLVASSGTLEFNNESFNWTGVTQNGTSSACKRRSNNSFFSRLNWLTHLKFKYPALNVTMPNNEKFDKLYIWGVHHPGTDNDQISLYAQASGRITVSTKRSQQTVIPNIGYRPRVRDIPSRISIYWTIVKPGDILLINSTGNLIAPRGYFKIRSGKSSIMRSDAPIGKCNSECITPNGSIPNDKPFQNVNRITYGACPRYVKQNTLKLATGMRNVPEKQTRGIFGAIAGFIENGWEGMVDGWYGFRHQNSEGIGQAADLKSTQAAINQINGKLNRLIGKTNEKFHQIEKEFSEVEGRIQDLEKYVEDTKIDLWSYNAELLVALENQHTIDLTDSEMNKLFERTKKQLRENAEDMGNGCFKIYHKCDNACIGSIRNGTYDHDVYRDEALNNRFQIKGVELKSGYKDWILWISFAISCFLLCVALLGFIMWACQKGNIRCNICI

SEQ ID NO: 1326 - protein, 566 aa, synthetic construct
  REGION 1..566: note = hemagglutinin__InfluenzaA__ABI92863
MKTIIALSYILCLVFAQKLPGNDNSTATLCLGHHAVPNGTIVKTITNDQIEVTNATELVQSSSTGGICDSPHQILDGENCTLIDALLGDPQCDGFQNKKWDLFVERSKAHSNCYPYDVPDYASLRSLIASSGTLEFNNESFNWTGVTQNGTSSACKRRSNQSFFSRLNWLTHLKFKYPALNVTMPNNEKFDKLYIWGVHHPGTDSDQISLYAQAPGRITVSTKRSQQTVIPNIGSRPRVRDISSRISIYWTIVKPGDILLINSTGNLIAPRGYFKIRSGKSSIMKSDAPIGRCNSECITPNGSIPNDKPFQNVNRITYGACPRYVKQNTLKLATGMRNVPEKQTRGIFGAIAGFIENGWEGMVDGWYGFRHQNSEGTGQAADLKSTQAAINQINGKLNRLIGKTNEKFHQIEKEFSEVEGRIQDLEKYVEDTKIDLWSYNAELLVALENQHTIDLTDSEMNKLFERTKKQLRENAEDMGNGCFKIYHKCDNACIGSIRNGTYDHDVYRDEALNNRFQIKGVELKSGYKDWILWISFAISCLLLCVALLGFIMWACQKGNIRCNICI

SEQ ID NO: 1327 - protein, 566 aa, synthetic construct; identical to SEQ ID NO: 243
  REGION 1..566: note = hemagglutinin__InfluenzaA__ABI92874

SEQ ID NO: 1328 - protein, 566 aa, synthetic construct; identical to SEQ ID NO: 243
  REGION 1..566: note = hemagglutinin__InfluenzaA__ABI92885

SEQ ID NO: 1329 - protein, 566 aa, synthetic construct
  REGION 1..566: note = hemagglutinin__InfluenzaA__ABI92907
MKTIIALSYILCLVFAQKLPGNDNSTATLCLGHHAVPNGTIVKTITNDQIEVTNATELVQSSSTGGICDSPYQILDGENCTLIDALLGDPQCDGFQNKKWDLFVERSKAYSNCYPYDVPDYVSLRSLVASSGTLEFNNESFNWTGVTQNGTSSACKRRSNNSFFSRLNWLTHLKFKYPALNVTMPNNEKFDKLYIWGVHHPGTDNDQISLYAQASGRITVSTKRSQQTVIPNIGSRPRVRDIPSRISIYWTIVKPGDILLINSTGNLIAPRGYFKIRSGKSSIMRSDAPIGKCNSECITPNGSIPNDKPFQNVNRITYGACPRYVKQNTLKLATGMRNVPEKQTRGIFGAIAGFIENGWEGMVDGWYGFRHQNSEGIGQAADLKSTQAAINQINGKLNRLIGKTNEKFHQIEKEFSEVEGRIQDLEKYVEDTKIDLWSYNAELLVALENQHTIDLTDSEMNKLFERTKKQLRENAEDMGNGCFKIYHKCDNACIGSIRNGTYDHDVYRDEALNNRFQIKGVELKSGYKDWILWISFAISCFLLCVALLGFIMWACQKGNIRCNICI

SEQ ID NO: 1330 - protein, 566 aa, synthetic construct; identical to SEQ ID NO: 243
  REGION 1..566: note = hemagglutinin__InfluenzaA__ABI92918

SEQ ID NO: 1331 - protein, 566 aa, synthetic construct; identical to SEQ ID NO: 1329
  REGION 1..566: note = hemagglutinin__InfluenzaA__ABI92929

SEQ ID NO: 1332 - protein, 566 aa, synthetic construct
  REGION 1..566: note = hemagglutinin__InfluenzaA__ABI92940
MKTIIAFNYILCLVFAQKLPGNDNSTATLCLGHHAVPNGTIVKTITNDQIEVTNATELVQSSSTGGICDSPHQILDGENCTLIDALLGDPQCDGFQNKKWDLFVERSKAYSNCYPYDVPDYASLRSLVASSGTLEFNNEIFNWTGVTQNGTSSACKRRSNNSFFSRLNWLTHLKFKYPALNVTMPNNEKFDKLYIWGVHHPGTDNDQISLYAQASGRITVSTKRSQQTVIPNIGSRPRVRDIPSRISIYWTIVKPGDILLINSTGNLIAPRGYFKIRSGKSSIMRSDAPIGKCNSECITPNGSIPNDKPFQNVNRITYGACPRYVKQNTLKLATGMRNVPEKQTRGIFGAIAGFIENGWEGMVDGWYGFRHQNSEGTGQAADLKSTQAAINQINGKLNRLIGKTNEKFHQIEKEFSEVEGRIQDLEKYVEDTKIDLWSYNAELLVALENQHTIDLTDSEMNKLFERTKKQLRENAEDMGNGCFKIYHKCDNACIGSIRNGTYDHDVYRDEALNNRFQIKGVELKSGYKDWILWISFAISCFLLCVALLGFIMWACQKGNIRCNICI

SEQ ID NO: 1333 - protein, 566 aa, synthetic construct
  REGION 1..566: note = hemagglutinin__InfluenzaA__ABI92951
MKTIIALSYILCLVFAQKLPGNDNSTATLCLGHHAVPNGTIVKTITNDQIEVTNATELVQSSSTGGICDSPHQILDGENCTLIDALLGDPQCDGFQNKKWDLFVERSKAYSNCYPYDVPDYASLRSLIASSGTLEFNNESFNWTGVTQNGTSSACKRRSNSSFFSRLNWLTHLKFKYPALNVTMPNNEEFDKLYIWGVHHPGTYNDQISLYAQASGRITVSTKRSQQTVIPNIGSRPRVRDIPSRISIYWTIVKPGDILLINSTGNLIAPRGYFKIRSGKSSIMRSDAPIGKCNSECITPNGSIPNDKPFQNVNRITYGACPRYVKQNTLKLATGMRNVPEKQTRGIFGAIAGFIENGWEGMVDGWYGFRHQNSEGIGQAADLKSTQAAIDQINGKLNRLIGKTNEKFHQIEKEFSEVEGRIQDLEKYVEDTKIDLWSYNAELLVALENQHTIDLTDSEMNKLFERTKKQLRENAEDMGNGCFKIYHKCDNSCIGSIRNGTYDHDVYRDEALNNRFQIKGVELKSGYKDWILWISFAISCFLLCVALLGFIMWACQKGNIRCNICI

SEQ ID NO: 1334 - protein, 566 aa, synthetic construct
  REGION 1..566: note = hemagglutinin__InfluenzaA__ABI92962
MKTIIALSYILCLVFAQKLPGNDNSTATLCLGHHAVPNGTIVKTITNDQIEVTNATELVQSSSTGGICDSPHQILDGENCTLIDALLGDPQCDGFQNKKWDLFVERNKAYSNCYPYDVPDYASLRSLIASSGTLEFNNESFNWTGVTQNGTSSACKRRSNSSFFSRLNWLTHLKFKYPALNVTMPNNEEFDKLYIWGVHHPGTYNDQISLYAQASGRITVSTKRSQQTVIPNIGSRPRVRDIPSRISIYWTIVKPGDILLINSTGNLIAPRGYFKIRSGKSSIMRSDAPIGKCNSECITPNGSIPNDKPFQNVNRITYGACPRYVKQNTLKLATGMRNVPEKQTRGIFGAIAGFIENGWEGMVDGWYGFRHQNSEGIGQAADLKSTQAAIDQINGKLNRLIGKTNEKFHQIEKEFSEVEGRIQDLEKYVEDTKIDLWSYNAELLVALENQHTIDLTDSEMNKLFERTKKQLRENAEDMGNGCFKIYHKCDNACIGSIRNGTYDHDVYRDEALNNRFQIKGVELKSGYKDWILWISFAISCFLLCVALLGFIMWACQKGNIRCNICI

SEQ ID NO: 1335 - protein, 566 aa, synthetic construct; identical to SEQ ID NO: 633
  REGION 1..566: note = hemagglutinin__InfluenzaA__ABI92973

SEQ ID NO: 1336 - protein, 566 aa, synthetic construct; identical to SEQ ID NO: 633
  REGION 1..566: note = hemagglutinin__InfluenzaA__ABI92984

SEQ ID NO: 1337 - protein, 566 aa, synthetic construct
  REGION 1..566: note = hemagglutinin__InfluenzaA__ABI92995
MKTIIALSYILCLVFAQKLPGNDNSTATLCLGHHAVPNGTIVKTITNDQIEVTNATELVQSSSTGGICDSPHQILDGENCTLIDALLGDPQCDGFQNKKWDLFVERSKAYSNCYPYDVPDYASLRSLIASSGTLEFNNESFNWTGVTQNGTSSACKRRSNSSFFSRLNWLTHLKFKYPALNVTMPNNEEFDKLYIWGVHHPGTYNDQISLYAQASGRITVSTKRSQQTVIPNIGSRPRIRDIPSRISIYWTIVKPGDILLINSTGNLIAPRGYFKIRSGKSSIMRSDAPIGKCNSECITPNGSIPNDKPFQNVNRITYGACPKYVKQNTLKLATGMRNVPEKQTRGIFGAIAGFIENGWEGMVDGWYGFRHQNSEGIGQAADLKSTQAAIDQINGKLNRLIGKTNEKFHQIEKEFSEVEGRIQDLEKYVEDTKIDLWSYNAELLVALENQHTIDLTDSEMNKLFERTKKQLRENAEDMGNGCFKIYHKCDNACIGSIRNGTYDHDVYRDEALNNRFQIKGVELKSGYKDWILWISFAISCFLLCVALLGFIMWACQKGNIRCNICI

SEQ ID NO: 1338 - protein, 566 aa, synthetic construct; identical to SEQ ID NO: 633
  REGION 1..566: note = hemagglutinin__InfluenzaA__ABI93006

SEQ ID NO: 1339 - protein, 566 aa, synthetic construct; identical to SEQ ID NO: 633
  REGION 1..566: note = hemagglutinin__InfluenzaA__ABI93017

SEQ ID NO: 1340 - protein, 565 aa, synthetic construct; identical to SEQ ID NO: 1232
  REGION 1..565: note = hemagglutinin__InfluenzaA__ABI93028

SEQ ID NO: 1341 - protein, 566 aa, synthetic construct; identical to SEQ ID NO: 966
  REGION 1..566: note = hemagglutinin__InfluenzaA__ABI93039

SEQ ID NO: 1342 - protein, 566 aa, synthetic construct
  REGION 1..566: note = hemagglutinin__InfluenzaA__ABI93061
MKTIIALSYILCLVFAQKLPGNDNSTATLCLGHHAVPNGTLVKTITNDQIEVTNATELVQSSSTGRICDSPHQILDGENCTLIDALLGDPHCDGFQNKEWDLFVERSKAYSNCYPYDVPDYASLRSLVASSGTLEFNNESFNWTGVAQNGTSSACKRRSNKSFFSRLNWLHQLKYKYPALNVTMPNNEKFDKLYIWGVHHPSTDSDQISLYAQASGRVTVSTKRSQQTVIPNIGSRPWVRGVSSRISIYWTIVKPGDILLINSTGNLIAPRGYFKIRSGKSSIMRSDASIGKCNSECITPNGSIPNDKPFQNVNRITYGACPRYVKQNTLKLATGMRNVPEKQTRGIFGAIAGFIENGWEGMVDGWYGFRHQNSEGTGQAADLKSTQAAINQINGKLNRLIEKTNEKFHQIEKEFSEVEGRIQDLEKYVEDTKIDLWSYNAELLVALENQHTIDLTDSEMNKLFERTKKQLRENAEDMGNGCFKIYHKCDNACIGSIRNGTYDHDVYRDEALNNRFQIKGVELKSGYKDWILWISFAISCFLLCVVLLGFIMWACQKGNIRCNICI

SEQ ID NO: 1343 - protein, 566 aa, synthetic construct; identical to SEQ ID NO: 650
  REGION 1..566: note = hemagglutinin__InfluenzaA__ABI93072

SEQ ID NO: 1344 - protein, 566 aa, synthetic construct; identical to SEQ ID NO: 650
  REGION 1..566: note = hemagglutinin__InfluenzaA__ABI93083

SEQ ID NO: 1345 - protein, 566 aa, synthetic construct; identical to SEQ ID NO: 650
  REGION 1..566: note = hemagglutinin__InfluenzaA__ABI93094

SEQ ID NO: 1346 - protein, 566 aa, synthetic construct; identical to SEQ ID NO: 650
  REGION 1..566: note = hemagglutinin__InfluenzaA__ABI93105

SEQ ID NO: 1347 - protein, 566 aa, synthetic construct
  REGION 1..566: note = hemagglutinin__InfluenzaA__ABI93116
MKTIIALSYILCLVFAQKLPGNDNSTATLCLGHHAVPNGTLVKTITNDQIEVTNATELVQSSSTGGICDSPHQILDGENCTLIDALLGDPHCDGFQNKEWDLFVERSKAYSNCYPYDVPDYASLRSLVASSGTLEFNNESFNWTGVAQNGTSSACKRRSNKSFFSRLNWLHQLKYKYPALNVTMPNNEKFDKLYIWGVHHPSTDSDQISLYAQAPGRVTVSTKRSQQTVIPNIGSRPWVRGVSSRISIYWTIVKPGDILLINCTGNLIAPRGYFKMRSGKSSIMRSDASIGKCNSECITPNGSIPNDKPFQNVNRITYGACPRYVKQNTLKLATGMRNVPEKQTRGIFGAIAGFIENGWEGMVDGWYGFRHQNSEGTGQAADLKSTQAAINQINGKLNRLIEKTNEKFHQIEKEFSEVEGRIQDLEKYVEDTKIDLWSYNAELLVALENQHTIDLTDSEMNKLFERTKKQLRENAEDMGNGCFKIYHKCDNACIGSIRNGTYDHGVYRDEALNNRFQIKGVELKSGYKDWILWISFAISCFLLCVVLLGFIMWACQKGNIRCNICI

SEQ ID NO: 1348 - protein, 562 aa, synthetic construct
  REGION 1..562: note = hemagglutinin__InfluenzaA__ABI94581
MNTQILVFALVASIPTNADKICLGHHAVSNGTKVNTLTERGVEVVNATETVERTNVPRICSKGKRTVDLGQCGLLGTITGPPQCDQFLEFSADLIIERREGSDVCYPGKFVNEEALRQILRESGGIDKETMGFTYSGIRTNGTTSACRRSGSSFYAEMKWLLSNTDNAAFPQMTKSYKNTRKDPALIIWGIHHSGSTTEQTKLYGSGNKLITVGSSNYQQSFVPSPGARPQVNGQSGRIDFHWLILNPNDTVTFSFNGAFIAPDRASFLRGKSMGIQSEVQVDANCEGDCYHSGGTIISNLPFQNINSRAVGKCPRYVKQESLLLATGMKNVPEIPKRRRRGLFGAIAGFIENGWEGLIDGWYGFRHQNAQGEGTAADYKSTQSAIDQITGKLNRLIEKTNQQFELIDNEFTEVEKQIGNVINWTRDSMTEVWSYNAELLVAMENQHTIDLADSEMNKLYERVKRQLRENAEEDGTGCFEIFHKCDDDCMASIRNNTYDHSKYREEAIQNRIQIDPVKLSSGYKDVILWFSFGASCFILLAIAMGLVFICVKNGNMRCTICI

SEQ ID NO: 1349 - protein, 566 aa, synthetic construct; identical to SEQ ID NO: 766
  REGION 1..566: note = hemagglutinin__InfluenzaA__ABI95228

SEQ ID NO: 1350 - protein, 566 aa, synthetic construct
  REGION 1..566: note = hemagglutinin__InfluenzaA__ABI95239
MKTIIALSYILCLVFAQKLPGNDNSTATLCLGHHAVPNGTIVKTITNDQIEVTNATELVQSSSTGGICDSPHQILDGENCTLIDALLGDPQCDGFQNKKWDLFVERSKAYSNCYPYDVPDYASLRSLVASSGTLEFNNESFNWTGVTQNGTSSACKRRSNNSFFSRLNWLTHLKFKYPALNVTMPNNEKFDKLYIWGVHHPGTDNDQISLYAQASGRITVSTKRSQQTVIPNIGSRPRVRDIPSRISIYWTIVKPGDILLINSTGNLIAPRGYFKIRSGKSSIMRSDAPIGKCNSECITPNGSIPNDKPFQNVNRITYGACPRYVKQNTLKLATGMRNVPEKQTRGIFGAIAGFIENGWEGMVNGWYGFRHQNSEGIGQAADLKSTQAAINQINGKLNRLIGKTNEKFHQIEKEFSEVEGRIQDLEKYVEDTKIDLWSYNAELLVALENQHTIDLTDSEMNKLFERTKKQLRENAEDMGNGCFKIYHKCDNACIGSIRNGTYDHDVYRDEALNNRFQIKGVELKSGYKDWILWISFAISCFLLCVALLGFIMWACQKGNIRCNICI

SEQ ID NO: 1351 - protein, 565 aa, synthetic construct
  REGION 1..565: note = hemagglutinin__InfluenzaA__ABI95250
MKAKLLVLLCTFTATYADTICVGYHANNSTDTVDTVLEKNVTVTHSVNLLEDSHNGKLCLLKGIAPLQLGNCSVAGWILGNPECESLISKESWSYIVETPNPENGTCYPGYFADYEELREQLSSVSSFERFEIFPKESSWPNHTVTGVSASCSHNGKSSFYRNLLWLTEKNGLYPNLSKSYVNNKEKEVLVLWGVHHPSNIGDQRAIYHTENAYVSVVSSHYSRRFTPEIAKRPKVRGQEGRINYYWTLLEPGDTIIFEANGNLIAPWYAFALSRGFGSGIITSNAPMNECDAKCQTPQGAINSSLPFQNVHPVTIGECPKYVRSAKLRMVTGLRNIPSIQSRGLFGAIAGFIEGGWTGMIDGWYGYHHQNEQGSGYAADQKSTQNAINGITNKVNSVIEKMNTQFTAVGKEFNKLERRMENLNKKVDDGFLDIWTYNAELLVLLENERTLDFHDSNVKNLYEKVKSQLKNNAKEIGNGCFEFYHKCNNECMESVKNGTYDYPKYSEESKLNREKIDGVKLESMGVYQILAIYSTVASSLVLLVSLGAISFWMCSNGSLQCRICI

SEQ ID NO: 1352 - protein, 565 aa, synthetic construct
  REGION 1..565: note = hemagglutinin__InfluenzaA__ABI95261
MKAKLLVLLCTFTATYADTICIGYHANNSTDTVDTVLEKNVTVTHSVNLLEDSHNGKLCLLKGIAPLQLGNCSVAGWILGNPECESLISKESWSYIVETPNPENGTCYPGYFADYEELREQLSSVSSFERFEIFPKESSWPNHTVTGVSASCSHNGKSSFYRNLLWLTEKNGLYPNLSKSYVNNKEKEVLVLWGVHHPSNIGVQRAIYHTENAYVSVVSSHYSRRFTPEIAKRPKVRDQEGRINYYWTLLEPGDTIIFEANGNLIAPWYAFALSRGFESGIITSNAPMNECDAKCQTPQGAINSSLPFQNVHPVTIGECPKYVRSAKLRMVTGLRNIPSIQSRGLFGAIAGFIEGGWTGMIDGWYGYHHQNEQGSGYAADQKSTQNAINGITNKVNSVIEKMNTQFTAVGKEFNKLERRMENLNKKVDDGFLDIWTYNAELLVLLENERTLDFHDSNVKNLYEKVKSQLKNNAKEIGNGCFEFYHKCNNECMESVKNGTYDYPKYSEESKLNREKIDGVKLESMGVYQILAIYSTVASSLVLLVSLGAISFWMCSNGSLQCRICI

SEQ ID NO: 1353 - protein, 565 aa, synthetic construct; identical to SEQ ID NO: 1232
  REGION 1..565: note = hemagglutinin__InfluenzaA__ABI95272

SEQ ID NO: 1354 - protein, 565 aa, synthetic construct; identical to SEQ ID NO: 1232
  REGION 1..565: note = hemagglutinin__InfluenzaA__ABI95283

SEQ ID NO: 1355 - protein, 565 aa, synthetic construct; identical to SEQ ID NO: 296
  REGION 1..565: note = hemagglutinin__InfluenzaA__ABI95294

SEQ ID NO: 1356 - protein, 565 aa, synthetic construct
  REGION 1..565: note = hemagglutinin__InfluenzaA__ABI96104
MKVKLLILLCTFTATYADTICIGYHANNSTDTVDTVLEKNVTVTHSVNLLEDSHNGKLCLLKGIAPLQLGNCSVAGWILGNPECELLISKESWSYIVETPNPENGACYPGYFADYEELREQLSSVSSFERFEIFPKESSWPNHTVTGVSASCSHNGKSSFYRNLLWLTGKNGLYPNLIKSYANNKEKEVLILWGVHHPPNIGDQRTLYHTENAYVSVVSSHYSRRFTPEITKRPKVRDQEGRINYYWTLLEPGDTIIFEANGNLIAPWYAFALSRGFGSGIITSNAPMDECDAKCQTPQGAINSSLPFQNVHPVTIGECPKYVRSAKLRMVTGLRNIPSIQSRGLFGAIAGFIEGGWTGMVDGWYGYHHQNEQGSGYAADQKSTQNAINGITNKVNSVIEKMNTQFTAVGKEFNKLERRMENLNKKVDDGFLDIWTYNAELLVLLENERTLDFHDSNVKNLYEKVKSQLKNNAKEIGNGCFEFYHKCNNECMESVKNGTYDYPKYSEESKLNREKIDGVKLDSMGVYQILAIYSTVASSLVLLVSLGAISFWMCSNGSLQCRICI

SEQ ID NO: 1357 - protein, 566 aa, synthetic construct; identical to SEQ ID NO: 650
  REGION 1..566: note = hemagglutinin__InfluenzaA__ABJ09107

SEQ ID NO: 1358 - protein, 566 aa, synthetic construct
  REGION 1..566: note = hemagglutinin__InfluenzaA__ABJ09140
MKTIIALSYILCLVFAQKLPGNDNSTATLCLGHHAVPNGTLVKTITNDQIEVTNATELVQSSSTGRICDSPHRILDGKNCTLIDALLGDPHCDGFQNKEWDLFVERSKAYSNCYPYDVPDYASLRSLVASSGTLEFINEDFNWTGVAQDGKSYSCKRGSVNSFFSRLNWLHKLEYKYPALNVTMPNNGKFDKLYIWGVHHPSTDSDQTSLYVRASGRVTVSTKRSQQTVIPNIGFRPWVRGLSSRISIYWTIVKPGDILLINSTGNLIAPRGYFKIRNGKSSIMRSDAPIGNCSSECITPNGSIPNDKPFQNVNRITYGACPRYVKQNTLKLATGMRNVPEKQTRGIFGAIAGFIENGWEGMVDGWYGFRHQNSEGTGQAADLKSTQAAIDQINGKLNRLIEKTNEKFHQIEKEFSEVEGRIQDLEKYVEDTKIDLWSYNAGLLVALENQHTIDLTDSEMNKLFERTRKQLRENAEDMGNGCFKIYHKCDNACIGSIRNGTYDHDVYRDEALNNRFQIKGVELKSGYKDWILWISFAISCFLLCVVLLGFIMWACQKGNIRCNICI

SEQ ID NO: 1359 - protein, 565 aa, synthetic construct
  REGION 1..565: note = hemagglutinin__InfluenzaA__ABJ09151
MKAKLLVLLCTFTATYADTICIGYHANNSTDTVDTVLEKNVTVTHSVNLLEDSHNGKLCLLKGIAPLQLGNCSVAGWILGNPECELLISKESWSYIVETPNPENGTCYPGYFADYEELREQLSSVSSFERFEIFPKGSSWPNHTVTGVSASCSHNGKSSFYRNLLWLTGKNGLYPNLSMSYVNNKGKEVLVLWGVHHPPNIGDQRALYHTENAYVSVVSSHYSRRFTPEIAKRPKVRDQEGRINYYWTLLEPGDTIIFEANGNLIAPWYAFALSRGFGSGIITSNAPMGECDAKCQTPQGAINSSLPFQNVHPVTIGECPKYVRSAKLRMVTGLRNIPSIQSRGLFGAIAGFIEGGWTGMVDGWYGYHHQNEQGSGYAADQKSTQNAINGITNKVNSVIEKMNTQFTAVGKEFNKLERRMENLNKKVDDGFLDIWTYNAELLVLLENERTLDFHDSNVKNLYEKVKSQLKNNAKEIGNGCFEFYHKCNNECMESVKNGTYDYPKYSKESKLNREKIDGVKLESMGVYQILAIYSTVASSLVLLVSLGAISFWMCSNGSLQCRICI

SEQ ID NO: 1360 - protein, 566 aa, synthetic construct
  REGION 1..566: note = hemagglutinin__InfluenzaA__ABJ09162
MKTIIALSYILCLVFAQKLPGNDNSTATLCLGHHAVPNGTIVKTITNDQIEVTNATELVQSSSTGGICDSPHQILDGENCTLIDALLGDPQCDGFQNKKWDLFVERSKAYSNCYPYDVPDYASLRSLVASSGTLEFNNESFNWTGVTQNGTSSACKRRSNNSFFSRLNWLTHLKFKYPALNVTMPNNEKFDKLYIWGVHHPGTNNDQISLYAQASGRITVSTKRSQQTVIPNIGSRPRVRDIPSRISIYWTIVKPGDILLINSTGNLIAPRGYFKIRSGKSSIMRSDAPIGKCNSECITPNGSIPNDKPFQNVNRITYGACPRYVKQNTLKLATGMRNVPEKQTRGIFGAIAGFIENGWEGMVDGWYGFRHQNSEGIGQAADLKSTQAAINQINGKLNRLIGKTNEKFHQIEKEFSEVEGRIQDLEKYVEDTKIDLWSYNAEILVALENQHTIDLTDSEMNKLFERTKKQLRENAEDMGNGCFKIYHKCDNACIGSIRNGTYDHDVYRDEALNNRFQIKGVELKSGYKDWILWISFAISCFLLCVALLGFIMWACQKGNIRCNICI

SEQ ID NO: 1361 - protein, 566 aa, synthetic construct; identical to SEQ ID NO: 243
  REGION 1..566: note = hemagglutinin__InfluenzaA__ABJ09173

SEQ ID NO: 1362 - protein, 565 aa, synthetic construct
  REGION 1..565: note = hemagglutinin__InfluenzaA__ABJ09184
MKVKLLVLLCTFTATYADTICIGYHANNSTDTVDTVLEKNVTVTHSVNLLEDSHNGKLCLLKGIAPLQLGNCSVAGWILGNPECELLISKESWSYIVETPNPENGTCYPGYFADYEELREQLSSVSSFERFEIFPKESSWPNHTVTGVSASCSHNGKSSFYRNLLWLTGKNGLYPNLSKSYANNKEKEVLVLWGVHHPPNIGDQRALYHTENAYVSVVSSHYSRRFTPEIAKRPKVRDQEGRINYYWTLLEAGDTIIFEANGNLIAPRFAFALSRGFGSGIITSNAPMDECDAKCQTPQGAINSSLPFQNVHPVTIGECPKYVRSAKLRMATGLRNIPSIQSRGLFGAIAGFIEGGWTGMVDGWYGYHHQNEQGSGYAADQKSTQNAINGITNKVNSVIEKMNTQFTAVGKEFSKLERRMENLNKKVDDGFLDIWTYNAELLVLLENERTLDFHDSNVKNLYEKVKSQLKNNAKEIGNGCFEFYHKCNDECMESVKNGTYDYPKYSEESKLNREKIDGVKLESMGVYQILAIYSTVASSLVLLVSLGAISFWMCSNGSLQCRICI

SEQ ID NO: 1363 - protein, 566 aa, synthetic construct; identical to SEQ ID NO: 633
  REGION 1..566: note = hemagglutinin__InfluenzaA__ABJ09195

SEQ ID NO: 1364 - protein, 566 aa, synthetic construct; identical to SEQ ID NO: 633
  REGION 1..566: note = hemagglutinin__InfluenzaA__ABJ09206

SEQ ID NO: 1365 - protein, 566 aa, synthetic construct; identical to SEQ ID NO: 1213
  REGION 1..566: note = hemagglutinin__InfluenzaA__ABJ09217

SEQ ID NO: 1366 - protein, 566 aa, synthetic construct; identical to SEQ ID NO: 650
  REGION 1..566: note = hemagglutinin__InfluenzaA__ABJ09228

SEQ ID NO: 1367 - protein, 566 aa, synthetic construct
  REGION 1..566: note = hemagglutinin__InfluenzaA__ABJ09239
MKTIIALSYILCLVFAQKLPGNDNSTATLCLGHHAVPNGTLVKTITNDQIEVTNATELVQSSSTGGICDSPHQILDGENCTLIDALLGDPHCDGFQNKEWDLFVERSKAYSNCYPYDVPDYASLRSLVASSGTMEFNNESFNWTGVAQNGTSSACKRRSNKSFFSRLNWLHQLKYKYPALNVTMPNNEKFDKLYIWGVHHPSTDSDQISLYAQAPGRVTVSTKRSQQTVIPNIGSRPWVRGVSSRISIYWTIVKPGDILLINCTGNLIAPRGYFKIRSGKSSIMRSDASIGKCNSECITPNGSIPNDKPFQNVNRITYGACPRYVKQNTLKLATGMRNVPEKQTRGIFGAIAGFIENGWEGMVDGWYGFRHQNSEGTGQAADLKSTQAAINQINGKLNRLIEKTNEKFHQIEKEFSEVEGRIQDLEKYVEDTKIDLWSYNAELLVALENQHTIDLTDSEMNKLFERTKKQLRENAEDMGNGCFKIYHKCDNACIGSIRNGTYDHDVYRDEALNNRFQIKGVELKSGYKDWILWISFAISCFLLCVVLLGFIMWACQKGNIRCNICI

SEQ ID NO: 1368 - protein, 566 aa, synthetic construct
  REGION 1..566: note = hemagglutinin__InfluenzaA__ABJ09250
MKTIIALSYILCLVFAQKLPGNDNSTATLCLGHHAVPNGTLVKTITNDQIEVTNATELVQSSSTGRICDSPHQILDGENCTLIDALLGDPHCDGFQNKEWDLFVERSKAYSNCYPYDVPDYASLRSLVASSGTLEFNNESFNWTGVAQNGTSSACKRRSNKSFFSRLNWLHQLKYKYPALNVTMPNNEKFDKLYIWGIHHPSTDSDQISLYAQASGRVTVSTKRSQQTVIPNIGSRPWVRGVSSRISIYWTIVKPGDILLINSTGNLIAPRGYFKIRSGKSSIMRSDAPIGKCNSECITPNGSIPNDKPFQNVNRITYGACPRYVKQNTLKLATGMRNVPEKQTRGIFGAIAGFIENGWEGMVDGWYGFRHQNSEGTGQAADLKSTQAAINQINGKLNRLIEKTNEKFHQIEKEFSEVEGRIQDLEKYVEDTKIDLWSYNAELLVALENQHTIDLTDSEMNKLFERTKKQLRENAEDMGNGCFKIYHKCDNACIGSIRNETYDHDVYRDEALNNRFQIKGVELKSGYKDWILWISFAISCFLLCVVLLGFIMWACQKGNIRCNICI

SEQ ID NO: 1369 - protein, 566 aa, synthetic construct
  REGION 1..566: note = hemagglutinin__InfluenzaA__ABJ09261
MKTIIALSYILCLVFAQKLPGNDNSTATLCLGHHAVPNGTLVKTITNDQIEVTNATELVQSSSTGKICDSPHQILDGENCTLIDALLGDPHCDGFQNKEWDLFVERSKAYSNCYPYDVPDYASLRSLVASSGTLEFNNESFNWTGVAQNGTSSACKRRSIKSFFSRLNWLHQLKYKYPALNVTMPNNEKFDKLYIWGVHHPSTDSDQTSLYAQASGRVTVSTKRSQQTVIPNIGSRPWVRGVSSRISIYWTIVKPGDILLINSTGNLIAPRGYFKIRSGKSSIMRSDAPIGKCNSECITPNGSIPNDKPFQNVNRITYGACPRYVKQNTLKLATGMRNVPEKQTRGIFGAIAGFIENGWEGMVDGWYGFRHQNSEGTGQAADLKSTQAAINQINGKLNRLIEKTNEKYHQIEKEFSEVEGRIQDLEKYVEDTKIDLWSYNAELLVALENQHTIDLTDSEMNKLFERTRKQLRENAEDMGNGCFKIYHKCDNACIGSIRNGTYDHDVYRDEALNNRFQIKGVELKSGYKDWILWISFAISCFLLCVVLLGFIMWACQKGNIRCNICI

SEQ ID NO: 1370 - protein, 566 aa, synthetic construct
  REGION 1..566: note = hemagglutinin__InfluenzaA__ABJ09272
MKTIIALSYILCLVFAQKLPGNDNSTATLCLGHHAVPNGTLVKTITNDQIEVTNATELVQSSSTGRICNSPHQILDGENCTLIDALLGDPHCDGFQNKEWDLFVERRKAYSNCYPYDVPDYASLRSLVASSGTLEFNNESFNWTGVAQNGTSSACKRRSIKSFFSRLNWLHQLKYKYPALNVTMPNNEKFDKLYIWGVHHPSTDSDQISLYAQASGRVTVSTKRSQQTVIPNIGSRPWVRGVSSRISIYWTIVKPGDILLINSTGNLIAPRGYFKIRSGKSSIMRSDAPIGKCNSECITPNGSIPNDKPFQNVNRITYGACPRYVKQNTLKLATGMRNVPEKQTRGIFGAIAGFIENGWEGMVDGWYGFRHQNSEGTGQAADLKSTQAAINQINGKLNRLIEKTNEKFHQIEKEFSEVEGRIQDLEKDVEDTKIDLWSYNAELLVALENQHTIDLTDSEMNKLFERTKKQLRENAEDMGNGCFKIYHKCDNACIGSIRNGTYDHDVYRDEALNNRFQIKGVELKSGYKDWILWISFAISCFLLCVVLLGFIMWACQKGNIRCNICI

SEQ ID NO: 1371 - protein, 566 aa, synthetic construct; identical to SEQ ID NO: 72
  REGION 1..566: note = hemagglutinin__InfluenzaA__ABJ09294

SEQ ID NO: 1372 - protein, 566 aa, synthetic construct
  REGION 1..566: note = hemagglutinin__InfluenzaA__ABJ09305
MKTIIALSYILCLVFAQKLPGNDNSTATLCLGHHAVPNGTLVKTITNDQIEVTNATELVQSSSTGRICDSPHQILDGENCTLIDALLGDPHCDGFQNKEWDLFVERSKAYSNCYPYDVPDYASLRSLVASSGTLEFNNESFNWTGVAQNGTSSACKRRSNKSFFSRLNWLHQLKYKYPALNVTMPNNEKFDKLYIWGVHHPSTDSDQISLYAQASGRVTVSTKRSQQTVIPNIGSRPWVRGVSSRISIYWTIVKPGDILLINSTGNLIAPRGYFKIRSGKSSIMRSDAPIGKCNSECITPNGSIPNDKPFQNVNRITYGACPRYVKQNTLKLATGMRNVPEKQTRGIFGAIAGFIENGWEGMVDGWYGFRHQNSEGTGQAADLKSTQAAINQINGKLNRLIEKTNEKFHQIEKEFSEVEGRIQDLEKYVEDTKIDLWSYNAELLVALENQHTIDLTDSEMNKLFERTKKQLRENAEDMGNGCFKIYHKCDNACIGSIRNETYDHDVYRDEALNNRFQIKGVELKSGYKDWILWISFAISCFLLCVVLLGFIMWACQKGNIRCNICI

SEQ ID NO: 1373 - protein, 566 aa, synthetic construct
  REGION 1..566: note = hemagglutinin__InfluenzaA__ABJ09316
MKTIIALSYILCLVFAQKLPGNDNSTATLCLGHHAVPNGTLVKTITNDQIEVTNATELVQSSSTGRICDSPHQILDGENCTLIDALLGDPHCDGFQNKEWDLFVERSKAYSNCYPYDVPDYASLRSLVASSGTLEFNNESFNWTGVAQNGTSSACKRRSNKSFFSRLNWLHQLKYKYPALNVTMPNNEKFDKLYIWGVHHPSTDSDQISLYAQASGRVTVSTKRSQQTVIPNIGSRHWVRGVSSRISIYWTIVKPGDILLINSTGNLIAPRGYFKIRSGKSSIMRSDASIGKCNSECITPNGSIPNDKPFQNVNRITYGACPRYVKQNTLKLATGMRNVPEKQTRGIFGAIAGFIENGWEGMVDGWYGFRHQNSEGTGQAADLKSTQAAINQINGKLNRLIEKTNEKFHQIEKEFSEVEGRIQDLEKYVEDTKIDLWSYNAELLVALENQHTIDLTDSEMNKLFERTKKQLRENAEDMGNGCFKIYHKCDNACIGSIRNGTYDHDVYRDEALNNRFQIKGVELKSGYKDWILWISFAISCFLLCVVLLGFIMWACQKGNIRCNICI

SEQ ID NO: 1374 - protein, 566 aa, synthetic construct; identical to SEQ ID NO: 650
  REGION 1..566: note = hemagglutinin__InfluenzaA__ABJ09338

SEQ ID NO: 1375 - protein, 566 aa, synthetic construct
  REGION 1..566: note = hemagglutinin__InfluenzaA__ABJ09349
MKTIIALSYILCLVFAQKLPGNDNSTATLCLGHHAVPNGTLVKTITNDQIEVTNATELIQSSSTGGICDSPHQILDGENCTLIDALLGDPHCDGFQNKEWDLFVERSKAYSNCYPYDVPDYASLRSLVASSGTLEFNNESFNWTGVAQNGTSSACKRRSNKSFFSRLNWLHQLKYKYPALNVTMPNNEKFDKLYIWGVHHPSTDSDQISLYAQAPGRVTVSTKRSQQTVIPNIGSRPWVRGVSSRISIYWTIVKPGDILLINCTGNLIAPRGYFKIRSGKSSIMRSDASIGKCNSECITPNGSIPNDKPFQNVNRITYGACPRYVKQNTLKLATGMRNVPEKQTRGIFGAIAGFIENGWEGMVDGWYGFRHQNSEGTGQAADLKSTQAAINQINGKLNRLIEKTNEKFHQIEKEFSEVEGRIQDLEKYVEDTKIDLWSYNAELLVALENQHTIDLTDSEMNKLFERTKKQLRENAEDMGNGCFKIYHKCDNACIGSIRNGTYDHDVYRDEALNNRFQIKGVELKSGYKDWILWISFAISCFLLCVVLLGFIMWACQKGNIRCNICI

SEQ ID NO: 1376 - protein, 566 aa, synthetic construct; identical to SEQ ID NO: 650
  REGION 1..566: note = hemagglutinin__InfluenzaA__ABJ09360

SEQ ID NO: 1377 - protein, 566 aa, synthetic construct
  REGION 1..566: note = hemagglutinin__InfluenzaA__ABJ09371
MKTIIALSYILCLVFAQKLPGNDNSTATLCLGHHAVPNGTIVKTITNDQIEVTNATELVQSSSTGGICDSPHQILDGENCTLIDALLGDPQCDGFQNKKWDLFVERSKAYSNCYPYDVPDYASLRSLIASSGTLEFNNESFNWTGVTQNGTSSACKRRSNSSFFSRLNWLTHLKFKYPALNVTMPNNEEFDKLYIWGVHHPGTYNDQISLYAQASGRITVSTKRSQQTVIPNIGSRLRVRDIPSRISIYWTIVKPGDILLINSTGNLIAPRGYFKIRSGKSSIMRSDAPIGKCNSECITPNGSIPNDKPFQNVNRITYGACPRYVKQNTLKLATGMRNVPEKQTRGIFGAIAGFIENGWEGMVDGWYGFRHQNSEGIGQAADLKSTQAAIDQINGKLNRLIGKTNEKFHQIEKEFSEVEGRIQDLEKYVEDTKIDLWSYNAELLVALENQHTIDLTDSEMNKLFERTKKQLRENAEDMGNGCFKIYHKCDNACIGSIRNGTYDHDVYRDEALNNRFQIKGVELKSGYKDWILWISFAISCFLLCVALLGFIMWACQKGNIRCNICI

SEQ ID NO: 1378 - protein, 566 aa, synthetic construct; identical to SEQ ID NO: 633
  REGION 1..566: note = hemagglutinin__InfluenzaA__ABJ09382

SEQ ID NO: 1379 - protein, 566 aa, synthetic construct
  REGION 1..566: note = hemagglutinin__InfluenzaA__ABJ16587
MKTIIALSYISCLVFAQKLPGNDNSTATLCLGHHAVPNGTLVKTITNDQIEVTNATELVQSSSTGRICDSPHQILDGENCTLIDALLGDPHCDGFQNKEWDLFVERSKAYSNCYPYDVPDYASLRSLVASSGTLEFNNESFNWTGVAQNGTSSACKRRSIKSFFSRLNWLHQLKYRYPALNVTMPNNDKFDKLYIWGVHHPSTDSDQTSLYAQASGRVTVSTKRSQQTVIPNIGSRPWVRGVSSRISIYWTIVKPGDILLINSTGNLIAPRGYFKIRSGKSSIMRSDAPIGKCNSECITPNGSIPNDKPFQNVNRITYGACPRYVKQNTLKLATGMRNVPEKQTRGIFGAIAGFIENGWEGMMDGWYGFRHQNSEGTGQAADLKSTQAAINQINGKLNRLIEKTNEKFHQIEKEFSEVEGRIQDLEKYVEDTKIDLWSYNAELLVALENQHTIDLTDSEMNKLFERTRKQLRENAEDMGNGCFKIYHKCDNACIGSIRNGTYDHDVYRDEALNNRFQIKGVELKSGYKDWILWISFAISCFLLCVVLLGFIMWACQKGNIRCNICI

SEQ ID NO: 1380 - protein, 566 aa, synthetic construct
  REGION 1..566: note = hemagglutinin__InfluenzaA__ABJ16598
MKTIIALSYILCLVFAQKLPGNDNSTATLCLGHHAVPNGTLVKTITNDQIEVTNATELVQSSSTGRICNSPHQILDGENCTLIDALLGDPHCDGFQNKEWDLFVERSKAYSNCYPYDVPDYASLRSLVASSGTLEFNNESFNWTGVAQNGTSSACKRRSIKSFFSRLNWLHQLKYKYPALNVTMPNNEKFDKLYIWGVHHPSTDSDQISLYAQASGRVTVSTKRSQQTVIPNIGSRPWVRGVSSRISIYWTIVKPGDILLINSTGNLIAPRGYFKIRSGKSSIMRSDAPIGKCNSECITPNGSIPNDKPFQNVNRITYGACPRYVKQNTLKLATGMRNVPEKQTRGIFGAIAGFIENGWEGMVDGWYGFRHQNSEGTGQAADLKSTQAAINQINGKLNRLIEKTNEKFHQIEKEFSEVEGRIQDLEKYVEDTKIDLWSYNAELLVALENQHTIDLTDSEMNKLFERTKKQLRENAEDMGNGCFKIYHKCDNACIGSIRNGTYDHDVYRDEALNNRFQIKGVELKSGYKDWILWISFAISCFLLCVVLLGFIMWACQKGNIRCNICI

SEQ ID NO: 1381 - protein, 566 aa, synthetic construct
  REGION 1..566: note = hemagglutinin__InfluenzaA__ABJ16620
MKTIIALSYILCLVFAQKLPGNDNSTATLCLGHHAVPNGTLVKTITNDQIEVTNATELVQSSSTGRICNSPHQILDGENCTLIDALLGDPHCDGFQNKEWDLFVERNKAYSNCYPYDVPDYASLRSLVASSGTLEFNNESFNWTGVAQNGTSSACKRRSIKSFFSRLNWLHQLKYKYPALNVTMPNNEKFDKLYIWGVHHPSTDSDQISLYAQASGRVTVSTKRSQQTVIPNIGSRPWVRGVSSRISIYWTIVKPGDILLINSTGNLIAPRGYFKIRSGKSSIMRSDAPIGKCNSECITPNGSIPNDKPFQNVNRITYGACPRYVKQNTLKLATGMRNVPEKQTRGIFGAIAGFIENGWEGMVDGWYGFRHQNSEGTGQAADLKSTQAAINQINGKLNRLIEKTNKKFHQIEKEFSEVEGRIQDLEKYVEDTKIDLWSYNAELLVALENQHTIDLTDSEMNKLFERTKKQLRENAEDMGNGCFKIYHKCDNACIGSIRNGTYDHDVYRDEALNNRFQIKGVELKSGYKDWILWISFAISCFLLCVVLLGFIMWACQKGNIRCNICI

SEQ ID NO: 1382 - protein, 566 aa, synthetic construct
  REGION 1..566: note = hemagglutinin__InfluenzaA__ABJ16631
MKTIIALSYILCLVFAQKLPGNDNSTATLCLGHHAVPNGTIVKTITNDQIEVTNATELVQSSSTGGICDSPHQILDGENCTLIDALLGDPQCDGFQNKKWDLFVERSKAYSNCYPYDVPDYASLRSLIASSGTLEFNNESFNWTGVTQNGTSSACKRRSNSSFFSRLNWLTHLKFKYPALNVTMPNNEEFDKLYIWGVHHPGTYNDQISLYAQASGRITVSTKRSQQTVIPNIGSRPRVRDIPSRISIYWTIVKPGDILLINSTGNLIAPRGYFKIRSGKSSIMRSDAPIGKCNSECITPNGSIPNDKPFQNVNRITYGACPRYVKQNTLKLATGMRNVPEKQTRGIFGAIAGFIENGWEGMVDGWYGFRHQNSEGIGQAADLKSTQAAIDQINGKLNRLIGKTNEKFHQIEKEFSEVEGRIQDLEKYVEDTKIDLWSYNAELLVALENQHTIDLTDSEMNKLFEKTKKQLRENAEDMGNGCFKIYHKCDNACIGSIRNGTYDHDVYRDEALNNRFQIKGVELKSGYKDWILWISFAISCFLLCVALLGFIMWACQKGNIRCNICI

SEQ ID NO: 1383 - protein, 565 aa, synthetic construct
  REGION 1..565: note = hemagglutinin__InfluenzaA__ABJ16664
MKVKLLVLLCTFTATYADTICIGYHANNSTDTVDTVLEKNVTVTHSVNLLEDSHNGKLCLLKGIAPLQLGNCSVAGWILGNPECELLISKESWSYIVETPNPENGTCYPGHFADYEELREQLSSVSSFERFEIFPKESSWPNHTVTGVSASCSHNGKSSFYRNLLWLTGKNGLYPNLSKSYANNKEKEVLVLWGVHHPPNIGDQRALYHTENAYVSVVSSHYSRRFTPEIAKRPKVRDQEGRINYYWTLLEPGDTIIFEANGNLIAPRFAFALSRGFGSGIITSNAPMDECDAKCQTPQGAINSSLPFQNVHPVTIGECPKYVRSAKLRMVTGLRNIPSIQSRGLFGAIAGFIEGGWTGMVDGWYGYHHQNEQGSGYAADQKSTQNAINGITNKVNSVIEKMNTQFTAVGKEFNKLERRMENLNKKVDDGFLDIWTYNAELLVLLENERTLDFHDSNVKNLYEKVKSQLKNNAKEIGNGCFEFYHKCNDECMESVKNGTYDYPKYSEESKLNRERIDGVKLESMGVYQILAIYSTVASSLVLLVSLGAISFWMCSNGSLQCRICI

SEQ ID NO: 1384 - protein, 565 aa, synthetic construct; identical to SEQ ID NO: 1204
  REGION 1..565: note = hemagglutinin__InfluenzaA__ABJ16675

SEQ ID NO: 1385 - protein, 565 aa, synthetic construct
  REGION 1..565: note = hemagglutinin__InfluenzaA__ABJ16686
MKVKLLVLLCTFTATYADTICIGYHANNSTDTVDTVLEKNVTVTHSVNLLEDSHNGKLCLLKGIAPLQLGNCSVAGWILGNPECELLISKESWSYIVETPNPENGTCYPGYFADYEELREQLSSVSSFERFEIFPKESSWPNHTVTGVSASCSHNGKSSFYRNLLWLTGKNGLYPNLSKSYANNKEKEVLVLWGVHHPPNIGDQRALYHTENAYVSVVSSHYSRRFTPEIAKRPKVRDQEGRINYYWTLLEPGDTIIFEANGNLIAPRFAFALSRGFGSGIITSNAPMDECDAKCQTPQGAINSSLPFQNVHPVTIGECPKYVRSAKLRMATGLRNIPSIQSRGLFGAIAGFIEGGWTGMVDGWYGYHHQNEQGSGYAADQKSTQNAINGITNKVNSVIEKMNTQFTAVGKEFSKLERRMENLNKKVDDGFLDIWTYNAELLVLLENERTLDFHDSNVKNLYEKVKSQLKNNAKEIGNGCFEFYHKCNDECMESVKNGTYDYPKYSEESKLNREKIDGVKLESMGVYQILAIYSTVASSLVLLVSLGAISFWMCSNGSLQCRICI

SEQ ID NO: 1386 - protein, 566 aa, synthetic construct
  REGION 1..566: note = hemagglutinin__InfluenzaA__ABJ16697
MKTIIALSYILCLVFAQKLPGNDNSTATLCLGHHAVPNGTLVKTITNDQIEVTNATELVQSSSTGGICDSPHQILDGENCTLIDALLGDPHCDGFQNKEWDLFVERSKAYSNCYPYDVPDYASLRSLVASSGTLEFNNESFNWTGVAQNGTSSACKRRSNKSFFSRLNWLHQLKYKYPALNVTMPNNEKFDKLYIWGVHHPSTDSDQISLYAQAPGRVTVSTKRSQQTVIPNIGSRPWVRGVSSRISIYWTIVKPGDILLINCTGNLIAPRGYFKIRSGKSSIMRSDASIGKCNSECITPNGSIPNDKPFQNVNRITYGACPRYVKQNTLKLATGMRNVPEKQTRGIFGAIAGFIENGWEGMVDGWYGFRHQNSEGTGQAADLKSTQAAINQINGKLNRLIEKTNEKFHQIEKEFSEVEGRIQDLEKYVEDTKIDLWSYNAELLVALENQHTIDLTDSEMNKLFERTKKQLRENAEDMGNGCFKIYHKCDNACIGSIRNGTYDHDVYRDEALNNRFQIKGVELKSGYKDWILWISFAISCFLLCAVLLGFIMWACQKGNIRCNICI

SEQ ID NO: 1387 - protein, 566 aa, synthetic construct
  REGION 1..566: note = hemagglutinin__InfluenzaA__ABJ16730
MKAKLLVLLCAFTATYADTICIGYHANNSTDTVDTVLEKNVTVTHSVNLLEDSHNGKLCRLKGTAPLQLGNCSIAGWILGNPECESLFSKESWSYIAETPNPKNGTCYPGYFADYEELREQLSSVSSFERFEIFPKDSSWPNHTVTKGVTASCSHNGKSSFYKNLLWLTEKNGLYPNLSKSYVNKKGKEVLVLWGVHHPSNMGDQRAIYHKENAYVSVLSSHYSRRFTPEIARRPKVRDQEGRINYYWTLLEPGDTIIFEANGNLIAPWYAFALSRGFGSGIIISNASMGECDAKCQTPQGAINSSLPFQNVHPVTIGECPKYVRSTKLRMVTGLRNVPSIQSRGLFGAIAGFIEGGWTGMIDGWYGYHHQNEQGSGYAADQKSTQNAINGITNKVNSIIEKMNTQFTAVGKEFNKLERRMENLNKKVDDGFLDIWTYNAELLVLLENERTLDFHDSNVKNLYEKVKNQLKNNAKEIGNGCFEFYHKCNNECMESVKNGTYDYPKYSKESKLNREKIDGVKLESMGVYQILAIYSTVASSLVLLVSLGAISFWMCSNGSLQCRICI

SEQ ID NO: 1388 - protein, 566 aa, synthetic construct
  REGION 1..566: note = hemagglutinin__InfluenzaA__ABJ16741
MKTIIALSYILCLVFAQKLPGNDNSTATLCLGHHAVPNGTLVKTITNDQIEVTNATELVQSSSTGGICDSPHQILDGENCTLIDALLGDPHCDGFQNKEWDLFVERSKAYSNCYPYDVPDYASLRSLVASSGTLEFNNESFNWTGVAQNGTSSACKRRSNKGFFSRLNWLHQLKYKYPALNVTMPNNEKFDKLYIWGVHHPSTDSDQISLYAQAPGRVTVSTKRSQQTVIPNIGSRPWVRGVSSIISIYWTIVKPGDILLINCTGNLIAPRGYFKIRSGKSSIMRSDASIGKCNSECITPNGSIPNDKPFQNVNRITYGACPRYVKQNTLKLATGMRNVPEKQTRGIFGAIAGFIENGWEGMVDGWYGFRHQNSEGTGQAADLKSTQAAINQINGKLNRLIGKTNEKFHQIEKEFSEVEGRIQDLEKYVEDTKIDLWSYNAELLVALENQHTIDLTDSEMNKLFERTKKQLRENAEDMGNGCFKIYHKCDNACIGSIRNGTYDHDVYRDEALNNRFQIKGVELKSGYKDWILWISFAISCFLLCVVLLGFIMWACQKGNIRCNICI

SEQ ID NO: 1389 - protein, 566 aa, synthetic construct
  REGION 1..566: note = hemagglutinin__InfluenzaA__ABJ16752
MKTIIALSYILCLVFAQKLPGNDNSTATLCLGHHAVPNGTLVKTITNDQIEVTNATELVQSSSTGGICDSPHQILDGENCTLIDALLGDPHCDGFQNKEWDLFVERSKAYSNCYPYDVPDYASLRSLVASSGTLEFNNESFNWTGVAQNGTSSACKRRSNKSFFSRLNWLHQLKYKYPALNVTMPNNEKFDKLYIWGVHHPSTDSDQISLYAQAPGRVTVSTKRSQQTVIPNIGSRPWVRGVSSGISIYWTIVKPGDILLINCTGNLIAPRGYFKIRSGKSSIMRSDASIGKCNSECITPNGSIPNDKPFQNVNRITYGACPRYVKQNTLKLATGMRNVPEKQTRGIFGAIAGFIENGWEGMVDGWYGFRHQNSEGTGQAADLKSTQAAINQINGKLNRLIEKTNEKFHQIEKEFSEVEGRIQDLEKYVEDTKIDLWSYNAELLVALENQHTIDLTDSEMNKLFERTKKQLRENAEDMGNGCFKIYHKCDNACIGSIRNGTYDHDVYRDEALNNRFQIKGVELKSGYKDWILWISFAISCFLLCVVLLGFIMWACQKGNIRCNICI

SEQ ID NO: 1390 - protein, 566 aa, synthetic construct
  REGION 1..566: note = hemagglutinin__InfluenzaA__ABJ16763
MKTIIALSYILCLVFAQKLPGNDNSTATLCLGHHAVPNGTLVKTITNDQIEVTNATELVQSSSTGGICDSPHQILDGENCTLIDALLGDPHCDGFQNKEWDLFVERSKAYSNCYPYDVPDYASLRSLVASSGTLEFNNESFNWTGVAQNGTSSACKRRSNKSFFSRLNWLHQLKYKYPALNVTMPNNEKFDKLYIWGVHHPSTDSDQISLYAQAPGRVTVSTKRSQQTVIPNIGSRHWVRGVSSRISIYWTIVKPGDILLINCTGNLIAPRGYFKIRSGKSSIMRSDASIGKCNSECITPNGSIPNDKPFQNVNRITYGACPRYVKQNTLKLATGMRNVPEKQTRGIFGAIAGFIENGWEGMVDGWYGFRHQNSEGTGQAADLKSTQAAINQINGKLNRLIEKTNEKFHQIEKEFSEVEGRIQDLEKYVEDTKIDLWSYNAELLVALENQHTIDLTDSEMNKLFERTKKQLRENAEDMGNGCFKIYHKCDNACIGSIRNGTYDHDVYRDEALNNRFQIKGVELKSGYKDWILWISFAISCFLLCVVLLGFIMWACQKGNIRCNICI

SEQ ID NO: 1391 - protein, 566 aa, synthetic construct
  REGION 1..566: note = hemagglutinin__InfluenzaA__ABJ16774
MKTIIALSYILCLVFAQKLPVNDNSTATLCLGHHAVPNGTLVKTITNDHIEVTNATELVQSSPTGRICDSPHQILDGENCTLIDALLGDPHCDGFQNKEWDLFVERSTAYSNCYPYDVPDYASLRSLVASSGTLEFNNESFNWTGVAQNGTSSACKRRSIKSFFSRLNWLHQLKYKYPALNVTMPNNEKFDKLYIWGVHHPSTDSDQISLYAQASGRVTVSTKRSQQTVIPNIGSGPWVRGVSSRISIYWTIVKPGDILLINSTGNLIAPRGYFKIRNGKSSIMRSNTPIGKCNSECITPNGSIPNDKPFQNVNRITYGACPRYVKQNTLKLATGMRNVPEKQTRGIFGAIAGFIENGWEGMVDGWYGFRHQNSEGTGQAADLKSTQAAINQINGKLNRLIEKTNEKFHQIEKEFSEVEGRIQDLEKYVEDTKIDLWSYNAELLVALENQHTIDLTDSEMNKLFERTRKQLRENAEDMGNGCFKIYHKCDNACIGSIRNGTYDHDVYRDEALNNRFQIKGVELKSGYKDWILWISFAISCFLLCVVLLGFIMWACQKGNIRCNICI

SEQ ID NO: 1392 - protein, 566 aa, synthetic construct
  REGION 1..566: note = hemagglutinin__InfluenzaA__ABJ16785
MKTIIALSYILCLVFAQKLPGNDNSTATLCLGHHAVPNGTLVKTITNDQIEVTNATELVQSSSTGGICDSPHQILDGENCTLIDALLGDPHCDGFQNKEWDLFVERSKAYSNCYPYDVPDYASLRSLVASSGTLEFNNESFNWTGVAQNGTSYACKRRSNKSFFSRLNWLHQLKYKYPALNVTMPNNEKFDKLYIWGVHHPSTDSDQISLYAQAPGRVTVSTKRSQQTVIPNIGSRPWVRGVSSRISIYWTIVKPGDILLINCTGNLIAPRGYFKIRSGKSSIMRSDASIGKCNSECITPNGSIPNDKPFQNVNRITYGACPRYVKQNTLKLATGMRNVPEKQTRGIFGAIAGFIENGWEGMVDGWYGFRHQNSEGTGQAADLKSTQAAINQINGKLNRLIEKTNEKFHQIEKEFSEVEGRIQDLEKYVEDTKIDLWSYNAELLVALENQHTIDLTDSEMNKLFERTKKQLRENAEDMGNGCFKIYHKCDNACIGSIRNGTYDHDVYRDEALNNRFQIKGVELKSGYKDWILWISFAISCFLLCVVLLGFIMWACQKGNIRCNICI

SEQ ID NO: 1393 - protein, 566 aa, synthetic construct; identical to SEQ ID NO: 910
  REGION 1..566: note = hemagglutinin__InfluenzaA__ABJ53438

SEQ ID NO: 1394 - protein, 565 aa, synthetic construct; identical to SEQ ID NO: 742
  REGION 1..565: note = hemagglutinin__InfluenzaA__ABJ53449

SEQ ID NO: 1395 - protein, 566 aa, synthetic construct
  REGION 1..566: note = hemagglutinin__InfluenzaA__ABJ53471
MKTIIALSYILCLVFAQKIPGNDNSTATLCLGHHAVPNGTIVKTITNDQIEVTNATELVQSSSTGGICDSPHQILDGENCTLIDALLGDPQCDGFQNKKWDLFVERSKAYSNCYPYDVPDYASLRSLVASSGTLEFNNESFNWTGVTQNGTSSACKRGSNNSFFSRLNWLTHLKFKYPALNVTMPNNEKFDKLYIWGVHHPGTDNDQIFLYAQASGRITVSTKRSQQTVIPNIGSRPRVRNIPSRISIYWTIVKPGDILLINSTGNLIAPRGYFKIRSGKSSIMRSDAPIGKCNSECITPNGSIPNDKPFQNVNRITYGACPRYVKQNTLKLATGMRNVPEKQTRGIFGAIAGFIENGWEGMVDGWYGFRHQNSEGIGQAADLKSTQAAINQINGKLNRLIGKTNEKFHQIEKEFSEVEGRIQDLEKYVEDTKIDLWSYNAELLVALENQHTIDLTDSEMNKLFERTKKQLRENAEDMGNGCFKIYHKCDNACIGSIRNGTYDHDVYRDEALNNRFQIKGVELKSGYKDWILWISFAISCFLLCVALLGFIMWACQKGNIRCNICI

SEQ ID NO: 1396 - protein, 566 aa, synthetic construct
  REGION 1..566: note = hemagglutinin__InfluenzaA__ABJ53482
MKTIIALSYILCLVFAQKLPGNDNSTATLCLGHHAVPNGTIVRTITNDQIEVTNATELVQSSSTGEICDSPHQILDGENCTLIDALLGDPQCDGFQNKKWDLFVERSKAYSNCYPYDVPDYASLRSLVASSGTLEFNNESFNWTGVTQNGTSSACKRRSNNSFFSRLNWLTHLKFKYPALNVTMPNNEKFDKLYIWGVHHPGTDNDQIFLYAQASGRITVSTKRSQQTVIPNIGSRPRVRNIPSRISIYWTIVKPGDILLINSTGNLIAPRGYFKIRSGKSSIMRSDAPIGKCNSECITPNGSIPNDKPFQNVNRITYGACPRYVKQNTLKLATGMRNVPEKQTRGIFGAIAGFIENGWEGMVDGWYGFRHQNSEGIGQAADLKSTQAAINQINGKLNRLIGKTNEKFHQIEKEFSEVEGRIQDLEKYVEDTKIDLWSYNAELLVALENQHTIDLTDSEMNKLFERTKKQLRENAEDMGNGCFKIYHKCDNACIGSIRNGTYDHDVYRDEALNNRFQIKGVELKSGYKDWILWISFAISCFLLCVALLGFIMWACQKGNIRCNICI

SEQ ID NO: 1397 - protein, 565 aa, synthetic construct; identical to SEQ ID NO: 1232
  REGION 1..565: note = hemagglutinin__InfluenzaA__ABJ53493

SEQ ID NO: 1398 - protein, 565 aa, synthetic construct
  REGION 1..565: note = hemagglutinin__InfluenzaA__ABJ53504
MKAKLLVLLCTFTATYADTICIGYHANNSTDTVDTVLEKNVTVTHSVNLLEDSHNGKLCLLKGIAPLQLGNCSVAGWILGNPECESLISKESWSYIVETPNPENGTCYPGYFADYEELREQLSSVSSFERFEIFPKESSWPNHTVTGVSASCSHNGKSSFYRNLLWLTEKNGLYPNLSKSYVNNKEKEVLVLWGVHHPSNIGVQRAIYHTENAYVSVVSSHYSRRFTPEIAKRPKVRDQEGRINYYWTLLEPGDTIIFEANGNLIAPWYAFALSRGFESGIITSNAPMNECDAKCQTPLGAINSSLPFQNVHPVTIGECPKYVRSAKLRMVTGLRNIPSIQSRGLFGAIAGFIEGGWTGMIDGWYGYHHQNEQGSGYAADQKSTQNAINGITNKVNSVIEKMNTQFTAVGKEFNKLERRMENLNKKVDDGFLDIWTYNAELLVLLENERTLDFHDSNVKNLYEKVKSQLKNNAKEIGNGCFEFYHKCNNECMESVKNGTYDYPKYSEESKLNREKIDGVKLESMGVYQILAIYSTVASSLVLLVSLGAISFWMCSNGSLQCRICI

SEQ ID NO: 1399 - protein, 566 aa, synthetic construct; identical to SEQ ID NO: 1387
  REGION 1..566: note = hemagglutinin__InfluenzaA__ABJ53515

SEQ ID NO: 1400 - protein, 566 aa, synthetic construct
  REGION 1..566: note = hemagglutinin__InfluenzaA__ABK39962
MKTIIALSYILCLVFAQKLPGNDNSTATLCLGHHAVPNGTLVKTITNDQIEVTNATELVQSSSTGRICDSPHQILDGENCTLIDALLGDPHCDGFQNKEWDLFVERSKAYSNCYPYDVPDYVSLRSLVASSGTLEFNNESFNWTGVAQNGTSSACKRRSDKSFFSRLNWLHQLKYKYPALNVTMPNNEKFDKLYIWGVHHPGTDSDQISLYAQASGRVTVSTKRSQQTVIPNIGSRPWVRGVSSRISIYWTIVKPGDILLINSTGNLIAPRGYFKIRSGKSSIMRSDAPIGKCNSECITPNGSIPNDKPFQNVNRITYGACPRYVKQKTLKLATGMRNVPEKQTRGIFGAIAGFIENGWEGMMDGWYGFRHQNSEGTGQAADLKSTQAAINQINGKLNRLIEKTNEKFHQIEKEFSEVEGRIQDLEKYVEDTKIDLWSYNAELLVALENQHTIDLTDSEMNKLFERTKKQLRENAEDMGNGCFKIYHKCDNACIGSIRNGTYDHDVYRDEALNNRFQIKGVELKSGYKDWILWISFAISCFLLCIVLLGFIMWACQKGNIRCNICI

SEQ ID NO: 1401 - protein, 566 aa, synthetic construct; identical to SEQ ID NO: 630
  REGION 1..566: note = hemagglutinin__InfluenzaA__ABK39973

SEQ ID NO: 1402 - protein, 566 aa, synthetic construct
  REGION 1..566: note = hemagglutinin__InfluenzaA__ABK39984
MKTIIALSYILCLVFAQKLPGNDNSRATLCLGHHAVPNGTIVKTITNDQIEVTNATELVQSSSTGGICDSPHQILDGENCTLIDALLGDPQCDGFQNKKWDLFVERSKAYSNCYPYDVPDYASLRSLVASSGTLEFNNESFNWTGVTQNGTSSACKRRSNNSFFSRLNWLTHLKFKYPALNVTMPNNEKFDKLYIWGVHHPGTDNDQIFLYAQASGRITVSTKRSQQTVIPNIGSRPRVRNIPSRISIYWTIVKPGDILLINSTGNLIAPRGYFKIRSGKSSIMRSDAPIGKCNSECITPNGSIPNDKPFQNVNRITYGACPRYVKQNTLKLATGMRNVPEKQTRGIFGAIAGFIENGWEGMVDGWYGFRHQNSEGIGQAADLKSTQAAIDQINGKLNRLIGKTNEKFHQIEKEFSEVEGRIQDLEKYVEDTKIDLWSYNAELLVALENQHTIDLTDSEMNKLFERTKKQLRENAEDMGNGCFKIYHKCDNACIGSIRNGTYDHDVYRDEALNNRFQIKGVELKSGYKDWILWISFAISCFLLCVALLGFIMWACQKGNIRCNICI

SEQ ID NO: 1403 - protein, 565 aa, synthetic construct
  REGION 1..565: note = hemagglutinin__InfluenzaA__ABK39995
MKVKLLILLCTFTATYADTICIGYHANNSTDTVDTVLEKNVTVTHSVNLLEDSHNGKLCLLKGIAPLQLGNCSVAGWILGNPECELLISKESWSYIVETPNPENGACYPGYFADYEELREQLSSVYSFERFEIFPKESSWPNHTVTGVSASCSHNGKSSFYRNLLWLTGKNGLYPNLSKSYANNKEKEVLILWGVHHPPNIGNQRTLYHTENAYVSVVSSHYSRRFTPEITKRPKVRDQEGRINYYWTLLEPGDTIIFEANGNLIAPWYAFALSRGFGSGIITSNAPMDECDAKCQTPQGAINSSLPFQNVHPVTIGECPKYVRSAKLRMVTGLRNIPSIQSRGLFGAIAGFIEGGWTGMVDGWYGYHHQNEQGSGYAADQKSTQNAINGITNKVNSVIEKMNTQFTAVGKEFNKLERRMENLNKKVDDGFLDIWTYNAELLVLLENERTLDFHDSNVKNLYEKVKSQLKNNAKEIGNGCFEFYHKCNNECMESVKNGTYDYPKYSEESKLNREKIDGVKLDSMGVYQILAIYSTVASSLVLLVSLGAISFWMCSNGSLQCRICI

SEQ ID NO: 1404 - protein, 566 aa, synthetic construct
  REGION 1..566: note = hemagglutinin__InfluenzaA__ABK40017
MKTIIALSYILCLVFAQKLPGNDNSTATLCLGHHAVPNGTIVKTITNDQIEVTNATELVQSSSTGGICDSPHQILDGENCTLIDALLGDPQCDGFQNKKWDLFVERSKAYSNCYPYDVPDYASLRSLVASSGTLEFNNESFNWTGVTQNGTSSACKRRSNNSFFSRLNWLTHLKFKYPALNVTMPNNKKFDKLYIWGVHHPGTDNDQISLYAQASGRITVSTKRSQQTVIPNIGSRPRVRDIPSRISIYWTIVKPGDILLINSTGNLIAPRGYFKIRSGKSSIMRSDAPIGKCNSECITPNGSIPNDKPFQNVNRITYGACPRYVKQNTLKLATGMRNVPEKQTRGIFGAIAGFIENGWEGMVDGWYGFRHQNSEGIGQAADLKSTQAAINQINGKLNRLIGKTNEKFHQIEKEFSEVEGRIQDLEKYVEDTKIDLWSYNAELLVALENQHTIDLTDSEMNKLFERTKKQLRENAEDMGNGCFKIYHKCDNACIGSIRNGTYDHDVYRDEALNNRFQIKGVELKSGYKDWILWISFAISCFLLCVALLGFIMWACQKGNIRCNICI

SEQ ID NO: 1405 - protein, 566 aa, synthetic construct
  REGION 1..566: note = hemagglutinin__InfluenzaA__ABK40028
MKAKLLVLLCAFTATYADTICIGYHANNSTDTVDTVLEKNVTVTHSVNLLEDSHNGKLCRLKGTAPLQLGNCSIAGWILGNPECESLFSKESWSYIAETPNPKNGTCYPGYFADYEELREQLSSVSSFERFEIFPKDSSWPNHTVTKGVTASCSHNGKSSFYKNLLWLTEKNGLYPNLSKSYVNKKGKEVLVLWGVHHPSNMGDQRAIYHKENAYVTVLSSHYSRRFTPEIARRPKVRDQEGRINYYWTLLEPGDTIIFEANGNLIAPWYAFALSRGFGSGIIISNASMGECDAKCQTPQGAINSSLPFQNVHPVTIGECPKYVRSTKLRMVTGLRNVPSIQSRGLFGAIAGFIEGGWTGMIDGWYGYHHQNEQGSGYAADQKSTQNAINGITNKVNSIIEKMNTQFTAVGKEFNKLERRMENLNKKVDDGFLDIWTYNAELLVLLENERTLDFHDSNVKNLYEKVKNQLKNNAKEIGNGCFEFYHKCNNECMESVKNGTYDYPKYSKESKLNREKIDGVKLESMGVYQILAIYSTVASSLVLLVSLGAISFWMCSNGSLQCRICI

SEQ ID NO: 1406 - protein, 566 aa, synthetic construct; identical to SEQ ID NO: 1387
  REGION 1..566: note = hemagglutinin__InfluenzaA__ABK40039

SEQ ID NO: 1407 - protein, 566 aa, synthetic construct; identical to SEQ ID NO: 1387
  REGION 1..566: note = hemagglutinin__InfluenzaA__ABK40050

SEQ ID NO: 1408 - protein, 566 aa, synthetic construct; identical to SEQ ID NO: 650
  REGION 1..566: note = hemagglutinin__InfluenzaA__ABK40061

SEQ ID NO: 1409 - protein, 566 aa, synthetic construct; identical to SEQ ID NO: 650
  REGION 1..566: note = hemagglutinin__InfluenzaA__ABK40075

SEQ ID NO: 1410 - protein, 566 aa, synthetic construct; identical to SEQ ID NO: 921
  REGION 1..566: note = hemagglutinin__InfluenzaA__ABK40510

SEQ ID NO: 1411 - protein, 566 aa, synthetic construct; identical to SEQ ID NO: 921
  REGION 1..566: note = hemagglutinin__InfluenzaA__ABK40534

SEQ ID NO: 1412 - protein, 566 aa, synthetic construct
  REGION 1..566: note = hemagglutinin__InfluenzaA__ABK40546
MKAKLLVLLCALSATDADTICIGYHANNSTDTVDTVLEKNVTVTHSVNLLEDNHNGKLCKLKGIAPLQLGKCSIAGWILGNPECESLFSNKSWSYIAETPNSENGTCYPGYFADYEELREQLSSVSSFERFEIFPKESSWPKHNVTKGVTASCSHKGKSSFYRNLLWLTEKNGSYPNLSKSYVNNKEKEVLVLWGVHHPSNIEDQKTIYRKENAYVSVVSSHYNRRFTPEIAKRPKVRNQEGRINYYWTLLEPGDTIIFEANGNLIAPWYAFALSRGFGSGIITSNASMDECDAKCQTPQGAINSSLPFQNVHPVTIGECPKYVRSTKLRMVTGLRNIPSIQSRGLFGAIAGFIEGGWTGMIDGWYGYHHQNEQGSGYAADQKSTQNAINGITNKVNSIIEKMNTQFTAVGKEFNKLEKRMENLNKKVDDGFLDIWTYNAELLVLLENERTLDFHDSNVKNLYEKVKSQLKNNAKEIGNGCFEFYHKCNNECMESVKNGTYDYPKYSEESKLNREKIDGVKLESMGVYQILAIYSTVASSLVLLVSLGAISFWMCSNGSLQCRICI

SEQ ID NO: 1413 - protein, 566 aa, synthetic construct; identical to SEQ ID NO: 921
  REGION 1..566: note = hemagglutinin__InfluenzaA__ABK40557

SEQ ID NO: 1414 - protein, 566 aa, synthetic construct; identical to SEQ ID NO: 921
  REGION 1..566: note = hemagglutinin__InfluenzaA__ABK40568

SEQ ID NO: 1415 - protein, 566 aa, synthetic construct; identical to SEQ ID NO: 921
  REGION 1..566: note = hemagglutinin__InfluenzaA__ABK40579

SEQ ID NO: 1416 - protein, 566 aa, synthetic construct
  REGION 1..566: note = hemagglutinin__InfluenzaA__ABK40590
MKAKLLVLLCALSATDADTICIGYHANNSTDTVDTVLEKNVTVTHSVNLLEDNHNGKLCKLKGIAPLQLGKCSIAGWILGNPECESLFSKKSWSYIAETPNSENGTCYPGYFADYEELREQLSSVSSFERFEIFPKESSWPKHNVTKGVTASCSHKGKSSFYRNLLWLTEKNGSYPNLSKSYVNNKEKEVLVLWGVHHPSNIEDQKTIYRKENAYVSVVSSHYNRRFTPEIAKRPKVRNQEGRINYYWTLLEPGDTIIFEANGNLIAPWYAFALSRGFGSGIITSNASMDECDAKCQTPQGAINSSLPFQNVHPVTIGECPKYVRSTKLRMVTGLRNIPSIQSRGLFGAIAGFIEGGWTGMIDGWYGYHHQNEQGSGYAADQKSTQNAINGITNKVNSIIEKMNTQFTAVGKEFNKLEKRMENLNKKVDDGFLDIWTYNAELLVLLENERTLDFHDSNVKNLYEKVKNQLKNNAKEIGNGCFEFYHKCNNECMESVKNGTYDYPKYSEESKLNREKIDGVKLESMGVYQILAIYSTVASSLVLLVSLGAISFWMCSNGSLQCRICI

SEQ ID NO: 1417 - protein, 566 aa, synthetic construct; identical to SEQ ID NO: 921
  REGION 1..566: note = hemagglutinin__InfluenzaA__ABK40601

SEQ ID NO: 1418 - protein, 566 aa, synthetic construct; identical to SEQ ID NO: 650
  REGION 1..566: note = hemagglutinin__InfluenzaA__ABK40612

SEQ ID NO: 1419 - protein, 566 aa, synthetic construct
  REGION 1..566: note = hemagglutinin__InfluenzaA__ABK40623
MKTIIALSYILCLVFAQKLPVNDNSTATLCLGHHAVPNGTLVKTITNDHIEVTNATELVQSSSTGRICDSPHQILDGENCTLIDALLGDPHCDGFQNKEWDLFVERSTAYSNCYPYDVPDYASLRSLVASSGTLEFNNESFNWTGVAQNGTSSACKRRSIKSFFSRLNWLHQLKYKYPALNVTMPNNEKFDKLYIWGVHHPSTDSDQISLYAQASGRVTVSTKRSQQTVIPNIGSRPWVRGVSSRISIYWTIVKPGDILLINSTGNLIAPRGYFKIRSGKSSIMRSNAPIGKCNSECITPNGSIPNDKPFQNVNRIAYGACPRYVKQNTLKLATGMRNVPEKQTRGIFGAIAGFIENGWEGMVDGWYGFRHLNSEGTGQAADLKSTQAAINQINGKLNRLIEKTNEKFHQIEKEFSEVEGRIQDLEKYVKDTKIDLWSYNAELLVALENQHTIDLTDSEMNKLFERTRKQLRENAEDVGNGCFKIYHKCDNACIGSIRNGTYDHDVYRDEALNNRFQIKGVELKSGYKDWILWISFAISCFLLCVVLLGFIMWACQKGNIRCNICI

SEQ ID NO: 1420 - protein, 566 aa, synthetic construct; identical to SEQ ID NO: 984
  REGION 1..566: note = hemagglutinin__InfluenzaA__ABK40645

SEQ ID NO: 1421 - protein, 566 aa, synthetic construct
  REGION 1..566: note = hemagglutinin__InfluenzaA__ABK40656
MKTIIALSYILCLVFAQKLPGNDNSTATLCLGHHAVPNGTLVKTITNDQIEVTNATELVQSSPTGRICDSPHRILDGKNCTLIDALLGDPHCDGFQNKEWDLFVERSKAYSNCYPYDVPDYASLRSLVASSGTLEFTNENFNWTGVAQDGKSYSCKRGSVNSFFSRLNWLHKLEYKYPALNVTMPNNGKFDKLYIWGVHHPSTDSDQTSLYVRASGKVTVSTKRSQQTVIPDIGYRPWVRGLSSRISIYWTIVKPGDILLINSTGNLIAPRGYFKIRNGKSSIMRSDAPIGNCSSECITPNGSIPNDKPFQNVNRITYGTCPRYVKQNTLKLATGMRNVPEKQTRGIFGAIAGFIENGWEGMVDGWYGFRHQNSEGTGQAADLKSTQAAIDQINGKLNRLVEKTNEKFHQIEKEFSEVEGRIQDLEKYVEDTKIDLWSYNAELLVALENQHTIDLTDSEMNKLFERTRKQLRENAEDMGNGCFKIYHKCDNACIGSIRNGTYDHDVYRDEALNNRFQIKGVELKSGYKDWILWISFAISCFLLCVVLLGFIMWACQKGNIRCNICI

SEQ ID NO: 1422 - protein, 566 aa, synthetic construct
  REGION 1..566: note = hemagglutinin__InfluenzaA__ABK40667
MKTIIALSYILCLVFAQKLPGNDNSTATLCLGHHAVPNGTLVKTITNDQIEVTNATELVQSSSTGRICDSPHRILDGKNCTLIDALLGDPHCDGFQNKEWDLFVERSKAYSNCYPYDVPDYASLRSLVASSGTLEFTNEGFNWTGVAQDGKSYACKRGSVNSFFSRLNWLHKLEYKYPALNVTMPNNDKFDKLYIWGVHHPSTDSDQTSLYVQASGRVTVSTKRSQQTVIPNIGSRPWVRGISSRISIYWTIVKPGDILLINSTGNLIAPRGYFKLRNGKSSIMRSDAPIDNCNSECITPNGSIPNDKPFQNVNRITYGACPRYVKQNTLKLATGMRNVPEKQTRGIFGAIAGFIENGWEGMVDGWYGFRHQNSEGTGQAADLKSTQAAIDQINGKLNRLTEKTNEKFHQIEKEFSEVEGRIQDLEKYVEDTKIDLWSYNAELLVALENQHTIDLTDSEMNKLFERTRKQLRENAEDMGNGCFKIYHKCDNACIGSIRNGTYNHDVYRDEALNNRFQIKGVELKSGYKDWILWISFAISCFLLCVVLLGFIMWACQKGNIRCNICI

SEQ ID NO: 1423 - protein, 566 aa, synthetic construct; identical to SEQ ID NO: 1066
  REGION 1..566: note = hemagglutinin__InfluenzaA__ABK40678

SEQ ID NO: 1424 - protein, 565 aa, synthetic construct
  REGION 1..565: note = hemagglutinin__InfluenzaA__ABK40689
MKVKLLVLLCTFTATYADTICIGYHANNSTDTVDTVLEKNVTVTHSVNLLEDSHNGKLCLLKGIAPLQLGNCSVAGWILGNPECELLISKESWSYIVETPNPENGTCYPGYFADYEELREQLSSVSSFERFEIFPKESSWPNHTVTGVSASCSHNGKSSFYRNLLWLTGKNGLYPNLSKSYANNKEKEVLVLWGVHHPPNIGNQRALYHTENAYVSVVSSHYSRRFTPEIAKRPKVRDQEGRINYYWTLLEPGDTIIFEANGNLIAPRFAFALSRGFGSGIITSNAPMDECDAKCQTPQGAINSSLPFQNVHPVTIGECPKYVRSAKLRMATGLRNIPSIQSRGLFGAIAGFIEGGWTGMVDGWYGYHHQNEQGSGYAADQKSTQNAINGITNKVNSVIEKMNTQFTAVGKEFSKLERRMENLNKKVDDGFLDIWTYNAELLVLLENERTLDFHDSNVKNLYEKVKSQLKNNAKEIGNGCFEFYHKCNDECMESVKNGTYDYPKYSEESKLNREKIDGVKLESMGVYQILAIYSTVASSLVLLVSLGAISFWMCSNGSLQCRICI

SEQ ID NO: 1425 - protein, 566 aa, synthetic construct; identical to SEQ ID NO: 650
  REGION 1..566: note = hemagglutinin__InfluenzaA__ABK40700

SEQ ID NO: 1426 - protein, 566 aa, synthetic construct; identical to SEQ ID NO: 650
  REGION 1..566: note = hemagglutinin__InfluenzaA__ABK40711

SEQ ID NO: 1427 - protein, 566 aa, synthetic construct
  REGION 1..566: note = hemagglutinin__InfluenzaA__ABK40722
MKTIIALSYILCLVFAQKLPGNDNSTATLCLGHHAVPNGTLVKTITNDQIEVTNATELVQSSSTGGICDSPHQILDGENCTLIDALLGDPHCDGFQNKEWDLFVERSKAYSNCYPYDVPDYASLRSLVASSGTLEFNNESFNWTGVAQNGTSSACKRRSNKSFFSRLNWLHQLKYKYPALNVTMPNNEKFDKLYIWGVHHPSTDNDQISLYAQAPGRVTVSTKRSQQTVIPNIGSRPWVRGVSSRISIYWTIVKPGDILLINCTGNLIAPRGYFKIRSGKSSIMRSDASIGKCNSECITPNGSIPNDKPFQNVNRITYGACPRYVKQNTLKLATGMRNVPEKQTRGIFGAIAGFIENGWEGMVDGWYGFRHQNSEGTGQAADLKSTQAAINQINGKLNRLIEKTNEKFHQIEKEFSEVEGRIQDLEKYVEDTKIDLWSYNAELLVALENQHTIDLTDSEMNKLFERTKKQLRENAEDMGNGCFKIYHKCDNACIGSIRNGTYDHDVYRDEALNNRFQIKGVELKSGYKDWILWISFAISCFLLCVVLLGFIMWACQKGNIRCNICI

SEQ ID NO: 1428 - protein, 566 aa, synthetic construct; identical to SEQ ID NO: 650
  REGION 1..566: note = hemagglutinin__InfluenzaA__ABK40733

SEQ ID NO: 1429 - protein, 566 aa, synthetic construct; identical to SEQ ID NO: 1305
  REGION 1..566: note = hemagglutinin__InfluenzaA__ABK40744

SEQ ID NO: 1430 - protein, 566 aa, synthetic construct; identical to SEQ ID NO: 915
  REGION 1..566: note = hemagglutinin__InfluenzaA__ABK79948

SEQ ID NO: 1431 - protein, 565 aa, synthetic construct; identical to SEQ ID NO: 1204
  REGION 1..565: note = hemagglutinin__InfluenzaA__ABK79959

SEQ ID NO: 1432 - protein, 566 aa, synthetic construct
  REGION 1..566: note = hemagglutinin__InfluenzaA__ABK79970
MKAKLLVLLCAFTATYADTICIGYHANNSTDTVDTVLEKNVTVTHSVNLLEDSHNGKLCRLKGTAPLQLGNCSIAGWILGNPECESLFSKKSWSYIAETPNPKNGTCYPGYFADYEELREQLSSVSSFERFEIFPKDSSWPNHTVTKGVTASCSHNGKSSFYKNLLWLTEKNGLYPNLSKSYVNKKGKEVLVLWGVHHPSNMGDQRAIYHKENAYVSVLSSHYSRRFTPEIARRPKVRDQEGRINYYWTLLEPGDTIIFEANGNLIAPWYAFALSRGFGSGIIISNASMGECDAKCQTPQGAINSSLPFQNVHPVTIGECPKYVRSTKLRMVTGLRNVPSIQSRGLFGAIAGFIEGGWTGMIDGWYGYHHQNEQGSGYAADQKSTQNAINGITNKVNSIIEKMNTQFTAVGKEFNKLERRMENLNKKVDDGFLDIWTYNAELLVLLENERTLDFHDSNVKNLYEKVKNQLKNNAKEIGNGCFEFYHKCNNECMESVKNGTYDYPKYSKESKLNREKIDGVKLESMGVYQILAIYSTVASSLVLLVSLGAISFWMCSNGSLQCRICI

SEQ ID NO: 1433 - protein, 566 aa, synthetic construct
  REGION 1..566: note = hemagglutinin__InfluenzaA__ABK79981
MKTIIALSYILCLVFTQKLPGNDNSTATLCLGHHAVPNGTLVKTITNDQIEVTNATELVQSSSTGGICDSPHQILDGENCTLIDALLGDPHCDGFQNKEWDLFVERSKAYSNCYPYDVPDYASLRSLVASSGTLEFNNESFNWTGVAQNGTSSACKRRSNKSFFSRLNWLHQLKYKYPALNVTMPNNEKFDKLYIWGVHHPSTDSDQISLYAQAPGRVTVSTKRSQQTVIPNIGSRPWVRGVSSRISIYWTIVKPGDILLINCTGNLIAPRGYFKIRSGKSSIMRSDASIGKCNSECITPNGSIPNDKPFQNVNRITYGACPRYVKQNTLKLATGMRNVPEKQTRGIFGAIAGFIENGWEGMVDGWYGFRHQNSEGTGQAADLKSTQAAINQINGKLNRLIEKTNEKFHQIEKEFSEVEGRIQDLEKYVEDTKIDLWSYNAELLVALENQHTIDLTDSEMNKLFERTKKQLRENAEDMGNGCFKIYHKCDNACIGSIRNGTYDHDVYRDEALNNRFQIKGVELKSGYKDWILWISFAISCFLLCVVLLGFIMWACQKGNIRCNICI

SEQ ID NO: 1434 - protein, 566 aa, synthetic construct; identical to SEQ ID NO: 650
  REGION 1..566: note = hemagglutinin__InfluenzaA__ABK79992

SEQ ID NO: 1435 - protein, 566 aa, synthetic construct; identical to SEQ ID NO: 921
  REGION 1..566: note = hemagglutinin__InfluenzaA__ABK80025

SEQ ID NO: 1436 - protein, 566 aa, synthetic construct; identical to SEQ ID NO: 921
  REGION 1..566: note = hemagglutinin__InfluenzaA__ABK80036

SEQ ID NO: 1437 - protein, 566 aa, synthetic construct; identical to SEQ ID NO: 921
  REGION 1..566: note = hemagglutinin__InfluenzaA__ABK80047

SEQ ID NO: 1438 - protein, 566 aa, synthetic construct; identical to SEQ ID NO: 766
  REGION 1..566: note = hemagglutinin__InfluenzaA__ABK80058

SEQ ID NO: 1439 - protein, 566 aa, synthetic construct
  REGION 1..566: note = hemagglutinin__InfluenzaA__ABK80069
MKTIIALSYILCLVFAQKLPVNDNSTATLCLGHHAVPNGTLVKTITNDHIEVTNATELVQSSSTGRICDSPHQILDGENCTLIDALLGDPHCDGFQNKEWDLFVERSTAYSNCYPYDVPDYASLRSLVASSGTLEFNNESFNWTGVAQNGTSSACKRRSIKSFFSRLNWLHQLKYKYPALNVTMPNNEKFDKLYIWGVHHPSTDSDQISLYAQASGRVTVSTKRSQQTVIPNIGSRPWIRGVSSRISIYWTIVKPGDILLINSTGNLIAPRGYFKIRSGKSSIMRSNAPIGKCNSECITPNGSIPNDKPFQNVNRIAYGACPRYVKQNTLKLATGMRNVPEKQTRGIFGAIAGFIENGWEGMVDGWYGFRHLNSEGTGQAADLKSTQAAINQINGKLNRLIEKTNEKFHQIEKEFSEVEGRIQDLEKYVEDTKIDLWSYNAELLVALENQHTIDLTDSEMNKLFERTRKQLRENAEDVGNGCFKIYHKCDNACIGSIRNGTYDHDVYRDEALNNRFQIKGVELKSGYKDWILWISFAISCFLLCVVLLGFIMWACQKGNIRCNICI

SEQ ID NO: 1440 - protein, 566 aa, synthetic construct
  REGION 1..566: note = hemagglutinin__InfluenzaA__ABK80080
MKTIIALSYILCLVFAQKLPVNDNSTATLCLGHHAVPNGTLVKTITNDHIEVTNATELVQSSSTGRICDSPHQILDGENCTLIDALLGDPHCDGFQNKEWDLFVERSTAYSNCYPYDVPDYASLRSLVASSGTLEFNNESFNWTGVAQNGTSSACKRRSIKSFFSRLNWLHQLKYKYPALNVTMPNNEKFDKLYIWGVHHPSTDSDQISLYAQASGRVTVSTKRSQQTVIPNIGSRPWVRGVSSRISIYWTIVKPGDILLINSTGNLIAPRGYFKIRSGKSSIMRSNAPIGKCNSECITPNGSIPNDKPFQNVNRITYGACPRYVKQNTLKLATGMRNVPEKQTRGIFGAIAGFIENGWEGMVDGWYGFRHQNSEGTGQAADLKSTQAAINQINGKLNRLIEKTNEKFHQIEKEFSEVEGRIQDLEKYVEDTKIDLWSYNAELLVALENQHTIDLTDSEMNKLFERTRKQLRENAEDMGNGCLKIYHKCDNACIGSIRNGTYDHDVYRDEALNNRFQIKGVELKSGYKDWILWISFAISCFLLCVVLLGFIMWACQKGNIRCNICI

SEQ ID NO: 1441 - protein, 566 aa, synthetic construct; identical to SEQ ID NO: 650
  REGION 1..566: note = hemagglutinin__InfluenzaA__ABK80091

SEQ ID NO: 1442 - protein, 566 aa, synthetic construct; identical to SEQ ID NO: 650
  REGION 1..566: note = hemagglutinin__InfluenzaA__ABK80102

SEQ ID NO: 1443 - protein, 566 aa, synthetic construct; identical to SEQ ID NO: 51
  REGION 1..566: note = hemagglutinin__InfluenzaA__ABK80113

SEQ ID NO: 1444 - protein, 566 aa, synthetic construct
  REGION 1..566: note = hemagglutinin__InfluenzaA__ABK80124
MKTIIALSYILCLVFAQKLPGNDNSTATLCLGHHAVPNGTLVKTITNDQIEVTNATELVQSSSTGRICDSPHQILDGENCTLIDALLGDPHCDGFQNKEWDLFVERSKAYSNCYPYDVPDYVSLRSLVASSGTLEFNNESFNWTGVAQNGTSSACKRRSDKSFFSRLNWLHQLKYKYPALNVTMPNNEKFDKLYIWGVHHPGTDSDQISLYAQASGRVTVSTKRSQQTVIPNIGSRPWVRGVSSRISIYWTIVKPGDILLINSTGNLIAPRGYFKIRSGKSSIMRSDAPIGKCNSECITPNGSIPNDKPFQNVNRITYGPCPRYVKQNTLKLATGMRNVPEKQTRGIFGAIAGFIENGWEGMMDGWYGFRHQNSEGTGQAADLKSTQAAINQINGKLNRLIEKTNEKFHQIEKEFSEVEGRIQDLEKYVEDTKIDLWSYNAELLVALENQHTIDLTDSEMNKLFERTKKQLRENAEDMGNGCFKIYHKCDNACIGSIRNGTYDHDVYRDEALNNRFQIKGVELKSGYKNWILWISFAISCFLLCIVLLGFIMWACQKGNIRCNICI

SEQ ID NO: 1445 - protein, 566 aa, synthetic construct; identical to SEQ ID NO: 51
  REGION 1..566: note = hemagglutinin__InfluenzaA__ABK80135

SEQ ID NO: 1446 - protein, 566 aa, synthetic construct; identical to SEQ ID NO: 51
  REGION 1..566: note = hemagglutinin__InfluenzaA__ABK80146

SEQ ID NO: 1447 - protein, 566 aa, synthetic construct; identical to SEQ ID NO: 51
  REGION 1..566: note = hemagglutinin__InfluenzaA__ABK80157

SEQ ID NO: 1448 - protein, 566 aa, synthetic construct; identical to SEQ ID NO: 562
  REGION 1..566: note = hemagglutinin__InfluenzaA__ABK80168

SEQ ID NO: 1449 - protein, 566 aa, synthetic construct
  REGION 1..566: note = hemagglutinin__InfluenzaA__ABK80179
MKTIIALSYILCLVFAQKLPGNDNSTATLCLGHHAVPNGTLVKTITNDQIEVTNATELVQSSSTGRICDSPHQILDGENCTLIDALLGDPHCDGFQNKEWDLFVERSKAYSNCYPYDVPDYVSLRSLVASSGTLEFNNESFNWTGVAQNGTSSACKRRSDKSFFSRLNWLHQLKYKYPALNVTMPNNEKFDKLYIWGVHHPGTDSDQISLYAQASGRVTVSTKRSQQTVIPNIGSRPWVRGVSSRISIYWTIVKPGDILLINSTGNLIAPRGYFKIRSGKSSIMRSDAPIGKCNSECITPNGSVPNDKPFQNVNRITYGACPRYVKQNTLKLATGMRNVPEKQTRGIFGAIAGFIENGWEGMMDGWYGFRHQNSEGTGQAADLKSTQAAINQINGKLNRLIEKTNEKFHQIEKEFSEVEGRIQDLEKYVEDTKIDLWSYNAELLVALENQHTIDLTDSEMNKLFERTKKQLRENAEDMGNGCFKIYHKCDNACIGSIRNGTYDHDVYRDEALNNRLQIKGVELKSGYKDWILWISFAISCFLLCIVLLGFIMWACQKGNIRCNICI

SEQ ID NO: 1450 - protein, 566 aa, synthetic construct; identical to SEQ ID NO: 562
  REGION 1..566: note = hemagglutinin__InfluenzaA__ABK80190

SEQ ID NO: 1451 - protein, 566 aa, synthetic construct; identical to SEQ ID NO: 1305
  REGION 1..566: note = hemagglutinin__InfluenzaA__ABK80201

SEQ ID NO: 1452 - protein, 566 aa, synthetic construct
  REGION 1..566: note = hemagglutinin__InfluenzaA__ABK80212
MKTIIALSYILCLVFAQKLPGNDNSTATLCLGHHAVPNGTIVKTITNDQIEVTNATELVQSSSTGGICDSPHQILDGENCTLIDALLGDPQCDGFQNKKWDLFVERSKAYSNCYPYDVPDYASLRSLVASSGTLEFNNESFDWTGVTQNGTSSACKRRSNKSFFSRLNWLTHLKYKYPALNVTMPNNEKFDKLYIWGVHHPGTDSDQISLYAQASGRITVSTKRSQQTVIPNIGSRPRVRDVSSRISIYWTIVKPGDILLINSTGNLIAPRGYFKIRSGKSSIMRSDAPIGKCNSECITPNGSIPNDKPFQNVNRITYGACPRYVKQNTLKLATGMRNVPEKQTRGIFGAIAGFIENGWEGMVDGWYGFRHQNSEGTGQAADLKSTQAAINQINGKLNRLIGKTNEKFHQIEKEFSEVEGRIQDLEKYVEDTKIDLWSYNAELLVALENQHTIDLTDSEMNKLFERTKKQLRENAEDMGNGCFKIYHKCDNACIGSIRNGTYDHDVYRDEALNNRFQIKGVELKSGYKNWILWISFAISCFLLCVALLGFIMWACQKGNIRCNICI

SEQ ID NO: 1453 - protein, 566 aa, synthetic construct; identical to SEQ ID NO: 516
  REGION 1..566: note = hemagglutinin__InfluenzaA__ABK80223

SEQ ID NO: 1454 - protein, 566 aa, synthetic construct
  REGION 1..566: note = hemagglutinin__InfluenzaA__ABK80234
MRTIIALSYILCLVFAQKLPGNDNSTATLCLGHHAVPNGTIVKTITNDQIEVTNATELVQSSSTGGICDSPHQILDGENCTLIDALLGDPQCDGFQNKKWDLFVERSKAYSNCYPYDVPDHASLRSLVASSGTLEFNNESFDWTGVTQNGTSSACKRRSNKSFFSRLNWLTHLKYKYPALNVTMPNNEKFDKLYIWGVHHPGTDSDQISLYAQASGRITVSTKRSQQTVIPNIGSRPRVRDVSSRISIYWTIVKPGDILLINSTGNLIAPRGYFKIRSGKSSIMRSDAPIGKCNSECITPNGSIPNDKPFQNVNRITYGACPRYVKQNTLKLATGMRNVPEKQTRGIFGAIAGFIENGWEGMVDGWYGFRHQNSEGTGQAADLKSTQAAINQINGKLNRLIGKTNEKFHQIEKEFSEVEGRIQDLEKYVEDTKIDLWSYNAELLVALENQHTIDLTDSEMNKLFERTKKQLRENAEDMGNGCFKIYHKCDNACIGSIRNGTYDHDVYRDEALNNRFQIKGVELKSGYKDWILWISFAISCFLLCVALLGFIMWACQKGNIRCNICI

SEQ ID NO: 1455 - protein, 566 aa, synthetic construct
  REGION 1..566: note = hemagglutinin__InfluenzaA__ABK80245
MKTIIALSYILCLVFAQKLPGNDNSTATLCLGHHAVPNGTIVKTITNDQIEVTNATELVQSSSTGGICDSPHQILDGENCTLIDALLGDPQCDGFQNKKWDLFVERSKAHSNCYPYDVPDYASLRSLIASSGTLEFNNESFNWTGVTQNGTSSACKRRSNQSFFSRLNWLTHLKFKYPALNVTMPNNEKFDKLYIWGVHHPGTDSDQISLYAQAPGRITVSTKRSQQTVIPNIGSRPRVRDISSRISIYWTIVKPGDILLINSTGNLIAPRGYFKIRSGKSSIMKSDAPIGKCNSECITPNGSIPNDKPFQNVNRITYGACPRYVKQNTLKLATGMRNVPEKQTRGIFGAIAGFIENGWEGMVDGWYGFRHQNSEGTGQAADLKSTQAAINQINGKLNRLIGKTNEKFHQIEKEFSEVEGRIQDLEKYVEDTKIDLWSYNAELLVALENQHTIDLTDSEMNKLFERTKKQLRENAEDMGNGCFKIYHKCDNACIGSIRNGTYDHDVYRDEALNNRFQIKGVELKSGYKDWILWISFAISCLLLCVALLGFIMWACQKGNIRCNICI

SEQ ID NO: 1456 - protein, 566 aa, synthetic construct; identical to SEQ ID NO: 1455
  REGION 1..566: note = hemagglutinin__InfluenzaA__ABK80256

SEQ ID NO: 1457 - protein, 566 aa, synthetic construct; identical to SEQ ID NO: 612
  REGION 1..566: note = hemagglutinin__InfluenzaA__ABK80267

SEQ ID NO: 1458 - protein, 566 aa, synthetic construct; identical to SEQ ID NO: 633
  REGION 1..566: note = hemagglutinin__InfluenzaA__ABK80278

SEQ ID NO: 1459 - protein, 566 aa, synthetic construct
  REGION 1..566: note = hemagglutinin__InfluenzaA__ABK80289
MKTIIALSYILCLVFAQKLPGNDNSTATLCLGHHAVPNGTIVKTITNDQIEVTNATELVQSSSTGGICDSPHQILDGENCTLIDALLGDPQCDGFQNKKWDLFVERSKAYSNCYPYDVPDYASLRSLVASSGTLEFNNESFNWTGVTQNGTSSACKRRSNNSFFSRLNWLTHLKFKYPALNVTMPNNEKFDKLYIWGVHHPGTDNDQIFLYAQASGRITVSTKRSQQTVIPNIGSRPRVRNIPSRISIYWTIVKPGDILLINSTGNLIAPRGYFKIRSGKSSIMRSDAPIGKCNSECITPNGSIPNDKPFQNVNRITYGACPRYVKQNTLKLATGMRNVPEKQTRGIFGAIAGFIENGWEGMVDGWYGFRHQNSEGTGQAADLKSTQAAINQINGKLNRLIGKTNEKFHQIEKEFSEVEGRIQDLEKYVEDTKIDLWSYNAELLVALENQHTIDLTDSEMNKLFERTKKQLRENAEDMGNGCFKIYHKCDNACIGSIRNGTYDHDVYRDEALNNRFQIKGVELKSGYKDWILWISFAISCFLLCVALLGFIMWACQKGNIRCNICI

SEQ ID NO: 1460 - protein, 566 aa, synthetic construct; identical to SEQ ID NO: 51
  REGION 1..566: note = hemagglutinin__InfluenzaA__ABK80300

SEQ ID NO: 1461 - protein, 566 aa, synthetic construct; identical to SEQ ID NO: 51
  REGION 1..566: note = hemagglutinin__InfluenzaA__ABK80311

SEQ ID NO: 1462 - protein, 568 aa, synthetic construct
  REGION 1..568: note = hemagglutinin__InfluenzaA__ABL07019
MEKIVLLLSIVSLVKSDQICIGYHANNSTEQVDTIMEKNVTVTHAQDILEKTHNGKLCDLDGVKPLILRDCSVAGWLLGNPMCDEFINVPEWSYIVEKANPTNDLCYPGSFNDYEELKHLLSRINHFEKIQIIPKSSWSDHEASSGVSSACPYLGSPSFFRNVVWLTKKNSTYPTIKKSYNNTNQEDLLVLWGIHHPNNEAEQTRLYQNPTTYISIGTSTLNQRLVPKIATRSKVNGQSGRMEFFWTILKPNDAINFESNGNFIAPEYAYKIVKKGDSAIMKSELEYSNCNTKCQTPMGAINSSMPFHNIHPLTIGECPKYVKSNRLVLATGLRNSPQRESRRKKRGLFGAIAGFIEGGWQGMVDGWYGYHHSNEQGSGYAADKESTQKAIDGVTNKVNSIIDKMNTQFEAVGREFNNLERRIENLNKKMEDGFLDVWTYNAELLVLMENERTLDFHDSNVKNLYDKVRLQLRDNAKELGNGCFEFYHKCDNECMESIRNGTYNYPQYSEEARLKREEISGVKLESIGTYQILSIYSTVASSLALAIMIAGLSLWMCSNGSLQCRICI

SEQ ID NO: 1463 - protein, 568 aa, synthetic construct
  REGION 1..568: note = hemagglutinin__InfluenzaA__ABL07030
MEKIVLLLAIVSLVKSDQICIGYHANNSTEQVDTIMEKNVTVTHAQDILEKTHNGKLCDLDGVKPLILRDCSVAGWLLGNPMCDEFINVPEWSYIVEKANPTNDLCYPGSFNDYEELKHLLSRINHFEKIQIIPKSSWSDHEASSGVSSACPYLGSPSFFRNVVWLIKKNSTYPTIKKSYNNTNQEDLLVLWGIHHPNDAAEQTRLYQNPTTYISIGTSTLNQRLVPKIATRSKVNGQSGRMEFFWAILKPNDAINFESNGNFIAPEYAYKIVKKGDSAIMKSELEYGNCNTKCQTPMGAINSSMPFHNIHPLTIGECPKYVKSNRLVLATGLRNSPQRESRRKKRGLFGAIAGFIEGGWQGMVDGWYGYHHSNEQGSGYAADKESTQKAIDGVTNKVNSIIDKMNTQFEAVGREFNNLERRIENLNKKMEDGFLDVWTYNAELLVLMENERTLDFHDSNVKNLYDKVRLQLRDNAKELGNGCFEFYHKCDNECMESIRNGTYNYPQYSEEARLKREEISGVKLESIGTYQILSIYSTVASSLALAIMIAGLSLWMCSNGSLQCRICI

SEQ ID NO: 1464 - protein, 568 aa, synthetic construct
  REGION 1..568: note = hemagglutinin__InfluenzaA__ABL10088
MEKIVLLFAIVSLVKSDQICIGYHANNSTEQVDTIMEKNVTVTHAQDILEKTHNGKLCDLDGVKPLILRDCSVAGWLLGNPMCDEFINVPEWSYIVEKANPVNDLCYPGDFNDYEELKHLLSRINHFEKIQIIPKSSWSSHEASLGVSSACPYQGKSSFFRNVVWLIKKNSTYPTIKRSYNNTNQEDLLVLWGIHHPNDAAEQTKLYQNPTTYISVGTSTLNQRLVPRIATRSEVNGQSGRMEFFWTILKPNDAINFESNGNFVAPEYAYKIVKKGDSTIMKSELEYGNCNTKCQTPMGAINSSMPFHNIHPLTIGECPKYVKSNRLVLATGLRNSPQRERRRKKRGLFGAIAGFIEGGWQGMVDGWYGYHHSNEQGSGYAANKESTQKAIDGVTNKVNSIIDKMNTQFEAVGREFNNLERRIENLNKKMEDGFLDVWTYNAELLVLMENERTLDFHDSNVKNLYDKVRLQLRDNAKELGNGCFEFYHKCDNECMESVRNGTYDYPQYSEEARLKREEISGVKLESIGIYQILSIYSTVASSLALAIMVAGLSLWMCSNGSLQCRICI

SEQ ID NO: 1465 - protein, 568 aa, synthetic construct
  REGION 1..568: note = hemagglutinin__InfluenzaA__ABL31766
MEKIVLLLAIVSFVKSDQICIGYHANNSTEQVDTIMEKNVTVTHAQDILEKTHNGKLCDLDGVKPLILRDCSVAGWLLGNPMCDEFINVPEWSYIVEKANPTNDLCYPGSFNDYEELKHLLSRINHFEKIQIIPKSSWSDHEASSGVSSACPYLGSPSFFRNVVWLIKKNSTYPTIKKSYNNTNQEDLLVLWGIHHPNDAAEQTRLYQNPTTYISIGTSTLNQRLVPKIATRSKVNGQSGRMEFFWAILKPNDAINFESNGNFIAPEYAYKIVKKGDSAIMKSELEYGNCNTKCQTPMGAINSSMPFHNIHPLTIGECPKYVKSNRLVLATGLRNSPQRESRRKKRGLFGAIAGFIEGGWQGMVDGWYGYHHSNEQGSGYAADKESTQKAIDGVTNKVNSIIDKMNTQFEAVGREFNNLERRIENLNKKMEDGFLDVWTYNAELLVLMENERTLDFHDSNVKNLYDKVRLQLRDNAKELGNGCFEFYHKCDNECMESIRNGTYNYPQYSEEARLKREEISGVKLESIGTYQILSIYSTVASSLALAIMIAGLSLWMCSNGSLQCRICI

SEQ ID NO: 1466 - protein, 568 aa, synthetic construct
  REGION 1..568: note = hemagglutinin__InfluenzaA__ABL31780
MEKIVLLLSIVSLVKSDQICIGYHANNSTEQVDTIMEKNVTVTHAQDILEKTHNGKLCDLDGVKPLILRDCSVAGWLLGNPMCDEFINVPEWSYIVEKANPTNDLCYPGSFNDYEELKHLLSRINHFEKIQIIPKGSWSDHEASSGVSSACPYLRSPSFFRNVVWLIKKNSTYPTIKKSYNNTNQEDLLVLWGIHHPNNEAEQTRLYQNPTTYISIGTSTLNQRLVPKIATRSKVNGQSGRMEFFWTILKPNDAINFESNGNFIAPEYAYKIVKKGDSAIMKSELEYGNCNTKCQTPMGAINSSMPFHNIHPLTIGECPKYVKSNRLVLATGLRNSPQRESRRKKRGLFGAIAGFIEGGWQGMVDGWYGYHHSNEQGSGYAADKESTQKAIDGVTNKVNSIIDKMNTQFEAVGREFNNLERRIENLNKKMEDGFLDVWTYNAELLVLMENERTLDFHDSNVKNLYDKVRLQLRDNAKELGNGCFEFYHKCDNECMESIRNGTYNYPQYSEEARLKREEISGVKLESIGTYQILSIYSTVASSLALAIMIAGLSLWMCSNGSLQCRICI

SEQ ID NO: 1467 - protein, 566 aa, synthetic construct
  REGION 1..566: note = hemagglutinin__InfluenzaA__ABL67165
MKTIIALSYILCLVFAQKLPGNDNSTATLCLGHHAVPNGTIVKTITNDQIEVTNATELVQSSSTSGICDSPHQILDGENCTLIDALLGDPQCDGFQNKKWDLFVERSKAYSNCYPYDVPDHASLRSLVASSGTLEFNNESFDWTGVTQNGTSSACKRRSNKSFFSRLNWLTHLKYKYPALNVTMPNNEKFDKLYIWGVHHPGTDSDQISLYAQASGRITVSTKRSQQTVIPNIGSRPRVRDVSSRISIYWTIVKPGDILLINSTGNLIAPRGYFKIRSGKSSIMRSDAPIGKCNSECITPNGSIPNDKPFQNVNRITYGACPRYVKQNTLKLATGMRNVPEKKTRGIFGAIAGFIENGWEGMVDGWYGFRHQNSEGTGQAADLKSTQAAINQINGKLNRLIGKTNEKFHQIEKEFSEVEGRIQDLEKYVEDTKIDLWSYNAELLVALENQHTIDLTDSEMNKLFERTKKQLRENAEDMGNGCFKIYHKCDNACIGSIRNGTYDHDVYRDEALNNRFQIKGVELKSGYKDWILWISFAISCFLLCVALLGFIMWACQKGNIRCNICI

SEQ ID NO: 1468 - protein, 566 aa, synthetic construct
  REGION 1..566: note = hemagglutinin__InfluenzaA__ABL67176
MKTIIALSYILCLVFTQKLPGNDNSTATLCLGHHAVPNGTLVKTITNDQIEVTNATELVQSSSTGGICDSPHQILDGENCTLIDALLGDPHCDGFQNKEWDLFVERSRAYSNCYPYDVPDYASLRSLVASSGTLEFNNESFNWTGVAQNGTSSACKRRSNKSFFSRLNWLHQLKYKYPALNVTMPNNEKFDKLYIWGVHHPSTDSDQISLYAQAPGRVTVSTKRSQQTVIPNIGSRPWVRGVSSRISIYWTIVKPGDILLINCTGNLIAPRGYFKIRSGKSSIMRSDASIGKCNSECITPNGSIPNDKPFQNVNRITYGACPRYVKQNTLKLATGMRNVPEKQTRGIFGAIAGFIENGWEGMVDGWYGFRHQNSEGTGQAADLKSTQAAINQINGKLNRLIEKTNEKFHQIEKEFSEVEGRIQDLEKYVEDTKIDLWSYNAELLVALENQHTIDLTDSEMNKLFERTKKQLRENAEDMGNGCFKIYHKCDNACIGSIRNGTYDHDVYRDEALNNRFQIKGVELKSGYKDWILWISFAISCFLLCVVLLGFIMWACQKGNIRCNICI

SEQ ID NO: 1469 - protein, 566 aa, synthetic construct; identical to SEQ ID NO: 1432
  REGION 1..566: note = hemagglutinin__InfluenzaA__ABL67187

SEQ ID NO: 1470 - protein, 566 aa, synthetic construct; identical to SEQ ID NO: 1387
  REGION 1..566: note = hemagglutinin__InfluenzaA__ABL67209

SEQ ID NO: 1471 - protein, 566 aa, synthetic construct; identical to SEQ ID NO: 921
  REGION 1..566: note = hemagglutinin__InfluenzaA__ABL67253

SEQ ID NO: 1472 - protein, 566 aa, synthetic construct
  REGION 1..566: note = hemagglutinin__InfluenzaA__ABL67264
MKAKLLVLLCALSATDADTICIGYHANNSTDTVDTVLEKNVTVTHSVNLLEDNHNGKLCKLKGIAPLQLGKCSIAGWILGNPECESLFSKKSWSYIAETPNSENGTCYPGYFADYEELREQLSSVSSFERFEIFPKESSWPKHNVTKGVTASCSHKGKSSFYRNLLWLTEKNGSYPNLSKSYVNNKEKEVLVLWGVHHPSNIEDQKTIYRKENAYVSVVSSHYNRRFTPEIAKRPKVRNQEGRINYYWTLLEPGDTIIFEANGNLIAPWYAFALSRGFGSGIITSNASMDECDAKCQTPQGAINSSFPFQNVHPVTIGECPKYVRSTKLRMVTGLRNIPSIQSRGLFGAIAGFIEGGWTGMIDGWYGYHHQNEQGSGYAADQKSTQNAINGITNKVNSIIEKMNTQFTAVGKEFNKLEKRMENLNKKVDDGFLDIWTYNAELLVLLENERTLDFHDSNVKNLYEKVKSQLKNNAKEIGNGCFEFYHKCNNECMESVKNGTYDYPKYSEESKLNREKIDGVKLESMGVYQILAIYSTVASSLVLLVSLGAISFWMCSNGSLQCRICI

SEQ ID NO: 1473 - protein, 566 aa, synthetic construct
  REGION 1..566: note = hemagglutinin__InfluenzaA__ABL67275
MKTIIALSYILCLVFAQKLPVNDNSTATLCLGHHAVPNGTLVKTITNDHIEVTNATELVQSSSTGRICDSPHQILDGENCTLIDALLGDPHCDGFQNKEWDLFVERSTAYSNCYPYDVPDYASLRSLVASSGTLEFNNESFNWTGVAQNGTSSACKRRSIKSFFSRLNWLHQLKYKYPALNVTMPNNEKFDKLYIWGVHHPSTDSDQISLYAQASGRVTVSTKRSQQTVIPNIGSRPWVRGVSSRISIYWTIVKPGDILLINSTGNLIAPRGYFKIRSGKSSIMRSNAPIGKCNSECITPNGSIPNDKPFQNVNRITYGACPRYVKQNTLKLATGMRNVPEKQTRGIFGAIAGFIENGWEGMVDGWYGFRHQNSEGTGQAADLKSTQAAINQINGKLNRLIEKTNEKFHQIEKEFSEVEGRIQDLEKYVEDTKIDLWSYNAELLVALENQHTIDLTDSEMNKLFERTRKQLRENAEDVGNGCFKIYHKCDNACIGSIRNGTYDHDVYRDEALNNRFQIKGVKLKSGYKDWILWISFAISCFLLCVVLLGFIMWACQKGNIRCNICI

SEQ ID NO: 1474 - protein, 566 aa, synthetic construct
  REGION 1..566: note = hemagglutinin__InfluenzaA__ABL67286
MKTIIALSYILCLVFAQKLPGNDNSTATLCLGHHAVPNGTLVKTITNDQIEVTNATELVQSSSTGRICDSPHQILDGENCTLIDALLGDPHCDGFQNKEWDLFVERSKAYSNCYPYDVPDYVSLRSLVASSGTLEFNNESFNWTGVAQNGTSSACKRRSDKSFFSRLNWLHQLKYKYPALNVTMPNNEKFDKLYIWGVHHPGTDSDQISLYAQASGRVTVSTKRSQQTVIPNIGSRPWVRGVSSRISIYWTIVKSGDILLINSTGNLIAPRGYFKIRSGKSSIMRSDAPIGKCNSECITPNGSIPNDKPFQNVNRITYGPCPRYVKQNTLKLATGMRNVPEKQTRGIFGAIAGFIENGWEGMMDGWYGFRHQNSEGTGQAADLKSTQAAINQINGKLNRLIEKTNEKFHQIEKEFSEVEGRIQDLEKYVEDTKIDLWSYNAELLVALENQHTIDLTDSEMNKLFERTKKQLRENAEDMGNGCFKIYHKCDNACIGSIRNGTYDHDVYRDEALNNRFQIKGVELKSGYKDWILWISFAISCFLLCIVLLGFIMWACQKGNIRCNICI

SEQ ID NO: 1475 - protein, 566 aa, synthetic construct; identical to SEQ ID NO: 1005
  REGION 1..566: note = hemagglutinin__InfluenzaA__ABL67297

SEQ ID NO: 1476 - protein, 566 aa, synthetic construct
  REGION 1..566: note = hemagglutinin__InfluenzaA__ABL67308
MKTIIALSYILCLVFAQKLPGNDNSMATLCLGHHAVPNGTLVKTITNDQIEVTNATELVQSSSTGRICDSPHQILDGENCTLIDALLGDPHCDGFQNKEWDLFVERSKAYSSCYPYDVPDYVSLRSLVASSGTLEFNNESFNWTGVAQNGTSSACKRRSDKSFFSRLNWLHQLKYKYPALNVTMPNNEKFDKLYIWGVHHPGTDSDQISLYAQASGRVTVSTKRSQQTVIPNIGSRPWVRGVSSRISIYWTIVKPGDILLINSTGNLIAPRGYFKIRSGKSSIMRSDAPIDKCNSECITPNGSIPNDKPFQNVNRITYGLCPRYVKQNTLKLATGMRNVPEKQTRGIFGAIAGFIENGWEGMMDGWYGFRHQNSEGTGQAADLKSTQAAINQINGKLNRLIEKTNEKFHQIEKEFSEVEGRIQDLEKYVEDTKIDLWSYNAELLVALENQHTIDLTDSEMNKLFERTKKQLRENAEDMGNGCFKIYHKCDNACIGSIRNGTYDHDVYRDEALNNRFQIKGVELKSGYKDWILWISFAISCFLLCIVLLGFIMWACQKGNVRCNICI

SEQ ID NO: 1477 - protein, 566 aa, synthetic construct; identical to SEQ ID NO: 562
  REGION 1..566: note = hemagglutinin__InfluenzaA__ABL67319

SEQ ID NO: 1478 - protein, 566 aa, synthetic construct; identical to SEQ ID NO: 1305
  REGION 1..566: note = hemagglutinin__InfluenzaA__ABL67330

SEQ ID NO: 1479 - protein, 566 aa, synthetic construct; identical to SEQ ID NO: 516
  REGION 1..566: note = hemagglutinin__InfluenzaA__ABL67341

SEQ ID NO: 1480 - protein, 566 aa, synthetic construct; identical to SEQ ID NO: 516
  REGION 1..566: note = hemagglutinin__InfluenzaA__ABL67352

SEQ ID NO: 1481 - protein, 566 aa, synthetic construct; identical to SEQ ID NO: 32
  REGION 1..566: note = hemagglutinin__InfluenzaA__ABL67363

SEQ ID NO: 1482 - protein, 566 aa, synthetic construct
  REGION 1..566: note = hemagglutinin__InfluenzaA__ABL67374
MKTIIALSYILCLVFAQKLPGNDNSTATLCLGHHAVPNGTIVKTITNDQIEVTNATELVQSSSTGGICDSPHQILDGENCTLIDALLGDPQCDGFQNKKWDLFVERSKAHSNCYPYDVPDYASLRSLIASSGTLEFNNESFNWTGVTQNGTSSACKRRSNQSFFSRLNWLTHLKFKYPALNVTMPNNEKFDKLYIWGVHHPGTDSDQISLYAQAPGRITVSTKRSQQTVIPNIGSRPRVRDISSRISIYWTIVKPGDILLINSTGNLIAPRGYFKMRSGKSSIMKSDAPIGKCNSECITPNGSIPNDKPFQNVNRITYGACPRYVKQNTLKLATGMRNVPEKQTRGIFGAIAGFIENGWEGMVDGWYGFRHQNSEGTGQAADLKSTQAAINQINGKLNRLIGKTNEKFHQIEKEFSEVEGRIQDLEKYVEDTKIDLWSYNAELLVALENQHTIDLTDSEMNKLFERTKKQLRENAEDMGDGCFKIYHKCDNACIGSIRNGTYDHDVYRDEALNNRFQIKGVELKSGYKDWILWISFAISCLLLCVALLGFIMWACQKGNIRCNICI

SEQ ID NO: 1483 - protein, 566 aa, synthetic construct; identical to SEQ ID NO: 282
  REGION 1..566: note = hemagglutinin__InfluenzaA__ABL67385

SEQ ID NO: 1484 - protein, 566 aa, synthetic construct; identical to SEQ ID NO: 612
  REGION 1..566: note = hemagglutinin__InfluenzaA__ABL67396

SEQ ID NO: 1485 - protein, 566 aa, synthetic construct; identical to SEQ ID NO: 630
  REGION 1..566: note = hemagglutinin__InfluenzaA__ABL67407

SEQ ID NO: 1486 - protein, 566 aa, synthetic construct
  REGION 1..566: note = hemagglutinin__InfluenzaA__ABL67418
MKTIIALSYILCLVFAQKLPGNDNSTATLCLGHHAVPNGTIVKTITNDQIEVTNATELVQSSSTGGICNSPHQILDGENCTLIDALLGDPQCDGFQNKKWDLFVERSKAYSNCYPYDVPDYASLRSLVASSGTLEFNNESFNWTGVTQNGTSSACKRRSNNSFFSRLNWLTHLKFKYPALNVTMPNNEKFDKLYIWGVHHPGTDNDQIFLYAQASGRITVSTKRSQQTVIPNIGSRPRVRNIPSRISIYWTIVKPGDILLINSTGNLIAPRGYFKIRSGKSSIMRSDAPIGKCNSECITPNGSIPNDKPFQNVNRITYGACPRYVKQNTLKLATGMRNVPEKQTRGIFGAIAGFIENGWEGMVDGWYGFRHQNSEGIGQAADLKSTQAAINQINGKLNRLIGKTNEKFHQIEKEFSEVEGRIQDLEKYVEDTKIDLWSYNAELLVALENQHTIDLTDSEMNKLFERTKKQLRENAEDMGNGCFKIYHKCDNACIGSIRNGTYDHDVYRDEALNNRFQIKGVELKSGYKDWILWISFAISCFLLCVALLGFIMWACQKGNIRCNICI

SEQ ID NO: 1487 - protein, 568 aa, synthetic construct; identical to SEQ ID NO: 28
  REGION 1..568: note = hemagglutinin__InfluenzaA__ABL67781

SEQ ID NO: 1488 - protein, 568 aa, synthetic construct
  REGION 1..568: note = hemagglutinin__InfluenzaA__ABL67794
MEKIVLLFAIVSLVKSDQICIGYHANNSTEQVDTIMEKNVTVTHAQDILEKTHNGKLCDLDGVKPLILRDCSVAGWLLGNPMCDEFINVPEWSYIVEKANPVNDLCYPGDFNDYEELKHLLSRINHFEKIQIIPKSSWSSHEASLGVSSACPYQGKSSFFRNVVWLIKKNSTYPTIKRSYNNTNQEDLLVLWGIHHPNDAAEQTKLYQNPTTYISVGTSTLNQRLVPRIATRSKVNGQSGRMEFFWTILKPNDAINFESNGNFIAPEYAYKIVKKGDSTIMKSELEYGNCNTKCQTPMGAINSSMPFHNIHPLTIGECPKYVKSNRLVLATGLRNSPQREKRRKKRGLFGAIAGFIEGGWQGMVDGWYGYHHSNEQGSGYAADKESTQKAIDGVTNKVNSIIDKMNTQFEAVGREFNNLERRIENLNKKMEDGFLDVWTYNAELLVLMENERTLDFHDSNVKNLYDKVRLQLRDNAKELGNGCFEFYHKCDNECMESVRNGTYDYPQYSEEARLKREEISGVKLESIGIYQILSIYSTVASSLALAIMVAGLSLWMCSNGSLQCRICI

SEQ ID NO: 1489 - protein, 568 aa, synthetic construct
  REGION 1..568: note = hemagglutinin__InfluenzaA__ABL67816
MEKIVLLFAIVSLVKSDQICIGYHANNSTEQVDTIMEKNVTVTHAQDILEKTHNGKLCDLDGVKPLILRDCSVAGWLLGNPMCDEFINVPEWSYIVEKANPVNDLCYPGDFNDYEELKHLLSRINHFEKIQIIPKSSWSSHEASLGVSSACPYQGKSSFFRNVVWLIKKNSTYPTIKRSYNNTNQEDLLVLWGIHHPNDAAEQTKLYQNPTTYISVGTSTLNQRLVPRIATRSKVNGQSGRMEFFWTILKPNDAINFESNGNFIAPEYAYKIVKKGDSTIMKSELEYGNCNTKCQTPMGAINSSMPFHNIHPLTIGECPKYVKSNRLVLATGLRNSPQRERRRKKRGLFGAIAGFIEGGWQGMVDGWYGYHHSNEQGSGYAADKESTQKAIDGVTNKVNSIINKMNTQFEAVGREFNNLERRIENLNKKMEDGFLDVWTYNAELLVLMENERTLDFHDSNVKNLYDKVRLQLRDNAKELGNGCFEFYHKCDNECMESVRNGTYDYPQYSEEARLKREEISGVKLESIGIYQILSIYSTVASSLALAIMVAGLSLWMCSNGSLQCRICI

SEQ ID NO: 1490 - protein, 568 aa, synthetic construct
  REGION 1..568: note = hemagglutinin__InfluenzaA__ABL67827
MEKIVLLFAIVSLVKSDHICIGYHANNSTEQVDTIMEKNVTVTHAQDILEKTHNGKLCDLDGVKPLILRDCSVAGWLLGNPMCDEFINVPEWSYIVEKANPVNDLCYPGDFNDYEELKHLLSRINHFEKIQIIPKSSWSSHEASLGVSSACPYQGKSSFFRNVVWLIKKNSTYPTIKRSYNNTNQEDLLVLWGIHHPNDAAEQTKLYQNPTTYISVGTSTLNQRLVPRIATRSKVNGQSGRMEFFWTILKPNDAINFESNGNFIAPEYAYEIVKKGDSTIMKSELEYGNCNTKCQTPMGAINSSMPFHNIHPLTIGECPKYVKSNRLVLATGLRNSPQIERRRKKRGLFGAIAGFLEGGWQGMVDGWYGYHHSNEQGSGYAADKESTQKAIDGVTNKVNSIINKMNTQFEAVGREFNNLERRIENLNKKMEDGFLDVWTYNAELLVLMENERTLDFHDSNVKNLYDKVRLQLRDNAKELGNGCFEFYHKCDNECMESVRNGTYDYPQYSEEARLKREEISGVKLESIGIYQILSIYSTVASSLALAIMVAGLSLWMCSNGSLQCRICI

SEQ ID NO: 1491 - protein, 566 aa, synthetic construct
  REGION 1..566: note = hemagglutinin__InfluenzaA__ABM22015
MKTIIALSYILCLVFAQKLPGNDNSTATLCLGHHAVPNGTIVKTITNDQIEVTNATELVQSSSTGGICDSPHQILDGENCTLIDALLGDPQCDGFQNKKWDLFVERSKAYSNCYPYDVPDYASLRSLVASSGTLEFNNESFNWTGVTQNGTSSACKRRSNNSFFSRLNWLTHLKFKYPALNVTMPNNEKFDKLYIWGVHHPGTDNDQIFLYAQASGRITVSTKRSQQTVIPNIGSRPRVRNIPSRISIYWTIVKPGDILLINSTGNLIAPRGYFKIRSGKSSIMRSDAPIGKCNSECITPNGSIPNDKPFQNVNRITYGACPRYVKQNTLKLATGMRNVPEKQTRGIFGAIAGFIENGWEGMVDGWYGFRHQNSEGIGQAADLKSTQAAINQINGKLNRLIGKTNEKFHQIEKEFSEVEGRIQDLEKYVEDTKIDLWSYNAELLVALENQHTIDLTDSEMNKLFERTKKQLRENAEDMGNGCFKIYHKCDNACIGSIRNGTYDHDVYRDEALNNRFQIKGVELKSGYKDWILWISFAISCFLLCVALLGFIMWACQKGNIRCDICI

SEQ ID NO: 1492 - protein, 566 aa, synthetic construct
  REGION 1..566: note = hemagglutinin__InfluenzaA__ABM22026
MKAKLLVLLCAFTATYADTICIGYHANNSTDTVDTVLEKNVTVTHSVNLLEDSHNGKLCRLKGTAPLQLGNCSIAGWILGNPECESLFSKESWSYIAETPNPKNGTCYPGYFADYEELREQLSSVSSFKRFEIFPKDSSWPNHTVTKGVTASCSHNGKSSFYKNLLWLTEKNGLYPNLSKSYVNKKGKEVLVLWGVHHPSNMGDQRAIYHKENAYVSVLSSHYSRRFTPEIARRPKVRDQEGRINYYWTLLEPGDTIIFEANGNLIAPWYAFALSRGFGSGIIISNASMGECDAKCQTPQGAINSSLPFQNVHPVTIGECPKYVRSTKLRMVTGLRNVPSIQSRGLFGAIAGFIEGGWTGMIDGWYGYHHQNEQGSGYAADQKSTQNAINGITNKVNSIIEKMNTQFTAVGKEFNKLERRMENLNKKVDDGFLDIWTYNAELLVLLENERTLDFHDSNVKNLYEKVKNQLKNNAKEIGNGCFEFYHKCNNECMESVKNGTYDYPKYSKESKLNREKIDGVKLESMGVYQILAIYSTVASSLVLLVSLGAISFWMCSNGSLQCRICI

SEQ ID NO: 1493 - protein, 566 aa, synthetic construct; identical to SEQ ID NO: 633
  REGION 1..566: note = hemagglutinin__InfluenzaA__ABM22037

SEQ ID NO: 1494 - protein, 566 aa, synthetic construct; identical to SEQ ID NO: 51
  REGION 1..566: note = hemagglutinin__InfluenzaA__ABM22059

SEQ ID NO: 1495 - protein, 566 aa, synthetic construct; identical to SEQ ID NO: 1305
  REGION 1..566: note = hemagglutinin__InfluenzaA__ABM22070

SEQ ID NO: 1496 - protein, 566 aa, synthetic construct
  REGION 1..566: note = hemagglutinin__InfluenzaA__ABM22081
MKTIIALSYILCLVFAQKLPGNDNSTATLCLGHHAVPNGTIVKTITNDQIEVTNATELVQSSSTGGICDSPHQILDGENCTLIDALLGDPQCDGFQNKKWDLFVERSKAYSNCYPYDVPDHASLRSLVASSGTLEFNNESFDWTGVTQNGTSSACKRRSNKSFFSRLNWLTHLKYKYPALNVTMPNNEKFDKLYIWGVHHPGTDSDQISLYAQASGRITVSTKRSQQTVIPNIGSRPRVRDVSSRISIYWTIVKPGDILLINSTGNLIAPRGYFKIRSGKSSIMRSDAPIGKCNSECITPNGSIPNDKPFQNVNRITYGACPRYVKQNTLKLATGMRNIPEKQTRGIFGAIAGFIENGWEGMVDGWYGFRHQNSEGTGQAADLKSTQAAINQINGKLNRLIGKTNEKFHQIEKEFSEVEGRIQDLEKYVEDTKIDLWSYNAELLVALENQHTIDLTDSEMNKLFERTKKQLRENAEDMGNGCFKIYHKCDNACIGSIRNGTYDHDVYRDEALNNRFQIKGVELKSGYKDWILWISFAISCFLLCVALLGFIMWACQKGNIRCNICI

SEQ ID NO: 1497 - protein, 566 aa, synthetic construct
  REGION 1..566: note = hemagglutinin__InfluenzaA__ABM22092
MKTIIALSYILCLVFAQKLPGNDNSTATLCLGHHAVPNGTIVKTITNDQIEVTNATELVQSSSTGEICDSPHQILDGENCTLIDALLGDPQCDGFQNKKWDLFVERSKAYSNCYPYDVPDHASLRSLVASSGTLEFNNESFDWAGVTQNGTSSACKRRSNKSFFSRLNWLTHLKYKYPALNVTMPNNEKFDKLYIWGVHHPGTDSDQISLYAQASGRITVSTKRSQQTVIPNIGSRPRVRDVSSRISIYWTIVKPGDILLINSTGNLIAPRGYFKIRSGKSSIMRSDAPIGKCNSECITPNGSIPNDKPFQNVNRITYGACPRYVKQNTLKLATGMRNVPEKQTRGIFGAIAGFIENGWEGMVDGWYGFRHQNSEGTGQAADLKSTQAAINQINGKLNRLIGKTNEKFHQIEKEFSEVEGRIQDLEKYVEDTKIDLWSYNAELLVALENQHTIDLTDSEMNKLFERTKKQLRENAEDMGNGCFKIYHKCDNACIGSIRNGTYDHDVYRDEALNNRFQIKGVELKSGYKDWILWISFAISCFLLCVALLGFIMWACQKGNIRCNICI

SEQ ID NO: 1498 - protein, 566 aa, synthetic construct; identical to SEQ ID NO: 1310
  REGION 1..566: note = hemagglutinin__InfluenzaA__ABM22103

SEQ ID NO: 1499 - protein, 566 aa, synthetic construct; identical to SEQ ID NO: 516
  REGION 1..566: note = hemagglutinin__InfluenzaA__ABM22114

SEQ ID NO: 1500 - protein, 566 aa, synthetic construct; identical to SEQ ID NO: 1455
  REGION 1..566: note = hemagglutinin__InfluenzaA__ABM22125

SEQ ID NO: 1501 - protein, 566 aa, synthetic construct
  REGION 1..566: note = hemagglutinin__InfluenzaA__ABM22136
MKTIIALSYILCLVFAQKLPGNDNSTATLCLGHHAVPNGTIVKTITNDQIEVTNATELVQSSSTGGICDSPHQILDGENCTLIDALLGDPQCDGFQNKKWDLFVERSKAYSNCYPYDVPDYASLRSLVASSGTLEFNNESFNWTGVTQNGTSSACKRRSNNSFFSRLNWLTHLKFKYPALNVTMPNNEKFDKLYIWGVHHPGTDNDQIFLYAQASGRITVSTKRSQQTVIPNIGSRPRVRNIPSRISIYWTIVKPGDILLINSTGNLIAPRGYFKIRSGKSSIMRSDAPIGKCNSECITPNGSIPNDKPFQNVNRITYGACPRYVKQNTLKLAIGMRNVPEKQTRGIFGAIAGFIENGWEGMVDGWYGFRHQNSEGIGQAADLKSTQAAINQINGKLNRLIGKTNEKFHQIEKEFSEVEGRIQDLEKYVEDTKIDLWSYNAELLVALENQHTIDLTDSEMNKLFERTKKQLRENAEDMGNGCFKIYHKCDNACIGSIRNGTYDHDVYRDEALNNRFQIKGVELKSGYKDWILWISFAISCFLLCVALLGFIMWACQKGNIRCNICI

SEQ ID NO: 1502 - protein, 566 aa, synthetic construct; identical to SEQ ID NO: 633
  REGION 1..566: note = hemagglutinin__InfluenzaA__ABM22147

SEQ ID NO: 1503 - protein, 566 aa, synthetic construct; identical to SEQ ID NO: 921
  REGION 1..566: note = hemagglutinin__InfluenzaA__ABM22158

SEQ ID NO: 1504 - protein, 566 aa, synthetic construct; identical to SEQ ID NO: 921
  REGION 1..566: note = hemagglutinin__InfluenzaA__ABM22169

SEQ ID NO: 1505 - protein, 566 aa, synthetic construct; identical to SEQ ID NO: 921
  REGION 1..566: note = hemagglutinin__InfluenzaA__ABM22180

SEQ ID NO: 1506 - protein, 566 aa, synthetic construct; identical to SEQ ID NO: 921
  REGION 1..566: note = hemagglutinin__InfluenzaA__ABM22191

SEQ ID NO: 1507 - protein, 566 aa, synthetic construct; identical to SEQ ID NO: 921
  REGION 1..566: note = hemagglutinin__InfluenzaA__ABM22202

SEQ ID NO: 1508 - protein, 566 aa, synthetic construct; identical to SEQ ID NO: 921
  REGION 1..566: note = hemagglutinin__InfluenzaA__ABM22213

SEQ ID NO: 1509 - protein, 566 aa, synthetic construct; identical to SEQ ID NO: 921
  REGION 1..566: note = hemagglutinin__InfluenzaA__ABM22224

SEQ ID NO: 1510 - protein, 566 aa, synthetic construct; identical to SEQ ID NO: 921
  REGION 1..566: note = hemagglutinin__InfluenzaA__ABM22235

SEQ ID NO: 1511 - protein, 566 aa, synthetic construct
  REGION 1..566: note = hemagglutinin__InfluenzaA__ABM22268
MKVKLLVLLCAFTATYADTICIGYHANNSTDTVDTVLEKNVTVTHSVNLLEDSHNGKLCRLKGTAPLQLGNCSVAGWILGNPECESLFSKESWSYIAETPNPENGTCYPGYFADYEELREQLSSVSSFERFEIFPKESSWPNHTVTKGVTASCSHNGKSSFYKNLLWLTEKNGLYPNLSKSYVNNKEKEVLVLWGVHHPSNIGDQRAIYHTENAYVSVVSSHYSRRFTPEIAKRPKVRDQEGRINYYWTLLEPGDTIIFEANGNLIAPWYAFALSRGFGSGIITSNASMGECDAKCQTPQGAINSSLPFQNVHPVTIGECPKYVRSTKLRMVTGLRNIPSIQSRGLFGAIAGFIEGGWTGMIDGWYGYHHQNEQGSGYAADQKSTQNAIDGITNKVNSVIEKMNTQFTAVGKEFNKLERRMENLNKKVDDGFLDIWTYNAELLVLLENERTLDFHDSNVKNLYEKVKNQLKNNAKEIGNGCFEFYHKCNNECMESVKNGTYDYPKYSEESKLNREKIDGVKLESMGVYQILAIYSTVASSLVLLVSLGAISFWMCSNGSLQCRICI

SEQ ID NO: 1512 - protein, 566 aa, synthetic construct
  REGION 1..566: note = hemagglutinin__InfluenzaA__ABM22279
MKAKLLVLLCAFTATYADTICIGYHANNSTDTVDTVLEKNVTVTHSVNLLEDRHNGKLCRLKGTAPLQLGNCSVAGWILGNPECESLFSKESWSYIAETPNPENGTCYPGYFADYEELREQLSSVSSFERFEIFPKESSWPNHTVTKGVTASCSHNGKSSFYKNLLWLTEKNGLYPNLSKSYVNNKEKEVLVLWGVHHPSNIGDQRAIYHTENAYVSVVSSHYSRRFTPEIAKRPKVRDQEGRINYYWTLLEPGDTIIFEANGNLIAPWYAFALSRGFGSGIITSNASMGDCDAKCQTPQGAINSSLPFQNVHPVTIGGCPKYVRSTKLRMVTGLRNIPSIQSRGLFGAIAGFIEGGWTGMIDGWYGYHHQNEQGSGYAADKKSTQNAIDGITNKVNSVIEKMNTQFTAVGKEFNKLERRMENLNKKVDDGFLDIWTYNAELLVLLENERTLDYHDSNVKNLYEKVKNQLKNNAKEIGNGCFEFYHKCNNECMESVKNGTYDYPKYSEESKLKREKIDGVKLESMGVYQILAIYSTVASSLVLLVSLGAISFWMCSNGSLQCRICI

SEQ ID NO: 1513 - protein, 566 aa, synthetic construct
  REGION 1..566: note = hemagglutinin__InfluenzaA__ABM22290
MKAKLLVLLCAFTATYADTICIGYHANNSTDTVDTVLEKNVTVTHSVNLLENSHNGKLCRLKGTAPLQLGNCSVAGWILGNPECESLFSKESWSYIAETPNPENGTCYPGYFADYEELREQLSSVSSFERFEIFPKESSWPNHTVTKGVTASCSHNGKSSFYKNLLWLTEKNGLYPNLSKSYVNNKEKEVLVLWGVHHPSNIGDQRAIYHTENAYVSVVSSHYSRRFTPEIAKRPKVRDQEGRINYYWTLLEPGDTIIFEANGNLIAPWYAFALSRGFGSGIITSNASMGECDAKCQTPQGAINSSLPFQNVHPVTIGECPKYVRSTKLRMVTGLRNIPSIQSRGLFGAIAGFIEGGWTGMIDGWYGYHHQNEQGSGYAADQKSTQNAIDGITNKVNSVIEKMNTQFTAVGKEFNKLERRMENLNKKVDDGFLDIWTYNAELLVLLENERTLDFHDSNVKNLYEKVKNQLKNNAKEIGNGCFEFYHKCNNECMESVKNGTYDYPKYSEESKLNREKIDGVKLESMGVYQILAIYSTVASSLVLLVSLGAISFWMCSNGSLQCRICI

SEQ ID NO: 1514 - protein, 566 aa, synthetic construct; identical to SEQ ID NO: 255
  REGION 1..566: note = hemagglutinin__InfluenzaA__ABM22301

SEQ ID NO: 1515 - protein, 566 aa, synthetic construct; identical to SEQ ID NO: 255
  REGION 1..566: note = hemagglutinin__InfluenzaA__ABM22312

SEQ ID NO: 1516 - protein, 566 aa, synthetic construct; identical to SEQ ID NO: 255
  REGION 1..566: note = hemagglutinin__InfluenzaA__ABM22323

SEQ ID NO: 1517 - protein, 566 aa, synthetic construct; identical to SEQ ID NO: 255
  REGION 1..566: note = hemagglutinin__InfluenzaA__ABM22334

SEQ ID NO: 1518 - protein, 566 aa, synthetic construct; identical to SEQ ID NO: 256
  REGION 1..566: note = hemagglutinin__InfluenzaA__ABM22345

SEQ ID NO: 1519 - protein, 566 aa, synthetic construct; identical to SEQ ID NO: 256
  REGION 1..566: note = hemagglutinin__InfluenzaA__ABM22356

SEQ ID NO: 1520 - protein, 566 aa, synthetic construct; identical to SEQ ID NO: 256
  REGION 1..566: note = hemagglutinin__InfluenzaA__ABM22367

SEQ ID NO: 1521 - protein, 565 aa, synthetic construct; identical to SEQ ID NO: 841
  REGION 1..565: note = hemagglutinin__InfluenzaA__ABM66864

SEQ ID NO: 1522 - protein, 566 aa, synthetic construct; identical to SEQ ID NO: 921
  REGION 1..566: note = hemagglutinin__InfluenzaA__ABM66886

SEQ ID NO: 1523 - protein, 566 aa, synthetic construct; identical to SEQ ID NO: 921
  REGION 1..566: note = hemagglutinin__InfluenzaA__ABM66897

SEQ ID NO: 1524 - protein, 566 aa, synthetic construct; identical to SEQ ID NO: 921
  REGION 1..566: note = hemagglutinin__InfluenzaA__ABM66908

SEQ ID NO: 1525 - protein, 566 aa, synthetic construct; identical to SEQ ID NO: 256
  REGION 1..566: note = hemagglutinin__InfluenzaA__ABM66919

SEQ ID NO: 1526 - protein, 566 aa, synthetic construct; identical to SEQ ID NO: 256
  REGION 1..566: note = hemagglutinin__InfluenzaA__ABM66930

SEQ ID NO: 1527 - protein, 566 aa, synthetic construct; identical to SEQ ID NO: 256
  REGION 1..566: note = hemagglutinin__InfluenzaA__ABM66941

SEQ ID NO: 1528 - protein, 566 aa, synthetic construct; identical to SEQ ID NO: 256
  REGION 1..566: note = hemagglutinin__InfluenzaA__ABM66952

SEQ ID NO: 1529 - protein, 566 aa, synthetic construct; identical to SEQ ID NO: 256
  REGION 1..566: note = hemagglutinin__InfluenzaA__ABM66963

SEQ ID NO: 1530 - protein, 566 aa, synthetic construct; identical to SEQ ID NO: 256
  REGION 1..566: note = hemagglutinin__InfluenzaA__ABM66974

SEQ ID NO: 1531 - protein, 566 aa, synthetic construct; identical to SEQ ID NO: 256
  REGION 1..566: note = hemagglutinin__InfluenzaA__ABM66985

SEQ ID NO: 1532 - protein, 566 aa, synthetic construct; identical to SEQ ID NO: 256
  REGION 1..566: note = hemagglutinin__InfluenzaA__ABM66996

SEQ ID NO: 1533 - protein, 566 aa, synthetic construct; identical to SEQ ID NO: 256
  REGION 1..566: note = hemagglutinin__InfluenzaA__ABM67007

SEQ ID NO: 1534 - protein, 566 aa, synthetic construct; identical to SEQ ID NO: 256
  REGION 1..566: note = hemagglutinin__InfluenzaA__ABM67018

SEQ ID NO: 1535 - protein, 566 aa, synthetic construct
  REGION 1..566: note = hemagglutinin__InfluenzaA__ABM67029
MKTIIALSYIICLVFAQKLPGNDNSTATLCLGHHAVPNGTIVKTITNDQIEVTNATELVQSSSTGEICDSPHQILDGENCTLIDALLGDPQCDGFQNKKWDLFVERSKAYSNCYPYDVPDYASLRSLVASSGTLEFNNESFNWTGVTQNGTSSACKRRSNNSFFSRLNWLTHLKFKYPALNVTMPNNEKFDKLYIWGVHHPGTDNDQIFLYAQASGRITVSTKRSQQTVIPNIGSRPRVRDIPSRISIYWTIVKPGDILLINSTGNLIAPRGYFRIRSGKSSIMRSDAPIGKCNSECITPNGSIPNDKPFQNVNRITYGACPRYVKQNTLKLATGMRNVPEKQTRGIFGAIAGFIENGWEGMVDGWYGFRHQNSEGIGQAADLKSTQAAINQINGKLNRLIGKTNEKFHQIEKEFSEVEGRIQDLEKYVEDTKIDLWSYNAELLVALENQHTIDLTDSEMNKLFERTKKQLRENAEDMGNGCFKIYHKCDNACIGSIRNGTYDHDVYRDEALNNRFQIKGVELKSGYKDWILWISFAISCFLLCVALLGFIMWACQKGNIRCNICI

SEQ ID NO: 1536 - protein, 565 aa, synthetic construct; identical to SEQ ID NO: 299
  REGION 1..565: note = hemagglutinin__InfluenzaA__ABM67051

SEQ ID NO: 1537 - protein, 568 aa, synthetic construct
  REGION 1..568: note = hemagglutinin__InfluenzaA__ABM90467
MEKIVLLLSIVSLVKSDQICIGYHANNSTEQVDTIMEKNVTVTHAQDILEKTHNGKLCDLDGVKPLILRDCSVAGWLLGNPMCDEFINVPEWSYIVEKANPTNDLCYPGSFNDYEELKHLLSRINHFEKIQIIPKSSWSDHEASSGVSSACPYLGSPSFFRNVVWLIKKNSTYPTIKKSYNNTNQEDLLVLWGIHHPNNEAEQTRLYQNPTTYISIGTSTLNQRLVPKIATRSKVNGQSGRMEFFWTILKPNDAINFESNGNFIAPEYAYKIVKKGDSAIMKSELEYGNCNTKCQTPMGAINSSMPFHNIHPLTIGECPKYVKSNRLVLATGLRNSPQRESRRKKRGLFGAIAGFIEGGWQGMVDGWYGYHHSNEQGSGYAADKESTQKAIDGVTNKVNSIIDKMNTQFEAVGREFNNLERRIENLNKKMEDGFLDVWTYNAELLVLMENERTLDFHDSNVKNLYDKVRLQLRDNAKELGNGCFEFYHKCDNECMESIRNGTYNYPQYSEEARLKREEISGVKLESIGTYQILSIYSTVASSLALAIMIAGLSLWMCSNGSLQCRICI

SEQ ID NO: 1538 - protein, 568 aa, synthetic construct
  REGION 1..568: note = hemagglutinin__InfluenzaA__ABM90511
MEKIVLLLSIVSLVKSDQICIGYHANNSTEQVDTIIEKNVTVTHAQDILEKTHNGKLCDLDGVKPLILKDCSVAGWLLGNPMCDEFINVPEWSYIVEKANPTNDLCYPGSFNDYEELKHLLSRINHFEKIQIIPKSSWSDHEASSGVSSACPYLGSPSFFRNVVWLIKKNSTYPTIKKSYNNTNQEDLLVLWGIHHPNNEEEQTRLYQNPTTYISIGTSTLNQRLVPKIATRSKVNGQSGRMEFFWTILKPNDAINFESNGNFIAPEYAYKIVKKGDSAIMKSELEYSNCNTKCQTPMGAINSSMPFHNIHPLTIGECPKYVKSSRLVLATGLRNSPQRESRRKKRGLFGAIAGFIEGGWQGMVDGWYGYHHSNEQGSGYAADKESTQKAIDGVTNKVNSIIDKMNTQFEAVGREFNNLERRIENLNKKMEDGFLDVWTYNAELLVLMENERTLDFHDSNVKNLYDKVRLQLRDNAKELGNGCFEFYHKCDNECMESIRNGTYNYPQYSEEARLKREEISGVKLESIGTYQILSIYSTVASSLALAIMIAGLSLWMCSNGSLQCRICI

SEQ ID NO: 1539 - protein, 568 aa, synthetic construct
  REGION 1..568: note = hemagglutinin__InfluenzaA__ABM90533
MEKIVLLLSIVSLVKSDQICIGYHANNSTEQVDTIMEKNVTVTHAQDILEKTHNGKLCDLDGVKPLILKDCSVAGWLLGNPMCDEFINVPEWSYIVEKANPTNDLCYPGSFNDYEELKHLLSRINHFEKIQIIPKSSWSDHEASSGVSSACPYLGSPSFFRNVVWLIKKNSTYPTIKKSYNNTNQEDLLVLWGIHHPNNEEEQTRLYQNPTTYISIGTSTLNQRLVPKIATRSKVNGQSGRMEFFWTILKPNDAINFESNGNFIAPEYAYKIVKKGDSAIMKSELEYSNCNTKCQTPMGAINSSMPFHNIHPLTIGECPKYVKSSRLVLATGLRNSPQRESRRKKRGLFGAIAGFIEGGWQGMVDGWYGYHHSNEQGSGYAADKESTQKAIDGVTNKVNSIIDKMNTQFEAVGREFNNLERRIENLNKKMEDGFLDVWTYNAELLVLMENERTLDFHDSNVKNLYDKVRLQLRDNAKELGNGCFEFYHKCDNECMESIRNGTYNYPQYSEEARLKREEISGVKLESIGTYQILSIYSTVASSLALAIMIAGLSLWMCSNGSLQCRICI

SEQ ID NO: 1540 - protein, 568 aa, synthetic construct; identical to SEQ ID NO: 1539
  REGION 1..568: note = hemagglutinin__InfluenzaA__ABM90544

SEQ ID NO: 1541 - protein, 566 aa, synthetic construct
  REGION 1..566: note = hemagglutinin__InfluenzaA__ABN50900
MKAKLLVLLCALSATDADTICIGYHANNSTDTVDTVLEKNVTVTHSVNLLEDSHNGKLCRLKGIAPLQLGKCSIAGWILGNPECESLFSKKSWSYIAETPNSENGTCYPGYFADYEELREQLSSVSSFERFEIFPKESSWPKHNVTRGVTASCSHKGKSSFYRNLLWLTEKNGSYPNLSKSYVNNKEKEVLVLWGVHHPSNIEDQKTIYRKENAYVSVVSSHYNRRFTPEIAKRPKVRGQEGRINYYWTLLEPGDTIIFEANGNLIAPWYAFALSRGFGSGIITSNASMDECDAKCQTPQGAINSSLPFQNVHPVTIGECPKYVRSTKLRMVTGLRNIPSIQSRGLFGAIAGFIEGGWTGMIDGWYGYHHQNEQGSGYAADQKSTQNAINGITNKVNSVIEKMNTQFTAVGKEFNKLEKRMENLNKKVDDGFLDIWTYNAELLVLLENERTLDFHDSNVKNLYEKVKSQLKNNAKEIGNGCFEFYHKCNNECMESVKNGTYDYPKYSEESKLNREKIDGVKLESMGVYQILAIYSTVASSLVLLVSLGAISFWMCSNGSLQCRICI

SEQ ID NO: 1542 - protein, 566 aa, synthetic construct; identical to SEQ ID NO: 921
  REGION 1..566: note = hemagglutinin__InfluenzaA__ABN50917

SEQ ID NO: 1543 - protein, 566 aa, synthetic construct
  REGION 1..566: note = hemagglutinin__InfluenzaA__ABN50928
MKAKLLILLCAFTATDADTICIGYHANNSTDTVDTVLEKNVTVTHSVNLLEDSHNGKLCRLKGIAPLQLGNCSIAGWILGNPECESLFSKKSWSYIAETPNSENGTCYPGYFADYEELREQLSSVSSFERFEIFPKESSWPNHTVTKGVTASCSHKGKSSFYRNLLWLTEKNGSYPNLSKSYVNNKEKEVLVLWGVHHPSNIGDQRAIYHTENAYVSVVSSHYNRRFTPEIAKRPKVRGQEGRINYYWTLLEPGDTIIFEANGNLIAPWYAFALSRGFGSGIITSNASMDECDAKCQTPQGAINSSLPFQNVHPVTIGECPKYVRSTKLRMVTGLRNIPSIQSRGLFGAIAGFIEGGWTGMIDGWYGYHHQNEQGSGYAADQKSTQNAINGITNKVNSVIEKMNTQFTAVGKEFNKLERRMENLNKKVDDGFLDIWTYNAELLVLLENERTLDFHDSNVKNLYEKVKSQLKNNAKEIGNGCFEFYHKCNNECMESVKNGTYDYPKYSEESKLNREKIDGVKLESMGVYQILAIYSTVASSLVLLVSLGAISFWMCSNGSLQCRICI

SEQ ID NO: 1544 - protein, 566 aa, synthetic construct
  REGION 1..566: note = hemagglutinin__InfluenzaA__ABN50940
MKAKLLVLLCAFTATDADTICIGYHANNSTDTVDTVLEKNVTVTHSVNLLEDSHNGKLCRLKGIAPLQLGNCSIAGWILGNPECESLFSKKSWSYIAETPNSENGTCYPGYFSDYEELREQLSSVSSFERFEIFPKESSWPNHTVTKGVTASCSHKGKSSFYRNLLWLTEKNGSYPNLSKSYVNNKEKEVLVLWGVHHPSNIGDQRAIYHTENAYVSVVSSHYNRRFTPEIAKRPKVRDQEGRINYYWTLLEPEDTIIFEANGNLIAPWYAFALSRGFGSGIITSNASMDECDAKCQTPQGAINSSLPFQNVHPVTIGECPKYVRSTKLRMVTGLRNIPSIQSRGLFGAIAGFIEGGWTGMIDGWYGYHHQNEQGSGYAADQKSTQNAINGITNKVNSVIEKMNTQFTAVGKEFNKLERRMENLNKKVDDGFLDIWTYNAELLVLLENERTLDFHDSNVKNLYEKVKSQLKNNAKEIGNGCFEFYHKCNNECMESVKNGTYDYPKYSEESKLNREKIDGVKLESMGVYQILAIYSTVASSLVLLVSLGAISFWMCSNGSLQCRICI

SEQ ID NO: 1545 - protein, 566 aa, synthetic construct; identical to SEQ ID NO: 1511
  REGION 1..566: note = hemagglutinin__InfluenzaA__ABN50951

SEQ ID NO: 1546 - protein, 566 aa, synthetic construct
  REGION 1..566: note = hemagglutinin__InfluenzaA__ABN50962
MKAKLLVLLCAFTATYADTICIGYHANNSTDTVDTVLEKNVTVTHSVNLLEDSHNGKLCRLKGTAPLQLGNCSVAGWILGNPECESLFSKESWSYIAETPNPENGTCYPGYFADYEELREQLSSVSSFERFEIFPKESSWPNHTVTKGVTASCSHNGKSSFYKNLLWLTEKNGLYPNLSKSYVNNKEKEVLVLWGVHHPSNIGDQRAIYHTENAYVSVVSSHYSRRFTPEIAKRPKVRDQEGRINYYWTLLEPGDTIIFEANGNLIAPWYAFALSRGFGSGIITSNASMGECDAKCQTPQGAINSSLPFQNVHPVTIGECPKYVRSTKLRMVTGLRNIPSIQSRGLFGAIAGFIEGGWTGMIDGWYGYHHQNEQGSGYAADKKSTQNAIDGITNKVNSVIEKMNTQFTAVGKEFNKLERRMENLNKKVDDGFLDIWTYNAELLVLLENERTLDFHDSNVKNLYEKVKNQLKNNAKEIGNGCFEFYHKCNNECMESVKNGTYDYPKYSEESKLKREKIDGVKLESMGVYQILAIYSTVASSLVLLVSLGAISFWMCSNGSLQCRICI

SEQ ID NO: 1547 - protein, 566 aa, synthetic construct; identical to SEQ ID NO: 910
  REGION 1..566: note = hemagglutinin__InfluenzaA__ABN50973

SEQ ID NO: 1548 - protein, 566 aa, synthetic construct; identical to SEQ ID NO: 255
  REGION 1..566: note = hemagglutinin__InfluenzaA__ABN50984

SEQ ID NO: 1549 - protein, 566 aa, synthetic construct; identical to SEQ ID NO: 256
  REGION 1..566: note = hemagglutinin__InfluenzaA__ABN50995

SEQ ID NO: 1550 - protein, 566 aa, synthetic construct
  REGION 1..566: note = hemagglutinin__InfluenzaA__ABN51043
MKTIIALSYILCLVFAQKLPGNDNSTATLCLGHHAVPNGTIVKTITNDQIEVTNATELVQSSSTGEICDSPHQILDGENCTLIDALLGDPQCDGFQNKKWDLFVERSKAYSNCYPYDVPDYASLRSLVASSGTLEFNNESFNWTGVTQNGTSSACKRRSNNSFFSRLNWLTHLKFKYPALNVTMPNNEKFDKLYIWGVHHPGTDNDQIFLYAQASGRITVSTKRSQQTVIPNIGSRPRVRDIPSRISIYWTIVKPGDILLINSTGNLIAPRGYFKIRSGKSSIMRSDAPIGKCNSECITPNGSIPNDKPFQNVNRITYGACPRYVKQNTLKLATGMRNVPEKQTRGIFGAIAGFIENGWEGMVDGWYGFRHQNSEGIGQAADLKSTQAAINQINGKLNRLIGKTNEKFHQIEKEFSEVEGRIQDLEKYVEDTKIDLWSYNAELLVALENQHTIDLTDSEMNKLFERTKKQLRENAEDMGNGCFKIYHKCDNACIGSIRNGTYDHDVYRDEALNNRFQIKGVELKSGYKDWILWISFAISCFLLCVVLLGFIMWACQKGNIRCNICI

SEQ ID NO: 1551 - protein, 566 aa, synthetic construct; identical to SEQ ID NO: 1396
  REGION 1..566: note = hemagglutinin__InfluenzaA__ABN51054

SEQ ID NO: 1552 - protein, 566 aa, synthetic construct
  REGION 1..566: note = hemagglutinin__InfluenzaA__ABN51066
MKAKLLVLLCAFTATYADTICIGYHANNSTDTVDTVLEKNVTVTHSVNLLEDSHNGKLCRLKGTAPLQLGNCSVAGWILGNPECESLFSKESWSYIAETPNPENGTCYPGYFADYEELREQLSSVSSFERFEIFPKKSSWPNHTVTKGVTASCSHNGKSSFYKNLLWLTEKNGLYPNLSKSYVNNKEKEVLVLWGVHHPSNIGDQRTIYHTENAYVSVVSSHYSRRFTPEIAKRPKVRDQEGRINYYWTLLEPGDTIIFEANGNLIAPWYAFALSRGFGSGIITSNASMGDCDAKCQTPQGAINSSLPFQNVHPVTIGECPKYVRSTKLRMVTGLRNIPSIQSRGLFGAIAGFIEGGWTGMIDGWYGYHHQNEQGSGYAADKKSTQNAIDGITNKVNSVIEKMNTQFTAVGKEFNKLERRMENLNKKVDDGFLDIWTYNAELLVLLENERTLDFHDSNVKNLYEKVKNQLKNNAKEIGNGCFEFYHKCNNECIESVKNGTYDYPKYSEESKLKREKIDGVKLESMGVYQILAIYSTVASSLVLLVSLGAIGFWMCSNGSLQCRICI

SEQ ID NO: 1553 - protein, 565 aa, synthetic construct; identical to SEQ ID NO: 296
  REGION 1..565: note = hemagglutinin__InfluenzaA__ABN51077

SEQ ID NO: 1554 - protein, 565 aa, synthetic construct; identical to SEQ ID NO: 299
  REGION 1..565: note = hemagglutinin__InfluenzaA__ABN51088

SEQ ID NO: 1555 - protein, 566 aa, synthetic construct
  REGION 1..566: note = hemagglutinin__InfluenzaA__ABN51099
MKTIIALSYIFCLALGQDLPGNDNSTATLCLGHHAVPNGTLVKTITNDQIEVTNATELVQSSSTGKICNNPHRILDGIDCTLIDALLGDPHCDVFQNETWDLFVERSKAFSNCYPYDVPDYASLRSLVASSGTLEFITEGFTWTGVTQNGGSNACKRGPGSGFFSRLNWLTKSGSTYPVLNVTMPNNDNFDKLYIWGVHHPSTNQEQTSLYVQASGRVTVSTRRSQQTIIPNIGSRPWVRGLSSRISIYWTIVKPGDVLVINSNGNLIAPRGYFKMRTGKSSIMRSDAPIDTCISECITPNGSIPNDKPFQNVNKITYGACPKYVKQNTLKLATGMRNVPEKQTRGLFGAIAGFIENGWEGMIDGWYGFRHQNSEGTGQAADLKSTQAAIDQINGKLNRVIEKMNEKFHQIEKEFSEVEGRIQDLEKYVEDTKIDLWSYNAELLVALENQHTIDLTDSEMNKLFEKTRRQLRENAEDMGNGCFKIYHKCDNACIESIRNGTYDHDVYRDEALNNRFQIKGVELKSGYKDWILWISFAISCFLLCVVLLGFIMWACQRGNIRCNICI

SEQ ID NO: 1556 - protein, 566 aa, synthetic construct
  REGION 1..566: note = hemagglutinin__InfluenzaA__ABN51110
MKTIIALSYIFCLALGQDLPGNDNSTATLCLGHHAVPNGTLVKTITDDQIEVTNATELVQSSSTGKICNNPHRILDGINCTLIDALLGDPHCDVFQDETWDLFVERSKAFSNCYPYDVPDYASLRSLVASSGTLEFITEGFTWTGVTQNGGSNACKRGPGSGFFSRLNWLTKSGSTYPVLNVTMPNNDNFDKLYIWGVHHPSTNQEQTSLYVQASGRVTVSTRRSQQTIIPNIGSRPWVRGLSSRISIYWTIVKPGDVLVINSNGNLIAPRGYFKMRTGKSSIMRSDAPIDTCISECITPNGSIPNDKPFQNVNKITYGACPKYVKQNTLKLATGMRNVPEKQTRGLFGAIAGFIENGWEGMIDGWYGFRHQNSEGTGQAADLKSTQAAIDQINGKLNRVIEKTNEKFHQIEKEFSEVEGRIQDLEKYVEDTKIDLWSYNAELLVALENQHTIDLTDSEMNKLFEKTRRQLRENAEDMGNGCFKIYHKCDNACIESIRNGTYDHDVYRDEALNNRFQIKGVELKSGYKDWILWISFAISCFLLCVVLLGFIMWACQRGNIRCNICI

SEQ ID NO: 1557 - protein, 566 aa, synthetic construct
  REGION 1..566: note = hemagglutinin__InfluenzaA__ABN51121
MKTIIALSYIFCLALGQDLPGNDNSTATLCLGHHAVPNGTLVKTITDDQIEVTNATELVQSSSTGKICNNPHRILDGINCTLIDALLGDPHCDVFQDETWDLFVERSKAFSNCYPYDVPDYASLRSLVASSGTLEFITEGFTWTGVTQNGGSNACKRGPGSGFFSRLNWLTKSGSTYPVLNVTMPNNDNFDKLYIWGVHHPSTNQEQTSLYVQASGRVTVSTRRSQQTIIPNIGSRPWVRGLSSRISIYWTIVKPGDVLVINSNGNLIAPRGYFKMRTGKSSIMRSDAPIDTCISECITPNGSIPNDKPFQNVNKITYGTCPKYVKQNTLKLATGMRNVPEKQTRGLFGAIAGFIENGWEGMIDGWYGFRHQNSEGTGQAADLKSTQAAIDQINGKLNRVIEKTNEKFHQIEKEFSEVEGRIQDLEKYVEDTKIDLWSYNAELLVALENQHTIDLTDLEMNKLFEKTRRQLRENAEDMGNGCFKIYHKCDNACIESIRNGTYDHDVYRDEALNNRFQIKGVELKSGYKDWILWISFAISCFLLCVVLLGFIMWACQRGNIRCNICI

SEQ ID NO: 1558 - protein, 566 aa, synthetic construct
  REGION 1..566: note = hemagglutinin__InfluenzaA__ABN51132
MKTIIALSYIFCLALGQDLPGNDNSTATLCLGHHAVPNGTLVKTITDDQIEVTNATELVQSSSTGKICNNPHRILDGINCTLIDALLGDPHCDVFQDETWDLFVERSKAFSNCYPYDVPDYASLRSLVASSGTLEFITEGFTWTGVTQNGGSNACKRGPGSGFFSRLNWLTKSGSTYPVLNVTMPNNDNFDKLYIWGVHHPSTNQEQTSLYVQASGRVTVSTRRSQQTIIPNIGSRPWVRGLSSRISIYWTIVKPGDVLVINSNGNLIAPRGYFKMRTGKSSIMRSDASIDTCISECITPNGSIPNDKPFQNVNKITYGACPKYVKQNTLKLATGMRNVPEKQTRGLFGAIAGFIENGWEGMIDGWYGFRHQNSEGTGQAADLKSTQAAIDQINGKLNRVIEKTNEKFHQIEKEFSEVEGRIQDLEKYVEDTKIDLWSYNAELLVALENQHTIDLTDSEMNKLFEKTRRQLRENAEDMGNGCFKIYHKCDNACIESIRNGTYDHDVYRDEALNNRFQIKGVELKSGYKDWILWISFAISCFLLCVVLLGFIMWACQRGNIRCNICI

SEQ ID NO: 1559 - protein, 565 aa, synthetic construct; identical to SEQ ID NO: 800
  REGION 1..565: note = hemagglutinin__InfluenzaA__ABN51143

SEQ ID NO: 1560 - protein, 566 aa, synthetic construct
  REGION 1..566: note = hemagglutinin__InfluenzaA__ABN51154
MKTIIALSYILCLVFTQKLPGNDNSTATLCLGHHAVPNGTLVKTITNDQIEVTNATELVQSSSTGRICDSPHQILDGENCTLIDALLGDPHCDGFQNKEWDLFVERSKAYSNCYPYDVPDYVSLRSLVASSGTLEFNNESFNWTGVAQNGTSSACKRRSDKSFFSRLNWLHQLKYKYPALNVTMPNNEKFDKLYIWGVHHPGTDSDQISLYAQASGRVTVSTKRSQQTVIPNIGSGPWVRGVSSRISIYWTIVKPGDILLINSTGNLIAPRGYFKIRSGKSSIMRSDAPIGKCNSECITPNGSIPNDKPFQNVNRITYGPCPRYVKQNTLKLATGMRNVPEKQTRGIFGAIAGFIENGWEGMMDGWYGFRHQNSEGTGQAADLKSTQAAINQINGKLNRLIEKTNEKFHQIEKEFSEVEGRIQDLEKYVEDTKIDLWSYNAELLVALENQHTIDLTDSEMNKLFERTKKQLRENAEDMGNGCFKIYHKCDNACIGSIRNGTYDHDVYRDEALNNRFQIKGVELKSGYKDWILWISFAISCFLLCIVLLGFIMWACQKGNIRCNICI

SEQ ID NO: 1561 - protein, 566 aa, synthetic construct
  REGION 1..566: note = hemagglutinin__InfluenzaA__ABN59390
MKTIIALSYIICLVFAQKLPGNDNSTATLCLGHHAVPNGTIVKTITNDQIEVTNATELVQSSSTGEICDSPHQILDGENCTLIDALLGDPQCDGFQNKKWDLFVERSKAYSNCYPYDVPDYASLRSLVASSGTLEFNNESFNWTGVTQNGTSSACKRRSNNSFFSRLNWLTHLKFKYPALNVTMPNNEKFDKLYIWGVHHPGTDNDQIFLYAQASGRITVSTKRSQQTVIPNIGSRPRVRNIPSRISIYWTIVKPGDILLINSTGNLIAPRGYFRIRSGKSSIMRSDAPIGKCNSECITPNGSIPNDKPFQNVNRITYGACPRYVKQNTLKLATGMRNVPEKQTRGIFGAIAGFIENGWEGMVDGWYGFRHQNSEGIGQAADLKSTQAAINQINGKLNRLIGKTNEKFHQIEKEFSEVEGRIQDLEKYVEDTKIDLWSYNAELLVALENQHTIDLTDSEMNKLFERTKKQLRENAEDMGNGCFKIYHKCDNACIGSIRNGTYDHDVYRDEALNNRFQIKGVELKSGYKDWILWISFAISCFLLCVALLGFIMWACQKGNIRCNICI

SEQ ID NO: 1562 - protein, 566 aa, synthetic construct
  REGION 1..566: note = hemagglutinin__InfluenzaA__ABN59401
MKAKLLVLLCALSATDADTICIGYHANNSTDTVDTVLEKNVTVTHSVNLLEDSHNGKLCRLKGIAPLQLGKCNIAGWILGNPECESLFSKKSWSYIAETPNSENGTCYPGYFADYEELREQLSSVSSFERFEIFPKERSWPKHNITRGVTAACSHKGKSSFYRNLLWLTEKNGSYPNLNKSYVNNKEKEVLVLWGVHHPSNIEDQKTLYRKENAYVSVVSSNYNRRFTPEIAERPKVRGQAGRINYYWTLLEPGDTIIFEANGNLIAPWHAFALSRGFGSGIITSNASMDECDTKCQTPQGAINSSLPFQNIHPVTIGECPKYVRSTKLRMVTGLRNIPSIQSRGLFGAIAGFIEGGWTGMIDGWYGYHHQNEQGSGYAADQKSTQNAINGITNKVNSVIEKMNTQFTAVGKEFNKLEKRMENLNKKVDDGFLDIWTYNAELLVLLENERTLDFHDSNVKNLYEKVKSQLKNNAKEIGNGCFEFYHKCNNECMESVKNGTYDYPKYSEESKLNREKIDGVKLESMGVYQILAIYSTVASSLVLLVSLGAISFWMCSNGSLQCRICI

SEQ ID NO: 1563 - protein, 565 aa, synthetic construct
  REGION 1..565: note = hemagglutinin__InfluenzaA__ABN59412
MKANLLVLLCALAAADADTICIGYHANNSTDTVDTVLEKNVTVTHSVNLLEDSHNGKLCRLKGIAPLQLGKCNIAGWLLGNPECDPLLPVRSWSYIVETPNSENGICYPGDFIDYEELREQLSSVSSFERFEIFPKESSWPNHNTNGVTAACSHEGKSSFYRNLLWLTEKEGSYPKLKNSYVNKKGKEVLVLWGIHHPPNSKEQQNLYQNENAYVSVVTSNYNRRFTPEIAERPKVRDQAGRMNYYWTLLKPGDTIIFEANGNLIAPMYAFALSRGFGSGIITSNASMHECNTKCQTPLGAINSSLPYQNIHPVTIGECPKYVRSAKLRMVTGLRNIPSIQSRGLFGAIAGFIEGGWTGMIDGWYGYHHQNEQGSGYAADQKSTQNAINGITNKVNTVIEKMNIQFTAVGKEFNKLEKRMENLNKKVDDGFLDIWTYNAELLVLLENERTLEFHDSNVKNLYEKVKSQLKNNAKEIGNGCFEFYHKCDNECMESVRNGTYDYPKYSEESKLNREKVDGVKLESMGIYQILAIYSTVASSLVLLVSLGAISFWMCSNGSLQCRICI

SEQ ID NO: 1564 - protein, 566 aa, synthetic construct
  REGION 1..566: note = hemagglutinin__InfluenzaA__ABN59423
MKAKLLVLLCALSATDADTICIGYHANNSTDTVDTVLEKNVTVTHSVNLLEDSHNGKLCRLKGIAPLQLGKCSIAGWILGNPECESLFSKKSWSYIAETPNSENGTCYPGYFADYEELREQLSSVSSFERFEIFPKERSWPKHNVTRGVTASCSHKGKSSFYRNLLWLTEKNGSYPNLSKSYVNNKEKEVLVLWGVHHPSNIENQKTIYRKENAYVSVVSSNYNRRFTPEIAERPKVRDQEGRINYYWTLLEPGDTIIFEANGNLIAPWYAFALSRGFGSGIITSNASMDECDTKCQTPQGAINSSLPFQNVHPVTIGECPKYVRSTKLRMVTGLRNIPSIQSRGLFGAIAGFIEGGWTGMIDGWYGYHHQNEQGSGYAADQKSTQNAINGITNKVNSVIEKMNTQFTAVGKEFNKLEKRMENLNKKVDDGFLDIWTYNAELLVLLENERTLDFHDSNVKNLYEKVKSQLKNNAKEIGNGCFEFYHKCNNECMESVKNGTYDYPKYSEESKLNREKIDGVKLESMGVYQILAIYSTVASSLVLLVSLGAISFWMCSNGSLQCRICI

SEQ ID NO: 1565 - protein, 566 aa, synthetic construct; identical to SEQ ID NO: 766
  REGION 1..566: note = hemagglutinin__InfluenzaA__ABO32656

SEQ ID NO: 1566 - protein, 566 aa, synthetic construct
  REGION 1..566: note = hemagglutinin__InfluenzaA__ABO32667
MKTIIALSYILCLVFAQKLPGNDNSTATLCLGHHAVPNGTLVKTITNDQIEVTNATELVQSSSTGGICDSPHQILDGENCTLIDALLGDPHCDGFQNKEWDLFVERSKAYSNCYPYDVPDYASLRSLVASSGTLEFNNESFNWTGVAQNGTSSACKRRSNKSFFSRLNWLHQLKYKYPALNVTMPNNEKFDKLYIWGVHHPSTDSDQISLYAQASGRVTVSTKRSQQTVIPNIGSRPWVRDVSSRISIYWTIVKPGDILLINSTGNLIAPRGYFKIRSGKSSIMRSDAPIGKCNSECITPNGSIPNDKPFQNVNRITYGACPRYVKQNTLKLATGMRNVPEKQTRGIFGAIAGFIENGWEGMVDGWYGFRHQNSEGTGQAADLKSTQAAINQINGKLNRLIGKTNEKFHQIEKEFSEVEGRIQDLEKYVEDTKIDLWSYNAELLVALENQHTIDLTDSEMNKLFERTKKQLRENAEDMGNGCFKIYHKCDNACIGSIRNGTYDHDVYRDEALNNRFQIKGVELKSGYKDWILWISFAISCFLLCVVLLGFIMWACQKGNIRCNICI

SEQ ID NO: 1567 - protein, 565 aa, synthetic construct
  REGION 1..565: note = hemagglutinin__InfluenzaA__ABO32678
MKVKLLVLLCTFTATYADTICIGYHANNSTDTVDTVLEKNVTVTHSVNLLEDSHNGKLCLLKGIAPLQLGNCSVAGWILGNPECELLISKESWSYIVETPNPENGTCYPGYFADYEELREQLSSVSSFERFEIFPKESSWPNHTVTGVSASCSHNGKSSFYRNLLWLTGKNGLYPNLSKSYANNKEKEVLVLWGVHHPPNIGDQRALYHTENAYVSVVSSHYSRRFTPEIAKRPKVRDQEGRINYYWTLLEPGDTIIFEANGNLIAPRFAFALSRGFGSGIITSNAPMDECDAKCQTPQGAINSSLPFQNVHPVTIGECPKYVRSAKLRMATGLRNIPSIQSRGLFGAIAGFIEGGWTGMVDGWYGYHHQNEQGSGYAADQKSTQNAINGITNKVNSVIEKMNTQFTAVGKEFSKLERRMENLHKKVDDGFLDIWTYNAELLVLLENERTLDFHDSNVKNLYEKVKSQLKNNAKEIGNGCFEFYHKCNDECMESVKNGTYDYPKYSEESKLNREKIDGVKLESMGVYQILAIYSTVASSLVLLVSLGAISFWMCSNGSLQCRICI

SEQ ID NO: 1568 - protein, 566 aa, synthetic construct
  REGION 1..566: note = hemagglutinin__InfluenzaA__ABO32692
MKTIIALSYILCLVFAQKLPGNDNSTATLCLGHHAVPNGTIVKTITNDQIEVTNATELVQSSSTGGICDSPHQILDGENCTLIDALLGDPQCDGFQNKKWDLFVERSKAYSNCYPYDVPDYASLRSLVASSGTLEFNNESFNWTGVTQNGTSSACKRRSNNSFFSRLNWLTHLKFKYPALNVTMPNNEKFDKLYIWGVHHPGTDNDQIFLYAQASGRITVSTKRSQQTVIPNIGSRPRVRNIPSRISIYWTIVKPGDILLINSTGNLIAPRGYFKIRSGKSSIMRSDAPIGKCNSECITPNGSIPNDKPFQNVNRITYGACPRYVKQNTLKLATGMRNVPEKQTRGIFGAIAGFIENGWEGMVDGWYGFRHQNSEGIGQAADLKSTQAAINQINGKLNRLIGKTNEKFHQIEKEFSEVEGRIQDLEKYVEDTKIDLWSYNAELLVALENQHTIDLTDSEMNKLFERTKKQLRENAEDMGNGCFKIYHKCDNACIGSIRNGTYDHDVYRDEALNNRFQIKGVELKSGYKDWILWISFAISCFLLCVVLLGFIMWACQKGNIRCNICI

SEQ ID NO: 1569 - protein, 566 aa, synthetic construct; identical to SEQ ID NO: 1433
  REGION 1..566: note = hemagglutinin__InfluenzaA__ABO32751

SEQ ID NO: 1570 - protein, 566 aa, synthetic construct; identical to SEQ ID NO: 1433
  REGION 1..566: note = hemagglutinin__InfluenzaA__ABO32762

SEQ ID NO: 1571 - protein, 566 aa, synthetic construct; identical to SEQ ID NO: 1455
  REGION 1..566: note = hemagglutinin__InfluenzaA__ABO32775

SEQ ID NO: 1572 - protein, 566 aa, synthetic construct; identical to SEQ ID NO: 243
  REGION 1..566: note = hemagglutinin__InfluenzaA__ABO32790

SEQ ID NO: 1573 - protein, 566 aa, synthetic construct
  REGION 1..566: note = hemagglutinin__InfluenzaA__ABO32803
MKTIIALSYILCLVFAQKLPGNDNSTATLCLGHHAVPNGTIVKTITNDQIEVTNATELVQSSSTGGICDSPHQILDGENCTLIDALLGDPQCDGFQNKKWDLFVERSKAYSNCYPYDVPDYVSLRSLVASSGTLEFNNESFNWTGVTQNGTSSACKRRSNNSFFSRLNWLTHLKFKYPALNVTMPNNEKFDKLYIWGVHHPGTDNDQISLYAQASGRITVSTKRSQQTVIPNIGSRPRVRDIPSRISIYWTIVKPGDTLLINSTGNLIAPRGYFKIRSGKSSIMRSDAPIDKCNSECITPNGSIPNDKPFQNVNRITYGACPRYVKQNTLKLATGMRNVPEKQTRGIFGAIAGFIENGWEGMVDGWYGFRHQNSEGIGQAADLKSTQAAINQINGKLNRLIGKTNEKFHQIEKEFSEVEGRIQDLEKYVEDTKIDLWSYNAELLVALENQHTIDLTDSEMNKLFERTKKQLRENAEDMGNGCFKIYHKCDNACIGSIRNGTYDHDVYRDEALNNRFQIKGVELKSGYKDWILWISFAISCFLLCVALLGFIMWACQKGNIRCNICI

SEQ ID NO: 1574 - protein, 566 aa, synthetic construct; identical to SEQ ID NO: 633
  REGION 1..566: note = hemagglutinin__InfluenzaA__ABO32816

SEQ ID NO: 1575 - protein, 566 aa, synthetic construct; identical to SEQ ID NO: 256
  REGION 1..566: note = hemagglutinin__InfluenzaA__ABO32827

SEQ ID NO: 1576 - protein, 566 aa, synthetic construct
  REGION 1..566: note = hemagglutinin__InfluenzaA__ABO32838
MKTIIALSYILCLVFAQKLPGNDNSTATLCLGHHAVPNGTIVKTITNDQIEVTNATELVQSSSTGGICDSPHQILDGENCTLIDALLGDPQCDGFQNKRWDLFVERSKAYSNCYPYDVPDYASLRSLVASSGTLEFNNESFNWTGVTQNGTSSACKRRSNNSFFSRLNWLTHLKFKYPALNVTMPNNEKFDKLYIWGVHHPGTDNDQIFLYAQASGRITVSTKRSQQTVIPNIGSRPRVRNIPSRISIYWTIVKPGDILLINSTGNLIAPRGYFKIRSGKSSIMRSDAPIGKCNSECITPNGSIPNDKPFQNVNRITYGACPRYVKQNTLKLATGMRNVPEKQTRGIFGAIAGFIENGWEGMVDGWYGFRHQNSEGIGQAADLKSTQAAINQINGKLNRLIGKTNEKFHQIEKEFSEVEGRIQDLEKYVEDTKIDLWSYNAELLVALENQHTIDLTDSEMNKLFERTKKQLRENAEDMGNGCFKIYHKCDNACIGSIRNGTYDHDVYRDEALNNRFQIKGVELKSGYKDWILWISFAISCFLLCVALLGFIMWACQKGNIRCNICI

SEQ ID NO: 1577 - protein, 566 aa, synthetic construct; identical to SEQ ID NO: 1576
  REGION 1..566: note = hemagglutinin__InfluenzaA__ABO32849

SEQ ID NO: 1578 - protein, 566 aa, synthetic construct
  REGION 1..566: note = hemagglutinin__InfluenzaA__ABO32860
MKTIIALSYILCLVFAQKLPGNDNSTATLCLGHHAVPNGTIVKTITNDQIEVTNATELVQSSSTGGICDSPHQILDGENCTLIDALLGDPQCDGFQNKRWDLFVERSKAYSNCYPYDVPDYASLRSLVASSGTLEFNNESFNWTGVTQNGTSSACKRRSNNSFFSRLNWLTHLKFKYPALNVTMPNNEKFDKLYIWGVHHPGTDNDQIFLYAQASGRITVSTKRSQQTVIPNIGSRPRVRDIPSRISIYWTIVKPGDILLINSTGNLIAPRGYFKIRSGKSSIMRSDAPIGKCNSECITPNGSIPNDKPFQNVNRITYGACPRYVKQNTLKLATGMRNVPEKQTRGIFGAIAGFIENGWEGMVDGWYGFRHQNSEGIGQAADLKSTQAAINQINGKLNRLIGKTNEKFHQIEKEFSEVEGRIQDLEKYVEDTKIDLWSYNAELLVALENQHTIDLTDSEMNKLFERTKKQLRENAEDMGNGCFKIYHKCDNACIGSIRNGTYDHDVYRDEALNNRFQIKGVELKSGYKDWILWISFAISCFLLCVALLGFIMWACQKGNIRCNICI

SEQ ID NO: 1579 - protein, 566 aa, synthetic construct; identical to SEQ ID NO: 1561
  REGION 1..566: note = hemagglutinin__InfluenzaA__ABO32871

SEQ ID NO: 1580 - protein, 566 aa, synthetic construct
  REGION 1..566: note = hemagglutinin__InfluenzaA__ABO32882
MKTIIALSYIICLVFAQKLPGNDNSTATLCLGHHAVPNGTIVKTITNDQIEVTNATELVQSSSTGEICDSPHQILDGENCTLIDALLGDPQCDGFQNKKWDLFVERSKAYSNCYPYDVPDYASLRSLVASSGTLEFNNESFNWTGVTQNGTSSACKRRSNNSFFSRLNWLTHLKFKYPALNVTMPNNEKFDKLYIWGVHHPGTDNDQIFPYAQASGRITVSTKRSQQTVIPNIGSRPRVRNIPSRISIYWTIVKPGDILLINSTGNLIAPRGYFRIRSGKSSIMRSDAPIGKCNSECITPNGSIPNDKPFQNVNRITYGACPRYVKQNTLKLATGMRNVPEKQTRGIFGAIAGFIENGWEGMVDGWYGFRHQNSEGIGQAADLKSTQAAINQINGKLNRLIGKTNEKFHQIEKEFSEVEGRIQDLEKYVEDTKIDLWSYNAELLVALENQHTIDLTDSEMNKLFERTKKQLRENAEDMGNGCFKIYHKCDNACIGSIRNGTYDHDVYRDEALNNRFQIKGVELKSGYKDWILWISFAISCFLLCVALLGFIMWACQKGNIRCNICI

SEQ ID NO: 1581 - protein, 566 aa, synthetic construct
  REGION 1..566: note = hemagglutinin__InfluenzaA__ABO32893
MKTIIALSYILCLVFAQKLPGNDNSTATLCLGHHAVPNGTIVKTITNDQIEVTNATELVQSSSTGEICDSPHQILDGENCTLIDALLGDPQCDGFQNKKWDLFVERSKAYSNCYPYDVPDYASLRSLVASSGTLEFNNESFNWTGVTQNGTSSACKRRSNNSFFSRLNWLTHLKFKYPALNVTMPNNEKFDKLYIWGVHHPGTDNDQIFLYAQASGRITVSTKRSQQTVIPNIGSRPRVRNIPSRISIYWTIVKPGDILLINSTGNLIAPRGYFKIRSGKSSIMRSDAPIGKCNSECITPNGSIPNDKPFQNVNRITYGACPRYVKQNTLKLATGMRNVPEKQTRGIFGAIAGFIENGWEGMVDGWYGFRHQNSEGIGQAADLKSTQAAINQINGKLNRLIGKTNEKFHQIEKEFSEVEGRIQDLEKYVEDTKIDLWSYNAELLVALENQHTIDLTDSEMNKLFERTKKQLRENAEDMGNGCFKIYHKCDNACIGSIRNGTYDHDVYRDEALNNRFQIKGVELKSGYKDWILWISFAISCFLLCVVLLGFIMWACQKGNIRCNICI

SEQ ID NO: 1582 - protein, 566 aa, synthetic construct; identical to SEQ ID NO: 1581
  REGION 1..566: note = hemagglutinin__InfluenzaA__ABO32904

SEQ ID NO: 1583 - protein, 566 aa, synthetic construct; identical to SEQ ID NO: 1396
  REGION 1..566: note = hemagglutinin__InfluenzaA__ABO32915

SEQ ID NO: 1584 - protein, 566 aa, synthetic construct; identical to SEQ ID NO: 1396
  REGION 1..566: note = hemagglutinin__InfluenzaA__ABO32926

SEQ ID NO: 1585 - protein, 566 aa, synthetic construct
  REGION 1..566: note = hemagglutinin__InfluenzaA__ABO32937
MKTIIALSYILCLVFAQKLPGNDNSTATLCLGHHAVPNGTIVRTITNDQIEVTNATELVQSSSTGEICDSPHQILDGENCTLIDALLGDPQCDGFQNKKWDLFVERSKAYSNCYPYDVPDYASLRSLVASSGTLEFNNESFNWTGVTQNGTSSSCKRRSNNSFFSRLNWLTHLKFKYPALNVTMPNNEKFDKLYIWGVHHPGTDNDQIFLYAQASGRITVSTKRSQQTVIPNIGSRPRVRNIPSRISIYWTIVKPGDILLINSTGNLIAPRGYFKIRSGKSSIMRSDAPIGKCNSECITPNGSIPNDKPFQNVNRITYGACPRYVKQNTLKLATGMRNVPEKQTRGIFGAIAGFIENGWEGMVDGWYGFRHQNSEGIGQAADLKSTQAAINQINGKLNRLIGKTNEKFHQIEKEFSEVEGRIQDLEKYVEDTKIDLWSYNAELLVALENQHTIDLTDSEMNKLFERTKKQLRENAEDMGNGCFKIYHKCDNACIGSIRNGTYDHDVYRDEALNNRFQIKGVELKSGYKDWILWISFAISCFLLCVALLGFIMWACQKGNIRCNICI

SEQ ID NO: 1586 - protein, 565 aa, synthetic construct
  REGION 1..565: note = hemagglutinin__InfluenzaA__ABO32948
MRAKLLVLLCTFTATYADTICIGYHANNSTDTVDTVLEKNVTVTHSVNLLEDSHNGKLCLLKGIAPLQLGNCSVAGWILGNPECELLISKESWSYIVETPNPENGTCYPGYFADYEELREQLSSVSSFERFEIFPKGSSWPNHTVTGVSASCSHNGKSSFYRNLLWLTGKNGLYPNLSMSYVNNKEKEVLVLWGVHHPPNIGDQRALYHTENAYVSVVSSHYSRRFTPEIAKRPKVRDQEGRINYYWTLLEPGDTIIFEANGNLIAPWYAFALSRGFGSGIITSNAPMDECDAKCQTPQGAINSSLPFQNVHPVTIGECPKYVRSAKLRMVTGLRNIPSIQSRGLFGAIAGFIEGGWTGMVDGWYGYHHQNEQGSGYAADQKSTQNAINGITNKVNSVIEKMNTQFTAVGKEFNKLERRMENLNKKVDDGFLDIWTYNAELLVLLENERTLDFHDSNVKNLYEKVKSQLKNNAKEIGNGCFEFYHKCNNECMESVKNGTYDYPKYSEESKLNREKIDGVKLESMGVYQILAIYSTVASSLVLLVSLGAISFWMCSNGSLQCRICI

SEQ ID NO: 1587 - protein, 565 aa, synthetic construct
  REGION 1..565: note = hemagglutinin__InfluenzaA__ABO32959
MKAKLLVLLCTFTATYADTICIGYHANNSTDTVDTVLEKNVTVTHSVNLLEDSHNGKLCLLKGIAPLQLGNCSVAGWILGNPECELLISKESWSYIVETPNPENGTCYPGYFADYEELREQLSSVSSFERFEIFPKESSWPNHTVTGVSASCSHNGKSSFYRNLLWLTGKNGLYPNLSRSYVNNKEKEVLVLWGVHHPPNIGDQRALYHTENAYVSVVSSHYSRRFTPEIAKRPKVRDQEGRINYYWTLLEPGDTLIFEANGNLIAPWYAFALSRGFGSGIITSNAPMDECDAKCQTPQGAINSSLPFQNVHPVTIGECPKYVRSTKLRMVTGLRNIPSIQSRGLFGAIAGFIEGGWTGMVDGWYGYHHQNEQGSGYAADQKSTQNAINGITNKVNSVIEKMNTQFTAVGKEFNKLERRMENLNKKVDDGFLDIWTYNAELLVLLENERTLDFHDSNVKNLYEKVKSQLKNNAKEIGNGCFEFYHKCNNECMESVKNGTYDYPKYSEESKLNREKIDGVKLESMGVYQILAIYSTVASSLVLLVSLGAISFWMCSNGSLQCRICI

SEQ ID NO: 1588 - protein, 565 aa, synthetic construct; identical to SEQ ID NO: 1204
  REGION 1..565: note = hemagglutinin__InfluenzaA__ABO32970

SEQ ID NO: 1589 - protein, 566 aa, synthetic construct
  REGION 1..566: note = hemagglutinin__InfluenzaA__ABO32981
MKAKLLVLLCALSATDADTICIGYHANNSTDTVDTVLEKNVTVTHSVNLLEDSHNGKLCRLKGIAPLQLGKCSIAGWILGNPECESLFSKKSWSYIAETPNSENGTCYPGYFADYEELREQLSSVSSFERFEIFPKERSWPKHNVTRGVTASCSHKGKSSFYRNLLWLTEKNGSYPNLSKSYVNNKEKEVLVLWGVHHPSNIKDQKTIYRKENAYVSVVSSNYNRRFTPEIAERPKVRDQAGRINYYWTLLEPGDTIIFEANGNLIAPWYAFALSRGFGSGIITSNASMDECDTKCQTPQGAINSSLPFQNVHPVTIGECPKYVRSTKLRMVTGLRNIPSIQSRGLFGAIAGFIEGGWTGMIDGWYGYHHQNEQGSGYAADQKSTQNAINGITNKVNSVIEKMNTQFTAVGKEFNKLEKRMENLNKKVDDGFLDIWTYNAELLVLLENERTLDFHDSNVKNLYEKVKSQLKNNAKEIGNGCFEFYHKCNNECMESVKNGTYDYPKYSEESKLNREKIDGVKLESMGVYQILAIYSTVASSLVLLVSLGAISFWMCSNGSLQCRICI

SEQ ID NO: 1590 - protein, 566 aa, synthetic construct
  REGION 1..566: note = hemagglutinin__InfluenzaA__ABO32992
MKAKLLVLLCALSATDADTICIGYHANNSTDTVDTVLEKNVTVTHSVNLLEDSHNGKLCRLKGIAPLQLGKCSIAGWILGNPECESLFSKKSWSYIAETPNSENGTCYPGYFADYEELREQLSSVSSFERFEIFPKERSWPKHDVTRGVTASCSHKGKSSFYRNLLWLTEKNGSYPNLSKSYVNNKEKEVLVLWGVHHPSNIEDQKTIYRKENAYVSVVSSNYNRRFTPEISERPKVRDQKGRINYYWTLLEPGDTIIFEANGNLIAPWYAFALSRGFGSGIITSNASMDECDTKCQTPQGAINSSLPFQNVHPVTIGECPKYVRSTKLRMVTGLRNIPSIQSRGLFGAIAGFIEGGWTGMIDGWYGYHHQNEQGSGYAADQKSTQNAINGITNKVNSVIEKMNTQFTAVGKEFNKLEKRMENLNKKVDDGFLDIWTYNAELLVLLENERTLDFHDSNVKNLYEKVKSQLKNNAKEIGNGCFEFYHKCNNECMESVKNGTYDYPKYSEESKLNREKIDGVKLESMGVYQILAIYSTVASSLVLLVSLGAISFWMCSNGSLQCRICI

SEQ ID NO: 1591 - protein, 566 aa, synthetic construct
  REGION 1..566: note = hemagglutinin__InfluenzaA__ABO33006
MKAKILVLLCALSATDADTICIGYHANNSTDTVDTVLEKNVTVTHSVNLLEDSHNGKLCRLKGIAPLQLGKCSIAGWILGNPECESLFSKKSWSYIAETPNSENGTCYPGYFADYEELREQLSSVSSFERFEIFPKERSWPKHNVTRGVTASCSHKGKSSFYRNLLWLTEKNGSYPNLSKSYVNNKEKEVLVLWGVHHPSNIEDQKTIYRKENAYVSVVSSNYNRRFTPEISKRPKVRDQEGRINYYWTLLEPGDTIIFEANGNLIAPWYAFALSRGFGSGIITSNASMDECDTKCQTPQGAINSSLPFQNVHPVTIGECPKYVRSTKLRMVTGLRNIPSIQSRGLFGAIAGFIEGGWTGMIDGWYGYHHQNEQGSGYAADQKSTQNAINGITNKVNSVIEKMNTQFTAVGKEFNKLEKRMENLNKKVDDGFLDIWTYNAELLVLLENERTLDFHDSNVKNLYEKVKSQLKNNAKEIGNGCFEFYHKCNNECMESVKNGTYDYPKYSEESKLNREKIDGVKLESMGVYQILAIYSTVASSLVLLVSLGAISFWMCSNGSLQCRICI

SEQ ID NO: 1592 - protein, 566 aa, synthetic construct
  REGION 1..566: note = hemagglutinin__InfluenzaA__ABO33025
MKAKLLVLLCALSATDADTICIGYHANNSTDTVDTVLEKNVTVTHSVNLLEDNHNGKLCKLKGIAPLQLGKCSIAGWILGNPECESLFSKKSWSYIAETPNSENGTCYPGYFADYEELREQLSSVSSFERFEIFPKESSWPNHNVTKGVTASCSHKGKSSFYRNLLWLTEKNGSYPNLSKSYVNNKEKEVLVLWGVHHPSNIKDQRTIYRKENAYVSVVSSHYNRRFTPEIAKRPKVRDQEGRINYYWTLLEPGDTIIFEANGNLIAPWYAFALSRGFGSGIITSNASMDECDAKCQTPQGAINSSLPFQNVHPVTIGECPKYVRSTKLRMVTGLRNIPSIQSRGLFGAIAGFIEGGWTGMIDGWYGYHHQNEQGSGYAADQKSTQSAINGITNKVNSIIEKMNTQFTAVGKEFNKLEKRMENLNKKVDDGFLDIWTYNAELLVLLENERTLDFHDSNVKNLYEKVKSQLKNNAKEIGNGCFEFYHKCNNECMESVKNGTYDYPKYSEESKLNREKIDGVKLESMGVYQILAIYSTVASSLVLLVSLGAISFWMCSNGSLQCRICI

SEQ ID NO: 1593 - protein, 566 aa, synthetic construct
  REGION 1..566: note = hemagglutinin__InfluenzaA__ABO33036
MKTIIALSYILCLVFAQKLPGNDNSTATLCLGHHAVPNGTLVKTITNDQIEVTNATELVQSSSTGRICNSPHQILDGENCTLIDALLGDPHCDGFQNKEWDLFVERRKAYSNCYPYDVPDYASLRSLVASSGTLEFNNESFNWTGVAQNGTSSACKRRSIKSFFSRLNWLHQLKYKYPALNVTMPNNEKFDKLYIWGVHHPSTDSDQISLYAQASGRVTVSTKRSQQTVIPNIGSRPWVRGVSSRISIYWTIVKPGDILLINSTGNLIAPRGYFKIRSGKSSIMRSDAPIGKCNSECITPNGSIPNDKPFQNVNRITYGACPRYVKQNTLKLATGMRNVPEKQTRGIFGAIAGFIENGWEGMVDGWYGFRHQNSEGTGQAADLKSTQAAINQINGKLNRLIEKTNEKFHQIEKEFSEVEGRIQDLEKYVEDTKIDLWSYNAELLVALENQHTIDLTDSEMNKLFERTKKQLRENAEDMGNGCFKIYHKCDNACIGSIRNGTYDHDVYRDEALNNRFQIKGVELKSGYKDWILWISFAISCFLLCVVLLGFIMWACQKGNIRCNICI

SEQ ID NO: 1594 - protein, 566 aa, synthetic construct; identical to SEQ ID NO: 72
  REGION 1..566: note = hemagglutinin__InfluenzaA__ABO33047

SEQ ID NO: 1595 - protein, 566 aa, synthetic construct; identical to SEQ ID NO: 650
  REGION 1..566: note = hemagglutinin__InfluenzaA__ABO33058

SEQ ID NO: 1596 - protein, 566 aa, synthetic construct
  REGION 1..566: note = hemagglutinin__InfluenzaA__ABO33069
MKTIIALSYIFCLVFAQNLPGNDNSTATLCLGHHAVPNGTLVKTITNDQIEVTNATELVQSSSTGRICDSPHRILDGKNCTLIDALLGDPHCDGFQNEKWDLFVERSKAFSNCYPYDVPDYASLRSLVASSGTLEFINEGFNWTGVTQNGGSYACKRGPDNSFFSRLNWLYESESKYPVLNVTMPNNDNFDKLYIWGVHHPSTDKEQTNLYVQASGRVTVSTKKSQQTIIPNVGSRPWVRGLSSRISIYWTIVKPGDILLINSNGNLIAPRGYFKIRTGKSSIMRSDAPIGTCSSECITPNGSIPNDKPFQNVNKITYGACPKYVKQNTLKLATGMRNVPEKQTRGIFGAIAGFIENGWEGMVDGWYGFRHQNSEGTGQAADLKSTQAAIDQINGKLNRVIEKTNEKFHQIEKEFSEVEGRIQDLEKYIEDTKIDLWSYNAELLVALENQHTIDLTDSKMNKLFEKTRRQLRENAEDMGNGCFKIYHKCDNACIGSIRNGTYDHDVYRDEALNNRFQIKGVELKSGYKDWILWISFAISCFLLCVVLLGFIMWACQKGNIRCNICI

SEQ ID NO: 1597 - protein, 566 aa, synthetic construct; identical to SEQ ID NO: 921
  REGION 1..566: note = hemagglutinin__InfluenzaA__ABO37988

SEQ ID NO: 1598 - protein, 566 aa, synthetic construct
  REGION 1..566: note = hemagglutinin__InfluenzaA__ABO38010
MKAKLLVLLCAFTATYADTICIGYHANNSTDTVDTVLEKNVTVTHSVNLLEDSHNGKLCRLKGTAPLQLGNCSVAGWILGNPECESLFSKESWSYIAETPNPENGTCYPGYFADYEELREQLSSVSSFERFEIFPKESSWPNHTVTKGVTASCSHNGKSSFYKNLLWLTEKNGLYPNLSKSYVNNKEKEVLVLWGVHHPSNIGDQRAIYHTENAYVSVVSSHYSRRFTPEIAKRPKVRDQEGRINYYWTLLEPGDTIIFEANGNLIAPWYAFALSRGVGSGIITSNASMGDCDAKCQTPQGAINSSLPFQNVHPVTIGECPKYVRSTKLRMVTGLRNIPSIQSRGLFGAIAGFIEGGWTGMIDGWYGYHHQNEQGSGYAADKKSTQNAIDGITNKVNSVIEKMNTQFTAVGKEFNKLERRMENLNKKVDDGFLDIWTYNAELLVLLENERTLDFHDSNVKNLYEKVKNQLKNNAKEIGNGCFEFYHKCNNECMESVKNGTYDYPKYSEESKLKREKIDGVKLESMGVYQILAIYSTVASSLVLLVSLGAISFWMCSNGSLQCRICI

SEQ ID NO: 1599 - protein, 565 aa, synthetic construct
  REGION 1..565: note = hemagglutinin__InfluenzaA__ABO38021
MKAKLLVLLCTFTATYADTICIGYHANNSTDTVDTVLEKNVTVTHSVNLLEDSHNGKLCLLKGIAPLQLGNCSVAGWILGNPECELLIPKESWSYIVETPNPENGTCYPGYFADYEELREQLSSVSSFERFEIFPKESSWPNHTVTGVSASCSHNGKSSFYRNLLWLTGKNGLYPNLSKSYANNKEKEVLVLWGVHHPPNIGDQRALYHTENAYVSVVSSHYSRRFIPEMAKRPKVRDQEGRINYYWTLLEPGDTIIFEANGNLIAPWYAFALSRGFGSGIITSNAPMGECDAKCQTPQGAINSSLPFQNVHPVTIGECPKYVRSAKLRMVTGLRNIPSIQSRGLFGAIAGFIEGGWTGMVDGWYGYHHQNEQGSGYAADQKSTQNAINGITNKVNSVIEKMNTQFTAVGKEFNKLERRMENLNKKVDDGFLDIWTYNAELLVLLENERTLDFHDSNVKNLYEKVKSQLKNNAKEIGNGCFEFYHKCNNECMESVKNGTYDYPKYSEESKLNREKIDGVKLESMGVYQILAIYSTVASSLVLLVSLGAISFWMCSNGSLQCRICI

SEQ ID NO: 1600 - protein, 565 aa, synthetic construct
  REGION 1..565: note = hemagglutinin__InfluenzaA__ABO38032
MKVKLLVLLCTFTATYADTICIGYHANNSTDTVDTVLEKNVTVTHSVNLLEDSHNGKLCLLKGIAPLQLGNCSVAGWILGNPECELLISKESWSYIVETPDPENGTCYPGYFADYEELREQLSSVSSFERFEIFPKESSWPNHTVTGVSASCSHNGKSSFYRNLLWLTGKNGLYPNLSKSYANNKEKEVLVLWGVHHPPNIGDQRALYHTENAYVSVVSSHYSRRFTPEIAKRPKVRDQEGRINYYWTLLEPGDTIIFEANGNLIAPRYAFALSRGFGSGIITSNAPMDECDAKCQTPKGAINSSLPFQNVHPVTIGECPKYVRSAKLRMVTGLRNIPSIQSRGLFGAIAGFIEGGWTGMVDGWYGYHHQNEQGSGYAADQKSTQNAINGITNKVNSVIEKMNTQFTAVGKEFNKLERRMENLNKKVDDGFLDIWTYNAELLVLLENERTLDFHDSNVKNLYEKVKSQLKNNAKEIGNGCFEFYHKCNNECMESVKNGTYDYPKYSEESKLNREKIDGVKLESMGIYQILAIYSTVASSLVLLVSLGAISFWMCSNGSLQCRICI

SEQ ID NO: 1601 - protein, 565 aa, synthetic construct; identical to SEQ ID NO: 800
  REGION 1..565: note = hemagglutinin__InfluenzaA__ABO38043

SEQ ID NO: 1602 - protein, 566 aa, synthetic construct
  REGION 1..566: note = hemagglutinin__InfluenzaA__ABO38054
MKARLLVLLCALAATDADTICIGYHANNSTDTVDTVLEKNVTVTHSVNLLEDSHNGKLCRLKGIAPLQLGKCNIAGWILGNPECESLLSERSWSYIVETPNSENGTCYPGDFIDYEELREQLSSVSSFERFEIFSKESSWPKHNTTRGVTAACSHAGKSSFYRNLLWLTEKDGSYPNLNNSYVNKKGKEVLVLWGVHHPSNIKDQQTLYQKENAYVSVVSSNYNRRFTPEIAERPKVRGQAGRMNYYWTLLKPGDTIMFEANGNLIAPWYAFALSRGFGSGIITSNASMHECDTKCQTPQGAINSSLPFQNIHPVTIGECPKYVRSTKLRMVTGLRNIPSIQSRGLFGAIAGFIEGGWTGMIDGWYGYHHQNEQGSGYAADQKSTQNAINGITNKVNSVIEKMNTQFTAVGKEFNNLEKRMENLNKKVDDGFLDIWTYNAELLVLLENERTLDFHDSNVKNLYEKVKNQLRNNAKEIGNGCFEFYHKCNNECMESVKNGTYDYPKYSEESKLNREKIDGVKLESMGVYQILAIYSTVASSLVLLVSLGAISFWMCSNGSLQCRICI

SEQ ID NO: 1603 - protein, 566 aa, synthetic construct
  REGION 1..566: note = hemagglutinin__InfluenzaA__ABO38065
MKAKLLVLLCALSATDADTICIGYHANNSTDTVDTVLEKNVTVTHSVNLLEDSHNGKLCRLKGIAPLQLGKCSIAGWILGNPECESLFSKKSWSYIAETPNSENGTCYPGYFADYEELREQLSSVSSFERFEIFPKERSWPKHNITRGVTASCSHKGKSSFYRNLLWLTEKNGSYPNLSKSYVNNKEKEVLVLWGVHHPSNIEDQKTIYRKENAYVSVVSSNYNRRFTPEIAKRPKVRGQEGRINYYWTLLEPGDTIIFEANGNLIAPWYAFALSRGFGSGIITSNASMDECDTKCQTPQGAINSSLPFQNVHPVTIGECPKYVRSTKLRMVTGLRNIPSIQSRGLFGAIAGFIEGGWTGMIDGWYGYHHQNEQGSGYAADQKSTQNAINGITNKVNSVIEKMNTQFTAVGKEFNKLEKRMENLNKKVDDGFLDIWTYNAELLVLLENERTLDFHDSNVKNLYEKVKSQLKNNAKEIGNGCFEFYHKCNNECMESVKNGTYDYPKYSEESKLNREKIDGVKLESMGVYQILAIYSTVASSLVLLVSLGAISFWMCSNGSLQCRICI

SEQ ID NO: 1604 - protein, 566 aa, synthetic construct; identical to SEQ ID NO: 243
  REGION 1..566: note = hemagglutinin__InfluenzaA__ABO38076

SEQ ID NO: 1605 - protein, 566 aa, synthetic construct
  REGION 1..566: note = hemagglutinin__InfluenzaA__ABO38087
MKTIIALSYILCLVFAQKLPVNDNSTATLCLGHHAVPNGTLVKTITNDHIEVTNATELVQSSSTGRICDSPHQILDGENCTLIDALLGDPHCDGFQNKEWDLFVERSTAYSNCYPYDVPDYASLRSLVASSGTLEFNNESFNWTGVAQNGTSSACKRRSIKSFFSRLNWLHQLKYKYPALNVTMPNNEKFDKLYIWGVHHPSTDSDQISLYAQASGRVTVSTKRSQQTVIPNIGSRPWVRGVSSRISIYWTIVKPGDILLINSTGNLIAPRGYFKIRSGKSSIMRSNAPIGKCNSECITPNGSIPNDKPFQNVNRITYGACPRYVKQNTLKLATGMRNVPEKQTRGIFGAIAGFIENGWEGMVDGWYGFRHQNSEGTGQAADLKSTQAAINQINGKLNRLIEKTNEKFHQIEKEFSEVEGRIQDLEKYVEDTKIDLWSYNAELLVALENQHTIDLTDSEMNKLFERTRKQLRENAEDVGNGCFKIYHKCDNACIGSIRNGTYDHDVYRDEALNNRFQIKGVELKSGYKDWILWISFAISCFLLCVVLLGFIMWACQKGNIRCNICI

SEQ ID NO: 1606 - protein, 562 aa, synthetic construct
  REGION 1..562: note = hemagglutinin__InfluenzaA__ABO38098
MAIIYLILLFTAVRGDQICIGYHANNSTEKVDTILERNVTVTHAKDILEKTHNGKLCKLNGIPPLELGDCSIAGWLLGNPECDRLLSVPEWSYIMEKENPRDGLCYPGSFNDYEELKHLLSSVKHFEKVKILPKDRWTQHTTTGGSRACAVSGNPSFFRNMVWLTKKGSNYPVAKGSYNNTSGEQMLIIWGVHHPNDETEQRTLYQNVGTYVSVGTSTLNKRSTPDIATRPKVNGQGGRMEFSWTLLDMWDTINFESTGNLIAPEYGFKISKRGSSGIMKTEGTLGNCETKCQTPLGAINTTLPFHNVHPLTIGECPKYVKSEKLVLATGLRNVPQIESRGLFGAIAGFIEGGWQGMVDGWYGYHHSNDQGSGYAADKESTQKAFDGITNKVNSVIEKMNTQFEAVGKEFSNLERRLENLNKKMEDGFLDVWTYNAELLVLMENERTLDFHDSNVKNLYDKVRMQLRDNVKELGNGCFEFYHKCDDECMNSVKNGTYDYPKYEEESKLNRNEIKGVKLSSMGVYQILAIYATVAGSLSLAIMMAGISFWMCSNGSLQCRICI

SEQ ID NO: 1607 - protein, 566 aa, synthetic construct
  REGION 1..566: note = hemagglutinin__InfluenzaA__ABO38230
MKTIIALSYIFCQVFAQNLPGNDNSTATLCLGHHAVPNGTLVKTITNDQIEVTNATELVQSSSTGRICDNPHRILDGKNCTLIDALLGDPHCDGFQNEKWDLFVERSKAFSNCYPYDVPDYASLRSLVASSGTLEFFNEGFNWTGVTQNGGSYACKRGPDNSFFSRLNWLYKSESTYPVLNVTMPNNDNFDKLYIWGVHHPSTDKEQTNLYVQASGRVTVSTKRSQQTIIPSVGSRPWVRGLSSRISIYWTIVKPGDVLLINSNGNLIAPRGYFKIRTGKSSIMRSDAPIGTCSSECITPNGSIPNDKPFQNVDKITYGACPKYVKQNTLKLATGMRNVPEKQTRGIFGAIAGFIENGWEGMIDGWYGFRHQNSEGTGQAADLKSTQAAIDQINGKLNRVIEKTNEKFHQIEKEFSEVEGRIQDLEKYVEDTKIDLWSYNAELLVALENQHTIDLTDSEMNKLFEKTRRQLRENAEDMGNGCFKIYHKCDNACIGSIRNGTYDHDVYRDEALNNRFQIKGVELKSGYKDWILWISFAISCFLLCVVLLGFIMWACQKGNIRCNICI

SEQ ID NO: 1608 - protein, 566 aa, synthetic construct
  REGION 1..566: note = hemagglutinin__InfluenzaA__ABO38241
MKTIIALSYISCLVFAQKLPGNDNSTATLCLGHHAVPNGTLVKTITNDQIEVTNATELVQSSSTGRICDSPHRILDGKNCTLIDALLGDPHCDGFQNEKWDLFVERSKAFSNCYPYDVPDYASLRSLVASSGTLEFINEGFNWTGVTQSGGSYTCKRGSVNSFFSRLNWLYESESKYPALNVTMPNNGKFDKLYIWGVHHPSTDKEQTNLYVRASGRVTVSTKRSQQTVIPNIGPRPWVRGLSSRISIYWTIVKPGDILLINSTGNLIAPRGYFKIRTGKSSIMRSDAPIGTCSSGCITPNGSIPNDKPFQNVNKITYGACPRYVKQNTLKLATGMRNVPEKQTRGIFGAIAGFIENGWEGMVDGWYGFRHQNSEGTGQAADLKSTQAAIDQINGKLNRLIEKTNEKFHQIEKEFSEVEGRIQDLEKYVEDTKIDLWSYNAELLVALENQHTIDMTDSEMNKLFEKTRKQLRENAEDMGNGCFKIYHKCDNACIGSIRNGTYDHDVYRDEALNNRFQIKGVELKSGYKDWILWISFAISCFLLCVVLLGFIMWACQKGNIRCNICI

SEQ ID NO: 1609 - protein, 566 aa, synthetic construct; identical to SEQ ID NO: 282
  REGION 1..566: note = hemagglutinin__InfluenzaA__ABO38252

SEQ ID NO: 1610 - protein, 562 aa, synthetic construct
  REGION 1..562: note = hemagglutinin__InfluenzaA__ABO38296
MVIIYLILLFTAVRGDQICIGYHANNSTEKVDTILERNVTVTHAKDILEKTHNGKLCKLNGIPPLELGDCSIAGWLLGNPECDRLLSVPEWSYIMEKENPRDGLCYPGSFNDYEELKHFLSSVKHFEKVKILPKDRWTQHTTTGGSRACAVSGNPSFFRNMVWLTKKGSNYPVAKGSYNNTSGEQMLIIWGVHHPNDETEQRTLYQNVGTYVSVGTSTLNKRSTPDIATRPKVNGLGGRMEFSWTLLDMWDTINFESTGNLIAPEYGFKISKRGSSGIMKTEGTLGNCETKCQTPLGAINTTLPFHNVHPLTIGECPKYVKSEKLVLATGLRNVPQIESRGLFGAIAGFIEGGWQGMVDGWYGYHHSNDQGSGYAADKESTQKAFDGITNKVNSVIEKMNTQFEAVGKEFSNLERRLENLNKKMEDGFLDVWTYNAELLVLMENERTLDFHDSNVKNLYDKVRMQLRDNAKELGNGCFEFYHKCDDECMNSVKNGTYYYPKYEEESKLNRNEIKGVKLSSMGVYQILAIYATVAGSLSLAIMMAGISFWMCSNGSLQCRICI

SEQ ID NO: 1611 - protein, 565 aa, synthetic construct; identical to SEQ ID NO: 870
  REGION 1..565: note = hemagglutinin__InfluenzaA__ABO38318

SEQ ID NO: 1612 - protein, 565 aa, synthetic construct; identical to SEQ ID NO: 800
  REGION 1..565: note = hemagglutinin__InfluenzaA__ABO38329

SEQ ID NO: 1613 - protein, 566 aa, synthetic construct
  REGION 1..566: note = hemagglutinin__InfluenzaA__ABO38351
MKARLLVLLCALAATDADTICIGYHANNSTDTVDTVLEKNVTVTHSVNLLEDSHNGKLCRLKGIAPLQLGKCNIAGWLLGNPECDPLLPARSWSYIVETPNSENGICYPGAFIDYEELREQLSSVSSFERFEIFPKESSWPNHNTNIGVTAACSHAGKSSFYRNLLWLTKKGGSYPKLKNSYVNKKGKEVLVLWGIHHPSNSKDQQTLYQNENAYVSVVSSNYNRRFTPEIAERPEVRDQAGRMNYYWTLLEPGDTIMFEANGNLVAPWYAFALSRGFGSGIITSNASMHECNTKCQTPQGAINSSLPFQNIHPVTIGECPKYVRSAKLRMVTGLRNIPSIQSRGLFGAIAGFIEGGWTGMIDGWYGYHHQNEQGSGYAADQKSTQNAINGITNKVNSVIEKMNTQFTAVGKEFNNLEKRMENLNKKVDDGFLDIWTYNAELLVLLENERTLDFHDSNVKNLYEKVKSQLKNNAKEIGNGCFEFYHKCDNECMESVRNGTYDYPKYSEESKLNREKIDGVKLESMGVYQILAIYSTVASSLVLLVSLGAISFWMCSNGSLQCRICI

SEQ ID NO: 1614 - protein, 566 aa, synthetic construct
  REGION 1..566: note = hemagglutinin__InfluenzaA__ABO38362
MKAKLLVLLCALSATDADTICIGYHANNSTDTVDTVLEKNVTVTHSVNLLEDSHNGKLCRLKGIAPLQLGKCSIAGWILGNPECESLVSKKSWSYIAETPNSENGTCYPGYFADYEELREQLSSVSSFERFEIFPKESSWPKHNVTRGVTASCSHKGKSSFYRNLLWLTEKNGSYPNLSKSYVNNKEKEVLVLWGVHHPSNIENQKTIYRKENAYVSVVSSHYNRRFTPEIAKRPKVRDQEGRINYYWTLLEPGDTIIFEANGNLIAPWYAFALSRGFGSGIITSNASIDECDAKCQTPQGAINSSLPFQNVHPVTIGECPKYVRSTKLRMVTGLRNIPSIQSRGLFGAIAGFIEGGWTGMIDGWYGYHHQNEQGSGYAADQKSTQNAINGITNKVNSVIEKMNTQFTAVGKEFNKLEKRMENLNKKVDDGFLDIWTYNAELLVLLENERTLDFHDSNVKNLYEKVKSQLKNNAKEIGNGCFEFYHKCNNECMESVKNGTYDYPKYSEESKLNREKIDGVKLESMGVYQILAIYSTVASSLVLLVSLGAISFWMCSNGSLQCRICI

SEQ ID NO: 1615 - protein, 565 aa, synthetic construct
  REGION 1..565: note = hemagglutinin__InfluenzaA__ABO38373
MKARLLVLLCALAATDADTICIGYHANNSTDTVDTVLEKNVTVTHSVNLLEDSHNGKLCRLKGIAPLQLGKCNIAGWILGNPECESLLSERSWSYIVETPNSENGTCYPGDFIDYEELREQLSSVSSFERFEIFSKESSWPKHTTGGVTAACSHAGKSSFYRNLLWLTEKDGSYPNLNNSYVNKKGKEVLVLWGVHHPSNIKDQQTLYQKENAYVSVVSSNYNRRFTPEIAERPKVRGQAGRINYYWTLLKPGDTIMFEANGNLIAPWYAFALSRGFGSGIITSNASMHECDTKCQTPQGAINSSLPFQNIHPVTIGECPKYVRSTKLRMVTGLRNIPSIQSRGLFGAIAGFIEGGWTGMIDGWYGYHHQNEQGSGYAADQKSTQNAINGITNKVNSVIEKMNTQFTAVGKEFNNLEKRMENLNKKVDDGFLDIWTYNAELLVLLENERTLDFHDSNVKNLYEKVKNQLRNNAKEIGNGCFEFYHKCNNECMESVKNGTYDYPKYSEESKLNREKIDGVKLESMGVYQILAIYSTAASSLVLLVSLGAISFWMCSNGSLQCRICI

SEQ ID NO: 1616 - protein, 566 aa, synthetic construct
  REGION 1..566: note = hemagglutinin__InfluenzaA__ABO38384
MKARLLVLLCALAAADADTICIGYHANNSTDTVDTVLEKNVTVTHSVNLLEDSHNGKLCRLKGIPPLQLGKCNIAGWLLGNPECDSLLPARSWSYIVETPNSENGACYPGDFINYEELREQLSSVSSFERFEIFPKESSWPKHNTTKGVTAACSHAGKSSFYRNLLWLTKKEDSYPKLKNSYVNKKGKEVLVLWGVHHPSSSKEQQTLYQNENAYVSVVSSNYNRRFTPEIAERPKVRDQTGRMNYYWTLLEPGDTIIFEANGNLIAPWYAFALSRGFGSGIITSNASMHECNTKCQTPQGAINSSLPFQNIHPVTIGECPKYVRSAKLRMVTGLRNIPSIQSRGLFGAIAGFIEGGWTGMIDGWYGYHHQNEQGSGYAADQKSTQNAINGITNKVNSVIEKMNTQFTAVGKEFNNLEKRMENLNKKVDDGFLDIWTYNAELLVLLENERTLDFHDSNVKNLYEKVKSQLKNNAKEIGNGCFEFYHKCDNECMESVRNGTYDYPKYSEESKLNREKIDGVKLESMGVYQILAIYSTVASSLVLLVSLGAISFWMCSNGSLQCRICI

SEQ ID NO: 1617 - protein, 566 aa, synthetic construct
  REGION 1..566: note = hemagglutinin__InfluenzaA__ABO38395
MKAKLLVLLCAFTATDADTICIGYHANNSTDTVDTVLEKNVTVTHSVNLLEDSHNGKLCRLKGIAPLQLGNCSIAGWILGNPECESLFSKKSWSYIAETPNSENGTCYPGYFADYEELREQLSSVSSFERFEIFPKESSWPNHTVTKGVTASCSHKGRSSFYRNLLWLTKKNGSYPNLSKSYVNNKEKEVLVLWGVHHPSNIGDQRAIYHTENAYVSVVSSHYNRRFTPEIAKRPKVRDQEGRINYYWTLLEPGDTIIFEANGNLIAPWYAFALSRGFGSGIITSNASMDECDAKCQTPQGAINSSLPFQNVHPVTIGECPKYVRSTKLRMVTGLRNIPSIQSRGLFGAIAGFIEGGWTGMIDGWYGYHHQNEQGSGYAADQKSTQNAINGITNKVNSVIEKMNTQFTAVGKEFNKLERRMENLNKKVDDGFLDIWTYNAELLVLLENERTLDFHDSNVKNLYEKVKSQLKNNAKEIGNGCFEFYHKCNNECMESVKNGTYDYPKYSEESKLNREKIDGVKLESMGVYQILAIYSTVASSLVLLVSLGAISFWMCSNGSLQCRICI

SEQ ID NO: 1618 - protein, 566 aa, synthetic construct
  REGION 1..566: note = hemagglutinin__InfluenzaA__ABO38406
MKAKLLVLLCALSATDADTICIGYHANNSTDTVDTVLEKNVTVTHSVNLLEDNHNGKLCKLKGIAPLQLGKCSIAGWILGNPECESLFSKKSWSYIAETPNSENGTCYPGYFADYEELREQLSSVSSFERFEIFPKESSWPNHNVTKGVTASCSHKGKSSFYRNLLWLTEKKGSYPNLSKSYVNNKEKEVLVLWGIHHPSNIEDQKTIYRKENAYVSVVSSHYNRRFTPEIAKRPKVRDQEGRINYYWTLLEPGDTIIFEANGNLIAPWYAFALSRGFGSGIITSNASMDECDAKCQTPRGAINSSLPFQNVHPVTIGECPKYVRSTKLRMVTGLRNIPSIQSRGLFGAIAGFIEGGWTGMIDGWYGYHHQNEQGSGYAADQKSTQSAINGITNKVNSIIEKMNTQFTAVGKEFNKLEKRMENLNKKVDDGFLDIWTYNAELLVLLENERTLDFHDSNVKNLYEKVKSQLKNNAKEIGNGCFEFYHKCNNECMESVKNGTYDYPKYSEESKLNREKIDGVKLESMGVYQILAIYSTVASSLVLLVSLGAISFWMCSNGSLQCRICI

SEQ ID NO: 1619 - protein, 566 aa, synthetic construct
  REGION 1..566: note = hemagglutinin__InfluenzaA__ABO38417
MKTIIALSYILCLVFAQKLPVNDNSTATLCLGHHAVPNGTLVKTITNDHIEVTNATELVQSSPTGRICDSPHQILDGENCTLIDALLGDPHCDGFQNKEWDLFVERSTAYSNCYPYDVPDYASLRSLVASSGTLEFNNESFNWTGVAQNGTSSACKRRSIKSFFSRLNWLHQLKYKYPALNVTMPNNEKFDKLYIWGVHHPSTDSDQISLYAQASGRVTVSTKRSQQTVIPNIGSRPWVRGVSSRISIYWTIVKPGDILLINSTGNLIAPRGYFKIRSGKSSIMRSNTPIGKCNSECITPNGSIPNDKPFQNVNRITYGACPRYVKQNTLKLATGMRNVPEKQTRGIFGAIAGFIENGWEGMVDGWYGFRHQNSEGTGQAADLKSTQAAINQINGKLNRLIEKTNEKFHQIEKEFSEVEGRIQDLEKYVEDTKIDLWSYNAELLVALENQHTIDLTDSEMNKLFERTRKQLRENAEDMGNGCFKIYHKCDNACIGSIRNGTYDHDVYRDEALNNRFQIKGVELKSGYKDWILWISFAISCFLLCVVLLGFIMWACQKGNIRCNICI

SEQ ID NO: 1620 - protein, 562 aa, synthetic construct
  REGION 1..562: note = hemagglutinin__InfluenzaA__ABO38712
MAIIYFILLFTAVRGDQICIGYHANNSTEKVDTILERNVTVTHAKDILEKTHNGKLCKLNGIPPLELGDCSIAGWLLGNPECDRLLRVPEWSYIMEKENPRYSLCYPGSFNDYEELKHLLSSVKHFEKVRILPKDGWTQHTTSGGSKACAVSGKSSFFRNMVWLTKKGPNYPVAKRSYNNTSGEQMLIIWGVHHPKDEAEQRALYQKVGTYVSASTSTLNKRSTPEIAARPEVNGLGSRMEFSWTLLDVWDTINFESTGNLVAPEYGFKISKRGSSGIMKTEGTLGNCETKCQTPLGAINTTLPFHNVHPLTIGECPKYVKSEKLVLATGLRNVPQIESRGLFGAIAGFIEGGWQGMVDGWYGYHHSNDQGSGYAADKESTQKAFDRITNKVNSVIEKMNTQFEAVGKEFSNLEKRLENLNKKMEDGFLDVWTYNAELLVLMENERTLDFHDSNVKNLYNKVRMQLRDNVKELGNGCFEFYHKCDDECMSSVKNGTYDYPKYEEESKLKRNEIKGVKLSSMGVYQILAIYATVAGSLSLAIMIAGISLWMCSNGSLQCRICI

SEQ ID NO: 1621 - protein, 562 aa, synthetic construct
  REGION 1..562: note = hemagglutinin__InfluenzaA__ABO38723
MAIIYFILLFTAVRGDQICIGYHANNSTEKVDTILERNVTVTHAKDILEKTHNGKLCKLNGIPPLELGDCSIAGWLLGNPECDRLLRVPEWSYIMEKENPRYSLCYPGSFNDYEELKHLLSSVKHFEKVRILPKDGWTQHTTSGGSKACAVSGKSSFFRNMVWLTKKGPNYPVAKRSYNNTSGEQMLIIWGVHHPNDEAEQRALYQKVGTYVSASTSTLNKRSTPEIAARPEVNGLGSRMEFSWTLLDVWDTINFESTGNLVAPEYGFKISKRGSSGIMKTEGTLGNCETKCQTPLGAINTTLPFHNVHPLTIGECPKYVKSEKLVLATGLRNVPQIESRGLFGAIAGFIEGGWQGMVDGWYGYHHSNDQGSGYAADKESTQKAFDRITNKVNSVIEKMNTQFEAVGKEFSNLEKRLGNLNKKMEDGFLDVWTYNAELLVLMENERTLDFHDSNVKNLYNKVRMQLRDNVKELGNGCFEFYHKCDDECMSSVKNGTYDYPKYEEESKLKRNEIKGVKLSSMGVYQILAIYATVAGSLSLAIMIAGISLWMCSNGSLQCRICI

SEQ ID NO: 1622 - protein, 565 aa, synthetic construct
  REGION 1..565: note = hemagglutinin__InfluenzaA__ABO44046
MKVKLLVLLCTFTATYADTICIGYHANNSTDTVDTVLEKNVTVTHSVNLLEDSHNGKLCLLKGIAPLQLGNCSVAGWILGNPECELLISKESWSYIVETPNPENGTCYPGYFADYEELREQLSSVSSFERFEIFPKESSWPNHTVTGVSASCSHNGKSSFYRNLLWLTGKNGLYPNLSKSYANNKEKEVLVLWGVHHPPNIGDQRALYHTENAYVSVVSSHYSRRFTPEIAKRPKVRDQEGRINYYWTLLEPGDTIIFEANGNLIAPRYAFALSRGFGSGIITSNAPMDECDAKCQTPQGAINSSLPFQNVHPVTIGECPKYVRSAKLRMVTGLRNIPSIQSRGLFGAIAGFIEGGWTGMVDGWYGYHHQNEQGSGYAADQKSTQNAINGITNKMNSVIEKMNTQFTAVGKEFNKLERRMENLNKKVDDGFLDIWTYNAELLVLLENERTLDFHDSNVKNLYEKVKSQLKNNAKEIGNGCFEFYHKCNNECMESVKNGTYDYPKYSEESKLNREKIDGVKLESMGVYQILAIYSTVASSLVLLVSLGAISFWMCSNGSLQCRICI

SEQ ID NO: 1623 - protein, 562 aa, synthetic construct
  REGION 1..562: note = hemagglutinin__InfluenzaA__ABO44057
MAIIYLILLFTAVRGDQICIGYHANNSTEKVDTILERNVTVTHAKDILEKTHNGKLCKLNGIPPLELGDCSIAGWLLGNPECDRLLRVPEWSYIMEKENPRYSLCYPGSFNDYEELKHLLSSVKHFEKVKILPKDGWTQHETDGGSKACAVSGKASFFRNMVWLTKRGPNYQVAKRSYNNTSGEQMLIIWGVHHPKDEAEQRALYQKVGTYVSASTSTLNKRSTPEIAARPEVNGLESRMEFSWTLLDVWDTINFESTGNLVAPEYGFKISKRGSSGIMKTEGTLGNCETKCQTPLGAINTTLPFHNVHPLTIGECPKYVKSEKLVLATGLRNVPQIESRGLFGAIAGFIEGGWQGMVDGWYGYHHSNDQGSGYAADKESTQKAFDRITNKVNSVIEKMNIQFEAVGKEFSNLEKRLENLNKKMEDGFLDVWTYNAELLVLMENERTLDFHDSNVKNLYDKVRMQLRDNVKELGNGCFEFYHKCDDECMNSVKNGTYDYPKYEEESKLKRNEIKGVKLSSMGVYQILAIYATVAGSLSLAIMIAGISFWMCSNGSLQCRVCI

SEQ ID NO: 1624 - protein, 566 aa, synthetic construct; identical to SEQ ID NO: 256
  REGION 1..566: note = hemagglutinin__InfluenzaA__ABO44079

SEQ ID NO: 1625 - protein, 562 aa, synthetic construct
  REGION 1..562: note = hemagglutinin__InfluenzaA__ABO44090
MAIIYLILLFTAVRGDQICIGYHANNSTEKVDTILERNVTVTHAKDILEKTHNGKLCKLNGIPPLELGDCSIAGWLLGNPECDRLLRVPEWSYIMEKENPRDGLCYPGSFNDYEELKHLLSSVKHFEKVKILPKDRWTQHTTTGGSRACAVSGNPSFFRNMIWLTKKGSNYPVAKGSYNNTSGEQMLIIWGVHHPNDETEQRTLYQNVGTYVSVVTSTLNKRSTPKIATRPKVNGLGGRMEFSWTLLDMWDTINFESTGNLIAPEYGFKISKRGSSGIMKTEGTLENCETKCQTPLGAINTTLPFHNVHPLTIGECPKYVKSEKLVLATGLRNVPQIESRGLFGAIAGFIEGGWQGMVDGWYGYHHSNDQGSGYAADKESTQRAFDGITNKVNSVIEKMNTQFEAVGKEFSNLERRLENLNKKMEDGLLDVWTYNAELLVLMENERILDFHDSNVKNLYDKVRMQLRDNVKELGNGCFEFYHKCDDECMNSVKNGTYDYPKYEEESKLNRNEIKGVKLSSMGVYQILAIYATVAGSLSLAIMMAGISFWMCSNGSLQCRICI

SEQ ID NO: 1626 - protein, 562 aa, synthetic construct
  REGION 1..562: note = hemagglutinin__InfluenzaA__ABO44101
MAIIYLILLFTAVRGDQICIGYHANNSTEKVDTILERNVTVTHAKDILEKTHNGKLCKLNGIPPLELGDCSIAGWLLGNPECDRLLRVPEWSYIMEKENPRYSLCYPGSFNDYEELKHLLSSVKHFEKVKILPKDGWTQHKTDGGSKACAVSGKPSFFRNMVWLTKKGPNYPVAKRSYNNTSGEQMLIIWGVHHPNDEAEQRALYQKVGTYVSASTSTLNKRSTPEIAARPEVSGLGSRMEFSWTLLDVWDTISFESTGNLVAPEYGFKISKRGSSGIMKTEGTLGNCETKCQTPLGAINTTLPFHNVHPLTIGECPKYVKSEKLVLATGLRNVPQIESRGLFGAIAGFIEGGWQGMVDGWYGYHHSNDQGSGYAADKESTQKAFDRITNKVNSVIEKMNTQFEAVGKEFSNLEKRLENLNKKMEDGFLDVWTYNAELLVLMENERTLDFHDSNVKNLYDKVRMQLRDNVKELGNGCFEFYHKCDDECMNSVKNGTYDYPKYEEESKLKRNEIKGVKLSSMGVYQILAIYATVAGSLSLAIMIAGISFWMCSNGSLQCRICI

SEQ ID NO: 1627 - protein, 566 aa, synthetic construct
  REGION 1..566: note = hemagglutinin__InfluenzaA__ABO44123
MKAKLLVLLCAFTATDADTICIGYHANNSTDTVDTVLEKNVTVTHSVNLLEDSHNGKLCRLKGIAPLQLGNCSIAGWILGNPECESLFSKKSWSYIAETPNSENGTCYPGYFADYEELREQLSSVSSFERFEIFPKESSWPNHTVTKGVTASCSHKGKSSFYRNLLWLTKKNGSYPNLSKSYVNNKEKEVLVLWGVHHPSNIGDQRAIYHTENAYVSVVSSHYNRRFTPEIAKRPKVRDQEGRINYYWTLLEPGDTIIFEANGNLIAPWYAFALSRGFGSGIITSNASMDECDAKCQTPQGAINSSLPFQNVHPVTIGECPKYVRSTKLRMVTGLRNIPSIQSRGLFGAIAGFIEGGWTGMIDGWYGYHHQNEQGSGYAADQKSTQNAINGITNKVNSVIEKMNTQFTAVGKEFNKLERRMENLNKKVDDGFLDIWTYNAELLVLLENERTLDFHDSNVKNLYEKVKSQLKNNAKEIGNGCFEFYHKCNNECMESVKNGTYDYPKYSEESKLNREKIDGVKLESMGVYQILAIYSTVASSLVLLVSLGAISFWMCSNGSLQCRICI

SEQ ID NO: 1628 - protein, 566 aa, synthetic construct
  REGION 1..566: note = hemagglutinin__InfluenzaA__ABO44134
MKAKLLVLLCALSATDADTICIGYHANNSTDTVDTVLEKNVTVTHSVNLLEDSHNGKLCRLKGIAPLQLGKCSIAGWILGNPECESLFSKKSWSYIAETPNSENGTCYPGYFADYEELREQLSSVSSFERFEIFPKERSWPKHNVTRGVTASCSHKGKSSFYRNLLWLTEKNGSYPNLSKSYVNNKEKEVLVLWGVHHPSNIEDQKTIYRKENAYVSVVSSNYNRRFTPEIAERPKVRGQAGRINYYWTLLEPGDTIIFEANGNLIAPWHAFALSRGFGSGIITSNASMDECDTKCQTPQGAINSSLPFQNIHPVTIGECPKYVRSTKLRMVTGLRNIPSIQSRGLFGAIAGFIEGGWTGMIDGWYGYHHQNEQGSGYAADQKSTQNAINGITNKVNSVIEKMNTQFTAVGKEFNKLEKRMENLNKKVDDGFLDIWTYNAELLVLLENERTLDFHDSNVKNLYEKVKSQLKNNAKEIGNGCFEFYHKCNNECMESVKNGTYDYPKYSEESKLNREKIDGVKLESMGVYQILAIYSTVASSLVLLVSLGAISFWMCSNGSLQCRICI

SEQ ID NO: 1629 - protein, 566 aa, synthetic construct
  REGION 1..566: note = hemagglutinin__InfluenzaA__ABO52071
MKTIIALSYILCLVFAQKLPGNDNSTATLCLGHHAVPNGTIVKTITNDQIEVTNATELVQNSSTGGICDSPHQILDGENCTLIDALLGDPQCDGFQNKKWDLFVERSKAYSNCYPYDVPDYASLRSLVASSGTLEFNNESFNWTGVTQNGTSSACKRRSNNSFFSRLNWLTHLKFKYPALNVTMPNNEKFDKLYIWGVHHPSTDNDQISLYAQASGRITVSTKRSQQTVIPNIGSRPRVRDIPSRISIYWTIVKPGDILLINSTGNLIAPRGYFKIRSGKSSIMRSDAPIGKCNSECITPNGSIPNDKPFQNVNRITYGACPRYVKQNTLKLATGMRNVPEKQTRGIFGAIAGFIENGWEGMVDGWYGFRHQNSEGIGQAADLKSTQAAINQINGKLNRLIGKTNEKFHQIEKEFSEVEGRIQDLEKYVEDTKIDLWSYNAELLVALENQHTIDLTDSEMNKLFERTKKQLRENAEDMGNGCFKIYHKCDNACIGSIRNGTYDHDVYRDEALNNRFQIKGVELKSGYKDWILWISFAISCFLLCVALLGFIMWACQKGNIRCNICI

SEQ ID NO: 1630 - protein, 566 aa, synthetic construct
  REGION 1..566: note = hemagglutinin__InfluenzaA__ABO52225
MKAKLLVLLCAFTATYADTICIGYHANNSTDTVDTVLEKNVTVTHSVNLLEDSHNGKLCRLKGTAPLQLGNCSVAGWILGNPECESLFSKESWSYIAETPNPENGTCYPGYFADYEELKEQLSSVSSFERFEIFPKESSWPNHTVTKGVTASCSHNGKSSFYKNLLWLTEKNGLYPNLSKSYVNNKEKEVLVLWGVHHPSNIGDQRAIYHTENAYVSVVSSHYSRRFTPEIAKRPKVRDQEGRINYYWTLLEPGDTIIFEANGNLIAPWYAFALSRGFGSGIITSNASMGECDAKCQTPQGAINSSLPFQNVHPVTIGECPKYVRSTKLRMVTGLRNIPSIQSRGLFGAIAGFIEGGWTGMIDGWYGYHHQNEQGSGYAADKKSTQNAIDGITNKVNSVIEKMNTQFTAVGKEFNKLERRMENLNKKVDDGFLDIWTYNAELLVLLENERTLDFHDSNVKNLYEKVKNQLKNNAKEIGNGCFEFYHKCNDECMESVKNGTYDYPKYSEESKLKREKIDGVKLESMGVYQILAIYSTVASSLVLLVSLGAISFWMCSNGSLQCRICI

SEQ ID NO: 1631 - protein, 562 aa, synthetic construct
  REGION 1..562: note = hemagglutinin__InfluenzaA__ABO52236
MAIIYLILLFTAVRGDQICIGYHANNSTEKVDTILERNVTVTHAKDILEKTHNGKLCKLNGIPPLELGDCSIAGWLLGNPECDRLLSVPEWSYIMEKENPRDGLCYPGSFNDYEELKHFLSSVKHFEKVKILPKDRWTQHTTTGGSRACAVSGNPSFFRNMVWLTKKGSNYPVAKGSYNNTSGEQMLIIWGVHHPNDETEQRTLYQNVGTYVSVGTSTLNKRSTPDIATRPKVNGLGGRMEFSWTLLDMWDTINFESTGNLIAPEYGFKISKRGSSGIMKTEGTLGNCETKCQTPLGAINTTLPFHNVHPLTIGECPKYVKSEKLVLATGLRNVPQIESRGLFGAIAGFIEGGWQGMVDGWYGYHHSNDQGSGYAADKESTQKAFDGITNKVNSVIEKMNTQFEAVGKEFSNLERRLENLNKKMEDGFLDVWTYNAELLVLMENERTLDFHDSNVKNLYDKVRMQLRDNAKELGNGCFEFYHKCDDECMNSVKNGTYYYPKYEEESKLNRNEIKGVKLSSMGVYQILAIYATVAGSLSLAIMMAGISFWMCSNGSLQCRICI

SEQ ID NO: 1632 - protein, 562 aa, synthetic construct
  REGION 1..562: note = hemagglutinin__InfluenzaA__ABO52247
MAIIYLILLFTAVRGDQICIGYHANNSTEKVDTILERNVTVTHAKDILEKTHNGKLCKLNGIPPLELGDCSIAGWLLGNPECDRLLRVPEWSYIMEKENPRYSLCYPGSFNDYEELKHLLSSVKHFEKVKILPKDGWTQHKTDGGSKACAVSGKPSFFRNMVWLTKKGPNYPVAKRSYNNTSGEQMLIIWGVHHPNDEAEQRALYQKVGTYVSASTSTLNKRSTPEIAARPEVSGLGSRMEFSWTLLDVWDTISFESTGNLVAPEYGFKISKRGSSGIMKTEGTLGNCETKCQTPLGAINTTLPFHNVHPLTIGECPKYVKSEKLVLATGPRNVPQIESRGLFGAIAGFIEGGWQGMVDGWYGYHHSNDQGSGYAADKESTQKAFDRITNKVNSVIEKMNTQFEAVGKEFSNLEKRLENLNKKMEDGFLDVWTYNAELLVLMENERTLDFHDSNVKNLYDKVRMQLRDNVKELGNGCFEFYHKCDDECMNSVKNGTYDYPKYEEESKLKRNEIKGVKLSSMGVYQILAIYATVAGSLSLAIMIAGISFWMCSNGSLQCRICI

SEQ ID NO: 1633 - protein, 566 aa, synthetic construct
  REGION 1..566: note = hemagglutinin__InfluenzaA__ABO52258
MKAKLLVLLCALSATDADTICIGYHANNSTDTVDTVLEKNVTVTHSVNLLEDSHNGKLCRLKGIAPLQLGKCSIAGWILGNPECESLFSKKSWSYIAETPNSENGTCYPGYFADYEELREQLSSVSSFERFEIFPKESSWPKHNVTRGVTASCSHKGKCSFYRNLLWLTEKNGSYPNLSKSYVNNKEKEVLVLWGVHHPSNIEDQKTIYRKENAYVSVVSSHYNRRFTPEIAKRPKVRDQEGRINYYWTLLEPGDTIIFEANGNLIAPWYAFALSRGFGSGIITSNASMDECDAKCQTPQGAINSSLPFQNVHPVTIGECPKYVRSTKLRMVTGLRNIPSIQSRGLFGAIAGFIEGGWTGMIDGWYGYHHQNEQGSGYAADQKSTQNAINGITNKVNSVIEKMNTQFTAVGKEFNKLEKRMENLNKKVDDGFLDIWTYNAELLVLLENERTLDFHDSNVKNLYEKVKSQLKNNAKEIGNGCFEFYHKCNNECMESVKNGTYDYPKYSEESKLNREKIDGVKLESMGVYQILAIYSTVASSLVLLVSLGAISFWMCSNGSLQCRICI

SEQ ID NO: 1634 - protein, 566 aa, synthetic construct
  REGION 1..566: note = hemagglutinin__InfluenzaA__ABO52280
MKARLLILLCALSATDADTICIGYHANNSTDTVDTVLEKNVTVTHSVNLLEDSHNGKLCRLKGIAPLQLGKCNIAGWILGNPECESLLSNRSWSYIAETPNSENGICYPGDFADYEELREQLSSVSSFERFEIFPKESSWPKHNITRGVTVACSHAKKSSFYKNLLWLTEANGLYPSLSKSYVNDREKEVLVLWGVHHPSNIEDQRTLYRKENAYVSVVSSNYNRRFTPEIAERPKVRGQPGRMNYYWTLLEPGDKIIFEANGNLIAPWYAFALSRGPGSGIITSNASMDECDTKCQTPQGAINSSLPFQNIHPVTIGECPKYVRSTKLRMVTGLRNIPSIQSRGLFGAIAGFIEGGWTGMVDGWYGYHHQNEQGSGYAADQKSTQNAINGITNKVNSVIEKMNTQFTAVGKEFNKLEKRMENLNKKVDDGFLDIWTYNAELLVLLENERTLDFHDSNVKNLYEKVKNQLRNNAKEIGNGCFEFYHKCDNECMESVKNGTYDYPKYSEESKLNRAKIDGVKLESMGVYQILAIYSTVASSLVLLVSLGAISFWMCSNGSLQCRICI

SEQ ID NO: 1635 - protein, 562 aa, synthetic construct
  REGION 1..562: note = hemagglutinin__InfluenzaA__ABO52302
MAIIYLILLFTAVRGDQICIGYHANNSTEKVDTILERNVTVTHAKDILEKTHNGKLCKLNGIPPLELGNCSIAGWLLGNPECDRLLSVPEWSYIMEKENPRDGLCYPGSFNDYEELKHLLSSVKHFEKVKILPKDRWTQHTTTGGSRACAVSGNPSFFRNMVWLTKKGSNYPVAKGSYNNTSGEQMLIIWGVHHPNDETEQRTLYQNVGTYVSVGTSTLNKRSTPDIATRPKVNGLGGRMEFSWTLLDMWDTINFESTGNLIAPEYGFKISKRGSSGIMKTEGTLGNCETKCQTPLGAINTTLPFHNVHPLTIGECPKYVKSEKLVLATGLRNVPQIESRGLFGAIAGFIEGGWQGMVDGWYGYHHSNDQGSGYAADKESTQKAFDGITNKVNSVIEKMNTQFEAVGKEFSNLERRLENLNKKMEDGFLDVWTYNAELLVLMENERTLDFHDSNVKNLYDKVRMQLRDNVKELGNGCFEFYHKCDDECMNSVKNGTYDYPKYEEESKLNRNEIKGVKLSSMGIYQILAIYATVAGSLSLAIMMAGISFWMCSNGSLQCRICI

SEQ ID NO: 1636 - protein, 566 aa, synthetic construct
  REGION 1..566: note = hemagglutinin__InfluenzaA__ABO52313
MKTIIALSYIFCLVFAQNLPGNDNSTATLCLGHHAVPNGTLVKTITNDQIEVTNATELVQSSSTGKICNNPHRILDGINCTLIDALLGDPHCDGFQNEKWDLFVERSKAFSNCYPYDVPDYASLRSLVASSGTLEFINEGFNWTGVTQNGGSNACKRGPDSGFFSRLNWLYKSGSTYPVLNVTMPNNDNFDKLYIWGVHHPSTDQEQTNLYVQASGRVTVSTKRSQQTIIPNVGSRPWVRGLSSRISIYWTIVKPGDILVINSNGNLIAPRGHFKMRTGKSSIMRSDAPIGTCSSECITPNGSIPNDKPFQNVNKITYGACPKYVKQNTLKLATGMRNVPEKQTRGIFGAIAGFIENGWEGMIDGWYGFRHRNSEGTGQAADLKSTQAAIDQINGKLNRVIEKTNEKFHQIEKEFSEVEGRIQDLEKYVEDTKIDLWSYNAELLVALENQHTIDLTDSEMNKLFEKTRRQLRENAEDMGNGCFKIYHKCDNACIGSIRNGTYDHDVYRDEALNNRFQIKGVELKSGYKDWILWISFAISCFLLCVVLLGFIMWACQKGNIRCNICI

SEQ ID NO: 1637 - protein, 566 aa, synthetic construct
  REGION 1..566: note = hemagglutinin__InfluenzaA__ABO52335
MKTIIALSYIFCLVLGQDFPRNDNSTATLCLGHHAVPNGTLVKTITNDQIEVTNATELVQSSSTGKICNNPHRILDGIDCTLIDALLGDPHCDGFQNETWDLFVERSKAFSNCYPYDVPDYASLRSLVASSGTLEFINEGFTWTGVTQNGGSNACKRGPDSGFFSRLNWLYKSGNTYPVLNVTMPNNDNFDKLYIWGVHHPSTDQDQTSLYVQASGRVTVSTKRSQQTVIPNIGPRPWVRGLSSRISIYWTIVKPGDILLINSNGNLIAPRGYFKMRTGKSSIMRSDAPIGTCISECITPNGSIPNDKPFQNVNKITYGACPKYVKQNTLKLATGMRNVPEKQTRGIFGAIAGFIENGWEGMIDGWYGFRHQNSEGTGQAADLKSTQAAIDQINGKLNRVIEKTNEKFHQIEKEFSEVEGRIQDLEKYVEDTKIDLWSYNAELLVALENQHTIDLTDSEMNKLFEKTRRQLRENAEDMGNGCFKIYHRCDNACIGSIRNGTYDHDVYRDEALNNRFQIKGVELKSGYKDWILWISFAISCFLLCVVLLGFIMWACQKGNIRCNICI

SEQ ID NO: 1638 - protein, 566 aa, synthetic construct
  REGION 1..566: note = hemagglutinin__InfluenzaA__ABO52346
MKTIIALSYIFCLVFAQDLPGNDNSTATLCLGHHAVPNGTLVKTITNDQIEVTNATELVQSSSTGKICDNPHRILDGINCTLIDALLGDPHCDGFQNEKWDLFVERSKAFSDCYPYDVPDYASLRSLVASSGTLEFINEGFNWTGVTQNGGSSACKRGPDNGFFSRLNWLYKSGSTYPVQNVTMPNNDNSDKLYIWGVHHPSTDKEQTDLYVQASGKVTVSTKRSQQTVIPNVGSRPWVRGLSSRVSIYWTIVKPGDILVINSNGNLIAPRGYFKMRTGKSSIMRSDAPIGTCSSECITPNGSIPNDKPFQNVNKITYGACPKYVKQNTLKLATGMRNVPEKQTRGIFGAIAGFIENGWEGMIDGWYGFRHQNSEGTGQAADLKSTQAAIDQINGKLNRVIEKTNEKFHQIEKEFSEVEGRIQDLEKYVEDTKIDLWSYNAELLVALENQHTIDLTDSEMNKLFEKTRRQLRENAEDMGNGCFKIYHKCDNACIGSIRNGTYDHDVYRDEALNNRFQIKGVELKSGYKDWILWISFAISCFLLCVVLLGFIMWACQKGNIRCNICI

SEQ ID NO: 1639 - protein, 566 aa, synthetic construct
  REGION 1..566: note = hemagglutinin__InfluenzaA__ABO52357
MKTIIALSYIFCLALGQDLPGNDNSTATLCLGHHAVPNGTLVKTITDDQIEVTNATELVQSSSTGKICNNPHRILDGIDCTLIDALLGDPHCDVFQNETWDLFVERSKAFSNCYPYDVPDYASLRSLVASSGTLEFITEGFTWTGVTQNGGSNACKRGPGSGFFSRLNWLTKSGSTYPVLNVTMPNNDNFDKLYIWGVHHPSTNQEQTSLYVQASGRVTVSTRRSQQTIIPNIGSRPWVRGLSSRISIYWTIVKPGDVLVINSNGNLIAPRGYFKMRTGKSSIMRSDAPIDTCIFECITPNGSIPNDKPFQNVNKITYGACPKYVKQNTLKLATGMRNVPEKQTRGIFGAIAGFIENGWEGMIDGWYGFRHQNSEGTGQAADLKSTQAAIDQINGKLNRVIEKTNEKFHQIEKEFSEVEGRIQDLEKYVEDTKIDLWSYNAELLVALENQHTIDLTDSEMNKLFEKTRRQLRENAEDMGNGCFKIYHKCDNACIESIRNGTYDHDVYRDEALNNRFQIKGVELKSGYKDWILWISFAISCFLLCVVLLGFIMWACQRGNIRCNICI

SEQ ID NO: 1640 - protein, 566 aa, synthetic construct
  REGION 1..566: note = hemagglutinin__InfluenzaA__ABO52368
MKTIIALSYIFCLALGQDLPGNDNSTATLCLGHHAVPNGTLVKTITNDQIEVTNATELVQSSSTGKICNNPHRILDGINCTLIDALLGDPHCDVFQDETWDLFVERSKAFSNCYPYDVPDYASLRSLVASSGTLEFITEGFTWTGVTQNGGSNACKRGPGSGFFSRLNWLTKSGSTYPVLNVTMPNNDNFDKLYIWGVHHPSTNQEQTSLYVQASGRVTVSTRRSQQTIIPNIGSRPWVRGLSSRISIYWTIVKPGDVLVINSNGNLIAPRGYFKMRTGKSSIMRSDAPIDTCISECITPNGSIPNDKPFQNVNKITYGACPKYVKQNTLKLATGMRNVPEKQTRGLFGAIAGFIENGWEGMIDGWYGFRHQNSEGTGQAADLKSTQAAIDQINGKLNRVIEKTNEKFHQIEKEFSEVEGRIQDLEKYVEDTKIDLWSYNAELLVALENQHTIDLTDSEMNKLFEKTRRQLRENAEDMGNGCFKIYHKCDNACIESIRNGTYDHDVYRDEALNNRFQIKGVELKSGYKDWILWISFAISCFLLCVVLLGFIMWACQRGNIRCNICI

SEQ ID NO: 1641 - protein, 566 aa, synthetic construct
  REGION 1..566: note = hemagglutinin__InfluenzaA__ABO52797
MKAKLLVLLCALSATDADTICIGYHANNSTDTVDTVLEKNVTVTHSVNLLEDNHNGKLCKLKGIAPLQLGKCSIAGWILGNPECESLFSKKSWSYIAETPNSENGTCYPGYFADYEELREQLSSVSSFERFEIFPKESSWPNHNVTKGVTASCSHKGKSSFYRNLLWLTEKNGSYPSLSKSYVNNKEKEVLVLWGVHHPSNIKDQKTIYRKENAYVSVVSSHYNRRFTPEIAKRPKVRDQEGRINYYWTLLEPGDTIIFEANGNLIAPWYAFALSRGFGSGIITSNASMDECDAKCQTPQGAINSSLPFQNVHPVTIGECPKYVRSTKLRMVTGLRNIPSIQSRGLFGAIAGFIEGGWTGMIDGWYGYHHQNEQGSGYAADQKSTQSAINGITNKVNSIIEKMNTQFTAVGKEFNKLEKRMENLNKKVDDGFLDIWTYNAELLVLLENERTLDFHDSNVKNLYEKVKSQLKNNAKEIGNGCFEFYHKCNNECMESVKNGTYDYPKYSEESKLNREKIDGVKLESMGVYQILAIYSTVASSLVLLVSLGAISFWMCSNGSLQCRICI

SEQ ID NO: 1642 - protein, 565 aa, synthetic construct; identical to SEQ ID NO: 742
  REGION 1..565: note = hemagglutinin__InfluenzaA__ABP49217

SEQ ID NO: 1643 - protein, 565 aa, synthetic construct
  REGION 1..565: note = hemagglutinin__InfluenzaA__ABP49305
MKAKLMVLLCTFTATYADTICIGYHANNSTDTVDTVLEKNVTVTHSVNLLEDSHNGKLCLLKGIAPLQLGNCSVAGWILGNPECELLISKESWSYIVETPNPENGTCYPGYFADYEELREQLSSVSSFERFEIFPKESSWPNHTVTGVSASCSHNGKSSFYRNLLWLTGKNGLYPNLSKSYANNKEKEVLVLWGVHHPPNIGDQRALYHTENAYVSVVSSHYSRRFTPEIAKRPKVRDQEGRINYYWTLLEPGDTIIFEANGNLIAPWYAFALSRGFGSGIITSNAPMGECDAKCQTPQGAINSSLPFQNVHPVTIGECPKYVRSAKLRMVTGLRNIPSIQSRGLFGAIAGFIEGGWTGMVDGWYGYHHQNEQGSGYAADQKSTQNAINGITNKVNSVIEKMNTQFTAVGKEFNKLERRMENLNKKVDDGFLDIWTYNAELLVLLENERTLDFHDSNVKNLYEKVKSQLKNNAKEIGNGCFEFYHKCNNECMESVKNGTYDYPKYSEESKLNREKIDGVKLESMGVYQILAIYSTVASSLVLLVSLGAISFWMCSNGSLQCRICI

SEQ ID NO: 1644 - protein, 566 aa, synthetic construct
  REGION 1..566: note = hemagglutinin__InfluenzaA__ABP49316
MKAKLLVLLCALSATDADTICIGYHANNSTDTVDTVLEKNVTVTHSVNLLEDSHNGKLCRLKGIAPLQLGKCNIAGWILGNPECESLFSKKSWSYIAETPNSENGTCYPGYFADYEELREQLSSVSSFERFEIFPKERSWPKHNITRGVTAACSHKGKSSFYRNLLWLTEKNGSYPNLKKSYVNNKEKEVLVLWGVHHPSNIEDQKTLYRKENAYVSVVSSNYNKRFTPEIAERPKVRGQAGRINYYWTLLEPGDTIIFEANGNLIAPWHAFALSRGFGSGIITSNASMDECDTKCQTPQGAINSSLPFQNIHPVTIGECPKYVRSTKLRMVTGLRNIPSIQSRGLFGAIAGFIEGGWTGMIDGWYGYHHQNEQGSGYAADQKSTQNAINGITNKVNSVIEKMNTQFTAVGKEFNKLEKRMENLNKKVDDGFLDIWTYNAELLVLLENERTLDFHDSNVKNLYEKVKSQLKNNAKEIGNGCFEFYHKCNNECMESVKNGTYDYPKYSEESKLNREKIDGVKLESMGVYQILAIYSTVASSLVLLVSLGAISFWMCSNGSLQCRICI

SEQ ID NO: 1645 - protein, 566 aa, synthetic construct
  REGION 1..566: note = hemagglutinin__InfluenzaA__ABP49327
MKARLLVLLCALAATDADTICIGYHANNSTDTVDTVLEKNVTVTHSVNLLEDSHNGKLCRLKGIAPLQLRKCNIAGWILGNPECESLLSERSWSYIVETPNSENGTCYPGDFTNYEELREQLSSVSSFERFEIFPKESSWPKHNTTRGVTAACSHAGKSSFYRNLLWLTEKDGSYPNLNNSYVNKKGKEVLVLWGVHHPSNIKDQQTLYQKENAYVSVVSSNYNRRFTPEIAERPKVRGQAGRMNYYWTLLKPGDTIMFEANGNLIAPWYAFALSRGFGSGIITSNASMHECDTKCQTPQGAINSSLPFQNIHPVTIGECPKYVRSTKLRMVTGLRNIPSIQSRGLFGAIAGFIEGGWTGMIDGWYGYHHQNEQGSGYAADQKSTQNAINGITNKVNSVIEKMNTQFTAVGKEFNNLEKRMENLNKKVDDGFLDIWTYNAELLILLENERTLDFHDSNVKNLYEKVKSQLRNNAKEIGNGCFEFYHKCNNECMESVKNGTYDYPKYSEESKLNREKIDGVKLESMGVYQILAIYSTVASSLVLLVSLGAISFWMCSNGSLQCRICI

SEQ ID NO: 1646 - protein, 566 aa, synthetic construct
  REGION 1..566: note = hemagglutinin__InfluenzaA__ABP49338
MKAKLLVLLCALSATDADTICIGYHANNSTDTVDTVLEKNVTVTHSVNLLEDSHNGKLCRLKGIAPLQLGKCSIAGWILGNPECESLFSKKSWSYIAETPNSENGTCYPGYFADYEELREQLSSVSSFERFEIFPKERSWPKHNVTRGVTASCSHKGKSSFYRNLLWLTEKNGSYPNLSKSYVNNKEKEVLVLWGVHHPSNIEDQKTIYRKENAYVSVVSSNYNRRFTPEIAKRPKVRGQEGRINYYWTLLEPGDTIIFEANGNLIAPWYAFALSRGFGSGIITSNASMDECDTKCQTPQGAINSSLPFQNVHPVTIGECPKYVRSTKLRMVTGLRNIPSIQSRGLFGAIAGFIEGGWTGMIDGWYGYHHQNEQGSGYAADQKSTQNAINGITNKVNSVIEKMNTQFTAVGKEFNKLEKRMENLNKKVDDGFLDIWTYNAELLVLLENERTLDFHDSNVKNLYEKVKSQLKNNAKEIGNGCFEFYHKCNNECMESVKNGTYDYPKYSEESKLNREKIDGVKLESMGVYQILAIYSTVASSLVLLVSLGAISFWMCSNGSLQCRICI

SEQ ID NO: 1647 - protein, 566 aa, synthetic construct
  REGION 1..566: note = hemagglutinin__InfluenzaA__ABP49349
MKAKLLVLLCALSATDADTICIGYHANNSTDTVDTVLEKNVTVTHSVNLLEDNHNGKLCKLKGIAPLQLGKCSIAGWILGNPECESLFSKKSWSYIAETPNSENGTCYPGYFADYEELREQLSSVSSFERFEIFPKESSWPNHNVTKGVTASCSHKGKSSFYRNLLWLTEKNGSYPNLSKSYVNNKEKEVLVLWGIHHPSNIEDQKTIYRKENAYVSVVSSHYNRRFTPEIAKRPKVRDQEGRINYYWTLLEPGDTIIFEANGNLIAPWYAFALSRGFGSGIITSNASMDECDAKCQTPLGAINSSLPFQNVHPVTIGECPKYVRSTKLRMVTGLRNIPSIQSRGLFGAIAGFIEGGWTGMIDGWYGYHHQNEQGSGYAADQKSTQSAINGITNKVNSIIEKMNTQFTAVGKEFNKLEKRMENLNKKVDDGFLDIWTYNAELLVLLENERTLDFHDSNVKNLYEKVKSQLKNNAKEIGNGCFEFYHKCNNECMESVKNGTYDYPKYSEESKLNREKIDGVKLESMGVYQILAIYSTVASSLVLLVSLGAISFWMCSNGSLQCRICI

SEQ ID NO: 1648 - protein, 566 aa, synthetic construct
  REGION 1..566: note = hemagglutinin__InfluenzaA__ABP49360
MKAKLLILLCAFTATDADTICIGYHANNSTDTVDTVLEKNVTVTHSVNLLEDSHNGKLCRLKGIAPLQLGNCSIAGWILGNPECESLFSKKSWSYIAETPNSENGTCYPGYFADYEELREQLSSVSSFERFEIFPKESSWPNHTVTKGVTASCSHNGKSSFYRNLLWLTKKNGSYPNLSKSYVNNKEKEVLVLWGVHHPSNIGDQRAIYHTENAYVSVVSSHYNRRFTPEIAKRPKVRDQEGRINYYWTLLEPGDTIIFEANGNLIAPWYAFALSRGFGSGIITSNASMDECDAKCQTPQGAINSSLPFQNVHPVTIGECPKYVRSTKLRMVTGLRNIPSIQSRGLFGAIAGFIEGGWTGMIDGWYGYHHQNEQGSGYAADQKSTQNAINGITNKVNSVIEKMNTQFTAVGKEFNKLERRMENLNKKVDDGFLDIWTYNAELLVLLENERTLDFHDSNVKNLYEKVKSQLKNNAKEIGNGCFEFYHKCNNECMESVKNGTYDYPKYSEESKLNREKIDGVKLESMGVYQILAIYSTVASSLVLLVSLGAISFWMCSNGSLQCRICI

SEQ ID NO: 1649 - protein, 566 aa, synthetic construct; identical to SEQ ID NO: 650
  REGION 1..566: note = hemagglutinin__InfluenzaA__ABP49371

SEQ ID NO: 1650 - protein, 566 aa, synthetic construct; identical to SEQ ID NO: 1387
  REGION 1..566: note = hemagglutinin__InfluenzaA__ABP49382

SEQ ID NO: 1651 - protein, 565 aa, synthetic construct
  REGION 1..565: note = hemagglutinin__InfluenzaA__ABP49393
MKVKLLVLLCTFTATYADTICIGYHANNSTDTVDTVLEKNVTVTHSVNLLEDSHNGKLCLLKGIAPLQLGNCSVAGWILGNPECELLISKESWSYIVETPNPENGTCYPGYFADYEELREQLSSVSSFERFEIFPKESSWPNHTVTGVSASCSHNGKSSFYRNLLWLTGKNGLYPNLSKSYANNKEKEVLVLWGIHHPPNIGDQRALYHTENAYVSVVSSHYSRRFTPEIAKRPKVRDQEGRINYYWTLLEPGDTIIFEANGNLIAPRFAFALSRGFGSGIITSNAPMDECDAKCQTPQGAINSSLPFQNVHPVTIGECPKYVRSAKLRMVTGLRNIPSIQSRGLFGAIAGFIEGGWTGMVDGWYGYHHQNEQGSGYAADQKSTQNAINGITNKVNSVIEKMNTQFTAVGKEFNKLERRMENLNKKVDDGFLDIWTYNAELLVLLENERTLDFHDSNVKNLYEKVKSQLKNNAKEIGNGCFEFYHKCNDECMESVKNGTYDYPKYSEESKLNRERIDGVKLESMGVYQILAIYSTVASSLVLLVSLGAISFWMCSNGSLQCRICI

SEQ ID NO: 1652 - protein, 566 aa, synthetic construct
  REGION 1..566: note = hemagglutinin__InfluenzaA__ABP49404
MKTIIALSYTLCLVFAQKLPGNDNSTATLCLGHHAVPNGTIVKTITNDQIEVTNATELVQSSSTGGICDSPHQILDGENCTLIGALLGDPQCDGFQNKKWDLFVERSKAYSNCYPYDVPDYASLRSLVASSGTLEFNNESFNWTGVTQNGTSSACKRRSNNSFFSRLNWLTHLKFKYPALNVTMPNNEKFDKLYIWGVHHPGTYNDQISLYAQASGRITVSTKRSQQTVIPNIGSRPRVRDIPSRISIYWTIVKPGDILLINSTGNLIAPRGYFKIRSGKSSIMRSDAPIGKCNSECITPNGSIPNDKPFQNVNRITYGACPRYVKQNTLKLATGMRNVPEKQTRGIFGAIAGFIENGWEGMVDGWYGFRHQNSEGIGQAADLKSTQAAINQINGKLNRLIGKTNEKFHQIEKEFSEVEGRIQDLEKYVEDTKIDLWSYNAELLVALENQHTIDLTDSEMNKLFERTKKQLRENAEDMGNGCFKIYHKCDNACIGSIRNGTYDHDVYRDEALNNRFQIKGVELKSGYKDWILWISFAISCFLLCVALLGFIMWACQKGNIRCNICI

SEQ ID NO: 1653 - protein, 566 aa, synthetic construct; identical to SEQ ID NO: 650
  REGION 1..566: note = hemagglutinin__InfluenzaA__ABP49415

SEQ ID NO: 1654 - protein, 566 aa, synthetic construct; identical to SEQ ID NO: 650
  REGION 1..566: note = hemagglutinin__InfluenzaA__ABP49426

SEQ ID NO: 1655 - protein, 562 aa, synthetic construct
  REGION 1..562: note = hemagglutinin__InfluenzaA__ABP49437
MAIIYLILLFTAVRGDQICIGYHANNSTEKVDTILERNVTVTHAKDILEKTHNGKLCKLNGIPPLELGDCSIAGWLLGNPECDRLLSVPEWSYIMEKENPRDGLCYPGSFNDYEELKHLLSSVKHFEKVKILPKDRWTQHTTTGGSRACAVSGNPSFFRNMVWLTKKGSNYPVAKGSYNNTSGEQMLIIWGVHHPNDETEQRTLYQNVGTYVSVGTSTLNKRSTPEIATRPKVNGLGGRMEFSWTLLDMWDTINFESTGNLIAPEYGFKISKRGSSGIMKTEGTLENCETKCQTPLGAINTTLPFHNVHPLTIGECPKYVKSEKLVLATGLRNVPQIESRGLFGAIAGFIEGGWQGMVDGWYGYHHSNDQGSGYAADKESTQKAFDGITNKVNSVIEKMNTQFEAVGKEFSNLERRLENLNKKMEDGFLDVWTYNAELLVLMENERTLDFHDSNVKNLYDKVRMQLRDNVKELGNGCFEFYHKCDDECMNSVKNGTYDYPKYEEESKLNRNEIKGVKLSSMGVYQILAIYATVAGSLSLAIMMAGISFWMCSNGSLQCRICI

SEQ ID NO: 1656 - protein, 566 aa, synthetic construct
  REGION 1..566: note = hemagglutinin__InfluenzaA__ABP49448
MKAKLLVLLCALSATDADTICIGYHANNSTDTVDTVLEKNVTVTHSVNLLEDSHNGKLCRLKGIAPLQLGKCSIAGWILGNPECESLFSKKSWSYIAETPNSENGTCYPGYFADYEELREQLSSVSSFERFEIFPKERSWPKHNVTRGVTASCSHKGKSSFYRNLLWLTEKNGSYPNLSKSYVNNKEKEVLVLWGVHHPSNIEDQKTIYRKENAYVSVVSSNYNRRFTPEISERPKVRGQEGRINYYWTLLEPGDTIIFEANGNLIAPWYAFALSRGFGSGIITSNASMDECDTKCQTPQGAINSSLPFQNVHPVTIGECPKYVRSTKLRMVTGLRNIPSIQSRGLFGAIAGFIEGGWTGMIDGWYGYHHQNEQGSGYAADQKSTQNAINGITNKVNSVIEKMNTQFTAVGKEFNKLEKRMENLNKKVDDGFLDIWTYNAELLVLLENERTLDFHDSNVKNLYEKVKSQLKNNAKEIGNGCFEFYHKCNNECMESVKNGTYDYPKYSEESKLNREKIDGVKLESMGVYQILAIYSTVASSLVLLVSLGAISFWMCSNGSLQCRICI

SEQ ID NO: 1657 - protein, 562 aa, synthetic construct
  REGION 1..562: note = hemagglutinin__InfluenzaA__ABP49459
MAIIYLILLFTAVRGDQICIGYHANNSTEKVDTILERNVTVTHAKDILEKTHNGKLCKLNGIPPLELGDCSIAGWLLGNPECDRLLSVPEWSYIMEKENPRDGLCYPGSFNDYEELKHLLSSVKHFEKVKILPKDRWTQHTTTGGSRACAVSGNPSFFRNMVWLTKKGSNYPVAKGSYNNTSGEQMLIIWGVHHPNDETEQRTLYQNVGTYVSVGTPTLNKRSTPDIATRPKVNGQGGRMEFSWTLLDMWDTINFESTGNLIAPEYGFKISKRGSSGIMKTEGTLGNCETKCQTPLGAINTTLPFHNVHPLTIGECPKYVKSEKLVLATGLRNVPQIESRGLFGAIAGFIEGGWQGMVDGWYGYHHSNDQGSGYAADKESTQKAFDGITNKVNSVIEKMNTQFEAVGKEFSNLERRLENLNKKMEDGFLDVWTYNAELLVLMENERTLDFHDSNVKNLYDKVRMQLRDNVKELGNGCFEFYHKCDDECMNSVKNGTYDYPKYEEESKLNRNEIKGVKLSSMGVYQILAIYATVAGSLSLAIMMAGISFWMCSNGSLQCRICI

SEQ ID NO: 1658 - protein, 562 aa, synthetic construct
  REGION 1..562: note = hemagglutinin__InfluenzaA__ABP49470
MAIIYLILLFTAVRGDQICIGYHANNSTEKVDTILERNVTVTHAKDILEKTHNGKLCKLNGIPPLELGDCSIAGWLLGNPECDRLLSVPEWSYIMEKENPRDGLCYPGSFNDYEELKHLLSSVKHFEKVKILPKDRWTQHTTTGGSRACAVSGNPSFFRNMVWLTKKGSNYPVAKGSYNNTSGEQMLIIWGVHHPNDETEQRTLYQNVGTYVSVSTSTLNKRSTPDIATRPKVNGLGGRMEFSWTLLDMWDTINFESTGNLIAPEYGFKISKRGSSGIMKTEGTLGNCETKCQTPLGAINTTLPFHNVHPLTIGECPKYVKSEKLVLATGLRNVPQIESRGLFGAIAGFIEGGWQGMVDGWYGYHHSNDQGSGYAADKESTQKAFDGITNKVNSVIEKMNTQFEAVGKEFSNLERRLENLNKKMEDGFLDVWTYNAELLVLMENERTLDFHDSNVKNLYDKVRMQLRDNVKELGNGCFEFYHKCDDECMNSVKNGTYDYPKYEEESKLNRNEIKGVKLSSMGVYQILAIYATVAGSLSLAIMMAGISFWMCSNGSLQCRICI

SEQ ID NO: 1659 - protein, 566 aa, synthetic construct
  REGION 1..566: note = hemagglutinin__InfluenzaA__ABP49492
MKTIIALSYIFCLVFAQGLPGNDNSTATLCLGHHAVPNGTLVKTITNDQIEVTNATELVQSSSTGKICDNPHRILDGINCTLIDALLGDPHCDGFQNEKWDLFVERSKAFSNCYPYDVPDYASLRSLVASSGTLEFINEGFNWTGVTQNGGSSSCKRGPDNGFFSRLNWLYKSGSTYPVQNVTMPNNDNSDKLYIWGVHHPSTDKEQTDLYVQASGKVTVSTKRSQQTVIPNVGSRPWVRGLSSRVSIYWTIVKPGDILVINSNGNLIAPRGYFKMRTGKSSIMRSDAPIGTCSSECITPNGSIPNDKPFQNVNKITYGACPKYVKQNTLKLATGMRNVPEKQTRGIFGAIAGFIENGWEGMIDGWYGFRHQNSEGTGQAADLKSTQAAIDQINGKLNRVIEKTNEKFHQIEKEFSEVEGRIQDLEKYVEDTKIDLWSYNAELLVALENQHTIDLTDSEMNKLFEKTRRQLRENAEDMGNGCFKIYHKCDNACIGSIRNGTYDHDVYRDEALNNRFQIKGVELKSGYKDWILWISFAISCFLLCVVLLGFIMWACQKGNIRCNICI

SEQ ID NO: 1660 - protein, 566 aa, synthetic construct; identical to SEQ ID NO: 1556
  REGION 1..566: note = hemagglutinin__InfluenzaA__ABP49503

SEQ ID NO: 1661 - protein, 566 aa, synthetic construct
  REGION 1..566: note = hemagglutinin__InfluenzaA__ABP49514
MKTIIALSYIFYLALGQDLPGNDNSTATLCLGHHAVPNGTLVKTITNDQIEVTNATELVQSSSTGKICNNPHRILDGIDCTLIDALLGDPHCDVFQNETWDLFVERSKAFSNCYPYDVPDYASLRSLVASSGTLEFITEGFTWTGVTQNGGSNACKRGPGSGFFSRLNWLTKSGSTYPVLNVTMPNNDNFDKLYIWGVHHPSTNQEQTSLYVQASGRVTVSTRRSQQTIIPNIGSRPWVRGLSSRISIYWTIVKPGDVLVINSNGNLIAPRGYFKMRTGKSSIMRSDAPIDTCISECITPNGSIPNDKPFQNVNKITYGACPKYVKQNTLKLATGMRNVPEKQTRGLFGAIAGFIENGWEGMIDGWYGFRHQNSEGTGQAADLKSTQAAIDQINGKLNRVIEKTNEKFHQIEKEFSEVEGRIQDLEKYVEDTKIDLWSYNAELLVALENQHTIDLTDSEMNKLFEKTRRQLRENAEDMGNGCFKIYHKCDNACIESIRNGTYDHDVYRDEALNNRFQIKGVELKSGYKDWILWISFAISCFLLCVVLLGFIMWACQRGNIRCNICI

SEQ ID NO: 1662 - protein, 566 aa, synthetic construct
  REGION 1..566: note = hemagglutinin__InfluenzaA__ABQ01311
MKARLLILLCALSATDADTICIGYHANNSTDTVDTVLEKNVTVTHSVNLLEDSHNGKLCRLKGIAPLQLGKCNIAGWILGNPECESLLSNRSWSYIAETPNSENGTCYPGDFADYEELREQLSSVSSFERFEIFPKERSWPKHNITRGVTAACSHAKKSSFYKNLLWLTEANGSYPNLSKSYVNNKEKEVLVLWGVHHPSKIEDQRTLYRKENAYVSVVSSNYNRRFTPEIAERPKVRGQAGRMNYYWTLLEPGDKIIFEANGNLIAPWYAFALSRGLGSGIITSNASMDECDTKCQTPQGAINSSLPFQNIHPVTIGECPKYVRSTKLRMVTGLRNIPSIQSRGLFGAIAGFIEGGWTGMVDGWYGYHHQNEQGSGYAADQKSTQNAINGITNKVNSVIEKMNTQFTAVGKEFNKLEKRMENLNKKVDDGFLDIWTYNAELLVLLENERTLDFHDSNVKNLYEKVKNQLRNNAKEIGNGCFEFYHKCDNECMESVKNGTYDYPKYSEESKLNREKIDGVKLESMGVYQILAIYSTVASSLVLLVSLGAISFWMCSNGSLQCRICI

SEQ ID NO: 1663 - protein, 566 aa, synthetic construct
  REGION 1..566: note = hemagglutinin__InfluenzaA__ABQ01322
MKAKLLVLLCALSATDADTICIGYHANNSTDTVDTVLEKNVTVTHSVNLLEDSHNGKLCRLKGIAPLHLGKCSIAGWILGNPECESLFSKKSWSYIAETPNSENGTCYPGYFADYEELREQLSSVSSFERFEIFPKERSWPKHNVTRGVTAACSHKGKSSFYRNLLWLTEKNGSYPNLSKSYVNNKEKEVLVLWGVHHPSNIEDQKTIYRKENAYVSVVSSNYNRRFTPEIAKRPKVRGQEGRINYYWTLLEPGDTIIFEANGNLIAPWYAFALSRGFGSGIITSNASMDECDAKCQTPQGAINSSLPFQNVHPVTIGECPKYVRSTKLRMVTGLRNIPSIQSRGLFGAIAGFIEGGWTGMIDGWYGYHHQNEQGSGYAADQKSTQNAINGITNKVNSVIEKMNTQFTAVGKEFNKLEKRMENLNKKVDDGFLDIWTYNAELLVLLENERTLDFHDSNVKNLYEKVKSQLKNNAKEIGNGCFEFYHKCNNECMESVKNGTYDYPKYSEESKLNREKIDGVKLESMGVYQILAIYSTVASSLVLLVSLGAISFWMCSNGSLQCRICI

SEQ ID NO: 1664 - protein, 566 aa, synthetic construct; identical to SEQ ID NO: 650
  REGION 1..566: note = hemagglutinin__InfluenzaA__ABQ01333

SEQ ID NO: 1665 - protein, 566 aa, synthetic construct
  REGION 1..566: note = hemagglutinin__InfluenzaA__ABQ01344
MKTIIALSYILCLVFAQKLPGNDNSTATLCLGHHAVPNGTLVKTITNDQIEVTNATELVQSSSTGGICDSPHQILDGENCTLIDALLGDPHCDGFQNKEWDLFVERSKAYSNCYPYDVPDYASLRSLVASSGTLEFNNESFNWTGVAQNGTSSACKRRSNKSFFSRLNWLHQLKYKYPALNVTMPNNEKFDKLYIWGVHHPSTDSDQISLYAQAPGRVTVSTKRSQQTVIPNIGSRPWVRGVSSRISIYWTIVKPGDILLINCTGNLIAPRGYFKIRSGKSSIMRSDASIGKCNSECITPNGSIPNDKPFQNVNRITYGACPRYVKQNTLKLATGMRNVPEKQTRGIFGAIAGFIENGWEGMVDGWYGFRHQNSEGTGQAADLKSTQAAINQINGKLNRLIGKTNEKFHQIEKEFSEVEGRIQDLEKYVEDTKIDLWSYNAELLVALENQHTIDLTDSEMNKLFERTKKQLRENAEDMGNGCFKIYHKCDNACIGSIRNGTYDHDVYRDEALNNRFQIKGVELKSGYKDWILWISFAISCFLLCVVLLGFIMWACQKGNIRCNICI

SEQ ID NO: 1666 - protein, 562 aa, synthetic construct
  REGION 1..562: note = hemagglutinin__InfluenzaA__ABQ01355
MAIIYLILLFTAVRGDQICIGYHANNSTEKVDTILERNVTVTHAKDILEKTHNGKLCKLNGIPPLELGDCSIAGWLLGNPECDRLLRVPEWSYIMEKENPRDGLCYPGSFNDYEELKHLLSSVKHFEKVRILPKDRWTQHTTTGGSRACAVSGNPSFFRNMIWLTKKGSNYPVAKGSYNNTSGEQMLIIWGVHHPIDETEQRTLYQNVETYVSVVTSTLNKRSTPKIATRPKVNGLGGRMEFSWTLLDMWDTINFESTGNLIAPEYGFKISKRGSSGIMKTEGTLENCETKCQTPLGAINTTLPFHNVHPLTIGECPKYVKSEKLVLATGLRNVPQIESRGLFGAIAGFIEGGWQGMVDGWYGYHHSNDQGSGYAADKESTQRAFDGITNKVNSVIEKMNTQFEAVGKEFSNLERRLENLNKKMEDGFLDVWTYNAELLVLMENERTLDFHDSNVKNLYDKVRMQLRDNVKELGNGCFEFYHKCDDECMNSVKNGTYDYPKYEEESKLNRNEIKGVKLSSMGVYQILAIYATVAGSLSLAIMMAGISFWMCSNGSLQCRICI

SEQ ID NO: 1667 - protein, 566 aa, synthetic construct
  REGION 1..566: note = hemagglutinin__InfluenzaA__ABQ01366
MKTIIALSYIFCLVFAQDLPGNDNSTATLCLGHHAVPNGTLVKTITNDQIEVTNATELVQSSSTGKICDNPHRILDGINCTLIDALLGDPHCDGFQNEKWDLFVERSKAFSNCYPYDVPDYASLRSLVASSGTLEFINEGFNWTGVTQNGGSSACKRGPDNGFFSRLNWLYKSGSTYPVQNVTMTNNDNSDKLYIWGVHHPSTDKEQTDLYVQASGKVTVSTKRSQQTIIPNVGSRPWVRGLSSRVSIYWTIVKPGDILVINSNGNLIAPRGYFKMRTGKSSIMRSDAPIGTCSSECITPNGSIPNDKPFQNVNKITYGACPKYVKQNTLKLATGMRNVPEKQTRGIFGAIAGFIENGWEGMIDGWYGFRHQNSEGTGQAADLKSTQAAIDQINGKLNRVIEKTNEKFHQIEKEFSEVEGRIQDLEKYVEDTKIDLWSYNAELLVALENQHTIDLTDSEMNKLFEKTRRQLRENAEDMGNGCFKIYHKCDNACIGSIRNGTYDHDVYRDEALNNRFQIKGVELKSGYKDWILWISFAISCFLLCVVLLGFIMWACQKGNIRCNICI

SEQ ID NO: 1668 - protein, 566 aa, synthetic construct; identical to SEQ ID NO: 1433
  REGION 1..566: note = hemagglutinin__InfluenzaA__ABQ44383

SEQ ID NO: 1669 - protein, 566 aa, synthetic construct; identical to SEQ ID NO: 633
  REGION 1..566: note = hemagglutinin__InfluenzaA__ABQ44405

SEQ ID NO: 1670 - protein, 566 aa, synthetic construct
  REGION 1..566: note = hemagglutinin__InfluenzaA__ABQ44416
MKAKLLVLLCAFTATDADTICIGYHANNSTDTVDTVLEKNVTVTHSVNLLEDSHNGKLCRLKGIAPLQLGNCSIAGWILGNPECESLFSKKSWSYIAETPNSENGTCYPGYFADYEELREQLSSVSSFERFEIFPKESSWPNHTVTKGVTASCSHKGKSSFYRNLLWLTEKNGSYPNLSKSYVNNKEKEVLVLWGVHHPSNIGDQRAIYHTENAYVSVVSSHYNRRFTPEIAKRPKVRDQEGRINYYWTLLEPEDTIIFEANGNLIAPWYAFALSRGFGSGIITSNASMDECDAKCQTPQGAINSSLPFQNVHPVTIGECPKYVRSTKLRMVTGLRNIPSIQSRGLFGAIAGFIEGGWTGMIDGWYGYHHQNEQGSGYAADQKSTQNAINGITNKVNSVIEKMNTQFTAVGKEFNKLERRMENLNKKVDDGFLDIWTYNAELLVLLENERTLDFHDSNVKNLYEKVKSQLKNNAKEIGNGCFEFYHKCNNECMESVKNGTYDYPKYSEESKLNREKIDGVKLESMGVYQILAIYSTVASSLVLLVSLGAISFWMCSNGSLQCRICI

SEQ ID NO: 1671 - protein, 566 aa, synthetic construct; identical to SEQ ID NO: 256
  REGION 1..566: note = hemagglutinin__InfluenzaA__ABQ44427

SEQ ID NO: 1672 - protein, 562 aa, synthetic construct
  REGION 1..562: note = hemagglutinin__InfluenzaA__ABQ44438
MAIIYFILLFTAVRGDQICIGYHANNSTEKVDTILERNVTVTHAKDILEKTHNGKLCKLNGIPPLELGDCSITGWLLGNPECDRLLRVPEWSYIMEKENPRYSLCYPGSFNDYEELKHLLSSVKHFEKVRILPKDGWTQHTTSGGSKACAVSGKSSFFRNMVWLTKKGPNYPVAKRSYNNTSGEQMLIIWGVHHPNDEAEQSALYQKVGTYVSASTSTLNKRSTPEIAARPEVNGLGSRMEFSWTLLDVWDTINFESTGNLVAPEYGFKISKRGSSGIMKTEGTLGNCETKCQTPLGAINTTLPFHNVHPLTIGECPKYVKSEKLVLATGLRNVPQIESRGLFGAIAGFIEGGWQGMVDGWYGYHHSNDQGSGYAADKESTQKAFDRITNKVNSVIEKMNTQFEAVGKEFSNLEKRLENLNKKMEDGFLDVWTYNAELLVLMENERTLDFHDSNVKNLYNKVRMQLRDNVKELGNGCFEFYHKCDDECMSSVKNGTYDYPKYEEESKLKRNEIKGVKLSSMGVYQILAIYATVAGSLSLAIMIAGISLWMCSNGSLQCRICI

SEQ ID NO: 1673 - protein, 562 aa, synthetic construct
  REGION 1..562: note = hemagglutinin__InfluenzaA__ABQ44460
MAIIYLILLFTAVRGDQICIGYHANNSTEKVDTILERNVTVTHAKDILEKTHNGKLCKLNGIPPLELGDCSIAGWLLGNPECDRLLSVPEWSYIMEKENPRDGLCYPGSFNDYEELKHLLSSVKHFEKVKILPKDRWTQHTTTGGSRACAVSGNPSFFRNMIWLTKKGSNYPVAKGSYNNTSGEQMLIIWGVHHPNDETEQRTLYQNVGTYVSVGTSTLNKRSTPDIATRPKVNGLGSRMEFSWTLLDMWDTINFESTGNLIAPEYGFKISKRGSSGIMKTEGTLGNCETKCQTPLGAINTTLPFHNVHPLTIGECPKYVKSEKLVLATGLRNVPQIESRGLFGAIAGFIEGGWQGMVDGWYGYHHSNDQGSGYAADKESTQKAFDGITNKVNSVIEKMNTQFEAVGKEFSNLERRLENLNKKMEDGFLDVWTYNAELLVLMENERTLDFHDSNVKNLYDKVRMQLRDNVKELGNGCFEFYHKCDDECMNSVKNGTYDYPKYEEESKLNRNEIKGVKLSSMGVYQILAIYATVAGSLSLAIMMAGISFWMCSNGSLQCRICI

SEQ ID NO: 1674 - protein, 566 aa, synthetic construct
  REGION 1..566: note = hemagglutinin__InfluenzaA__ABQ44471
MKARLLILLCALSATDADTICIGYHANNSTDTVDTVLEKNVTVTHSVNLLEDSHNGKLCRLKGIAPLQLGKCNIAGWILGNPECESLLSNRSWSYIAETPNSENGTCYPGDFADYEELREQLSSVSSFERFEIFPKERSWPKHNITRGVTAACSHAKKSSFYKNLLWLTEANGSYPNLSKSYVNNKEKEVLVLWGVHHPSNIEDQRTLYRKENAYVSVVSSNYNRRFTPEIAERPKVRGQAGRMNYYWTLLEPGDKIIFEANGNLIAPWYAFALSRGLGSGIITSNASMDECDTKCQTPQGAINNSLPFQNIHPVTIGECPKYVRSTKLRMVTGLRNIPSIQSRGLFGAIAGFIEGGWTGMVDGWYGYHHQNEQGSGYAADQKSTQNAINGITNKVNSVIEKMNTQFTAVGKEFNKLEKRMENLNKKVDDGFLDIWTYNAELLVLLENERTLDFHDSNVKNLYEKVKNQLRNNAKEIGNGCFEFYHKCDNECMESVKNGTYDYPKYSEESKLNREKIDGVKLESMGVYQILAIYSTVASSLVLLVSLGAISFWMCSNGSLQCRICI

SEQ ID NO: 1675 - protein, 566 aa, synthetic construct
  REGION 1..566: note = hemagglutinin__InfluenzaA__ABR15797
MKTIIALSYIFCLALGQDLPGNDNSTATLCLGHHAVPNGTLVKTITNDQIEVTNATELVQSSSTGKICNNPHRILDGIDCTLIDALLGDPHCDVFQNETWDLFVERSKAFSNCYPYDVPDYASLRSLVASSGTLEFITEGFTWTGVTQNGGSNACKRGPGSGFFSRLNWLTKSGSTYPVLNVTMPNNDNFDKLYIWGVHHPSTNQEQTSLYVQASGRVTVSTRRSQQTIIPNIGSRPWVRGLSSRISIYWTIVKPGDVLVINSNGNLIAPRGYFKMRTGKSSIMRSDAPIDTCISECITPNGSIPNDKPFQNVNKITYGACPKYVKQNTLKLATGMRNVPEKQTRGLFGAIAGFIENGWEGMIDGWYGFRHQNSEGTGQAADLKSTQAAIDQINGKLNRVIEKTNEKFHQIEKEFSEVEGRIQDLEKYVEDTKIDLWSYNAELLVALENQHTIDLTDSEMNKLFEKTRRQLRENAEDMGNGCFKIYHKCDNACIESIRNGTYDHDVYRDEALNNRFQIKGVELKSGYKDWILWISFAISCFLLCVVLLGFIMWACQRGNIRCNICI

SEQ ID NO: 1676 - protein, 566 aa, synthetic construct
  REGION 1..566: note = hemagglutinin__InfluenzaA__ABR15808
MKARLLILLCALSATDADTICIGYHANNSTDTVDTVLEKNVTVTHSVNLLEDSHNGKLCRLKGIAPLQLGKCNIAGWILGNPECESLLSNRSWSYIAETPNSENGTCYPGDFADYEELREQLSSVSSFERFEIFPKERSWPKHNITRGVTAACSHAKKSSFYKNLLWLTEANGSYPNLSKSYVNNKEKEVLVLWGVHHPSNIEDQRTLYRKENAYVSVVSSNYNRRFTPEIAERPKVRGQAGRMNYYWTLLEPGDKIIFEANGNLIAPWYAFALSRGLGSGIITSNASMDECDTKCQTPQGAINSSLPFQNIHPVTIGECPKYVRSTKLRMVTGLRNIPSIQSRGLFGAIAGFIEGGWTGMVDGWYGYHHQNEQGSGYAADQKSTQNAINGITNKVNSVIEKMNTQFTAVGKEFNKLEKRMENLNKKVDDGFLDIWTYNAELLVLLENERTLDFHDSNVKNLYEKVKNQLRNNAKEIGNGCFEFYHKCDNECMESVKNGTYDYPKYSEESKLNREKIDGVKLESMGVYQILAIYSTVASSLVLLVSLGAISFWMCSNGSLQCRICI

SEQ ID NO: 1677 - protein, 565 aa, synthetic construct; identical to SEQ ID NO: 742
  REGION 1..565: note = hemagglutinin__InfluenzaA__ABR15885

SEQ ID NO: 1678 - protein, 565 aa, synthetic construct
  REGION 1..565: note = hemagglutinin__InfluenzaA__ABR15896
MKAKLLVLLCTFTATYADTICIGYHANNSTDTVDTVLEKNVTVTHSVNLLEDSHNGKLCLLKGIAPLQLGNCSVAGWILGNPECELLISKESWSYIVEAPNPENGTCYPGYFADYEELREQLSSVSSFERFEIFPKESSWPNHTVTGVSASCSHNGKSSFYRNLLWLTGKNGLYPNLSMSYVNNKEKEVLVLWGVHHPPNIGDQRALYHTENAYVSVVSSHYSRRFTPEIAKRPKVRDQEGRINYYWTLLEPGDTIIFEANGNLIAPWYAFALSRGFGSGIITSNAPMDECDAKCQTPQGAINSSLPFQNVHPVTIGECPKYVRSAKLRMVTGLRNIPSIQSRGLFGAIAGFIEGGWTGMVDGWYGYHHQNEQGSGYAADQKSTQNAINGITNKVNSVIEKMNTQFTAVGKEFNKLERRMENLNKKVDDGFLDIWTYNAELLVLLENERTLDFHDSNVKNLYEKVKSQLKNNAKEIGNGCFEFYHKCNNECMESVKNGTYDYPKYSEESKLNREKIDGVKLESMGVYQILAIYSTVASSLVLLVSLGAISFWMCSNGSLQCRICI

SEQ ID NO: 1679 - protein, 565 aa, synthetic construct; identical to SEQ ID NO: 741
  REGION 1..565: note = hemagglutinin__InfluenzaA__ABR15907

SEQ ID NO: 1680 - protein, 565 aa, synthetic construct; identical to SEQ ID NO: 742
  REGION 1..565: note = hemagglutinin__InfluenzaA__ABR15918

SEQ ID NO: 1681 - protein, 566 aa, synthetic construct
  REGION 1..566: note = hemagglutinin__InfluenzaA__ABR15929
MKTIIALSYILCLVFAQKLPGNDNSTATLCLGHHAVPNGTLVKTITNDQIEVTNATELVQSSSTGRICDSPHQILDGENCTLIDALLGDPHCDGFQNKEWDLFVERSKAYSNCYPYDVPDYVSLRSLVASSGTLEFNNESFNWTGVAQNGTSSACKRRSDKSFFSRLNWLHQLKYKYPALNVTMPNNEKFDKLYIWGVHHPGTDSDQISLYAQASGRVTVSTKRSQQTVIPNIGSRPWVRGISSRISIYWTIVKPGDILLINSTGNLIAPRGYFKIRSGKSSIMRSDAPIGKCNSECITPNGSIPNDKPFQNVNRITYGPCPRYVKQNTLKLATGMRNVPEKQTRGIFGAIAGFIENGWEGMMDGWYGFRHQNSEGTGQAADLKSTQAAINQINGKLNRLIEKTNEKFHQIEKEFSEVEGRIQDLEKYVEDTKIDLWSYNAELLVALENQHTIDLTDSEMNKLFERTKKQLRENAEDMGNGCFKIYHKCNNACIGSIRNGTYDHDVYRDEALNNRFQIKGVELKSGYKDWILWISFAISCFLLCIVLLGFIMWACQKGNIRCNICI

SEQ ID NO: 1682 - protein, 566 aa, synthetic construct
  REGION 1..566: note = hemagglutinin__InfluenzaA__ABR15940
MKTIIALSYILCLVFAQKLPGNDNSTATLCLGHHAVPNGTLVKTITNDQIEVTNATELVQSSSTGRICDSPHQILDGENCTLIDALLGDPHCDGFQNKEWDLFVERSKAYSNCYPYDVPDYVSLRSLVASSGTLEFNNESFNWTGVAQNGTSSACKRRSDKSFFSRLNWLHQLKYKYPALNVTMPNNEKFDKLYIWGVHHPGTDSDQISLYAQASGRVTVSTKRSQQTVIPNIGSRPWVRGVSSRISIYWTIVKPGDILLINSTGNLIAPRGYFKIRSGKSSIMRSDAPIGKCNSECITPNGSISNDKPFQNVNRITYGACPRYVKQNTLKLATGMRNVPEKQTRGIFGAIAGFIENGWEGMMDGWYGFRHQNSEGTGQAADLKSTQAAINQINGKLNRLIEKTNEKFHQIEKEFSEVEGRIQDLEKYVEDTKIDLWSYNAELLVALENQHTIDLTDSEMNKLFERTKKQLRENAEDMGNGCFKIYHKCDNACIGSIRNGTYDHDVYRDEALNNRFQIKGVELKSGYKDWVLWISFAISCFLLCIVLLGFIMWACQKGNIRCNICI

SEQ ID NO: 1683 - protein, 566 aa, synthetic construct; identical to SEQ ID NO: 562
  REGION 1..566: note = hemagglutinin__InfluenzaA__ABR15951

SEQ ID NO: 1684 - protein, 566 aa, synthetic construct
  REGION 1..566: note = hemagglutinin__InfluenzaA__ABR15962
MKTIIALSYILCLVFAQKLPGNDNSTATLCLGHHAVPNGTLVKTITNDQIEVTNATELVQSSSTGRICDSPHQILDGENCTLIDALLGDPHCDGFQNKEWDLFVERSRAYSNCYPYDVPDYVSLRSLVASSGTLEFNNESFNWTGVAQNGTSSACKRRSDKSFFSRLNWLHQLKYKYPALNVTMPNNEKFDKLYIWGVHHPGTDSDQISLYAQASGRVTVSTKRSQQTVIPNIGSRPWVRGVSSIISIYWTIVKPGDILLINSTGNLIAPRGYFKIRSGKSSIMRSDAPIGKCNSECITPNGSIPNDKPFQNVNRITYGPCPRYVKQNTLKLATGMRNVPEKQTRGIFGAIAGFIENGWEGMMDGWYGFRHQNSEGTGQAADLKSTQAAINQINGKLNRLIEKTNEKFHQIEKEFSEVEGRIQDLEKYVEDTKIDLWSYNAELLVALENQHTIDLTDSEMNKLFERTKKQLRENAEDMGNGCFKIYHKCDNACIGSIRNGTYDHDVYRDEALNNRFQIKGVELKSGYKDWILWISFAISCFLLCIVLLGFIMWACQKGNIRCNICI

SEQ ID NO: 1685 - protein, 566 aa, synthetic construct
  REGION 1..566: note = hemagglutinin__InfluenzaA__ABR22241
MKTIIALSYILCLAFAQKLPGNDNSTATLCLGHHAVPNGTLVKTITNDQIEVTNATELVQSSSTGRICDSPHQILDGENCTLIDALLGDPHCDGFQNKEWDLFVERSKAYSNCYPYDVPDYASLRSLVASSGTLEFNNESFNWTGVAQNGTSSACKRRSIKSFFSRLNWLHQLEYRYPALNVTMPNNDKFDKLYIWGVHHPSTDSDQISVYAQASGRVTVSTKRSQQTVIPNIGSRPWVRGISSRISIYWTIVKPGDILLINSTGNLIAPRGYFKIRSGKSSIMRSDAPIGKCNSECITPNGSIPNDKPFQNVNRITYGACPRYVKQNTLKLATGMRNVPEKQTRGIFGAIAGFIENGWEGMMDGWYGFRHQNSEGTGQAADLKSTQAAINQINGKLNKLIEKTNEKFHQIEKEFSEVEGRIQDLEKYVEDTKIDLWSYNAELLVALENQNTIDLTDSEMNKLFERTRKQLRENAEDMGNGCFKIYHKCDNACIGSIRNGTYDHDVYRDEALNNRFQIKGVELKSGYKDWILWISFAISCFLLCVVLLGFIMWACQKGNIRCNICI

SEQ ID NO: 1686 - protein, 566 aa, synthetic construct; identical to SEQ ID NO: 650
  REGION 1..566: note = hemagglutinin__InfluenzaA__ABR28515

SEQ ID NO: 1687 - protein, 566 aa, synthetic construct
  REGION 1..566: note = hemagglutinin__InfluenzaA__ABR28592
MKTIIALSYVFCLVFAQDLPGNDNSTATLCLGHHAVPNGTLVKTITNDQIEVTNATELVQSSSTGKICDNPHRILDGINCTLIDALLGDPHCDGFQNEKWDLFVERSKAFSNCYPYDVPDYASLRSLVASSGTLEFINEGFNWTGVTQNGGSSACKRGPDNGFFSRLNWLYKSGSTYPVQNVTMPNNDNSDKLYIWGVHHPSTDKEQTDLYVQASGKVTVSTKRSQQTVIPNVGSRPWVRGLSSRVSIYWTIVKPGDILVINSNGNLIAPRGYFKMRTGKSSIMRSDAPIGTCSSECITPNGSIPNDKPFQNVNKITYGACPKYVKQNTLKLATGMRNVPEKQTRGIFGAIAGFIENGWEGMIDGWYGFRHQNSEGTGQAADLKSTQAAIDQINGKLNRVIEKTNEKFHQIEKEFSEVEGRIQDLEKYVEDTKIDLWSYNAELLVALENQHTIDLTDSEMNKLFEKTRRQLRENAEDMGNGCFKIYHKCDNACIGSIRNGTYDHDVYRDEALNNRFQIKGVELKSGYKDWILWISFAISCFLLCVVLLGFIMWACQKGNIRCNICI

SEQ ID NO: 1688 - protein, 565 aa, synthetic construct; identical to SEQ ID NO: 742
  REGION 1..565: note = hemagglutinin__InfluenzaA__ABR28768

SEQ ID NO: 1689 - protein, 565 aa, synthetic construct; identical to SEQ ID NO: 742
  REGION 1..565: note = hemagglutinin__InfluenzaA__ABR28779

SEQ ID NO: 1690 - protein, 566 aa, synthetic construct; identical to SEQ ID NO: 1433
  REGION 1..566: note = hemagglutinin__InfluenzaA__ABR28790

SEQ ID NO: 1691 - protein, 565 aa, synthetic construct; identical to SEQ ID NO: 742
  REGION 1..565: note = hemagglutinin__InfluenzaA__ABR28801

SEQ ID NO: 1692 - protein, 566 aa, synthetic construct; identical to SEQ ID NO: 650
  REGION 1..566: note = hemagglutinin__InfluenzaA__ABR28812

SEQ ID NO: 1693 - protein, 566 aa, synthetic construct
  REGION 1..566: note = hemagglutinin__InfluenzaA__ABR28823
MKTIIALSYILCLVFAQKLPGNDNSTATLCLGHHAVPNGTLVKTITNDQIEVTNATELVQSSSTGRICDSPHQILDGENCTLIDALLGDPHCDGFQNKEWDLFVERSKAYSNCYPYDVPDYVSLRSLVASSGTLEFNNESFNWTGVAQNGTSSACKRRSDKSFFSRLNWLHQLKYKYPALNVTMPNNEKFDKLYIWGVHHPGTDSDQISLYAQASGRVTVSTKRSQQTVIPNIGSRPWVRGISSRISIYWTIVKPGDILLINSTGNLIAPRGYFKIRSGKSSIMRSDAPIGKCNSECITPNGSIPNDKPFQNVNRITYGPCPRYVKQNTLKLATGMRNVPEKQTRGIFGAIAGFIENGWEGMMDGWYGFRHQNSEGTGQAADLKSTQAAINQINGKLNRLIEKTNEKFHQIEKEFSEVEGRIQDLEKYVEDTKIDLWSYNAELLVALENQHTIDLTDSEMNKLFERTKKQLRENAEDMGNGCFKIYHKCDNACIGSIRNGTYDHDVYRDEALNNRFQIKGVELKSGYKDWILWISFAISCFLLCIVLLGFIMWACQKGNIRCNICI

SEQ ID NO: 1694 - protein, 565 aa, synthetic construct; identical to SEQ ID NO: 870
  REGION 1..565: note = hemagglutinin__InfluenzaA__ABR28834

SEQ ID NO: 1695 - protein, 565 aa, synthetic construct; identical to SEQ ID NO: 841
  REGION 1..565: note = hemagglutinin__InfluenzaA__ABR28845

SEQ ID NO: 1696 - protein, 566 aa, synthetic construct
  REGION 1..566: note = hemagglutinin__InfluenzaA__ABR28856
MKTIIALSYILCLVFAQKLPGNDNSTATLCLGHHAVPNGTLVKTITNDQIEVTNATELVQSSSTGRICDSPHQILDGENCTLIDALLGDPHCDGFQNKEWDLFVERSKAYSNCYPYDVPDYVSLRSLVASSGTLEFNNESFNWTGVAQNGTSSACKRRSDKSFFSRLNWLHQLKYKYPALNVIMPNNEKFDKLYIWGVHHPGTDSDQISLYAQASGRVTVSTKRSQQTVIPNIGSRPWVRGVSSRISIYWTIVKPGDILLINSTGNLIAPRGYFKIRSGKSSIMRSDAPIGKCNSECITPNGSIPNDKPFQNVNRITYGACPRYVKQKTLKLATGMRNVPEKQTRGIFGAIAGFIENGWEGMMDGWYGFRHQNSEGTGQAADLKSTQAAINQINGKLNRLIEKTNEKFHQIEKEFSEVEGRIQDLEKYVEDTKIDLWSYNAELLVALENQHTIDLTDSEMNKLFERTKKQLRENAEDMGNGCFKIYHKCDNACIGSIRNGTYDHDVYRDEALNNRFQIKGVELKSGYKDWILWISFAISCFLLCIVLLGFIMWACQKGNIRCNICI

SEQ ID NO: 1697 - protein, 566 aa, synthetic construct; identical to SEQ ID NO: 607
  REGION 1..566: note = hemagglutinin__InfluenzaA__ABR28867

SEQ ID NO: 1698 - protein, 566 aa, synthetic construct; identical to SEQ ID NO: 562
  REGION 1..566: note = hemagglutinin__InfluenzaA__ABR28878

SEQ ID NO: 1699 - protein, 565 aa, synthetic construct; identical to SEQ ID NO: 1204
  REGION 1..565: note = hemagglutinin__InfluenzaA__ABR28900

SEQ ID NO: 1700 - protein, 566 aa, synthetic construct
  REGION 1..566: note = hemagglutinin__InfluenzaA__ABR28922
MKTIIALSYILCLVFAQKLPGNDNSTATLCLGHHAVPNGTIVKTITNDQIEVTNATELVQSSSTGGICDSPHQILDGENCTLIDALLGDPQCDGFQNKKWDLFVERSKAYSNCYPYDVPDYASLRSLVASSGTLEFNNESFNWTGVTQNGTSSACKRRSNNSFFSRLNWLTHLKFKYPALNVTMPNNEKFDKLYIWGVHHPGTDNDQISLYAQASGRITVSTKRSQQTVIPNIGSRPRVRDIPSRVSIYWTIVKPGDILLINSTGNLIAPRGYFKIRSGKSSIMRSDAPIGKCNSECITPNGSIPNDKPFQNVNRITYGACPRYVKQNTLKLATGMRNVPEKQTRGIFGAIAGFIENGWEGMVDGWYGFRHQNSEGIGQAADLKSTQAAINQINGKLNRLIGKTNEKFHQIEKEFSEVEGRIQDLEKYVEDTKIDLWSYNAELLVALENQHTIDLTDSEMNKLFERTKKQLRENAEDMGNGCFKIYHKCDNACIGSIRNGTYDHDVYRDEALNNRFQIKGVELKSGYKDWILWISFAISCFLLCVALLGFIMWACQKGNIRCNICI

SEQ ID NO: 1701 - protein, 566 aa, synthetic construct; identical to SEQ ID NO: 1581
  REGION 1..566: note = hemagglutinin__InfluenzaA__ABR88080

SEQ ID NO: 1702 - protein, 566 aa, synthetic construct
  REGION 1..566: note = hemagglutinin__InfluenzaA__ABS00315
MKAKLLVLLCAFTATDADTICIGYHANNSTDTVDTVLEKNVTVTHSVNLLEDSHNGKLCRLKGIAPLQLGNCSVAGWILGNPECESLFSKKSWSYIAETPNSENGTCYPGYFADYEELREQLSSVSSFERFEIFPKESSWPNHTVTKGVSASCSHKGRSSFYRNLLWLTEKNGSYPNLSKSYVNNKEREVLVLWGVHHPSNIGEQRAIYHTENAYVSVVSSHYNRRFTPEIAKRPKVRGQEGRINYYWTLLEPGDTIIFEANGNLIAPWYAFALSRGFGSGIITSNASMDECDAKCQTPQGAINSSLPFQNVHPVTIGECPKYVRSTKLRMVTGLRNIPSIQSRGLFGAIAGFIEGGWTGMIDGWYGYHHQNEQGSGYAADQKSTQNAINGITNKVNSVIEKMNTQFTAVGKEFNKLERRMENLNKKVDDGFLDIWTYNAELLVLLENERTLDFHDSNVKNLYEKVKSQLKNNAKEIGNGCFEFYHKCNNECMESVKNGTYDYPKYSEESKLNREKIDGVKLESMGVYQILAIYSTVASSLVLLVSLGAISFWMCSNGSLQCRICI

SEQ ID NO: 1703 - protein, 566 aa, synthetic construct
  REGION 1..566: note = hemagglutinin__InfluenzaA__ABS00326
MKAKLLVLLCAFTATDADTICIGYHANNSTDTVDTVLEKNVTVTHSVNLLEDSHNGKLCRLKGIAPLQLGNCSVAGWILGNPECESLFSKKSWSYIAETPNSENGTCYPGYFADYEELREQLSSVSSFERFEIFPKESSWPNHTVTKGVSASCSHKGRSSFYRNLLWLTEKNGSYPNLSKSYVNNKEKEVLVLWGVHHPSNIGEQRAIYHTENAYVSVVSSHYNRRFTPEIAKRPKVRGQEGRINYYWTLLEPGDTIIFEANGNLIAPWYAFALSRGFGSGIITSNASMDECDAKCQTPQGAINSSLPFQNVHPVTIGECPKYVRSTKLRMVTGLRNIPSIQSRGLFGAIAGFIEGGWTGMIDGWYGYHHQNEQGSGYAADQKSTQNAINGITNKVNSVIEKMNTQFTAVGKEFNKLERRMENLNKKVDDGFLDIWTYNAELLVLLENERTLDFHDSNVKNLYEKVKSQLKNNAKEIGNGCFEFYHKCNNECMESVKNGTYDYPKYSEESKLNREKIDGVKLESMGVYQILAIYSTVASSLVLLVSLGAISFWMCSNGSLQCRICI

SEQ ID NO: 1704 - protein, 566 aa, synthetic construct; identical to SEQ ID NO: 1640
  REGION 1..566: note = hemagglutinin__InfluenzaA__ABS49899

SEQ ID NO: 1705 - protein, 566 aa, synthetic construct
  REGION 1..566: note = hemagglutinin__InfluenzaA__ABS49910
MKTIIALSYIFCLALGQDLPGNDNSTATLCLGHHAVPNGTLVKTITNDQIEVTNATELVQSSSTGKICNNPHRILDGINCTLIDALLGDPHCDVFQDETWDLFVERSKAFSNCYPYDVPDYASLRSLVASSGTLEFITEGFTWTGVTQNGGSNACKRGPGSGFFSRLNWLTKSGSTYPVLNVTMPNNDNFDKLYIWGVHHPSTNQEQTSLYVQASGRVTVSTRRSQQTIIPNIGSRPWVRGLSSRISIYWTIVKPGDVLVINSNGNLIAPRGYFKMRTGKSSIMRSDAPIDTCISECITPNGSIPNDKPFQNVNKITYGACPKYVKQNTLKLATGMRNVPEKQTRGLFGAIAGFIENGWEGMIDGWYGFRHQNSEGTGQAADLKSTQAAIDQINGKLNRVIEKTNEKFHQIEKEFSEVEGRIQDLEKYVEDTKIDLWSYNAELLVALENQHTIDLTDSEMNKLFEKTRRQMRENAEDMGNGCFKIYHKCDNACIESIRNGTYDHDVYRDEALNNRFQIKGVELKSGYKDWILWISFAISCFLLCVVLLGFIMWACQRGNIRCNICI

SEQ ID NO: 1706 - protein, 566 aa, synthetic construct; identical to SEQ ID NO: 650
  REGION 1..566: note = hemagglutinin__InfluenzaA__ABS49965

SEQ ID NO: 1707 - protein, 565 aa, synthetic construct
  REGION 1..565: note = hemagglutinin__InfluenzaA__ABS49976
MKVKLLVLLCTFTATYADTICIGYHANNSTDTVDTVLEKNVTVTHSVNLLEDSHNGKLCLLKGIAPLQLGNCSVAGWILGNPECELLISKESWSYIVETPNPENGTCYPGYFADYEELREQLSSVSSFERFEIFPKESSWPNHTVTGVSASCSHNGKSSFYRNLLWLTGKNGLYPNLSKSYANNKEKEVLVLWGVHHPPNIGNQRALYHTENAYVSVVSSHYSRRFTPEIAKRPKVRDQEGRINYYWTLLEPGDTIIFEANGNLIAPRYAFALSRGFGSGIITSNAPMDECDAKCQTPQGAINSSLPFQNVHPVTIGECPKYVRSAKLRMVTGLRNIPSIQSRGLFGAIAGFIEGGWTGMVDGWYGYHHQNEQGSGYAADQKSTQNAINGITNKVNSVIEKMNTQFTAVGKEFNKLERRMENLNKKVDDGFLDIWTYNAELLVLLENERTLDFHNSNVKNLYEKVKSQLKNNAKEIGNGCFEFYHKCNNECMESVKNGTYDYPKYSEESKLNREKIDGVKLESMGVYQILAIYSTVASSLVLLVSLGAISFWMCSNGSLQCRICI

SEQ ID NO: 1708 - protein, 565 aa, synthetic construct
  REGION 1..565: note = hemagglutinin__InfluenzaA__ABS49987
MKVKLLVLLCTFTATYADTICIGYHANNSTDTVDTVLEKNVTVTHSVNLLEDSHNGKLCLLKGIAPLQLGNCSVAGWILGNPECELLISKESWSYIVETPNPENGTCYPGYFADYEELREQLSSVSSFERFEIFPKESSWPNHTVTGVSASCSHNGKSSFYRNLLWLTGKNGLYPNLSKSYANNKEKEVLVLWGVHHPPNIGDQRALYHTENAYVSVVSSHYSRRFTPEIAKRPKVRDQEGRINYYWTLLEPGDTIIFEANGNLIAPRYAFALSRGFGSGIITSNAPMDECDAKCQTPQGAINSSLPFQNVHPVTIGECPKYVRSAKLRMVTGLRNIPSIQSRGLFGAIAGFIEGGWTGMVDGWYGYHHQNEQGSGYAADQKSTQNAINGITNKVNSVIEKMNTQFTAVGKEFNKLERRMENLNKKVDDGFLDIWTYNAELLVLLENERTLDFHDSNMKNLYEKVKSQLKNNAKEIGNGCFEFYHKCNNECMESVKNGTYDYPKYSEESKLNREKIDGVKLESMGVYQILAIYSTVASSLVLLVSLGAISFWMCSNGSLQCRICI

SEQ ID NO: 1709 - protein, 566 aa, synthetic construct
  REGION 1..566: note = hemagglutinin__InfluenzaA__ABS49998
MKTIIALSYILCLVFAQKLPGNDNSTATLCLGHHAVPNGTLVKTITNDQIEVTNATELVQSSSTGGICDSPHQILDGENCTLIDALLGDPHCDGFQNKEWDLFVERSKAYSNCYPYDVPDYASLRSLVASSGTLEFNNESFNWTGVAQNGTSSACKRRSNKSFFSRLNWLHQLKYKYPALNVIMPNNEKFDKLYIWGVHHPSTDSDQISLYAQAPGRVTVSTKRSQQTVIPNIGSRPWVRGVSSRISIYWTIVKPGDILLINCTGNLIAPRGYFKIRSGKSSIMRSDASIGKCNSECITPNGSIPNDKPFQNVNRITYGACPRYVKQNTLKLATGMRNVPEKQTRGIFGAIAGFIENGWEGMVDGWYGFRHQNSEGTGQAADLKSTQAAINQINGKLNRLIEKTNEKFHQIEKEFSEVEGRIQDLEKYVEDTKIDLWSYNAELLVALENQHTIDLTDSEMNKLFERTKKQLRENAEDMGNGCFKIYHKCDNACIGSIRNGTYDHDVYRDEALNNRFQIKGVELKSGYKDWILWISFAISCFLLCVVLLGFIMWACQKGNIRCNICI

SEQ ID NO: 1710 - protein, 566 aa, synthetic construct
  REGION 1..566: note = hemagglutinin__InfluenzaA__ABS50009
MKTIIALSYILCLVFAQKLPGNDNSTATLCLGHHAVPNGTLVKTITNDQIEVTNATELVQSSSTGGICDSPHQILDGENCTLIDALLGDPHCDGFQNKEWDLFVERSKAYSNCYPYDVPDYASLRSLVASSGTLEFNNESFNWTGVAQNGTSSACKRRSNKSFFSRLNWLHQLKYKYPALNVTMPNNEKFDKLYIWGVHHPSTDSDQISLYAQAPGRVTVSTKRSQQTVIPNIGSRPWVRGVSSKISIYWTIVKPGDILLINCTGNLIAPRGYFKIRSGKSSIMRSDASIGKCNSECITPNGSIPNDKPFQNVNRITYGACPRYVKQNTLKLATGMRNVPEKQTRGIFGAIAGFIENGWEGMVDGWYGFRHQNSEGTGQAADLKSTQAAINQINGKLNRLIEKTNEKFHQIEKEFSEVEGRIQDLEKYVEDTKIDLWSYNAELLVALENQHTIDLTDSEMNKLFERTKKQLRENAEDMGNGCFKIYHKCDNACIGSIRNGTYDHDVYRDEALNNRFQIKGVELKSGYKDWILWISFAISCFLLCVVLLGFIMWACQKGNIRCNICI

SEQ ID NO: 1711 - protein, 566 aa, synthetic construct; identical to SEQ ID NO: 710
  REGION 1..566: note = hemagglutinin__InfluenzaA__ABS50020

SEQ ID NO: 1712 - protein, 566 aa, synthetic construct
  REGION 1..566: note = hemagglutinin__InfluenzaA__ABS50031
MKTIIALSYMLCLVFAQKLPGNDNSTAMLCLGHHAVPNGTLVKTITNDQIEVTNATELVQSSSTGGICDSPHQILDGENCTLIDALLGDPHCDGFQNKEWDLFVERSKAYSNCYPYDVPDYASLRSLVASSGTLEFNNESFNWTGVAQNGTSSACKRRSNKSFFSRLNWLHQLKYKYPALNVTMPNNEKFDKLYIWGVHHPSTDSDQISLYAQAPGRVTVSTKRSQQTVIPNIGSGPWVRGVSSRISIYWTIVKPGDILLINCTGNLIAPRGYFKIRSGKSSIMRSDASIGKCNSECITPNGSIPNDKPFQNVNRITYGACPRYVKQNTLKLATGMRNVPEKQTRGIFGAIAGFIENGWEGMVDGWYGFRHQNSEGTGQAADLKSTQAAINQINGKLNRLIEKTNEKFHQIEKEFSEVEGRIQDLEKYVEDTKIDLWSYNAELLVALENQHTIDLTDSEMNKLFERTKKQLRENAEDMGNGCFKIYHKCDNACIGSIRNGTYDHDVYRDEALNNRFQIKGVELKSGYKDWILWISFAISCFLLCVVLLGFIMWACQKGNIRCNICI

SEQ ID NO: 1713 - protein, 566 aa, synthetic construct; identical to SEQ ID NO: 51
  REGION 1..566: note = hemagglutinin__InfluenzaA__ABS50042

SEQ ID NO: 1714 - protein, 566 aa, synthetic construct; identical to SEQ ID NO: 1693
  REGION 1..566: note = hemagglutinin__InfluenzaA__ABS50053

SEQ ID NO: 1715 - protein, 566 aa, synthetic construct
  REGION 1..566: note = hemagglutinin__InfluenzaA__ABS50064
MKTIIALSYILCLVFAQKLPGNDNSTATLCLGHHAVPNGTLVKTITNDQIEVTNATELVQSSSTGRICDSPHQILDGENCTLIDALLGDPHCDGFQNKEWDLFVERSKAYSNCYPYDVPDYVSLRSLVASSGTLEFNNESFNWTGVAQNGTSSACKRRSDKSFFSRLNWLHQLKYKYPALNVTMPNNEKFDKLYIWGVHHPGTDSDQISLYAQASGRVTVSTKRSQQTVIPNIGSRPWVRGVSSRISIYWTIVKPGDILLINSTGNLIAPRGYFKIRSGKSSIMRSDAPIGKCNSECITPNGSIPNDKPFQNVNRITYGPCPRYVKQTTLKLATGMRNVPEKQTRGIFGAIAGFIENGWEGMMDGWYGFRHQNSEGTGQAADLKSTQAAINQINGKLNRLIEKTNEKFHQIEKEFSEVEGRIQDLEKYVEDTKIDLWSYNAELLVSLENQHTIDLTDSEMNKLFERTKKQLRENAEDMGNGCFKIYHKCDNACIGSIRNGTYDHDVYRDEALNNRFQIKGVELKSGYKDWILWISFAISCFLLCIVLLGFIMWACQKGNIRCNICI

SEQ ID NO: 1716 - protein, 566 aa, synthetic construct
  REGION 1..566: note = hemagglutinin__InfluenzaA__ABS50075
MKTIIALSYILCLVFAQKLPGNDNSTATLCLGHHAVPNGTIVKTITNDQIEVTNATELVQSSSTGGICDSPHKILDGENCTLIDALLGDPQCDGFQNKKWDLFVERSKAYSNCYPYDVPDYASLRSLIASSGTLEFNNESFNWTGVTQNGTSSACKRRSNSSFFSRLNWLTHLKFKYPALNVTMPNNEEFDKLYIWGVHHPGTYNDQISLYAQASGRITVSTKRSQQTVIPNIGSRPRVRDIPSRISIYWTIVKPGDILLINSTGNLIAPRGYFKIRSGKSSIMRSDAPIGKCNSECITPNGSIPNDKPFQNVNRITYGACPRYVKQNTLKLATGMRNVPEKQTRGIFGAIAGFIENGWEGMVDGWYGFRHQNSEGIGQAADLKSTQAAIDQINGKLNRLIGKTNEKFHQIEKEFSEVEGRIQDLEKYVEDTKIDLWSYNAELLVALENQHTIDLTDSEMNKLFERTKKQLRENAEDMGNGCFKIYHKCDNACIGSIRNGTYDHDVYRDEALNNRFQIKGVELKSGYKDWILWISFAISCFLLCVALLGFIMWACQKGNIRCNICI

SEQ ID NO: 1717 - protein, 565 aa, synthetic construct
  REGION 1..565: note = hemagglutinin__InfluenzaA__ABS71665
MKVKLLVLLCTFTATYADTICIGYHANNSTDTVDTVLEKNVTVTHSVNLLEDSHNGKLCLLKGIAPLQLGNCSVAGWILGNPECESLISRESWSYIVEKPSPENGTCYPGHFADYEELREQLSSVSSFERFEIFPKESSWPNHTATGVSASCSHNGESSFYKNLLWLTGKNGLYPNLSKSYANNKEKEVLVLWGVHHPPNIGDQRALYHTENAYVSVVSSHYSRKFTPEIAKRPKVRDQEGRISYYWTLLEPGDTIIFEANGNLIAPRYAFALSRGFGSGIINSNAPMDECDAKCQTPQGAINSSLPFQNVHPVTIGECPKYVRSAKLRMVTGLRNIPSIQSRGLFGAIAGFIEGGWTGMVDGWYGYHHQNEQGSGYAADQKSTQNAINGITNKVNSVIEKMNTQFTAVGKEFNKLERRMENLNKKVDDGFIDIWTYNAELLVLLENERTLDFHDSNVKNLYEKVKSQLKNNAKEIGNGCFEFYHKCNDECMESVKNGTYDYPKYSEESKLNREKIDGVKLESMGVYQILAIYSTVASSLVLLVSLGAISFWMCSNGSLQCRICI

SEQ ID NO: 1718 - protein, 565 aa, synthetic construct
  REGION 1..565: note = hemagglutinin__InfluenzaA__ABS71666
MKVKLLVLLCTFTATYADTICIGYHANNSTDTVDTVLEKNVTVTHSVNLLEDSHNGKLCLLKGIAPLQLGNCSVAGWILGNPECESLISRESWSYIVEKPSPENGTCYPGHFADYEELREQLSSVSSFERFEIFPKESSWPNHTATGVSASCSHNGKSSFYKNLLWLTGKNGLYPNLSKSYANNKEKEVLVLWGVHHPPNIGDQRALYHTENAYVSVVSSHYSRKFTPEIAKRPKVRDQEGRISYYWTLLEPGDTIIFEANGNLIAPRYAFALSRGFGSGIINSNAPMDECDAKCQTPQGAINSSLPFQNVHPVTIGECPKYVRSAKLRMVTGLRNIPSIQSRGLFGAIAGFIEGGWTGMVDGWYGYHHQNEQGSGYAADQKSTQNAINGITNKVNSVIEKMNTQFTAVGKEFNKLERRMENLNKKVDDGFIDIWTYNAELLVLLENERTLDFHDSNVKNLYEKVKSQLKNNAKEIGNGCFEFYHKCNDECMESVKNGTYDYPKYSEESKLNREKIDGVKLESMGVYQILAIYSTVASSLVLLVSLGAISFWMCSNGSLQCRICI

SEQ ID NO: 1719 - protein, 565 aa, synthetic construct
  REGION 1..565: note = hemagglutinin__InfluenzaA__ABS71667
MKVKLLVLLCTFTATYADTICIGYHANNSTDTVDTVLEKNVTVTHSVNLLEDSHNGKLCLLKGIAPLQLGNCSVAGWILGNPECESLISRESWSYIVEKPSPENGTCYPGHFADYEELREQLSSVSSFERFEIFPKESSWPNHTATGVSASCSHNGKSSFYKNLLWLTGKNGLYPNLSKSYANNKEKEVLVLWGVHHPPNIGDQRALYHTENAYISVVSSHYSRKFTPEIAKRPKVRDQEGRISYYWTLLEPGDTIIFEANGNLIAPRYAFALSRGFGSGIINSNAPMDECDAKCQTPQGAINSSLPFQNVHPVTIGECPKYVRSAKLRMVTGLRNIPSIQSRGLFGAIAGFIEGGWTGMVDGWYGYHHQNEQGSGYAADQKSTQNAINGITNKVNSVIEKMNTQFTAVGKEFNKLERRMENLNKKVDDGFIDIWTYNAELLVLLENERTLDFHDSNVKNLYEKVKSQLKNNAKEIGNGCFEFYHKCNDECMESVKNGTYDYPKYSEESKLNREKIDGVKLESMGVYQILAIYSTVASSLVLLVSLGAISFWMCSNGSLQCRICI

SEQ ID NO: 1720 - protein, 565 aa, synthetic construct
  REGION 1..565: note = hemagglutinin__InfluenzaA__ABS71668
MKVKLLVLLCTFTATYADTICIGYHANNSTDTVDTVLEKNVTVTHSVNLLEDSHNGKLCLLKGIAPLQLGNCSVAGWILGNPECESLISRESWSYIVEKPSPENGTCYPGHFADYEELREQLSSVSSFERFEIFPKESSWPNHTASGVSASCSHNGKSSFYKNLLWLTGKNGLYPNLSKSYANNKEKEVLVLWGVHHPPNIGDQRALYHTENAYVSVVSSHYSRKFTPEIAKRPKVRDQEGRINYYWTLLEPGDTIIFEANGNLIAPRYAFALSRGFGSGIINSNAPMDECDAKCQTPQGAINSSLPFQNVHPVTIGECPKYVRSAKLRMVTGLRNIPSIQSRGLFGAIAGFIEGGWTGMVDGWYGYHHQNEQGSGYAADQKSTQNAINGITNKVNSVIEKMNTQFTAVGKEFNKLERRMENLNKKVDDGFIDIWTYNAELLVLLENERTLDFHDSNVKNLYEKVKSQLKNNAKEIGNGCFEFYHKCNDECMESVKNGTYDYPKYSEESKLNREKIDGVKLESMGVYQILAIYSTVASSLVLLVSLGAISFWMCSNGSLQCRICI

SEQ ID NO: 1721 - protein, 565 aa, synthetic construct
  REGION 1..565: note = hemagglutinin__InfluenzaA__ABS71669
MKVKLLVLLCTFTATYADTICIGYHANNSTDTVDTVLEKNVTVTHSVNLLEDSHNGKLCLLKGIAPLQLGNCSVAGWILGNPECELLISKESWSYIVEKPNPENGTCYPGHFADYEELREQLSSVSSFERFEIFPKESSWPNHTVTGVSASCSHNGESSFYKNLLWLTGKNGLYPNLSKSYANNKEKEVLVLWGVHHPPNIGDQKALYHTENAYVSVVSSHYSRKFTPEIAKRPKVRDQEGRINYYWTLLEPGDTIIFEANGNLIAPRYAFALSRGFGSGIINSNAPMDKCDAKCQTPQGAINSSLPFQNVHPVTIGECPKYVRSAKLRMVTGLRNIPSIQSRGLFGAIAGFIEGGWTGMVDGWYGYHHQNEQGSGYAADQKSTQNAINGITNKVNSVIEKMNTQFTAVGKEFNKLERRMENLNKKVDDGFIDIWTYNAELLVLLENERTLDFHDSNVKNLYEKVKSQLKNNAKEIGNGCFEFYHKCNDECMESVKNGTYDYPKYSEESKLNREKIDGVKLESMGVYQILAIYSTVASSLVLLVSLGAISFWMCSNGSLQCRICI

SEQ ID NO: 1722 - protein, 565 aa, synthetic construct
  REGION 1..565: note = hemagglutinin__InfluenzaA__ABS71671
MKVKLLVLLCTFTATYADTICIGYHANNSTDTVDTVLEKNVTVTHSVNLLEDSHNGKLCLLKGIAPLQLGNCSVAGWILGNPECELLISKESWSYIVEKPNPENGTCYPGHFADYEELREQLSSVSSFERFEMFPKESSWPNHTVTGVSASCSHNGKSSFYKNLLWLTGKNGLYPNLSKSYANNKEKEVLVLWGVHHPPNIGDQRALYHTENAYVSVVSSHYSRKFTPEIAKRPKVRDQEGRINYYWTLLEPGDTIIFEANGNLIAPRYAFALSRGFGSGIINSNAPMDECDAKCQTPQGAINSSLPFQNVHPVTIGECPKYVRSAKLRMVTGLRNIPSIQSRGLFGAIAGFIEGGWTGMVDGWYGYHHQNEQGSGYAADQKSTQNAINGITNKVNSVIEKMNTQFTAVGKEFNKLERRMENLNKKVDDGFIDIWTYNAELLVLLENERTLDFHDSNVKNLYEKVKSQLKNNAKEIGNGCFEFYHKCNDECMESVKNGTYDYPKYSEESKLNREKIDGVKLESMGVYQILAIYSTVASSLVLLVSLGAISFWMCSNGSLQCRICI

SEQ ID NO: 1723 - protein, 565 aa, synthetic construct
  REGION 1..565: note = hemagglutinin__InfluenzaA__ABS71672
MKVKLLVLLCTFTATYADTICIGYHANNSTDTVDTVLEKNVTVTHSVNLLEDSHNGKLCLLKGIAPLQLGNCSVAGWILGNPECELLISKESWSYIVEKPNPENGTCYPGHFADYEELRERLSSVSSFERFEMFPKESSWPNHTVTGVSASCSHNGKSSFYKNLLWLTGKNGLYPNLSKSYANNKEKEVLVLWGVHHPPNIGAQRALYHTENAYVSVVSSHYSRKFTPEIAKRPKVRDQEGRINYYWTLLEPGDTIIFEANGNLIAPRYAFALSRGFGSGIINSNAPMDECDAKCQTPQGAINSSLPFQNVHPVTIGECPKYVRSAKLRMVTGLRNIPSIQSRGLFGAIAGFIEGGWTGMVDGWYGYHHQNEQGSGYAADQKSTQNAINGITNKVNSVIEKMNTQFTAVGKEFNKLERRMENLNKKVDDGFIDIWTYNAELLVLLENERTLDFHDSNVKNLYEKVKSQLKNNAKEIGNGCFEFYHKCNDECMESVKNGTYDYPKYSEESKLSREKIDGVKLESMGVYQILAIYSTVASSLVLLVSLGAISFWMCSNGSLQCRICI

SEQ ID NO: 1724 - protein, 565 aa, synthetic construct
  REGION 1..565: note = hemagglutinin__InfluenzaA__ABS71673
MKVKLLVLLCTFTATYADTICIGYHANNSTDTVDTVLEKNVTVTHSVNLLEDSHNGKLCLLKGIAPLQLGNCSVAGWILGNPECELLISKESWSYIVETPNPENGTCYPGYFADYEELREQLSSVSSFERFEIFPKESSWPNHTVTGVSASCSHNGRSSFYRNLLWLTGKNGLYPNLSKSYANNKEKEVLVLWGVHHPPNIGDQRALYHTENTYVSVVSSHYSRRFTPEIAKRPKVRDQEGRINYYWTLLEPGDTIIFEANGNLIAPRFAFALSRGFGSGIITSNAPMDECDAKCQTPQGAINSSLPFQNVHPVTIGECPKYVRSAKLRMATGLRNIPSIQSRGLFGAIAGFIEGGWTGMVDGWYGYHHQNEQGSGYAADQKSTQNAINGITNKVNSVIEKMNTQFTAVGKEFSKLERRMENLNKKVDDGFLDIWTYNAELLVLLENERTLDFHDSNVKNLYEKVKSQLKNNAKEIGNGCFEFYHKCNDECMESVKNGTYDYPKYSEESKLNREKIDGVKLESMGVYQILAIYSTVASSLVLLVSLGAISFWMCSNGSLQCRICI

SEQ ID NO: 1725 - protein, 566 aa, synthetic construct; identical to SEQ ID NO: 630
  REGION 1..566: note = hemagglutinin__InfluenzaA__ABS71674

SEQ ID NO: 1726 - protein, 566 aa, synthetic construct
  REGION 1..566: note = hemagglutinin__InfluenzaA__ABS71675
MKTIIALSYILCLVFAQKLPGNDNSTATLCLGHHAVPNGTIVKTITNDQIEVTNATELVQSSSTGGICDSPHQILDGENCTLIDALLGDPQCDGFQNKKWDLFVERSKAHSNCYPYDVPDYASLRSLVASSGTLEFNNESFNWTGVTQNGTSSACKRRSNNSFFSRLNWLTHLKFKYPALNVTMPNNEKFDKLYIWGVHHPGTDNDQIFLYAQASGRITVSTKRSQQTVIPNIGSRPRVRNIPSRISIYWTIVKPGDILLINSTGNLIAPRGYFKIRSGKSSIMRSDAPIGKCNSECITPNGSIPNDKPFQNVNRITYGACPRYVKQNTLKLATGMRNVPEKQTRGIFGAIAGFIENGWEGMVDGWYGFRHQNSEGIGQAADLKSTQAAINQINGKLNRLIGKTNEKFHQIEKEFSEVEGRIQDLEKYVEDTKIDLWSYNAELLVALENQHTIDLTDSEMNKLFERTKKQLRENAEDMGNGCFKIYHKCDNACIGSIRNGTYDHDVYRDEALNNRFQIKGVELKSGYKDWILWISFAISCFLLCVALLGFIMWACQKGNIRCNICI

SEQ ID NO: 1727 - protein, 566 aa, synthetic construct
  REGION 1..566: note = hemagglutinin__InfluenzaA__ABS71676
MKTIIALSYILCLVFAQKLPGIDNSTATLCLGHHAVPNGTIVKTITNDQIEVTNATELVQNSSTGGICDSPHQILDGENCTLIDALLGDPQCDGFQNKKWDLFVERSKAYSNCYPYDVPDYASLRSLVASSGTLEFNNESFNWTGVTQNGTSSACKRGSNNSFFSRLNWLTHSKFKYPALNVTMPNNEEFDKLYIWGVHHPGTDNDQIFLYAQASGRITVSTKRSQQTVIPNIGSRPRVRNIPSRISIYWTIVKPGDILLINSTGNLIAPRGYFIIRSGKSSIMRSDAPIGKCNSECITPNGSIPNDKPFQNVNRITYGACPRYVKQNTLKLATGMRNVPEKQTRGIFGAIAGFIENGWEGMVDGWYGFRHQNSEGIGQAADLKSTQAAIDQINGKLNRLIGKTNEKFHQIEKEFSEVEGRIQDLEKYVEDTKIDLWSYNAELLVALENQHTIDLTDSEMNKLFEKTKKQLRENAEDMGNGCFKIYHKCDNACIGSIRNGTYDHDVYRDEALNNRFQIKGVELKSGYKDWILWISFAISCFLLCVALLGFIMWACQKGNIRCNICI

SEQ ID NO: 1728 - protein, 566 aa, synthetic construct
  REGION 1..566: note = hemagglutinin__InfluenzaA__ABS71677
MKTIIALSYILCLVFAQKLPGIDNSTATLCLGHHAVPNGTIVKTITDDQIEVTNATELVQNSSTGGICDSPHQILDGENCTLIDALLGDPQCDGFQNKKWDLFVERSKAYSNCYPYDVPDYASLRSLVASSGTLEFNNESFNWTGVTQNGTSSACKRGSNNSFFSRLNWLTHSKFKYPALNVTMPNNEEFDKLYIWGVHHPGTDNDQIFLYAQASGRITVSTKRSQQTVIPNIGSRPRVRNIPSRISIYWTIVKPGDILLINSTGNLIAPRGYFKIRSGKSSIMRSDAPIDKCNSECITPNGSIPNDKPFQNVNRITYGACPRYVKQNTLKLATGMRNVPEKQTRGIFGAIAGFIENGWEGMVDGWYGFRHQNSEGIGQAADLKSTQAAIDQINGKLNRLIGKTNEKFHQIEKEFSEVEGRIQDLEKYVEDTKIDLWSYNAELLVALENQHTIDLTDSEMNKLFEKTKKQLRENAEDMGNGCFKIYHKCDNACIGSIRNGTYDHDVYRDEALNNRFQIKGVELKSGYKDWILWISFAISCFLLCVALLGFIMWACQKGNIRCNICI

SEQ ID NO: 1729 - protein, 566 aa, synthetic construct
  REGION 1..566: note = hemagglutinin__InfluenzaA__ABS71679
MKTIIALSYILCLVFAQKLPGIDNSTATLCLGHHAVPNGTIVKTITNDQIEVTNATELVQSSSTGGICDSPHQILDGENCTLIDALLGDPQCDGFQNKKWDLFVERSKAYSNCYPYDVPDYASLRSLVASSGTLEFNNESFNWTGVTQNGTSSACKRGSNNSFFSRLNWLTHSKFKYPALNVTMPNNEEFDKLYIWGVHHPGTDNDQIFLYAQASGRITVSTKRSQQTVIPNIGSRPRVRNIPSRISIYWTIVKPGDILLINSTGNLIAPRGYFKIRSGKSSIMRSDAPIGKCNSECITPNGSIPNDKPFQNVNRITYGACPRYVKQNTLKLATGMRNVPEKQTRGIFGAIAGFIENGWEGMVDGWYGFRHQNSEGIGQAADLKSTQAAIDQINGKLNRLIGKTNEKFHQIEKEFSEVEGRIQDLEKYVEDTKIDLWSYNAELLVALENQHTIDLTDSEMNKLFEKTKKQLRENAEDMGNGCFKIYHKCDNACIGSIRNGTYDHDVYRDEALNNRFQIKGVELKSGYKDWILWISFAISCFLLCVALLGFIMWACQKGNIRCNICI

SEQ ID NO: 1730 - protein, 566 aa, synthetic construct; identical to SEQ ID NO: 1729
  REGION 1..566: note = hemagglutinin__InfluenzaA__ABS71680

SEQ ID NO: 1731 - protein, 566 aa, synthetic construct
  REGION 1..566: note = hemagglutinin__InfluenzaA__ABS71682
MKTIIALSYILCLVFAQKLPGNDNSTATLCLGHHAVPNGTIVKTITNDQIEVTNATELVQSSSTGGICDSPHQILDGENCTLIDALLGDPQCDGFQNKKWDLFVERSKAYSNCYPYDVPDYASLRSLIASSGTLEFNNESFNWTGVTQNGTSSACKRRSNNSFFSRLNWLTHLKFKYPALNVTMPNNEKFDKLYIWGVHHPGTDNDQIFLYAQASGRITVSTKRSQQTVIPNIGSRPRVRNIPSRISIYWTIVKPGDILLINSTGNLIAPRGYFKIRSGKSSIMRSDAPIGKCNSECITPNGSIPNDKPFQNVNRITYGACPRYVKQNTLKLATGMRNVPEKQTRGIFGAIAGFIENGWEGMVDGWYGFRHQNSEGIGQAADLKSTQAAIDQINGKLNRLIGKTNEKFHQIEKEFSEVEGRIQDLEKYVEDTKIDLWSYNAELLVALENQHTIDLTDSEMNKLFEKTKKQLRENAEDMGNGCFKIYHKCDNACIGSIRNGTYDHDVYRDEALNNRFQIKGVELKSGYKDWILWISFAISCFLLCVVLLGFIMWACQKGNIRCNICI

SEQ ID NO: 1732 - protein, 566 aa, synthetic construct
  REGION 1..566: note = hemagglutinin__InfluenzaA__ABU80177
MKTIIALSYILCLVFAQKLPVNDNSTATLCLGHHAVPNGTLVKTITNDHIEVTNATELVQSSSTGRICDSPHQILDGENCTLIDALLGDPHCDGFQNKEWDLFVERSTAYSNCYPYDVPDYASLRSLVASSGTLEFNNESFNWTGVAQNGTSSSCKRRSIKSFFSRLNWLHQLKYKYPALNVTMPNNEKFDKLYIWGVHHPSTDSDQISLYAQASGRVTVSTKRSQQTVIPNIGSRPWVRGVSSRISIYWTIVKPGDILLINSTGNLIAPRGYFKIRSGKSSIMRSNAPIGKCNSECITPNGSIPNDKPFQNVNRITYGACPRYVKQNTLKLATGMRNVPEKQTRGIFGAIAGFIENGWEGMVDGWYGFRHQNSEGTGQAADLKSTQAAINQINGKLNRLIEKTNEKFHQIEKEFSEVEGRIQDLEKYVEDTKIDLWSYNAELLVALENQHTIDLTDSEMNKLFERTRKQLRENAEDMGNGCFKIYHKCDNACIGSIRNGTYDHDVYRDEALNNRFQIKGVELKSGYKDWILWISFAISCFLLCVVLLGFIMWACQKGNIRCNICI

SEQ ID NO: 1733 - protein, 565 aa, synthetic construct
  REGION 1..565: note = hemagglutinin__InfluenzaA__ABU80298
MKVKLLVLLCTFTATYADTICIGYHANNSTDTVDTVLEKNVTVTHSVNLLEDSHNGKLCLLKGIAPLQLGNCSVAGWILGNPECELLISKESWSYIVETPNPENGTCYPGYFADYEELREQLSSVSSFERFEIFPKESSWPNHTVTGVSASCSHNGKSSFYRNLLWLTGKNGLYPNLSKSYANNKEKEVLVLWGVHHPPNIGDQRALYHTENAYVSVVSSHYSRRFTPEIAKRPKVRDQEGRINYYWTLLEPGDTIIFEANGNLIAPRYAFALSRGFGSGIITSNAPMDECDAKCQTPQGAINSSLPFQNVHPVTIGECPKYVRSAKLRMATGLRNIPSIQSRGLFGAIAGFIEGGWTGMVDGWYGYHHQNEQGSGYAADQKSTQNAINGITNKVNSVIEKMNTQFTAVGKEFNKLERRMENLNKKVDDGFLDIWTYNAELLVLLENERTLDFHDSNVKNLYKKVKSQLKNNAKEIGNGCFEFYHKCNNECMESVKNGTYDYPKYSEESKLNREKIDGVKLESMGVYQILAIYSTVASSLVLLVSLGAISFWMCSNGSLQCRICI

SEQ ID NO: 1734 - protein, 566 aa, synthetic construct
  REGION 1..566: note = hemagglutinin__InfluenzaA__ABU80320
MKTIIALSYILCLVFAQKLPGNDNSTATLCLGHHAVPNGTLVKTITNDQIEVTNATELVQSSSTGGICDSPHQILDGENCTLIDALLGDPHCDSFQNKEWDLFVERSKAYSNCYPYDVPDYASLRSLVASSGTLEFNNESFNWTGVAQNGTSSACKRRSNKSFFSRLNWLHQLKYKYPALNVTMPNNEKFDKLYIWGVHHPSTDSDQISLYAQAPGRVTVSTKRSQQTVIPNIGSRPWVRGVSSIISIYWTIVKPGDILLINCTGNLIAPRGYFKIRSGKSSIMRSDASIGKCNSECITPNGSIPNDKPFQNVNRITYGACPRYVKQNTLKLATGMRNVPEKQTRGIFGAIAGFIENGWEGMVDGWYGFRHQNSEGTGQAADLKSTQAAINQINGKLNRLIEKTNEKFHQIEKEFSEVEGRIQDLEKYVEDTKIDLWSYNAELLVALENQHTIDLTDSEMNKLFERTKKQLRENAEDMGNGCFKIYHKCDNACIGSIRNGTYDHDVYRDEALNNRFQIKGVELKSGYKDWILWISFAISCFLLCVVLLGFIMWACQKGNIRCNICI

SEQ ID NO: 1735 - protein, 566 aa, synthetic construct; identical to SEQ ID NO: 1039
  REGION 1..566: note = hemagglutinin__InfluenzaA__ABU80331

SEQ ID NO: 1736 - protein, 566 aa, synthetic construct
  REGION 1..566: note = hemagglutinin__InfluenzaA__ABU80400
MKAILLVLLYTFTAANADTLCIGYHANNSTDTVDTVLEKNVTVTHSVNLLEDRHNGKLCKLRGVAPLHLGKCNIAGWLLGNPECELLFTASSWSYIVETSNSDNGTCYPGDFINYEELREQLSSVSSFERFEIFPKASSWPNHETNRGVTAACPYAGANSFYRNLIWLVKKGNSYPKLSKSYVNNKEKEVLVLWGIHHPPTSTDQQSLYQNADAYVFVGSSKYNKKFKPEIATRPKVRGQAGRMNYYWTLVEPGDTITFEATGNLVVPRYAFAMKRGSGSGIIISDTPVHDCNTTCQTPKGAINTSLPFQNIHPVTIGECPKYVKSTKLRMATGLRNIPSIQSRGLFGAIAGFIEGGWTGMIDGWYGYHHQNEQGSGYAADRKSTQNAIDGITNKVNSVIEKMNTQFTAVGKEFNHLEKRIENLNRKVDDGFLDIWTYNAELLVLLENERTLDYHDSNVKNLYEKVRSQLKNNAKEIGNGCFEFYHKCDDTCMESVKNGTYDYPKYSEESKLNREEIDGVKLESTRIYQILAIYSTVASSLVLLVSLGAISFWMCSNGSLQCRICI

SEQ ID NO: 1737 - protein, 566 aa, synthetic construct
  REGION 1..566: note = hemagglutinin__InfluenzaA__ABU92572
MKTIIALSYILCLVFTQKLPGNDNSTATLCLGHHAVPNGTLVKTITNDQIEVTNATELVQSSSTGRICDSPHQILDGENCTLIDALLGDPHCDGFQNKEWDLFVERSKAYSNCYPYDVPDYVSLRSLVASSGTLEFNNESFNWTGVAQNGTSSACKRRSDKSFFSRLNWLHQLKYKYPALNVTMPNNEKFDKLYIWGVHHPGTDSDQISLYAQASGRVTVSTKRSQQTVIPNIGSRPWVRGVSSRISIYWTIVKPGDILLINSTGNLIAPRGYFKIRSGKSSIMRSDAPIGKCNSECITPNGSIPNDKPFQNVNRITYGPCPRYVKQNTLKLATGMRNVPEKQTRGIFGAIAGFIENGWEGMMDGWYGFRHQNSEGTGQAADLKSTQAAINQINGKLNRLIEKTNEKFHQIEKEFSEVEGRIQDLEKYVEDTKIDLWSYNAELLVALENQHTIDLTDSEMNKLFERTKKQLRENAEDMGNGCFKIYHKCDNACIGSIRNGTYDHDVYRDEALNNRFQIKGVELKSGYKDWILWISFAISCFLLCIVLLGFIMWACQKGNIRCNICI

SEQ ID NO: 1738 - protein, 566 aa, synthetic construct
  REGION 1..566: note = hemagglutinin__InfluenzaA__ABU92573
MKTIIALSYILCLVFAQKLPGNDNSTATLCLGHHAVPNGTLVKTITNDQIEVTNATELVQSSSTGRICDSPHQILDGENCTLIDALLGDPHCDGFQNKEWDLFVERSKAYSNCYPYDVPDYVSLRSLVASSGTLEFNNESFNWTGVAQNGTSSACKRRSDKSFFSRLNWLHQLKYKYPALNVTMPNNEKFDKLYIWGVHHPGTDSDQISLYAQASGRVTVSTKRSQQTVIPNIGSRPWVRGVSSRISIYWTIVKPGDILLINSTGNLIAPRGYFKIRSGKSSIMRSDAPIGKCNSECITPNGSIPNGKPFQNVNRITYGACPRYVKQNTLKLATGMRNVPEKQTRGIFGAIAGFIENGWEGMMDGWYGFRHQNSEGTGQAADLKSTQAAINQINGKLNRLIKKTNEKFHQIEKEFSEVEGRIQDLEKYVEDTKIDLWSYNAELLVALENQHTIDLTDSEMNKLFERTKKQLRENAEDMGNGCFKIYHKCDNACIGSIRNGTYDHDVYRDEALNNRFQIKGVELKSGYKDWILWISFAISCFLLCIVLLGFIMWACQKGNIRCNICI

SEQ ID NO: 1739 - protein, 566 aa, synthetic construct
  REGION 1..566: note = hemagglutinin__InfluenzaA__ABU92575
MKTIIALSYILCLVFAQKLPGNDNSTATLCLGHHAVPNGTLVKTITNDQIEVTNATELVQSSSTGRICDSPHQILDGENCTLIDALLGDPHCDGFQNKEWDLFVERSKAYSNCYPYDVPDYVSLRSLVASSGTLEFNNESFNWTGVAQNGTSSACKRRSDKSFFSRLNWLHQLKYKYPALNVTMPNNEKFDKLYIWGVHHPGTDSDQISLYAQASGRVTVSTKRSQQTVIPNIGSKPWVRGVSSRISIYWTIVKPGDILLINSTGNLIAPRGYFKIRSGKSSIMRSDAPIGKCNSECITPNGSIPNDKPFQNVNRITYGPCPRYVKQNTLKLATGMRNVPEKQTRGIFGAIAGFIENGWEGMMDGWYGFRHQNSEGTGQAADLKSTQAAINQINGKLNRLIEKTNEKFHQIEKEFSEVEGRIQDLEKYVEDTKIDLWSYNAELLVALENQHTIDLTDSEMNKLFERTKKQLRENAEDMGNGCFKIYHKCDNACIGSIRNGTYDHDVYRDEALNNRFQIKGVELKSGYKDWILWISFAISCFLLCIVLLGFIMWACQKGNIRCNICI

SEQ ID NO: 1740 - protein, 566 aa, synthetic construct; identical to SEQ ID NO: 51
  REGION 1..566: note = hemagglutinin__InfluenzaA__ABU92576

SEQ ID NO: 1741 - protein, 566 aa, synthetic construct; identical to SEQ ID NO: 51
  REGION 1..566: note = hemagglutinin__InfluenzaA__ABU92577

SEQ ID NO: 1742 - protein, 566 aa, synthetic construct; identical to SEQ ID NO: 72
  REGION 1..566: note = hemagglutinin__InfluenzaA__ABU92578

SEQ ID NO: 1743 - protein, 566 aa, synthetic construct; identical to SEQ ID NO: 72
  REGION 1..566: note = hemagglutinin__InfluenzaA__ABU92579

SEQ ID NO: 1744 - protein, 566 aa, synthetic construct; identical to SEQ ID NO: 72
  REGION 1..566: note = hemagglutinin__InfluenzaA__ABU92580

SEQ ID NO: 1745 - protein, 566 aa, synthetic construct; identical to SEQ ID NO: 1737
  REGION 1..566: note = hemagglutinin__InfluenzaA__ABU92581

SEQ ID NO: 1746 - protein, 566 aa, synthetic construct
  REGION 1..566: note = hemagglutinin__InfluenzaA__ABU92582
MKTIIALSYILCLVFAQKLPGNDNSTATLCLGHHAVPNGTLVKTITNDQIEVTNATELVQSSSTGRICDSPHQILDGENCTLIDALLGDPHCDGFQNKEWDLFVERSKAYSNCYPYDVPDYVSLRSLVASSGTLEFNNESFNWTGVAQNGTSSACKRRSDKSFFSRLNWLHQLKYKYPAQNVTMPNNEKFDKLYIWGVHHPGTDSDQISLYAQASGRVTVSTKRSQQTVIPNIGSRPWVRGVSSRISIYWTIVKPGDILLINSTGNLIAPRGYFKIRSGKSSIMRSDAPIGKCNSECITPNGSIPNDKPFQNVNRITYGACPRYVKQNTLKLATGMRNVPEKQTRGIFGAIAGFIENGWEGMMDGWYGFRHQNSEGTGQAADLKSTQAAINQINGKLNRLIEKTNEKFHQIEKEFSEVEGRIQDLEKYVEDTKIDLWSYNAELLVALENQHTIDLTDSEMNKLFERTKKQLRENAEDMGNGCFKIYHKCDNACIGSIRNGTYDHDVYRDEALNNRFQIKGVELKSGYKDWILWISFAISCFLLCIVLLGFIMWACQKGNIRCNICI

SEQ ID NO: 1747 - protein, 566 aa, synthetic construct; identical to SEQ ID NO: 1746
  REGION 1..566: note = hemagglutinin__InfluenzaA__ABU92583

SEQ ID NO: 1748 - protein, 566 aa, synthetic construct
  REGION 1..566: note = hemagglutinin__InfluenzaA__ABU92584
MKTIIALSYILCLVFAQKLPGNDNSTATLCLGHHAVPNGTLVKTITNDQIEVTNATELVQSSSTGRICDSPHQILDGENCTLIDALLGDPHCDGFQNKEWDLFVERSKAYSNCYPYDVPDYVSLRSLVASSGTLEFNNESFNWTGVAQNGTSSACKRRSDKSFFSRLNWLHQLRYKYPALNVTMPNNEKFDKLYIWGVHHPGTDSDQISLYAQASGRVTVSTKRSQQTVIPNIGSRPWVRGVSSRISIYWTIVKPGDILLINSTGNLIAPRGYFKIRSGKSSIMRSDAPIGKCNSECITPNGSIPNDKPFQNVNRITYGACPRYVKQKTLKLATGMRNVPEKQTRGIFGAIAGFIENGWEGMMDGWYGFRHQNSEGTGQAADLKSTQAAINQINGKLNRLIEKTNEKFHQIEKEFSEVEGRIQDLEKYVEDTKIDLWSYNAELLVALENQHTIDLTDSEMNKLFERTKKQLRENAEDMGNGCFKIYHKCDNACIGSIRNGTYDHDVYRDEALNNRFQIKGVELKSGYKDWILWISFAISCFLLCIVLLGFIMWACQKGNIRCNICI

SEQ ID NO: 1749 - protein, 566 aa, synthetic construct
  REGION 1..566: note = hemagglutinin__InfluenzaA__ABU92586
MKTIIALSYILCLVFAQKLPGNDNSTATLCLGHHAVPNGTIVKTITNDQIEVTNATELVQSSSTGGICDSPHQILDGENCTLIDALLGDPQCDGFQNKKWDLFVERSKAYSNCYPYDVPDYASLRSLIASSGTLEFNNESFNWTGVTQNGTSSACKRRSNSSFFSRLNWLTHLKFKYPALNVTMPNNEEFDKLYIWGVHHPGTDNDQISLYAQASGRITVSTKRSQQTVIPNIGSRPRVRDIPSRISIYWTIVKPGDILLINSTGNLIAPRGYFKIRSGKSSIMRSDAPIGKCNSECITPNGSIPNDKPFQNVNRITYGACPRYVKQNTLKLATGMRNVPEKQTRGIFGAIAGFIENGWEGMVDGWYGFRHQNSEGIGQAADLKSTQAAIDQINGKLNRLIGKTNEKFHQIEKEFSEVEGRIQDLEKYVEDTKIDLWSYNAELLVALENQHTIDLTDSEMNKLFERTKKQLRENAEDMGNGCFKIYHKCDNACIGSIRNGTYDHDVYRDEALNNRFQIKGVELKSGYKNWILWISFAISCFLLCVALLGFIMWACQKGNIRCNICI

SEQ ID NO: 1750 - protein, 566 aa, synthetic construct
  REGION 1..566: note = hemagglutinin__InfluenzaA__ABU92587
MKTIIALSYILCLVFAQKLPGNDNSTATLCLGHHAVPNGTIVKTITNDQIEVTNATELVQSSSTGGICDSPHQILDGENCTLIDALLGDPQCDGFQNKKWDLFVERSKAYSNCYPYDVPDYASLRSLIASSGTLEFNNESFNWTGVTQNGTSSACKRRSNSSFFSRLNWLTHLKFKYPALNVTMPNNEEFDKLYIWGVHHPGTYNDQISLYAQASGRITVSTKRSQQTAIPNIGSRPRVRDIPSRISIYWTIVKPGDILLINSTGNLIAPRGYFKIRSGKSSIMRSDAPIGKCNSECITPNGSIPNDKPFQNVNRITYGACPRYVKQNTLKLATGMRNVPEKQTRGIFGAIAGFIENGWEGMVDGWYGFRHQNSEGIGQAADLKSTQAAIDQINGKLNRLIGKTNEKFHQIEKEFSEVEGRIQDLEKYVEDTKIDLWSYNAELLVALENQHTIDLTDSEMNKLFERTKKQLRENAEDMGNGCFKIYHKCDNACIGSIRNGTYDHDVYRDEALNNRFQIKGVELKSGYKDWILWISFAISCFLLCVALLGFIMWACQKGNIRCNICI

SEQ ID NO: 1751 - protein, 566 aa, synthetic construct
  REGION 1..566: note = hemagglutinin__InfluenzaA__ABU92588
MKTIIALSYILCLVFAQKLPGNDNSTATLCLGHHAVPNGTIVKTITNDQIEVTNATELVQSSSTGGICDSPHQILDGENCTLIDALLGDPQCDGFQNKKWDLFVERSKAYSNCYPYDVPDYASLRSLVASSGTLEFNNESFNWTGVTQNGTSSACKRKSNNSFFSRLNWLTHLKFKYPALNVTMPNNEKFDKLYIWGVHHPGTDNDQISLYAQASGRITVSTKRSQQTVIPNIGSRPRVRDIPSRISIYWTIVKPGDILLINSTGNLIAPRGYFKIRSGKSSIMRSDAPIGKCNSECITPNGSIPNDKPFQNVNRITYGACPRYVKQNTLKLATGMRNVPEKQTRGIFGAIAGFIENGWEGMVDGWYGFRHQNSEGIGQAADLKSTQAAINQINGKLNRLIGKTNEKFHQIEKEFSEVEGRIQDLEKYVEDTKIDLWSYNAEFLVALENQHTIDLTDSEMNKLFERTKKQLRENAEDMGNGCFKIYHKCDNACIGSIRNGTYDHDVYRDEALNNRFQIKGVELKSGYKDWILWISFAISCFLLCVALLGFIMWACQKGNIRCNICI

SEQ ID NO: 1752 - protein, 566 aa, synthetic construct; identical to SEQ ID NO: 633
  REGION 1..566: note = hemagglutinin__InfluenzaA__ABU92590

SEQ ID NO: 1753 - protein, 566 aa, synthetic construct
  REGION 1..566: note = hemagglutinin__InfluenzaA__ABU92591
MKTIIALSYILCLVFAQKLPGNDNSTATLCLGHHAVPNGTIVKTITNDQIEVTNATELVQSSSTGGICDSPHQILDGENCTLIDALLGDPQCDGFQNKKWDLFVERSKAYSNCYPYDVPDYASLRSLIASSGTLEFNNESFNWTGVTQNGTSSACKRRSNSSFFSRLNWLTHLKFKYPALNVTMPNNEEFDKLYIWGVHHPGTDNDQISLYAQASGRITVSTKRSQQTVIPNIGSRPRVRDIPSRISIYWTIVKPGDILLINSTGNLIAPRGYFKIRSGKSSIMRSDAPIGKCNSECITPNGSIPNDKPFQNVNRITYGACPRYVKQNTLKLATGMRNVPEKQTRGIFGAIAGFIENGWEGMVDGWYGFRHQNSEGIGQAADLKSTQAAIDQINGKLNRLIGKTNEKFHQIEKEFSEVEGRIQDLEKYVEDTKIDLWSYNAELLVALENQHTIDLTDSEMNKLFERTKKQLRENAEDMGNGCFKIYHKCDNACIGSIRNGTYDHDVYRDEALNNRFQIKGVELKSGYKDWILWISFAISCFLLCVALLGFIMWACQKGNIRCNICI

SEQ ID NO: 1754 - protein, 566 aa, synthetic construct; identical to SEQ ID NO: 1753
  REGION 1..566: note = hemagglutinin__InfluenzaA__ABU92592

SEQ ID NO: 1755 - protein, 566 aa, synthetic construct
  REGION 1..566: note = hemagglutinin__InfluenzaA__ABU92593
MKTIIALSYILCLVFAQKLPGNDNSTATLCLGHHAVPNGTIVKTITNDQIEVTNATELVQSSSTGGICDSPHQILDGENCTLIDALLGDPQCDGFQNKKWDLFVERSKAYSNCYPYDVPDYASLRSLVASSGTLEFNNESFNWTGVTQNGTSSACKRRSNNSFFSRLNWLTHLKFKYPALNVTMPNNEKFDKLYIWGVHHPGTDNDQIFLYAQASGRITVSTKRSQQTVIPNIGSRPRVRNIPSRISIYWTIVKPGDILLINSTGNLIAPRGYFKIRSGKSSIMRSDAPIGKCNSECITPNGSIPNDKPFQNVNRITYGACPRYVKQNTLKLATGMRNVPEKQTRGIFGAIAGFIENGWEGMVDGWYGFRHQNSEGIGQAADLKSTQAAIDQINGKLNRLIGKTNEKFHQIEKEFSEVEGRIQDLEKYVEDTKIDLWSYNAELLVALENQHTIDLTDSEMNKLFEKTKKQLRENAEDMGNGCFKIYHKCDNACIGSIRNGTYDHDVYRDEALNNRFQIKGVELKSGYKDWILWISFAISCFLLCVALLGFIMWAGQKGNKRCNICI

SEQ ID NO: 1756 - protein, 566 aa, synthetic construct
  REGION 1..566: note = hemagglutinin__InfluenzaA__ABU92594
MKTIIALSYILCLVFAQKLPGNDNSTATLCLGHHAVPNGTIVKTITNDQIEVTNATELVQSSSTGEICNSPHQILDGESCTLIDALLGDPQCDGFQNKKWDLFVERSKAYSNCYPYDVPDYASLRSLVASSGTLEFNNESFNWTGVTQNGTSSACKRRSNNSFFSRLNWLTHLKFKYPALNVTMPNNEKFDKLYIWGVHHPGTDNDQIFLYAQASGRITVSTKRSQQTVIPNIGSRPRVRNIPSRISIYWTIVKPGDILLINSTGNLIAPRGYFKIRSGKSSIMRSDAPIGKCNSECITPNGSIPNDKPFQNVNRITYGACPRYVKQNTLKLATGMRNVPEKQTRGIFGAIAGFIENGWEGMVDGWYGFRHQNSEGIGQAADLKSTQAAINQINGKLNRLIGKTNEKFHQIEKEFSEVEGRIQDLEKYVEDTKIDLWSYNAELLVALENQHTIDLTDSEMNKLFERTKKQLRENAEDMGNGCFKIYHKCDNACIGSIRNGTYDHDVYRDEALNNRFQIKGVELKSGYKDWILWISFAISCFLLCVALSGFIMWACQKGNIRCNICI

SEQ ID NO: 1757 - protein, 566 aa, synthetic construct
  REGION 1..566: note = hemagglutinin__InfluenzaA__ABU92595
MKTIIALSYILCLVFAQKLPENDNSTATLCLGHHAVPNGTIVKTITNDQIEVTNATELVQSSSTGGICDSPHQILDGENCTLIDALLGDPQCDGFQNKKWDLFVERSKAYSNCYPYDVPDYASLRSLVASSGTLEFNNESFNWTGVTQNGTSSACKRRSNNSFFSRLNWLTHLKFKYPALNVTMPNNEKFDKLYIWGVHHPGTDNDQIFLYAQASGRITVSTKRSQQTVIPNIGSRPRVRNIPSRISIYWTIVKPGDILLINSTGNLIAPRGYFKIRSGKSSIMRSDAPIGKCNSECITPNGSIPNDKPFQNVNRITYGACPRYVKQNTLKLATGMRNVPEKQTRGIFGAIAGFIENGWEGMVDGWYGFRHQNSEGIGQAADLKSTQAAIDQINGKLNRLIGKTNEKFHQIEKEFSEVEGRIQDLEKYVEDTKIDLWSYNAELLVALENQHTIDLTDSEMNKLFEKTKKQLRENAEDMGNGCFKIYHKCDNACIGSIRNGTYDHDVYRDEALNNRFQIKGVELKSGYKDWILWISFAISCFLLCVALLGFIMWACQKGNIRCNICI

SEQ ID NO: 1758 - protein, 566 aa, synthetic construct
  REGION 1..566: note = hemagglutinin__InfluenzaA__ABU92596
MKTIIALSYILCLVFAQKLPGNDNSTATLCLGHHAVPNGTMVKTITNDQIEVTNATELVQSSSTGEICDSPHQILDGENCTLIDALLGDPQCDGFQNKKWDLFVERSKAHSNCYPYDVPDYASLRSLIASSGTLEFNNESFNWTGVTQNGTSSACKRRSDNSFFSRLNWLTHLKFKYPALNVTMPNNEEFDKLYIWGVHHPGTDNDQISLYAQASGRITVSTKRSQQTVIPNIGSRPRVRDIPSRISIYWTIVKPGDILLINSTGNLIAPRGYFKIRSGKSSIMRSDAPIGKCNSGCITPNGSIPNDKPFQNVNRITYGACPRYVKQNTLKLATGMRNVPEKQTRGIFGAIAGFIENGWEGMVDGWYGFRHQNSEGIGQAADLKSTQAAIDQINGKLNRLIGKTNEKFHQIEKEFSEVEGRIQDLEKYVEDTKIDLWSYNAELLVALENQHTIDLTDSEMNKLFERTKKQLRENAEDMGNGCFKIYHKCDNACIGSIRNGTYDHDVYRDEALNNRFQIKGVELKSGYKDWILWISFAISCFLLCVALLGFIMWACQKGNIRCNICI

SEQ ID NO: 1759 - protein, 566 aa, synthetic construct; identical to SEQ ID NO: 630
  REGION 1..566: note = hemagglutinin__InfluenzaA__ABU92597

SEQ ID NO: 1760 - protein, 566 aa, synthetic construct; identical to SEQ ID NO: 73
  REGION 1..566: note = hemagglutinin__InfluenzaA__ABU92601

SEQ ID NO: 1761 - protein, 566 aa, synthetic construct; identical to SEQ ID NO: 73
  REGION 1..566: note = hemagglutinin__InfluenzaA__ABU92602

SEQ ID NO: 1762 - protein, 566 aa, synthetic construct
  REGION 1..566: note = hemagglutinin__InfluenzaA__ABU92603
MKTIIALSYILCLVFAQKLPGNDNSTATLCLGHHAVPNGTIVKTITNDQIEVTNATELVQISSTGEICDSPHQILDGENCTLIDALLGDPQCDGFQNKKWDLFVERSKAYSNCYPYDVPDYASLRSLVASSGTLEFNNESFDWTGVTQNGTSSACKRRSDKSFFSRLNWLTHLKYKYPALNVTMPNNEKFDKLYIWGVHHPGTDSDQISLYAQASGRITVSTKRSQQTVIPNIGSRPRVRDVSSRISIYWTIVKPGDILLINSTGNLIAPRGYFKIRSGKSSIMRSDAPIGKCNSECITPNGSIPNDKPFQNVNRITYGACPRYVKQNTLKLATGMRNVPEKQTRGIFGAIAGFIENGWEGMVDGWYGFRHQNSEGTGQAADLKSTQAAINQINGKLNRLIGKTNEKFHQIEKEFSEVEGRIQDLEKYVEDTKIDLWSYNAELLVALENQHTIDLTDSEMNKLFERTKKQLRENAEDMGNGCFKIYHKCDNACIGSIRNGTYDHDVYRDEALNNRFQIKGVELKSGYKDWILWISFAISCFLLCVALLGFIMWACQKGNIRCNICI

SEQ ID NO: 1763 - protein, 566 aa, synthetic construct; identical to SEQ ID NO: 73
  REGION 1..566: note = hemagglutinin__InfluenzaA__ABU92604

SEQ ID NO: 1764 - protein, 566 aa, synthetic construct; identical to SEQ ID NO: 1762
  REGION 1..566: note = hemagglutinin__InfluenzaA__ABU92605

SEQ ID NO: 1765 - protein, 566 aa, synthetic construct; identical to SEQ ID NO: 1762
  REGION 1..566: note = hemagglutinin__InfluenzaA__ABU92606

SEQ ID NO: 1766 - protein, 566 aa, synthetic construct; identical to SEQ ID NO: 612
  REGION 1..566: note = hemagglutinin__InfluenzaA__ABU92608

SEQ ID NO: 1767 - protein, 566 aa, synthetic construct; identical to SEQ ID NO: 612
  REGION 1..566: note = hemagglutinin__InfluenzaA__ABU92609

SEQ ID NO: 1768 - protein, 566 aa, synthetic construct
  REGION 1..566: note = hemagglutinin__InfluenzaA__ABU92610
MKTIIALSYILCLVFAQKLPGNDNSTATLCLGHHAVPNGTIVKTITNDQIEVTNATELVQSSSTGEICDSPHQILDGENCTLIDALLGDPQCDGFQNKKWDLFVERSKAYSNCYPYDVPDYASLRSLVASSGTLEFNNESFNWTGVTQNGTSSACKRRSNNSFFSRLNWLTHSKFKYPALNVTMPNNEKFDKLYIWGVHHPGTDNDQIFLYAQASGRITVSTKRSQQTVIPNIGSRPRVRNIPSRISIYWTIVKPGDILLINSTGNLIAPRGYFKIRSGKSSIMRSDAPIGKCNSECITPNGSIPNDKPFQNVNRIAYGACPRYVKQNTLKLATGMRNVPEKQTRGIFGAIAGFIENGWEGMVDGWYGFRHQNSEGIGQAADLKSTQAAINQINGKLNRLIGKTNEKFHQIEKEFSEVEGRIQDLEKYVEDTKIDLWSYNAELLVALENQHTIDLTDSEMNKLFERTKKQLRENAEDMSNGCFKIYHKCDNACIGSIRNGTYDHDVYRDEALNNRFQIKGVELKSGYKDWILWISFAISCFLLCVVLLGFIMWACQKGNIRCNICI

SEQ ID NO: 1769 - protein, 566 aa, synthetic construct
  REGION 1..566: note = hemagglutinin__InfluenzaA__ABU92611
MKTIIALSYILCLVFAQKLPGNDNSTATLCLGHHAVPNGTIVKTITNDQIEVTNATELVQSSSTGGICDSPHQILDGENCTLIDALLGDPQCDGFQNKKWDLFVERSKAYSNCYPYDVPDYASLRSLIASSGTLEFNNESFNWTGVTQNGTSSACKRRSNNSFFSRLNWLTHLKFKYPALNVTMPNNEEFDKLYIWGVHHPGTDNDQISLYAQASGKITVSTKRSQQTVIPNIGSRPRVRDIPSRISIYWTIVKPGDILLINSTGNLIAPRGYFKIRSGKSSIMRSDAPIGKCNSECITPNGSIPNDKPFQNVNRITYGACPRYVKQNTLKLATGMRNVPEKQTRGIFGAIAGFIENGWEGMVDGWYGFRHQNSEGIGQAADLKSTQAAIDQINGKLNRLIGKTNEKFHQIEKEFSEVEGRIQDLEKYVEDTKIDLWSYNAELLVALENQHTIDLTDSEMNKLFERTKKQLRENAEDMGNGCFKIYHKCDNACIGSIRNGTYDHDVYRDEALNNRFQIKGVELKSGYKDWILWISFAISCFLLCVALLGFIIWACLKGNIRCNICI

SEQ ID NO: 1770 - protein, 566 aa, synthetic construct
  REGION 1..566: note = hemagglutinin__InfluenzaA__ABU92612
MKTIIALSYILCLVFAQKLPGNDNSTATLCLGHHAVPNGTMVKTITNDQIEVTNATELVQSSSTGGICDSPHQILDGENCTLIDALLGDPQCDGFQNKKWDLFVERSKAHSNCYPYDVPDYASLRSLVASSGTLEFNNESFNWTGVTQNGTSSACKRRSNNSFFSRLNWLTHLKFKYPALNVTMPNNEKFDKLYIWGVHHPGTDNDQISLYAQASGRITVSTKRSQQTVIPNIGSRPRVRDIPSRISIYWTIVKPGDILLINSTGNLIAPRGYFKIRSGKSSIMRSDAPIGKCNSECITPNGSIPNNKPFQNVNRITYGACPRYVKQNTLKLATGMRNVPEKQTRGIFGAIAGFIENGWEGMVDGWYGFRHQNSEGIGQAADLKSTQAAINQINGKLNRLIGKTNEKFHQIEKEFSEVEGRIQDLEKYVEDTKIDLWSYNAELLVALENQHTIDLTDSEMNKLFERTKKQLRENAEDMGNGCFKIYHKCDNACIGSIRNGTYDHDVYRDEALNNRFQIKGVELKSGYKDWILWISFAISCFLLCVALLGFIMWACQKGNIRCNICI

SEQ ID NO: 1771 - protein, 566 aa, synthetic construct; identical to SEQ ID NO: 1258
  REGION 1..566: note = hemagglutinin__InfluenzaA__ABU92613

SEQ ID NO: 1772 - protein, 566 aa, synthetic construct; identical to SEQ ID NO: 1757
  REGION 1..566: note = hemagglutinin__InfluenzaA__ABU92614

SEQ ID NO: 1773 - protein, 566 aa, synthetic construct
  REGION 1..566: note = hemagglutinin__InfluenzaA__ABU92615
MKTIIALSYILCLVFAQKLPGNDNSTATLCLGHHAVPNGTIVRTITNDQIEVTNATELVQSSSTGGICDSPHQILDGENCTLIDALLGDPQCDGFQNKKWDLFVERSKAYSNCYPYDVPDYASLRSLVASSGTLEFNNESFNWTGVTQNGTSSACKRRSNNSFFSRLNWLTHLKFKYPALNVTMPNNEKFDKLYIWGVHHPGTDNDQISLYAQASGRITVSTKRSQQTVIPNVGSRPRVRDIPSRISIYWTIVKPGDILLINSTGNLIAPRGYFKIRSGKSSIMRSDAPIGKCNSECITPNGSIPNDKPFQNVNRITYGACPRYVKQNTLKLATGMRNVPEKQTRGIFGAIAGFIENGWEGMVDGWYGFRHQNSEGIGQAADLKSTQAAINQINGKLNRLIGKTNEKFHQIEKEFSEVEGRIQDLEKYVEDTKIDLWSYNAELLVALENQHTIDLTDSEMNKLFERTKKQLRENAEDMGNGCFKIYHKCDNACIGSIRNGTYDHDVYRDEALNNRFQIKGVELKSGYKDWILWISFAISCFLLCVALLGFIMWACQKGNIRCNICI

SEQ ID NO: 1774 - protein, 566 aa, synthetic construct
  REGION 1..566: note = hemagglutinin__InfluenzaA__ABU92617
MKTIIALSYILCLVFAQKLPGNDNSTATLCLGHHSVPNGTIVKTITNDQIEVTNATELVQSSSTGGICDSPHQILDGENCTLIDALLGDPQCDGFQNKKWDLFVERSKAYSNCYPYDVPDYASLRSLIASSGTLEFNNESFNWTGVTQNGTSSACKRRSNSSFFSRLNWLTHLKFKYPALNVTMPNNEEFDKLYIWGVHHPGTDNDQISLYAQASGRITVSTKRSQQTVIPNIGSRPRVRDIPSRISIYWTIVKPGDILLINSTGNLIAPRGYFKIRSGKSSIMRSDAPIGKCNSECITPNGSIPNDKPFQNVNRITYGACPRYVKQNTLKLATGMRNVPEKQTRGIFGAIAGFIENGWEGMVDGWYGFRHQNSEGIGQAADLKSTQAAIDQINGKLNRLIGKTNEKFHQIEKEFSEVEGRIQDLEKYVEDTKIDLWSYNAELLVALENQHTIDLTDSEMNKLFERTKKQLRENAEDMGNGCFKIYHKCDNACIGSIRNGTYDHDVYRDEALNNRFQIKGVELKSGYKDWILWISFAISCFLLCVALLGFIMWACQKGNIRCNICI

SEQ ID NO: 1775 - protein, 566 aa, synthetic construct; identical to SEQ ID NO: 1258
  REGION 1..566: note = hemagglutinin__InfluenzaA__ABU92619

SEQ ID NO: 1776 - protein, 566 aa, synthetic construct; identical to SEQ ID NO: 1757
  REGION 1..566: note = hemagglutinin__InfluenzaA__ABU92620

SEQ ID NO: 1777 - protein, 566 aa, synthetic construct
  REGION 1..566: note = hemagglutinin__InfluenzaA__ABU92622
MKTIIALSYILCLVFAQKLPGNDNSTATLCLGHHAVPNGTIVKTITNDQIEVTNATELVQSSSTGGICDSPHQILDGENCTLIDALLGDPQCDGFQNKKWDLFVERSKAYSNCYPYDVPDYASLRSLIASSGTLEFNNESFNWTGVTQNGTSSACKRRSNSSFFSRLNWLTHLKFKYPALNVTMPNNEEFDKLYIWGVHHPGTDNDQISLYAQASGRITVSTKRSQQTVIPNIGSRPRVRDIPSRISIYWTIVKPGDILLINSTGNLIAPRGYFKIRSGKSSIMRSDAPIGKCNSECITPNGSIPNDKPFQNVNRITYGACPRSVKQNTLKLATGMRNVPEKQTRGIFGAIAGFIENGWEGMVDGWYGFRHQNSEGIGQAADLKSTQAAIDQINGKLNRLIGKTNEKFHQIEKEFSEVEGRIQDLEKYVEDTKIDLWSYNAELLVALENQHTIDLTDSEMNKLFERTKKQLRENAEDMGNGCFKIYHKCDNACIGSIRNGTYDHDVYRDEALNNRFQIKGVELKSGYKDWILWISFAISCFLLCVALLGFIMWACQKGNIRCNICI

SEQ ID NO: 1778 - protein, 566 aa, synthetic construct; identical to SEQ ID NO: 73
  REGION 1..566: note = hemagglutinin__InfluenzaA__ABU92623

SEQ ID NO: 1779 - protein, 566 aa, synthetic construct
  REGION 1..566: note = hemagglutinin__InfluenzaA__ABU92624
MKTIIALSYILCLVFAQKLPGNDNSTATLCLGHHAVPNGTIVKTITNDQIEVTNATELVQISSTGEICDSPHQILDGENCTLIDALLGDPQCDGFQNKKWDLFVERSKAYSNCYPYDVPDYASLRSLVASSGTLEFNNESFDWTGVTQNGTSSACKRRSDKSFFSRLNWLTHLKYKYPALNVTMPNNEKFDKLYIWGVHHPGTDSDQISLYAQALGRITVSTKRSQQTVIPNIGSRPRVRDVSSRISIYWTIVKPGDILLINSTGNLIAPRGYFKIRSGKSSIMRSDAPIGKCNSECITPNGSIPNDKPFQNVNRITYGACPRYVKQNTLKLATGMRNVPEKQTRGIFGAIAGFIENGWEGMVDGWYGFRHQNSEGTGQAADLKSTQAAINQINGKLNRLIGKTNEKFHQIEKEFSEVEGRIQDLEKYVEDTKIDLWSYNAELLVALENQHTIDLTDSEMNKLFERTKKQLRENAEDMGNGCFKIYHKCDNACIGSIRNGTYDHDVYRDEALNNRFQIKGVELKSGYKDWILWISFAISCFLLCVALLGFIMWACQKGNIRCNICI

SEQ ID NO: 1780 - protein, 566 aa, synthetic construct; identical to SEQ ID NO: 1762
  REGION 1..566: note = hemagglutinin__InfluenzaA__ABU92625

SEQ ID NO: 1781 - protein, 566 aa, synthetic construct; identical to SEQ ID NO: 73
  REGION 1..566: note = hemagglutinin__InfluenzaA__ABU92626

SEQ ID NO: 1782 - protein, 566 aa, synthetic construct
  REGION 1..566: note = hemagglutinin__InfluenzaA__ABU92627
MKTIIALSYILCMVFAQKLPGNDNSTATLCLGHHAVPNGTIVKTITNDQIEVTNATELVQISSTGEICDSPHQILDGENCTLIDALLGDPQCDGFQNKKWDLFVERSKAYSNCYPYDVPDYASLRSLVASSGTLEFNNESFDWTGVTQNGTSSACKRRSDKSFFSRLNWLTHLKYKYPALNVTMPNNEKFDKLYIWGVHHPGTDSDQISLYAQASGRITVSTKRSQQTVIPNIGSRPRVRDVSSRISIYWTIVKPGDILLINRPGNLIAPRGYFKIRSGKSSIMRSDAPIGKCNSECITPNGSIPNDKPFQNVNRITYGACPRYVKQNTLKLATGMRNVPEKQTRGIFGAIAGFIENGWEGMVDGWYGFRHQNSEGTGQAADLKSTQAAINQINGKLNRLIGKTNEKFHQIEKEFSEVEGRIQDLEKYVEDTKIDLWSYNAELLVALENQHTIDLTDSEMNKLFERTKKQLRENAEDMGNGCFKIYHKCDNACIGSIRNGTYDHDVYRDEALNNRFQIKGVELKSGYKDWILWISFAISCFLLCVALLGFIMWACQKGNIRCNICI

SEQ ID NO: 1783 - protein, 566 aa, synthetic construct; identical to SEQ ID NO: 1762
  REGION 1..566: note = hemagglutinin__InfluenzaA__ABU92628

SEQ ID NO: 1784 - protein, 566 aa, synthetic construct; identical to SEQ ID NO: 1762
  REGION 1..566: note = hemagglutinin__InfluenzaA__ABU92631

SEQ ID NO: 1785 - protein, 566 aa, synthetic construct
  REGION 1..566: note = hemagglutinin__InfluenzaA__ABU92632
MKTIIALSYILCLVFAQKLPGNDNSTATLCLGHHAVPNGTIVKTITNDQIEVTNATELVQSSSTGGICDSPHQILDGENCTLIDALLGDPQCDGFQNKKWDLFVERSKAYSNCYPYDVPDYASLRSLIASSGTLEFNNESFNWTGVTQNGTSSACKRRSNKSFFSRLNWLTHLKYKYPALNVTMPNNEKFDKLYIWGVHHPGTDSDQISLYAQASGRITVSTKRSQQTVIPNIGSRPRVRDVSSRISIYWTIVKPGDILLINSTGNLIAPRGYFKIRSGKSSIMRSDAPIGKCNSECITPNGSIPNDKPFQNVNRITYGACPRYVKQNTLKLATGMRNVPEKQTRGIFGAIAGFIENGWEGMVDGWYGFRHLNSEGTGQAADLKSTQAAINQINGKLNRLIGKTNEKFHQIEKEFSEVEGRIQDLEKYVEDTKIDLWSYNAELLVALENQHTIDLTDSEMNKLFERTKKQLRENAEDMGNGCFKIYHKCDNACIGSIRNGTYDHDVYRDEALNNRFQIKGVELKSGYKDWILWISFAISCFLLCVALLGFIMWACQKGNIRCNICI

SEQ ID NO: 1786 - protein, 566 aa, synthetic construct
  REGION 1..566: note = hemagglutinin__InfluenzaA__ABU92635
MKTIIALSYILCLVFAQKLPGNDNSTATLCLGHHAVPNGTIVKTITNDQIEVTNATELVQSSSTGGICDSPHQILDGENCTLIDALLGDPQCDGFQNKKWDLFVERSKAYSNCYPYDVPDYASLRSIVASSGTLEFNNESFNWTGVTQNGTSSACKRKSNKSFFSRLNWLTHLKYKYPALNVTMPNNEKFDKLYIWGVHHPGTDNDQISLYAQASGRITVSTKRSQQTVIPNIGSRPRVRDVSSRISIYWTIVKPGDILLINSTGNLIAPRGYFKIRSGKSSIMRSDAPIGKCNSECITPNGSIPNDKPFQNVNRITYGACPRYVKQNTLKLATGMRNVPEKQTRGIFGAIAGFIENGWEGMVDGWYGFRHQNSEGTGQAADLKSTQAAINQINGKLNRLIGKTNEKFHQIEKEFSEVEGRIQDLEKYVEDTKIDLWSYNAELLVALENQHTIDLTDSEMNKLFERTKKQLRENAEDMGNGCFKIYHKCDNACIGSIRNGTYDHDVYRDEALNNRFQIKGVELKSGYKDWILWISFAISCFLLCVALLGFIMWACQKGNIRCNICI

SEQ ID NO: 1787 - protein, 566 aa, synthetic construct; identical to SEQ ID NO: 630
  REGION 1..566: note = hemagglutinin__InfluenzaA__ABU92636

SEQ ID NO: 1788 - protein, 566 aa, synthetic construct
  REGION 1..566: note = hemagglutinin__InfluenzaA__ABU92637
MKTIIALSYILCLVFAQKLPGNDNSTATLCLGHHAVPNGTTVKTITNDQIEVTNATELVQSSSTGGICDSPHQILDGENCTLIDALLGDPQCDGFQNKKWDLFVERSKAYSNCYPYDVPDYVSLRSLVASSGTLEFNNESFNWTGVTQNGTSSACKRRSNNSFFSRLNWLTHLKFKYPALNVTMPNNEKFDKLYIWGVHHPGTDNDQISLYAQASGRITVSTKRSQQTVIPNIGSRPRVRDIPSRISIYWTIVKPGDILLINSTGNLIAPRGYFKIRSGKSSIMRSDAPIGKCNSECITPNGSIPNDKPFQNVNRITYGACPRYVKQNTLKLATGMRNVPEKQTRGIFGAIAGFIENGWEGMVDGWYGFRHQNSEGIGQAADLKSTQAAINQINGKLNRLIGKTNEKFHQIEKEFSEVEGRIQDLEKYVEDTKIDLWSYNAELLVALENQHTIDLTDSEMNKLFERTKKQLRENAEDMGNGCFKIYHKCDNACIGSIRNGTYDHDVYRDEALNNRFQIKGVELKSGYKDWILWISFAISCFLLCVALLGFIMWACQKGNIRCNICI

SEQ ID NO: 1789 - protein, 566 aa, synthetic construct
  REGION 1..566: note = hemagglutinin__InfluenzaA__ABU92639
MKTIIALSYILCLVFAQKLPGNDNSTATLCLGHHAVPNGTIVKTITNDQIEVTNATELVQISSTGEICDSPHQILDGENCTLIDALLGDPQCDGFQNTKWDLFVERSKAYSNCYPYDVPDYASLRSLVASSGTLEFNNESFDWTGVTQNGTSSACKRRSDKSFFSRLNWLTHLKYKYPALNVTMPNNEKFDKLYIWGVHHPGTDSDQISLYAQASGRITVSTKRSQQTVIPNIGSRPRVRDVSSRISIYWTIVKPGDILLINSTGNLIAPRGYFKIRSGKSSIMRSDAPIGKCNSECITPNGSIPNDKPFQNVNRITYGACPRYVKQNTLKLATGMRNVPEKQTRGIFGAIAGFIENGWEGMVDGWYGFRHQNSEGTGQAADLKSTQAAINQINGKLNRLIGKTNEKFHQIEKEFSEVEGRIQDLEKYIEDTKIDLWSYNAELLVALENQHTIDLTDSEMNKLFERTKKQLRENAEDMGNGCFKIYHKCDNACIGSIRNGTYDHDVYRDEALNNRFQIKGVELKSGYKDWILWISFAISCFLLCVALLGFIMWACQKGNIRCNICI

SEQ ID NO: 1790 - protein, 566 aa, synthetic construct
  REGION 1..566: note = hemagglutinin__InfluenzaA__ABU92640
MKTIIALSYILCLVFAQKLPGNDNSTATLCLGHHAVPNGTIVKTITNDQIEVTNATELVQSSSTGEICDSPHQILDGENCTLIDALLGDPQCDGFQNKKWDLFVERSKAYSNCYPYDVPDYASLRSLVASSGTLEFNNESFNWTGVTQNGTSSACKRRSNNSFFSRLNWLTHLKFKYPALNVTMPNNEKFDKLYIWGVHHPGTDNDQIFLYAQASGRITVSTKRSQQTVIPNIGSRPRVRNIPSRISIYWTIVKPGDILLINSTGNLIAPRGYFKIRSGKSSIMRSDAPIGKCNSECITPNGSIPNDKPFQNVNRITYGACPRYVKQNTLKLATGMRNVPEKQTRGIFGAIAGFIENGWEGMVDGWYGFRHQNSEGIGQAADLKSTQAAINQINGKLNRLIGKTNEKFHQIEKEFSEVEGRIQDLEKYVEDTKIDLWSYNAELLVALENQHTIDLTDSEMNKLFERTKKQLRENAEDMGNGCFKIYHKCDNACIGSIRNGTYDHDVYRDEALNNRFQIKGVELKSGYKDWILWISFAISCFLLCAALLGFIMWACQKGNIRCNICI

SEQ ID NO: 1791 - protein, 566 aa, synthetic construct
  REGION 1..566: note = hemagglutinin__InfluenzaA__ABU92641
MKTIIALSYILCLVFAQKLPGNDNSTATLCLGHHAVPNGTIVKTITNDQIEVTNATELVQSSSTGGICDSPHQILDGENCTLIDALLGDPQCDGFQNKKWDLFVERSKAYSNCYPYDVPDYASLRSLVASSGTLEFNNESFNWTGVTQNGTSSACKRKSNNSFFSRLNWLTHLKFKYPALNVTMPNNEKFDKLYIWGVHHPGTDNDQISLYAQASGRITVSTKRSQQTVIPNIGSRPRVRDIPSRISIYWTIVKPGDILLINSTGNLIAPRGYFKIRSGKSSIMRSDAPIGKCNSECITPNGSIPNDKPFQNVNRITYGACPRYVKQNTLKLATGMRNVPEKQTRGIFGAIAGFIENGWEGMVDGWYGFRHQNSEGIGQAADLKSTQAAINQINGKLNRLIGKTNEKFHQIEKEFSEVEGRIQDLEKYVEDTKIDLWSYNAELLVALENQHTIDLTDSEMNKLFERTKKQLRENAEDMGNGCFKIYHKCDNACIGSIRNGTYDHDVYRDEALNNRFQIKGVELKSGYKDWILWISFAISCFLLCVALLGFIMWACQKGNIRCNICI

SEQ ID NO: 1792 - protein, 566 aa, synthetic construct
  REGION 1..566: note = hemagglutinin__InfluenzaA__ABU92642
MKTIIALSYILCLVFAQKLPGNDNSTATLCLGHHAVPNGTIVKTITNDQIEVTNATELVQSSSTGGICDSPHQILDGENCTLIDALLGDPQCDGFQNKKWDLFVERSKAYSNCYPYDVPDYASLRSLVASSGTLEFNNESFNWTGVTQNGTSSACKRRSNNSFFSRLNWLTHLKFKYPALNVTMPNNEKFDKLYIWGVHHPGTDNDQIFLYAQASGRIIVSTKRSQQTVIPNIGSRPRVRNIPSRISIYWTIVKPGDILLINSTGNLIAPRGYFKIRSGKSSIMRSDAPIGKCNSECITPNGSIPNDKPFQNVNRITYGACPRYVKQNTLKLATGMRNVPEKQTRGIFGAIAGFIENGWEGMVDGWYGFRHQNSEGIGQAADLKSTQAAIDQINGKLNRLIGKTNEKFHQIEKEFSEVEGRIQDLEKYVEDTKIDLWSYNAELLVALENQHTIDLTDSEMNKLFEKTKKQLRENAEDMGNGCFKIYHKCDNACIGSIRNGTYDHDVYRDEALNNRFQIKGVELKSGYKDWILWISFAISCFLLCVALLGFIMWACQKGNIRCNICI

SEQ ID NO: 1793 - protein, 566 aa, synthetic construct
  REGION 1..566: note = hemagglutinin__InfluenzaA__ABU92643
MKTIIALSYILCLVFAQKLPGNDNSTATLCLGHHAVPNGTIVKTITNDQIEVTNATELVQISSTGEICDSPHQILDGENCTLIDALLGDPQCDGFQNKKWDLFVERSKAYSNCYPYDVPDYASLRSLVASSGTLEFNNESFDWTGVTQNGTSSACKRRSDKSFFSRLNWLTHLKYKYPALNVTMPNNEKFDKLYIWGVHHPGTDSDQISLYAQASGRITVSTKRSQQTVIPNIGSRPRVRDVSSRISIYWTIVKPGDILLINSTGNLIAPRGYFKIRSGKSSIMRSDAPIGKCNSECITPNGSIPNDKPFQNVNRITYGACPRYVKQNTLKLATGMRNVPEKQTRGIFGAIAGFIENGWEGMVDGWYGFRHQNSEGTGQAADLKSTQAAINQINGKLNRLIGKTNEKFHQIEKEFSEVEGRIQDLEKYVEDTKIDLWSYNAELLVALENQHTIDLTDSEMNKLFERTKKQLRENAEDMGNGCFKIYHKCDNACIGSIRNGTYDHNVYRDEALNNRFQIKGVELKSGYKDWILWISFAISCFLLCVALLGFIMWACQKGNIRCNICI

SEQ ID NO: 1794 - protein, 566 aa, synthetic construct
  REGION 1..566: note = hemagglutinin__InfluenzaA__ABU92645
MKTIIALSYILCLVFAQKLPGNDNSTATLCLGHHAVPNGTIVKTITNDQIEVTNATELVQSSSTGEICDSPHQILDGENCTLIDALLGDPQCDGFQNKKWDLFVERSKAYSNCYPYDVPDYASLRSLVASSGTLEFNNESFNWTGVTQNGTSSACKRRSNNSFFSRLNWLTHLKFKYPALNVTMPNNEKFDKLYIWGVHHPGTDNDQIFLYAQASGRITVSTKRSQQTVIPNIGSRPRVRNIPSRISIYWTIVKPGDILLINSTGNLIAPRGYFKIRSGKSSIMRSDAPIGKCNSECITPNGSIPNDKPFQNVNRIAYGACPRYVKQNTLKLATGMRNVPEKQTRGIFGAIAGFIENGWEGMVDGWYGFRHQNSEGIGQAADLKSTQAAINQINGKLNRLIGKTNEKFHQIEKEFSEVEGRIQDLEKYVEDTKIDLWSYNAELLVALENQHTIDLTDSEMNKLFERTKKQLRENAEDMGNGCFKIYHKCDNACIGSIRNGTYDHDVYRDEALNNRFQIKGIELKSGYKDWILWISFAISCFLLCVVLLGFIMWACQKGNIRCNICI

SEQ ID NO: 1795 - protein, 566 aa, synthetic construct
  REGION 1..566: note = hemagglutinin__InfluenzaA__ABU92646
MKTIIALSYILCLVFAQKLPGNDNSTATLCLGHHAVPNGTIVKTITNDQIEVTNATELVQSSSTGGICDSPHQILDGENCTLIDALLGDPQCDGFQNKKWDLFVERSKAYSNCYPYDVPDYASLRSLVASSGTLEFNNESFNWTGVTQNGTSSACKRRSNKSFFSRLNWLTHLKFKYPALNVTMPNNEKFDKLYIWGVHHPGTDNDQISLYAQASGRITVSTKRSQQTVIPNIGSRPRVRDVPSRISIYWTIVKPGDILLINSTGNLIAPRGYFKIRSGKSSIMRSDAPIGKCNSECITPNGSIPNDKPFQNVNRITYGACPRYVKQNTLKLATGMRNVPEKQTRGIFGAIAGFIENGWEGMVDGWYGFRHQNSEGTGQAADLKSTQAAINQINGKLNRLIGKTNEKFHQIEKEFSEVEGRIQDLEKYVEDTKIDLWSYNAELLVALENQHTIDLTDSEMNKLFERTKKQLRENAEDMGNGCFKIYHKCDNACIGSIRNGTYDHDVYRDEALNNRFQIKGVELKSGYKDWILWISFAISCFLLCVALLGFIMWACQKGNIRCNICI

SEQ ID NO: 1796 - protein, 566 aa, synthetic construct; identical to SEQ ID NO: 73
  REGION 1..566: note = hemagglutinin__InfluenzaA__ABU92647

SEQ ID NO: 1797 - protein, 566 aa, synthetic construct
  REGION 1..566: note = hemagglutinin__InfluenzaA__ABU92648
MKTIIALSYILCLVFAQKLPGNDNSTATLCLGHHAVPNGTIVKTITNDQIEVTNATELVQISSTGEICDSPHQILDGENCTLIDALLGDPQCDGFQNKKWDLFVERSKAYSNCYPYDVPDYASLRSLVASSGTLEFNNESFNWTGVTQNGTSSACKRRSDKSFFSRLNWLTHLKYKYPALNVTMPNNEKFDKLYIWGVHHPGTDSDQISLYAQASGRITVSTKRSQQTVIPNIGSRPRVRDVSSRISIYWTIVKPGDILLINSTGNLIAPRGYFKIRSGKSSIMRSDAPIGKCNSECITPNGSIPNDKPFQNVNRITYGACPRYVKQNTLKLATGMRNVPEKQTRGIFGAIAGFIENGWEGMVDGWYGFRHQNSEGTGQAADLKSTQAAINQINGKLNRLIGKTNEKFHQIEKEFSEVEGRIQDLEKYVEDTKIDLWSYNAELLVALENQHTIDLTDSEMNKLFERTKKQLRENAEDMGNGCFKIYHKCDNACIGSIRNGTYDHDVYRDEALNNRFQIKGVELKSGYKDWILWISFAISCFLLCVALLGFIMWACQKGNIRCNICI

SEQ ID NO: 1798 - protein, 566 aa, synthetic construct; identical to SEQ ID NO: 73
  REGION 1..566: note = hemagglutinin__InfluenzaA__ABU92649

SEQ ID NO: 1799 - protein, 566 aa, synthetic construct; identical to SEQ ID NO: 1762
  REGION 1..566: note = hemagglutinin__InfluenzaA__ABU92650

SEQ ID NO: 1800 - protein, 566 aa, synthetic construct
  REGION 1..566: note = hemagglutinin__InfluenzaA__ABU92651
MKTIIALSYILCLVFAQKLPGNDNSTATLCLGHHAVPNGTIVKTITNDQIEVTNATELVQISSTGEICDSPHQILDGENCTLIDALLGDPQCDGFQNKKWDLFVERSKAYSNCYPYDVPDYASLRSLVASSGTLEFYNESFDWTGVTQNGTSSACKRRSDKSFFSRLNWLTHLKYKYPALNVTMPNNEKFDKLYIWGVHHPGTDSDQISLYAQASGRITVSTKRSQQTVIPNIGSRPRVRDVSSRISIYWTIVKPGDILLINSTGNLIAPRGYFKIRSGKSSIMRSDAPIGKCNSECITPNGSIPNDKPFQNVNRITYGACPRYVKQNTLKLATGMRNVPEKQTRGIFGAIAGFIENGWEGMVDGWYGFRHQNSEGTGQAADLKSTQAAINQINGKLNRLIGKTNEKFHQIEKEFSEVEGRIQDLEKYVEDTKIDLWSYNAELLVALENQHTIDLTDSEMNKLFERTKKQLRENAEDMGNGCFKIYHKCDNACIGSIRNGTYDHDVYRDEALNNRFQIKGVELKSGYKDWILWISFAISCFLLCVALLGFIMWACQKGNIRCNICI

SEQ ID NO: 1801 - protein, 566 aa, synthetic construct
  REGION 1..566: note = hemagglutinin__InfluenzaA__ABU92652
MKTIIALSYILCLVFAQKLPGNDNSTATLCLGHHAVPNGTIVKTITNDQIEVTNATELVQSSSTGGICDSPHQILDGENCTLIDALLGDPQCDGFQNKKWDLFVERSKAYSNCYPYDVPDYASLRSLVASSGTLEFNNESFDWTGVTQNGTSSACKRRSNKSFFSRLNWLTHLKYKYPALNVTMPNNEKFDKLYIWGVHHPGTDSDQISLYAQASGRITVSTKRSQQTVIPNIGSRPRVRDVSSRISIYWTIVKPGDILLINSTGNLIAPRGYFKIRSGKSSIMRSDAPIGKCNSECITPNGSIPNDKPFQNVNRITYGACPRYVKQNTLKLATGMRNVPEKQTRGIFGAIAGFIENGWEGMVDGWYGFRHQNSEGTGQAADLKSTQAAINQINGKLNRLIGKTNEKFHQIEKEFSEVEGRIQDLEKYVEDTKIDLWSYNAELLVALENQHTIDLTDSEMNKLFERTKKQLRENAEDIGNGCFKIYHKCDNACIGSIRNGTYDHDVYRDEALNNRFQIKGVELKSGYKDWILWISFAISCFLLCVALLGFIMWACQKGNIRCNICI

SEQ ID NO: 1802 - protein, 566 aa, synthetic construct; identical to SEQ ID NO: 1762
  REGION 1..566: note = hemagglutinin__InfluenzaA__ABU92653

SEQ ID NO: 1803 - protein, 566 aa, synthetic construct
  REGION 1..566: note = hemagglutinin__InfluenzaA__ABU92654
MKTIIALSYILCLVFAQKLPGNDNSTATLCLGHHAVPNGTIVKTITNDQIEVTNATELVQSSSTGGICDSPHQILDGENCTLIDALLGDPQCDGFQNKKWDLFVERSKAYSNCYPYDVPDYASLRSLVASSGTLEFNNESFNWTGVTQNGTSSACKRRSNKSFFSRLNWLTHLKFKYPALNVTMPNNEKFDKLYIWGVHHPGTDNDQISLYAQASGKITVSTKRSQQTVIPNIGSRPRVRDVPSRISIYWTIVKPGDILLINSTGNLIAPRGYFKIRSGKSSIMRSDAPIGKCNSECITPNGSILNDKPFQNVNRITYGACPRYVKQNTLKLATGMRNVPEKQTRGIFGAIAGFIENGWEGMVDGWYGFRHQNAEGTGQAADLKSTQAAINQINGKLNRLIGKTNEKFHQIEKEFSEVEGRIQDLEKYVEDTKIDLWSYNAELLVALENQHTIDLTDSEMNKLFERTKKQLRENAEDMGNGCFKIYHKCDNACIGSIRNGTYDHDVYRDEALNNRFQIKGVELKSGYKDWILWISFAISCFLLCVALLGFIMWACQKGNIRCNICI

SEQ ID NO: 1804 - protein, 566 aa, synthetic construct
  REGION 1..566: note = hemagglutinin__InfluenzaA__ABU92655
MKTIIALSYILCLVFAQKLPGNDNSTATLCLGHHAVPNGTIVKTITNDQIEVTNATELVQSSSTGGICDSPHQILDGENCTLIDALLGDPQCDGFQNKKWDLFVERSKAYSNCYPYDVPDYASLRSLVASSGTLEFNNESFNWTGVTQNGTSSACKRRSNKSFFSRLNWLTHLKFKYPALNVTMPNNEKFDKLYIWGVHHPGTDNDQISLYAQASGRITVSTKRSQQTVIPNIGSRPRVRDVPSRISIYWTIVKPGDILLINSTGNLIAPRGYFKIRSGKSSIMRSDAPIGKCNSECITPNGSIPNDKPFQNVNRITYGACPRYVKQNTLKLATGMRNVPEKQTRGIFGAIAGFIENGWEGMVDGWYGFRHQNAEGTGQAADLKSTQAAINQINGKLNRLIGKTNEKFHQIEKEFSEVEGRIQDLEKYVEDTKIDLWSYNAELLVALENQHTIDLTDSEMNKLFERTKKQLRENAEDMGNGCFKIYHKCDNACIGSIRNGTYDHDVYRDEALNNRFQIKGVELKSGYKDWILWISFAISCFLLCVALLGFIMWACQKGNIRCNICI

SEQ ID NO: 1805 - protein, 566 aa, synthetic construct; identical to SEQ ID NO: 1762
  REGION 1..566: note = hemagglutinin__InfluenzaA__ABU92656

SEQ ID NO: 1806 - protein, 566 aa, synthetic construct; identical to SEQ ID NO: 633
  REGION 1..566: note = hemagglutinin__InfluenzaA__ABU92657

SEQ ID NO: 1807 - protein, 566 aa, synthetic construct; identical to SEQ ID NO: 1762
  REGION 1..566: note = hemagglutinin__InfluenzaA__ABU92658

SEQ ID NO: 1808 - protein, 566 aa, synthetic construct; identical to SEQ ID NO: 633
  REGION 1..566: note = hemagglutinin__InfluenzaA__ABU92659

SEQ ID NO: 1809 - protein, 566 aa, synthetic construct; identical to SEQ ID NO: 1762
  REGION 1..566: note = hemagglutinin__InfluenzaA__ABU92660

SEQ ID NO: 1810 - protein, 566 aa, synthetic construct
  REGION 1..566: note = hemagglutinin__InfluenzaA__ABU92661
MKTIIALSYILCLVFAQKLPGNDNSTATLCLGHHAVPNGTIVKTITNDQIEVTNATELVQISSTGEICDSPHQILDGENCTLIDALLGDPQCDGFQNKKWDLFVERSKAYSNCYPYDVPDYASLRSLVASSGTLEFNNESFDWTGVTQNGTSSACKRRSDKSFFSRLNWLTHLKYKYPALNVTMPNNEKFDKLYIWGVHHPGTDSDQISLYAQASGRITVSTKRSQQTVIPNIGSRPRVRDVSSRISIYWTIVKPGDILLINSTGNLIAPRGYFKIRSGKSSIMRSDAPIGKCNSECITPNGSIPNDKPFQNVNRITYGACPRYVKQNTLKLATGMRNVPEKQTRGIFGAIAGFIENGWEGMVDGWYGFRHQNSEGTGQAADLKSTQAAINQINGKLNRLIGKTNEKFHQIEKEFSEVEGRIQDLEKYVEDTKIDLWSYNAELLVALENQHTIDLTDSEMNKLFERTKKQLRENAEDMGNGCFKIYHKCDNACIGSIRNGTYDHDVYRDEALNNRFQIKGVELESGYKDWILWISFAISCFLLCVALLGFIMWACQKGNIRCNICI

SEQ ID NO: 1811 - protein, 566 aa, synthetic construct; identical to SEQ ID NO: 73
  REGION 1..566: note = hemagglutinin__InfluenzaA__ABU92662

SEQ ID NO: 1812 - protein, 566 aa, synthetic construct; identical to SEQ ID NO: 1762
  REGION 1..566: note = hemagglutinin__InfluenzaA__ABU92663

SEQ ID NO: 1813 - protein, 566 aa, synthetic construct; identical to SEQ ID NO: 1762
  REGION 1..566: note = hemagglutinin__InfluenzaA__ABU92664

SEQ ID NO: 1814 - protein, 566 aa, synthetic construct
  REGION 1..566: note = hemagglutinin__InfluenzaA__ABU92665
MKTIIALSYILCLVFAQKLPGNDNSTATLCLGHHAVPNGTIVKTITNDQIEVTNATELVQSSSTGGICDSPHQILDGENCTLIDALLGDPQCDGFQNKKWDLFVERSKAYSNCYPYDVPDYASLRSLVASSGTLEFNNESFNWTGVTQNGTSSACKRRSNKSFFSRLNWLTHLKFKYPALNVTMPNNEKFDKLYIWGVHHPGTDNDQISLYAQASGRITVSTKRSQQTVIPNIGSRPRVRDVPSRISIYWTIVKPGDILLINSTGNLIAPRGYFKIRSGKSSIMRSDAPIGKCNSECITPNGSIPNDKPFQNVNRITYGACPRYVTQNTLKLATGMRNVPEKQTRGIFGAIAGFIENGWEGMVDGWYGFRHQNSEGTGQAADLKSTQAAINQINGKLNRLIGKTNEKFHQIEKEFSEVEGRIQDLEKYVEDTKIDLWSYNAELLVALENQHTIDLTDSEMNKLFERTKKQLRENAEDMGNGCFKIYHKCDNACIGSIRNGTYDHDVYRDEALNNRFQIKGVELKSGYKDWILWISFAISCFLLCVALLGFIMWACQKGNIRCNICI

SEQ ID NO: 1815 - protein, 566 aa, synthetic construct; identical to SEQ ID NO: 1762
  REGION 1..566: note = hemagglutinin__InfluenzaA__ABU92666

SEQ ID NO: 1816 - protein, 566 aa, synthetic construct; identical to SEQ ID NO: 72
  REGION 1..566: note = hemagglutinin__InfluenzaA__ABU92667

SEQ ID NO: 1817 - protein, 566 aa, synthetic construct; identical to SEQ ID NO: 72
  REGION 1..566: note = hemagglutinin__InfluenzaA__ABU92668

SEQ ID NO: 1818 - protein, 566 aa, synthetic construct
  REGION 1..566: note = hemagglutinin__InfluenzaA__ABU92669
MKTIIALSYILCLVFAQKLPVNDNSTATLCLGHHAVPNGTLVKTITNDHIEVTNATELVQSSSTGRICDSPHQILDGENCTLIDALLGDPHCDGFQNKEWDLFVERSTAYSNCYPYDVPDYASLRSLVASSGTLEFNNESFNWTGVAQNGTSSACKRRSIKSFFSRLNWLHQLKYKYPALNVTMPNNEKFDKLYIWGVHHPSTDSDQISLYAQASGRVTVSTKRSQQTVIPNIGSRPWVRGVSSRISIYWTIVKPGDILLINSTGNLIAPRGYFKIRNGKSSIMRSNAPIGKCNSECITPNGSIPNDKPFQNVNRITYGACPRYVKQNTLKLATGMRNVPEKQTRGIFGAIAGFIENGWEGMVDGWYGFRHQNSEGTGQAADLKSTQAAINQINGKLNRLIEKTNEKFHQIEKEFSEVEGRIQDLEKYVEDTKIDLWSYNAELLVALENQHTIDLTDSEMNKLFERTRKQLRENAEDMGNGCFKIYHKCDNACIGSIRNGTYDHDVYRDEALNNRFQIKGVELKSGYKDWILWISFAISCFLLCVVLLGFIMWACQKGNIRCNICI

SEQ ID NO: 1819 - protein, 566 aa, synthetic construct; identical to SEQ ID NO: 72
  REGION 1..566: note = hemagglutinin__InfluenzaA__ABU92670

SEQ ID NO: 1820 - protein, 566 aa, synthetic construct
  REGION 1..566: note = hemagglutinin__InfluenzaA__ABU92671
MKTIIALSHILCLVFAQKLPVNDNSTATLCLGHHAVPNGTLVKTITNDHIEVTNATELVQSSSTGRICDIPHQILDGENCTLIDALLGDPHCDGFQNKEWDLFVERSTAYSNCYPYDVPDYASLRSLVASSGTLEFNNESFNWTGVAQNGTSSACKRRSIKSFFSRLNWLHQLKYKYPALNVTMPNNEKFDKLYIWGVHHPSTDSDQISLYAQAPGRVTVSTKRSQQTVIPNIGSRPWVRGVSSRISIYWTIVKPGDILLINSTGNLIAPRGYFKIRSGKSSIMRSNAPIGKCNSECITPNGSIPNDKPFQNVNRITYGACPRYVKQNTLKLATGMRNVPEKQTRGIFGAIAGFIENGWEGMVDGWYGFRHQNSEGTGQAADLKSTQAAINQINGKLNRLIEKTNEKFHQIEKEFSEAEGRIQDLEKYVEDTKIDLWSYNAELLVALENQHTIDLTDSEMNKLFERTRKQLRENAEDMGNGCFKIYHKCDNACIGSIRNGTYDHDVYRDEALNNRFQIKGVELKSGYKDWILWISFAISCFLLCVVLLGFIMWACQKGNIRCNICI

SEQ ID NO: 1821 - protein, 566 aa, synthetic construct; identical to SEQ ID NO: 72
  REGION 1..566: note = hemagglutinin__InfluenzaA__ABU92672

SEQ ID NO: 1822 - protein, 566 aa, synthetic construct; identical to SEQ ID NO: 72
  REGION 1..566: note = hemagglutinin__InfluenzaA__ABU92673

SEQ ID NO: 1823 - protein, 566 aa, synthetic construct
  REGION 1..566: note = hemagglutinin__InfluenzaA__ABU92674
MKTIIALSYILCLVFAQKLPVNDNSTATLCLGHHAVPNGTLVKTITNDHIEVTNATELVQSSSTGRICDSPHQILDGENCTLIDALLGDPHCDGFQNKEWDLFVERRTAYSNCYPYDVPDYASLRSLVASSGTLEFNNESFNWTGVAQNGTSSACKRRSIKSFFSRLNWLHQLKYKYPALNVTMPNNEKFDKLYIWGVHHPSTDSDQISLYAQASGRVTVSTKRSQQTVIPNIGSRPWVRGVSSRISIYWTIVKPGDILLINSTGNLIAPRGYFKIRSGKSSIMRSNAPIGKCNSECITPNGSIPNDKPFQNVNRITYGACPRYVKQNTLKLATGMRNVPEKQTRGIFGAIAGFIENGWEGMVDGWYGFRHQNSEGTGQAADLKSTQAAINQINGKLNRLIEKTNEKFHQIEKEFSEVEGRIQDLEKYVEDTKIDLWSYNAELLVALENQHTIDLTDSEMNKLFERTRKQLRENAEDMGNGCFKIYHKCDNACIGSIRNGTYDHDVYRDEALNNRFQIKGVELKSGYKDWILWISFAISCFLLCVVLLGFIMWACQKGNIRCNICI

SEQ ID NO: 1824 - protein, 566 aa, synthetic construct
  REGION 1..566: note = hemagglutinin__InfluenzaA__ABU92675
MKTIIALSYILCLVFAQKLPGNDNSTATLCLGHHAVPNGTIVKTITNDQIEVTNATELVQSSSTGGICDSPHQILDGENCTLIDALLGDPQCDGFQNKKWDLFVERSKAYSNCYPYDVPDYASLRSLIASSGTLEFNNESFNWTGVTQNGTSSACKRRSNSSFFSRLNWLTHLKFKYPALNVTMPNNEEFDKLYIWGVHHPGTDNDQISLYAQASGRITVSTKRSQQTVIPNIGSRPRVRDIPSRISIYWTIVKPGDILLINSTGNLIAPRGYFKIRSGKSSIMRSDAPIGKCNSECITPNGSIPNDKPFQNVNRITYGACPRYVKQNTLKLATGMRNVPEKQTRGIFGAIAGFIENGWEGMVDGWYGFRHQNSEGIGQAADLKSTQAAIDQINGKLNRLIGKTNEKFHQIEKEFSEVEGRIQDLEKYVEDTKIDLWSYNAELLVALENQHTIDLTDSEMNKLFERTKKQLRENAEDMGNGCFKIYHKCDNACMGSIRNGTYDHDVYRDEALNNRFQIKGVELKSGYKDWILWISFAISCFLLCVALLGFIMWACQKGNIRCNICI

SEQ ID NO: 1825 - protein, 566 aa, synthetic construct; identical to SEQ ID NO: 633
  REGION 1..566: note = hemagglutinin__InfluenzaA__ABU92676

SEQ ID NO: 1826 - protein, 566 aa, synthetic construct; identical to SEQ ID NO: 1753
  REGION 1..566: note = hemagglutinin__InfluenzaA__ABU92677

SEQ ID NO: 1827 - protein, 566 aa, synthetic construct
  REGION 1..566: note = hemagglutinin__InfluenzaA__ABU92678
MKTIIALSYILCLVFAQKLPGNDNSTATLCLGHHAVPNGTIVKTITNDQIEVTNATELVQSSSTGGICDSPHQILDGENCTLIDALLGDPQCDGLQNKKWDLFVERSKAYSNCYPYDVPDYASLRSLIASSGTLEFNNESFNWTGVTQNGTSSACKRRSNNSFFSRLNWLTHLKFKYPALNVTMPNNEEFDKLYIWGVHHPGTDNDQISLYAQASGRITVSTKRSQQTVIPNIGSRPRVRDIPSRISIYWTIVKPGDILLINSTGNLIAPRGYFKIRSGKSSIMRSDAPIGNCNSECITPNGSIPNDKPFQNVNRITYGACPRYVKQNTLKLATGMRNVPEKQTRGIFGAIAGFIENGWEGMVDGWYGFRHQNSEGIGQAADLKSTQAAIDQINGKLNRLIGKTNEKFHQIEKEFSEVEGRIQDLEKYVEDTKIDLWSYNAELLVALENQHTIDLTDSEMNKLFERTKKQLRENAEDMGNGCFKIYHKCDNACIGSIRNGTYDHDVYRDEALNNRFQIKGVELKSGYKDWILWISFAISCFLLCVALLGFIMWACQKGNIRCNICI

SEQ ID NO: 1828 - protein, 566 aa, synthetic construct
  REGION 1..566: note = hemagglutinin__InfluenzaA__ABU92680
MKTIIALSYILCLVFAQKLPGNDNSTATLCLGHHAVPNGTIVKTITNDQIEVTNATELVQSSSTGGICDSPHQILDGENCTLIDALLGDPQCDGFQNKKWDLFVERSKAYSNCYPYDVPDYASLRSLVASSGTLEFNNESFNWTGVTQNGTSSACKRRSNNSFFSRLNWLTHLKFKYPALNVTMPNNEKFDKLYIWGVHHPGTDNDQIFLYAQASGRITVSTKRSQQTVIPNIGSRPRVRNIPSRISIYWTIVKPGDILLINSTGNLIAPRGYFKIRSGKSSIMRSDAPIGKCNSECITPNGSIPNDKPFQNVNRITYGACPRYVKQNTLKLATGMRNVPEKQTRGIFGAIAGFIENGWEGMVDGWYGFRHQNSEGIGQAADLKSTQAAIDQINGKLNRLIGKTNEKFHQIEKEFSEVEGRIQDLEKYVEDTKIDLWSYNAELLVALENQHTIDLTDSEMNKLFEKTKKQLRENAEDMGNGCFKIYHKCDNACIGSIRNGTYDHDVYRDEALNNRFQIKGVELKSGYKDWILWISFAISCFLLCVALLGFIMWACQKGNIRCNICI

SEQ ID NO: 1829 - protein, 566 aa, synthetic construct; identical to SEQ ID NO: 1757
  REGION 1..566: note = hemagglutinin__InfluenzaA__ABU92681

SEQ ID NO: 1830 - protein, 566 aa, synthetic construct; identical to SEQ ID NO: 73
  REGION 1..566: note = hemagglutinin__InfluenzaA__ABU92682

SEQ ID NO: 1831 - protein, 566 aa, synthetic construct; identical to SEQ ID NO: 1762
  REGION 1..566: note = hemagglutinin__InfluenzaA__ABU92683

SEQ ID NO: 1832 - protein, 566 aa, synthetic construct
  REGION 1..566: note = hemagglutinin__InfluenzaA__ABU92684
MKTIIALSYILCLVFAQKLPGNDNSTATLCLGHHAVPNGTIVKTITNDQIEVTNATELVQISSTGGICDSPHQILDGENCTLIDALLGDPQCDGFQNKKWDLFIERSKAYSNCYPYDVPDYASLRSLVASSGTLEFNNESFDWTGVTQNGTSSACKRRSNKSFFSRLNWLTHLKYKYPALNVTMPNNEKFDKLYIWGVHHPGTDSDQISLYAQAPGRITVSTKRSQQTVIPNIGSRPRVRDVSSRISIYWTIVKPGDILLINSTGNLIAPRGYFKIRSGKSSIMRSDAPIGKCNSECITPNGSIPNDKPFQNVNRITYGACPRYVKQNTLKLATGMRNVPEKQTRGIFGAIAGFIENGWEGMVDGWYGFRHQNSEGTGQAADLKSTQAAINQINGKLNRLIGKTNEKFHQIEKEFSEVEGRIQDLEKYVEDTKIDLWSYNAELLVALENQHTIDLTDSEMNKLFERTKKQLRENAEDMGNGCFKIYHKCDNACIGSIRNGTYDHDVYRDEALNNRFQIKGVELKSGYKDWILWISFAISCFLLCVALLGFIMWACQKGNIRCNICI

SEQ ID NO: 1833 - protein, 566 aa, synthetic construct
  REGION 1..566: note = hemagglutinin__InfluenzaA__ABU92685
MKTIIALSYILCLVFAQKLPGNDNSTATLCLGHHAVPNGTIVKTITNDQIEVTNATELVQISSTGGICDSPHQILDGENCTLIDALLGDPQCDGFQNKKWDLFVERSKAYSNCYPYDVPDYASLRSLVASSGTLEFNNESFDWTGVTQNGTSSACKRRSNKSFFSRLNWLTHLKYKYPALNVTMPNNEKFDKLYIWGVHHPGTDSDQISLYAQASGRITVSTKRSQQTVIPNIGSRPRVRDVSSRISIYWTIVKPGDILLINSTGNLIAPRGYFKIRSGKSSIMKSDAPIGKCNSECITPNGSIPNDKPFQNVNRITYGACPRYVKQNTLKLATGMRNVPEKQTRGIFGAIAGFIENGWEGMVDGWYGFRHQNSEGTGQAADLKSTQAAINQINGKLNRLIGKTNEKFHQIEKEFSEVEGRIQDLEKYVEDTKIDLWSYNAELLVALENQHTIDLTDSEMNKLFERTKKQLRENAEDMGNGCFKIYHKCDNACIGSIRNGTYDHDVYRDEALNNRFQIKGVELKSGYKDWILWISFAISCFLLCVALLGFIMWACQKGNIRCNICI

SEQ ID NO: 1834 - protein, 566 aa, synthetic construct; identical to SEQ ID NO: 1762
  REGION 1..566: note = hemagglutinin__InfluenzaA__ABU92686

SEQ ID NO: 1835 - protein, 566 aa, synthetic construct; identical to SEQ ID NO: 1762
  REGION 1..566: note = hemagglutinin__InfluenzaA__ABU92687

SEQ ID NO: 1836 - protein, 566 aa, synthetic construct; identical to SEQ ID NO: 1795
  REGION 1..566: note = hemagglutinin__InfluenzaA__ABU92688

SEQ ID NO: 1837 - protein, 566 aa, synthetic construct; identical to SEQ ID NO: 1762
  REGION 1..566: note = hemagglutinin__InfluenzaA__ABU92689

SEQ ID NO: 1838 - protein, 566 aa, synthetic construct
  REGION 1..566: note = hemagglutinin__InfluenzaA__ABU92691
MKTIIALSYILCLVFAQKLPGNDNSTATLCLGHHAVPNGTIVKTITNDQIEVTNATELVQISSTGGICDSPHQILDGENCTLIDALLGDPQCDGFQNKKWDLFVERSKAYSNCYPYDVPDYASLRSLVASSGTLEFNNESFDWTGVTQNGTSSACKRRSNKSFFSRLNWLTHLKYKYPALNVTMPNNEKFDKLYIWGVHHPGTDSDQISLYAQASGRITVSTKRSQQTVIPNIGSRPRVRDVSSRISIYWTIVKPGDILLINSTGNLIAPRGYFKIRSGKSSVMRSDAPIGKCNSECITPNGSIPNDKPFQNVNRITYGACPRYVKQNTLKLATGMRNVPEKQTRGIFGAIAGFIENGWEGMVDGWYGFRHQNSEGTGQAADLKSTQAAINQINGKLNRLIGKTNEKFHQIEKEFSEVEGRIQDLEKYVEDTKIDLWSYNAELLVALENQHTIDLTDSEMNKLFERTKKQLRENAEDIGNGCFKIYHKCDNACIGSIRNGTYDHNVYRDEALNNRFQIKGVELKSGYKDWILWISFAISCFLLCVALLGFIMWACQKGNIRCNICI

SEQ ID NO: 1839 - protein, 566 aa, synthetic construct; identical to SEQ ID NO: 690
  REGION 1..566: note = hemagglutinin__InfluenzaA__ABU92692

SEQ ID NO: 1840 - protein, 566 aa, synthetic construct
  REGION 1..566: note = hemagglutinin__InfluenzaA__ABU92693
MKAIIALSYILCLVFAQKLPGNDNSTATLCLGHHAVPNGTIVKTITNDQIEVTNATELVQISSTGEICDSPHQILDGENCTLIDALLGDPQCDGFQNKKWDLFVERSKAYSNCYPYDVPDYASLRSLVASSGTLEFNNESFDWTGVTQNGTSSACKRRSDKSFFSRLNWLTHLKYKYPALNVTMPNNEKFDKLYIWGVHHPGTDSDQISLYAQASGRITVSTKRSQQTVIPNIGSRPRVRDVSSRISIYWTIVKPGDILLINSTGNLIAPRGYFKIRSGKSSIMRSDAPIGKCNSECITPNGSIPNDKPFQNVNRITYGACPRYVKQNTLKLATGMRNVPEKQTRGIFGAIAGFIENGWEGMVDGWYGFRHQNSEGTGQAADLKSTQAAINQINGKLNRLIGKTNEKFHQIEKEFSEVEGRIQDLEKYVEDTKIDLWSYNAELLVALENQHTIDLTDSEMNKLFERTKKQLRENAEDMGNGCFKIYHKCDNACIGSIRNGTYDHDVYRDEALNNRFQIKGVELKSGYKDWILWISFAISCFLLCVALLGFIMWACQKGNIRCNICI

SEQ ID NO: 1841 - protein, 566 aa, synthetic construct
  REGION 1..566: note = hemagglutinin__InfluenzaA__ABU92694
MKTIIALSYILCLVFAQKLPGNDNSTATLCLGHHAVPNGTIVKTITNDQIEVTNATELVQSSSTGGICDSPHQILDGENCTLIDALLGDPQCDGFQNKKWDLFVERSKAYSNCYPYDVPDYASLRSLVASSGTLEFNNESFNWTGVTQNGTSSACKRRSNNSFFSRLNWLTHLKFKYPALNVTMPNNEKFDKLYIWGVHHPGTDNDQISLYAQASGRITVSTKRSQQTVIPNIGSRPRVRDIPSRISIYWTIVKPGDILLINSTGNLIAPRGYFKIRSGKSSIMRSDAPIGKCNSECITPNGSIPNDKPFQNVNRITYGACPRYVKQNTLKLATGMRNVPEKQTRGIFGAIAGFIENGWEGMVDGWYGFRHQNSEGIGQAADLKSTQAAINQINGKLNRLIGKTNEKFHQIEKEFSEVEGRIQDLEKYVEDTKVDLWSYNAELLVALENQHTIDLTDSEMNKLFERTKKQLRENAEDMGNGCFKIYHKCDNACIGSIRNGTYDHDVYRDEALNNRFQIKGVELKSGYKDWILWISFAISCFLLCVALLGFIMWACQKGNIRCNICI

SEQ ID NO: 1842 - protein, 566 aa, synthetic construct; identical to SEQ ID NO: 1753
  REGION 1..566: note = hemagglutinin__InfluenzaA__ABU92695

SEQ ID NO: 1843 - protein, 566 aa, synthetic construct
  REGION 1..566: note = hemagglutinin__InfluenzaA__ABU92696
MKTIIALGYILCLVFAQKLPGNDNSTATLCLGHHAVPNGTIVKTITNDQIEVTNATELVQSSSTGGICDSPHQILDGENCTLIDALLGDPQCDGFQNKKWDLFVERSKAYSNCYPYDVPDYASLRSLIASSGTLEFNNESFNWTGVTQNGTSSACKRRSNSSFFSRLNWLTHLKFKYPALNVTMPNNEEFDKLYIWGVHHPGTDNDQISLYAQASGRITVSTKRSQQTVIPNIGSRPRVRDIPSRISIYWTIVKPGDILLINSTGNLIAPRGYFKIRSGKSSIMRSDAPIGKCNSECITPNGSIPNDKPFQNVNRITYGACPRYVKQNTLKLATGMRNVPEKQTRGIFGAIAGFIENGWEGMVDGWYGFRHQNSEGIGQAADLKSTQAAIDQINGKLNRLIGKTNEKFHQIEKEFSEVEGRIQDLEKYVEDTKIDLWSYNAELLVALENQHTIDLTDSEMNKLFERTKKQLRENAEDMGNGCFKIYHKCDNACIGSIRNGTYDHDVYRDEALNNRFQIKGVELKSGYKDWILWISFAISCFLLCVALLGFIMWACQKGNIRCNICI

SEQ ID NO: 1844 - protein, 566 aa, synthetic construct; identical to SEQ ID NO: 633
  REGION 1..566: note = hemagglutinin__InfluenzaA__ABU92697

SEQ ID NO: 1845 - protein, 566 aa, synthetic construct; identical to SEQ ID NO: 243
  REGION 1..566: note = hemagglutinin__InfluenzaA__ABU92698

SEQ ID NO: 1846 - protein, 566 aa, synthetic construct
  REGION 1..566: note = hemagglutinin__InfluenzaA__ABU92699
MKTIIALSYILCLVFAQKLPGNDNSTATLCLGHHAVPNGTIVKTITNDQIEVTNATELVQSSSTGGICDSPHQILDGENCTLIDALLGDPQCDGFQNKKWDLFVERSKAYSNCYPYDVPDYASLRSLVASSGTLEFNNESFNWAGVTQNGTSSACKRRSNNSFFSRLNWLTHLKFKYPALNVTMPNNEKFDKLYIWGVHHPGTDNDQIFLYAQASGRITVSTKRSQQTVIPNIGSRPRVRNIPSRISIYWTIVKPGDILLINSTGNLIAPRGYFKIRSGKSSIMRSDAPIGKCNSECITPNGSIPNDKPFQNVNRITYGACPRYVKQNTLKLATGMRNVPEKQTRGIFGAIAGFIENGWEGMVDGWYGFRHQNSEGIGQAADLKSTQAAIDQINGKLNRLIGKTNEKFHQIEKEFSEVEGRIQDLEKYVEDTKIDLWSYNAELLVALENQHTIDLTDSEMNKLFEKTKKQLRENAEDMGNGCFKIYHKCDNACIGSIRNGTYDHDVYRDEALNNRFQIKGVELKSGYKDWILWISFAISCFLLCVALLGFIMWACQKGNIRCNICI

SEQ ID NO: 1847 - protein, 566 aa, synthetic construct
  REGION 1..566: note = hemagglutinin__InfluenzaA__ABU92700
MKTIIALSYILCLVFAQKLPENDNSTATLCLGHHAVPNGTIVKTITNDQIEVTNATELVQSSSTGGICDSPHQILDGENCTLIDALLGDPQCDGFQNKKWDLFVERSKAYSNCYPYDVPDYASLRSLVASSGTLEFNNESFNWTGVTQNGTSSACKRRSNNSFFSRLNWLTHLKFKYPALNVTMPNNERFDKLYIWGVHHPGTDNDQIFLYAQASGRITVSTKRSQQTVIPNIGSRPRVRNIPSRISIYWTIVKPGDILLINSTGNLIAPRGYFKIRSGKSSIMRSDAPIGKCNSECITPNGSIPNDKPFQNVNRITYGACPRYVKQNTLKLATGMRNVPEKQTRGIFGAIAGFIENGWEGMVDGWYGFRHQNSEGIGQAADLKSTQAAIDQINGKLNRLIGKTNEKFHQIEKEFSEVEGRIQDLEKYVEDTKIDLWSYNAELLVALENQHTIDLTDSEMNKLFEKTKKQLRENAEDMGNGCFKIYHKCDNACIGSIRNGTYDHDVYRDEALNNRFQIKGVELKSGYKDWILWISFAISCFLLCVALLGFIMWACQKGNIRCNICI

SEQ ID NO: 1848 - protein, 566 aa, synthetic construct
  REGION 1..566: note = hemagglutinin__InfluenzaA__ABU92701
MKTIIALSYILCLVFAQKLPENDNSTATLCLGHHAVPNGTIVKTITNDQIEVTNATELVQSSSTGGICDSPHQILDGENCTLIDALLGDPQCDGFQNKKWDLFVERSKAYSNCYPYDVPDYASLRSLVASSGTLEFNNESFNWTGVTQNGTSSACKRRSNNSFFSRLNWLTHLKFKYPALNVTMPNNERFDKLYIWGVHHPGTDNDQIFLYAQASGRITVSTKRSQQTVIPNIGSRPRVRNIPSRISIYWTIVKPGDILLINSTGNLIAPRGYFKIRSGKSSIMRSDAPIGKCNSECITPNGSIPNDKPFQNVNRITYGACPRYVKQNTLKLATGMRNVPEKQTRGIFGAIAGFIENGWEGMVDGWYGFRHQNSEGIGQAADLKSTQAAIDQINGKLNRLIGKTNEKFHQIEKEFSEVEGRIQDLEKYVEDTKIDLWSYNAELLVALENQHTIDLTDSEMNKLFEKTKKQLRENAEDMGNGCFKIYHKCDNACIGSIRNGTYDHDVYRDEALNNRLQIKGVELKSGYKDWILWISFAISCFLLCVALLGFIMWACQKGNIRCNICI

SEQ ID NO: 1849 - protein, 566 aa, synthetic construct; identical to SEQ ID NO: 612
  REGION 1..566: note = hemagglutinin__InfluenzaA__ABU92702

SEQ ID NO: 1850 - protein, 566 aa, synthetic construct; identical to SEQ ID NO: 1828
  REGION 1..566: note = hemagglutinin__InfluenzaA__ABU92703

SEQ ID NO: 1851 - protein, 566 aa, synthetic construct
  REGION 1..566: note = hemagglutinin__InfluenzaA__ABU92704
MKTIIALSYILCLVFAQKLPGNDNSTATLCLGHHAVPNGTIVKTITNDQIEVTNATELVQSSSTGGICDSPHQILDGENCTLIDALLGDPQCDGFQNKKWDLFVERNKAYSNCYPYDVPDYASLRSLVASSGTLEFNNESFNWTGVTQNGTSSACKRRSNNSFFSRLNWLTHLKFKYPALNVTMPNNEKFDKLYIWGVHHPGTDNDQIFLYAQASGRITVSTKRSQQTVIPNIGSRPRVRNIPSRISIYWTIVKPGDILLINSTGNLIAPRGYFKIRSGKSSIMRSDAPIGKCNSECITPNGSIPNDKPFQNVNRITYGACPRYVKQNTLKLATGMRNVPEKQTRGIFGAIAGFIENGWEGMVDGWYGFRHQNSEGIGQAADLKSTQAAIDQINGKLNRLIGKTNEKFHQIEKEFSEVEGRIQDLEKYVEDTKIDLWSYNAELLVALENQHTIDLTDSEMNKLFEKTKKQLRENAEDMGNGCFKIYHKCDNACIGSIRNGTYDHDVYRDEALNNRFQIKGVELKSGYKDWILWISFAISCFLLCVALLGFIMWACQKGNIRCNICI

SEQ ID NO: 1852 - protein, 566 aa, synthetic construct
  REGION 1..566: note = hemagglutinin__InfluenzaA__ABU92705
MKTIIALSYILCLVFAQKLPGNDNSTATLCLGHHAVPNGTIVKTITNDQIEVTNATELVQSSSTGGICDSPHQILDGENCTLIDALLGDPQCDGFQNKKWDLFVERSKAYSNCYPYDVPDYASLRSLIASSGTLEFNNESFNWTGVTQNGTSSACKRRSNNSFFSRLNWLTHLKFKYPALNVTMPNNEEFDKLYIWGVHHPGTDNDQISLYAQAPGRITVSTKRSQQTVIPNIGSRPRVRDIPSRISIYWTIVKPGDILLINSTGNLIAPRGYFKIRSGKSSIMRSDAPIGKCKSECITPNGSIPNDKPFQNVNRITYGACPRYVKQNTLKLATGMRNVPEKQTRGIFGAIAGFIENGWEGMVDGWYGFRHQNSEGIGQAADLKSTQAAIDQINGKLNRLIGKTNEKFHQIEKEFSEVEGRIQDLEKYVEDTKIDLWSYNAELLVALENQHTIDLTDSEMNKLFERTKKQLRENAEDMGNGCFKIYHKCDNACIGSIRNGTYDHDVYRDEALNNRFRIKSVELKSGYKDWILWISFAISCFLLCVALLGFIMWACQKGNIRCNICI

SEQ ID NO: 1853 - protein, 566 aa, synthetic construct; identical to SEQ ID NO: 73
  REGION 1..566: note = hemagglutinin__InfluenzaA__ABU92706

SEQ ID NO: 1854 - protein, 566 aa, synthetic construct; identical to SEQ ID NO: 1762
  REGION 1..566: note = hemagglutinin__InfluenzaA__ABU92707

SEQ ID NO: 1855 - protein, 566 aa, synthetic construct; identical to SEQ ID NO: 1762
  REGION 1..566: note = hemagglutinin__InfluenzaA__ABU92708

SEQ ID NO: 1856 - protein, 566 aa, synthetic construct
  REGION 1..566: note = hemagglutinin__InfluenzaA__ABU92709
MKTIIALSYILCLVFAQKLPGNDNSTATLCLGHHAVPNGTIVKTITNDQIEVTNATELVQSSSTGGICDSPHQILDGENCTLIDALLGDPQCDGFQNKKWDLFVERSKAYSNCYPYDVPDYASLRSLVASSGTLEFNNESFNWAGVTQNGTSSACKRRSNKSFFSRLNWLTHLKYKYPALNVTMPNNEKFDKLYIWGVHHPGTDSDQISLYAQASGRITVSTKRSQQTVIPNIGSRPRVRDVSSRISIYWTIVKPGDILLINSTGNLIAPRGYFKIRSGKSSIMRSDAPIGKCNSECITPNGSIPNDKPFQNVNRITYGACPRYVKQNTLKLATGMRNVPEKQTRGIFGAIAGFIENGWEGMVDGWYGFRHQNSEGTGQAADLKSTQAAINQINGKLNRLIGKTNEKFHQIEKEFSEVEGRIQDLEKYVEDTKIDLWSYNAELLVALENQHTIDLTDSEMNKLFERTKKQLRENAEDMGNGCFKIYHKCDNACIESIRNGTYDHDVYRDEALNNRFQIKGVELKSGYKDWILWISFAISCFLLCVALLGFIMWACQKGNIRCNICI

SEQ ID NO: 1857 - protein, 566 aa, synthetic construct; identical to SEQ ID NO: 51
  REGION 1..566: note = hemagglutinin__InfluenzaA__ABU92710

SEQ ID NO: 1858 - protein, 566 aa, synthetic construct; identical to SEQ ID NO: 73
  REGION 1..566: note = hemagglutinin__InfluenzaA__ABU92711

SEQ ID NO: 1859 - protein, 566 aa, synthetic construct; identical to SEQ ID NO: 73
  REGION 1..566: note = hemagglutinin__InfluenzaA__ABU92712

SEQ ID NO: 1860 - protein, 566 aa, synthetic construct; identical to SEQ ID NO: 1762
  REGION 1..566: note = hemagglutinin__InfluenzaA__ABU92713

SEQ ID NO: 1861 - protein, 566 aa, synthetic construct; identical to SEQ ID NO: 1762
  REGION 1..566: note = hemagglutinin__InfluenzaA__ABU92714

SEQ ID NO: 1862 - protein, 566 aa, synthetic construct
  REGION 1..566: note = hemagglutinin__InfluenzaA__ABU92715
MKTIIALSYILCLVFAQKLPGNDNSTATLCLGHHAVPNGTIVKTITNDQIEVTNATELVQISSTGEICDSPHQILDGENCTLIDALLGDPQCDGFQNKKWDLFVERSKAYSNCYPYDVPDYASLRSLVASSGTLEFNNESFDWTGVTQNGTSSACKRRSNKSFFSRLNWLTHLKYKYPALNVTMPNNEKFEKLYIWGVHHPGTDSDQINLYAQASGRITVSTKRSQQTVIPNIGSRPRVRDVSSRISIYWTIVKPGDILLINSTGNLIAPRGYFKIRSGKSSIMRSDAPIGKCNSECITPNGSIPNDKPFQNVNRITYGACPRYVKQNTLKLATGMRNVPEKQTRGIFGAIAGFIENGWEGMVDGWYGFRHQNSEGTGQAADLKSTQAAINQINGKLNRLIGKTNEKFHQIEKEFSEVEGRIQDLEKYVEDTKIDLWSYNAELLVALENQHTIDLTDSEMNKLFERTKKQLRENAEDMGNGCFKIYHKCDNACIGSIRNGTYDHDVYRDEALNNRFQIKGVELKSGYKDWILWISFAISCFLLCVALLGFIMWACQKGNIRCNICI

SEQ ID NO: 1863 - protein, 566 aa, synthetic construct; identical to SEQ ID NO: 1762
  REGION 1..566: note = hemagglutinin__InfluenzaA__ABU92716

SEQ ID NO: 1864 - protein, 566 aa, synthetic construct; identical to SEQ ID NO: 1762
  REGION 1..566: note = hemagglutinin__InfluenzaA__ABU92717

SEQ ID NO: 1865 - protein, 566 aa, synthetic construct; identical to SEQ ID NO: 73
  REGION 1..566: note = hemagglutinin__InfluenzaA__ABU92718

SEQ ID NO: 1866 - protein, 566 aa, synthetic construct; identical to SEQ ID NO: 73
  REGION 1..566: note = hemagglutinin__InfluenzaA__ABU92719

SEQ ID NO: 1867 - protein, 566 aa, synthetic construct
  REGION 1..566: note = hemagglutinin__InfluenzaA__ABU92720
MKTIIALSYILCLVFAQKLPGNDNSTATLCLGHHAVPNGTIVKTITNDQIEVTNATELVQISSTGEICDSPHQILDGENCTLIDALLGDPQCDGFQNKKWDLFVERSKAYSNCYPYDVPDYSSLRSLVASSGTLEFNNESFDWTGVTQNGTSSACKRRSDKSFFSRLNWLTHLKYKYPALNVTMPNNEKFDKLYIWGVHHPGTDSDQISLYAQASGRITVSTKRSQQTVIPNIGSRPRVRDVSSRISIYWTIVKPGDILLINSTGNLIAPRGYFKIRSGKSSIMRSDAPIGKCNSECITPNGSIPNDKPFQNVNRITYGACPRYVKQNTLKLATGMRNVPEKQTRGIFGAIAGFIENGWEGMVDGWYGFRHQNSEGTGQAADLKSTQAAINQINGKLNRLIGKTNEKFHQIEKEFSEVEGRIQDLEKYVEDTKIDLWSYNAELLVALENQHTIDLTDSEMNKLFERTKKQLRENAEDMGNGCFKIYHKCDNACIGSIRNGTYDHDVYRDEALNNRFQIKGVELKSGYKDWILWISFAISCFLLCVALLGFIMWACQKGNIRCNICI

SEQ ID NO: 1868 - protein, 566 aa, synthetic construct
  REGION 1..566: note = hemagglutinin__InfluenzaA__ABU92721
MKTIIALSYILCLVFAQKLPGNDNSTATLCLGHHAVPNGTIVKTITNDQIEVTNATELVQISSTGEICDSPHQILDGENCTLIDALLGDPQCDGFQNKKWDLFVERSKAYSNCYPYDVPDYASLRSLVASSGTLEFNNESFDWTGVTQNGTSSACKRRSDKSFFSRLNWLTHLKYKYPALNVTMPNNEKFDKLYIWGVHHPGTDSDQISLYAQASGRITVSTKRSQQTVTPNIGSRPRVRDVSSRISIYWTIVKPGDILLINSTGNLIAPRGYFKIRSGKSSIMRSDAPIGKCNSECITPNGSIPNDKPFQNVNRITYGACPRYVKQNTLKLATGMRNVPEKQTRGIFGAIAGFIENGWEGMVDGWYGFRHQNSEGTGQAADLKSTQAAINQINGKLNRLIGKTNEKFHQIEKEFSEVEGRIQDLEKYVEDTKIDLWSYNAELLVALENQHTIDLTDSEMNKLFERTKKQLRENAEDMGNGCFKIYHKCDNACIGSIRNGTYDHDVYRDEALNNRFQIKGVELKSGYKDWILWISFAISCFLLCVALLGFIMWACQKGNIRCNICI

SEQ ID NO: 1869 - protein, 566 aa, synthetic construct; identical to SEQ ID NO: 1753
  REGION 1..566: note = hemagglutinin__InfluenzaA__ABU92722

SEQ ID NO: 1870 - protein, 566 aa, synthetic construct; identical to SEQ ID NO: 73
  REGION 1..566: note = hemagglutinin__InfluenzaA__ABU92723

SEQ ID NO: 1871 - protein, 566 aa, synthetic construct; identical to SEQ ID NO: 1856
  REGION 1..566: note = hemagglutinin__InfluenzaA__ABU92724

SEQ ID NO: 1872 - protein, 566 aa, synthetic construct
  REGION 1..566: note = hemagglutinin__InfluenzaA__ABU92725
MKTIIALSYILCLVFAQKLPGNDNSTATLCLGHHAVPNGTIVKTITNDQIEVTNATELVQSSSTGGICDSPHQILDGENCTLIDALLGDPQCDGFQNKKWDLFVERSKAYSNCYPYDVPDYASLRSLVASSGTLEFNNESFNWTGVTQNGTSSACKRRSNKSFFSRLNWLTHLKYKYPALNVTMPNNEKFDKLYIWGVHHPGTDSDQINLYAQASGRITVSTKRSQQTVIPNIGSRPRVRDVPSRISIYWTIVKPGDLLLINSTGNLIAPRGYFKIRSGKSSIMRSDAPIGKCNSECITPNGSIPNDKPFQNVNRITYGACPRYVKQNTLKLATGMRNVPEKQTRGIFGAIAGFIENGWEGMVDGWYGFRHQNSEGTGQAADLKSTQAAINQINGKLNRLIGKTNEKFHQIEKEFSEVEGRIQDLEKYVEDTKIDLWSYNAELLVALENQHTIDLTDSEMNKLFERTKKQLRENAEDMGNGCFKIYHKCDNACIGSIRNGTYDHDVYRDEALNNRFQIKGVELKSGYKDWILWISFAISCFLLCVALLGFIMWACQKGNIRCNICI

SEQ ID NO: 1873 - protein, 566 aa, synthetic construct; identical to SEQ ID NO: 1856
  REGION 1..566: note = hemagglutinin__InfluenzaA__ABU92726

SEQ ID NO: 1874 - protein, 566 aa, synthetic construct
  REGION 1..566: note = hemagglutinin__InfluenzaA__ABU92727
MKTIIALSYILCLVFAQKLPGNDNSTATLCLGHHAVPNGTIVKTITNDQIEVTNATELVQSSSTGGICDSPHQILDGENCTLIDALLGDPQCDGFQNKKWDLFVERSKAYSNCYPYDVPDYASLRSLIASSGTLEFNNESFNWTGVTQNGTSSACKRRSNSSFFSRLNWLTHLKFKYPALNVTMPNNEDFDKLYIWGVHHPGTDNDQISLYAQASGRITVSTKRSQQTVIPNIGSRPRVRDIPSRISIYWTIVKPGDILLINSTGNLIAPRGYFKIRSGKSSIMRSDAPIGKCNSECITPNGSIPNDKPFQNVNRITYGACPRYVKQNTLKLATGMRNVPEKQTRGIFGAIAGFIENGWEGMVDGWYGFRHQNSEGIGQAADLKSTQAAIDQINGKLNRLIGKTNEKFHQIEKEFSEVEGRIQDLEKYVEDTKIDLWSYNAELLVALENQHTIDLTDSEMNKLFERTKKQLRENAEDMGNGCFKIYHKCDNACIGSIRNGTYDHDVYRDEALNNRFQIKGVELKSGYKDWILWISFAISCFLLCVALLGFIMWACQKGNIRCNICI

SEQ ID NO: 1875 - protein, 566 aa, synthetic construct
  REGION 1..566: note = hemagglutinin__InfluenzaA__ABU92728
MKTIIALSYILCQVFAQKLPGNDNSTATLCLGHHAVPNGTIVKTITNDQIEVTNATELVQISSTGEICDSPHQILDGENCTLIDALLGDPQCDGFQNKKWDLFVERSKAYSNCYPYDVPDYASLRSLVASSGTLEFNNESFDWTGVTQNGTSSACKRRSDKSFFSRLNWLTHLKYKYPALNVTMPNNEKFDKLYIWGVHHPGTDNDQISLYAQASGRITVSTKRSQQTVIPNIGSRPRVRDVSSRISIYWTIVKPGDILLINSTGNLIAPRGYFKIRSGKSSIMRSDAPIGKCNSECITPNGSIPNDKPFQNVNRITYGACPRYVKQNTLKLATGMRNVPEKQTRGIFGAIAGFIENGWEGMVDGWYGFRHQNSEGTGQAADLKSTQAAINQINGKLNRLIGKTNEKFHQIEKEFSEVEGRIQDLEKYVEDTKIDLWSYNAELLVALENQHTIDLTDSEMNKLFERTKKQLRENAEDMGNGCFKIYHKCDNACIGSIRNGTYDHDVYRDEALNNRFQIKGVELKSGYKDWILWISFAISCFLLCVALLGFIMWACQKGNIRCNICI

SEQ ID NO: 1876 - protein, 566 aa, synthetic construct; identical to SEQ ID NO: 1875
  REGION 1..566: note = hemagglutinin__InfluenzaA__ABU92729

SEQ ID NO: 1877 - protein, 566 aa, synthetic construct; identical to SEQ ID NO: 1753
  REGION 1..566: note = hemagglutinin__InfluenzaA__ABU92730

SEQ ID NO: 1878 - protein, 566 aa, synthetic construct
  REGION 1..566: note = hemagglutinin__InfluenzaA__ABU92731
MKTIIALSYILCLVFAQKLPGNDNSTATLCLGHHAVPNGTIVKTITNDQIEVTNATELVQSSSTGGICDSPHQILDGENCTLIDALLGDPQCDGFQNKKWDLFVERSKAYSNCYPYDVPDYASLRSLIASSGTLEFNNESFNWTGVTQNGTSSACKRRSNSSFFSRLNWLTHLKFKYPALNVTMPNNEEFDKLYVWGVHHPGTYNDQISLYAQASGRITVSTKRSQQTVIPNIGSRPRVRDIPSRISIYWTIVKPGDILLINSTGNLIAPRGYFKIRSGKSSIMRSDAPIGKCNSECITPNGSIPNDKPFQNVNRITYGACPRYVKQNTLKLATGMRNVPEKQTRGIFGAIAGFIENGWEGMVDGWYGFRHQNSEGIGQAADLKSTQAAIDQINGKLNRLIGKTNEKFHQIEKEFSEVEGRIQDLEKYVEDTKIDLWSYNAELLVALENQHTIDLTDSEMNKLFERTKKQLRENAEDMGNGCFKIYHKCDNACIGSIRNGTYDHDVYRDEALNNRFQIKGVELKSGYKDWILWISFAISCFLLCVALLGFIMWACQKGNIRCNICI

SEQ ID NO: 1879 - protein, 566 aa, synthetic construct
  REGION 1..566: note = hemagglutinin__InfluenzaA__ABU92732
MKTIIALSYILCLVFAQKLPGNDNSTATLCLGHHAVPNGTIVKTITNDQIEVTNATELVQSSSTGGICDSPHQILDGENCTLIDALLGDPQCDGFQNKKWDLFVERSKAYSNCYPYDVPDYASLRSLIASSGTLEFNNESFNWTGVTQNGTSSACKRRSNSSFFSRLNWLTHLKFKYPALNVTMPNNEEFDKLYIWGVHHPGTYNDQISLYAQASGRITVSTKRSQQTVIPNIGSRPRVRDIPSRISIYWTIVKPGDILLINSTGNLIAPRGYFKIRSGKSSIMRSDAPIGKCNSECITPNGSIPNDKPFQNVNRITYGACPRYVKQNTLKLATGMRNVPEKQTRGIFGAIAGFIENGWEGMVDGWYGFRHQNSEGIGQAADLKSTQAAIDQINGKLNRLIGKTNEKFHQIEKEFSEVEGRIQDLEKYVEDTKIDLWSYNAELLVALENQHTIDLTDSEMNKLFERTKKQLRENAEDMGNGCFKIYHKCDNACIGSIRNGTYDHDVYRDEALNNRFQIKGVELKSGYKDWILWISFAISCFLLCVVLLGFIMWACQKGNIRCNICI

SEQ ID NO: 1880 - protein, 566 aa, synthetic construct
  REGION 1..566: note = hemagglutinin__InfluenzaA__ABU92733
MKTIIALSYILCLVFAQKLPGNDNSTATLCLGHHAVPNGTIVKTITNDQIEVTNATELVQSSSTGGICDSPHQILDGENCTLIDALLGDPQCDGFQNKKWDLFIERSKAYSNCYPYDVPDYASLRSLVASSGTLEFNNESFNWTGVTQNGTSSACKRRSNNSFFSRLNWLTHLKFKYPALNVTMPNNEKFDKLYIWGVHHPGTDNDQISLYAQASGRITVSTKRSQQTVIPNIGSRPRVRDIPSRISIYWTIVKPGDILLINSTGNLIAPRGYFKIRSGKSSIMRSDAPIGKCNSECITPNGSIPNDKPFQNVNRITYGACPRYVKQNTLKLATGMRNVPEKQTRGIFGAIAGFIENGWEGMVDGWYGFRHQNSEGIGQAADLKSTQAAINQINGKLNRLIGKTNEKFHQIEKEFSEVEGRIQDLEKYVEDTKVDLWSYNAELLVALENQHTIDLTDSEMNKLFERTKKQLRENAEDMGNGCFKIYHKCDNACIGSIRNGTYNHDVYRDEALNNRFQIKGVELKSGYKDWILWISFAISCFLLCVALLGFIMWACQKGNIRCNICI

SEQ ID NO: 1881 - protein, 566 aa, synthetic construct; identical to SEQ ID NO: 1753
  REGION 1..566: note = hemagglutinin__InfluenzaA__ABU92734

SEQ ID NO: 1882 - protein, 566 aa, synthetic construct
  REGION 1..566: note = hemagglutinin__InfluenzaA__ABU92735
MKTIIALSYILCLVFAQKLPGNDNSTATLCLGHHAVPNGTIVKTITNDQIEVTNATELVQSSSTGGICGSPHQILDGENCTLIDALLGDPQCDGFQNKKWDLFVERSKAYSNCYPYDVPDYASLRSLVASSGTLEFNNESFNWTGVTQNGTSSACKRRSNNSFFSRLNWLTHLKFKYPALNVTMPNNEKFDKLYIWGVHHPGTDNDQISLYAQAPARITVSTKRSQQTVIPNIGSRPRVRDIPSRISIYWTIVKPGDILLINSTGNLIAPRGYFKILSGKSSIMRSDAPIGKCNSECITPNGSIPNDKPFQNVNRITYGACPRYVKQNTLKLATGMRNVPEKQTRGIFGAIAGFIENGWEGMVDGWYGFRHQNSEGIGQAADLKSTQAAINQINGKLNRLIGKTNEKFHQIEKEFSEVEGRIQDLEKYVEDTKIDLWSYNAELLVALENQHTIDLTDSEMNKLFERTKKQLRENAEDMGNGCFKIYHKCDNACIGSIRNGTYDHDVYRDEALNNRFQIKGVELKSGYKDWILWISFAMSCFLLCVALLGFIMWACQKGNIRCNICI

SEQ ID NO: 1883 - protein, 566 aa, synthetic construct; identical to SEQ ID NO: 1828
  REGION 1..566: note = hemagglutinin__InfluenzaA__ABU92737

SEQ ID NO: 1884 - protein, 566 aa, synthetic construct
  REGION 1..566: note = hemagglutinin__InfluenzaA__ABU92738
MKTIIALSYILCLVFAQKLPGNDNSTATLCLGHHAVPNGTIVKTITNDQIEVTNATELVQSSSTGGICDSPHQILDGENCTLIDALLGDPQCDGFQNKKWDLFVERSKAYSNCYPYDVPDYASLRSLIASSGTLEFNNESFNWTGVTQNGTSSACKRRSNNSFFSRLNWLTHLKFKYPALNVTMPNNEKFDKLYIWGVHHPGTDNDQISLYAQAPGRITVSTKRSQQTVIPNIGSRPRVRDIPSRISIYWTIVKPGDILLINSTGNLIAPRGYFKIRSGKSSIMRSDAPIGKCNSECITPNGSIPNDKPFQNVNRITYGACPRYVKQNTLKLATGMRNVPEKQTRGIFGAIAGFIENGWEGMVDGWYGFRHQNSEGIGQAADLKSTQAAIDQINGKLNRLIGKTNEKFHQIEKEFSEVEGRIQDLEKYVEDTKIDLWSYNAELLVALENQHTIDLTDSEMNKLFERTKKQLRENAEDMGNGCFKIYHKCDNACIGSIRNGTYDHDVYRDEALNNRFQIKGVELKSGYKDWILWISFAISCFLLCVVLLGFIMWACQKGNIRCNICI

SEQ ID NO: 1885 - protein, 566 aa, synthetic construct; identical to SEQ ID NO: 1762
  REGION 1..566: note = hemagglutinin__InfluenzaA__ABU92739

SEQ ID NO: 1886 - protein, 566 aa, synthetic construct
  REGION 1..566: note = hemagglutinin__InfluenzaA__ABU92740
MKTIIALSYILCLVFAQKLPGNDNSTATLCLGHHAVPNGTIVKTITNDQIEVTNATELVQSSSTGEICDSPHQILDGENCTLIDTLLGDPQCDGFQNKKWDLFVERSKAYSNCYPYDVPDYASLRSLVASSGTLEFNNESFNWTGVTQNGTSSACKRRSNNSFFSRLNWLTHLKFKYPALNVTMPNNEKFDKLYIWGVHHPGTDNDQIFLYAQASGRITVSTKRSQQTVIPNIGSRPRVRNIPSRISIYWTIVKPGDILLINSTGNLIAPRGYFKIRSGKSSIMRSDAPIGKCNSECITPNGSIPNDKPFQNVNRITYGACPRYVKQNTLKLATGMRNVPEKQTRGIFGAIAGFIENGWEGMVDGWYGFRHQNSEGIGQAADLKSTQAAINQINGKLNRLIGKTNEKFHQIEKEFSEVEGRIQDLEKYVEDTKIDLWSYNAELLVALENQHTIDLTDSEMNKLFERTKKQLRENAEDMGNGCFKIYHKCDNACIGSIRNGTYDHDVYRDEALNNRFQIKGVELKSGYKDWILWISFAISCFLLCVALLGFIMWACQKGNIRCNICI

SEQ ID NO: 1887 - protein, 566 aa, synthetic construct
  REGION 1..566: note = hemagglutinin__InfluenzaA__ABU92741
MKTIIALSYILCLVFAQKLPGNDNSTATLCLGHHAVPNGTIVKTITNDQIEVTNATELVQSSSTGGICDSPHQILDGENCTLIDALLGDPQCDGFQNKKWDLFVERSKAYSNCYPYDVPDYASLRSLIASSGTLEFNNESFNWTGVTQNGTSSACKRRSNNSFFSRLNWLTHLKFKYPALNVTMPNNEEFDKLYIWGVHHPGTDNDQISLYAQAPGRITVSTKRSQQTVIPNIGSRPRVRDIPSRISIYWTIVKPGDILLINSTGNLIAPRGYFKIRSGKSSIMRSDAPIGKCNSECITPNGSIPNDKPFQNVNRITYGACPRYVKQNTLKLATGMRNVPEKQTRGIFGAIAGFIENGWEGMVDGWYGFRHQNSEGIGQAADLKSTQAAIDQINGKLNRLIGKTNEKFHQIEKEFSEVEGRIQDLEKYVEDTKIDLWSYNAELLVALENQHTIDLTDSEMNKLFERTKKQLRENAEDMGNGCFKIYHKCDNACIGSIRNGTYDHDIYRDEALNNRFQIKGVELKSGYKDWILWISFAISCFLLCVVLLGFIMWACQKGNIRCNICI

SEQ ID NO: 1888 - protein, 566 aa, synthetic construct; identical to SEQ ID NO: 1828
  REGION 1..566: note = hemagglutinin__InfluenzaA__ABU92742

SEQ ID NO: 1889 - protein, 566 aa, synthetic construct
  REGION 1..566: note = hemagglutinin__InfluenzaA__ABU92743
MKTIIALSYILYLVFAQKLPENDNSTATLCLGHHAVPNGTIVKTITNDQIEVTNATELVQSSSTGGICDSPHQILDGENCTLIDALLGDPQCDGFQNKKWDLFVERSKAYSNCYPYDVPDYASLRSLVASSGTLEFNNESFNWTGVTQNGTSSACKRRSNNSFFSRLNWLTHLKFKYPALNVTMPNNEKFDKLYIWGVHHPGTDNDQIFLYAQASGRITVSTKRSQQTVIPNIGSRPRVRNIPSRISIYWTIVKPGDILLINSTGNLIAPRGYFKIRSGKSSIMRSDAPIGKCNSECITPNGSIPNDKPFQNVNRITYGACPRYVKQNTLKLATGMRNVPEKQTRGIFGAIAGFIENGWEGMVDGWYGFRHQNSEGIGQAADLKSTQAAIDQINGKLNRLIGKTNEKFHQIEKEFSEVEGRIQDLEKYVEDTKIDLWSYNAELLVALENQHTIDLTDSEMNKLFEKTKKQLRENAEDMGNGCFKIYHKCDNACIGSIRNGTYDHDVYRDEALNNRFQIKGVELKSGYKDWILWISFAISCFLLCVALLGFIMWACQKGNIRCNICI

SEQ ID NO: 1890 - protein, 566 aa, synthetic construct; identical to SEQ ID NO: 1828
  REGION 1..566: note = hemagglutinin__InfluenzaA__ABU92744

SEQ ID NO: 1891 - protein, 566 aa, synthetic construct
  REGION 1..566: note = hemagglutinin__InfluenzaA__ABU92745
MKTIIALSYILCLVFAQKLPGNDNSTATLCLGHHAVPNGTIVKTITNDQIEVTNATELVQSSSTGGICDSPHQILDGENCTLIDALLGDPQCDGFQNKKWDLFVERSKAYSNCYPYDVPDYASLRSLIASSGTLEFNNESFNWTGVTQNGTSSACKRRSNNSFFSRLNWLTHLKFKYPALNVTMPNNEEFDKLYIWGVHHPGTDNDQISLYAQAPGRITVSTKRSQQTVIPNIGSRPRVRDIPSRISIYWTIVKPGDILLINSTGNLIAPRGYFKIRIGKSSIMRSDAPIGKCNSECITPNGSIPNDKPFQNVNRITYGACPRYVKQNTLKLATGMRNVPEKQTRGIFGAIAGFIENGWEGMVDGWYGFRHQNSEGIGQAADLKSTQAAIDQINGKLNRLIGKTNEKFHQIEKEFSEVEGRIQDLEKYVEDTKIDLWSYNAELLVALENQHTIDLTDSEMNKLFERTKKQLRENAEDMGNGCFKIYHKCDNACIGSIRNGTYDHDVYRDEALNNRFQIKGVELKSGYKDWILWISFAISCFLLCVVLLGFIMWACQKGNIRCNICI

SEQ ID NO: 1892 - protein, 566 aa, synthetic construct; identical to SEQ ID NO: 1828
  REGION 1..566: note = hemagglutinin__InfluenzaA__ABU92746

SEQ ID NO: 1893 - protein, 566 aa, synthetic construct; identical to SEQ ID NO: 73
  REGION 1..566: note = hemagglutinin__InfluenzaA__ABU92747

SEQ ID NO: 1894 - protein, 566 aa, synthetic construct
  REGION 1..566: note = hemagglutinin__InfluenzaA__ABU92748
MKTIIALSYILCLVFAQKLPGNDNSTATLCLGHHAVPNGTIVKTITNDQIEVTNATELVQSSSTGEICDSPHQILDGENCTLIDALLGDPQCDGFQNKKWDLFVERSKAYSNCYPYDVPDYASLRSLVASSGTLEFNNESFNWTGVTQNGTSSACKRRSNNSFFSRLNWLTHSKFKYPALNVTMPNNEKFDKLYIWGVHHPGTDNDQTFLYAQASGRITVSTKRSQQTVIPNIGSRPRVRNIPSRISIYWTIVKPGDILLINSTGNLIAPRGYFKIRSGKSSIMRSDAPIGKCNSECITPNGSIPNDKPFQNVNRITYGACPRYVKQNTLKLATGMRNVPEKQTRGIFGAIAGFIENGWEGMVDGWYGFRHQNSEGIGQAADLKSTQAAINQINGKLNRLIGKTNEKFHQIEKEFSEVEGRIQDLEKYVEDTKIDLWSYNAELLVALENQHTIDLTDSEMNKLFERTKKQLRENAEDMGNGCFKIYHKCDNACIGSIRNGTYDHDVYRDEALNNRFQIKGVELKSGYKDWILWISFAISCFLLCVVLLGFIMWACQKGNIRCNICI

SEQ ID NO: 1895 - protein, 566 aa, synthetic construct; identical to SEQ ID NO: 73
  REGION 1..566: note = hemagglutinin__InfluenzaA__ABU92749

SEQ ID NO: 1896 - protein, 566 aa, synthetic construct
  REGION 1..566: note = hemagglutinin__InfluenzaA__ABU92750
MKTIIALSYILCLVFAQKLPGNDNRTATLCLGHHAVPNGTIVKTITNDQIEVTNATELVQISSTGGICDSPHQILDGENCTLIDALLGDPQCDGFQNKKWDLFVERSKAYSNCYPYDVPDYASLRSLVASSGTLEFNNESFDWTGVTQNGTSSACKRRSNKSFFSRLNWLTHLKYKYPALNVTMPNNEKFDKLYIWGVHHPGTDSDQISLYAQASGRITVSTKRSQQTVIPNIGSRPRVRDVSSRISIYWTIVKPGDILLINSTGNLIAPRGYFKIRSGKSSIMRSDAPIGKCNSECITPNGSIPNDKPFQNVNRITYGACPRYVKQNTLKLATGMRNVPEKQTRGIFGAIAGFIENGWEGMVDGWYGFRHQNSEGTGQAADLKSTQAAINQINGKLNRLIGKTNEKFHQIEKEFSEVEGRIQDLEKYVEDTKIDLWSYNAELLVALENQHTIDLTDSEMNKLFERTKKQLRENAEDMGNGCFKIYHKCDNACIGSIRNGTYDHDVYRDEALNNRFQIKGVELKSGYKDWILWISFAISCFLLCVALLGFIMWACQKGNIRCNICI

SEQ ID NO: 1897 - protein, 566 aa, synthetic construct
  REGION 1..566: note = hemagglutinin__InfluenzaA__ABU92751
MKTIIALSYILCLVFAQKLPGNDNSTATLCLGHHAVPNGTIVKTITNDQIEVTNATELVQSSSTGGICDSPHQILDGENCTLIDALLGDPQCDGFQNKKWDLFVERSKAYSNCYPYDVPDYASLRSLVASSGTLEFNNESFNWTGVTQNGTSSACKRRSNKSFFSRLNWLTHLKYKYPALNVTMPNNEKFDKLYIWGVHHPGTDSDQISLYAQASGRITVSTKRSQQTVIPNIGSRPRVRDVSSRISIYWTIVKPGDILLINSTGNLIAPRGYFKIRSGKSSIMRSDAPIGKCNSECITPNGSIPNDKPFQNVNRITYGACPRYVKQNTLKLATGMRNVPEKQTRGIFGAIAGFIENGWEGMVDGWYGFRHQNSEGTGQAADLKSTQAAINQINGKLNRLIGKTNEKFHQIEKEFSEVEGRIQDLEKYVEDTKIDLWSYNAELLVALENQHTIDLTDSEMNKLFERTKKQLRENAEDMGNGCFKIYHKCDNACIGSIRNGTYDHDVYRDEALNNRFQIKGVELKSGYKDWILWISFAISCFLLCVALLGFIMWACQKGNIRCNICI

SEQ ID NO: 1898 - protein, 566 aa, synthetic construct; identical to SEQ ID NO: 1762
  REGION 1..566: note = hemagglutinin__InfluenzaA__ABU92752

SEQ ID NO: 1899 - protein, 566 aa, synthetic construct; identical to SEQ ID NO: 73
  REGION 1..566: note = hemagglutinin__InfluenzaA__ABU92753

SEQ ID NO: 1900 - protein, 566 aa, synthetic construct; identical to SEQ ID NO: 1762
  REGION 1..566: note = hemagglutinin__InfluenzaA__ABU92754

SEQ ID NO: 1901 - protein, 566 aa, synthetic construct
  REGION 1..566: note = hemagglutinin__InfluenzaA__ABU92755
MKTIIALSYILCLVFAQKLPGNDNGTATLCLGHHAVPNGTIVKTITNDQIEVTNATELVQSSSTGGICDSPHQILDGENCTLIDALLGDPQCDGFQNKKWDLFVERSKAYSNCYPYDVPDYASLRSLVASSGTLEFNNESFNWTGVTQNGTSSACKRRSNKSFFSRLNWLTHLKFKYPALNVTMPNNEKFDKLYIWGVHHPGTDNDQISLYAQASGRITVSTKRSQQTVIPNIGSRPRVRDVPSRISIYWTIVKPGDILLINSTGNLIAPRGYFKIRSGKSSIMRSDAPIGKCNSECITPNGSIPNDKPFQNVNRITYGACPRYVKQNTLKLATGMRNVPEKQTRGIFGAIAGFIENGWEGMVDGWYGFRHQNAEGTGQAADLKSTQAAINQINGKLNRLIGKTNEKFHQIEKEFSEVEGRIQDLEKYVEDTKIDLWSYNAELLVALENQHTIDLTDSEMNKLFERTKKQLRENAEDMGNGCFKIYHKCDNACIGSIRNGTYDHNVYRDEALNNRFQIKGVELKSGYKDWILWISFAISCFLLCVVLLGFIMWACQKGNIRCNICI

SEQ ID NO: 1902 - protein, 566 aa, synthetic construct
  REGION 1..566: note = hemagglutinin__InfluenzaA__ABU92756
MKTIIALSYILCLVFAQKLPGNDNSTATLCLGHHAVPNGTIVKTITNDQIEVTNATELVQISSTGGICDSPHQILDGENCTLIDALLGDPQCDGFQNKKWDLFVERSKAHSNCYPYDVPDYASLRSLVASSGTLEFNNESFDWTGVTQNGTSSACKRRSNKSFFSRLNWLTHLKYKYPALNVTMPNNEKFDKLYIWGVHHPGTDSDQISLYAQASGRITVSTKRSQQTVIPNIGSRPRVRDVSSRISIYWTIVKPGDILLINSTGNLIAPRGYFKIRSGKSSIMRSDAPIGKCNSECITPNGSIPNDKPFQNVNRITYGACPRYVKQNTLKLATGMRNVPEKQTRGIFGAIAGFIENGWEGMVDGWYGFRHQNSEGTGQAADLKSTQAAINQINGKLNRLIGKTNEKFHQIEKEFSEVEGRIQDLEKYVEDTKIDLWSYNAELLVALENQHTIDLTDSEMNKLFERTKKQLRENAEDMGNGCFKIYHKCDNACIGSIRNGTYDHDVYRDEALNNRFQIKGVELKSGYKDWILWISFAISCFLLCVALLGFIMWACQKGNIRCNICI

SEQ ID NO: 1903 - protein, 566 aa, synthetic construct
  REGION 1..566: note = hemagglutinin__InfluenzaA__ABU92757
MKTIIALSYILCLVFAQKLPGNDNSTATLCLGHHAVPNGTIVKTITNDQIEVTNATELVQISSTGEICDSPHQILDGENCTLIDALLGDPQCDGFQNKKWDLFVERSKAYSNCYPYDVPDYASLRSLVASSGTLEFNNESFDWTGVTQNGTSSACKRRSDKSFFSRLNWLTHLKYKYPALNVTMPNNEKFDKLYIWGVHHPGTDSDQISLYAQASGRITVSTKRSQQTVIPNIGSRPRVRDVSSRISIYWTIVKPGDILLINSTGNLIAPRGYFKIRRGKSSIMRSDAPIGKCNSECITPNGSIPNDKPFQNVNRITYGACPRYVKQNTLKLATGMRNVPEKQTRGIFGAIAGFIENGWEGMVDGWYGFRHQNSEGTGQAADLKSTQAAINQINGKLNRLIGKTNEKFHQIEKEFSEVEGRIQDLEKYVEDTKIDLWSYNAELLVALENQHTIDLTDSEMNKLFERTKKQLRENAEDMGNGCFKIYHKCDNACIGSIRNGTYDHDVYRDEALNNRFQIKGVELKSGYKDWILWISFAISCFLLCVALLGFIMWACQKGNIRCNICI

SEQ ID NO: 1904 - protein, 566 aa, synthetic construct; identical to SEQ ID NO: 1762
  REGION 1..566: note = hemagglutinin__InfluenzaA__ABU92758

SEQ ID NO: 1905 - protein, 566 aa, synthetic construct; identical to SEQ ID NO: 1762
  REGION 1..566: note = hemagglutinin__InfluenzaA__ABU92759

SEQ ID NO: 1906 - protein, 566 aa, synthetic construct
  REGION 1..566: note = hemagglutinin__InfluenzaA__ABU92760
MKTIIALSYILCLVFAQKLPGNDNSTATLCLGHHAVPNGTIVKTITNDQIEVTNATELVQISSTGEICNSPHQILDGENCTLIDALLGDPQCDGFQNKKWDLFVERSKAYSNCYPYDVPDYASLRSLVASSGTLEFNNESFDWTGVTQNGTSSACKRRSDKSFFSRLNWLTHLKYKYPALNVTMPNNEKFDKLYIWGVHHPGTDSDQISLYAQASGRITVSTKRSQQTVIPNIGSRPRVRDVSSRISIYWTIVKPGDILLINSTGNLIAPRGYFKIRSGKSSIMRSDAPIGKCNSECITPNGSIPNDKPFQNVNRITYGACPRYVKQNTLKLATGMRNVPEKQTRGIFGAIAGFIENGWEGMVDGWYGFRHQNSEGTGQAADLKSTQAAINQINGKLNRLIGKTNEKFHQIEKEFSEVEGRIQDLEKYVEDTKIDLWSYNAELLVALENQHTIDLTDSEMNKLFERTKKQLRENAEDMGNGCFKIYHKCDNACIGSIRNGTYDHDVYRDEALNNRFQIKGVELKSGYKDWILWISFAISCFLLCVALLGFIMWACQKGNIRCNICI

SEQ ID NO: 1907 - protein, 565 aa, synthetic construct
  REGION 1..565: note = hemagglutinin__InfluenzaA__ABV29579
MKVKLLVLLCTFTATYADTICIGYHANNSTDTVDTVLEKNVTVTHSVNLLEDSHNGKLCLLKGIAPLQLGNCSVAGWILGNPECELLISKESWSYIVETPNPENGTCYPGYFADYEELREQLSSVSSFERFEIFPKESSWPNHTVTGVSASCSHNGKSSFYRNLLWLTGKNGLYPNLSKSYANNKEKEVLVLWGVHHPPNIGDQRALYHTENAYVSVVSSHYSRRFTPEIAKRPKVRDQEGRINYYWTLLEPGDTIIFEANGNLIAPRFAFALSRGFGSGIITSNAPMDECDAKCQTPQGAINSSLPFQNVHPVTIGECPKYVRSTKLRMVTGLRNIPSIQSRGLFGAIAGFIEGGWTGMVDGWYGYHHQNEQGSGYAADQKSTQNAINGITNKVNSVIEKMNTQFTAVGKEFNKLEKRMENLNKKVDDGFLDIWTYNAELLVLLENERTLDFHDSNVKNLYEKVKSQLKNNAKEIGNGCFEFYHKCNDECMESVKNGTYDYPKYSEESKLNREKIDGVKLESMGVYQILAIYSTVASSLVLLVSLGAISFWMCSNGSLQCRICI

SEQ ID NO: 1908 - protein, 565 aa, synthetic construct
  REGION 1..565: note = hemagglutinin__InfluenzaA__ABV29612
MKVKLLILLCTFTATYADTICIGYHANNSTDTVDTVLEKNVTVTHSVNLLEDSHNGKLCLLKGIAPLQLGNCSVAGWILGNPECELLISKESWSYIVETPNPENGTCYPGYFADYEELREQLSSVSSFERFEIFPKESSWPNHTVTGVSASCSHNGKSSFYRNLLWLTGKNGLYPNLSKSYANNKEKEVLVLWGVHHPPNIGDQRALYHTENAYVSVVSSHYSRRFTPEVAKRPKVRDQEGRINYYWTLLEPGDTIIFEANGNLIAPRFAFALSRGFGSGIITSNAPMDECDAKCQTPQGAINSSLPFQNVHPVTIGECPKYVRSTKLRMVTGLRNIPSIQSRGLFGAIAGFIEGGWTGMVDGWYGYHHQNEQGSGYAADQKSTQNAINGITNKVNSVIEKMNTQFTAVGKEFNKLERRMENLNKKVDDGFLDIWTYNAELLVLLENERTLDFHDSNVKNLYEKVKSQLKNNAKEIGNGCFEFYHKCNDECMESVKNGTYDYPKYSEESKLNREKIDGVKLESMGVYQILAIYSTVASSLVLLVSLGAISFWMCSNGSLQCRICI

SEQ ID NO: 1909 - protein, 565 aa, synthetic construct
  REGION 1..565: note = hemagglutinin__InfluenzaA__ABV29634
MKVKLLVLLCTFTATYADTICIGYHANNSTDTVDTVLEKNVTVTHSVNLLEDSHNGKLCLLKGIAPLQLGNCSVAGWILGNPECELLISKESWSYIVEAPSPENGTCYPGYFADYEELREQLSSVSSFERFEIFPKESSWPNHTVTGVSASCSHNGKSSFYRNLLWLTGKNGLYPNLSKSYANNKEKEVLVLWGVHHPPNIGDQRALYHTENAYVSVVSSHYSRRFTPEIAKRPKVRDQEGRINYYWTLLEPGDTIIFEANGNLIAPRFAFALSRGFGSGIITSNAPMGECDAKCQTPQGAINSSLPFQNVHPVTIGECPKYVRSAKLRMVTGLRNIPSIQSRGLFGAIAGFIEGGWTGMVDGWYGYHHQNEQGSGYAADQKSTQNAINGITNKVNSVIEKMNTQFTAVGKEFNKLERRMENLNKKVDDGFLDIWTYNAELLVLLENERTLDFHDSNVKNLYEKVKSQLKNNAKEIGNGCFEFYHKCNDECMESVKNGTYDYPKYSEESKLNREKIDGVKLESMGVYQILAIYSTVASSLVLLVSLGAISFWMCSNGSLQCRICI

SEQ ID NO: 1910 - protein, 565 aa, synthetic construct
  REGION 1..565: note = hemagglutinin__InfluenzaA__ABV29645
MKVKLLILLCTFTATYADTICIGYHANNSTDTVDTVLEKNVTVTHSVNLLEDSHNGKLCLLKGIAPLQLGNCSVAGWILGNPECELLISKESWSYIVETPNPENGTCYPGYFADYEELREQLSSVSSFERFEIFPKESSWPNHTVTGVSASCSHNGKSSFYRNLLWLTGKNGLYPNLSKSYANNKEKEVLVLWGVHHPPNIGDQRALYHTENAYVSVVSSHYSRRFTPEIAKRPKVRDQEGRINYYWTLLEPGDTIIFEANGNLIAPRFAFALSRGFGSGIITSNAPMDECDAKCQTPQGAINSSLPFQNVHPVTIGECPKYVRSTKLRMVTGLRNIPSIQSRGLFGAIAGFIEGGWTGMVDGWYGYHHQNEQGSGYAADQKSTQNAINGITNKVNSVIEKMNTQFTAVGKEFNKLERRMENLNKKVDDGFLDIWTYNAELLVLLENERTLDFHDSNVKNLYEKVKSQLKNNAKEIGNGCFEFYHKCNDECMESVKNGTYDYPKYSEESKLNREKIDGVKLESMGVYQILAIYSTVASSLVLLVSLGAISFWMCSNGSLQCRICI

SEQ ID NO: 1911 - protein, 565 aa, synthetic construct; identical to SEQ ID NO: 1910
  REGION 1..565: note = hemagglutinin__InfluenzaA__ABV29667

SEQ ID NO: 1912 - protein, 565 aa, synthetic construct
  REGION 1..565: note = hemagglutinin__InfluenzaA__ABV29678
MKVKLLILLCTFTATYADTICIGYHANNSTDTVDTVLEKNVTVTHSVNLLEDSHNGKLCLLKGIAPLQLGNCSVAGWILGNPECELLISKESWSYIVETPNPENGTCYPGYFADYEELREQLSSVSSFERFEIFPKESSWPNHTVTGVSASCSHNGKSSFYRNLLWLTGKNGLYPNLSKSYANNKEKEVLVLWGVHHPPNIGDQRALYHTENAYVSVVSSHYSRRFTPEIAKRPKVRDQEGRINYYWTLLEPGDTIIFEANGNLIAPRFAFALSRGFGSGIITSNAPVDECDAKCQTPQGAINSSLPFQNVHPVTIGECPKYVRSTKLRMVTGLRNIPSIQSRGLFGAIAGFIEGGWTGMVDGWYGYHHQNEQGSGYAADQKSTQNAINGITNKVNSVIEKMNTQFTAVGKEFNKLERRMENLNKKVDDGFLDIWTYNAELLVLLENERTLDFHDSNVKNLYEKVKSQLKNNAKEIGNGCFEFYHKCNDECMESVKNGTYDYPKYSEESKLNREKIDGVKLESMGVYQILAIYSTVASSLVLLVSLGAISFWMCSNGSLQCRICI

SEQ ID NO: 1913 - protein, 565 aa, synthetic construct
  REGION 1..565: note = hemagglutinin__InfluenzaA__ABV29689
MKVKLLVLLCTFTATYADTICIGYHANNSTDTVDTVLEKNVTVTHSVNLLEDSHNGKLCLLKGIAPLQLGNCSVAGWILGNPECELLISKESWSYIVETPNPENGTCYPGYFADYEELREQLSSVSSFERFEIFPKESSWPNHTVTGVSASCSHNGKSSFYRNLLWLTGKNGLYPNLSKSYANNKEKEVLVLWGVHHPPNIGDQRALYHTENAYVSVVSSHYSRRFTPEIAKRPKVRDQEGRINYYWTLLEPGDTIIFEANGNLIAPRFAFALSRGFGSGIITSNAPMDECDAKCQTPQGAINSSLPFQNVHPVTIGECPKYVRSTKLRMVTGLRNIPSIQSRGLFGAIAGFIEGGWIGMVDGWYGYHHQNEQGSGYAADQKSTQNAINGITNKVNSVIEKMNTQFTAVGKEFNKLERRMENLNKKVDDGFLDIWTYNAELLVLLENERTLDFHDSNVKNLYEKVKSQLKNNAKEIGNGCFEFYHKCNDECMESVKNGTYDYPKYSEESKLNREKIDGVKLESMGVYQILAIYSTVASSLVLLVSLGAISFWMCSNGSLQCRICI

SEQ ID NO: 1914 - protein, 565 aa, synthetic construct
  REGION 1..565: note = hemagglutinin__InfluenzaA__ABV29700
MKVKLLVLLCTFTATYADTICIGYHANNSTDTVDTVLEKNVTVTHSVNLLEDSHNGKLCLLKGIAPLQLGNCSVAGWILGNPECELLISKESWSYIVETPNPENGTCYPGYFADYEELREQLSSVSSFERFEIFPKESSWPNHTVTGVSASCSHNGKSSFYRNLLWLTGKNGLYPNLSKSYANNKEKEVLVLWGVHHPPNIGDQRALYHTENAYVSVVSSHYSRRFTPEIAKRPKVRDQEGRINYYWTLLEPGDTIIFEANGNLIAPRFAFALSRGFGSGIITSNAPMDECDAKCQTPQGAINSSLPFQNVHPVTIGECPKYVRSTKLRMVTGLRNIPSIQSRGLFGAIAGFIEGGWTGMVDGWYGYHHQNEQGSGYAADQKSTQNAINGITNKVNSVIEKMNTQFTAVGKEFNKLERRMENLNKKVDDGFLDIWTYNAELLVLLENERTLDFHDSNVKNLYEKVKSQLKNNAKEIGNGCFEFYHKCNDECMESVKNGTYDYPKYSEESKLNREKIDGVKLESMGVYQILAIYSTVASSLVLLVSLGAISFWMCSNGSLQCRICI

SEQ ID NO: 1915 - protein, 566 aa, synthetic construct
  REGION 1..566: note = hemagglutinin__InfluenzaA__ABV29711
MKTIIALSYILCLVFAQKLPGNDNSTATLCLGHHAVPNGTIVKTITNDQIEVTNATELVQSSSTGEICDSPHQILDGENCTLIDALLGDPQCDGFQNKKWDLFVERSKAYSNCYPYDVPDYASLRSLVASSGTLEFNNESFNWTGVTQNGTSSACIRRSNNSFFSRLNWLTHLKFKYPALNVTMPNNEKFDKLYIWGVHHPGTDNDQIFLYAQASGRITVSTKRSQQTVIPNIGSRPRVRNIPSRISIYWTIVKPGDILLINSTGNLIAPRGYFKIQSGKSSIMRSDAPIGKCNSECITPNGSIPNDKPFQNVNRITYGACPRYVKQNTLKLATGMRNVPEKQTRGIFGAIAGFIENGWEGMVDGWYGFRHQNSEGIGQAADLKSTQAAIDQINGKLNRLIGKTNEKFHQIEKEFSEVEGRIQDLEKYVEDTKIDLWSYNAELLVALENQHTIDLTDSEMNKLFEKTKKQLRENAEDMGNGCFKIYHKCDNACIGSIRNGTYDHDVYRDEALNNRFQIKGVELKSGYKDWILWISFAISCFLLCVALLGFIMWACQKGNIRCNICI

SEQ ID NO: 1916 - protein, 566 aa, synthetic construct
  REGION 1..566: note = hemagglutinin__InfluenzaA__ABV29722
MKTIIALSYILCLVFAQKLPGNDNSTATLCLGHHAVPNGTIVKTITNDQIEVTNATELVQSSSTGEICDSPHQILDGENCTLIDALLGDPQCDGFQNKKWDLFVERSKAYSNCYPYDVPDYASLRSLVASSGTLEFNNESFNWTGVTQNGTSSACIRRSNNSFFSRLNWLTHLKFKYPALNVTMPNNEKFDKLYIWGVHHPGTDNDQIFLYAQASGRITVSTKRSQQTVIPNIGSRPRVRNIPSRISIYWTIVKPGDILLINSTGNLIAPRGYFKIRSGKSSIMRSDAPIGKCNSECITPNGSIPNDKPFQNVNRITYGACPRYVKQNTLKLATGMRNVPEKQTRGIFGAIAGFIENGWEGMVDGWYGFRHQNSEGIGQAADLKSTQAAIDQINGKLNRLIGKTNEKFHQIEKEFLEVEGRIQDLEKYVEDTKIDLWSYNAELLVALENQHTIDLTDSEMNKLFEKTKKQLRENAEDMGNGCFKIYHKCDNACIGSIRNGTYDHDVYRDEALNNRFQIKGVELKSGYKDWILWISFAISCFLLCVALLGFIMWACQKGNIRCNICI

SEQ ID NO: 1917 - protein, 565 aa, synthetic construct
  REGION 1..565: note = hemagglutinin__InfluenzaA__ABV29733
MKVKLLVLLCTFTATYADTICIGYHANNSTDTVDTVLEKNVTVTHSVNLLEDSHNGKLCLLKGIAPLQLGNCSVAGWILGNPECELLISKESWSYIVETPNPENGTCYPGYFADYEELREQLSSVSSFERFEIFPKESSWPNHTVTGVSASCSHNGESSFYRNLLWLTGKNGLYPNLSKSYANNKEKEVLVLWGVHHPPNIGDQRALYHTENAYVSVVSSHYSRRFTPEIAKRPKVRDQEGRINYYWTLLEPGDTIIFEANGNLIAPRFAFALSRGFGSGIITSNAPMDKCDAKCQTPQGAINSSLPFQNVHPVTIGECPKYVRSTKLRMVTGLRNIPSIQSRGLFGAIAGFIEGGWTGMVDGWYGYHHQNEQGSGYAADQKSTQNAINGITNKVNSVIEKMNTQFTAVGKEFNKLERRMENLNKKVDDGFLDIWTYNAELLVLLENERTLDFHDSNVKNLYEKVKSQLKNNAKEIGNGCFEFYHKCDDECMESVKNGTYDYPKYSEESKLNREKIDGVKLESMGVYQILAIYSTVASSLVLLVSLGAISFWMCSNGSLQCRICI

SEQ ID NO: 1918 - protein, 565 aa, synthetic construct; identical to SEQ ID NO: 1910
  REGION 1..565: note = hemagglutinin__InfluenzaA__ABV29744

SEQ ID NO: 1919 - protein, 565 aa, synthetic construct
  REGION 1..565: note = hemagglutinin__InfluenzaA__ABV29755
MKVKLLVLLCTFTATYADTICIGYHANNSTDTVDTVLEKNVTVTHSVNLLEDSHNGKLCLLKGIAPLQLGNCSVAGWILGNPECELLISKESWSYIVETPSPENGTCYPGYFADYEELREQLSSVSSFERFEIFPKESSWPNHTVTGVSASCSHNGKSSFYRNLLWLTGKNGLYPNLSKSYANNKEKEVLVLWGVHHPPNIGDQRALYHTENAYVSVVSSHYSRRFTPEIAKRPKVRDQEGRINYYWTLLEPGDTIIFEANGNLIAPRFAFALSRGFGSGIITSNAPMGKCDAKCQTPQGAINSSLPFQNVHPVTIGECPKYVRSAKLRMVTGLRNIPSIQSRGLFGAIAGFIEGGWTGMVDGWYGYHHQNEQGSGYAADQKSTQNAINGITNKVNSVIEKMNTQFTAVGKEFNKLERRMENLNKKVDDGFLDIWTYNAELLVLLENERTLDFHDSNVKNLYEKVKSQLKNNAKEIGNGCFEFYHKCNDECMESVKNGTYDYPKYSEESKLNREKIDGVKLESMGVYQILAIYSTVASSLVLLVSLGAISFWMCSNGSLQCRICI

SEQ ID NO: 1920 - protein, 565 aa, synthetic construct; identical to SEQ ID NO: 1910
  REGION 1..565: note = hemagglutinin__InfluenzaA__ABV29766

SEQ ID NO: 1921 - protein, 565 aa, synthetic construct
  REGION 1..565: note = hemagglutinin__InfluenzaA__ABV29777
MKVKLLVLLCTFTATYADTICIGYHANNSTDTVDTVLEKNVTVTHSVNLLEDSHNGKLCLLKGIAPLQLGNCSVAGWILGNPECELLISKESWSYIVETPNPENGTCYPGYFADYEELREQLSSVSSFERFEIFPKESSWPNHTVTGVSASCSHNGESSFYRNLLWLTGKNGLYPNLSKSYANNKEKEVLVLWGVHHPPNIGDQRALYHTENAYVSVVSSHYSRRFTPEIAKRPKVRDQEGRINYYWTLLEPGDTIIFEANGNLIAPRFAFALSRGFGSGIITSNAPMDKCDAKCQTPQGAINSSLPFQNVHPVTIGECPKYVRSTKLRMVTGLRNIPSIQSRGLFGAIAGFIEGGWTGMVDGWYGYHHQNEQGSGYAADQKSTQNAINGITNKVNSVIEKMNTQFTAVGKEFNKLERRMENLNKKVDDGFLDIWTYNAELLVLLENERTLDFHDSNVKNLYEKVKSQLKNNAKEIGNGCFEFYHKCNDECMESVKNGTYDYPKYSEESKLNREKIDGVKLESMGVYQILAIYSTVASSLVLLVSLGAISFWMCSNGSLQCRICI

SEQ ID NO: 1922 - protein, 565 aa, synthetic construct; identical to SEQ ID NO: 1910
  REGION 1..565: note = hemagglutinin__InfluenzaA__ABV29788

SEQ ID NO: 1923 - protein, 565 aa, synthetic construct; identical to SEQ ID NO: 1914
  REGION 1..565: note = hemagglutinin__InfluenzaA__ABV29799

SEQ ID NO: 1924 - protein, 566 aa, synthetic construct
  REGION 1..566: note = hemagglutinin__InfluenzaA__ABV29821
MKTIIALSYILCLVFAQKLPGNDNSTATLCLGHHAVPNGTIVKTITNDQIEVTNATELVQSSSTGEICDSPHQILDGENCTLIDALLGDPQCDGFQNKKWDLFVERSKAYSNCYPYDVPDYASLRSLVASSGTLEFNNESFNWTGVTQNGTSSACIRRSNNSFFSRLNWLTHLKFKYPALNVTMPNNEKFDKLYIWGVHHPGTDNDQVFLYAQASGRITVSTKRSQQTVIPNIGSRPRVRNIPSRISIYWTIVKPGDILLINSTGNLIAPRGYFKIRSGKSSIMRSDAPIGKCNSECITPNGSIPNDKPFQNVNRITYGACPRYVKQNTLKLATGMRNVPEKQTRGIFGAIAGFIENGWEGMVDGWYGFRHQNSEGIGQAADLKSTQAAIDQINGKLNRLIGKTNEKFHQIEKEFSEVEGRIQDLEKYVEDTKIDLWSYNAELLVALENQHTIDLTDSEMNKLFEKTKKQLRENAEDMGNGCFKIYHKCDNACIGSIRNGTYDHDVYRDEALNNRFQIKGVELKSGYKDWILWISFAISCFLLCVALLGFIMWACQKGNIKCNICI

SEQ ID NO: 1925 - protein, 565 aa, synthetic construct; identical to SEQ ID NO: 1914
  REGION 1..565: note = hemagglutinin__InfluenzaA__ABV29832

SEQ ID NO: 1926 - protein, 565 aa, synthetic construct; identical to SEQ ID NO: 1910
  REGION 1..565: note = hemagglutinin__InfluenzaA__ABV29865

SEQ ID NO: 1927 - protein, 565 aa, synthetic construct; identical to SEQ ID NO: 1910
  REGION 1..565: note = hemagglutinin__InfluenzaA__ABV29876

SEQ ID NO: 1928 - protein, 566 aa, synthetic construct
  REGION 1..566: note = hemagglutinin__InfluenzaA__ABV29898
MKTIIALSYILCLVFAQKLPGNDNSTATLCLGHHAVPNGTIVKTITNDQIEVTNATELVQSSSTGEICDSPHQILDGENCTLIDALLGDPQCDGFQNKKWDLFVERSKAYSNCYPYDVPDYASLRSLVASSGTLEFNNESFNWTGVTQNGTSSACIRRSNNSFFSRLNWLTHLKFKYPALNVTMPNNEKFDKLYIWGVHHPGTDNDQIFLYAQASGRITVSTKRSQQTVIPNIGSRPRVRNIPSRISIYWTIVKPGDILLINSTGNLIAPRGYFKIRSGKSSIMRSDAPIGKCNSECITPNGSIPNDKPFQNVNRITYGACPRYVKQNTLKLATGMRNVPEKQTRGIFGAIAGFIENGWEGMVDGWYGFRHQNSEGIGQAADLKSTQAAIDQINGKLNRLIGKTNEKFHQIEKEFSEVEGRIQDLEKYVEDTKIDLWSYNAELLVALENQHTIDLTDSEMNKLFEKTKKQLRENAEDMGNGCFKIYHKCDNACIGSIRNGTYDHDVYRDEALNNRFQIKGVELKSGYKDWILWISFAISCFLLCVALLGFIMWACQKGNIRCNICI

SEQ ID NO: 1929 - protein, 566 aa, synthetic construct
  REGION 1..566: note = hemagglutinin__InfluenzaA__ABV29909
MKTIIALSYILCLVFAQKLPGNDNSTATLCLGHHAVPNGTIVKTITSDQIEVTNATELVQNSSIGGICNSPHQILDGENCTLIDALLGDPQCDGFQNKKWDLFVERSKAYSNCYPYDVPDYASLRSLIASSGTLEFNNESFNWTGVTQNGTSSACKRRSNNSFFSRLNWLTHLKFKYPALNVTMPNNEEFDKLYIWGVHHPGTDNDQISLYAQAPGRITVSTKRSQQTVIPNIGSRPRVRDIPSRISIYWTIVKPGDILLINSTGNLIAPRGYFKIRSGKSSIMRSDAPIDKCNSECITPNGSIPNDKPFQNVNRITYGACPRYVKQNTLKLATGMRNVPEKQTRGIFGAIAGFIENGWEGMVDGWYGFRHQNSEGIGQAADLKSTQAAIDQINGKLNRLIGKTNEKFHQIEKEFSEVEGRIQDLEKYVEDTKIDLWSYNAELLVALENQHTIDLTDSEMNKLFERTKKQLRENAEDMGNGCFKIYHKCDNACIGSIRNGTYDHDVYRDEALNNRFQIKGVELKSGYKDWILWISFAISCFLLCVALLGFIMWACQKGNIRCNICI

SEQ ID NO: 1930 - protein, 565 aa, synthetic construct
  REGION 1..565: note = hemagglutinin__InfluenzaA__ABV29920
MKVKLLVLLCTFTATYADTICIGYHANNSTDTVDTVLEKNVTVTHSVNLLEDSHNGKLCLLKGIAPLQLGNCSVAGWILGNPECELLISKESWSYIVETPNPENGTCYPGYFADYEELREQLSSVSSFERFEIFPKESSWPNHTVTGVSASCSHNGKSSFYRNLLWLTGKNGLYPNLSKSYANNKEKEVLVLWGVHHPPNIGDQRALYHTENAYVSVVSSHYSRRFTPEIAKRPKVRDQEGRINYYWTLLEPGDTIIFEANGNLIAPRFAFALSRGFGSGIITSNAPMGECDAKCQTPQGAINSSLPFQNVHPVTIGECPKYVRSAKLRMVTGLRNIPSIQSRGLFGAIAGFIEGGWTGMVDGWYGYHHQNEQGSGYAADQKSTQNAINGITNKVNSVIEKMNTQFTAVGKEFNKLERRMENLNKKVDDGFLDIWTYNAELLVLLENERTLDFHDSNVKNLYEKVKSQLKNNAKEIGNGCFEFYHKCNDECMESVKNGTYDYPKYSEESKLNREKIDGVKLESMGVYQILAIYSTVASSLVLLVSLGAISFWMCSNGSLQCRICI

SEQ ID NO: 1931 - protein, 565 aa, synthetic construct; identical to SEQ ID NO: 1921
  REGION 1..565: note = hemagglutinin__InfluenzaA__ABV29942

SEQ ID NO: 1932 - protein, 565 aa, synthetic construct; identical to SEQ ID NO: 1914
  REGION 1..565: note = hemagglutinin__InfluenzaA__ABV29953

SEQ ID NO: 1933 - protein, 565 aa, synthetic construct; identical to SEQ ID NO: 1914
  REGION 1..565: note = hemagglutinin__InfluenzaA__ABV29964

SEQ ID NO: 1934 - protein, 565 aa, synthetic construct; identical to SEQ ID NO: 1910
  REGION 1..565: note = hemagglutinin__InfluenzaA__ABV29986

SEQ ID NO: 1935 - protein, 565 aa, synthetic construct; identical to SEQ ID NO: 1914
  REGION 1..565: note = hemagglutinin__InfluenzaA__ABV29997

SEQ ID NO: 1936 - protein, 565 aa, synthetic construct; identical to SEQ ID NO: 1910
  REGION 1..565: note = hemagglutinin__InfluenzaA__ABV30008

SEQ ID NO: 1937 - protein, 565 aa, synthetic construct; identical to SEQ ID NO: 1914
  REGION 1..565: note = hemagglutinin__InfluenzaA__ABV30019

SEQ ID NO: 1938 - protein, 565 aa, synthetic construct; identical to SEQ ID NO: 1914
  REGION 1..565: note = hemagglutinin__InfluenzaA__ABV30030

SEQ ID NO: 1939 - protein, 565 aa, synthetic construct
  REGION 1..565: note = hemagglutinin__InfluenzaA__ABV30041
MKVKLLVLLCTFTATYADTICIGYHANNSTDTVDTVLEKNVTVTHSVNLLEDSHNGKLCLLKGTAPLQLGNCSVAGWILGNPECELLISKESWSYIVETPNPENGTCYPGYFADYEELREQLSSVSSFERFEIFPKESSWPNHTVTGVSASCSHNGKSSFYRNLLWLTGKNGLYPNLSKSYANNKEKEVLVLWGVHHPPNIGDQRALYHTENAYVSVVSSHYSRRFTPEIAKRPKVRDQEGRINYYWTLLEPGDTIIFEANGNLIAPRFAFALSRGFGSGIITSNAPMGECDAKCQTPQGAINSSLPFQNVHPVTIGECPKYVRSAKLRMVTGLRNIPSIQSRGLFGAIAGFIEGGWTGMVDGWYGYHHQNEQGSGYAADQKSTQNAINGITNKVNSVIEKMNTQFTAVGKEFNKLERRMENLNKKVDDGFLDIWTYNAELLVLLENERTLDFHDSNVKNLYEKVKNQLKNNAKEIGNGCFEFYHKCNDECMESVKNGTYDYPKYSEESKLNREKIDGVKLESMGVYQILAIYSTVASSLVLLISLGAISFWMCSNGSLQCRICI

SEQ ID NO: 1940 - protein, 566 aa, synthetic construct; identical to SEQ ID NO: 1928
  REGION 1..566: note = hemagglutinin__InfluenzaA__ABV30063

SEQ ID NO: 1941 - protein, 566 aa, synthetic construct; identical to SEQ ID NO: 1928
  REGION 1..566: note = hemagglutinin__InfluenzaA__ABV30074

SEQ ID NO: 1942 - protein, 565 aa, synthetic construct; identical to SEQ ID NO: 1914
  REGION 1..565: note = hemagglutinin__InfluenzaA__ABV30085

SEQ ID NO: 1943 - protein, 565 aa, synthetic construct; identical to SEQ ID NO: 1914
  REGION 1..565: note = hemagglutinin__InfluenzaA__ABV30096

SEQ ID NO: 1944 - protein, 565 aa, synthetic construct; identical to SEQ ID NO: 1910
  REGION 1..565: note = hemagglutinin__InfluenzaA__ABV30107

SEQ ID NO: 1945 - protein, 565 aa, synthetic construct
  REGION 1..565: note = hemagglutinin__InfluenzaA__ABV30129
MKVKLLVLLCTFTATYADTICIGYHANNSTDTVDTVLEKNVTVTHSVNLLEDSHNGKLCLLKGIAPLQLGNCSVAGWILGNPECELLISKESWSYIVETPNPENGTCYPGNFADYEELREQLSSVSSFERFEIFPKESSWPNHTVTGVSASCSHNGKSSFYRNLLWLTGKNGLYPNLSKSYANNKEKEVLVLWGVHHPPNIGDQRALYHTENAYVSVVSSHYSRRFTPEIAKRPKVRDQEGRINYYWTLLEPGDTIIFEANGNLIAPRFAFALSRGFGSGIITSNAPMDECDAKCQTPQGAINSSLPFQNVHPVTIGECPKYVRSAKLRMVTGLRNIPSIQSRGLFGAIAGFIEGGWTGMVDGWYGYHHQNEQGSGYAADQKSTQNAINGITNKVNSVIEKMNTQFTAVGKEFNKLERRMENLNKKVDDGFLDIWTYNAELLVLLENERTLDFHDSNVKNLYEKVKSQLKNNAKEIGNGCFEFYHKCNDECMESVKNGTYDYPKYSEESKLNREKIDGVKLESMGVYQILAIYSTVASSLVLLVSLGAISFWMCSNGSLQCRICI

SEQ ID NO: 1946 - protein, 565 aa, synthetic construct
  REGION 1..565: note = hemagglutinin__InfluenzaA__ABV30140
MKVKLLVLLCTFTATYADTICIGYHANNSTDTVDTVLEKNVTVTHSVNLLEDRHNGKLCLLKGIAPLKLGNCSVAGWILGNPECELLISKESWSYIVETPNPENGTCYPGYFADYEELREQLSSVSSFERFEIFPKESSWPNHTVTGVSASCSHNGKSSFYRNLLWLTGKNGLYPNLSRSYANNKEKEVLVLWGVHHPPNIGDQRALYHTENAYVSVVSSHYSRRFTPEIAKRPKVRDQEGRINYYWTLLEPGDTIIFEANGNLIAPRFAFALSRGFGSGIITSNAPMDECDAKCQTPQGAINSSLPFQNVHPVTIGECPKYVRSAKLRMVTGLRNIPSIQSRGLFGAIAGFIEGGWTGMVDGWYGYHHQNEQGSGYAADQKSTQNAINGITNKVNSVIEKMNTQFTAVGKEFNKLERRMENLNKKVDDGFLDIWTYNAELLVLLENERTLDFHDSNVKNLYEKVKSQLKNNAKEIGNGCFEFYHKCNDECMESVKNGTYDYPKYSEESKLNREKIDGVKLESMGVYQILAIYSTVASSLVLLVSLGAISFWMCSNGSLQCRICI

SEQ ID NO: 1947 - protein, 565 aa, synthetic construct
  REGION 1..565: note = hemagglutinin__InfluenzaA__ABV30151
MKVKLLVLLCTFTATYADTICIGYHANNSTDTVDTVLEKNVTVTHSVNLLEDSHNGKLCLLKGIAPLQLGNCSVAGWILGNPECELLISKESWSYIVETPNPENGTCYPGYFADYEELREQLSSVSSFERFEIFPKESSWPNHTVTGVSASCSHSGKSSFYRNLLWLTGKNGLYPNLSKSYANNKEKEVLVLWGVHHPPNIGDQRALYHTENAYVSVVSSHYSRRFTPEIAKRPKVRDQEGRINYYWTLLEPGDTIIFEANGNLIAPRFAFALSRGFGSGIITSNAPMGECDAKCQTPQGAINSSLPFQNVHPVTIGECPKYVRSAKLRMVTGLRNIPSIQSRGLFGAIAGFIEGGWTGMVDGWYGYHHQNEQGSGYAADQKSTQNAINGITNKVNSVIEKMNTQFTAVGKEFNKLERRMENLNKKVDDGFLDIWTYNAELLVLLENERTLDFHDSNVKNLYEKVKSQLKNNAKEIGNGCFEFYHKCNDECMESVKNGTYDYPKYSEESKLNREKIDGVKLESMGVYQILAIYSTVASSLVLLVSLGAISFWMCSNGSLQCRICI

SEQ ID NO: 1948 - protein, 565 aa, synthetic construct
  REGION 1..565: note = hemagglutinin__InfluenzaA__ABV30162
MKVKLLVLLCTFTATYADTICIGYHANNSTDTVDTVLEKNVTVTHSVNLLEDSHNGKLCLLKGIAPLQLGNCSVAGWILGNPECELLISRESWSYIVETPNPENGTCYPGYFADYEELREQLSSVSSFERFEIFPKESSWPNHTVTGVSASCSHNGKSSFYRNLLWLTGKNGLYPNLSKSYANNKEKEVLVLWGVHHPPNIGDQRALYHTENAYVSVVSSHYSRRFTPEIAKRPKVRDQEGRINYYWTLLEPGDTIIFEANGNLIAPRFAFALSRGFGSGIITSNAPMDECDAKCQTPQGAINSSLPFQNVHPVTIGECPKYVRSTKLRMVTGLRNIPSIQSRGLFGAIAGFIEGGWTGMVDGWYGYHHQNEQGSGYAADQKSTQNAINGITNKVNSVIEKMNTQFTAVGKEFNKLERRMENLNKKVDDGFLDIWTYNAELLVLLENERTLDFHDSNVKNLYEKVKSQLKNNAKEIGNGCFEFYHKCNDECMESVKNGTYDYPKYSEESKLNREKIDGVKLESMGVYQILAIYSTVASSLVLLVSLGAISFWMCSNGSLQCRICI

SEQ ID NO: 1949 - protein, 565 aa, synthetic construct; identical to SEQ ID NO: 1914
  REGION 1..565: note = hemagglutinin__InfluenzaA__ABV30173

SEQ ID NO: 1950 - protein, 565 aa, synthetic construct; identical to SEQ ID NO: 1914
  REGION 1..565: note = hemagglutinin__InfluenzaA__ABV30184

SEQ ID NO: 1951 - protein, 566 aa, synthetic construct; identical to SEQ ID NO: 1928
  REGION 1..566: note = hemagglutinin__InfluenzaA__ABV30217

SEQ ID NO: 1952 - protein, 566 aa, synthetic construct; identical to SEQ ID NO: 1928
  REGION 1..566: note = hemagglutinin__InfluenzaA__ABV30228

SEQ ID NO: 1953 - protein, 566 aa, synthetic construct
  REGION 1..566: note = hemagglutinin__InfluenzaA__ABV30261
MKTIIALSYILCLVFAQKLPGIDNSTATLCLGHHAVPNGTIVKTITNDQVEVTNATELVQSSSTGGICDSPHQILDGENCTLIDALLGDPQCDGFQNKKWDLFVERSKAYSNCYPYDVPDYASLRSLVASSGTLEFNNESFNWAGVTQNGTSSACKRGSNNSFFSRLNWLTHSKFKYPALNVTMPNNEEFDKLYIWGVHHPGTDNDQIFLYAQASGRITVSTKRSQQTVIPNIGSRPRVRNIPSRISIYWTIVKPGDILLINSTGNLIAPRGYFKIRSGKSSIMRSDAPIGKCNSECITPNGSIPNDKPFQNVNRITYGACPRYVKQNTLKLATGMRNVPEKQTRGIFGAIAGFIENGWEGMVDGWYGFRHQNSEGMGQAADLKSTQAAIDQINGKLNRLIGKTNEKFHQIEKEFSEVEGRIQDLEKYVEDTKIDLWSYNAELLVALENQHTIDLTDSEMNKLFEKTKKQLRENAEDMGNGCFKIYHKCDNACIGSIRNGTYDHDVYRAEALNNRFQIKGVELKSGYKDWILWISFAISCFLLCVALLGFIMWACQKGNIRCNICI

SEQ ID NO: 1954 - protein, 566 aa, synthetic construct
  REGION 1..566: note = hemagglutinin__InfluenzaA__ABV30272
MKTIIALSYILCLVFAQKLPGNDNSTATLCLGHHAVPNGTIVKTITNDQIEVTNATELVQSSSTGEICDSPHQILDGENCTLIDALLGDPQCDGFQNKKWDLFVERSKAYSNCYPYDVPDYASLRSLVASSGTLEFNNESFNWTGVTQNGTSSACIRRSNNSFFSKLNWLTHLKFKYPALNVTMPNNEKFDKLYIWGVHHPGTDNDQIFLYAQASGRITVSTKRSQQTVIPNIGSRPRVRNIPSRISIYWTIVKPGDILLINSTGNLIAPRGYFKIRSGKSSIMRSDAPIGKCNSECITPNGSIPNDKPFQNVNRITYGACPRYVKQNTLKLATGMRNVPEKQTRGIFGAIAGFIENGWEGMVDGWYGFRHQNSEGIGQAADLKSTQAAIDQINGKLNRLIGKTNEKFHQIEKEFSEVEGRIQDLEKYVEDTKIDLWSYNAELLVALENQHTIDLTDSEMNKLFEKTKKQLRENAEDMGNGCFKIYHKCDNACIGSIRNGTYDHDVYRDEALNNRFQIKGVELKSGYKDWILWISFAISCFLLCVALLGFIMWACQKGNIRCNICI

SEQ ID NO: 1955 - protein, 565 aa, synthetic construct
  REGION 1..565: note = hemagglutinin__InfluenzaA__ABV30283
MKVKLLVLLCTFTATYADTICIGYHANNSTDTVDTVLEKNVTVTHSVNLLEDSHNGKLCLLKGIAPLQLGNCSVAGWILGNPECELLISKESWSYIVETPNPENGTCYPGNFADYEELREQLSSVSSFERFEIFPKESSWPNHTVTGVSASCSHNGKSSFYRNLLWLTGKNGLYPNLSKSYANNKEKEVLVLWGVHHPPNIGDQRALYHTENAYVSVVSSHYSRRFTPEIAKRPKVRDQEGRINYYWTLLEPGDTIIFEANGNLIAPRFAFALSRGFGSGIITSNAPMDECDAKCQTPQGAINSSLPFQNVHPVTIGECPKYVRSAKLRMVTGLRNIPSIQSRGLFGAIAGFIEGGWTGMVDGWYGYHHQNEQGSGYAADQKSTQNAIDGITNKVNSVIEKMNTQFTAVGKEFNKLERRMENLNKKVDDGFLDIWTYNAELLVLLENERTLDFHDSNVKNLYEKVKSQLKNNAKEIGNGCFEFYHKCNDECMESVKNGTYDYPKYSEESKLNREKIDGVKLESMGVYQILAIYSTVASSLVLLVSLGAISFWMCSNGSLQCRICI

SEQ ID NO: 1956 - protein, 565 aa, synthetic construct
  REGION 1..565: note = hemagglutinin__InfluenzaA__ABV30294
MKVKLLVLLCTFTATYADTICIGYHANNSTDTVDTVLEKNVTVTHSVNLLEDRHNGKLCLLKGIAPLQLGNCSVAGWILGNPECELLISKESWSYIVETPNPENGTCYPGYFADYEELREQLSSVSSFERFEIFPKESSWPNHTVTGVSASCSHNGKSSFYRNLLWLTGKNGLYPNLSRSYANNKEKEVLVLWGVHHPPNIGDQRALYHTENAYVSVVSSHYSRRFTPEIAKRPKVRDQEGRINYYWTLLEPGDTIIFEANGNLIAPRFAFALSRGFGSGIITSNAPMDECDAKCQTPQGAINSSLPFQNVHPVTIGECPKYVRSAKLRMVTGLRNIPSIQSRGLFGAIAGFIEGGWTGMVDGWYGYHHQNEQGSGYAADQKSTQNAINGITNKVNSVIEKMNTQFTAVGKEFNKLERRMENLNKKVDDGFLDIWTYNAELLVLLENERTLDFHDSNVKNLYEKVKSQLKNNAKEIGNGCFEFYHKCNDECMESVKNGTYDYPKYSEESKLNREKIDGVKLESMGVYQILAIYSTVASSLVLLVSLGAISFWMCSNGSLQCRICI

SEQ ID NO: 1957 - protein, 565 aa, synthetic construct
  REGION 1..565: note = hemagglutinin__InfluenzaA__ABV30305
MKVKLLVLLCTFTATYADTICIGYHANNSTDTVDTVLEKNVTVTHSVNLLEDSHNGKLCLLKGIAPLQLGNCSVAGWILGNPECELLISKESWSYIVETPNPENGTCYPGYFADYEELREQLSSVSSFERFEIFPKESSWPNHTVTGGSASCSHNGKSSFYRNLLWLTGKNGLYPNLSKSYANNKEKEVLVLWGVHHPPNIGDQRALYHTENAYVSVVSSHYSRRFTPEIAKRPKVRDQEGRINYYWTLLEPGDTIIFEANGNLIAPRFAFALSRGFGSGIITSNAPMDECDAKCQTPQGAINSSLPFQNVHPVTIGECPKYVRSTKLRMVTGLRNIPSIQSRGLFGAIAGFIEGGWTGMVDGWYGYHHQNEQGSGYAADQKSTQNAINGITNKVNSVIEKMNTQFTAVGKEFNKLERRMENLNKKVDDGFLDIWTYNAELLVLLENERTLDFHDSNVKNLYEKVKSQLKNNAKEIGNGCFEFYHKCNNECMESVKNGTYDYPKYSEESKLNREKIDGVKLESMGVYQILAIYSTVASSLVLLVSLGAISFWMCSNGSLQCRICI

SEQ ID NO: 1958 - protein, 565 aa, synthetic construct; identical to SEQ ID NO: 1910
  REGION 1..565: note = hemagglutinin__InfluenzaA__ABV30316

SEQ ID NO: 1959 - protein, 565 aa, synthetic construct; identical to SEQ ID NO: 1956
  REGION 1..565: note = hemagglutinin__InfluenzaA__ABV30327

SEQ ID NO: 1960 - protein, 565 aa, synthetic construct; identical to SEQ ID NO: 1910
  REGION 1..565: note = hemagglutinin__InfluenzaA__ABV30338

SEQ ID NO: 1961 - protein, 565 aa, synthetic construct; identical to SEQ ID NO: 1914
  REGION 1..565: note = hemagglutinin__InfluenzaA__ABV30349

SEQ ID NO: 1962 - protein, 565 aa, synthetic construct
  REGION 1..565: note = hemagglutinin__InfluenzaA__ABV30360
MKVKLLVLLCTFTATYADTICIGYHANNSTDTVDTVLEKNVTVTHSVNLLEDSHNGKLCLLKGIAPLQLGNCSVAGWILGNPECELLISKESWSYIVETPNPENGTCYPGNFADYEELREQLSSVSSFERFEIFPKESSWPNHTVTGVSASCSHNGKSSFYRNLLWLTGKNGLYPNLSKSYANNKEKEVLVLWGVHHPPNIGDQRALYHTENAYVSVVSSHYSRRFTPEIAKRPKVRDQEGRINYYWTLLEPGDTIIFEANGNLIAPRFAFALSRGFGSGIITSNAPMDECDAKCQTPQGAINSSLPFQNVHPVTIGECPKYVRSAKLRMVTGLRNIPSIQSRGLFGAIAGFIEGGWTGMVDGWYGYHHQNEQGSGYAADQKSTQNAIDGITNKVNSVIEKMNTQFTAVGKEFNKLERRMENLNKKVDDGFLDIWTYNAELLVLLENERTLDFHDSNVKNLYEKVKSQLKNNAKEIGNGCFEFYHKCNDECMESVKNGTYDYPKYSEESKLNREKIDGIKLESMGVYQILAIYSTVASSLVLLVSLGAISFWMCSNGSLQCRICI

SEQ ID NO: 1963 - protein, 565 aa, synthetic construct; identical to SEQ ID NO: 1914
  REGION 1..565: note = hemagglutinin__InfluenzaA__ABV30371

SEQ ID NO: 1964 - protein, 566 aa, synthetic construct; identical to SEQ ID NO: 1729
  REGION 1..566: note = hemagglutinin__InfluenzaA__ABV30382

SEQ ID NO: 1965 - protein, 566 aa, synthetic construct; identical to SEQ ID NO: 630
  REGION 1..566: note = hemagglutinin__InfluenzaA__ABV30393

SEQ ID NO: 1966 - protein, 566 aa, synthetic construct
  REGION 1..566: note = hemagglutinin__InfluenzaA__ABV30404
MKTIIALSYILCLVFAQKLPGNDNSTATLCLGHHAVPNGTIVKTITNDQIEVTNATELVQSSSTGEICDSPHQILDGENCTLIDALLGDPQCDGFQNKKWDLFVERSKAYSKCYPYDVPDYASLRSLVASSGTLEFNNESFNWTGVTQNGTSSACIRRSNNSFFSRLNWLTHLKFKYPALNVTMPNNEKFDKLYIWGVHHPGTDNDQIFLYAQASGRITVSTKRSQQTVIPNIGSRPRVRNIPSRISIYWTIVKPGDILLINSTGNLIAPRGYFKIRSGKSSIMRSDAPIGKCNSECITPNGSIPNDKPFQNVNRITYGACPRYVKQNTLKLATGMRNVPEKQTRGIFGAIAGFIENGWEGMVDGWYGFRHQNSEGIGQAADLKSTQAAIDQINGKLNRLIGKTNEKFHQIEKEFSEVEGRIQDLEKYVEDTKIDLWSYNADLLVALENQHTIDLTDSEMNKLFEKTKKQLRENAEDMGNGCFKIYHKCDNACIGSIRNGTYDHDVYRDEALNNRFQIKGVELKSGYKDWILWISFAISCFLLCVALLGFIMWACQKGNIRCNICI

SEQ ID NO: 1967 - protein, 566 aa, synthetic construct
  REGION 1..566: note = hemagglutinin__InfluenzaA__ABV30415
MKTIIALSYILCLVFAQKLPGIDNSTATLCLGHHAVPNGTIVKTITNDQIEVTNATELVQSSSTGGICDSPHQILDGENCTLIDALLGDPQCDGFQNKKWDLFVERSKAYSNCYPYDVPDYASLRSLVASSGTLEFNNESFNWAGVTQNGTSSACKRGSNNSFFSRLNWLTHSKFKYPALNVTMPNNEEFDKLYIWGVHHPGTDNDQIFLYAQASGRITVSTKRSQQTVIPNIGSRPRVRNIPSRISIYWTIVKPGDILLINSTGNLIAPRGYFKIRSGKSSIMRSDAPIGKCNSECITPNGSIPNDKPFQNVNRITYGACPRYVKQNTLKLATGMRNVPEKQTRGIFGAIAGFIENGWEGMVDGWYGFRHQNSEGIGQAADLKSTQAAIDQINGKLNRLIGKTNEKFHQIEKEFSEVEGRIQDLEKYVEDTKIDLWSYNAELLVALENQHTIDLTDSEMNKLFEKTKKQLRENAEDMGNGCFKIYHKCDNACIGSIRNGTYDHDVYRDEALNNRFQIKSVELKSGYKDWILWISFAISCFLLCVALLGFIMWACQKGNIRCNICI

SEQ ID NO: 1968 - protein, 566 aa, synthetic construct; identical to SEQ ID NO: 1928
  REGION 1..566: note = hemagglutinin__InfluenzaA__ABV30426

SEQ ID NO: 1969 - protein, 566 aa, synthetic construct
  REGION 1..566: note = hemagglutinin__InfluenzaA__ABV30437
MKTIIALSYILCLVFAQKLPGNDNSTATLCLGHHAVPNGTIVKTITNDQIEVTNATELVQSSSTGEICDSPHQILDGENCTLIDALLGDPQCDGFQNKKWDLFVERSKAYSNCYPYDVPDYASLRSLVASSGTLEFNNESFNWTGVTQNGTSSACIRRSNHSFFSRLNWLTHLKFKYPALNVTMPNNEKFDKLYIWGVHHPGTDNDQIFLYAQASGRITVSTKRSQQTVIPNIGSRPRVRNIPSRISIYWTIVKPGDILLINSTGNLIAPRGYFKIRSGKSSIMRSDAPIGKCNSECITPNGSIPNDKPFQNVNRITYGACPRYVKQNTLKLATGMRNVPEKQTRGIFGAIAGFIENGWEGMVDGWYGFRHQNSEGIGQAADLKSTQAAIDQINGKLNRLIGKTNEKFHQIEKEFSEVEGRIQDLEKYVEDTKIDLWSYNAELLVALENQHTIDLTDSEMNKLFEKTKKQLRENAEDMGNGCFKIYHKCDNACIGSIRNGTYDHDVYRDEALNNRFQIKGVELKSGYKDWILWISFAISCFLLCVALLGFIMWACQKGNIRCNICI

SEQ ID NO: 1970 - protein, 566 aa, synthetic construct; identical to SEQ ID NO: 1928
  REGION 1..566: note = hemagglutinin__InfluenzaA__ABV30448

SEQ ID NO: 1971 - protein, 565 aa, synthetic construct
  REGION 1..565: note = hemagglutinin__InfluenzaA__ABV30459
MKVKLLILLCTFTATYADTICIGYHANNSTDTVDTVLEKNVTVTHSVNLLEDSHNGKLCLLKGIAPLQLGNCSVAGWILGNPECELLISKESWSYIVEAPNPENGTCYPGYFADYEELREQLSSVSSFERFEIFPKESSWPNHTVTGVSASCSHNGKSSFYRNLLWLTGKNGLYPNLSKSYANNKEKEVLVLWGVHHPPNIGDQRALYHTENAYVSVVSSHYSRRFTPEIAKRPKVRDQEGRINYYWTLLEPGDTIIFEANGNLIAPRFAFALSRGFGSGIITSNAPMDECDAKCQTPQGAINSSLPFQNVHPVTIGECPKYVRSTKLRMVTGLRNIPSIQSRGLFGAIAGFIEGGWTGMVDGWYGYHHQNEQGSGYAADQKSTQNAINGITNKVNSVIEKMNTQFTAVGKEFNKLERRMENLNKKVDDGFLDIWTYNAELLVLLENERTLDFHDSNVKNLYEKVKSQLKNNAKEIGNGCFEFYHKCNDECMESVKNGTYDYPKYSEESKLNREKIDGVKLESMGVYQILAIYSTVASSLVLLVSLGAISFWMCSNGSLQCRICI

SEQ ID NO: 1972 - protein, 566 aa, synthetic construct; identical to SEQ ID NO: 1928
  REGION 1..566: note = hemagglutinin__InfluenzaA__ABV30470

SEQ ID NO: 1973 - protein, 565 aa, synthetic construct; identical to SEQ ID NO: 1910
  REGION 1..565: note = hemagglutinin__InfluenzaA__ABV30492

SEQ ID NO: 1974 - protein, 565 aa, synthetic construct
  REGION 1..565: note = hemagglutinin__InfluenzaA__ABV30503
MKVKLLILLCTFTATYADTICIGYHANNSTDTVDTVLEKNVTVTHSVNLLEDSHNGKLCLLKGIAPLQLGNCSVAGWILGNPECELLISKESWSYIVETPNPENGTCYPGYFADYEELREQLSSVSSFERFEIFPKESSWPNHTITGVSASCSHNGKSSFYRNLLWLTGKNGLYPNLSKSYANNKEKEVLVLWGVHHPPNIGDQRALYHTENAYVSVVSSHYSRRFTPEIAKRPKVRDQEGRINYYWTLLEPGDTIIFEANGNLIAPRFAFALSRGFGSGIITSNAPMDECDAKCQTPQGAINSSLPFQNVHPVTIGECPKYVRSTKLRMVTGLRNIPSIQSRGLFGAIAGFIEGGWTGMVDGWYGYHHQNEQGSGYAADQKSTQNAINGITNKVNSVIEKMNTQFTAVGKEFNKLERRMENLNKKVDDGFLDIWTYNAELLVLLENERTLDFHDSNVKNLYEKVKSQLKNNAKEIGNGCFEFYHKCNDECMESVKNGTYDYPKYSEESKLNREKIDGVKLESMGVYQILAIYSTVASSLVLLVSLGAISFWMCSNGSLQCRICI

SEQ ID NO: 1975 - protein, 566 aa, synthetic construct; identical to SEQ ID NO: 1928
  REGION 1..566: note = hemagglutinin__InfluenzaA__ABV30514

SEQ ID NO: 1976 - protein, 565 aa, synthetic construct
  REGION 1..565: note = hemagglutinin__InfluenzaA__ABV30525
MKVKLLVLLCTFTATYADTICIGYHANNSTDTVDTVLEKNVTVTHSVNLLEDSHNGKLCLLKGIAPLQLGNCSVAGWILGNPECELLISKESWSYIVETPNPENGTCYPGYFADYEELREQLSSVSSFERFEIFPKESSWPNHTVTGVSASCSHSGKSSFYRNLLWLTGKNGLYPNLSKSYANNKEKEVLVLWGVHHPPNIGDQRALYHTENAYVSVVSSHYSRRFTPEIAKRPKVRDQEGRINYYWTLLEPGDTIIFEANGNLIAPRFAFALSRGFGSGIITSNTPMGECDAKCQTPQGAINSSLPFQNVHPVTIGECPKYVRSAKLRMVTGLRNIPSIQSRGLFGAIAGFIEGGWTGMVDGWYGYHHQNEQGSGYAADQKSTQNAINGITNKVNSVIEKMNTQFTAVGKEFNKLERRMENLNKKVDDGFLDIWTYNAELLVLLENERTLDFHDSNVKNLYEKVKSQLKNNAKEIGNGCFEFYHKCNDECMESVKNGTYDYPKYSEESKLNREKIDGVKLESMGVYQILAIYSTVASSLVLLVSLGAISFWMCSNGSLQCRICI

SEQ ID NO: 1977 - protein, 565 aa, synthetic construct; identical to SEQ ID NO: 1914
  REGION 1..565: note = hemagglutinin__InfluenzaA__ABV30536

SEQ ID NO: 1978 - protein, 565 aa, synthetic construct; identical to SEQ ID NO: 1921
  REGION 1..565: note = hemagglutinin__InfluenzaA__ABV30547

SEQ ID NO: 1979 - protein, 565 aa, synthetic construct; identical to SEQ ID NO: 1914
  REGION 1..565: note = hemagglutinin__InfluenzaA__ABV30558

SEQ ID NO: 1980 - protein, 565 aa, synthetic construct
  REGION 1..565: note = hemagglutinin__InfluenzaA__ABV30569
MKVKLLILLCTFTATYADTICIGYHANNSTDTVDTVLEKNVTVTHSVNLLEDNHNGKLCLLKGIAPLQLGNCSVAGWILGNPECELLISKESWSYIVETPNPENGTCYPGYFADYEELREQLSSVSSFERFEIFPKESSWPNHTVTGVSASCSHNGKSSFYRNLLWLTGKNGLYPNLSKSYANNKEKEVLVLWGVHHPPNIGDQRALYHTENAYVSVVSSHYSRRFTPEIAKRPKVRDQEGRINYYWTLLEPGDTIIFEANGNLIAPRFAFALSRGFGSGIITSNAPMDECDAKCQTPQGAINSSLPFQNVHPVTIGECPKYVRSTKLRMVTGLRNIPSIQSRGLFGAIAGFIEGGWTGMVDGWYGYHHQNEQGSGYAADQKSTQNAINGITNKVNSVIEKMNTQFTAVGKEFNKLERRMENLNKKVDDGFLDIWTYNAELLVLLENERTLDFHDSNVKNLYEKVKSQLKNNAKEIGNGCFEFYHKCNDECMESVKNGTYDYPKYSEESKLNREKIDGVKLESMGVYQILAIYSTVASSLVLLVSLGAISFWMCSNGSLQCRICI

SEQ ID NO: 1981 - protein, 565 aa, synthetic construct; identical to SEQ ID NO: 1914
  REGION 1..565: note = hemagglutinin__InfluenzaA__ABV30580

SEQ ID NO: 1982 - protein, 565 aa, synthetic construct; identical to SEQ ID NO: 1910
  REGION 1..565: note = hemagglutinin__InfluenzaA__ABV30591

SEQ ID NO: 1983 - protein, 565 aa, synthetic construct; identical to SEQ ID NO: 1910
  REGION 1..565: note = hemagglutinin__InfluenzaA__ABV30602

SEQ ID NO: 1984 - protein, 565 aa, synthetic construct
  REGION 1..565: note = hemagglutinin__InfluenzaA__ABV30613
MKVKLLILLCTFTATYADTICIGYHANNSTDTVDTVLEKNVTVTHSVNLLEDSHNGKLCLLKGIAPLQLGNCSVAGWILGNPECELLISKESWSYIVETPNPENGTCYPGYFADYEELREQLSSVSSFERFEIFPKESSWPNHTVTGVSASCSHNGKSSFYRNLLWLTGKNGLYPNLSKSYANNKEKEVLVLWGVHHPPNIGDQRALYHTENAYVSVVSSHYSRRFTPEIAKRPKVRDQEGRINYYWTLLEPGDTIIFEANGNLIAPRFAFALSRGFGSGIITSNAPMDECDAKCQTPQGAINSSLPFQNVHPVTIGECPKYVRSTKLRMVTGLRNIPSIQSRGLFGAIAGFIEGGWTGMVDGWYGYHHQNEQGSGYAADQKSTQNAINGITNKVNSVIEKMNTQFTAVGKEFNKLERRMKNLNKKVDDGFLDIWTYNAELLVLLENERTLDFHDSNVKNLYEKVKSQLKNNAKEIGNGCFEFYHKCNDECMESVKNGTYDYPKYSEESKLNREKIDGVKLESMGVYQILAIYSTVASSLVLLVSLGAISFWMCSNGSLQCRICI

SEQ ID NO: 1985 - protein, 565 aa, synthetic construct; identical to SEQ ID NO: 1910
  REGION 1..565: note = hemagglutinin__InfluenzaA__ABV30624

SEQ ID NO: 1986 - protein, 566 aa, synthetic construct
  REGION 1..566: note = hemagglutinin__InfluenzaA__ABV30646
MKTIIALSYILCLVFAQKLPGNDNSTATLCLGHHAVPNGTIVKTITNDQIEVTNATELVQSSSTGEICDSPHQILDGENCTLIDALLGDPQCDGFQNKKWDLFVERSKAYSNCYPYDVPDYASLRSLVASSGTLEFNNESFNWTGVTQNGTSSACIRRSNNSFFSRLNWLTHLKFKYPALNVTMPNNEKFDKLYIWGVHHPGTYNDQIFLYAQASGRITVSTKRSQQTVIPNIGSRPRVRNIPSRISIYWTIVKPGDILLINSTGNLIAPRGYFKIRSGKSSIMRSDAPIGKCNSECITPNGSIPNDKPFQNVNRITYGACPRYVKQNTLKLATGMRNVPEKQTRGIFGAIAGFIENGWEGMVDGWYGFRHQNSEGIGQAADLKSTQAAIDQINGKLNRLIGKTNEKFHQIEKEFSEVEGRIQDLEKYVEDTKIDLWSYNAELLVALENQHTIDLTDSEMNKLFEKTKKQLRENAEDMGNGCFKIYHKCDNACIGSIRNGTYDHDVYRDEALNNRFQIKGVELKSGYKDWILWISFAISCFLLCVALLGFIMWACQKGNIRCNICI

SEQ ID NO: 1987 - protein, 566 aa, synthetic construct
  REGION 1..566: note = hemagglutinin__InfluenzaA__ABV30657
MKTIIALSYILCLVFAQKLPGNDNSTATLCLGHHAVPNGTIVKTITNDQIEVTNATELVQSSSTGEICDSPHQILDGENCTLIDALLGDPQCDGFQNKKWDLFVERSKAYSNCYPYDVPDYASLRSLVASSGTLEFNNESFNWTGVTQNGTSSACIRRSNNSFFSRLNWLTHLKFKYPALNVTMPNNEKFDKLYIWGVHHPGTDNDQVFLYAQASGRITVSTKRSQQTVIPNIGSRPRVRNIPSRISIYWTIVKPGDILLINSTGNLIAPRGYFKIRSGKSSIMRSDAPIGKCNSECITPNGSIPNDKPFQNVNRITYGACPRYVKQNTLKLATGMRNVPEKQTRGIFGAIAGFIENGWEGMVDGWYGFRHQNSEGIGQAADLKSTQAAIDQINGKLNRLIGKTNEKFHQIEKEFSEVEGRIQDLEKYVEDTKIDLWSYNAELLVALENQHTIDLTDSEMNKLFEKTKKQLRENAEDMGNGCFKIYHKCDNACIGSIRNGTYDHDVYRDEALNNRFQIKGVELKSGYKDWILWISFAISCFLLCVALLGFIMWACQKGNIRCNICI

SEQ ID NO: 1988 - protein, 566 aa, synthetic construct; identical to SEQ ID NO: 1987
  REGION 1..566: note = hemagglutinin__InfluenzaA__ABV45860

SEQ ID NO: 1989 - protein, 565 aa, synthetic construct; identical to SEQ ID NO: 1955
  REGION 1..565: note = hemagglutinin__InfluenzaA__ABV45871

SEQ ID NO: 1990 - protein, 565 aa, synthetic construct; identical to SEQ ID NO: 1914
  REGION 1..565: note = hemagglutinin__InfluenzaA__ABV45882

SEQ ID NO: 1991 - protein, 565 aa, synthetic construct; identical to SEQ ID NO: 1921
  REGION 1..565: note = hemagglutinin__InfluenzaA__ABV45893

SEQ ID NO: 1992 - protein, 566 aa, synthetic construct; identical to SEQ ID NO: 1729
  REGION 1..566: note = hemagglutinin__InfluenzaA__ABV45904

SEQ ID NO: 1993 - protein, 565 aa, synthetic construct; identical to SEQ ID NO: 1921
  REGION 1..565: note = hemagglutinin__InfluenzaA__ABV45926

SEQ ID NO: 1994 - protein, 565 aa, synthetic construct
  REGION 1..565: note = hemagglutinin__InfluenzaA__ABV45937
MKVKLLVLLCTFTATYADTICIGYHANNSTDTVDTVLEKNVTVTHSVNLLEDSHNGKLCLLKGIAPLQLGNCSVAGWILGNPECELLISKESWSYIVETPNPENGTCYPGYFADYEELREQLSSVSSFERFEIFPKESSWPNHTVTGVSASCSHNGKSSFYRNLLWLTGKNGLYPNLSKSYANNKEKEVLVLWGVHHPPNIGDQRALYHTENAYVSVVSSHYSRRFTPEIAKRPKVRDQEGRINYYWTLLEPGDTIIFETNGNLIAPRFAFALSRGFGSGIITSNAPMGECDAKCQTPQGAINSSLPFQNVHPVTIGECPKYVRSAKLRMVTGLRNIPSIQSRGLFGAIAGFIEGGWTGMVDGWYGYHHQNEQGSGYAADQKSTQNAINGITNKVNSVIEKMNTQFTAVGKEFNKLERRMENLNKKVDDGFLDIWTYNAELLVLLENERTLDFHDSNVKNLYEKVKSQLKNNAKEIGNGCFEFYHKCNDECMESVKNGTYDYPKYSEESKLNREKIDGVKLESMGVYQILAIYSTVASSLVLLVSLGAISFWMCSNGSLQCRICI

SEQ ID NO: 1995 - protein, 565 aa, synthetic construct; identical to SEQ ID NO: 1947
  REGION 1..565: note = hemagglutinin__InfluenzaA__ABV45948

SEQ ID NO: 1996 - protein, 565 aa, synthetic construct; identical to SEQ ID NO: 1914
  REGION 1..565: note = hemagglutinin__InfluenzaA__ABV45959

SEQ ID NO: 1997 - protein, 566 aa, synthetic construct
  REGION 1..566: note = hemagglutinin__InfluenzaA__ABV45970
MKTIIALSYILCLVFAQKLPGNDNSTATLCLGHHAVPNGTIVKTITNDQIEVTNATELVQSSSTGEICDSPHQILDGENCTLIDALLGDPQCDGFQNKKWDLFVERSKAYSNCYPYDVPDHASLRSLVASSGTLEFNNESFNWTGVTQNGTSSACIRRSNNSFFSRLNWLTHLKFKYPALNVTMPNNEKFDKLYIWGVHHPGTDNDQIFLYAQASGRITVSTKRSQQTVIPNIGSRPRVRNIPSRISIYWTIVKPGDILLINSTGNLIAPRGYFKIQSGKSSIMRSDAPIGKCNSECITPNGSIPNDKPFQNVNRITYGACPRYVKQNTLKLATGMRNVPEKQTRGIFGAIAGFIENGWEGMVDGWYGFRHQNSEGIGQAADLKSTQAAIDQINGKLNRLIGKTNEKFHQIEKEFSEVEGRIQDLEKYVEDTKIDLWSYNAELLVALENQHTIDLTDSEMNKLFEKTKKQLRENAEDMGNGCFKIYHKCDNACIGSIRNGTYDHDVYRDEALNNRFQIKGVELKSGYKDWILWISFAISCFLLCVALLGFIMWACQKGNIRCNICI

SEQ ID NO: 1998 - protein, 566 aa, synthetic construct
  REGION 1..566: note = hemagglutinin__InfluenzaA__ABV45981
MKTIIALSYILCLVFAQKLPGNDNSTATLCLGHHAVPNGTIVKTITNDQIEVTNATELVQSSSTGEICDSPHQILDGENCTLIDALLGDPQCDGFQNKKWDLFVERSKAYSNCYPYDVPDYASLRSLVASSGTLEFNNESFNWTGVTQNGTSSACIRRSNNSFFSRLNWLTHLKFKYPALNVTMPNNEKFDKLYIWGVHHPGTDNDQIFLYAQASGRITVSTKRSQQTVIPNIGSRPRVRNIPSRISIYWTIVKPGDILLINSTGNLIAPRGYFKIRSGKSSIMRSDAPIGKCNSECITPNGSIPNDKPFQNVNRITYGACPRYVKQNTLKLATGMRNVPEKQTRGIFGAIAGFIENGWEGMVDGWYGFRHQNSEGIGQAADLKSTQAAIDQINGKLNRLIGKTNEKFHQIEKEFSEVEGRIQDLEKYVEDTKIDLWSYNAELLVALENQHTIDLTDSEMNKLFEKTKKQLRENAEDMGNGCFKIYHKCDNACIGSIRNGTYDHDVYRDEALNNRFQIKGVELKSGYKDWIIWISFAISCFLLCVALLGFIMWACQKGNIRCNICI

SEQ ID NO: 1999 - protein, 565 aa, synthetic construct
  REGION 1..565: note = hemagglutinin__InfluenzaA__ABV82551
MKVKLLVLLCTFTATYADTICIGYHANNSTDTVDTVLEKNVTVTHSVNLLEDSHNGKLCLLKGIAPLQLGNCSVAGWILGNPECELLISKESWSYIVETPNPENGTCYPGYFADYEELREQLSSVSSFERFEIFPKESSWPNHTVTGVSASCSHNGESSFYRNLLWLTEKNGLYPNLSKSYANNKEKEVLVLWGVHHPPNIGDQRALYHTENAYVSVVSSHYSRRFTPEIAKRPKVRDQEGRINYYWTLLEPGDTIIFEANGNLIAPRFAFALSRGFGSGIITSNAPMDKCDAKCQTPQGAINSSLPFQNVHPVTIGECPKYVRSTKLRMVTGLRNIPSIQSRGLFGAIAGFIEGGWTGMVDGWYGYHHQNEQGSGYAADQKSTQNAINGITNKVNSVIEKMNTQFTAVGKEFNKLERRMENLNKKVDDGFLDIWTYNAELLVLLENERTLDFHDSNVKNLYEKVKSQLKNNAKEIGNGCFEFYHKCNDECMESVKNGTYDYPKYSEESKLNREKIDGVKLESMGVYQILAIYSTVASSLVLLVSLGAISFWMCSNGSLQCRICI

SEQ ID NO: 2000 - protein, 566 aa, synthetic construct; identical to SEQ ID NO: 1928
  REGION 1..566: note = hemagglutinin__InfluenzaA__ABV82562

SEQ ID NO: 2001 - protein, 566 aa, synthetic construct; identical to SEQ ID NO: 1928
  REGION 1..566: note = hemagglutinin__InfluenzaA__ABW36168

SEQ ID NO: 2002 - protein, 565 aa, synthetic construct; identical to SEQ ID NO: 1914
  REGION 1..565: note = hemagglutinin__InfluenzaA__ABW36179

SEQ ID NO: 2003 - protein, 565 aa, synthetic construct; identical to SEQ ID NO: 1957
  REGION 1..565: note = hemagglutinin__InfluenzaA__ABW36190

SEQ ID NO: 2004 - protein, 565 aa, synthetic construct; identical to SEQ ID NO: 1914
  REGION 1..565: note = hemagglutinin__InfluenzaA__ABW36201

SEQ ID NO: 2005 - protein, 565 aa, synthetic construct
  REGION 1..565: note = hemagglutinin__InfluenzaA__ABW36212
MKVKLLVLLCTFTATYADTICIGYHANNSTDTVDTVLEKNVTVTHSVNLLEDSHNGKLCLLKGIAPLQLGNCSVAGWILGNPECELLISKESWSYIVETPNPENGTCYPGYFADYEELREQLSSVSSFERFEIFPKENSWPNHTVTGVSASCSHNGKSSFYRNLLWLTGKNGLYPNLSKSYANNKEKEVLVLWGVHHPPNIGDQRALYHTENAYVSVVSSHYSRRFTPEIAKRPKVRDQEGRINYYWTLLEPGDTIIFEANGNLIAPRFAFALSRGLGSGIITSNAPMDECDAKCQTPQGAINSSLPFQNVHPVTIGECPKYVRSAKLRMVTGLRNIPSIQSRGLFGAIAGFIEGGWTGMVDGWYGYHHQNEQGSGYAADQKSTQNAINGITNKVNSVIEKMNTQFTAVGKEFNKLERRMENLNKKVDDGFLDIWTYNAELLVLLENERTLDFHDSNVKNLYEKVKGQLKNNAKEIGNGCFEFYHKCNDECMESVKNGTYDYPKYSEESKLNREKIDGVKLESMGVYQILAIYSTVASSLVLLVSLGAISFWMCSNGSLQCRICI

SEQ ID NO: 2006 - protein, 565 aa, synthetic construct; identical to SEQ ID NO: 1910
  REGION 1..565: note = hemagglutinin__InfluenzaA__ABW36223

SEQ ID NO: 2007 - protein, 565 aa, synthetic construct; identical to SEQ ID NO: 1910
  REGION 1..565: note = hemagglutinin__InfluenzaA__ABW36245

SEQ ID NO: 2008 - protein, 565 aa, synthetic construct; identical to SEQ ID NO: 1910
  REGION 1..565: note = hemagglutinin__InfluenzaA__ABW36267

SEQ ID NO: 2009 - protein, 565 aa, synthetic construct; identical to SEQ ID NO: 1914
  REGION 1..565: note = hemagglutinin__InfluenzaA__ABW36278

SEQ ID NO: 2010 - protein, 565 aa, synthetic construct
  REGION 1..565: note = hemagglutinin__InfluenzaA__ABW36289
MKLKLLVLLCTFTATYADTICIGYHANNSTDTVDTVLEKNVTVTHSVNLLEDSHNGKLCLLKGIAPLQLGNCSVAGWILGNPECELLISKESWSYIVETPNPENGTCYPGYFADYEELREQLSSVSSFERFEIFPKESSWPNHTVTGVSASCSHNGKSSFYRNLLWLTGKNGLYPNLSKSYANNKEKEVLVLWGVHHPPNIGDQRALYHTENAYVSVVSSHYSRRFTPEIAKRPKVRDQEGRINYYWTLLEPGDTIIFEANGNLIAPRFAFALSRGFGSGIITSNAPMDECDAKCQTPQGAINSSLPFQNVHPVTIGECPKYVRSTKLRMVTGLRNIPSIQSRGLFGAIAGFIEGGWTGMVDGWYGYHHQNEQGSGYAADQKSTQNAINGITNKVNSVIEKMNTQFTAVGKEFNKLERRMENLNKKVDDGFLDIWTYNAELLVLLENERTLDFHDSNVKNLYEKVKSQLKNNAKEIGNGCFEFYHKCNDECMESVKNGTYDYPKYSEESKLNREKIDGVKLESMGVYQILAIYSTVASSLVLLVSLGAISFWMCSNGSLQCRICI

SEQ ID NO: 2011 - protein, 565 aa, synthetic construct; identical to SEQ ID NO: 1921
  REGION 1..565: note = hemagglutinin__InfluenzaA__ABW36300

SEQ ID NO: 2012 - protein, 566 aa, synthetic construct
  REGION 1..566: note = hemagglutinin__InfluenzaA__ABW36311
MKAKLLVLLCALSATDADTICIGYHANNSTDTVDTVLEKNVTVTHSVNLLEDSHNGKLCRLKGIAPLQLGKCSIAGWILGNPECESLFSKKSWSYIAETPNSENGTCYPGYFADYEELREQLSSVSSFERFEIFPKERSWPKHNVTRGVTASCSHKGKSSFYRNLLWLTEKNGSYPNLSKSYVNNKEKEVLVLWGVHHPSNIEDQKTIYRKENAYVSVVSSNYNRRFTPEIAKRPKVRDQEGRINYYWTLLEPGDTIIFEANGNLIAPWYAFALSRGFGSGIITSNASMDECDTKCQTPQGAINSSLPFQNVHPVTIGECPKYVRSTKLRMVTGLRNIPSIQSRGLFGAIAGFIEGGWTGMIDGWYGYHHQNEQGSGYAADQKSTQNAINGITNKVNSVIEKMNTQFTAVGKEFNKLEKRMENLNKKVDDGFLDIWTYNAELLVLLENERTLDSHDSNVKNLYEKVKSQLKNNAKEIGNGCFEFYHKCNNECMESVKNGTYDYPKYSEESKLNREKIDGVKLESMGVYQILAIYSTVASSLVLLVSLGAISFWMCSNGSLQCRICI

SEQ ID NO: 2013 - protein, 566 aa, synthetic construct
  REGION 1..566: note = hemagglutinin__InfluenzaA__ABW38363
MKTIIALSYILCLVFAQKLPGNDNSTATLCLGHHAVPNGTIVKTITNDQIEVTNATELVQSSSTGEICDSPHQILDGENCTLIDALLGDPQCDGFQNKKWDLFVERSKAYSNCYPYDVPDYASLRSLVASSGTLEFNNESFNWTGVTQNGTSSACKRRSNNSFFSRLNWLTHLKFKYPALNVTMPNNEKFDKLYIWGVHHPGTDNDQIFLYAQASGRITVSTKRSQQTVIPNIGSRPRVRNIPSRISIYWTIVKPGDILLINSTGNLIAPRGYFKIRSGKSSIMRSDAPIGKCNSECITPNGSIPNDKPFQNVNRITYGACPRYVKQNTLKLATGMRNVPEKQTRGIFGAIAGFIENGWEGMVDGWYGFRHQNSEGIGQAADLKSTQAAIDQINGKLNRLIGKTNEKFHQIEKEFSEVEGRIQDLEKYVEDTKIDLWSYNAELIVALENQHTIDLTDSEMNKLFERTKKQLRENAEDMGNGCFKIYHKCDNACIGSIRNGTYDHDVYRDEALNNRFQIKGVELKSGYKDWILWISFAISCFLLCVALLGFIMWACQKGNIRCNICI

SEQ ID NO: 2014 - protein, 565 aa, synthetic construct
  REGION 1..565: note = hemagglutinin__InfluenzaA__ABW39777
MKVKLLVLLCTFTATYADTICIGYHANNSTDTVDTVLEKNVTVTHSVNLLEDSHNGKLCLLKGIAPLQLGNCSVAGWILGNPECELLISKESWSYIVETPNPENGTCYPGYFADYEELREQLSSVSSFERFEIFPKENSWPNHTVTGVSASCSHNGKSSFYRNLLWLTGKNGLYPNLSKSYANNKEKEVLVLWGVHHPPNIGDQRALYHTENAYVSVVSSHYSRRFTPEIAKRPKVRDQEGRINYYWTLLEPGDTIIFEANGNLIAPRFAFALSRGLGSGIITSNAPMDECDAKCQTPQGAINSSLPFQNVHPVTIGECPKYVRSAKLRMVTGLRNIPSIQSRGLFGAIAGFIEGGWTGMVDGWYGYHHQNEQGSGYAADQKSTQNAINGITNKVNSVIEKMNTQFTAVGKEFNKLERRMENLNKKVDDGFLDIWTYNAELLVLLENERTLDFHDSNVKNLYEKVKSQLKNNAKEIGNGCFEFYHKCNDECMESVKNGTYDYPKYSEESKLNREKIDGVKLESMGVYQILAIYSTVASSLVLLVSLGAISFWMCSNGSLQCRICI

SEQ ID NO: 2015 - protein, 565 aa, synthetic construct; identical to SEQ ID NO: 1914
  REGION 1..565: note = hemagglutinin__InfluenzaA__ABW39806

SEQ ID NO: 2016 - protein, 565 aa, synthetic construct; identical to SEQ ID NO: 1921
  REGION 1..565: note = hemagglutinin__InfluenzaA__ABW39817

SEQ ID NO: 2017 - protein, 565 aa, synthetic construct
  REGION 1..565: note = hemagglutinin__InfluenzaA__ABW39828
MKVKLLVLLCTFTATYADTICIGYHANNSTDTVDTVLEKNVTVTHSVNLLEDNHNGKLCLLKGIAPLQLGNCSVAGWILGNPECELLISKESWSYIVEKPNPENGTCYPGHFADYEELREQLSSVSSFERFEIFPKESSWPNHTVTGVSASCSHNGESSFYKNLLWLTGKNGLYPNLSKSYANNKEKEVLVLWGVHHPPNIGDQMTLYHKENAYVSVVSSHYSRKFTPEIAKRPKVRDQEGRINYYWTLLEPGDTIIFEANGNLIAPRYAFALSRGFGSGIINSNAPMDECDAKCQTPQGAINSSLPFQNVHPVTIGECPKYVRSAKLRMVTGLRNIPSIQSRGLFGAIAGFIEGGWTGMVDGWYGYHHQNEQGSGYAADQKSTQNAINGITNKVNSVIEKMNTQFTAVGKEFNKLERRMENLNKKVDDGFIDVWTYNAELLVLLENERTLDFHDSNVKNLYEKVKNQLKNNAKEIGNGCFEFYHKCNDECMESVKNGTYDYPKYSEESKLSREKIDGVKLESMGVYQILAIYSTVASSLVLLVSLGAISFWMCSNGSLQCRICI

SEQ ID NO: 2018 - protein, 565 aa, synthetic construct
  REGION 1..565: note = hemagglutinin__InfluenzaA__ABW39839
MKVKLLVLLCTFTATYADTICIGYHANNSTDTVDTVLEKNVTVTHSVNLLEDSHNGKLCLLKGIAPLQLGNCSVAGWILGNPECELLISKESWSYIVETPNPENGTCYPGYFADYEELREQLSSVSSFERFEIFPKESSWPNHTVTGVSASCSHNGKSSFYRNLLWLTGKNGLYPNLSKSYSNNKEKEVLVLWGVHHPPNIGDQRALYHTENAYVSVVSSHYSRRFTPEIAKRPKVRDQEGRINYYWTLLEPGDTIIFEANGNLIAPRFAFALSRGFGSGIITSNAPMGECDAKCQTPQGAINSSLPFQNVHPVTIGECPKYVRSAKLRMVTGLRNIPSIQSRGLFGAIAGFIEGGWTGMVDGWYGYHHQNEQGSGYAADQKSTQNAINGITNKVNSVIEKMNTQFTAVGKEFNKLERRMENLNKKVDDGFLDIWTYNAELLVLLENERTLDFHDSNVKNLYEKVKSQLKNNAKEIGNGCFEFYHKCNDECMESVRNGTYDYPKYSEESKLNREKIDGVKLESMGVYQILAIYSTVASSLVLLVSLGAISFWMCSNGSLQCRICI

SEQ ID NO: 2019 - protein, 565 aa, synthetic construct
  REGION 1..565: note = hemagglutinin__InfluenzaA__ABW39850
MKVKLLVLLCTFTATNADTICIGYHANNSTDTVDTVLEKNVTVTHSVNLLENSHNGKLCLLKGIAPLQLGNCSVAGWILGNPECELLISKESWSYIVEKPNPENGTCYPGHFADYEELREQLSSVSSFERFEIFPKESSWPNHTVTGVSASCSHNGESSFYRNLLWLTGKNGLYPNLSKSYANNKEKEVLVLWGVHHPPNIGDQKALYHTENAYVSVVSSHYSRKFTPEIAKRPKVRDQEGRINYYWTLLEPGDTIIFEANGNLIAPRYAFALSRGFGSGIINSNAPMDKCDAKCQTPQGAINSSLPFQNVHPVTIGECPKYVRSAKLRMVTGLRNIPSIQSRGLFGAIAGFIEGGWTGMVDGWYGYHHQNEQGSGYAADQKSTQNAINGITNKVNSVIEKMNTQFTAVGKEFNKLERRMENLNKKVDDGFIDIWTYNAELLVLLENERTLDFHDSNVKNLYEKVKGQLKNNAKEIGNGCFEFYHKCNDECMESVKNGTYDYPKYSEESKLNREKIDGVKLESMGVYQILAIYSTVASSLVLLVSLGAISFWMCSNGSLQCRICI

SEQ ID NO: 2020 - protein, 565 aa, synthetic construct; identical to SEQ ID NO: 1945
  REGION 1..565: note = hemagglutinin__InfluenzaA__ABW39861

SEQ ID NO: 2021 - protein, 566 aa, synthetic construct; identical to SEQ ID NO: 1928
  REGION 1..566: note = hemagglutinin__InfluenzaA__ABW39872

SEQ ID NO: 2022 - protein, 565 aa, synthetic construct
  REGION 1..565: note = hemagglutinin__InfluenzaA__ABW39883
MKVKLLVLLCTFTATYADTICIGYHANNSTDTVDTVLEKNVTVTHSVNLLEDSHNGKLCLLKGIAPLQLGNCSVAGWILGNPECELLISKESWSYIVETPNPENGTCYPGYFADYEELREQLSSVSSFERFEIFPKESSWPNHTVTGVSASCSHNGKSSFYRNLLWLTGKNGLYPNLSKSYANNKEKEVLVLWGVHHPHNIGDQRALYHTENAYVSVVSSHYSRRFTPEIAKRPKVRDQEGRINYYWTLLEPGDTIIFEANGNLIAPRFAFALSRGFGSGIITSNAPMDECDAKCQTPQGAINSSLPFQNVHPVTIGECPKYVRSTKLRMVTGLRNIPSIQSRGLFGAIAGFIEGGWTGMVDGWYGYHHQNEQGSGYAADQKSTQNAINGITNKVNSVIEKMNTQFTAVGKEFNKLERRMENLNKKVDDGFLDIWTYNAELLVLLENERTLDFHDSNVKNLYEKVKSQLKNNAKEIGNGCFEFYHKCNDECMESVKNGTYDYPKYSEESKLNREKIDGVKLESMGVYQILAIYSTVASSLVLLVSLGAISFWMCSNGSLQCRICI

SEQ ID NO: 2023 - protein, 565 aa, synthetic construct; identical to SEQ ID NO: 1955
  REGION 1..565: note = hemagglutinin__InfluenzaA__ABW39894

SEQ ID NO: 2024 - protein, 565 aa, synthetic construct; identical to SEQ ID NO: 1910
  REGION 1..565: note = hemagglutinin__InfluenzaA__ABW39905

SEQ ID NO: 2025 - protein, 565 aa, synthetic construct; identical to SEQ ID NO: 1914
  REGION 1..565: note = hemagglutinin__InfluenzaA__ABW39927

SEQ ID NO: 2026 - protein, 566 aa, synthetic construct
  REGION 1..566: note = hemagglutinin__InfluenzaA__ABW39938
MKTIIALSYILCLVFAQKIPGNDNSTATLCLGHHAVPNGTIVKTITNDQIEVTNATELVQSSSTGEICDSPHQILDGENCTLIDALLGDPQCDGFQNKKWDLFVERSKAYSNCYPYDVPDYASLRSLVASSGTLEFNNESFNWTGVTQNGTSSACIRRSNNSFFSRLNWLTHLKFKYPALNVTMPNNEKFDKLYIWGVHHPGTDNDQIFLYAQASGRITVSTKRSQQTVIPNIGSRPRVRNIPSRISIYWTIVKPGDILLINSTGNLIAPRGYFKIRSGKSSIMRSDAPIGKCNSECITPNGSIPNDKPFQNVNRITYGACPRYVKQNTLKLATGMRNVPEKQTRGIFGAIAGFIENGWEGMVDGWYGFRHQNSEGIGQAADLKSTQAAIDQINGKLNRLIGKTNEKFHQIEKEFSEVEGRIQDLEKYVEDTKIDLWSYNAELLVALENQHTIDLTDSEMNKLFEKTKKQLRENAEDMGNGCFKIYHKCDNACIGSIRNGTYDHDAYRDEALNNRFQIKGVELKSGYKDWILWISFAISCFLLCVALLGFIMWACQKGNIRCNICI

SEQ ID NO: 2027 - protein, 565 aa, synthetic construct; identical to SEQ ID NO: 1914
  REGION 1..565: note = hemagglutinin__InfluenzaA__ABW39949

SEQ ID NO: 2028 - protein, 565 aa, synthetic construct; identical to SEQ ID NO: 1955
  REGION 1..565: note = hemagglutinin__InfluenzaA__ABW39960

SEQ ID NO: 2029 - protein, 565 aa, synthetic construct; identical to SEQ ID NO: 1910
  REGION 1..565: note = hemagglutinin__InfluenzaA__ABW39982

SEQ ID NO: 2030 - protein, 565 aa, synthetic construct; identical to SEQ ID NO: 1930
  REGION 1..565: note = hemagglutinin__InfluenzaA__ABW39993

SEQ ID NO: 2031 - protein, 565 aa, synthetic construct; identical to SEQ ID NO: 1910
  REGION 1..565: note = hemagglutinin__InfluenzaA__ABW40004

SEQ ID NO: 2032 - protein, 565 aa, synthetic construct; identical to SEQ ID NO: 1956
  REGION 1..565: note = hemagglutinin__InfluenzaA__ABW40015

SEQ ID NO: 2033 - protein, 566 aa, synthetic construct; identical to SEQ ID NO: 1987
  REGION 1..566: note = hemagglutinin__InfluenzaA__ABW40026

SEQ ID NO: 2034 - protein, 565 aa, synthetic construct; identical to SEQ ID NO: 1910
  REGION 1..565: note = hemagglutinin__InfluenzaA__ABW40037

SEQ ID NO: 2035 - protein, 565 aa, synthetic construct
  REGION 1..565: note = hemagglutinin__InfluenzaA__ABW40048
MKVKLLVLLCTFTATYADTICIGYHANNSTDTVDTVLEKNVTVTHSVNLLEDSHNGKLCLLKGIAPLQLGNCSVAGWILGNPECELLISKESWSYIVETPNPENGTCYPGYFADYEELREQLSSVSSFERFEIFPKESSWPNHTVTGVSASCSHNGKSSFYRNLLWLTGKNGLYPNLSKSYANNKEKEVLVLWGVHHPPNIGDQKALYHTENAYVSVVSSHYSRRFTPEIAKRPKVRDQEGRINYYWTLLEPGDTIIFEANGNLIAPRFAFALSRGFGSGIITSNAPMDECDAKCQTPQGAINSSLPFQNVHPVTIGECPKYVRSTKLRMVTGLRNIPSIQSRGLFGAIAGFIEGGWTGMVDGWYGYHHQNEKGSGYAADQKSTQNAINGITNKVNSVIEKMNTQFTAVGKEFNKLERRMENLNKKVDDGFLDIWTYNAELLVLLENERTLDFHDSNVKNLYEKVKSQLKNNAKEIGNGCFEFYHKCNDECMESVKNGTYDYPKYSEESKLNREKIDGVKLESMGVYQILAIYSTVASSLVLLVSLGAISFWMCSNGSLQCRICI

SEQ ID NO: 2036 - protein, 565 aa, synthetic construct; identical to SEQ ID NO: 1914
  REGION 1..565: note = hemagglutinin__InfluenzaA__ABW40059

SEQ ID NO: 2037 - protein, 565 aa, synthetic construct
  REGION 1..565: note = hemagglutinin__InfluenzaA__ABW40070
MKVKLLVLLCTFTATYADTICIGYHANNSTDTVDTVLEKNVTVTHSVNLLENSHNGKLCLLKGIAPLQLGNCSVAGWILGNPECELLISKESWSYIVEKPNPENGTCYPGHFADYEELREQLSSVSSFKRFEIFPKESSWPNHTVTGVSASCSHNGESSFYRNLLWLTGKNGLYPNLSKSYANNKEKEVLVLWGVHHPPNIGDQKALYHTENAYVSVVSSHYSRKFTPEIAKRPKVRDQEGRINYYWTLLEPGDTIIFEANGNLIAPRYAFALSRGFGSGIINSNAPMDKCDSKCQTPQGAINSSLPFQNVHPVTIGECPKYVRSAKLRMVTGLRNIPSIQSRGLFGAIAGFIEGGWTGMVDGWYGYHHQNEQGSGYAADQKSTQNAINGITNKVNSVIEKMNTQFTAVGKEFNKLERRMENLNKKVDDGFIDIWTYNAELLVLLENERTLDFHDSNVKNLYEKVKSQLKNNAKEIGNGCFEFYHKCNDECMESVKNGTYDYPKYSEESKLNREKIDGVKLESMGVYQILAIYSTVASSLVLLVSLGAISFWMCSNGSLQCRICI

SEQ ID NO: 2038 - protein, 566 aa, synthetic construct; identical to SEQ ID NO: 1928
  REGION 1..566: note = hemagglutinin__InfluenzaA__ABW40081

SEQ ID NO: 2039 - protein, 565 aa, synthetic construct
  REGION 1..565: note = hemagglutinin__InfluenzaA__ABW40092
MKVKLLILLCTFTATYADTICIGYHANNSTDTVDTVLEKNVTVTHSVNLLEDSHNGKLCLLKGIAPLQLGNCSVAGWILGNPECELLISKESWSYIVETPNPENGTCYPGYFADYEELREQLSSVSSFKRFEIFPKESSWPNHTVTGVSASCSHNGKSSFYRNLLWLTGKNGLYPNLSKSYANNKEKEVLVLWGVHHPPNIGDQRALYHTENAYVSVVSSHYSRRFTPEIAKRPKVRDQEGRINYYWTLLEPGDTIIFEANGNLIAPRFAFALSRGFGSGIITSNAPMDECDAKCQTPQGAINSSLPFQNVHPVTIGECPKYVRSTKLRMVTGLRNIPSIQSRGLFGAIAGFIEGGWTGMVDGWYGYHHQNEQGSGYAADQKSTQNAINGITNKVNSVIEKMNTQFTAVGKEFNKLERRMENLNKKVDDGFLDIWTYNAELLVLLENERTLDFHDSNVKNLYEKVKSQLKNNAKEIGNGCFEFYHKCNDECMESVKNGTYDYPKYSEESKLNREKIDGVKLESMGVYQILAIYSTVASSLVLLVSLGAISFWMCSNGSLQCRICI

SEQ ID NO: 2040 - protein, 565 aa, synthetic construct; identical to SEQ ID NO: 1957
  REGION 1..565: note = hemagglutinin__InfluenzaA__ABW40103

SEQ ID NO: 2041 - protein, 565 aa, synthetic construct
  REGION 1..565: note = hemagglutinin__InfluenzaA__ABW40114
MKVKLLILLCTFTATYADTICIGYHANNSTDTVDTVLEKNVTVTHSVNLLEDSHNGKLCLLKGIAPLQLGNCSVAGWILGNPECELLISKESWSYIVETPNPENGTCYPGYFADYEELREQLSSVSSFERFEIFPKESSWPNHTVTGVSTSCSHNGKSSFYRNLLWLTGKNGLYPNLSKSYANNKEKEVLVLWGVHHPPNIGNQRALYHTENAYVSVVSSHYSRRFTPEIAKRPKVRDQEGRINYYWTLLEPGDTIIFEANGNLIAPRFAFALSRGFGSGIITSNAPMDECDAKCQTPQGAINSSLPFQNVHPVTIGECPKYVRSTKLRMVTGLRNIPSIQSRGLFGAIAGFIEGGWTGMVDGWYGYHHQNEQGSGYAADQKSTQNAINGITNKVNSVIEKMNTQFTAVGKEFNKLERRMENLNKKVDDGFLDIWTYNAELLVLLENERTLDFHDSNVKNLYEKVKSQLKNNAKEIGNGCFEFYHKCNDECMESVKNGTYDYPKYSEESKLNREKIDGVKLESMGVYQILAIYSTVASSLVLLVSLGAISFWMCSNGSLQCRICI

SEQ ID NO: 2042 - protein, 565 aa, synthetic construct; identical to SEQ ID NO: 1910
  REGION 1..565: note = hemagglutinin__InfluenzaA__ABW40125

SEQ ID NO: 2043 - protein, 566 aa, synthetic construct; identical to SEQ ID NO: 1928
  REGION 1..566: note = hemagglutinin__InfluenzaA__ABW40136

SEQ ID NO: 2044 - protein, 565 aa, synthetic construct; identical to SEQ ID NO: 1945
  REGION 1..565: note = hemagglutinin__InfluenzaA__ABW40147

SEQ ID NO: 2045 - protein, 565 aa, synthetic construct; identical to SEQ ID NO: 1914
  REGION 1..565: note = hemagglutinin__InfluenzaA__ABW40158

SEQ ID NO: 2046 - protein, 565 aa, synthetic construct; identical to SEQ ID NO: 1914
  REGION 1..565: note = hemagglutinin__InfluenzaA__ABW40180

SEQ ID NO: 2047 - protein, 566 aa, synthetic construct; identical to SEQ ID NO: 1928
  REGION 1..566: note = hemagglutinin__InfluenzaA__ABW40191

SEQ ID NO: 2048 - protein, 565 aa, synthetic construct; identical to SEQ ID NO: 1930
  REGION 1..565: note = hemagglutinin__InfluenzaA__ABW40202

SEQ ID NO: 2049 - protein, 565 aa, synthetic construct; identical to SEQ ID NO: 1910
  REGION 1..565: note = hemagglutinin__InfluenzaA__ABW40213

SEQ ID NO: 2050 - protein, 565 aa, synthetic construct; identical to SEQ ID NO: 1910
  REGION 1..565: note = hemagglutinin__InfluenzaA__ABW40224

SEQ ID NO: 2051 - protein, 565 aa, synthetic construct; identical to SEQ ID NO: 1914
  REGION 1..565: note = hemagglutinin__InfluenzaA__ABW40235

SEQ ID NO: 2052 - protein, 566 aa, synthetic construct
  REGION 1..566: note = hemagglutinin__InfluenzaA__ABW40246
MKTIIALSYILCLVFAQKLPGNDNSTATLCLGHHAVPNGTIVKTITNDQIEVTNATELVQSSSTGEICDSPHQILDGENCTLIDALLGDPQCDGFQNKKWDLFVERSKAYSNCYPYDVPDYASLRSLVASSGTLEFNNESFNWTGVTQNGTSSACIRRSNNSFFSRLNWLTHLKFKYPALNVTMPNNEKFDKLYIWGVHHPGTDNDQVFLYAQASGRITVSTKRSQQTVIPNIGSRPRVRNIPSRISIYWTIVKPGDILLINSTGNLIAPRGYFRIRSGKSSIMRSDAPIGKCNSECITPNGSIPNDKPFQNVNRITYGACPRYVKQNTLKLATGMRNVPEKQTRGIFGAIAGFIENGWEGMVDGWYGFRHQNSEGIGQAADLKSTQAAIDQINGKLNRLIGKTNEKFHQIEKEFSEVEGRIQDLEKYVEDTKIDLWSYNAELLVALENQHTIDLTDSEMNKLFEKTKKQLRENAEDMGNGCFKIYHKCDNACIGSIRNGTYDHDVYRDEALNNRFQIKGVELKSGYKDWILWISFAISCFLLCVALLGFIMWACQKGNIRCNICI

SEQ ID NO: 2053 - protein, 565 aa, synthetic construct
  REGION 1..565: note = hemagglutinin__InfluenzaA__ABW40257
MKVKLLILLCTFTATYADTICIGYHANNSTDTVDTVLEKNVTVTHSVNLLEDSHNGKLCLLKGIAPLQLGNCSVAGWILGNPECELLISKESWSYIVETPNPENGTCYPGYFADYEELREQLSSVSSFERFEIFPKESSWPNHTVTGVSASCSHNGKSSFYRNLLWLTGKNGLYPNLSKSYANNKEKEVLVLWGVHHPPNIGDQRALYHTENAYVSVVSSHYSRRFTPEIAKRPKVRDQEGRINYYWTLLEPGDTIIFEANGNLIAPRFAFALSRGFGSGIITSNAPMDECDAKCQTPQGAINSSLPFQNVHPVTIGECPKYVRSTKLRMVTGLRNIPSIQSRGLFGAIAGFIEGGWTGMVDGWYGYHHQNEQGSGYAADQKSTQNAINGITNKVNSIIEKMNTQFTAVGKEFNKLERRMENLNKKVDDGFLDIWTYNAELLVLLENERTLDFHDSNVKNLYEKVKSQLKNNAKEIGNGCFEFYHKCNDECMESVKNGTYDYPKYSEESKLNREKIDGVKLESMGVYQILAIYSTVASSLVLLVSLGAISFWMCSNGSLQCRICI

SEQ ID NO: 2054 - protein, 566 aa, synthetic construct; identical to SEQ ID NO: 1987
  REGION 1..566: note = hemagglutinin__InfluenzaA__ABW40268

SEQ ID NO: 2055 - protein, 565 aa, synthetic construct
  REGION 1..565: note = hemagglutinin__InfluenzaA__ABW40312
MKVKLLVLLCTFTATYADTICIGYHANNSTDTVDTVLEKNVTVTHSVNLLEDSHNGKLCLLKGIAPLQLGNCSVAGWILGNPECELLISKESWSYIVETPNPENGTCYPGYFADYEELREQLSSVSSFERFEIFPKESSWPNHTVTGVSASCSHNGRSSFYRNLLWLTGKNGLYPNLSKSYANNKEKEVLVLWGVHHPPNIGDQRALYHTENAYVSVVSSHYSRRFTPEIAKRPKVRDQEGRINYYWTLLEPGDTIIFEANGNLIAPRFAFALSRGFGSGIITSNAPMDECDAKCQTPQGAINSSLPFQNVHPVTIGECPKYVRSTKLRMVTGLRNIPSIQSRGLFGAIAGFIEGGWTGMVDGWYGYHHQNEQGSGYAADQKSTQNAINGITNKVNSVIEKMNTQFTAVGKEFNKLERRMENLNKKVDDGFLDIWTYNAELLVLLENERTLDFHDSNVKNLYEKVKSQLKNNAKEIGNGCFEFYHKCNDECMESVKNGTYDYPKYSEESKLNREKIDGVKLESMGVYQILAIYSTVASSLVLLVSLGAISFWMCSNGSLQCRICI

SEQ ID NO: 2056 - protein, 566 aa, synthetic construct; identical to SEQ ID NO: 1928
  REGION 1..566: note = hemagglutinin__InfluenzaA__ABW40323

SEQ ID NO: 2057 - protein, 565 aa, synthetic construct; identical to SEQ ID NO: 1956
  REGION 1..565: note = hemagglutinin__InfluenzaA__ABW40334

SEQ ID NO: 2058 - protein, 565 aa, synthetic construct; identical to SEQ ID NO: 1956
  REGION 1..565: note = hemagglutinin__InfluenzaA__ABW40345

SEQ ID NO: 2059 - protein, 565 aa, synthetic construct
  REGION 1..565: note = hemagglutinin__InfluenzaA__ABW40356
MKVKLLVLLCTFTATYADTICIGYHANNSTDTVDTVLEKNVTVTHSVNLLEDSHNGKLCLLKGIAPLQLGNCSVAGWILGNPECELLISKESWSYIVETPNPENGTCYPGYFADYEELREQLSSVSSFERFEIFPKESSWPNHTVTGVSASCSHNGKSSFYRNLLWLTGKNGLYPNLSKSYANNKEKEVLVMWGVHHPPNIGDQRALYHTENAYVSVVSSHYSRRFTPEIAKRPKVRDQEGRINYYWTLLEPGDTIIFEANGNLIAPRFAFALSRGFGSGIITSNAPMGECDAKCQTPQGAINSSLPFQNVHPVTIGECPKYVRSAKLRMVTGLRNIPSIQSRGLFGAIAGFIEGGWTGMVDGWYGYHHQNEQGSGYAADQKSTQNAINGITNKVNSVIEKMNTQFTAVGKEFNKLERRMENLNKKVDDGFLDIWTYNAELLVLLENERTLDFHDSNVKNLYEKVKSQLKNNAKEIGNGCFEFYHKCNDECMESVKNGTYDYPKYSEESKLNREKIDGVKLESMGVYQILAIYSTVASSLVLLVSLGAISFWMCSNGSLQCRICI

SEQ ID NO: 2060 - protein, 565 aa, synthetic construct; identical to SEQ ID NO: 1914
  REGION 1..565: note = hemagglutinin__InfluenzaA__ABW40367

SEQ ID NO: 2061 - protein, 566 aa, synthetic construct; identical to SEQ ID NO: 1928
  REGION 1..566: note = hemagglutinin__InfluenzaA__ABW40378

SEQ ID NO: 2062 - protein, 565 aa, synthetic construct; identical to SEQ ID NO: 1914
  REGION 1..565: note = hemagglutinin__InfluenzaA__ABW40389

SEQ ID NO: 2063 - protein, 565 aa, synthetic construct; identical to SEQ ID NO: 1910
  REGION 1..565: note = hemagglutinin__InfluenzaA__ABW40400

SEQ ID NO: 2064 - protein, 565 aa, synthetic construct; identical to SEQ ID NO: 1910
  REGION 1..565: note = hemagglutinin__InfluenzaA__ABW40411

SEQ ID NO: 2065 - protein, 565 aa, synthetic construct; identical to SEQ ID NO: 1910
  REGION 1..565: note = hemagglutinin__InfluenzaA__ABW40422

SEQ ID NO: 2066 - protein, 565 aa, synthetic construct; identical to SEQ ID NO: 1956
  REGION 1..565: note = hemagglutinin__InfluenzaA__ABW40433

SEQ ID NO: 2067 - protein, 565 aa, synthetic construct; identical to SEQ ID NO: 1930
  REGION 1..565: note = hemagglutinin__InfluenzaA__ABW40444

SEQ ID NO: 2068 - protein, 565 aa, synthetic construct; identical to SEQ ID NO: 1947
  REGION 1..565: note = hemagglutinin__InfluenzaA__ABW40455

SEQ ID NO: 2069 - protein, 565 aa, synthetic construct; identical to SEQ ID NO: 1914
  REGION 1..565: note = hemagglutinin__InfluenzaA__ABW40466

SEQ ID NO: 2070 - protein, 565 aa, synthetic construct; identical to SEQ ID NO: 1914
  REGION 1..565: note = hemagglutinin__InfluenzaA__ABW40477

SEQ ID NO: 2071 - protein, 565 aa, synthetic construct; identical to SEQ ID NO: 1910
  REGION 1..565: note = hemagglutinin__InfluenzaA__ABW40488

SEQ ID NO: 2072 - protein, 565 aa, synthetic construct; identical to SEQ ID NO: 1914
  REGION 1..565: note = hemagglutinin__InfluenzaA__ABW40499

SEQ ID NO: 2073 - protein, 565 aa, synthetic construct; identical to SEQ ID NO: 1956
  REGION 1..565: note = hemagglutinin__InfluenzaA__ABW40510

SEQ ID NO: 2074 - protein, 565 aa, synthetic construct; identical to SEQ ID NO: 1910
  REGION 1..565: note = hemagglutinin__InfluenzaA__ABW40521

SEQ ID NO: 2075 - protein, 565 aa, synthetic construct; identical to SEQ ID NO: 1914
  REGION 1..565: note = hemagglutinin__InfluenzaA__ABW40532

SEQ ID NO: 2076 - protein, 565 aa, synthetic construct
  REGION 1..565: note = hemagglutinin__InfluenzaA__ABW40543
MKVKLLVLLCTFTATYADTICIGYHANNSTDTVDTVLEKNVTVTHSVNLLEDRHNGKLCLLKGIAPLQLGNCSVAGWILGNPECELLTSKESWSYIVETPNPENGTCYPGYFADYEELREQLSSVSSFERFEIFPKESSWPNHTVTGVSASCSHNGKSSFYRNLLWLTGKNGLYPNLSKSYANNKEKEVLVLWGVHHPPNIGDQRALYHTENAYVSVVSSHYSRRFTPEIAKRPKVRDQEGRINYYWTLLEPGDTIIFEANGNLIAPRFAFALSRGFGSGIITSNAPMDECDAKCQTPQGAINSSLPFQNVHPVTIGECPKYVRSAKLRMVTGLRNIPSIQSRGLFGAIAGFIEGGWTGMVDGWYGYHHQNEQGSGYAADQKSTQNAINGITNKVNSVIEKMNTQFTAVGKEFNKLERRMENLNKKVDDGFLDIWTYNAELLVLLENERTLDFHDSNVKNLYEKVKSQLKNNAKEIGNGCFEFYHKCNDECMESVKNGTYDYPKYSEESKLNREKIDGVKLESMGVYQILAIYSTVASSLVLLVSLGAISFWMCSNGSLQCRICI

SEQ ID NO: 2077 - protein, 565 aa, synthetic construct; identical to SEQ ID NO: 2055
  REGION 1..565: note = hemagglutinin__InfluenzaA__ABW40554

SEQ ID NO: 2078 - protein, 565 aa, synthetic construct; identical to SEQ ID NO: 1914
  REGION 1..565: note = hemagglutinin__InfluenzaA__ABW40565

SEQ ID NO: 2079 - protein, 565 aa, synthetic construct
  REGION 1..565: note = hemagglutinin__InfluenzaA__ABW40576
MKVKLLILLCTFTATYADTICIGYHANNSTDTVDTVLEKNVTVTHSVNLLEDSHNGKLCLLKGIAPLQLGNCSVAGWILGNPECELLISKESWSYIVETPNPENGTCYPGYFADYEELREQLSSVSSFERFEIFPKESSWPNHTVTGVSASCSHNGKSSFYRNLLWLTGKNGLYPNLSKSYANNKEKEVLVLWGVHHPPNIGDQRALYHTENTYVSVVSSHYSRRFTPEIAKRPKVRDQEGRINYYWTLLEPGDTIILEANGNLIAPRFAFALSRGFGSGIITSNAPMDECDAKCQTPQGAINSSLPFQNVHPVTIGECPKYVRSTKLRMVTGLRNIPSIQSRGLFGAIAGFIEGGWTGMVDGWYGYHHQNEQGSGYAADQKSTQNAINGITNKVNSVIEKMNTQFTAVGKEFNKLERRMENLNKKVDDGFLDIWTYNAELLVLLENERTLDFHDSNVKNLYEKVKSQLKNNAKEIGNGCFEFYHKCNDECMESVKNGTYDYPKYSEESKLNREKIDGVKLESMGVYQILAIYSTVASSLVLLVSLGAISFWMCSNGSLQCRICI

SEQ ID NO: 2080 - protein, 566 aa, synthetic construct; identical to SEQ ID NO: 1987
  REGION 1..566: note = hemagglutinin__InfluenzaA__ABW40587

SEQ ID NO: 2081 - protein, 565 aa, synthetic construct; identical to SEQ ID NO: 1956
  REGION 1..565: note = hemagglutinin__InfluenzaA__ABW40598

SEQ ID NO: 2082 - protein, 565 aa, synthetic construct; identical to SEQ ID NO: 1930
  REGION 1..565: note = hemagglutinin__InfluenzaA__ABW40609

SEQ ID NO: 2083 - protein, 565 aa, synthetic construct; identical to SEQ ID NO: 1945
  REGION 1..565: note = hemagglutinin__InfluenzaA__ABW40620

SEQ ID NO: 2084 - protein, 566 aa, synthetic construct; identical to SEQ ID NO: 1987
  REGION 1..566: note = hemagglutinin__InfluenzaA__ABW40631

SEQ ID NO: 2085 - protein, 565 aa, synthetic construct; identical to SEQ ID NO: 1910
  REGION 1..565: note = hemagglutinin__InfluenzaA__ABW40642

SEQ ID NO: 2086 - protein, 566 aa, synthetic construct; identical to SEQ ID NO: 1987
  REGION 1..566: note = hemagglutinin__InfluenzaA__ABW40653

SEQ ID NO: 2087 - protein, 565 aa, synthetic construct; identical to SEQ ID NO: 1956
  REGION 1..565: note = hemagglutinin__InfluenzaA__ABW40664

SEQ ID NO: 2088 - protein, 565 aa, synthetic construct; identical to SEQ ID NO: 1930
  REGION 1..565: note = hemagglutinin__InfluenzaA__ABW40675

SEQ ID NO: 2089 - protein, 565 aa, synthetic construct; identical to SEQ ID NO: 2059
  REGION 1..565: note = hemagglutinin__InfluenzaA__ABW71294

SEQ ID NO: 2090 - protein, 565 aa, synthetic construct; identical to SEQ ID NO: 1956
  REGION 1..565: note = hemagglutinin__InfluenzaA__ABW71305

SEQ ID NO: 2091 - protein, 565 aa, synthetic construct
  REGION 1..565: note = hemagglutinin__InfluenzaA__ABW71316
MKVKLLILLCTFTATYADTICIGYHANNSTDTVDTVLEKNVTVTHSVNLLEDSHNGKLCLLKGIAPLQLGNCSVAGWILGNPECELLISKESWSYIVETPNPENGTCYPGYFADYEELREQLSSVSSFERFEIFPKESSWPNHTVTGVSASCSHNGKSSFYRNLLWLTGKNGLYPNLSKSYANNKEKEVLVLWGVHHPPNIGDQRALYHTENAYVSVVSSHYSRRFTPEIAKRPKVRDQEGRINYYWTLLEPRDTIIFEANGNLIAPRFAFALSRGFGSGIITSNAPMDECDAKCQTPQGAINSSLPFQNVHPVTIGECPKYVRSTKLRMVTGLRNIPSIQSRGLFGAIAGFIEGGWTGMVDGWYGYHHQNEQGSGYAADQKSTQNAINGITNKVNSVIEKMNTQFTAVGKEFNKLERRMENLNKKVDDGFLDIWTYNAELLVLLENERTLDFHDSNVKNLYEKVKSQLKNNAKEIGNGCFEFYHKCNDECMESVKNGTYDYPKYSEESKLNREKIDGVKLESMGVYQILAIYSTVASSLVLLVSLGAISFWMCSNGSLQCRICI

SEQ ID NO: 2092 - protein, 565 aa, synthetic construct; identical to SEQ ID NO: 1910
  REGION 1..565: note = hemagglutinin__InfluenzaA__ABW71327

SEQ ID NO: 2093 - protein, 565 aa, synthetic construct; identical to SEQ ID NO: 1914
  REGION 1..565: note = hemagglutinin__InfluenzaA__ABW71338

SEQ ID NO: 2094 - protein, 566 aa, synthetic construct; identical to SEQ ID NO: 1928
  REGION 1..566: note = hemagglutinin__InfluenzaA__ABW71349

SEQ ID NO: 2095 - protein, 565 aa, synthetic construct
  REGION 1..565: note = hemagglutinin__InfluenzaA__ABW71360
MKVKLLVLLCTFTATYADTICIGYHANNSTDTVDTVLEKNVTVTHSVNLLEDRHNGKLCLLKGIAPLQLGNCSVAGWILGNPECELLISKESWSYIVETPNPENGTCYPGYFADYEELREQLSSVSSFERFEIFPKESSWPNHTVTGVSASCSHNGKSSFYRNLLWLTGKNGLYPNLSRSYANNKEKEVLVLWGVHHPPNIGDQRALYHTENAYVSVVSSHYSRRFTPEIAKRPKVRDQEGRINYYWTLLEPGDTIIFEANGNLIAPRFAFALSRGFGSGIITSNAPMDECDAKCQTPQGAINSSLPFQNVHPVTIGECPKYVRSAKLRMVTGLRNIPSIQSRGLFGAIAGFIEGGWTGMVDGWYGYHHQNEQGSGYAADQKSTQNAINGITNKVNSVIEKMNTQFTAVGKEFNKLERRMENLNKKVDDGFLDIWTYNAELLVLLENERTLDFHDSNVKNLYEKVKSQLKNNAKEIGNGCFEFYHKCDDECMESVKNGTYDYPKYSEESKLNREKIDGVKLESMGVYQILAIYSTVASSLVLLVSLGAISFWMCSNGSLQCRICI

SEQ ID NO: 2096 - protein, 565 aa, synthetic construct; identical to SEQ ID NO: 1930
  REGION 1..565: note = hemagglutinin__InfluenzaA__ABW71371

SEQ ID NO: 2097 - protein, 565 aa, synthetic construct
  REGION 1..565: note = hemagglutinin__InfluenzaA__ABW71382
MKVKLLILLCTFTATYADTICIGYHANNSTDTVDTVLEKNVTVTHSVNLLEDSHNGKLCLLKGIAPLQLGNCSVAGWILGNPECELLISKESWSYIVETPNPENGTCYPGYFADYEELREQLSSVSSFERFEIFPKESSWSNHTITGVSASCSHNGKSSFYRNLLWLTGKNGLYPNLSKSYANNKEKEVLVLWGVHHPPNIGDQRALYHTENAYVSVVSSHYSRRFTPEIAKRPKVRDQEGRINYYWTLLEPGDTIIFEANGNLIAPRFAFALSRGFGSGIITSNAPMDECDAKCQTPQGAINSSLPFQNVHPVTIGECPKYVRSTKLRMVTGLRNIPSIQSRGLFGAIAGFIEGGWTGMVDGWYGYHHQNEQGSGYAADQKSTQNAINGITNKVNSVIEKMNTQFTAVGKEFNKLERRMENLNKKVDDGFLDIWTYNAELLVLLENERTLDFHDSNVKNLYEKVKSQLKNNAKEIGNGCFEFYHKCNDECMESVKNGTYDYPKYSEESKLNREKIDGVKLESMGVYQILAIYSTVASSLVLLVSLGAISFWMCSNGSLQCRICI

SEQ ID NO: 2098 - protein, 565 aa, synthetic construct
  REGION 1..565: note = hemagglutinin__InfluenzaA__ABW71393
MKVKLLVLLCTFTATYADTICIGYHANNSTDTVDTVLEKNVTVTHSVNLLEDSHNGKLCLLKGIAPLQLGNCSVAGWILGNPECELLISKESWSYIVETPNPENGTCYPGYFTDYEELREQLSSVSSFERFEIFPKESSWPNHTVTGVSASCSHNGKSSFYRNLLWLTGKNGLYPNLSKSYANNKEKEVLVLWGVHHPPNIGDQRALYHTENAYVSVVSSHYSRRFTPEIAKRPKVRDQEGRINYYWTLLEPGDTIIFEANGNLIAPRFAFALSRGFGSGIITSNAPMGECDAKCQTPQGAINSSLPFQNVHPVTIGECPKYVRSAKLRMVTGLRNIPSIQSRGLFGAIAGFIEGGWTGMVDGWYGYHHQNEQGSGYAADQKSTQNAINGITNKVNSVIEKMNTQFTAVGKEFNKLERRMENLNKKVDDGFLDIWTYNAELLVLLENERTLDFHDSNVKNLYEKVKSQLKNNAKEIGNGCFEFYHKCNDECMESVKNGTYDYPKYSEESKLNREKIDGVKLESMGVYQILAIYSTVASSLVLLVSLGAISFWMCSNGSLQCRICI

SEQ ID NO: 2099 - protein, 565 aa, synthetic construct; identical to SEQ ID NO: 2059
  REGION 1..565: note = hemagglutinin__InfluenzaA__ABW71404

SEQ ID NO: 2100 - protein, 565 aa, synthetic construct; identical to SEQ ID NO: 1947
  REGION 1..565: note = hemagglutinin__InfluenzaA__ABW71415

SEQ ID NO: 2101 - protein, 565 aa, synthetic construct
  REGION 1..565: note = hemagglutinin__InfluenzaA__ABW71426
MKAKLLILLCTFTATYADTICIGYHANNSTDTVDTVLEKNVTVTHSVNLLEDSHNGKLCLLKGIAPLQLGNCSVAGWILGNPECELLISKESWSYIVETPNPENGTCYPGYFADYEELREQLSSVSSFERFEIFPKESSWPNHTVTGVSASCSHNGKSSFYRNLLWLTGKNGLYPNLSKSYANNKEKEVLVLWGVHHPPNIGDQRALYHTENAYVSVVSSHYSRRFTPEIAKRPKVRDQEGRINYYWTLLEPGDTIIFEANGNLIAPRFAFALSRGFGSGIITSNAPMDECDAKCQTPQGAINSSLPFQNVHPVTIGECPKYVRSTKLRMVTGLRNIPSIQSRGLFGAIAGFIEGGWTGMVDGWYGYHHQNEQGSGYAADQKSTQNAINGITNKVNSVIEKMNTQFTAVGKEFNKLERRMENLNKKVDDGFLDIWTYNAELLVLLENERTLDFHDSNVKNLYEKVKSQLKNNAKEIGNGCFEFYHKCNDECMESVKNGTYDYPKYSEESKLNREKIDGVKLESMGVYQILAIYSTVASSLVLLVSLGAISFWMCSNGSLQCRICI

SEQ ID NO: 2102 - protein, 565 aa, synthetic construct
  REGION 1..565: note = hemagglutinin__InfluenzaA__ABW71448
MKVKLLVLLCTFTATYADTICIGYHANNSTDTVDTVLEKNVTVTHSVNLLEDSHNGKLCLLKGIAPLQLGNCSVAGWILGNPECELLISKESWSYIVETPNPENGTCYPGYFADYEELREQLSSVSSFERFEIFPKESSWPNHTVTGVSASCSHNGKSSFYRNLLWLTGKNGLYPNLSKSYANNKEKEVLVLWGVHHPPNIGDQRALYHTENAYVSVVSSHYSRRFTPEIAKRPKVRDQEGRINYYWTLLEPGDTIIFEANGNLIAPRFAFALSRGFGSGIITSNAPMDECDAKCQTPQGAINSSLPFQNVHPVTIGECPKYVRSTKLRMVTGLRNIPSIQSRGLFGAIAGFIEGGWTGMVDGWYGYHHQNEQGSGYAADQKSTQNAINGITNKVNSVIEKMNTQFTAVGKEFNKLERRMENLNKKVDDGFLDIWTYNAELLVLLENERTLDFHDSNVKNLYEKVKSQLKNNAKEIGNGCFEFYHKCNDECMESVKNGTYDYPKYSEESKLNREKIDGVKLESMGVYQILAIYSTIASSLVLLVSLGAISFWMCSNGSLQCRICI

SEQ ID NO: 2103 - protein, 565 aa, synthetic construct; identical to SEQ ID NO: 1930
  REGION 1..565: note = hemagglutinin__InfluenzaA__ABW71459

SEQ ID NO: 2104 - protein, 565 aa, synthetic construct; identical to SEQ ID NO: 1914
  REGION 1..565: note = hemagglutinin__InfluenzaA__ABW71470

SEQ ID NO: 2105 - protein, 568 aa, synthetic construct
  REGION 1..568: note = hemagglutinin__InfluenzaA__ABW74702
MEKIVLLLAIVSLVKSDQICIGYHANNSTEQVDTIMEKNVTVTHAQDILEKTHNGKLCDLDGVKPLILRDCSVAGWLLGNPMCDEFINVPEWSYIVEKANPTNDLCYPGSFNDYEELKHLLSRINHFEKIQIIPKSSWSDHEASSGVSSACPYLGSSSFFRNVVWLIKKNSTYPTIKKSYNNTNQEDLLVLWGIHHPNDAAEQTRLYQNPTTYISIGTSTLNQRLVPKIATRSKVNGQSGRMEFFWTILKPNDAINFESNGNFIAPEYAYKIVKKGDSAIMKSELEYGNCNTKCQTPMGAINSSMPFHNIHPLTIGECPKYVKSNRLVLATGLRNSPQRESRRKKRGLFGAIAGFIEGGWQGMVDGWYGYHHSNEQGSGYAADKESTQKAIDGVTNKVNSIIDKMNTQFEAVGREFNNLERRIENLNKKMEDGFLDVWTYNAELLVLMENERTLDFHDSNVKNLYDKVRLQLRDNAKELGNGCFEFYHKCDNECIESIRNGTYNYPQYSEEARLKREEISGVKLESIGTYQILSIYSTVASSLALAIMMAGLSLWMCSNGSLQCRICI

SEQ ID NO: 2106 - protein, 568 aa, synthetic construct
  REGION 1..568: note = hemagglutinin__InfluenzaA__ABW74703
MEKIVLLLAIVSLVKSDQICIGYHANNSTEQVDTIMEKNVTVTHAQDILEKTHNGKLCDLDGVKPLILKDCSVAGWLLGNPMCDEFINVPEWSYIVEKANPTNDLCYPGSFNDYEELKHLLSRINHFEKIQIIPKSSWSDHEASSGVSSACPYLGSPSFFRNVVWLIKKNSTYPTIKKSYNNTNQEDLLVLWGIHHPNDAAEQTRLYQNPTTYISIGTSTLNQRLVPKIATRSKVNGQSGRMEFFWTILKPNDAVNFESNGNFIAPEYAYKIVKKGDSAIMKSELEYGNCNTKCQTPMGAINSSMPFHNIHPLTIGECPKYVKSNRLVLATGLRNSPQRESRRKKRGLFGAIAGFIEGGWQGMVDGWYGYHHSNEQGSGYAADKESTQKAIDGVTNKVNSIIDKMNTQFEAVGREFNSLERRIENLNKKMEDGFLDVWTYNAELLVLMENERTLDFHDSNVKNLYDKVRLQLRDNAKELGNGCFEFYHKCDNECMESIRNGTYNYPQYSEEARLKREEISGVKLESIGTYQILSIYSTVASSLALAIMIAGLSLWMCSNGSLQCRICI

SEQ ID NO: 2107 - protein, 568 aa, synthetic construct
  REGION 1..568: note = hemagglutinin__InfluenzaA__ABW74705
MEKIVLLLAIVSLVKSDQICIGYHANNSTEQVDTIMEKNVTVTHAQDILEKTHNGKLCDLDGVKPLILRDCSVAGWLLGNPMCDEFINVPEWSYIVEKANPTNDLCYPGSFNDYEELKHLLSRINHFEKIQIIPKSSWSDHEASSGVSSACPYLGSPSFFRNVVWLIKKNSTYPTIKKSYNNTNQEDLLVLWGIHHPNDAAEQTRLYQNPTTYISIGTSTLNQRLVPKIATRSKVNGQSGRMEFFWTILKPNDAINFESNGNFIAPEYAYKIVKKGDSAIMKSELEYGNCNTKCQTPMGAINSSMPFHNIHPLTIGECPKYVKSNRLVLATGLRNSPQRESRRKKRGLFGAIAGFIEGGWQGMVDGWYGYHHSNEQGSGYAADKESTQKAIDGVTNKVNSIIDKMNTQFEAVGREFNNLERRIENLNKKMEDGFLDVWTYNAELLVLMENERTLDFHDSNVKNLYDKVRLQLRDNAKELGNGCFEFYHKCDNECMESIRNGTYNYPQYSEEARLKREEISGVKLESIGTYQILSIYSTVASSLALAIMIAGLSLWMCSNGSLQCRICI

SEQ ID NO: 2108 - protein, 568 aa, synthetic construct
  REGION 1..568: note = hemagglutinin__InfluenzaA__ABW74707
MEKIVLLLAIVSLVKSDQICIGYHANNSTEQVDTIMEKNVTVTHAQDILEKTHNGKLCDLDGVKPLILRDCSVAGWLLGNPMCDEFINVPEWSYIVEKANPTNDLCYPGSFNDYEELKHLLSRINHFEKIQIIPKSSWSDHEASSGVSSACPYLGSPSFFRNVVWLIKKNSTYPTIKKSYNNTNQEDLLVLWGIHHPNDAAEQTRLYQNPTTYISIGTSTLNQRLVPKMATRSKVNGQSGRMEFFWTILKPNDAINFESNGNFIAPEYAYKIVKKGDSAIMKSELEYGNCNTKCQTPMGAINSSMPFHNIHPLTIGECPKYVKSNRLVLATGLRNSPQRESRRKKRGLFGAIAGFIEGGWQGMVDGWYGYHHSNEQGSGYAADKESTQKAIDGVTNKVNSIIDKMNTQFEAVGREFNNLERRIENLNKKMEDGFLDVWTYNAELLVLMENERTLDFHDSNVKNLYDKVRLQLRDNAKELGNGCFEFYHKCDNECMESIRNGTYNYPQYSEEARLKREEISGVKLESIGTYQILSIYSTVASSLALAIMIAGLSLWMCSNGSLQCRICI

SEQ ID NO: 2109 - protein, 568 aa, synthetic construct
  REGION 1..568: note = hemagglutinin__InfluenzaA__ABW74708
MEKIVLLLAIVSLVKSDQICIGYHANNSTEQVDTIMEKNVTVTHAQDILEKTHNGKLCDLDGVKPLILRDCSVAGWLLGNPMCDEFINVPEWSYIVEKANPTNDLCYPGSFNDYEELKHLLSRINHFEKIQIIPKSSWSDHEASSGVSSACPYLGSPSFFRNVVWLIKKNSTYPTIKKSYNNTNQEDLLVLWGIHHPNDAAEQTRLYQNPTTYISIGTSTLNQRLVPKIATRSKVNGQSGRMEFFWTILKPNDAINFESNGNFIAPEYAYKIVKKGDSAIMKSELEYGNCNTKCQTPMGAINSSMPFHNIHPLTIGECPKYVKSNRSVLATGLRNSPQRESRRKKRGLFGAIAGFIEGGWQGMVDGWYGYHHSNEQGSGYAADKESTQKAIDGVTNKVNSIIDKMNTQFEAVGREFNNLERRIENLNKKMEDGFLDVWTYNAELLVLMENERTLDFHDSNVKNLYDKVRLQLRDNAKELGNGCFEFYHKCDNECMESIRNGTYNYPQYSEEARLKREEISGVKLESIGTYQILSIYSTVASSLALAIMMAGLSLWMCSNGSLQCRICI

SEQ ID NO: 2110 - protein, 568 aa, synthetic construct; identical to SEQ ID NO: 2107
  REGION 1..568: note = hemagglutinin__InfluenzaA__ABW74710

SEQ ID NO: 2111 - protein, 568 aa, synthetic construct; identical to SEQ ID NO: 2107
  REGION 1..568: note = hemagglutinin__InfluenzaA__ABW74711

SEQ ID NO: 2112 - protein, 568 aa, synthetic construct
  REGION 1..568: note = hemagglutinin__InfluenzaA__ABW74712
MEKIVLLLSIVSLVKSDQICIGYHANNSTEQVDTIMEKNVTVTHAQDILEKTHNGKLCDLDGVKPLILRDCSVAGWLLGNPMCDEFINVPEWSYIVEKANPTNDLCYPGSFNDYEELKHLLSRINHFEKIQIIPKSSWSDHEASSGVSSACPYLGSPSFFRNVVWLIKKNSTYPTIKKSYNNTNQEDLLVLWGIHHPNNEEEQTRLYQNPTTYISIGTSTLNQRLVPKIATRSKVNGQSGRMEFFWTILKPNDAINFESNGNFIAPEYAYKIVKKGDSAIMKSELEYSNCNTKCQTPMGAINSSMPFHNIHPLTIGECPKYVKSSRLVLATGLRNSPQRESRRKKRGLFGAIAGFIEGGWQGMVDGWYGYHHSNEQGSGYAADKESTQKAIDGVTNKVNSIIDKMNTQFEAVGREFNNLERRIENLNKKMEDGFLDVWTYNAELLVLMENERTLDFHDSNVKNLYDKVRLQLRDNAKELGNGCFEFYHKCDNECMESIRNGTYNYPQYSEEARLKREEISGVKLESIGTYQILSIYSTVASSLALAIMIAGLSLWMCSNGSLQCRICI

SEQ ID NO: 2113 - protein, 566 aa, synthetic construct
  REGION 1..566: note = hemagglutinin__InfluenzaA__ABW80976
MKTIIALSYILCLVFAQKLPGNDNSTATLCLGHHAVPNGTLVKTITNDQIEVTNATELVQSSSTSRICDSPHQILDGENCTLIDALLGDPHCDGFQNKEWDLFVERSKAYSNCYPYDVPDYVSLRSLVASSGTLEFNNESFNWTGVAQNGTSSACKRRSDKSFFSRLNWLHQLKYKYPALNVTMPNNEKFDKLYIWGVHHPGTDSDQISIYAQASGRVTVSTKRSQQTVIPNIGSRPWVRGVSSGISIYWTIVKPGDILLINSTGNLIAPRGYFKIRSGKSSIMRSDAPIGKCNSECITPNGSIPNDKPFQNVNRITYGACPRYVKQNTLKLATGMRNVPEKQTRGIFGAIAGFIENGWEGMMDGWYGFRHQNSEGTGQAADLKSTQAAINQINGKLNRLIEKTNEKFHQIEKEFSEVEGRIQDLEKYVEDTKIDLWSYNAELLVALENQHTIDLTDSEMNKLFERTKKQLRENAEDMGNGCFKIYHKCDNACIGSIRNGTYDHDVYRDEALNNRFQIKGVELKSGYKDWILWISFAISCFLLCIVLLGFIMWACQKGNIRCNICI

SEQ ID NO: 2114 - protein, 566 aa, synthetic construct
  REGION 1..566: note = hemagglutinin__InfluenzaA__ABW80977
MKTIIALSYILCLVFAQKLPGNDNSTATLCLGHHAVPNGTIVKTITNDQIEVTNATELVQSSSTGGICDSPHQILDGENCTLIDALLGDPQCDGFQNKKWDLFVERSKAYSNCYPYDVPDYASLRSLVASSGTLEFNNESFNWTGVTQNGTSSACKRRSNKSFFSRLNWLTHLKFKYPALNVTMPNNEKFDKLYIWGVHHPGTDNDQINLYAQASGRITVSTKRSQQTVIPNIGSRPRVRDVPSRISIYWTIVKPGDILLISSTGNLIAPRGYFKIRSGKSSIMRSDAPIGKCNSECITPNGSIPNDKPFQNVNRITYGACPRYVKQNTLKLATGMRNVPEKQTRGIFGAIAGFIENGWEGMVDGWYGFRHQNSEGTGQAADLKSTQAAINQINGKLNRLIGKTNEKFHQIEKEFSEVEGRIQDLEKYVEDTKIDLWSYNAELLVALENQHTIDLTDSEMNKLFERTKKQLRENAEDMGNGCFKIYHKCDNACIGSIRNGTYDHDVYRDEALNNRFQIKGVELKSGYKDWILWISFAISCFLLCVALLGFIMWACQKGNIRCNICI

SEQ ID NO: 2115 - protein, 565 aa, synthetic construct
  REGION 1..565: note = hemagglutinin__InfluenzaA__ABW80979
MKAKLLVLLCTFTATYADTICIGYHANNSTDTVDTVLEKNVTVTHSVNLLEDSHNGKLCLLKGIAPLQLGNCSVAGWILGNPECELLISKESWSYIVETPNPENGTCYPGYFADYEELREQLSSVSSFERFEIFPKESSWPNHTVTGVSASCSHNGKSSFYRNLLWLTGKNGLYPNLSKSYVNNKEKEVLVLWGVHHPPNIGNQRALYHTENAYVSVVSSHYSRRFTPEIAKRPKVRDQEGRINYYWTLLEPGDTIIFEANGNLIAPWYAFALSRGFGSGIITSNAPMDECDAKCQTPQGAINSSLPFQNVHPVTIGECPKYVRSAKLRMVTGLRNIPSIQSRGLFGAIAGFIEGGWTGMVDGWYGYHHQNEQGSGYAADQKSTQNAINGITNKVNSVIEKMNTQFTAVGKEFNKLERRMENLNKKVDDGFLDIWTYNAELLVLLENERTLDFHDSNVKNLYEKVKSQLKNNAKEIGNGCFEFYHKCNNECMESVKNGTYDYPKYSEESKLNREKIDGVKLESMGVYQILAIYSTVASSLVLLVSLGAISFWMCSNGSLQCRICI

SEQ ID NO: 2116 - protein, 566 aa, synthetic construct
  REGION 1..566: note = hemagglutinin__InfluenzaA__ABW81505
MKAKLLVLLCTFTATYADTICIGYHANNSTDTVDTVLEKNVTVTHSVNLLEDSHNGKLCRLKGTAPLQLGNCSIAGWILGNPECESLFSKESWSYIAETPNPKNGTCYPGYFADYEELREQLSSVSSFERFEIFPKDSSWPNHTVTKGVTASCSHNGKSSFYKNLLWLTEKNGLYPNLSKSYVNKKGKEVLVLWGVHHPSNMGDQRAIYHKENAYVSVLSSHYSRRFTPEIAKRPKVRDQEGRINYYWTLLEPGDTIIFEANGNLIAPWYAFALSRGFGSGIIISNASMGECDAKCQTPQGAINSSLPFQNVHPVTIGECPKYVRSTKLRMVTGLRNVPSIQSRGLFGAIAGFIEGGWTGMIDGWYGYHHQNEQGSGYAADQKSTQNAINGITNKVNSIIEKMNTQFTAVGKEFNKLERRMENLNKKVDDGFLDIWTYNAELLVLLENERTLDFHDSNVKNLYEKVKTQLKNNAKEIGNGCFEFYHKCNNECMESVKNGTYDYPKYSKESKLNREKIDGVKLESMGVYQILAIYSTVASSLVLLVSLGAISFWMCSNGSLQCRICI

SEQ ID NO: 2117 - protein, 565 aa, synthetic construct
  REGION 1..565: note = hemagglutinin__InfluenzaA__ABW81506
MKVKLLVLLCTFTATYADTICIGYHANNSTDTVDTVLEKNVTVTHSVNLLEDSHNGKLCLLKGIAPLQLGNCSVAGWILGNPECELLISKESWSYIVETPNPENGTCYPGYFADYEELREQLSSVSSFERFEIFPKESSWPNHTVTGVSASCSHNGKSSFYRNLLWLTGKNGLYPNLSKSYANNKEKEVLVLWGVHHPPNIGNQRALYHTENAYVSVVSSHYSRRFTPEIAKRPKVRDQEGRINYYWTLLEPGDTIIFEANGNLIAPWYAFALSRGFGSGIITSNAPMDECDAKCQTPQGAINSSLPFQNVHPVTIGECPKYVRSAKLRMVTGLRNIPSIQSRGLFGAIAGFIEGGWTGMVDGWYGYHHQNEQGSGYAADQKSTQNAINGITNKVNSVIEKMNTQFTAVGKEFNKLERRMENLNKKVDDGFLDIWTYNAELLVLLENERTLDFHDSNVKNLYEKVKSQLKNNAKEIGNGCFEFYHKCNNECMESVKNGTYDYPKYSEESKLNREKIDGVKLESMGIYQILAIYSTVASSLVLLVSLGAISFWMCSNGSLQCRICI

SEQ ID NO: 2118 - protein, 566 aa, synthetic construct
  REGION 1..566: note = hemagglutinin__InfluenzaA__ABW81507
MKAKLLVLLCTFTATYADTICIGYHANNSTDTVDTVLEKNVTVTHSVNLLEDSHNGKLCRLKGTVPLQLGNCSIAGWILGNPECESLFSKESWSYIAETPNPKNGTCYPGYFADYEELREQLSSVSSFERFEIFPKDSSWPNHTVTKGVTASCSHNGKSSFYKNLLWLTEKNGLYPNLSKSYVNKKGKEVLVLWGVHHPSNMGDQRAIYHKENAYVSVLSSHYSRRFTPEIAKRPKVRDQEGRINYYWTLLEPGDTIIFEANGNLIAPWYAFALSRGFGSGIIISNASMGECDAKCQTPQGAINSSLPFQNVHPVTIGECPKYVRSTKLRMVTGLRNVPSIQSRGLFGAIAGFIEGGWTGMIDGWYGYHHQNEQGSGYAADQKSTQNAINGITNKVNSIIEKMNTQFTAVGKEFNKLERRMENLNKKVDDGFLDIWTYNAELLVLLENERTLDFHDSNVKNLYEKVKTQLKNNAKEIGNGCFEFYHKCNNECMESVKNGTYDYPKYSKESKLNREKIDGVKLESMGVYQILAIYSTVASSLVLLVSLGAISFWMCSNGSLQCRICI

SEQ ID NO: 2119 - protein, 565 aa, synthetic construct
  REGION 1..565: note = hemagglutinin__InfluenzaA__ABW81508
MKVKLLVLLCTFTATYADTICIGYHANNSTDTVDTVLEKNVTVTHSVNLLEDSHNGKLCLLKGIAPLQLGNCSVAGWILGNPECELLISKESWSYIVETPNPENGTCYPGYFADYEELREQLSSVSSFERFEIFPKESSWPNHTVTGVSASCSHNGKSSFYRNLLWLTRKNGLYPNLSKSYANNKEKEVLVLWGVHHPPNIGDQRALYHTENAYVSVVSSHYSRRFTPEIAKRPKVRDQEGRINYYWTLLEPGDTIIFEANGNLIAPRYAFALSRGFGSGIITSNAPMDECDAKCQTPQGAINSSLPFQNVHPVTIGECPKYVRSAKLRMVTGLRNIPSIQSRGLFGAIAGFIEGGWTGMVDGWYGYHHQNEQGSGYAADQKSTQNAINGITNKVNSVIEKMNTQFTAVGKEFNKLERRMENLNKKVDDGFLDIWTYNAELLVLLENERTLDFHDSNVKNLYEKVKSQLKNNAKEIGNGCFEFYHKCNDECMESVKNGTYDYPKYSEESKLNREKIDGVKLESMGVYQILAIYSTVASSLVLLVSLGAISFWMCSNGSLQCRICI

SEQ ID NO: 2120 - protein, 566 aa, synthetic construct; identical to SEQ ID NO: 2116
  REGION 1..566: note = hemagglutinin__InfluenzaA__ABW81509

SEQ ID NO: 2121 - protein, 565 aa, synthetic construct
  REGION 1..565: note = hemagglutinin__InfluenzaA__ABW81511
MKAKLLVLLCTFTATYADTICIGYHANNSTDTVDTVLEKNVTVTHSVNLLEDSHNGKLCLLKGIAPLQLGNCSVAGWILGNPECELLISKESWSYIVETPNPENGTCYPGYFADYEELREQLSSVSSFERFEIFPKGSSWPNHTVTGVSASCSHNGKSSFYRNLLWLTGKNGLYPNLSMSYVNNKEKEVLVLWGVHHPPNIGNQRALYHTENAYVSVVSSHYSRRFTPEIAKRPKVRDQEGRINYYWTLLEPGDSIIFEANGNLIAPWYAFALSRGFGSGIITSNAPMDECDAKCQTPQGAINSSLPFQNVHPVTIGECPKYVRSAKLRMVTGLRNIPSIQSRGLFGAIAGFIEGGWTGMVDGWYGYHHQNEQGSGYAADQKSTQNAINGITNKVNSVIEKMNTQFTAVGKEFNKLERRMENLNKKVDDGFLDIWTYNAELLVLLENERTLDFHDSNVKNLYEKVKSQLKNNAKEIGNGCFEFYHKCNNECMESVKNGTYDYPKYSEESKLNREKIDGVKLESMGVYQILAIYSTVASSLVLLVSLGAISFWMCSNGSLQCRICI

SEQ ID NO: 2122 - protein, 565 aa, synthetic construct; identical to SEQ ID NO: 296
  REGION 1..565: note = hemagglutinin__InfluenzaA__ABW81512

SEQ ID NO: 2123 - protein, 565 aa, synthetic construct; identical to SEQ ID NO: 1385
  REGION 1..565: note = hemagglutinin__InfluenzaA__ABW81513

SEQ ID NO: 2124 - protein, 565 aa, synthetic construct
  REGION 1..565: note = hemagglutinin__InfluenzaA__ABW81514
MKVKLLVLLCTFTATYADTICISYHANNSTDTVDTVLEKNVTVTHSVNLLEDSHNGKLCLLKGIAPLQLGNCSVAGWILGNPECELLISKESWSYIVETPNPENGTCYPGYFADYEELREQLSSVSSFERFEIFPKESSWPNHTVTGVSASCSHNGKSSFYRNLLWLTGKNGLYPNLSKSYANNKEKEVLVLWGVHHPPNIGDQRALYHTENAYVSVVSSHYSRRFTPEIAKRPKVRDQEGRINYYWTLLEPGDTIIFEANGNLIAPRFAFALSRGFGSGIITSNAPMDECDAKCQTPQGAINSSLPFQNVHPVTIGECPKYVRSAKLRMATGLRNIPSIQSRGLFGAIAGFIEGGWTGMVDGWYGYHHQNEQGSGYAADQKSTQNAINGITNKVNSVIEKMNTQFTAVGKEFSKLERRMENLNKKVDDGFLDIWTYNAELLVLLENERTLDFHDSNVKNLYEKVKSQLKNNAKEIGNGCFEFYHKCNDECMESVKNGTYDYPKYSEESKLNREKIDGVKLESMGVYQILAIYSTVASSLVLLVSLGAISFWMCSNGSLQCRICI

SEQ ID NO: 2125 - protein, 565 aa, synthetic construct; identical to SEQ ID NO: 1385
  REGION 1..565: note = hemagglutinin__InfluenzaA__ABW81515

SEQ ID NO: 2126 - protein, 565 aa, synthetic construct; identical to SEQ ID NO: 1385
  REGION 1..565: note = hemagglutinin__InfluenzaA__ABW81516

SEQ ID NO: 2127 - protein, 565 aa, synthetic construct
  REGION 1..565: note = hemagglutinin__InfluenzaA__ABW81517
MKVKLLVLLCTFTATYADTICIGYHANNSTDTVDTVLEKNVTVTHSVNLLEDSHNGKLCLLKGIAPLQLGNCSVAGWILGNPECELLISKESWSYIVETPNPENGTCYPGYFADYEELREQLSSISSFERFEIFPKESSWPNHTVTGVSASCSHNGKSSFYRNLLWLTGKNGLYPNLSKSYANNKEKEVLVLWGVHHPPNIGDQRALYHTENAYVSVVSSHYSRRFTPEIAKRPKVRDQEGRINYYWTLLEPGDTIIFEANGNLIAPRFAFALSRGFGSGIITSNAPMDECDAKCQTPQGAINSSLPFQNVHPVTIGECPKYVRSAKLRMATGLRNIPSIQSRGLFGAIAGFIEGGWTGMVDGWYGYHHQNEQGSGYAADQKSTQNAINGITNKVNSVIEKMNTQFTAVGKEFSKLERRMENLNKKVDDGFLDIWTYNAELLVLLENERTLDFHDSNVKNLYEKVKSQLKNNAKEIGNGCFEFYHKCNDECMESVKNGTYDYPKYSEESKLNREKIDGVKLESMGVYQILAIYSTVASSLVLLVSLGAISFWMCSNGSLQCRICI

SEQ ID NO: 2128 - protein, 565 aa, synthetic construct
  REGION 1..565: note = hemagglutinin__InfluenzaA__ABW81518
MKVKLLVLLCTYTATYADTICIGYHANNSTDTVDTVLEKNVTVTHSVNLLEDSHNGKLCLLKGIAPLQLGNCSVAGWILGNPECELLISKESWSYIVETPNPENGTCYPGYFADYEELREQLSSVSSFERFEIFPKESSWPNHTVTGVSASCSHNGKSSFYRNLLWLTGKNGLYPNLSKSYANNKEKEVLVLWGVHHPPNIGDQRALYHTENAYVSVVSSHYSRRFTPEIAKRPKVRDQEGRINYYWTLLEPGDTIIFEANGNLIAPRFAFALSRGFGSGIITSNAPMDECDAKCQTPQGAINSSLPFQNVHPVTIGECPKYVRSAKLRMATGLRNIPSIQSRGLFGAIAGFIEGGWTGMVDGWYGYHHQNEQGSGYAADQKSTQNAINGITNKVNSVIEKMNTQFTAVGKEFSKLERRMENLNKKVDDGFLDIWTYNAELLVLLENERTLDFHDSNVKNLYEKVKSQLKNNAKEIGNGCFEFYHKCNDECMESVKNGTYDYPKYSEESKLNREKIDGVKLESMGVYQILAIYSTVASSLVLLVSLGAISFWMCSNGSLQCRICI

SEQ ID NO: 2129 - protein, 565 aa, synthetic construct
  REGION 1..565: note = hemagglutinin__InfluenzaA__ABW81519
MKVKLLVLLCTFTATYADTICIGYHANNSTDTVDTVLEKNVTVTHSVNLLEDSHNGKLCLLKGIAPLQLGNCSVAGWILGNPECELLISKESWSYIVETPNPENGTCYPGYFADYEELREQLSSVSSFERFEIFPKESSWPNHTVTGVSASCSHNGKSSFYRNLLWLTGKNGLYPNLSKSYANNKEKEVLVLWGVHHPPNIGDQRALYHTENAHVSVVSSHYSRRFTPEIAKRPKVRDQEGRINYYWTLLEPGDTIIFEANGNLIAPRFAFALSRGFGSGIITSNAPMDECDAKCQTPQGAINSSLPFQNVHPVTIGECPKYVRSAKLRMATGLRNIPSIQSRGLFGAIAGFIEGGWTGMVDGWYGYHHQNEQGSGYAADQKSTQNAINGITNKVNSVIEKMNTQFTAVGKEFSKLERRMENLNKKVDDGFLDIWTYNAELLVLLENERTLDFHDSNVKNLYEKVKSQLKNNAKEIGNGCFEFYHKCNDECMESVKNGTYDYPKYSEESKLNREKIDGVKLESMGVYQILAIYSTVASSLVLLVSLGAISFWMCSNGSLQCRICI

SEQ ID NO: 2130 - protein, 565 aa, synthetic construct
  REGION 1..565: note = hemagglutinin__InfluenzaA__ABW81520
MKVKLLVLLCTFTATYADTICIGYHANNSTDTVDTVLEKNVTVTHSVNLLEDSHNGKLCLLKGIAPLQLGSCSVAGWILGNPECELLISKESWSYIVETPNPENGTCYPGYFADYEELREQLSSVSSFERFEIFPKESSWPNHTVTGVSASCSHNGKSSFYRNLLWLTGKNGLYPNLSKSYANNKEKEVLVLWGVHHPPNIGDQRALYHTENAYVSVVSSHYSRRFTPEIAKRPKVRDQEGRINYYWTLLEPGDTIIFEANGNLIAPRFAFALSRGFGSGIITSNAPMDECDAKCQTPQGAINSSLPFQNVHPVTIGECPKYVRSAKLRMATGLRNIPSIQSRGLFGAIAGFIEGGWTGMVDGWYGYHHQNEQGSGYAADQKSTQNAINGITNKVNSVIEKMNTQFTAVGKEFSKLERRMENLNKKVDDGFLDIWTYNAELLVLLENERTLDFHDSNVKNLYEKVKSQLKNNAKEIGNGCFEFYHKCNDECMESVKNGTYDYPKYSEESKLNREKIDGVKLESMGVYQILAIYSTVASSLVLLVSLGAISFWMCSNGSLQCRICI

SEQ ID NO: 2131 - protein, 565 aa, synthetic construct
  REGION 1..565: note = hemagglutinin__InfluenzaA__ABW81521
MKVKLLVLLCTFTATYADTICIGYHANNSTDTVDTVLEKNVTVTHSVNLLEDSHNGKLCLLKGIAPLQLGNCSVAGWILGNPECELLISKESWSYIVETPNPENGTCYPGYFADYEELREQLSSVSSFERFEIFPKESSWPNHTVTGVSASCSHNGKSSFYRNLLWLTGKNGLYPNLSKSYANNKEKEVLVLWGVHHPPNIGDQRALYHTENAYVSVVSSHYSRRFTPEIAKRPKVRDQEGRINYYWTLLEPGDTIIFEANGNLIAPRFAFALSRGFGSGIISSNAPMDECDAKCQTPQGAINSSLPFQNVHPVTIGECPKYVRSAKLRMATGLRNIPSIQSRGLFGAIAGFIEGGWTGMVDGWYGYHHQNEQGSGYAADQKSTQNAINGITNKVNSVIEKMNTQFTAVGKEFSKLERRMENLNKKVDDGFLDIWTYNAELLVLLENERTLDFHDSNVKNLYEKVKSQLKNNAKEIGNGCFEFYHKCNDECMESVKNGTYDYPKYSEESKLNREKIDGVKLESMGVYQILAIYSTVASSLVLLVSLGAISFWMCSNGSLQCRICI

SEQ ID NO: 2132 - protein, 565 aa, synthetic construct; identical to SEQ ID NO: 1385
  REGION 1..565: note = hemagglutinin__InfluenzaA__ABW81522

SEQ ID NO: 2133 - protein, 565 aa, synthetic construct; identical to SEQ ID NO: 1385
  REGION 1..565: note = hemagglutinin__InfluenzaA__ABW81523

SEQ ID NO: 2134 - protein, 565 aa, synthetic construct
  REGION 1..565: note = hemagglutinin__InfluenzaA__ABW81524
MKVKLLVLLCTFTATYADTICIGYHANNSTDTIDTVLEKNVTVTHSVNLLEDSHNGKLCLLKGIAPLQLGNCSVAGWILGNPECELLISKESWSYIVETPNPENGTCYPGYFADYEELREQLSSVSSFERFEIFPKESSWPNHTVTGVSASCSHNGKSSFYRNLLWLTGKNGLYPNLSKSYANNKEKEVLVLWGVHHPPNIGDQRALYHTENAYVSVVSSHYSRRFTPEIAKRPKVRDQEGRINYYWTLLEPGDTIIFEANGNLIAPRFAFALSRGFGSGIITSNAPMDECDAKCQTPQGAINSSLPFQNVHPVTIGECPKYVRSAKLRMATGLRNIPSIQSRGLFGAIAGFIEGGWTGMVDGWYGYHHQNEQGSGYAADQKSTQNAINGITNKVNSVIEKMNTQFTAVGKEFSKLERRMENLNKKVDDGFLDIWTYNAELLVLLENERTLDFHDSNVKNLYEKVKSQLKNNAKEIGNGCFEFYHKCNDECMESVKNGTYDYPKYSEESKLNREKIDGVKLESMGVYQILAIYSTVASSLVLLVSLGAISFWMCSNGSLQCRICI

SEQ ID NO: 2135 - protein, 565 aa, synthetic construct
  REGION 1..565: note = hemagglutinin__InfluenzaA__ABW81526
MKVKLLVLLCTFTATYADTICIGYHANNSTDTVDTVLEKNVTVTHSVNLLEDSHNGKLCLLKGIAPLQLGNCSVAGWILGNPECELLISKESWSYIVEKPNPENGTCYPGHFADYEELREQLSSVSSFERFEIFPKESSWPNHTVTGVSASCSHNGKSSFYKNLLWLTGKNGLYPNLSKSYANNKEKEVLVLWGVHHPPNIGDQKALYHTENAYVSVVSSHYSRKFTPEIAKRPKVRDQEGRINYYWTLLEPGDTIIFEANGNLIAPRYAFALSRGFGSGIINSNAPMGKCDAKCQTPQGAINSSLPFQNVHPVTIGECPKYVRSAKLRMVTGLRNIPSIQSRGLFGAIAGFIEGGWTGMVDGWYGYHHQNEQGSGYAADQKSTQNAINGITNKVNSVIEKMNTQFTAVGKEFNKLERRMENLNKKVDDGFIDIWTYNAELLVLLENERTLDLHDSNVKNLYEKVKSQLKNNAKEIGNGCFEFYHKCNDECMESVKNGTYDYPKYSEESKLNREKIDGVKLESMGVYQILAIYSTVASSLVLLVSLGAISFWMCSNGSLQCRICI

SEQ ID NO: 2136 - protein, 565 aa, synthetic construct
  REGION 1..565: note = hemagglutinin__InfluenzaA__ABW81527
MKVKLLVLLCTFTATYADTICIGYHANNSTDTVDTVLEKNVTVTHSVNLLEDSHNGKLCLLKGIAPLQLGNCSVAGWILGNPECELLISKESWSYIVETPNPENGTCYPGYFADYEELREQLSSVSSFERFEIFPKESSWPNHTVTGVSASCSHNGKSSFYRNLLWLTGKNGLYPNLSKSYANNKEKEVLVLWGVHHPPNIGDQRALYHTENAYVSVVSSHYSRRFTPEIAKRPKVRNQEGRINYYWTLLEPGDTIIFEANGNLIAPRFAFALSRGFGSGIITSNAPMDECDAKCQTPQGAINSSLPFQNVHPVTIGECPKYVRSAKLRMATGLRNIPSIQSRGLFGAIAGFIEGGWTGMVDGWYGYHHQNEQGSGYAADQKSTQNAINGITNKVNSVIEKMNTQFTAVGKEFSKLERRMENLNKKVDDGFLDIWTYNAELLVLLENERTLDFHDSNVKNLYEKVKSQLKNNAKEIGNGCFEFYHKCNDECMESVKNGTYDYPKYSEESKLNREKIDGVKLESMGVYQILAIYSTVASSLVLLVSLGAISFWMCSNGSLQCRICI

SEQ ID NO: 2137 - protein, 565 aa, synthetic construct
  REGION 1..565: note = hemagglutinin__InfluenzaA__ABW81528
MKVKLLVLLCTFTATYADTICIGYHANNSTDTVDTVLEKNVTVTHSVNLLEDSHNGKLCLLKGIAPLQLGNCSVAGWILGNPECELLISKESWSYIVETPNPENGTCYPGHFADYEELREQLSSVSSFERFEIFPKESSWPNHTVTGVSASCSHNGKSSFYRNLLWLTGKNGLYPNLSKSYANNKEKEVLVLWGIHHPPNIGDQRALYHTENAYVSVVSSHYSRRFTPEIAKRPKVRDQEGRINYYWTLLEPRDTIIFEANGNLIAPRFAFALSRGFGSGIITSNAPMDECDAKCQTPQGAINSSLPFQNVHPVTIGECPKYVRSAKLRMVTGLRNIPSIQSRGLFGAIAGFIEGGWTGMVDGWYGYHHQNEQGSGYAADQKSTQNAINGITNKVNSVIEKMNTQFTAVGKEFNKLERRMENLNKKVDDGFLDIWTYNAELLVLLENERTLDFHDSNVKNLYEKVKSQLKNNAKEIGNGCFEFYHKCNDECMESVKNGTYDYPKYSEESKLNREKIDGVKLESMGVYQILAIYSTVASSLVLLVSLGAISFWMCSNGSLQCRICI

SEQ ID NO: 2138 - protein, 565 aa, synthetic construct
  REGION 1..565: note = hemagglutinin__InfluenzaA__ABW81529
MKVKLLILLCTFTATYADTICIGYHANNSTDTVDTVLEKNVTVTHSVNLLEDSHNGKLCLLKGIAPLQLGNCSVAGWILGNPECELLISRESWSYIVETPNPENGTCYPGYFADYEELREQLSSVSSFERFEIFPKESSWPNHTVTGVSASCSHNGKSSFYRNLLWLTGKNGLYPNLSKSYANNKEKEVLILWGVHHPPNIRDQMTLYHTENAYVSVVSSHYSRRFTPEITKRPKVRDQEGRINYYWTLLEPGDTIIFEANGNLIAPWYAFALSRGFGSGIITSNAPMDECDAKCQTPKGAINSSLPFQNVHPVTIGECPKYVRSAKLRMVTGLRNIPSIQSRGLFGAIAGFIEGGWTGMVDGWYGYHHQNEQGSGYAADQKSTQNAINGITNKVNSVIEKMNTQFTAVGKEFNKLERRMENLNKKVDDGFLDIWTYNAELLVLLENERTLDFHDSNVKNLYEKVKSQLKNNAKEIGNGCFEFYHKCNNECMESVKNGTYDYPKYSEESKLNREKIDGVKLESMGVYQILAIYSTVASSLVLLVSLGAISFWMCSNGSLQCRICI

SEQ ID NO: 2139 - protein, 565 aa, synthetic construct
  REGION 1..565: note = hemagglutinin__InfluenzaA__ABW81530
MKVKLLILLCTFTATYADTICIGYHANNSTDTVDTVLEKNVTVTHSVNLLEDSHNGKLCLLKGIAPLQLGNCSVAGWILGNPECELLISKESWSYIVETPNPENGACYPGYFADYEELREQLSSVSSFERFEIFPKESSWPNHTVTGVSASCSHNGKSSFYRNLLWLTGKNGLYPNLSKSYANNKEKEVLILWGVHHPPNIGDQRTLYHTENAYVSVVSSHYSRRFTPEITKRPKVRDQEGRINYYWTLLEPGDTIIFEANGNLIAPWYAFALSRGFGSGIITSNAPMDECDAKCQTPQGAINSSLPFQNVHPVTIGECPKYVRSAKLRMVTGLRNIPSIQSRGLFGAIAGFIEGGWTGMVDGWYGYHHQNEQGSGYAADQKSTQNAINRITNKVNSVIEKMNTQFTAVGKEFNKLERRMENLNKKVDDGFLDIWTYNAELLVLLENERTLDFHDSNVKNLYEKVKSQLKNNAKEIGNGCFEFYHKCNNECMESVKNGTYDYPKYSEESKLNREKIDGVKLDSMGVYQILAIYSTVASSLVLLVSLGAISFWMCSNGSLQCRICI

SEQ ID NO: 2140 - protein, 565 aa, synthetic construct; identical to SEQ ID NO: 326
  REGION 1..565: note = hemagglutinin__InfluenzaA__ABW81531

SEQ ID NO: 2141 - protein, 565 aa, synthetic construct
  REGION 1..565: note = hemagglutinin__InfluenzaA__ABW81532
MKVKLLILLCTFTATYADTICIGYHANNSTDTVDTVLEKNVTVTHSVNLLEDSHNGKLCLLKGIAPLQLGNCSVAGWILGNPECELLISKESWSYIVETPNPENGACYPWYFADYEELREQLSSVSSFERFEIFPKESSWPNHTVTGVSASCSHNGKSSFYRNLLWLTGKNGLYPNLSKSYANNKEKEVLILWGVHHPPNIGNQRTLYHTENAYVSVVSSHYSRRFTPEITKRPKVRDQEGRINYYWTLLEPGDTIIFEANGNLIAPWYAFALSRGFGSGIITSNAPMDECDAKCQTPQGAINSSLPFQNVHPVTIGECPKYVRSAKLRMVTGLRNIPSIQSRGLFGAIAGFIEGGWTGMVDGWYGYHHQNEQGSGYAADQKSTQNAINGITNKVNSVIEKMNTQFTAVGKEFNKLERRMENLNKKVDDGFLDIWTYNAELLVLLENERTLDFHDSNVKNLYEKVKSQLKNNAKEIGNGCFEFYHKCNNECMESVKNGTYDYPKYSEESKLNREKIDGVKLDSMGVYQILAIYSTVASSLVLLVSLGAISFWMCSNGSLQCRICI

SEQ ID NO: 2142 - protein, 565 aa, synthetic construct; identical to SEQ ID NO: 1956
  REGION 1..565: note = hemagglutinin__InfluenzaA__ABW86321

SEQ ID NO: 2143 - protein, 565 aa, synthetic construct; identical to SEQ ID NO: 1921
  REGION 1..565: note = hemagglutinin__InfluenzaA__ABW86332

SEQ ID NO: 2144 - protein, 565 aa, synthetic construct; identical to SEQ ID NO: 1910
  REGION 1..565: note = hemagglutinin__InfluenzaA__ABW86343

SEQ ID NO: 2145 - protein, 565 aa, synthetic construct; identical to SEQ ID NO: 1914
  REGION 1..565: note = hemagglutinin__InfluenzaA__ABW86354

SEQ ID NO: 2146 - protein, 565 aa, synthetic construct; identical to SEQ ID NO: 1914
  REGION 1..565: note = hemagglutinin__InfluenzaA__ABW86365

SEQ ID NO: 2147 - protein, 565 aa, synthetic construct; identical to SEQ ID NO: 1930
  REGION 1..565: note = hemagglutinin__InfluenzaA__ABW86376

SEQ ID NO: 2148 - protein, 565 aa, synthetic construct; identical to SEQ ID NO: 1914
  REGION 1..565: note = hemagglutinin__InfluenzaA__ABW86387

SEQ ID NO: 2149 - protein, 565 aa, synthetic construct; identical to SEQ ID NO: 1910
  REGION 1..565: note = hemagglutinin__InfluenzaA__ABW86409

SEQ ID NO: 2150 - protein, 565 aa, synthetic construct; identical to SEQ ID NO: 1910
  REGION 1..565: note = hemagglutinin__InfluenzaA__ABW86431

SEQ ID NO: 2151 - protein, 565 aa, synthetic construct; identical to SEQ ID NO: 1914
  REGION 1..565: note = hemagglutinin__InfluenzaA__ABW86442

SEQ ID NO: 2152 - protein, 565 aa, synthetic construct; identical to SEQ ID NO: 1930
  REGION 1..565: note = hemagglutinin__InfluenzaA__ABW86453

SEQ ID NO: 2153 - protein, 565 aa, synthetic construct; identical to SEQ ID NO: 1914
  REGION 1..565: note = hemagglutinin__InfluenzaA__ABW86464

SEQ ID NO: 2154 - protein, 565 aa, synthetic construct; identical to SEQ ID NO: 1930
  REGION 1..565: note = hemagglutinin__InfluenzaA__ABW86475

SEQ ID NO: 2155 - protein, 565 aa, synthetic construct; identical to SEQ ID NO: 1910
  REGION 1..565: note = hemagglutinin__InfluenzaA__ABW86486

SEQ ID NO: 2156 - protein, 565 aa, synthetic construct; identical to SEQ ID NO: 1956
  REGION 1..565: note = hemagglutinin__InfluenzaA__ABW86497

SEQ ID NO: 2157 - protein, 565 aa, synthetic construct; identical to SEQ ID NO: 1914
  REGION 1..565: note = hemagglutinin__InfluenzaA__ABW86508

SEQ ID NO: 2158 - protein, 565 aa, synthetic construct
  REGION 1..565: note = hemagglutinin__InfluenzaA__ABW86519
MKVKLLVLLCTFTATYADTICIGYHANNSTDTVDTVLEKNVTVTHSVNLLEDSHNGKLCLLKGIAPLQLGNCSVAGWILGNPECELLISKESWSYIVETPNPENGTCYPGYFADYEELREQLSSVSSFERFEIFPKESSWPNHTVTGVSASCSHNGKSSFYRNLLWLTGKNGLYPNLSKSYANNKEKEVLVLWGVHHPPNIGDQRALYHTENAYVSVVSSHYSRRFTPEIAKRPKVRNQEGRINYYWTLLEPGDTIIFEANGNLIAPRFAFALSRGFGSGIITSNAPMGECDAKCQTPQGAINSSLPFQNVHPVTIGECPKYVRSAKLRMVTGLRNIPSIQSRGLFGAIAGFIEGGWTGMVDGWYGYHHQNEQGSGYAADQKSTQNAINGITNKVNSVIEKMNTQFTAVGKEFNKLERRMENLNKKVDDGFLDIWTYNAELLVLLENERTLDFHDSNVKNLYEKVKSQLKNNAKEIGNGCFEFYHKCNDECMESVKNGTYDYPKYSEESKLNREKIDGVKLESMGVYQILAIYSTVASSLVLLVSLGAISFWMCSNGSLQCRICI

SEQ ID NO: 2159 - protein, 565 aa, synthetic construct; identical to SEQ ID NO: 1910
  REGION 1..565: note = hemagglutinin__InfluenzaA__ABW86530

SEQ ID NO: 2160 - protein, 565 aa, synthetic construct
  REGION 1..565: note = hemagglutinin__InfluenzaA__ABW86541
MKVKLLVLLCTFTATYADTICIGYHANNSTDTVDTVLEKNVTVTHSVNLLEDSHNGKLCLLKGIAPLQLGNCSVAGWILGNPECELLISKESWSYIVETPNPENGTCYPGYFADYEELREQLSSVSSFERFEIFPKESSWLNHTVTGVSASCSHNGKSSFYRNLLWLTGKNGLYPNLSKSYANNKEKEVLVLWGVHHPPNIGDQRALYHTENAYVSVVSSHYSRRFTPEIAKRPKVRDQEGRINYYWTLLEPGDTIIFEANGNLIAPRFAFALSRGFGSGIITSNAPMGECDAKCQTPQGAINSSLPFQNVHPVTIGECPKYVRSAKLRMVTGLRNIPSIQSRGLFGAIAGFIEGGWTGMVDGWYGYHHQNEQGSGYAADQKSTQNAINGITNKVNSVIEKMNTQFTAVGKEFNKLERRMENLNKKVDDGFLDIWTYNAELLVLLENERTLDFHDSNVKNLYEKVKSQLKNNAKEIGNGCFEFYHKCNDECMESVKNGTYDYPKYSEESKLNREKIDGVKLESMGVYQILAIYSTVASSLVLLVSLGAISFWMCSNGSLQCRICI

SEQ ID NO: 2161 - protein, 565 aa, synthetic construct; identical to SEQ ID NO: 1910
  REGION 1..565: note = hemagglutinin__InfluenzaA__ABW86552

SEQ ID NO: 2162 - protein, 566 aa, synthetic construct
  REGION 1..566: note = hemagglutinin__InfluenzaA__ABW86563
MKTIIALSYILCLVFAQKLPGNDNSTATLCLGHHAVPNGTIVKTITNDQIEVTNATELVQSSSTGEICDSPHQILDGENCTLIDALLGDPQCDGFQNKKWDLFVERSKAYSNCYPYDVPDYASLRSLVASSGTLEFNNESFNWTGVTQNGTSSACIRRSNNSFFSRLNWLTHLKFKYPALNVTMPNNEKFDKLYIWGVHHPGTDNDQIFLYAQASGRITVSTKRSQQTVIPNIGSRPRVRNIPSRISIYWTIVKPGDILLINSTGNLIAPRGYFKIRSGKSSIMRSDAPIGKCNSECITPNGSIPNDKPFQNVNRITYGACPRYVKQNTLKLATGMRNVPEKQTRGIFGAIAGFIENGWEGMVDGWYGFRHQNSEGIGQAADLKSTQAAIDQINGKLNRLIGKTNEKFHQIEKEFSEVEGRIQDLEKYVEDTKIDLWSYNAELLVALENQHTIDLTDSEMNKLFEKTKKQLRENAEDMGNGCFKIYHKCDNACIGSIRNGTYDHDVYRDEALNNRFQIKGVELKSGHKDWILWISFAISCFLLCVALLGFIMWACQKGNIRCNICI

SEQ ID NO: 2163 - protein, 565 aa, synthetic construct; identical to SEQ ID NO: 1947
  REGION 1..565: note = hemagglutinin__InfluenzaA__ABW86606

SEQ ID NO: 2164 - protein, 566 aa, synthetic construct; identical to SEQ ID NO: 921
  REGION 1..566: note = hemagglutinin__InfluenzaA__ABW91185

SEQ ID NO: 2165 - protein, 566 aa, synthetic construct
  REGION 1..566: note = hemagglutinin__InfluenzaA__ABW91196
MKTIIALSYILCLVFAQKLPGNDNSTATLCLGHHAVPNGTIVKTITNDQIEVTNATELVQSSSTGEICNSPHQILDGENCTLIDALLGDPQCDGFQNKKWDLFVERSKAYSNCYPYDVPDYASLRSLVASSGTLEFNNESFNWTGVTQNGTSSACIRRSNNSFFSRLNWLTHLKFKYPALNVTMPNNEKFDKLYIWGVHHPGTDNDQIFLYAQASGRITVSTKRSQQTVIPNIGSRPRVRNIPSRISIYWTIVKPGDILLINSTGNLIAPRGYFKIRSGKSSIMRSDAPIGKCNSECITPNGSIPNDKPFQNVNRITYGACPRYVKQNTLKLATGMRNVPEKQTRGIFGAIAGFIENGWEGMVDGWYGFRHQNSEGIGQAADLKSTQAAIDQINGKLNRLIGKTNEKFHQIEKEFSEVEGRIQDLEKYVEDTKIDLWSYNAELLVALENQHTIDLTDSEMNKLFEKTKKQLRENAEDMGNGCFKIYHKCDNACIGSIRNGTYDHDVYRDEALNNRFQIKGVELKSGYKDWILWISFAISCFLLCVALLGFIMWACQKGNIRCNICI

SEQ ID NO: 2166 - protein, 566 aa, synthetic construct; identical to SEQ ID NO: 2165
  REGION 1..566: note = hemagglutinin__InfluenzaA__ABW91207

SEQ ID NO: 2167 - protein, 565 aa, synthetic construct; identical to SEQ ID NO: 1910
  REGION 1..565: note = hemagglutinin__InfluenzaA__ABW91218

SEQ ID NO: 2168 - protein, 566 aa, synthetic construct; identical to SEQ ID NO: 1928
  REGION 1..566: note = hemagglutinin__InfluenzaA__ABW91240

SEQ ID NO: 2169 - protein, 566 aa, synthetic construct
  REGION 1..566: note = hemagglutinin__InfluenzaA__ABW91251
MKTIIALSYILCLVFAQKLPGNDNSTATLCLGHHAVPNGTIVKTITNDQIEVTNATELVQSSSTGEICDSPHQILDGENCTLIDALLGDPQCDGFQNKKWDLFVERSKAYSNCYPYDVPDYASLRSLVASSGTLEFNNESFNWTGVTQNGTSSACIRRSNNSFFSRLNWLTHLKFKYPALNVTMPNNEKFDKLYIWGVHHPGTDNDQIFLYAQASGRITVSTKRSQQTVIPNIGSRPRVRNIPSRISIYWTIVKSGDILLINSTGNLIAPRGYFKIRSGKSSIMRSDAPIGKCNSECITPNGSIPNDKPFQNVNRITYGACPRYVKQNTLKLATGMRNVPEKQTRGIFGAIAGFIENGWEGMVDGWYGFRHQNSEGIGQAADLKSTQAAIDQINGKLNRLIGKTNEKFHQIEKEFSEVEGRIQDLEKYVEDTKIDLWSYNAELLVALENQHTIDLTDSEMNKLFEKTKKQLRENAEDMGNGCFKIYHKCDNACIGSIRNGTYDHDVYRDEALNNRFQIKGVELKSGYKDWILWISFAISCFLLCVALLGFIMWACQKGNIRCNICI

SEQ ID NO: 2170 - protein, 566 aa, synthetic construct; identical to SEQ ID NO: 1928
  REGION 1..566: note = hemagglutinin__InfluenzaA__ABW91262

SEQ ID NO: 2171 - protein, 565 aa, synthetic construct; identical to SEQ ID NO: 1945
  REGION 1..565: note = hemagglutinin__InfluenzaA__ABW91273

SEQ ID NO: 2172 - protein, 565 aa, synthetic construct
  REGION 1..565: note = hemagglutinin__InfluenzaA__ABW91284
MKVKLLVLLCTFTATYADTICIGYHANNSTDTVDTVLEKNVTVTHSVNLLEDSHNGKLCLLKGIAPLQLGNCSVAGWILGNPECELLISRESWSYIVEKPNPENGTCYPGHFADYEELREQLSSVSSFERFEIFPKESSWPNHTTTGVSASCSHNGESSFYKNLLWLTGKNGLYPNLSKSYANNKEKEVLVLWGVHHPPNIGDQRALYHTENAYVSVVSSHYSRKFTPEIAKRPKVRDQEGRINYYWTLLEPGDTIIFEANGNLIAPRYAFALSRGFGSGIINSNASMGECDAKCQTPQGAINSSLPFQNVHPVTIGECPKYVRSAKLRMVTGLRNIPSIQSRGLFGAIAGFIEGGWTGMVDGWYGYHHQNEQGSGYAADQKSTQNAINGITNKVNSVIEKMNTQFTAVGKEFNKLERRMENLNKKVDDGFIDIWTYNAELLVLLENERTLDFHDSNVKNLYEKVKSQLKNNAKEIGNGCFEFYHKCNDECMESVKNGTYDYPKYSEESKLNREKIDGVKLESMGVYQILAIYSTVASSLVLLVSLGAISFWMCSNGSLQCRICI

SEQ ID NO: 2173 - protein, 565 aa, synthetic construct; identical to SEQ ID NO: 1945
  REGION 1..565: note = hemagglutinin__InfluenzaA__ABW91295

SEQ ID NO: 2174 - protein, 565 aa, synthetic construct; identical to SEQ ID NO: 1914
  REGION 1..565: note = hemagglutinin__InfluenzaA__ABW91306

SEQ ID NO: 2175 - protein, 565 aa, synthetic construct; identical to SEQ ID NO: 1914
  REGION 1..565: note = hemagglutinin__InfluenzaA__ABW91317

SEQ ID NO: 2176 - protein, 565 aa, synthetic construct
  REGION 1..565: note = hemagglutinin__InfluenzaA__ABW91328
MKVKLLILLCTFTATYADTICIGYHANNSTDTVDTVLEKNVTVTHSVNLLEDSHNGKLCLLKGIAPLQLGNCSVAGWILGNPECELLISKESWSYIVETPNPENGTCYPGYFADYEELREQLSSVSSFERFEIFPKESSWPNHTVTGVSASCSHNGKSSFYRNLLWLTGKNGLYPNLSKSYANNKEKEVLVLWGVHHPPNIGDQRALYHTENAYVSVVSSHYSRRFTPEIAKRPKVRDQEGRINYYWTLLEPGDTIIFEANGNLIAPRFAFALSRGFGSGIITSNAPMDECDAKCQTPQGAINSSLPFQNVHPVTIGECPKYVRSTKLRMVTGLRNIPSIQSRGLFGAIAGFIEGGWTGMVDGWYGYHHQNEQGSGYAADQKSTQNAINGITNKVNSVIEKMNTQFTAVGKEFNKLERRMENLNKKVDDGFLDIWTYNAELLVLLENERTLDFHDSNVKNLYEKVRSQLKNNAKEIGNGCFEFYHKCNDECMESVKNGTYDYPKYSEESKLNREKIDGVKLESMGVYQILAIYSTVASSLVLLVSLGAISFWMCSNGSLQCRICI

SEQ ID NO: 2177 - protein, 565 aa, synthetic construct; identical to SEQ ID NO: 1914
  REGION 1..565: note = hemagglutinin__InfluenzaA__ABW91339

SEQ ID NO: 2178 - protein, 565 aa, synthetic construct; identical to SEQ ID NO: 1914
  REGION 1..565: note = hemagglutinin__InfluenzaA__ABW91350

SEQ ID NO: 2179 - protein, 565 aa, synthetic construct
  REGION 1..565: note = hemagglutinin__InfluenzaA__ABW91361
MKVKLLVLLCTFTATYADTICIGYHANNSTDTVDTVLEKNVTVTHSVNLLEDSHNGKLCLLKGIAPLQLGNCSVAGWILGNPECELLISKESWSYIVETPNPENGTCYPGYFADYEELREQLSSVSSFERFEIFPKESSWPNHTVTGVSASCSHNGESSFYRNLLWLTGKNGLYPNLSKSYANNKEKEVLVLWGVHHPPNIGDQRALYHTENAYVSVVSSHYSRRFTPEIAKRPKVRDQEGRINYYWTLLEPGDTIIFEANGNLIAPRFAFALSRGFGSGIITSNAPMDKCDAKCQTPQGAINSSLPFQNVHPVTIGECPKYVRSTKLRMVTGLRNIPSIQTRGLFGAIAGFIEGGWTGMVDGWYGYHHQNEQGSGYAADQKSTQNAINGITNKVNSVIEKMNTQFTAVGKEFNKLERRMENLNKKVDDGFLDIWTYNAELLVLLENERTLDFHDSNVKNLYEKVKSQLKNNAKEIGNGCFEFYHKCNDECMESVKNGTYDYPKYSEESKLNREKIDGVKLESMGVYQILAIYSTVASSLVLLVSLGAISFWMCSNGSLQCRICI

SEQ ID NO: 2180 - protein, 565 aa, synthetic construct; identical to SEQ ID NO: 1914
  REGION 1..565: note = hemagglutinin__InfluenzaA__ABW91372

SEQ ID NO: 2181 - protein, 565 aa, synthetic construct; identical to SEQ ID NO: 1947
  REGION 1..565: note = hemagglutinin__InfluenzaA__ABW91383

SEQ ID NO: 2182 - protein, 566 aa, synthetic construct; identical to SEQ ID NO: 1987
  REGION 1..566: note = hemagglutinin__InfluenzaA__ABW91394

SEQ ID NO: 2183 - protein, 565 aa, synthetic construct; identical to SEQ ID NO: 1956
  REGION 1..565: note = hemagglutinin__InfluenzaA__ABW91405

SEQ ID NO: 2184 - protein, 565 aa, synthetic construct
  REGION 1..565: note = hemagglutinin__InfluenzaA__ABW91416
MKVKLLVLLCTFTATYADTICIGYHANNSTDTVDTVLEKNVTVTHSVNLLEDSHNGKLCLLKGIAPLQLGNCSVAGWILGNPECELLISKESWSYIVETPNPENGTCYPGYFADYEELREQLSSVSSFERFEIFPKESSWPNHTVTGVSASCSHNGKSSFYRNLLWLTGKNGLYPNLSKSYANNKEKEVLVLWGVHHPPNIGDQKALYHTENAYVSVVSSHYSRRFTPEIAKRPKVRDQEGRINYYWTLLEPGDTIIFEANGNLIAPRFAFALSRGFGSGIITSNAPMGECDAKCQTPQGAINSSLPFQNVHPVTIGECPKYVRSAKLRMVTGLRNIPSIQSRGLFGAIAGFIEGGWTGMVDGWYGYHHQNEQGSGYAADQKSTQNAINGITNKVNSVIEKMNTQFTAVGKEFNKLERRMENLNKKVDDGFLDIWTYNAELLVLLENERTLDFHDSNVKNLYEKVKSQLKNNAKEIGNGCFEFYHKCNDECMESVKNGTYDYPKYSEESKLNREKIDGVKLESMGVYQILAIYSTVASSLVLLVSLGAISFWMCSNGSLQCRICI

SEQ ID NO: 2185 - protein, 565 aa, synthetic construct; identical to SEQ ID NO: 2059
  REGION 1..565: note = hemagglutinin__InfluenzaA__ABW91427

SEQ ID NO: 2186 - protein, 566 aa, synthetic construct; identical to SEQ ID NO: 1928
  REGION 1..566: note = hemagglutinin__InfluenzaA__ABW91438

SEQ ID NO: 2187 - protein, 565 aa, synthetic construct; identical to SEQ ID NO: 1956
  REGION 1..565: note = hemagglutinin__InfluenzaA__ABW91449

SEQ ID NO: 2188 - protein, 565 aa, synthetic construct; identical to SEQ ID NO: 1956
  REGION 1..565: note = hemagglutinin__InfluenzaA__ABW91460

SEQ ID NO: 2189 - protein, 565 aa, synthetic construct
  REGION 1..565: note = hemagglutinin__InfluenzaA__ABW91471
MKVKLLVLLCTFTATYADTICIGYHANNSTDTVDTVLEKNVTVTHSVNLLEDSHNGKLCLLKGVAPLQLGNCSVAGWILGNPECELLISKESWSYIVETPNPENGTCYPGYFADYEELREQLSSVSSFERFEIFPKESSWPNHTVTGVSASCSHNGKSSFYRNLLWLTGKNGLYPNLSKSYANNKEKEVLVLWGVHHPPNIGDQRALYHTENAYVSVVSSHYSRRFTPEIAKRPKVRDQEGRINYYWTLLEPGDTIIFEANGNLIAPRFAFALSRGFGSGIITSNAPMDECDAKCQTPQGAINSSLPFQNVHPVTIGECPKYVRSTKLRMVTGLRNIPSIQSRGLFGAIAGFIEGGWTGMVDGWYGYHHQNEQGSGYAADQKSTQNAINGITNKVNSVIEKMNTQFTAVGKEFNKLERRMENLNKKVDDGFLDIWTYNAELLVLLENERTLDFHDSNVKNLYEKVKSQLKNNAKEIGNGCFEFYHKCNDECMESVKNGTYDYPKYSEESKLNREKIDGVKLESMGVYQILAIYSTVASSLVLLVSLGAISFWMCSNGSLQCRICI

SEQ ID NO: 2190 - protein, 565 aa, synthetic construct
  REGION 1..565: note = hemagglutinin__InfluenzaA__ABW91482
MKVKLLVLLCTFTATYADTICIGYHANNSTDTVDTVLEKNVTVTHSVNLLEDRHNGKLCLLKGIAPLQLGNCSVAGWILGNPECELLISKESWSYIVETPNPENGTCYPGYFADYEELREQLSSVSSFERFEIFPKESSWPNHTVTGVSASCSHNGRSSFYRNLLWLTGKNGLYPNLSRSYANNKEKEVLVLWGVHHPPNIGDQRALYHTENAYVSVVSSHYSRRFTPEIAKRPKVRDQEGRINYYWTLLEPGDTIIFEANGNLIAPRFAFALSRGFGSGIITSNAPMDECDAKCQTPQGAINSSLPFQNVHPVTIGECPKYVRSAKLRMVTGLRNIPSIQSRGLFGAIAGFIEGGWTGMVDGWYGYHHQNEQGSGYAADQKSTQNAINGITNKVNSVIEKMNTQFTAVGKEFNKLERRMENLNKKVDDGFLDIWTYNAELLVLLENERTLDFHDSNVKNLYEKVKSQLKNNAKEIGNGCFEFYHKCNDECMESVKNGTYDYPKYSEESKLNREKIDGVKLESMGVYQILAIYSTVASSLVLLVSLGAISFWMCSNGSLQCRICI

SEQ ID NO: 2191 - protein, 565 aa, synthetic construct
  REGION 1..565: note = hemagglutinin__InfluenzaA__ABW91493
MKVKLLILLCTFTATYADTICIGYHANNSTDTVDTVLEKNVTVTHSVNLLEDSHNGKLCLLKGIAPLQLGNCSVAGWILGNPECELLISKESWSYIVETPNPENGTCYPGYFADYEELREQLSSVSSFERFEIFPKESSWPNHTVTGVSASCSHNGKSSFYRNLLWLTGKNGLYPNLSKSYANNKEKEVLVLWGVHHPPNIGDQRALYHTENAYVSVVSSHYSRRFTPEIAKRPKVRDQEGRINYYWTLLEPGDTIIFEANGNLIAPRFAFALSRGFGSGIITSNAPMDECDAKCQTPQGAINSSLPFQNVHPVTIGECPKYVRSTKLRMVTGLRNIPSIQSRGLFGAIAGFIEGGWTGMVDGWYGYHHQNEQGSGYAADQKSTQNAINGITNKVNSVIEKMNTQFTAVGKEFNKLEKRMENLNKKVDDGFLDIWTYNAELLVLLENERTLDFHDSNVKNLYEKVKSQLKNNAKEIGNGCFEFYHKCNDECMESVKNGTYDYPKYSEESKLNREKIDGVKLESMGVYQILAIYSTVASSLVLLVSLGAISFWMCSNGSLQCRICI

SEQ ID NO: 2192 - protein, 565 aa, synthetic construct; identical to SEQ ID NO: 1930
  REGION 1..565: note = hemagglutinin__InfluenzaA__ABW91504

SEQ ID NO: 2193 - protein, 565 aa, synthetic construct
  REGION 1..565: note = hemagglutinin__InfluenzaA__ABW91515
MKVKLLVLLCTFTATYADTICIGYHANNSTDTVDTVLEKNVTVTHSVNLLEDRHNGKLCLLKGIAPLQLGNCSVAGWILGNPECELLISKESWSYVVETPNPENGTCYPGYFADYEELREQLSSVSSFERFEIFPKESSWPNHTVTGVSASCSHNGKSSFYRNLLWLTGKNGLYPNLSKSYANNKEKEVLVLWGVHHPPNIGDQRALYHTENAYVSVVSSHYSRRFTPEIAKRPKVRDQEGRINYYWTLLEPGDTIIFEANGNLIAPRFAFALSRGFGSGIITSNAPMDECDAKCQTPQGAINSSLPFQNVHPVTIGECPKYVRSAKLRMVTGLRNIPSIQSRGLFGAIAGFIEGGWTGMVDGWYGYHHQNEQGSGYAADQKSTQNAINGITNKVNSVIEKMNTQFTAVGKEFNKLERRMENLNKKVDDGFLDIWTYNAELLVLLENERTLDFHDSNVKNLYEKVKSQLKNNAKEIGNGCFEFYHKCNDECMESVKNGTYDYPKYSEESKLNREKIDGVKLESMGVYQILAIYSTVASSLVLLVSLGAISFWMCSNGSLQCRICI

SEQ ID NO: 2194 - protein, 565 aa, synthetic construct
  REGION 1..565: note = hemagglutinin__InfluenzaA__ABW91526
MKVKLLVLLCTFTATYADTICIGYHANNSTDTVDTVLEKNVTVTHSVNLLEDSHNGKLCLLKGIAPLQLGNCSVAGWILGNPECELLISKESWSYIVETPNPENGTCYPGYFADYEELREQLSSVSSFERFEIFPKESSWPNHTVTGVSASCSHNGKSSFYRNLLWLTGKNGLYPNLSKSYANNKEKEVLVLWGVHHPPNIGDQRALYHTENAYVSVVSSHYSRRFTPEIAKRPKVREQEGRINYYWTLLEPGDTIIFEANGNLIAPRFAFALSRGFGSGIITSNAPMDECDAKCQTPQGAINSSLPFQNVHPVTIGECPKYVRSTRLRMVTGLRNIPSIQSRGLFGAIAGFIEGGWTGMVDGWYGYHHQNEQGSGYAADQKSTQNAINGITNKVNSVIEKMNTQFTAVGKEFNKLERRMENLNKKVDDGFLDIWTYNAELLVLLENERTLDFHDSNVKNLYEKVKSQLKNNAKEIGNGCFEFYHKCNDECMESVKNGTYDYPKYSEESKLNREKIDGVKLESMGVYQILAIYSTVASSLVLLVSLGAISFWMCSNGSLQCRICI

SEQ ID NO: 2195 - protein, 565 aa, synthetic construct; identical to SEQ ID NO: 1914
  REGION 1..565: note = hemagglutinin__InfluenzaA__ABW91537

SEQ ID NO: 2196 - protein, 566 aa, synthetic construct; identical to SEQ ID NO: 1987
  REGION 1..566: note = hemagglutinin__InfluenzaA__ABW91548

SEQ ID NO: 2197 - protein, 565 aa, synthetic construct
  REGION 1..565: note = hemagglutinin__InfluenzaA__ABW91559
MKVKLLILLCTFTATYADTICIGYHANNSTDTVDTVLEKNVTVTHSVNLLEDSHNGKLCLLKGIAPLQLGNCSVAGWILGNPECELLISKESWSYIVETPNPENGTCYPGYFADYEELREQLSSVSSFERFEIFPKESSWPNHTVTGVSASCSHNGKSSFYRNLLWLTGKNGLYPNLSKSYANNKEKEVLVLWGVHHPPNIGDQRALYHTENAYVSVVSSHYSRRFTPEIAKRPKVRDQEGRINYYWTLLEPGDTIIFEANGNLIAPRFAFALSRGFGSGIITSNAPMDECDAKCQTPQGAINSSLPFQNVHPVTIGECPKYVRSTKLRMVTGLRNIPSIQSRGLFGAIAGFIEGGWTGMVDGWYGYHHQNEQGSGYAADQKSTQNAINGITNKVNSVIEKMNTQFTAVGKEFNKLERRMENLNKKVDDGFLDIWTYNAELLVLLENERTLDFHDSNVKNLYEKVKSQLKNNAKEIGNGCFEFYHKCNDECMESVKNGTYDYPKYSEESKLYREKIDGVKLESMGVYQILAIYSTVASSLVLLVSLGAISFWMCSNGSLQCRICI

SEQ ID NO: 2198 - protein, 565 aa, synthetic construct; identical to SEQ ID NO: 2055
  REGION 1..565: note = hemagglutinin__InfluenzaA__ABW91570

SEQ ID NO: 2199 - protein, 565 aa, synthetic construct; identical to SEQ ID NO: 1930
  REGION 1..565: note = hemagglutinin__InfluenzaA__ABW91581

SEQ ID NO: 2200 - protein, 565 aa, synthetic construct; identical to SEQ ID NO: 1910
  REGION 1..565: note = hemagglutinin__InfluenzaA__ABW91592

SEQ ID NO: 2201 - protein, 565 aa, synthetic construct; identical to SEQ ID NO: 1956
  REGION 1..565: note = hemagglutinin__InfluenzaA__ABW91603

SEQ ID NO: 2202 - protein, 565 aa, synthetic construct
  REGION 1..565: note = hemagglutinin__InfluenzaA__ABW91614
MKVKLLVLLCTFTATYADTICIGYHANNSTDTVDTVLEKNVTVTHSVNLLEDSHNGKLCLLKGIAPLQLGNCSVAGWILGNPECELLISKESWSYIVETPSPENGTCYPGYFADYEELREQLSSVSSFERFEIFPKESSWPNHTVTGVSASCSHNGKSSFYRNLLWLTGKNGLYPNLSKSYANNKEKEVLVLWGVHHPPNIGDQRALYHTENAYVSVVSSHYSRRFTPEIAKRPKVRDQEGRINYYWTLLEPGDTIIFEANGNLIAPRFAFALSRGFGSGIISSNAPMGECDAKCQTPQGAINSSLPFQNVHPVTIGECPKYVRSAKLRMVTGLRNIPSIQSRGLFGAIAGFIEGGWTGMVDGWYGYHHQNEQGSGYAADQKSTQNAINGITNKVNSVIEKMNTQFTAVGKEFNKLERRMENLNKKVDDGFLDIWTYNAELLVLLENERTLDFHDSNVKNLYEKVKSQLKNNAKEIGNGCFEFYHKCNDECMESVKNGTYDYPKYSEESKLNREKIDGVKLESMGVYQILAIYSTVASSLVLLVSLGAISFWMCSNGSLQCRICI

SEQ ID NO: 2203 - protein, 565 aa, synthetic construct; identical to SEQ ID NO: 1945
  REGION 1..565: note = hemagglutinin__InfluenzaA__ABW91625

SEQ ID NO: 2204 - protein, 565 aa, synthetic construct; identical to SEQ ID NO: 1914
  REGION 1..565: note = hemagglutinin__InfluenzaA__ABW91636

SEQ ID NO: 2205 - protein, 566 aa, synthetic construct; identical to SEQ ID NO: 1987
  REGION 1..566: note = hemagglutinin__InfluenzaA__ABW91647

SEQ ID NO: 2206 - protein, 568 aa, synthetic construct
  REGION 1..568: note = hemagglutinin__InfluenzaA__ABX10515
MEKIVLLFAIVSLVKSDQICIGYHANNSTEQVDTIMEKNVTVTHAQDILEKTHNGKLCDLDGVKPLILRDCSVAGWLLGNPMCDEFINVPEWSYIVEKANPVNDLCYPGDFNDYEELKHLLSRINHFEKIQIIPKSSWSSHEVSLGVSSACPYQGKSSFFRNVVWLIKKNSTYPTIKRSYNNTNQEDLLVLWGIHHPNDAAEQTKLYQNPTTYISVGTSTLNQRLVPRIATRSKVNGQSGRMEFFWTILKPNDAINFESNGNFIAPEYAYKIVKKGDSTIMKSELEYGNCNTKCQTPMGAINSSMPFHNIHPLTIGECPKYVKSNRLVLATGLRNSPQRERRRKKRGLFGAIAGFIEGGWQGMVDGWYGYHHSNEQGSGYAADKESTQKAIDGVTNKVNSIIDKMNTQFEAVGREFNNLERRIENLNKKMEDGFLDVWTYNAELLVLMENERTLDFHDSNVKNLYDKVRLQLKDNAKELGNGCFEFYHKCDNECMESVRNGTYDYPQYSEEARLKREEISGVKLESIGIYQILSIYSTVASSLALAIMVAGLSLWMCSNGSLQCRICI

SEQ ID NO: 2207 - protein, 566 aa, synthetic construct; identical to SEQ ID NO: 1856
  REGION 1..566: note = hemagglutinin__InfluenzaA__ABX10525

SEQ ID NO: 2208 - protein, 565 aa, synthetic construct; identical to SEQ ID NO: 1914
  REGION 1..565: note = hemagglutinin__InfluenzaA__ABX58239

SEQ ID NO: 2209 - protein, 565 aa, synthetic construct; identical to SEQ ID NO: 2014
  REGION 1..565: note = hemagglutinin__InfluenzaA__ABX58250

SEQ ID NO: 2210 - protein, 565 aa, synthetic construct
  REGION 1..565: note = hemagglutinin__InfluenzaA__ABX58261
MKVKLLILLCTFTATYADTICIGYHANNSTDTVDTVLEKNVTVTHSVNLLEDSHNGKLCLLKGIAPLQLGNCSVAGWILGNPECELLISKESWSYIVETPNPENGTCYPGYFADYEELREQLSSVSSFERFEIFPKESSWPNHTVTGVSASCSHNGKSSFYRNLLWLTGKNGLYPNLSKSYANNKEKEVLVLWGVHHPPNIGDQRALYHTENAYVSVVSSHYSRRFTPEIAKRPKVRDQEGRINYYWSLLEPGDTIIFEANGNLIAPRFAFALSRGFGSGIITSNAPMDECDAKCQTPQGAINSSLPFQNVHPVTIGECPKYVRSTKLRMVTGLRNIPSIQSRGLFGAIAGFIEGGWTGMVDGWYGYHHQNEQGSGYAADQKSTQNAINGITNKVNSVIEKMNTQFTAVGKEFNKLERRMENLNKKVDDGFLDIWTYNAELLVLLENERTLDFHDSNVKNLYEKVKSQLKNNAKEIGNGCFEFYHKCNDECMESVKNGTYDYPKYSEESKLNREKIDGVKLESMGVYQILAIYSTVASSLVLLVSLGAISFWMCSNGSLQCRICI

SEQ ID NO: 2211 - protein, 565 aa, synthetic construct
  REGION 1..565: note = hemagglutinin__InfluenzaA__ABX58272
MKVKLLILLCTFTATYADTICIGYHANNSTDTVDTVLEKNVTVTHSVNLLEDSHNGKLCLLKGIAPLQLGNCSVAGWILGNPECELLISKESWSYIVETPNPENGTCYPGYFADYEELREQLSSVSSFERFEIFPKKSSWPNHTVTGVSASCSHNGKSSFYRNLLWLTGKNGLYPNLSKSYANNKEKEVLVLWGVHHPPNIGDQRALYHTENAYVSVVSSHYSRRFTPEIAKRPKVRDQEGRINYYWTLLEPGDTIIFEANGNLIAPRFAFALSRGFGSGIITSNAPMDECDAKCQTPQGAINSSLPFQNVHPVTIGECPKYVRSTKLRMVTGLRNIPSIQSRGLFGAIAGFIEGGWTGMVDGWYGYHHQNEQGSGYAADQKSTQNAINGITNKVNSVIEKMNTQFTAVGKEFNKLERRMENLNKKVDDGFLDIWTYNAELLVLLENERTLDFHDSNVKNLYEKVKSQLKNNAKEIGNGCFEFYHKCNDECMESVKNGTYDYPKYSEESKLNREKIDGVKLESMGVYQILAIYSTVASSLVLLVSLGAISFWMCSNGSLQCRICI

SEQ ID NO: 2212 - protein, 565 aa, synthetic construct; identical to SEQ ID NO: 1914
  REGION 1..565: note = hemagglutinin__InfluenzaA__ABX58283

SEQ ID NO: 2213 - protein, 565 aa, synthetic construct; identical to SEQ ID NO: 2055
  REGION 1..565: note = hemagglutinin__InfluenzaA__ABX58294

SEQ ID NO: 2214 - protein, 565 aa, synthetic construct; identical to SEQ ID NO: 1910
  REGION 1..565: note = hemagglutinin__InfluenzaA__ABX58316

SEQ ID NO: 2215 - protein, 565 aa, synthetic construct; identical to SEQ ID NO: 2059
  REGION 1..565: note = hemagglutinin__InfluenzaA__ABX58327

SEQ ID NO: 2216 - protein, 565 aa, synthetic construct; identical to SEQ ID NO: 1910
  REGION 1..565: note = hemagglutinin__InfluenzaA__ABX58338

SEQ ID NO: 2217 - protein, 565 aa, synthetic construct
  REGION 1..565: note = hemagglutinin__InfluenzaA__ABX58360
MKVKLLVLLCTFTATYADTICIGYHANNSTDTVDTVLEKNVTVTHSVNLLEDSHNGKLCLLKGIAPIQLGNCSVAGWILGNPECELLISKESWSYIVETPNPENGTCYPGYFADYEELREQLSSVSSFERFEIFPKESSWPNHTVTGVSASCSHNGKSSFYRNLLWLTGKNGLYPNLSKSYANNKEKEVLVLWGVHHPPNIGDQRALYHTENAYVSVVSSHYSRRFTPEIAKRPKVRDQEGRINYYWTLLEPGDTIIFEANGNLIAPRFAFALSRGFGSGIITSNAPMDECDAKCQTPQGAINSSLPFQNVHPVTIGECPKYVRSTKLRMVTGLRNIPSIQSRGLFGAIAGFIEGGWTGMVDGWYGYHHQNEQGSGYAADQKSTQNAINGITNKVNSVIEKMNTQFTAVGKEFNKLERRMENLNKKVDDGFLDIWTYNAELLVLLENERTLDFHDSNVKNLYEKVKSQLKNNAKEIGNGCFEFYHKCNDGCMESVKNGTYDYPKYSEESKLNREKIDGVKLESMGVYQILAIYSTVASSLVLLVSLGAISFWMCSNGSLQCRICI

SEQ ID NO: 2218 - protein, 565 aa, synthetic construct; identical to SEQ ID NO: 1914
  REGION 1..565: note = hemagglutinin__InfluenzaA__ABX58371

SEQ ID NO: 2219 - protein, 565 aa, synthetic construct; identical to SEQ ID NO: 1914
  REGION 1..565: note = hemagglutinin__InfluenzaA__ABX58382

SEQ ID NO: 2220 - protein, 565 aa, synthetic construct; identical to SEQ ID NO: 2055
  REGION 1..565: note = hemagglutinin__InfluenzaA__ABX58393

SEQ ID NO: 2221 - protein, 565 aa, synthetic construct; identical to SEQ ID NO: 1914
  REGION 1..565: note = hemagglutinin__InfluenzaA__ABX58404

SEQ ID NO: 2222 - protein, 565 aa, synthetic construct
  REGION 1..565: note = hemagglutinin__InfluenzaA__ABX58415
MKVKLLVLLCTFTATYADTICIGYHANNSTDTVDTVLEKNVTVTHSVNLLEDRHNGKLCLLKGIAPLQLGNCSVAGWILGNPECELLISKKSWSYIVETPNPENGTCYPGYFADYEELREQLSSVSSFERFEIFPKESSWPNHTVTGVSASCSHNGKSSFYRNLLWLTGKNGLYPNLSRSYANNKEKEVLVLWGVHHPPNIGDQRALYHTENAYVSVVSSHYSRRFTPEIAKRPKVRDQEGRINYYWTLLEPGDTIIFEANGNLIAPRFAFALSRGFGSGIITSNAPMDECDAKCQTPQGAINSSLPFQNVHPVTIGECPKYVRSAKLRMVTGLRNIPSIQSRGLFGAIAGFIEGGWTGMVDGWYGYHHQNEQGSGYAADQKSTQNAINGITNKVNSVIEKMNTQFTAVGKEFNKLERRMENLNKKVDDGFLDIWTYNAELLVLLENERTLDFHDSNVKNLYEKVKSQLKNNAKEIGNGCFEFYHKCNDECMESVKNGTYDYPKYSEESKLNREKIDGVKLESMGVYQILAIYSTVASSLVLLVSLGAISFWMCSNGSLQCRICI

SEQ ID NO: 2223 - protein, 565 aa, synthetic construct; identical to SEQ ID NO: 1914
  REGION 1..565: note = hemagglutinin__InfluenzaA__ABX58426

SEQ ID NO: 2224 - protein, 565 aa, synthetic construct; identical to SEQ ID NO: 1914
  REGION 1..565: note = hemagglutinin__InfluenzaA__ABX58437

SEQ ID NO: 2225 - protein, 565 aa, synthetic construct; identical to SEQ ID NO: 1910
  REGION 1..565: note = hemagglutinin__InfluenzaA__ABX58448

SEQ ID NO: 2226 - protein, 565 aa, synthetic construct; identical to SEQ ID NO: 1956
  REGION 1..565: note = hemagglutinin__InfluenzaA__ABX58459

SEQ ID NO: 2227 - protein, 565 aa, synthetic construct; identical to SEQ ID NO: 2055
  REGION 1..565: note = hemagglutinin__InfluenzaA__ABX58470

SEQ ID NO: 2228 - protein, 565 aa, synthetic construct; identical to SEQ ID NO: 1956
  REGION 1..565: note = hemagglutinin__InfluenzaA__ABX58481

SEQ ID NO: 2229 - protein, 565 aa, synthetic construct; identical to SEQ ID NO: 1914
  REGION 1..565: note = hemagglutinin__InfluenzaA__ABX58492

SEQ ID NO: 2230 - protein, 565 aa, synthetic construct; identical to SEQ ID NO: 1930
  REGION 1..565: note = hemagglutinin__InfluenzaA__ABX58503

SEQ ID NO: 2231 - protein, 565 aa, synthetic construct; identical to SEQ ID NO: 1956
  REGION 1..565: note = hemagglutinin__InfluenzaA__ABX58525

SEQ ID NO: 2232 - protein, 565 aa, synthetic construct
  REGION 1..565: note = hemagglutinin__InfluenzaA__ABX58536
MKVKLLVLLCTFTATYADTICIGYHANNSTDTVDTVLEKNVTVTHSVNLLEDRHNGKLCLLKGIAPLQLGNCSVAGWILGNPECELLISKEPWSYIVETPNPENGTCYPGYFADYEELREQLSSVSSFERFEIFPKESSWPNHTVTGVSASCSHNGKSSFYRNLLWLTGKNGLYPNLSRSYANNKEKEVLVLWGVHHPPNIGDQRALYHTENAYVSVVSSHYSRRFTPEIAKRPKVRDQEGRINYYWTLLEPGDTIIFEANGNLIAPRFAFALSRGFGSGIITSNAPMDECDAKCQTPQGAINSSLPFQNVHPVTIGECPKYVRSAKLRMVTGLRNIPSIQSRGLFGAIAGFIEGGWTGMVDGWYGYHHQNEQGSGYAADQKSTQNAINGITNKVNSVIEKMNTQFTAVGKEFNKLERRMENLNKKVDDGFLDIWTYNAELLVLLENERTLDFHDSNVKNLYEKVKSQLKNNAKEIGNGCFEFYHKCNDECMESVKNGTYDYPKYSEESKLNREKIDGVKLESMGVYQILAIYSTVASSLVLLVSLGAISFWMCSNGSLQCRICI

SEQ ID NO: 2233 - protein, 565 aa, synthetic construct
  REGION 1..565: note = hemagglutinin__InfluenzaA__ABX58547
MKVKLLILLCTFTATYADTICIGYHANNSTDTVDTVLEKNVTVTHSVNLLEDSHNGKLCLLKGIAPLQLGNCSVAGWILGNPECELLISKESWSYIVETPNPENGTCYPGYFADYEELREQLSSVSSFERFEIFPKESSWPNHTVTGVSASCSHNGKSSFYRNLLWLTGKNGLYPNLSKSYANNKEKEVLVLWGVHHPPNIGDQRALYHTENAYVSVVSSHYSRRFTPEIAKRPKVRDQEGRINYYWTLLEPGDTIIFEANGNLIAPRFAFALSRGFGSGIITSNAPMDECDAKCQTPQGAINSSLPFQNVHPVTIGECPKYVRSTKLRMVTGLRNIPSIQTRGLFGAIAGFIEGGWTGMVDGWYGYHHQNEQGSGYAADQKSTQNAINGITNKVNSVIEKMNTQFTAVGKEFNKLERRMENLNKKVDDGFLDIWTYNAELLVLLENERTLDFHDSNVKNLYEKVKSQLKNNAKEIGNGCFEFYHKCNDECMESVKNGTYDYPKYSEESKLNREKIDGVKLESMGVYQILAIYSTVASSLVLLVSLGAISFWMCSNGSLQCRICI

SEQ ID NO: 2234 - protein, 565 aa, synthetic construct
  REGION 1..565: note = hemagglutinin__InfluenzaA__ABX58558
MKVKLLVLLCTFTATYADTICIGYHANNSTDTVDTVLEKNVTVTHSVNLLEDSHNGKLCLLKGIAPLQLGNCSVAGWILGNPECELLISKESWSYIVETPNPENGTCYPGYFADYEELREQLSSVSSFERFEIFPKESSWPNHTVTGVSASCSHNGRSSFYRNLLWLTGKNGLYPNLSKSYANNKEKEVLVLWGVHHPPNIGDQRALYHTENAYVSVVSSHYSRRFTPEIAKRPKVRDQEGRINYYWTLLEPGDTIIFEANGNLIAPRFAFALSRGFGSGIITSNAPMDKCDAKCQTPQGAINSSLPFQNVHPVTIGECPKYVRSTKLRMVTGLRNIPSIQSRGLFGAIAGFIEGGWTGMVDGWYGYHHQNEQGSGYAADQKSTQNAINGITNKVNSVIEKMNTQFTAVGKEFNKLERRMENLNKKVDDGFLDIWTYNAELLVLLENERTLDFHDSNVKNLYEKVKSQLKNNAKEIGNGCFEFYHKCNDECMESVKNGTYDYPKYSEESKLNREKIDGVKLESMGVYQILAIYSTVASSLVLLVSLGAISFWMCSNGSLQCRICI

SEQ ID NO: 2235 - protein, 565 aa, synthetic construct
  REGION 1..565: note = hemagglutinin__InfluenzaA__ABX58569
MKVKLLILLCTFTATYADTICIGYHANNSTDTVDTVLEKNVTVTHSVNLLEDSHNGKLCLLKGIAPLQLGNCSVAGWILGNPECELLISKESWSYIVETPNPENGTCYPGYFADYEELREQLSSVSSFERFEIFPKESSWPNHTATGVSASCSHNGKSSFYRNLLWLTGKNGLYPNLSKSYANNKEKEVLVLWGVHHPPNIGDQRALYHTENAYVSVVSSHYSRRFTPEIAKRPKVRDQEGRINYYWTLLEPGDTIIFEANGNLIAPRFAFALSRGFGSGIITSNAPMDECDAKCQTPQGAINSSLPFQNVHPVTIGECPKYVRSTKLRMVTGLRNIPSIQSRGLFGAIAGFIEGGWTGMVDGWYGYHHQNEQGSGYAADQKSTQNAINGITNKVNSVIEKMNTQFTAVGKEFNKLERRMENLNKKVDDGFLDIWTYNAELLVLLENERTLDFHDSNVKNLYEKVKSQLKNNAKEIGNGCFEFYHKCNDECMESVKNGTYDYPKYSEESKLNREKIDGVKLESMGVYQILAIYSTVASSLVLLVSLGAISFWMCSNGSLQCRICI

SEQ ID NO: 2236 - protein, 565 aa, synthetic construct; identical to SEQ ID NO: 1910
  REGION 1..565: note = hemagglutinin__InfluenzaA__ABX58580

SEQ ID NO: 2237 - protein, 565 aa, synthetic construct; identical to SEQ ID NO: 1914
  REGION 1..565: note = hemagglutinin__InfluenzaA__ABX58591

SEQ ID NO: 2238 - protein, 565 aa, synthetic construct
  REGION 1..565: note = hemagglutinin__InfluenzaA__ABX58602
MKVKLLVLLCTFTATYADTICIGYHANNSTDTVDTVLEKNVTVTHSVNLLEDSHNGKLCLLEGIAPLQLGNCSVAGWILGNPECELLISKESWSYIVETPNPENGTCYPGYFADYEELREQLSSVSSFERFEIFPKESSWPNHTVTGVSASCSHNGKSSFYRNLLWLTGKNGLYPNLSKSYANNKEKEVLVLWGVHHPPNIGDQRALYHTENAYVSVVSSHYSRRFTPEIAKRPKVRDQEGRINYYWTLLEPRDTIIFEANGNLIAPRFAFALSRGFGSGIITSNAPMGECDAKCQTPQGAINSSLPFQNVHPVTIGECPKYVRSAKLRMVTGLRNIPSIQSRGLFGAIAGFIEGGWTGMVDGWYGYHHQNEQGSGYAADQKSTQNAINGITNKVNSVIEKMNTQFTAVGKEFNKLERRMENLNKKVDDGFLDIWTYNAELLVLLENERTLDFHDSNVKNLYEKVKSQLKNNAKEIGNGCFEFYHKCNDECMESVKNGTYDYPKYSEESKLNREKIDGVKLESMGVYQILAIYSTVASSLVLLVSLGAISFWMCSNGSLQCRICI

SEQ ID NO: 2239 - protein, 565 aa, synthetic construct; identical to SEQ ID NO: 1947
  REGION 1..565: note = hemagglutinin__InfluenzaA__ABX58613

SEQ ID NO: 2240 - protein, 565 aa, synthetic construct; identical to SEQ ID NO: 1914
  REGION 1..565: note = hemagglutinin__InfluenzaA__ABX58624

SEQ ID NO: 2241 - protein, 565 aa, synthetic construct
  REGION 1..565: note = hemagglutinin__InfluenzaA__ABX58635
MKVKLLVLLCTFTATYADTICIGYHANNSTDTVDTVLEKNVTVTHSVNLLEDSHNGKLCLLKGIAPLQLGNCSVAGWILGNPECELLISKESWSYIVETPNPENGTCYPGYFADYEELREQLSSVSSFERFEIFPKESSWPNHTVTGVSASCSHNGRSSFYRNLLWLTGKNGLYPSLSKSYANNKEKEVLVLWGVHHPPNIGDQRALYHTENAYVSVVSSHYSRRFTPEIAKRPKVRDQEGRINYYWTLLEPGDTIIFEANGNLIAPRFAFALSRGFGSGIITSNAPMDECDAKCQTPQGAINSSLPFQNVHPVTIGECPKYVRSTKLRMVTGLRNIPSIQSRGLFGAIAGFIEGGWTGMVDGWYGYHHQNEQGSGYAADQKSTQNAINGITNKVNSVIEKMNTQFTAVGKEFNKLERRMENLNKKVDDGFLDIWTYNAELLVLLENERTLDFHDSNVKNLYEKVKSQLKNNAKEIGNGCFEFYHKCNDECMESVKNGTYDYPKYSEESKLNREKIDGVKLESMGVYQILAIYSTVASSLVLLVSLGAISFWMCSNGSLQCRICI

SEQ ID NO: 2242 - protein, 565 aa, synthetic construct; identical to SEQ ID NO: 1910
  REGION 1..565: note = hemagglutinin__InfluenzaA__ABX58679

SEQ ID NO: 2243 - protein, 565 aa, synthetic construct; identical to SEQ ID NO: 1956
  REGION 1..565: note = hemagglutinin__InfluenzaA__ABX58701

SEQ ID NO: 2244 - protein, 565 aa, synthetic construct; identical to SEQ ID NO: 2014
  REGION 1..565: note = hemagglutinin__InfluenzaA__ABX58712

SEQ ID NO: 2245 - protein, 567 aa, synthetic construct
  REGION 1..567: note = hemagglutinin__InfluenzaA__ABY19417
MEKIVLLLAIISLVKSDQICIGYHANNSTEQVDTIMEKNVTVTHAQDILEKTHNGKLCDLDGVKPLILRDCSVAGWLLGNPMCDEFINVPEWSYIVEKANPANDLCYPGNFNDYEELKHLLSRINHFEKIQIIPKSSWSDHEASSGVSSACPYQGVPSFFRNVVWLIKKNNTYPTIKRSYNNTNQEDLLILWGIHHSNDAAEQTKLYQNPTTYISVGTSTLNQRLVPKIATRSKVNGQSGRMDFFWTILKPNDAINFESNGNFIAPEYAYKIVKKGDSAIMKSEVEYGNCNTKCQTPIGAINSSMPFHNIHPLTIGECPKYVKSNKLVLATGLRNSPLRERRRKRGLFGAIAGFIEGGWQGMVDGWYGYHHSNEQGSGYAADKESTQKAIDGVTNKVNSIIDKMNTQFEAVGREFNNLERRIENLNKKMEDGFLDVWTYNAELLVLMENERTLDFHDSNVKNLYDKVRLQLRDNAKELGNGCFKFYHKCDNECMESVRNGTYDYPQYSEEARLKREEISGVKLESIGTYQILSIYSTVASSLALAIMVAGLSLWMCSNGSLQCRIRI

SEQ ID NO: 2246 - protein, 567 aa, synthetic construct
  REGION 1..567: note = hemagglutinin__InfluenzaA__ABY19418
MEKIVLLLAIISLVKSDQICIGYHANNSTEQVDTIMEKNVTVTHAQDILEKTHNGKLCDLDGVKPLILRDCSVAGWLLGNPMCDEFINVPEWSYIVEKANPANDLCYPGDFNDYEELKHLLSRINHFEKIQIIPKSSWSDHEASSGVSSACPYQGVPSFFRNVVWLIKKNNTYPTIKRSYNNTNQEDLLILWGIHHSNDAAEQTKLYQNPTTYISVGTSTLNQRLVPKIATRSKVNGQSGRMDFFWTILKPNDAINFESNGNFIAPEYAYKIVKKGDSAIMKSEVEYGNCNTKCQTPIGAINSSMPFHNIHPLTIGECPKYVKSNKLVLATGLRNSPLRERRRKRGLFGAIAGFIEGGWQGMVDGWYGFHHSNEQGSGYAADKESTQKAIDGVTNKVNSIIDKMNTQFEAVGREFNNLERRIENLNKKMEDGFLDVWTYNAELLVLMENERTLDFHDSNVKNLYDKVRLQLRDNAKELGNGCFEFYHKCDNECMESVRNGTYDYPQYSEEARLKREEISGVKLESIGTYQILSIYSTVASSLALAIMVAGLSLWMCSNGSLQCRICI

SEQ ID NO: 2247 - protein, 567 aa, synthetic construct
  REGION 1..567: note = hemagglutinin__InfluenzaA__ABY19419
MEKIVLLLAIISLVKSDQICIGYHANNSTEQVDTIMEKNVTVTHAQDILEKTHNGKLCDLDGVKPLILRDCSVAGWLLGNPMCDEFINVPEWSYIVEKANPANDLCYPGNFNDYEELKHLLSRINHFEKIQIIPKSSWSDHEASSGVSSACPYQGVPSFFRNVVWLIKKNNTYPTIKRSYNNTNQEDLLILWGIHHSNDAAEQTKLYQNPTTYISVGTSTLNQRLVPKIATRSKVNGQSGRMDFFWTILKPNDAINFESNGNFIAPEYAYKIVKKGDSAIMKSEVEYGNCNTKCQTPIGAINSSMPFHNIHPLTIGECPKYVKSNKLVLATGLRNSPLRERRRKRGLFGAIAGFIEGGWQGMVDGWYGYHHSNEQGSGYAADKESTQKAIDGVTNKVNSIIDKMNTQFEAVGREFNNLERRIENLNKKMEDGFLDVWTYNAELLVLMENERTLDFHDSNVKNLYDKVRLQLRDNAKELGNGCFEFYHKCDNECMESVRNGTYDYPQYSEEARLKREEISGVKLESIGTYQILSIYSTVASSLALAIMVAGLSLWMCSNGSLQCRICI

SEQ ID NO: 2248 - protein, 565 aa, synthetic construct; identical to SEQ ID NO: 2055
  REGION 1..565: note = hemagglutinin__InfluenzaA__ABY51017

SEQ ID NO: 2249 - protein, 566 aa, synthetic construct; identical to SEQ ID NO: 1928
  REGION 1..566: note = hemagglutinin__InfluenzaA__ABY51028

SEQ ID NO: 2250 - protein, 565 aa, synthetic construct
  REGION 1..565: note = hemagglutinin__InfluenzaA__ABY51039
MKVKLLVLLCTFTATNADTICIGYHANNSTDTVDTVLEKNVTVTHSVNLLENSHNGKLCLLKGIAPLQLGNCSVAGWILGNPECELLISKESWSYIVETPNPENGTCYPGHFADYEELREQLSSVSSFERFEIFPKESSWPNHTVTGVSASCSHNGESSFYRNLLWLTGKNGLYPNLSKSYANNKEKEVLVLWGVHHPPNIGDQKALYHTENAYVSVVSSHYSRKFTPEIAKRPKVRDQEGRINYYWTLLEPGDTIIFEANGNLIAPRYAFALSRGFGSGIINSNAPMDKCDAKCQTPQGAINSSLPFQNVHPVTIGECPKYVRSAKLRMVTGLRNIPSIQSRGLFGAIAGFIEGGWTGMVDGWYGYHHQNEQGSGYAADQKSTQNAINGITNKVNSVIEKMNTQFTAVGKEFNKLERRMENLNKKVDDGFIDIWTYNAELLVLLENERTLDFHDSNVKNLYEKVKGQLKNNAKEIGNGCFEFYHKCNDECMESVKNGTYDYPKYSEESKLNREKIDGVKLESMGVYQILAIYSTVASSLVLLVSLGAISFWMCSNGSLQCRICI

SEQ ID NO: 2251 - protein, 565 aa, synthetic construct
  REGION 1..565: note = hemagglutinin__InfluenzaA__ABY51050
MKVKLLVLLCTFTATYADTICIGYHANNSTDTVDTVLEKNVTVTHSVNLLENSHNGKLCLLKGIAPLQLGNCSVAGWILGNPECELLISKESWSYIVEKPNPENGTCYPGHFADYEELREQLSSVSSFERFEIFPKESSWPNHTVTGVSASCSHNGESSFYRNLLWLTGKNGLYPNLSKSYANNKEKEVLVLWGVHHPPNIGDQKALYHTENAYVSVVSSHYSRKFTPEIAKRPKVRDQEGRINYYWTLLEPGDTIIFEANGNLIAPRYAFALSRGFGSGIINSNAPMDKCDSKCQTPQGAINSSLPFQNVHPVTIGECPKYVRSAKLRMVTGLRNIPSIQSRGLFGAIAGFIEGGWTGMVDGWYGYHHQNEQGSGYAADQKSTQNAINGITNKVNSVIEKMNTQFTAVGKEFNKLERRMENLNKKVDDGFIDIWTYNAELLVLLENERTLDFHDSNVKNLYEKVKSQLKNNAKEIGNGCFEFYHKCNDECMESVKNGTYDYPKYSEESKLNREKIDGVKLESMGVYQILAIYSTVASSLVLLVSLGAISFWMCSNGSLQCRICI

SEQ ID NO: 2252 - protein, 565 aa, synthetic construct; identical to SEQ ID NO: 2014
  REGION 1..565: note = hemagglutinin__InfluenzaA__ABY51061

SEQ ID NO: 2253 - protein, 565 aa, synthetic construct
  REGION 1..565: note = hemagglutinin__InfluenzaA__ABY51072
MKVKLLILLCTFTATYADTICIGYHANNSTDTVDTVLEKNVTVTHSVNLLEDSHNGKLCLLKGIAPLQLGNCSVAGWILGNPECELLISKESWSYIVETPNPENGTCYPGYFADYEELREQLSSVSSFERFEIFPKESSWPNHTVTGVSASCSHNGKSSFYRNLLWLTGKNGLYPNLSKSYANNKEKEVLVLWGVHHPPNIGDQRALYHTENAYVSVVSSHYSRRFTPEIAKRPKVRDQEGRINYYWTLLEPGDTIIFEANGNLIAPRFAFALSRGFGSGIITSNAPMDECDAKCQTPQGAINSSLPFQNVHPVTIGECPKYVRSTKLRMVTGLRNIPSIQSRGLFGAIAGFIEGGWTGMVDGWYGYHHQNEQGSGYAADQKSTQNAINGITNKVNSVIEKMNTQFTAVGKAFNKLERRMENLNKKVDDGFLDIWTYNAELLVLLENERTLDFHDSNVKNLYEKVKSQLKNNAKEIGNGCFEFYHKCNDECMESVKNGTYDYPKYSEESKLNREKIDGVKLESMGVYQILAIYSTVASSLVLLVSLGAISFWMCSNGSLQCRICI

SEQ ID NO: 2254 - protein, 565 aa, synthetic construct; identical to SEQ ID NO: 1956
  REGION 1..565: note = hemagglutinin__InfluenzaA__ABY51083

SEQ ID NO: 2255 - protein, 565 aa, synthetic construct; identical to SEQ ID NO: 1914
  REGION 1..565: note = hemagglutinin__InfluenzaA__ABY51094

SEQ ID NO: 2256 - protein, 565 aa, synthetic construct; identical to SEQ ID NO: 2055
  REGION 1..565: note = hemagglutinin__InfluenzaA__ABY51105

SEQ ID NO: 2257 - protein, 565 aa, synthetic construct; identical to SEQ ID NO: 1914
  REGION 1..565: note = hemagglutinin__InfluenzaA__ABY51116

SEQ ID NO: 2258 - protein, 566 aa, synthetic construct
  REGION 1..566: note = hemagglutinin__InfluenzaA__ABY51127
MKTIIALSYILCMVFAQKLPGNDNSTATLCLGHHAVPNGTIVKTITNDQIEVTNATELVQSSSTGEICDSPHQILDGENCTLIDALLGDPQCDGFQNKKWDLFVERSKAYSNCYPYDVPDYASLRSLVASSGTLEFNNESFNWTGVTQNGTSSACIRRSNNSFFSRLNWLTHLKFKYPALNVTMPNNEKFDKLYIWGVHHPGTDNDQVFLYAQASGRITVSTKRSQQTVIPNIGSRPRVRNIPSRISIYWTIVKPGDILLINSTGNLIAPRGYFKIRSGKSSIMRSDAPIGKCNSECITPNGSIPNDKPFQNVNRITYGACPRYVKQNTLKLATGMRNVPEKQTRGIFGAIAGFIENGWEGMVDGWYGFRHQNSEGIGQAADLKSTQAAIDQINGKLNRLIGKTNEKFHQIEKEFSEVEGRIQDLEKYVEDTKIDLWSYNAELLVALENQHTIDLTDSEMNKLFEKTKKQLRENAEDMGNGCFKIYHKCDNACIGSIRNGTYDHDVYRDEALNNRFQIKGVELKSGYKDWILWISFAISCFLLCVALLGFIMWACQKGNIRCNICI

SEQ ID NO: 2259 - protein, 565 aa, synthetic construct
  REGION 1..565: note = hemagglutinin__InfluenzaA__ABY51138
MKVKLLVLLCTFTATYADTICIGYHANNSTDTVDTVLEKNVTVTHSVNLLEDRHNGKLCLLKGIAPLQLGNCSVAGWILGNPECELLISKESWSYIVETPNPENGTCYPGYFADYEELREQLSSVSSFERFEIFPKESSWPNHTVTGVSASCSHNGKSSFYRNLLWLTGKNGLYPNLSRSYANNKEKEVLVLWGVHHPPNIGDQRALYHTENAYVSVVSSHYSRRFTPEIAKRPKVRDQEGRINYYWTLLEPGDTIIFEANGNLIAPRFAFALSRGFGSGIITSNAPMDECDAKCQTPQGAINSSLPFQNVHPVTIGECPKYVRSAKLRMVTGLRNIPSIQSRGLFGAIAGFIEGGWTGMVDGWYGYHHQNEQGSGYAADQKSTQNAINGITNKVNSVIEKMNTQFTAVGKEFNKLERRMENLNKKVDDGFLDIWTYNAELLVLLENERTLDFHDSNVKNLYEKVKIQLKNNAKEIGNGCFEFYHKCNDECMESVKNGTYDYPKYSEESKLNREKIDGVKLESMGVYQILAIYSTVASSLVLLVSLGAISFWMCSNGSLQCRICI

SEQ ID NO: 2260 - protein, 565 aa, synthetic construct; identical to SEQ ID NO: 1914
  REGION 1..565: note = hemagglutinin__InfluenzaA__ABY51149

SEQ ID NO: 2261 - protein, 565 aa, synthetic construct
  REGION 1..565: note = hemagglutinin__InfluenzaA__ABY51160
MKVKLLVLLCTFTATYADTICIGYHANNSTDTVDTVLEKNVTVTHSVNLLEDRHNGKLCLLKGIAPLQLGNCSVAGWILGNPECELLISKESWSYIVETPNPENGTCYPGYFADYEELREQLSSVSSFERFEIFPKESSWPNHTVTGVSASCSHNGKSSFYRNLLWLTGKNGLYPNLSKSYANNKEKEVLVLWGVHHPPNIGDQRALYHTENAYVSVVSSHYSRRFTPEIAKRPKVRDQEGRINYYWTLLEPGDTIIFEANGNLIAPRFAFALSRGFGSGIITSNAPMDKCDAKCQTPQGAINSSLPFQNVHPVTIGECPKYVRSAKLRMVTGLRNIPSIQSRGLFGAIAGFIEGGWTGMIDGWYGYHHQNEQGSGYAADQKSTQNAINGITNKVNSVIEKMNTQFTAVGKEFNKLERRMENLNKKVDDGFLDIWTYNAELLVLLENERTLDFHDSNVKNLYEKVKSQLKNNAKEIGNGCFEFYHKCNDECMESVKNGTYDYPKYSEESKLNREKIDGVKLESMGVYQILAIYSTVASSLVLLVSLGAISFWMCSNGSLQCRICI

SEQ ID NO: 2262 - protein, 565 aa, synthetic construct
  REGION 1..565: note = hemagglutinin__InfluenzaA__ABY51171
MKVKLLVLLCTFTATYADTICIGYHANNSTDTVDTVLEKNVTVTHSVNLLEDSHNGKLCLLKGIAPLQLGNCSVAGWILGNPECELLISKESWSYIVETPNPENGTCYPGYFADYEELREQLSSVSSFERFEIFPKESSWPNHTVTGVSASCSHNGKSSFYRNLLWLTGKNGLYPNLSKSYANNKEKEVLVLWGVHHPPNIGDQRALYHTENAYVSVVSSHYSRRFTPEIAKRPKVRDQEGRINYYWTLLEPGDTIIFEANGNLIAPRFAFALSRGFGSGIITSNAPMGECDAKCQTPQGAINSSLPFQNVHPVTIGECPKYVRSAKLRMVTGLRNIPSIQSRGLFGAIAGFIEGGWTGMVDGWYGYHHQNEQGSGYAADQKSTQNAINGITNKVNSVIEKMNTQFTAVGKEFNKLERRMENLNKKVDDGFLDIWTYNAELLVLLENERTLDFHDSNVKNLYEKVKSQLKNNAKEIGNGCFEFYHKCNDECMESVKNGTYDYQKYSEESKLNREKIDGVKLESMGVYQILAIYSTVASSLVLLVSLGAISFWMCSNGSLQCRICI

SEQ ID NO: 2263 - protein, 565 aa, synthetic construct; identical to SEQ ID NO: 1910
  REGION 1..565: note = hemagglutinin__InfluenzaA__ABY51182

SEQ ID NO: 2264 - protein, 565 aa, synthetic construct; identical to SEQ ID NO: 1930
  REGION 1..565: note = hemagglutinin__InfluenzaA__ABY51193

SEQ ID NO: 2265 - protein, 565 aa, synthetic construct; identical to SEQ ID NO: 1914
  REGION 1..565: note = hemagglutinin__InfluenzaA__ABY51237

SEQ ID NO: 2266 - protein, 565 aa, synthetic construct; identical to SEQ ID NO: 1930
  REGION 1..565: note = hemagglutinin__InfluenzaA__ABY51248

SEQ ID NO: 2267 - protein, 565 aa, synthetic construct; identical to SEQ ID NO: 1910
  REGION 1..565: note = hemagglutinin__InfluenzaA__ABY51259

SEQ ID NO: 2268 - protein, 566 aa, synthetic construct; identical to SEQ ID NO: 1987
  REGION 1..566: note = hemagglutinin__InfluenzaA__ABY51270

SEQ ID NO: 2269 - protein, 568 aa, synthetic construct
  REGION 1..568: note = hemagglutinin__InfluenzaA__ABY76282
MEKIVLLLAIVSLVKSDQICIGYHANNSTEHVDTIMEKNVTVTHAQDILEKAHNGRLCDLDGVKPLILRDCSVAGWLLGNPMCDEFLNVPEWSYIVEKNNPANDLCYPGNFNDYEELKHLLSRINHFEKIQIIPKSSWSDHEASSGVSSACPYQGRSSFFRNVVWLIKKNDAYPTIKRSYNNTNQEDLLVLWGIHHPNDAAEQTRLYQNPTTYISVGTSTLNQRLVPKIATRSKVNGQSGRMEFFWTILKPNDAINFESNGNFIAPENAYKIVKKGDSTIMKSELEYGNCNTKCQTPIGAINSSMPFHNIHPLTIGECPKYVKSNRLVLATGLRNSPQGERRRKKRGLFGAIAGFIEGGWQGMVDGWYGYHHSNEQGSGYAADKESTQKAIDGVTNKVNSIIDKMNTQFEAVGREFNNLERRIENLNKKMEDGFLDVWTYNAELLVLMENERTLDFHDSNVKNLYDKVRLQLRDNAKELGNGCFEFYHRCDNECMESVRNGTYDYPQYSEEARLKREEISGVKLESIGTYQILSIYSTVASSLALAIMVAGLSLWMCSNGSLQCRICI

SEQ ID NO: 2270 - protein, 566 aa, synthetic construct
  REGION 1..566: note = hemagglutinin__InfluenzaA__ABY81349
MKAKLLVLLCALSATDADTICIGYHANNSTDTVDTVLEKNVTVTHSVNLLEDSHNGKLCRLKGIAPLQLGKCSIAGWILGNPECESLFSKKSWSYIAETPNSENGTCYPGYFADYEELREQLSSVSSFERFEIFPKERSWPKHNVTRGVTAACSHKGKSSFYRNLLWLTEKNGSYPNLSKSYVNNKEKEVLVLWGVHHPSNIKDQKTIYQKENAYVSVVSSNYNRRFTPEIAKRPKVRDQEGRINYYWTLLEPGDTIIFEANGNLIAPWYAFALSRGFGSGIITSNASMDECDTKCQTPQGAINSSLPFQNVHPVTIGECPKYVRSTKLRMVTGLRNIPSIQSRGLFGAIAGFIEGGWTGMIDGWYGYHHQNEQGSGYAADQKSTQNAINGITNKVNSVIEKMNTQFTAVGKEFNKLEKRMENLNKKVDDGFLDIWTYNAELLVLLENERTLDFHDSNVKNLYEKVKSQLKNNAKEVGNGCFEFYHKCNNECMESVKNGTYDYPKYSEESKLNREKIDGVKLESMGVYQILAIYSTVASSLVLLVSLGAISFWMCSNGSLQCRICI

SEQ ID NO: 2271 - protein, 566 aa, synthetic construct; identical to SEQ ID NO: 1928
  REGION 1..566: note = hemagglutinin__InfluenzaA__ABY81371

SEQ ID NO: 2272 - protein, 565 aa, synthetic construct; identical to SEQ ID NO: 1914
  REGION 1..565: note = hemagglutinin__InfluenzaA__ABY81382

SEQ ID NO: 2273 - protein, 565 aa, synthetic construct; identical to SEQ ID NO: 1956
  REGION 1..565: note = hemagglutinin__InfluenzaA__ABY81393

SEQ ID NO: 2274 - protein, 565 aa, synthetic construct
  REGION 1..565: note = hemagglutinin__InfluenzaA__ABY81415
MKVKLLVLLCTFTATYADTICIGYHANNSTDTVDTVLEKNVTVTHSVNLLEDSHNGKLCLLKGIAPLQLGNCSVAGWILGNPECELLISKESWSYIVETPSPENGTCYPGYFADYEELREQLSSVSSFERFEIFPKESSWPNHTVTGVSASCSHNGKSSFYRNLLWLTGKNGLYPNLSKSYANNKEKEVLVLWGVHHPPNIGDQRALYHTENAYVSVVSSHYSRRFTPEIAKRPKVRDQEGRINYYWTLLEPGDTIIFEANGNLIAPRFAFALSRGFGSGIITSNAPMGECDAKCQTPQGAINSSLPFQNVHPVTIGECPKYVRSAKLRMVTGLRNIPSIQSRGLFGAIAGFIEGGWTGMVDGWYGYHHQNEQGSGYAADQKSTQNAINGITNKVNSVIEKMNTQFTAVGKEFNKLERRMENLNKKVDDGFLDIWTYNAELLVLLENERTLDFHDSNVKNLYEKVKSQLKNNAKEIGNGCFEFYHKCNDECMESVKNGTYDYPKYSEESKLNREKIDGVKLESMGVYQILAIYSTVASSLVLLVSLGAISFWMCSNGSLQCRICI

SEQ ID NO: 2275 - protein, 566 aa, synthetic construct; identical to SEQ ID NO: 1928
  REGION 1..566: note = hemagglutinin__InfluenzaA__ACA24502

SEQ ID NO: 2276 - protein, 565 aa, synthetic construct
  REGION 1..565: note = hemagglutinin__InfluenzaA__ACA24513
MKVKLLILLCTFTATYADTICIGYHANNSTDTVDTVLEKNVTVTHSVNLLEDSHNGKLCLLKGIAPLQLGNCSVAGWILGNPECELLISKESWSYIVETPNPENGTCYPGYFADYEELREQLNSVSSFERFEIFPKESSWPNHTVTGVSASCSHNGKSSFYRNLLWLTGKNGLYPNLSKSYANNKEKEVLVLWGVHHPPNIGDQRALYHTENAYVSVVSSHYSRRFTPEIAKRPKVRDQEGRINYYWTLLEPRDTIIFEANGNLIAPRFAFALSRGFGSGIITSNAPMDECDAKCQTPQGAINSSLPFQNVHPVTIGECPKYVRSTKLRMVTGLRNIPSIQSRGLFGAIAGFIEGGWTGMVDGWYGYHHQNEQGSGYAADQKSTQNAINGITNKVNSVIEKMNTQFTAVGKEFNKLERRMENLNKKVDDGFLDIWTYNAELLVLLENERTLDFHDSNVKNLYEKVKSQLKNNAKEIGNGCFEFYHKCNDECMESVKNGTYDYPKYSEESKLNREKIDGVKLESMGVYQILAIYSTVASSLVLLVSLGAISFWMCSNGSLQCRICI

SEQ ID NO: 2277 - protein, 565 aa, synthetic construct; identical to SEQ ID NO: 1914
  REGION 1..565: note = hemagglutinin__InfluenzaA__ACA24524

SEQ ID NO: 2278 - protein, 566 aa, synthetic construct
  REGION 1..566: note = hemagglutinin__InfluenzaA__ACA24689
MKTIIALSYILCLVFAQKLPGIDNSTATLCLGHHAVPNGTIVKTITNDQIEVTNATELVQNSSTGGICDSPHQIIDGENCTLIDALLGDPQCDGFQNKKWDLFVERSKAYSNCYPYDVPDYASLRSLVASSGTLEFNNESFNWTGVTQNGTSSACKRGSNNSFFSRLNWLTHSKFKYPALNVTMPNNEEFDKLYIWGVHHPGTDNDQIFLYAQASGRITVSTKRSQQTVIPNIGSRPRVRNIPSRISIYWTIVKPGDILLINSTGNLIAPRGYFKIRSGKSSIMRSDAPIGKCNSECITPNGSIPNDKPFQNVNRITYGACPRYVKQNTLKLATGMRNVPEKQTRGIFGAIAGFIENGWEGMVDGWYGFRHQNSEGIGQAADLKSTQAAIDQINGKLNRLIGKTNEKFHQIEKEFSEVEGRIQDLEKYVEDTKIDLWSYNAELLVALENQHTIDLTDSEMNKLFEKTKKQLRENAEDMGNGCFKIYHKCDNACIGSIRNGTYDHYVYRDEALNNRFQIKGIELKSGYKDWILWISFAISCFLLCVALLGFIMWACQKGNIRCNICI

SEQ ID NO: 2279 - protein, 566 aa, synthetic construct
  REGION 1..566: note = hemagglutinin__InfluenzaA__ACA24700
MKTIIALSYILCLVFAQKLPGIDNSTATLCLGHHAVPNGTIVKTITNDQIEVTNATELVQNSSTGGICDSPHQILDGENCTLIDALLGDPQCDGFQNKKWDLFVERSQAYSNCYPYDVPDYASLRSLVASSGTLEFNNESFNWTGVTQNGTSSACKRGSNNSFFSRLNWLTHSKFKYPALNVTMPNNEEFDKLYIWGVHHPGTDNDQIFLYAQASGRITVSTKRSQQTVIPNIGSRPRVRNIPSRISIYWTIVKPGDILLINSTGNLIAPRGYFKIRSGKSSIMRSDAPIGKCNSECITPNGSIPNDKPFQNVNRITYGACPRYVKQNTLKLATGMRNVPEKQTRGIFGAIAGFIENGWEGMVDGWYGFRHQNSEGIGQAADLKSTQAAIDQINGKLNRLIGKTNEKFHQIEKEFSEVEGRIQDLEKYVEDTKIDLWSYNAELLVALENQHTIDLTDSEMNKLFEKTKKQLRENAEDMGNGCFKIYHKCDNACIGSIRNGTYDHDVYRDEALNNRFQIKGVELKSGYKDWILWISFAISCFLLCVALLGFIMWACQKGNIRCNICI

SEQ ID NO: 2280 - protein, 565 aa, synthetic construct
  REGION 1..565: note = hemagglutinin__InfluenzaA__ACA28846
MKVKLLVLLCTFTATYADTICIGYHANNSTDTVDTVLEKNVTVTHSVNLLENSHNGKLCLLKGIAPLQLGNCSVAGWILGNPECELLISKESWSYIVEKPNPENGTCYPGHFADYEELREQLSSVSSFERFEIFPKESSWPNHTVTGVSASCSHNGESSFYRNLLWLTGKNGLYPNLSKSYANNKEKEVLVLWGVHHPPNIGIQKALYHTENAYVSVVSSHYSRKFTPEIAKRPKVRDQEGRINYYWTLLEPGDTIIFEANGNLIAPRYAFALSRGFGSGIINSNAPMDKCDAKCQTPQGAINSSLPFQNVHPVTIGECPKYVRSAKLRMVTGLRNIPSIQSRGLFGAIAGFIEGGWTGMVDGWYGYHHQNEQGSGYAADQKSTQNAINGITNKVNSVIEKMNTQFTAVGKEFNKLERRMENLNKKVDDGFIDIWTYNAELLVLLENERTLDFHDSNVKNLYEKVKSQLKNNAKEIGNGCFEFYHKCNDECMESVKNGTYDYPKYSEESKLNREKIDGVKLESMGVYQILAIYSTVASSLVLLVSLGAISFWMCSNGSLQCRICI

SEQ ID NO: 2281 - protein, 566 aa, synthetic construct
  REGION 1..566: note = hemagglutinin__InfluenzaA__ACA33749
MKTIIALSYILCLVFAQKLPGNDNSTATLCLGHHAVPNGTIVKTITNDQIEVTNATELVQSSSTGEICDSPHQILDGENCTLIDALLGDPQCDGFQNKKWDLFVERSKAYSNCYPYDVPDYASLRSLVASSGTLEFNNESFNWTGVTQNGTSSSCIRRSNNSFFSRLNWLTHLKFKYPALNVTMPNNEKFDKLYIWGVHHPGTDNDQIFLYAQASGRITVSTKRSQQTVIPNIGSRPRVRNIPSRISIYWTIVKPGDILLINSTGNLIAPRGYFKIRSGKSSIMRSDAPIGKCNSECITPNGSIPNDKPFQNVNRITYGACPRYVKQNTLKLATGMRNVPEKQTRGIFGAIAGFIENGWEGMVDGWYGFRHQNSEGIGQAADLKSTQAAIDQINGKLNRLIGKTNEKFHQIEKEFSEVEGRIQDLEKYVEDTKIDLWSYNAELLVALENQHTIDLTDSEMNKLFEKTKKQLRENAEDMGNGCFKIYHKCDNACIGSIRNGTYDHDVYRDEALNNRFQIKGVELKSGYKDWILWISFAISCFLLCVALLGFIMWACQKGNIRCNICI

SEQ ID NO: 2282 - protein, 565 aa, synthetic construct; identical to SEQ ID NO: 1910
  REGION 1..565: note = hemagglutinin__InfluenzaA__ACA96519

SEQ ID NO: 2283 - protein, 552 aa, synthetic construct
  REGION 1..552: note = hemagglutinin__InfluenzaA__ACC55270
MNTQILAFIACVLTGVKGDKICLGHHAVANGTKVNTLTERGIEVVNATETVETTNIKKICTQGKRPTDLGQCGLLGTLIGPPQCDQFLEFSSDLIIERREGTDICYPGRFTNEESLRQILRRSGGIGKESMGFTYSGIRTNGATSACTRSGSSFYAEMKWLLSNSDNAAFPQMTKAYRNPRNKPALIIWGVHHSESVSEQTKLYGSGNKLITVRSSKYQQSFTPNPGARRIDFHWLLLDPNDTVTFTFNGAFIAPDRTSFFRGESLGVQSDAPLDSSCRGDCFHSGGTIVSSLPFQNINSRTVGKCPRYVKQKSLLLATGMRNVPEKPKPRGLFGAIAGFIENGWEGLINGWYGFRHQNAQGEGTAADYKSTQSAIDQITGKLNRLIGKTNQQFELIDNEFNEIEQQIGNVINWTRDAMTEIWSYNAELLVAMENQHTIDLADSEMSKLYERVKKQLRENAEEDGTGCFEIFHKCDDQCMESIRNNTYDHTQYRTESLQNRIQIDPVKLSSGYKDIILWFSFGASCFLLLAIAMGLVFICIKNGNMQCTICI

SEQ ID NO: 2284 - protein, 565 aa, synthetic construct; identical to SEQ ID NO: 1914
  REGION 1..565: note = hemagglutinin__InfluenzaA__ACC61964

SEQ ID NO: 2285 - protein, 565 aa, synthetic construct
  REGION 1..565: note = hemagglutinin__InfluenzaA__ACC61975
MKVKLLVLLCTFTASYADTICIGYHANNSTDTVDTVLEKNVTVTHSVNLLEDSHNGKLCLLKGIAPLQLGNCSVAGWILGNPECELLISKESWSYIVEVPNPENGTCYPGYFADYEELREQLSSISSFERFEIFPKESSWPNHTVTGVSASCSHNGKSSFYRNLLWLTGKNGLYPNLSKSYANNKEKEVLVLWGVHHPPNIGDQRALYHTENAYVSVVSSHYSRRFTPEIAKRPKVRDQEGRINYYWTLLEPGDTIIFEANGNLIAPRFAFALSRGLGSGIITSNAPMDECDAKCQTPQGAINSSLPFQNVHPVTIGECPKYVRSAKLRMVTGLRNIPSIQSRGLFGAIAGFIEGGWTGMVDGWYGYHHQNEQGSGYAADQKSTQNAINGITNKVNSVIEKMNTQFTAVGKEFNKLERRMENLNKKVDDGFLDIWTYNAELLVLLENERTLDFHDSNVKNLYEKVKSQLKNNAKEIGNGCFEFYHKCNNECMESVKNGTYDYPKYSEESKLNREKIDGVKLESMGVYQILAIYSTVASSLVLLVSLGAISFWMCSNGSLQCRICI

SEQ ID NO: 2286 - protein, 565 aa, synthetic construct; identical to SEQ ID NO: 1910
  REGION 1..565: note = hemagglutinin__InfluenzaA__ACC61986

SEQ ID NO: 2287 - protein, 565 aa, synthetic construct
  REGION 1..565: note = hemagglutinin__InfluenzaA__ACD37430
MKAKLLVLLCTFTATYADTICIGYHANNSTDTVDTVLEKNVTVTHSVNLLEDSHNGKLCLLKGIAPLQLGNCSVAGWILGNPECELLISKESWSYIVETPNPENGTCYPGYFADYEELREQLSSVSSFERFEIFPKESSWPTHTVTGVSASCSHNGKSSFYRNLLWLTGKNGLYPNLSKSYVNNKEKEVLVLWGVHHPPNIGDQRALYHTENAYVSVVSSHYSRRFTPEIAKRPKVRDQEGRINYYWTLLEPGDTIIFEANGNLIAPWYAFALSRGFGSGIITSNAPMDECDAKCQTPQGAINSSLPFQNVHPVTIGECPKYVRSAKLRMVTGLRNIPSIQSRGLFGAIAGFIEGGWTGMVDGWYGYHHQNEQGSGYAADQKSTQNAINGITNKVNSVIEKMNTQFTAVGKEFNKLERRMENLNKKVDDGFLDIWTYNAELLVLLENERTLDFHDSNVKNLYEKVKSQLKNNAKEIGNGCFEFYHKCNNECMESVKNGTYDYPKYSEESKLNREKIDGVKLESMGVYQILAIYSTVASSLVLLVSLGAISFWMCSNGSLQCRICI

SEQ ID NO: 2288 - protein, 565 aa, synthetic construct
  REGION 1..565: note = hemagglutinin__InfluenzaA__ACD37507
MKAKLLVLLCTFAATYADTICIGYHANNSTDTVDTVLEKNVTVTHSVNLLENSHNGKLCLLKGIAPLQLGNCSVAGWILGNPECELLISKESWSYIVEKPNPENGTCYPGHFADYEELREQLSSVSSFERFEIFPKESSWPNHTVTGVSASCSHNGESSFYRNLLWLTGKNGLYPNLSKSYANNKEKEVLVLWGVHHPPNIGNQKALYHTENAYVSVVSSHYSRKFTPEIAKRPKVRDQEGRINYYWTLLEPGDTIIFEANGNLIAPRYAFALSRGFGSGIINSNAPMDKCDAKCQTPQGAINSSLPFQNVHPVTIGECPKYVRSAKLRMVTGLRNIPSIQSRGLFGAIAGFIEGGWTGMVDGWYGYHHQNEQGSGYAADQKSTQNAINGITNKVNSVIEKMNTQFTAVGKEFNKLERRMENLNKKVDDGFIDIWTYNAELLVLLENERTLDFHDSNVKNLYEKVKSQLKNNAKEIGNGCFEFYHKCNDECMESVKNGTYDYPKYSEESKLNREKIDGVKLESMGVYQILAIYSTVASSLVLLVSLGAISFWMCSNGSLQCRICI

SEQ ID NO: 2289 - protein, 565 aa, synthetic construct; identical to SEQ ID NO: 2055
  REGION 1..565: note = hemagglutinin__InfluenzaA__ACD56113

SEQ ID NO: 2290 - protein, 565 aa, synthetic construct; identical to SEQ ID NO: 1914
  REGION 1..565: note = hemagglutinin__InfluenzaA__ACD56124

SEQ ID NO: 2291 - protein, 566 aa, synthetic construct; identical to SEQ ID NO: 1987
  REGION 1..566: note = hemagglutinin__InfluenzaA__ACD56258

SEQ ID NO: 2292 - protein, 566 aa, synthetic construct; identical to SEQ ID NO: 1729
  REGION 1..566: note = hemagglutinin__InfluenzaA__ACD56269

SEQ ID NO: 2293 - protein, 565 aa, synthetic construct
  REGION 1..565: note = hemagglutinin__InfluenzaA__ACD56280
MKVKLLILLCTFTATYADTICIGYHANNSTDTVDTVLEKNVTVTHSVNLLEDSHNGKLCLLKGIAPLQLGNCSVAGWILGNPECELLISKESWSYIVETPNPGNGTCYPGYFADYEELREQLSSVSSFERFEIFPKESSWPNHTVTGVSASCSHNGKSSFYRNLLWLTGKNGLYPNLSKSYANNKEKEVLVLWGVHHPPNIGDQRALYHTENAYVSVVSSHYSRRFTPEIAKRPKVRDQEGRINYYWTLLEPGDTIIFEANGNLIAPRFAFALSRGFGSGIITSNAPMDECEAKCQTPQGAINSSLPFQNVHPVTIGECPKYVRSTKLRMVTGLRNIPSIQSRGLFGAIAGFIEGGWTGMVDGWYGYHHQNEQGSGYAADQKSTQNAINGITNKVNSVIEKMNTQFTAVGKEFNKLERRMENLNKKVDDGFLDIWTYNAELLVLLENERTLDFHDSNVKNLYEKVKSQLKNNAKEIGNGCFEFYHKCNDECMESVKNGTYDYPKYSEESKLNREKIDGVKLESMGVYQILAIYSTVASSLVLLVSLGAISFWMCSNGSLQCRICI

SEQ ID NO: 2294 - protein, 562 aa, synthetic construct
  REGION 1..562: note = hemagglutinin__InfluenzaA__ACD56324
MAIIYLILLFTAVRGDQICIGYHANNSTEKVDTILERNVTVTHAKNILEKTHNGRLCKLNGIPPLELGDCSIAGWLLGNPECDRLLRVPEWSYIMEKENPRNGLCYPGSFNDYEELKHLLSSVKHFEKVRILPKDRWTQHTTTGSSRACAVSGNPSFFRNMVWLTKKESNYPVAKGSYNNTSGEQMLIIWGVHHPIDETEQRTLYQNVGTYVSVGTSTLNKRSTPDIATRPKVNGLGSRMEFSWTLLDMWDTINFESTGNLIAPEYGFKISKRGSSGIMKTERTLENCETKCQTPLGAINTTLPFHNVHPLTIGECPKYVKSEKLVLATGLRNVPQIEPRGLFGAIAGFIEGGWQGMVDGWYGYHHSNDQGSGYAADKESTQKAFDGITNKVNSVIEKMNTQFEAVGKEFSNLERRLENLNKKMEDGFLDVWTYNAELLVLMENERTLDFHDSNVKNLYDKVRMQLRDNVKELGNGCFEFYHKCDDECMNSVKNGTYDYPKYEEESKLNRNEIKGVKLSSMGVYQILAIYATVAGSLSLAIMMAGISFWMCSNGSLQCRICI

SEQ ID NO: 2295 - protein, 562 aa, synthetic construct
  REGION 1..562: note = hemagglutinin__InfluenzaA__ACD85187
MAIIYLILLFTAVRGDQICIGYHANNSTEKVDTILERNVTVTHAKDILEKTHNGKLCKLNGIPPLELGDCSIAGWLLGNPECDRLLRVPEWSYIMEKENPRYSLCYPGSFNDYEELKHLLSSVKHFEKVKILPKDRWTQHTTTGGSKACAVSGKPSFFRNMVWLTKKGPNYPVAKGSYNNTSGEQMLIIWGVHHPKDEAEQRALYQEVGTYVSASTSTLNKRSTPEIAARPEVNGLGSRMEFSWTLLDVWDTINFESTGNLVAPEYGFKISKRGSSGIMKTEGTLGNCETKCQTPLGAINTTLPFHNVHPLTIGECPKYVKSEKLVLATGLRNVPQIESRGLFGAIAGFIEGGWQGMVDGWYGYHHSNDQGSGYAADKESTQKAFDGITNKVNSVIEKMNTQFEAVGKEFNNLEKRLENLNKKMEDGFLDVWTYNAELLVLMENERTLDFHDSNVKNLYDKVRMQLRDNVKELGNGCFEFYHKCDDECMNSVKNGTYDYPKYEEESKLNRNEIKGVKLSSMGVYQILAIYATVAGSLSLAIMMAGISFWMCSNGSLQCRICI

SEQ ID NO: 2296 - protein, 562 aa, synthetic construct
  REGION 1..562: note = hemagglutinin__InfluenzaA__ACD85198
MAIIYLILLFTAVRGDQICIGYHANNSTEKVDTILERNVTVTHAKDILEKTHNGKLCKLNGIPPLELGDCSIAGWLLGNPECDRLLRVPEWSYIMEKENPRYSLCYPGSFNDYEELKHLLSSVKHFEKVKILPKDGWTQHTTTGGSKACAVSGKPSFFRNMVWLTKKGPNYPVAKRSYNNTSGEQMLIIWGVHHPTDEAEQRALYQEVGTYVSASTSTLNKRSTPEIAARPEVNGLRSRMEFSWTLLDVWDTINFESTGNLVAPEYGFKISKRGSSGIMKTEGTLGNCETKCQTPLGAINTTLPFHNVHPLTIGECPKYVKSEKLVLATGLRNVPQIESRGLFGAIAGFIEGGWQGMVDGWYGYHHSNDQGSGYAADKESTQKAFDRITNKVNSVIEKMNTQFEAVGKEFSNLEKRLENLNKKMEDGFLDVWTYNAELLVLMENERTLGFHDSNVKNLYDKVRMQLRDNVKELGNGCFEFYHKCDDECMNSVKNGTYDYPKYEEESKLKRNEIKGVKLSSMGVYQILAIYATVAGSLSLAIMMAGISFWMCSNGSLQCRICI

SEQ ID NO: 2297 - protein, 562 aa, synthetic construct
  REGION 1..562: note = hemagglutinin__InfluenzaA__ACD85209
MAIIYLILLFTAVRGDQICIGYHANNSTEKVDTILERNVTVTHAKDILEKTHNGKLCKLNGIPPLELGDCSIAGWLLGNPECDRLLSVPEWSYIMEKENPRDGLCYPGSFNDYEELKHLLSSVKHFEKVKILPKDRWTQHTTTGGSRACAVSGNPSFFRNMVWLTQKGSNYPVAKGSYNNTSGEQMLIIWGVHHPNDETEQRTLYQNVGTYVSVGTSTLNKRSTPDIATRPKVNGQGGRMEFSWTLLDMWDTINFESTGNLIAPEYGFKISKRGSSGIMKTEGTLENCETKCQTPLGAINTTLPFHNVHPLTIGECPKYVKSEKLVLATGLRNVPQIESRGLFGAIAGFIEGGWQGMVDGWYGYHHSNDQGSGYAADKESTQKAFDGITNKVNSVIEKMNTQFEAVGKEFSNLERRLENLNKKMEDGFLDVWTYNAELLVLMENERTLDFHDSNVKNLYDKVRMQLRDNVKELGNGCFEFYHKCDDECMNSVKNGTYDYPKYEEESKLNRNEIKGVKLSSMGVYQILAIYATVAGSLSLAIMMAGISFWMCSNGSLQCRICI

SEQ ID NO: 2298 - protein, 562 aa, synthetic construct
  REGION 1..562: note = hemagglutinin__InfluenzaA__ACD85220
MAIIYLILLFTAVRGDQICIGYHANNSTEKVDTILERNVTVTHAKDILEKTHNGKLCKLNGIPPLELGDCSIAGWLLGNPECDRLLRVPEWSYIMEKENPKYSLCYPGSFNDYEELKHLLSSVKHFEKVKILPKDRWTQHTTTGGSKACAVSGEPSFFRNMVWLTKKGPNYPVAKGSYNNTSGEQMLIIWGVHHPKDEAEQRALYQNVGTYVSASTSTLNKRSTPEIAARPEVNGLGSRMEFSWTLLDVWDTINFESTGNLVAPEYGFKISKRGSSGIMKTEGTLGNCETKCQTPLGAINTTLPFHNVHPLTIGECPKYVKSEKLVLATGLRNVPQIESRGLFGAIAGFIEGGWQGMVDGWYGYHHSNDQGSGYAADKESTQKAFDGITNKVNSVIEKMNTQFEAVGKEFNNLEKRLENLNKKMEDGFLDVWTYNAELLVLMENERTLDFHDSNVKNLYDKVRMQLRDNVKELGNGCFEFYHKCDDECMNSVKNGTYDYPKYEKESKLNRNEIKGVKLSSMGVYQILAIYATVAGSLSLAIMMAGISFWMCSNGSLQCRICI

SEQ ID NO: 2299 - protein, 562 aa, synthetic construct
  REGION 1..562: note = hemagglutinin__InfluenzaA__ACD85242
MAIIYLILLFATVRGDQICIGYHANNSTEKVDTILERNVTVTHAKDILEKTHNGKLCKLNGIPPLELGDCSIAGWLLGNPECDRLLRVPEWSYIMEKENPRYSLCYPGSLNDYEELKHLLSSVKHFEKVRILPKDRWTQHTTTGGSKACAVSGKPSFFRNMVWLTKKGPNYPVAKGSYNNTSGEQMLIIWGVHHPKDEAEQRALYQEVGTYVSASTSTLNKRSIPEIAARPEVNGLGSRMEFSWTLLDVWDTINFESTGNLVAPEYGFKISKRGSSGIMKTEGTLGNCETKCQTPLGAINTTLPFHNVHPLTIGECPKYVKSEKLVLATGLRNVPQIESRGLFGAIAGFIEGGWQGMVDGWYGYHHSNDQGSGYAADKESTQKAFDGITNKVNSMIEKMNTQFEAVGKEFNNLEKRLENLDKKMEDGFLDVWTYNAELLVLMENERTLDFHDSNVKNLYEKVRMQLRDNVKELGNGCFEFYHKCDNECMNSVKNGTYDYPKYEEESKLKRNEIKGVKLSSMGVYQILAIYATVAGSLSLAIMVAGISFWMCSNGSLQCRICI

SEQ ID NO: 2300 - protein, 562 aa, synthetic construct
  REGION 1..562: note = hemagglutinin__InfluenzaA__ACD85253
MAIIYLILLFATVRGDQICIGYHANNSTEKVDTILERNVTVTHAKDILEKTHNGKLCKLNGIPPLELGDCSIAGWLLGNPECDRLLRVPEWSYIMEKENPRYNLCYPGSLNEYEELKHLLSSVKHFEKVRILPKDRWTQHTTTGGSKACAVSGEPSFFRNMVWLTKKGPNYPVAKGSYNNTSGEQMLIIWGVHHPNDEAEQRALYQKVGTYVSASTSTLNKRSIPEIAARPKVNGLGSRMEFFWTLLDVWDTINFESTGNLVVPEYGFKISKRGSSGIMKTEGTLGNCETKCQTPLGAINTTLPFHNVHPLTIGECPKYVKSEKLVLATGLRNVPQIESRGLFGAIAGFIEGGWQGMVDGWYGYHHSNDQGSGYAADKESTQKAFDGITNKVNSVIEKMNTQFETVGKEFNNLEKRLENLNKKMEDGFLDVWTYNAELLVLMENERTLDFHDSNVKNLYEKVRMQLRDNVKELGNGCFEFYHKCDDECMNSVKNGTYDYPKYEEESKLKRNEIKGVKLSSMGVYQILAIYATVAGSLSLAIMVAGISFWMCSNGSLQCRICI

SEQ ID NO: 2301 - protein, 566 aa, synthetic construct
  REGION 1..566: note = hemagglutinin__InfluenzaA__ACD85440
MKTIIALSYILCLVFAQKLPGNDNSTATLCLGHHAVPNGTIVKTITNDQIEVTNATELVQSSSTGEICDSPHQILDGENCTLIDALLGDPQCDGFQNKKWDLFVERSKAYSNCYPYDVPDYASLRSLVASSGTLEFNNESFNWTGVTQNGTSSACIRRSNNSFFSRLNWLTHLKFKYPALNVTMPNNEKFDKLYIWGVHHPGTDNDQIFLYAQASGRITVSTKRSQQTVIPNIGSRPRVRNIPSRISIYWTIVKPGDILLINSTGNLIAPRGYFKIRSGKSSIMRSDAPIGKCNSECITPNGSIPNDKPFQNVNRITYGACPRYVKQNTLKLATGMRNVPEKQTRGIFGAIAGFIENGWEGMVDGWYGFRHQNSEGIGQAADLKSTQAAIDQINGKLNRLIGKTNEKFHQIEKEFSEVEGRIQDLEKYVEDTKIDLWSYNAELLVALENQHTIDLTDSEMNKLFEKTKKQLRENAEDLGNGCFKIYHKCDNACIGSIRNGTYDHDVYRDEALNNRFQIKGVELKSGYKDWILWISFAISCFLLCVALLGFIMWACQKGNIRCNICI

SEQ ID NO: 2302 - protein, 566 aa, synthetic construct; identical to SEQ ID NO: 2301
  REGION 1..566: note = hemagglutinin__InfluenzaA__ACD85451

SEQ ID NO: 2303 - protein, 566 aa, synthetic construct; identical to SEQ ID NO: 2301
  REGION 1..566: note = hemagglutinin__InfluenzaA__ACD85462

SEQ ID NO: 2304 - protein, 566 aa, synthetic construct; identical to SEQ ID NO: 1928
  REGION 1..566: note = hemagglutinin__InfluenzaA__ACD85473

SEQ ID NO: 2305 - protein, 566 aa, synthetic construct
  REGION 1..566: note = hemagglutinin__InfluenzaA__ACD85484
MKTIIALSYILCLVFAQKLPGNDNSTATLCLGHHAVPNGTIVKTITNDQIEVTNATELVQSSSTGEICDSPHQILDGENCTLIDALLGDPQCDGFQNKKWDLFVERSKAYSNCYPYDVPDYASLRSLVASSGTLEFNNESFNWTGVTQNGTSSACIRRSNNSFFSRLNWLTHLKFKYPALNVTMPNNEEFDKLYIWGVHHPGTDNDQIFLYAQASGRITVSTKRSQQTVIPNIGSRPRVRNIPSRISIYWTIVKPGDILLINSTGNLIAPRGYFKIRSGKSSIMRSDAPIGKCNSECITPNGSIPNDKPFQNVNRITYGACPRYVKQNTLKLATGMRNVPEKQTRGIFGAIAGFIENGWEGMVDGWYGFRHQNSEGIGQAADLKSTQAAIDQINGKLNRLIGKTNEKFHQIEKEFSEVEGRIQDLEKYVEDTKIDLWSYNAELLVALENQHTIDLTDSEMNKLFEKTKKQLRENAEDMGNGCFKIYHKCDNACIGSIRNGTYDHDVYRDEALNNRFQIKGVELKSGYKDWILWISFAISCFLLCVALLGFIMWACQKGNIRCNICI

SEQ ID NO: 2306 - protein, 566 aa, synthetic construct; identical to SEQ ID NO: 1928
  REGION 1..566: note = hemagglutinin__InfluenzaA__ACD85495

SEQ ID NO: 2307 - protein, 566 aa, synthetic construct
  REGION 1..566: note = hemagglutinin__InfluenzaA__ACD85528
MKTIIALSYILCLVFAQKLPGNDNSTATLCLGHHAVPNGTIVKTITNDQIEVTNATELVQSSSTGEICDSPHQILDGENCTLIDALLGDPQCDGFQNKKWDLFVERSKAYSNCYPYDVPDYVSLRSLVASSGTLEFNNESFNWTGVTQNGTSSACIRRSNKSFFSRLNWLTHLKFKYPALNVTMPNNENFDKLYIWGVHHPGTDNDQIFLYAQASGRITVSTKRSQQTVIPNIGSRPRVRNIPSRISIYWTIVKPGDILLINSTGNLIAPRGYFKIRSGKSSIMRSDAPIGKCNSECITPNGSIPNDKPFQNVNRITYGACPRYVKQNTLKLATGMRNVPEKQTRGIFGAIAGFIENGWEGMVDGWYGFRHQNSEGIGQAADLKSTQAAIDQINGKLNRLIGKTNEKFHQIEKEFSEVEGRIQDLEKYVEDTKIDLWSYNAELLVALENQHTIDLTDSEMNKLFEKTKKQLRENAEDLGNGCFKIYHKCDNACIGSIRNGTYDHDVYRDEALNNRFQIKGVELKSGYKDWILWISFAISCFLLCVALLGFIMWACQKGNIRCNICI

SEQ ID NO: 2308 - protein, 566 aa, synthetic construct
  REGION 1..566: note = hemagglutinin__InfluenzaA__ACD85539
MKTIIALSYILCLVFAQKLPGNDNSTATLCLGHHAVPNGTIVKTITNDQIEVTNATELVQSSSTGEICDSPHQILDGENCTLIDALLGDPQCDGFQNKKWDLFVERSKAYSNCYPYDVPDYASLRSLVASSGTLEFNNESFNWTGVTQNGTSSACIRRTNNSFFSRLNWLTHLKFKYPALNVTMPNNEKFDKLYIWGVHHPGTDNDQIFLYAQASGRITVSTKRSQQTVIPNIGSRPRVRNIPSRISIYWTIVKPGDILLINSTGNLIAPRGYFKIRSGKSSIMRSDAPIGKCNSECITPNGSIPNDKPFQNVNRITYGACPRYVKQNTLKLATGMRNVPEKQTRGIFGAIAGFIENGWEGMVDGWYGFRHQNSEGIGQAADLKSTQAAIDQINGKLNRLIGKTNEKFHQIEKEFSEVEGRIQDLEKYVEDTKIDLWSYNAELLVALENQHTIDLTDSEMNKLFEKTKKQLRENAEDMGNGCFKIYHKCDNACIGSIRNGTYDHDVYRDEALNNRFQIKGVELKSGYKDWILWISFAISCFLLCVALLGFIMWACQKGNIRCNICI

SEQ ID NO: 2309 - protein, 566 aa, synthetic construct
  REGION 1..566: note = hemagglutinin__InfluenzaA__ACD85550
MKTIIALSYILCLVFAQKLPGNDNSTATLCLGHHAVPNGTIVKTITNDQIEVTNATELVQSSSTGEICDSPHQILDGENCTLIDALLGDPQCDGFQNKKWDLFVERSKAYSNCYPYDVPDYASLRSLVASSGTLEFNNESFNWTGVTQNGTSSACIRRSNNSFFSRLNWLTHLKFKYPALNVTMPNNEKFDKLYIWGVHHPGTDNDQIFLYAQASGRITVSTKRSQQTVIPNIGSRPRVRNIPSRISIYWTIVKPGDILLINSTGNLIAPRGYFKIRSGKSSIMRSDAPIGKCNSECITPNGSIPNDKPFQNVNRITYGACPRYVKQNTLKLATGMRNVPEKQTRGIFGAIAGFIENGWEGMVDGWYGFRHQNSEGIGQAADLKSTQAAIDQINGKLNRLIGKTNEKFHQIEKEFSEVEGRIQDLEKYVEDTKIDLWSYNAELLVALENQHTIDLTDSEMNKLFEKTKKQLRENAEDLGNGCFKIYHKCDNACIGSIRNGTYDHDVYRDEALNNRFQIKGVELKSGYKDWILWISFAMSCFLLCVALLGFIMWACQKGNIRCNICI

SEQ ID NO: 2310 - protein, 566 aa, synthetic construct; identical to SEQ ID NO: 1928
  REGION 1..566: note = hemagglutinin__InfluenzaA__ACD85561

SEQ ID NO: 2311 - protein, 566 aa, synthetic construct
  REGION 1..566: note = hemagglutinin__InfluenzaA__ACD85572
MKTIIALSYILCLVFAQKLPGNDNSTATLCLGHHAVPNGTIVKTITNDQIEVTNATELVQSSSTGEICDSPHQILDGENCTLIDALLGDPQCDGFQNKKWDLFVERSKAYSNCYPYDVPDYASLRSLVASSGTLEFNNESFNWTGVTQNGTSSACIRRSNNSFFSRLNWLTHLKFKYPALNVTMPNNEKFDKLYIWGVHHPGTDNDQIFLYAQASGRITVSTKRSQQTVIPNTGSRPRVRNIPSRISIYWTIVKPGDILLINSTGNLIAPRGYFKIRSGKSSIMRSDAPIGKCNSECITPNGSIPNDKPFQNVNRITYGACPRYVKQNTLKLATGMRNVPEKQTRGIFGAIAGFIENGWEGMVDGWYGFRHQNSEGIGQAADLKSTQAAIDQINGKLNRLIGKTNEKFHQIEKEFSEVEGRIQDLEKYVEDTKIDLWSYNAELLVALENQHTIDLTDSEMNKLFEKTKKQLRENAEDMGNGCFKIYHKCDNACIGSIRNGTYDHDVYRDEALNNRFQIKGVELKSGYKDWILWISFAISCFLLCVALLGFIMWACQKGNIRCNICI

SEQ ID NO: 2312 - protein, 566 aa, synthetic construct; identical to SEQ ID NO: 2308
  REGION 1..566: note = hemagglutinin__InfluenzaA__ACD85583

SEQ ID NO: 2313 - protein, 566 aa, synthetic construct
  REGION 1..566: note = hemagglutinin__InfluenzaA__ACD93579
MKTIIALSYILCLVFAQKLPGNDNSTATLCLGHHAVPNGTIVKTITNDQIEVTNATELVQSSSTGEICDSPHQILDGENCTLIDALLGDPQCDGFQNKKWDLFVERSKAYSNCYPYDVPDYASLRSLVASSGTLEFNNESFNWTGVTQNGTSSACIRRSNNSFFSRLNWLTHLKFKYPALNVTMPNNEKFDKLYIWGVHHPGTDNDQIFLYAQASGRITVSTKRSQQTVIPNIGSRPRVRNIPSRISIYWTIVKPGDILLINSTGNLIAPRGYFKIRSGKSSIMRSDAPIGKCNSECITPNGSIPNDKPFQNVNRITYGACPRYVKQNTLKLATGMRNVPEKQTRGIFGAIAGFIENGWEGMVDGWYGFRHQNSEGIGQAADLKSTQAAIDQINGKLNRLIGKTNEKFHQIEKEFSEVEGRIQDLEKYVEDTKIDLWSYNAELLVALENQHTIDLTDSEMNKLFEKTKKQLRENAEDMGNGCFKIYHKCDNTCIGSIRNGTYDHDVYRDEALNNRFQIKGVELKSGYKDWILWISFAISCFLLCVALLGFIMWACQKGNIRCNICI

SEQ ID NO: 2314 - protein, 566 aa, synthetic construct; identical to SEQ ID NO: 630
  REGION 1..566: note = hemagglutinin__InfluenzaA__ACF09402

SEQ ID NO: 2315 - protein, 566 aa, synthetic construct
  REGION 1..566: note = hemagglutinin__InfluenzaA__ACF22159
MKTIIALSYILCLVFAQKLPGNDNSTATLCLGHHAVPNGTIVKTITNDQIEVTNATELVQNSSTGGICDSPHQILDGENCTLIDALLGDPQCDGFQNKKWDLFVERSKAYSNCYPYDVPDYASLRSLVASSGTLEFNNESFNWTGVTQNGTSSACKRRSNKSFFSRLNWLTHLKYKYPALNVTMPNNEKFDKLYIWGVHHPGTDSDQISLYAQASGRITVSTKRSQQTVIPNIGFRPRVRDVSSRISIYWTIVKPGDILLINSTGNLIAPRGYFKIRSGKSSIMRSDAPIGKCNSECITPNGSIPNDKPFQNVNRITYGACPRYVKQNTLKLATGMRNVPEKQTRGIFGAIAGFIENGWEGMVDGWYGFRHQNSEGTGQAADLKSTQAAINQINGKLNRLIGKTNEKFHQIEKEFSEVEGRIQDLEKYVEDTKIDLWSYNAELLVALENQHTIDLTDSEMNKLFERTKKQLRENAEDMGNGCFKIYHKCDNACIESIRNGTYDHDVYRDEALNNRFQIKGVELKSGYKDWILWISFAISCFLLCVALLGFIMWACQKGNIRCNICI

SEQ ID NO: 2316 - protein, 566 aa, synthetic construct
  REGION 1..566: note = hemagglutinin__InfluenzaA__ACF22188
MKTIIALSYIFCLALGQDLPGNDNSTATLCLGHHAVPNGTLVKTITDDQIEVTNATELVQSSSTGKICNNPHRILDGIDCTLIDALLGDPHCDVFQNETWDLFVERSKAFSNCYPYDVPDYASLRSLVASSGTLEFITEGFTWTGVTQNGGSNACKRGPGSGFFSRLNWLTKSGSTYPVLNVTMPNNDNFDKLYIWGVHHPSTNQEQTSLYVQASGRVTVSTRRSQQTIIPNIWSRPWVRGLSSRISIYWTIVKPGDVLVINSNGNLIAPRGYFKMRTGKSSIMRSDAPIDTCISECITPNGSIPNDKPFQNVNKITYGACPKYVKQNTLKLATGMRNVPEKQTRGLFGAIAGFIENGWEGMIDGWYGFRHQNSEGTGQAADLKSTQAAIDQINGKLNRVIEKTNEKFHQIEKEFSEVEGRIQDLEKYVEDTKIDLWSYNAELLVALENQHTIDLTDSEMNKLFEKTRRQLRENAEDMGNGCFKIYHKCDNACIESIRNGNYDHDVYRDEALNNRFQIKGVELKSGYKDWILWISFAISCFLLCVVLLGFIMWACQRGNIRCNICI

SEQ ID NO: 2317 - protein, 566 aa, synthetic construct; identical to SEQ ID NO: 2316
  REGION 1..566: note = hemagglutinin__InfluenzaA__ACF22199

SEQ ID NO: 2318 - protein, 566 aa, synthetic construct
  REGION 1..566: note = hemagglutinin__InfluenzaA__ACF22210
MKTIIALSYIFCLALGQDLPGNDNSTATLCLGHHAVPNGTLVKTITDDQIEVTNATELVQSSSTGKICNNPHRILDGIDCTLIDALLGDPHCDVFQNETWDLFVERSKAFSNCYPYDVPDYASLRSLVASSGTLEFITEGFTWTGVTQNGGSNACKRGPGSGFFSRLNWLTKSGSTYPVLNVTMPNNDNFDKLYIWGVHHPSTNQEQTSLYVQASGRVTVSTRRSQQTIIPNIGSRPWVRGLSSRISIYWTIVKPGDVLVINSNGNLIAPRGYFKMRTGKSSIMRSDAPIDTCISECITPNGSIPNDKPFQNVNKITYGACPKYVKQNTLKLATGMRNVPEKQTRGLFGAIAGFIENGWEGMIDGWYGFRHQNSEGTGQAADLKSTQAAIDQINGKLNRVIEKTNEKFHQIEKEFSEVEGRIQDLEKYVEDTKIDLWSYNAELLVALENQHTIDLTDSEMNKLFEKTRRQLRENAEDMGNGCFKIYHKCDNACIESIRNGTYDHDVYRDEALNNRFQIKGVELKSGYKDWILWISFAISCFLLCVVLLGFIMWACQRGNIRCNICI

SEQ ID NO: 2319 - protein, 566 aa, synthetic construct; identical to SEQ ID NO: 2318
  REGION 1..566: note = hemagglutinin__InfluenzaA__ACF22221

SEQ ID NO: 2320 - protein, 566 aa, synthetic construct; identical to SEQ ID NO: 2318
  REGION 1..566: note = hemagglutinin__InfluenzaA__ACF22232

SEQ ID NO: 2321 - protein, 566 aa, synthetic construct; identical to SEQ ID NO: 2318
  REGION 1..566: note = hemagglutinin__InfluenzaA__ACF22243

SEQ ID NO: 2322 - protein, 566 aa, synthetic construct; identical to SEQ ID NO: 2318
  REGION 1..566: note = hemagglutinin__InfluenzaA__ACF22254

SEQ ID NO: 2323 - protein, 566 aa, synthetic construct; identical to SEQ ID NO: 2318
  REGION 1..566: note = hemagglutinin__InfluenzaA__ACF22265

SEQ ID NO: 2324 - protein, 566 aa, synthetic construct; identical to SEQ ID NO: 2318
  REGION 1..566: note = hemagglutinin__InfluenzaA__ACF22276

SEQ ID NO: 2325 - protein, 566 aa, synthetic construct; identical to SEQ ID NO: 2318
  REGION 1..566: note = hemagglutinin__InfluenzaA__ACF22287

SEQ ID NO: 2326 - protein, 566 aa, synthetic construct; identical to SEQ ID NO: 2318
  REGION 1..566: note = hemagglutinin__InfluenzaA__ACF22298

SEQ ID NO: 2327 - protein, 566 aa, synthetic construct; identical to SEQ ID NO: 2318
  REGION 1..566: note = hemagglutinin__InfluenzaA__ACF22320

SEQ ID NO: 2328 - protein, 566 aa, synthetic construct; identical to SEQ ID NO: 2318
  REGION 1..566: note = hemagglutinin__InfluenzaA__ACF22342

SEQ ID NO: 2329 - protein, 566 aa, synthetic construct
  REGION 1..566: note = hemagglutinin__InfluenzaA__ACF22364
MKTIIALSYIFCLALGQDLPGNDNSTATLCLGHHAVPNGTLVKTITDDQIEVTNATELVQSSSTGKICNNPHRILDGIDCTLIDALLGDPHCDVFQNETWDLFVERSKAFSNCYPYDVPDYASLRSLVASSGTLEFITEGFTWTGVTQNGGSNACKRGPGSGFFSRLNWLTKSGSTYPVLNVTMPNNDNFDKLYIWGVHHPSTNQEQTSLYVQASGRVTVSTRRSQQTIIPNIESRPWVRGLSSRISIYWTIVKPGDVLVINSNGNLIAPRGYFKMRTGKSSIMRSDAPIDTCISECITPNGSIPNDKPFQNVNKITYGACPKYVKQNTLKLATGMRNVPEKQTRGLFGAIAGFIENGWEGMIDGWYGFRHQNSEGTGQAADLKSTQAAIDQINGKLNRVIEKTNEKFHQIEKEFSEVEGRIQDLEKYVEDTKIDLWSYNAELLVALENQHTIDLTDSEMNKLFEKTRRQLRENAEDMGNGCFKIYHKCDNACIESIRNGTYDHDVYRDEALNNRFQIKGVELKSGYKDWILWISFAISCFLLCVVLLGFIMWACQRGNIRCNICI

SEQ ID NO: 2330 - protein, 566 aa, synthetic construct; identical to SEQ ID NO: 2308
  REGION 1..566: note = hemagglutinin__InfluenzaA__ACF22408

SEQ ID NO: 2331 - protein, 566 aa, synthetic construct; identical to SEQ ID NO: 1928
  REGION 1..566: note = hemagglutinin__InfluenzaA__ACF41669

SEQ ID NO: 2332 - protein, 565 aa, synthetic construct; identical to SEQ ID NO: 1914
  REGION 1..565: note = hemagglutinin__InfluenzaA__ACF41680

SEQ ID NO: 2333 - protein, 562 aa, synthetic construct
  REGION 1..562: note = hemagglutinin__InfluenzaA__ACF41691
MAIIYLILLFTAVRGDQICIGYHANNSTEKVDTILERNVTVTHAKDILEKTHNGKLCKLNGIPPLELGDCSIAGWLLGNPECDRLLRVPEWSYIMEKENPRYSLCYPGSFNDYEELKHLLSSVKHFEKVKILPKDGWTQHETDGGSKACAVSGKPSFFRNMVWLTKKGPNYPVAKRSYNNTSGEQMLIIWGVHHPNDEAEQRALYQEVGTYVSASTSTLNKRSTPEIAARPKVSGLGSRMEFSWTLLDVWDTISFESTGNLVAPEYGFKISKRGSSGIMKTEGTLGNCETKCQTPLGAINTTLPFHNVHPLTIGECPKYVKSEKLVLATGLRNVPQIESRGLFGAIAGFIEGGWQGMVDGWYGYHHSNDQGSGYAADKESTQKAFDRITNKVNSVIEKMNTQFEAVGKEFSNLEKRLENLNKKMEDGFLDVWTYNAELLVLMENERTLDFHDSNVKNLYDKVRMQLRDNVKELGNGCFEFYHKCDDECMNSVKNGTYDYPKYEEESKLKRNEIKGVELSSMGVYQILAIYATVAGSLSLAIMIAGISFWMCSNGSLQCRICI

SEQ ID NO: 2334 - protein, 566 aa, synthetic construct; identical to SEQ ID NO: 2316
  REGION 1..566: note = hemagglutinin__InfluenzaA__ACF41735

SEQ ID NO: 2335 - protein, 566 aa, synthetic construct
  REGION 1..566: note = hemagglutinin__InfluenzaA__ACF41790
MKTIIALSYIFCLALGQDLPGNDNSTATLCLGHHAVPNGTLVKTITDDQIEVTNATELVQSSSTGKICNNPHRILDGIDCTLIDALLGDPHCDVFQNETWDLFVERSKAFSNCYPYDVPDYASLRSLVASSGTLEFITEDFTWTGVTQNGGSNACKRGPGSGFFSRLNWLTKSGSTYPVLDVTMPNNDNFDKLYIWGVHHPSTNQEQTSLYVQASGRVTVSTRRSQQTIIPNIGSRPWVRGLSSRISIYWTIVKPGDVLVINSNGNLIAPRGYFKMRTGKSSIMRSDAPIDTCISECITPNGSIPNDKPFQNVNKITYGACPKYVKQNTLKLATGMRNVPEKQTRGLFGAIAGFIENGWEGMIDGWYGFRHQNSEGTGQAADLKSTQAAIDQINGKLNRVIEKTNEKFHQIEKEFSEVEGRIQDLEKYVEDTKIDLWSYNAELLVALENQHTIDLTDSEMNKLFEKTRRQLRENAEDMGNGCFKIYHKCDNACIESIRNGTYDHDVYRDEALNNRFQIKGVELKSGYKDWILWISFAISCFLLCVVLLGFIMWACQRGNIRCNICI

SEQ ID NO: 2336 - protein, 566 aa, synthetic construct
  REGION 1..566: note = hemagglutinin__InfluenzaA__ACF41823
MKTIIALSYIFCLALGQDLPGNDNSTATLCLGHHAVPNGTLVKTITDDQIEVTNATELVQSSSTGKICNNPHRILDGIDCTLIDALLGDPHCDVFQNETWDLFVERSKAFSNCYPYDVPDYASLRSLVASSGTLEFITEGFTWTGVTQNGGSNACKRGPGSGFFSRLNWLTKSGSTYPVLNVTMPNNDNFDKLYIWGVHHPSTNQEQTSLYVQASGRVTVSTRRSRQTIIPNIGSRPWVRGLSSRISIYWTIVKPGDVLVINSNGNLIAPRGYFKMRTGKSSIMRSDAPIDTCISECITPNGSIPNDKPFQNVNKITYGACPKYVKQNTLKLATGMRNVPEKQTRGLFGAIAGFIENGWEGMIDGWYGFRHQNSEGTGQAADLKSTQAAIDQINGKLNRVIEKTNEKFHQIEKEFSEVEGRIQDLEKYVEDTKIDLWSYNAELLVALENQHTIDLTDSEMNKLFEKTRRQLRENAEDMGNGCFKIYHKCDNACIESIRNGTYDHNVYRDEALNNRFQIKGVELKSGYKDWILWISFAISCFLLCVVLLGFIMWACQRGNIRCNICI

SEQ ID NO: 2337 - protein, 565 aa, synthetic construct
  REGION 1..565: note = hemagglutinin__InfluenzaA__ACF41834
MKANLLVLLCALAAADADTICIGYHANNSTDTVDTVLEKNVTVTHSVNLLEDSHNGKLCRLKGIAPLQLGKCNIAGWLLGNPECDPLLPVRSWSYIVETPNSENGICYPGDFIDYEELREQLSSVSSFERFEIFPKESSWPNHNTNGVTAACSHEGKSSFYRNLLWLTEKEGSYPNLKNSYVNKKGKEVLVLWGIHHPSNSKEQQNLYQNENAYVSVVTSNYNRRFTPEIAERPKVRDQAGRMNYYWTLLKPGDTIIFEANGNLIAPMYAFALSRGFGSGIITSNASMHECNTKCQTPLGAINSSLPYQNIHPVTIGECPKYVRSAKLRMVTGLRNIPSIQSRGLFGAIAGFIEGGWTGMIDGWYGYHHQNEQGSGYAADQKSTQNAINGITNKVNTVIEKMNIQFTAVGKEFNKLEKRMENLNKKVDDGFLDIWTYNAELLVLLENERTLDFHDSNVKNLYEKVKSQLKNNAKEIGNGCFEFYHKCDNECMESVRNGTYDYPKYSEESKLNREKVDGVKLESMGIYQILAIYSTVASSLVLLVSLGAISFWMCSNGSLQCRICI

SEQ ID NO: 2338 - protein, 566 aa, synthetic construct
  REGION 1..566: note = hemagglutinin__InfluenzaA__ACF41856
MKTIIALSYILCLVFAQKLPGNDNSTATLCLGHHAVPNGTLVKTITNDQIEVTNATELVQSSSTGRICDSPHRILDGKNCTLIDALLGDPHCDGFQNKEWDLFVERSKAYSNCYPYDVPDYASLRSLVASSGTLEFINEDFNWTGVAQDGGSYACKRGSVNSFFSRLNWLHKSEYKYPALNVTMPNNGKFDKLYIWGVHHPSTDRDQTSLYVRASGRVTVSTKRSQQTVTPNIGSRPWVRGQSSRISIYWTIVKPGDILLINSTGNLIAPRGYFKIRNGKSSIMRSDAPIGTCSSECITPNGSIPNDKPFQNVNRITYGACPRYVKQNTLKLATGMRNVPEKQTRGIFGAIAGFIENGWEGMVDGWYGFRHQNSEGTGQAADLKSTQAAIDQINGKLNRLIEKTNEKFHQIEKEFSEVEGRIQDLEKYVEDTKIDLWSYNAELLVALENQHTIDLTDSEMNKLFEKTRKQLRENAEDMGNGCFKIYHKCDNACIGSIRNGTYDHDVYRDEALNNRFQIKGVELKSGYKDWILWISFAISCFLLCVVLLGFIMWACQKGNIRCNICI

SEQ ID NO: 2339 - protein, 565 aa, synthetic construct
  REGION 1..565: note = hemagglutinin__InfluenzaA__ACF41867
MKAKLLVLLCTFTATYADTICIGYHANNSTDTVDTVLEKNVTVTHSVNLLEDSHNGKLCLLKGIAPLQLGNCSVAGWILGNPECESLISKESWSYIVETPNPENGTCYPGYFADYEELREQLSSVSSFERFEIFPKESSWPNHTVTGVTASCSHNGKSSFYRNLLWLTEKNGLYPNLSNSYVNNKEKEVLVLWGVHHPSNIRDQRAIYHTENAYVSVVSSHYSRRFTPEIAKRPKVRGQEGRINYYWTLLEPGDTIIFEANGNLIAPWYAFALSRGFGSGIITSNAPMNECDAKCQTPQGAINSSLPFQNVHPVTIGECPKYVRSTKLRMVTGLRNIPSIQSRGLFGAIAGFIEGGWTGMMDGWYGYHHQNEQGSGYAADQKSTQNAINGITNKVNSVIEKMNTQFTAVGKEFNKLERRMENLNKKVDDGFLDIWTYNAELLVLLENERTLDFHDSNVKNLYEKVKSQLKNNAKEIGNGCFEFYHKCNNECMESVKNGTYDYPKYSEESKLNREKIDGVKLESMGVYQILAIYSTVASSLVLLVSLGAISFWMCSNGSLQCRICI

SEQ ID NO: 2340 - protein, 565 aa, synthetic construct; identical to SEQ ID NO: 2115
  REGION 1..565: note = hemagglutinin__InfluenzaA__ACF41878

SEQ ID NO: 2341 - protein, 566 aa, synthetic construct
  REGION 1..566: note = hemagglutinin__InfluenzaA__ACF41922
MKAKLLVLLCAFTATYADTICIGYHANNSTDTVDTVLEKNVTVTHSVNLLEDSHNGKLCRLKGIAPLQLGNCSVAGWILGNPKCESLFSKESWSYIAETPNPENGTCYPGYFADYEELREQLSSVSSFERFEIFPKESSWPNHTVTKGVTASCSHNGKSSFYRNLLWLTEKNGLYPNLSKSYVNNKEKEVLVLWGVHHPSNIRDQRAIYHTENAYVSVVSSHYSRRFTPEIAKRPKVRDQEGRINYYWTLLEPGDTIIFEANGNLIAPWYAFALSRGFGSGIITSNASMDECDAKCQTPQGAINSSLPFQNVHPVTIGECPKYVRSTKLRMVTGLRNIPSIQSRGLFGAIAGFIEGGWTGMIDGWYGYHHQNEQGSGYAADQKSTQNAINGITNKVNSVIEKMNTQFTAVGKEFNKLERRMENLNKKVDDGFLDIWTYNAELLVLLENGRTLDFHDSNVKNLYEKVKSQLKNNAKEIGNGCFEFYHKCNNECMESVKNGTYDYPKYSEESKLNRGKIDGVKLESMGVYQILAIYSTVASSLVLLVSLGAISFWMCSNGSLQCRICI

SEQ ID NO: 2342 - protein, 562 aa, synthetic construct
  REGION 1..562: note = hemagglutinin__InfluenzaA__ACF54389
MAIIYLILLFATVRGDQICIGYHANNSTEKVDTILERNVTVTHAKDILEKTHNGKLCKLNGIPPLELGDCSIAGWLLGNPECDRLLRVPEWSYIMEKENPRYSLCYPGSLNDYEELKHLLSSVKHFEKVRILPKDRWTQHTTTGGSKACAVSGKPSFFRNMVWLTKKGTNYPVAKGSYNNTSGEQMLIIWGVHHPIDEAEQRALYQEVGTYVSASTSTLNKRSIPEIAARPEVNGLGSRMEFSWTLLDVWDTINFESTGNLVAPEYGFKISKRGSSGIMKTEGTLGNCETKCQTPLGAINTTLPFHNVHPLTIGECPKYVKSEKLVLATGLRNVPQIESRGLFGAIAGFIEGGWQGMVDGWYGYHHSNEQGSGYAADKESTQKAFDGITNKVNSVIEKMNTQFEAVGKEFNNLEKRLENLNKKMEDGFLDVWTYNAELLVLMENERTLDFHDSNVKNLYEKVRMQLRDNVKELGNGCFEFYHKCDDECMNSVKNGTYDYPKYEEESKLKRNEIKGVKLSSMGVYQILAIYATVAGSLSLAIMVAGISFWMCSNGSLQCRICI

SEQ ID NO: 2343 - protein, 566 aa, synthetic construct; identical to SEQ ID NO: 2316
  REGION 1..566: note = hemagglutinin__InfluenzaA__ACF54400

SEQ ID NO: 2344 - protein, 566 aa, synthetic construct; identical to SEQ ID NO: 2318
  REGION 1..566: note = hemagglutinin__InfluenzaA__ACF54411

SEQ ID NO: 2345 - protein, 566 aa, synthetic construct; identical to SEQ ID NO: 2318
  REGION 1..566: note = hemagglutinin__InfluenzaA__ACF54422

SEQ ID NO: 2346 - protein, 566 aa, synthetic construct; identical to SEQ ID NO: 2329
  REGION 1..566: note = hemagglutinin__InfluenzaA__ACF54433

SEQ ID NO: 2347 - protein, 566 aa, synthetic construct; identical to SEQ ID NO: 2318
  REGION 1..566: note = hemagglutinin__InfluenzaA__ACF54444

SEQ ID NO: 2348 - protein, 566 aa, synthetic construct; identical to SEQ ID NO: 2336
  REGION 1..566: note = hemagglutinin__InfluenzaA__ACF54466

SEQ ID NO: 2349 - protein, 562 aa, synthetic construct
  REGION 1..562: note = hemagglutinin__InfluenzaA__ACF54477
MAIIYLILLFTAVRGDQICIGYHANNSTEKVDTILERNVTVTHAKDILEKTHNGKLCKLNGIPPLELGDCSIAGWLLGNPECDRLLSVPEWSYIMEKENPRDGLCYPGSFNDYEELKHLLSSVKHFEKVKILPKDRWTQHTTTGGSRACAVSGNPSFFRNMVWLTKKGSNYPVAKGSYNNTSGEQMLIIWGVHHPNDETEQRTLYQNVGTYVSVGTSTLNKRSTPDIATRPKVNGLGSRMEFSWTLLDMWDTINFESTGNLIAPEYGFKISKRGSSGIMKTEGTLENCETKCQTPLGAINTTLPFHNVHPLTIGECPKYVKSEKLVLATGLRNVPQIESRGLFGAIAGFIEGGWQGMVDGWYGYHHSNDQGSGYAADKESTQKAFDGITNKVNSVIEKMNTQFEAVGKEFSNLERRLENLNKKMEDGFLDVWTYNAELLVLMENERTLDFHDSNVKNLYDKVRMQLRDNVKELGNGCFEFYHKCDDECMNSVKNGTYDYPKYEEESKLNRNEIKGVKLSSMGVYQILAIYATVAGSLSLAIMMAGISFWMCSNGSLQCRICI

SEQ ID NO: 2350 - protein, 562 aa, synthetic construct
  REGION 1..562: note = hemagglutinin__InfluenzaA__ACF54499
MAIIYLILLFTAVRGDQICIGYHANNSTETVDTILERNVTVTHAKDILEKTHNGKLCKLNGIPPLELGDCSIAGWLLGNPECDRLLSVPEWSYIMEKENPRDGLCYPGSFNDYEELKHLLSSVKHFEKVKILPKDRWTQHTTTGGSRACAVSGNPSFFRNMVWLTKKGSNYPVAKGSYNNTSGEQMLIIWGVHHPNDETEQRTLYQNVGTYVSVGTSTLNKRSTPDIATRPKVNGLGSRMEFSWTLLDMWDTINFESTGNLIAPEYGFKISKRGSSGIMKTEGTLENCETKCQTPLGAINTTLPFHNVHPLTIGECPKYVKSEKLVLATGLRNVPQIESRGLFGAIAGFIEGGWQGMVDGWYGYHHSNDQGSGYAADKESTQKAFDGITNKVNSVIEKMNTQFEAVGKEFSNLERRLENLNKKMEDGFLDVWTYNAELLVLMENERTLDFHDSNVKNLYDKVRMQLRDNVKELGNGCFEFYHKCDDECMNSVKNGTYDYPKYEEESKLNRNEIKGVKLSSMGVYQILAIYATVAGSLSLAIMMAGISFWMCSNGSLQCRICI

SEQ ID NO: 2351 - protein, 562 aa, synthetic construct; identical to SEQ ID NO: 2350
  REGION 1..562: note = hemagglutinin__InfluenzaA__ACF54510

SEQ ID NO: 2352 - protein, 562 aa, synthetic construct; identical to SEQ ID NO: 2350
  REGION 1..562: note = hemagglutinin__InfluenzaA__ACF54521

SEQ ID NO: 2353 - protein, 566 aa, synthetic construct
  REGION 1..566: note = hemagglutinin__InfluenzaA__ACF54532
MKTIIALSYILCLVFAQKLPGNDNSTATLCLGHHAVPNGTIVKTITNDQIEVTNATELVQSSSTGEICDSPHQILDGENCTLIDALLGDPQCDGFQNKKWDLFVERSKAYSNCYPYDVPDYASLRSLVASSGTLEFNNESFNWTGVTQNGTSSACIRRSNNSFFSRLNWLTHLKFKYPALNVTMPNNEKFDKLYIWGVHHPGTDNDQIFLYAQASGRITVSTKRSQQTVIPNIGSRPRVRNIPSRISIYWTIVKPGDILLINSTGNLIAPRGYFKIRSGKSSIMRSDAPIGKCNSECITPNGSIPNDKPFQNVNRITYGACPRYVKQNTLKLATGMRNVPEKQTRGIFGAIAGFIENGWEGMVDGWYGFRHQNSEGIGQAADLKSTQAAIDQINGKLNRLIGKTNEKFHQIEKEFSEVEGRIQDLEKYVEDTKIDLWSYNAELLVALENQHTIDLTDSEMNKLFEKTKKQLRENAEDMGNGCFKIYHKCDNACIGSIRNGTYDHDVYRDEALNNRFQIKGVELTSGYKDWILWISFAISCFLLCVALLGFIMWACQKGNIRCNICI

SEQ ID NO: 2354 - protein, 566 aa, synthetic construct
  REGION 1..566: note = hemagglutinin__InfluenzaA__ACF54543
MKTIIALSYILCLVFAQKLPGNDNSTATLCLGHHAVPNGTIVKTITNDQIEVTNATELVQSSSTGEICDSPHQILDGENCTLIDALLGDPQCDGFQNKKWDLFVERSKAYSNCYPYDVPDYVSLRSLVASSGTLEFNNESFNWTGVTQNGTSSACIRRSNNSFFSRLNWLTHLKFKYPALNVTMPNNENFDKLYIWGVHHPGTDNDQIFLYAQASGRITVSTKRSQQTVIPNIGSRPRVRNIPSRISIYWTIVKPGDILLINSTGNLIAPRGYFKIRSGKSSIMRSDAPIGKCNSECITPNGSIPNDKPFQNVNRITYGACPRYVKQNTLKLATGMRNVPEKQTRGIFGAIAGFIENGWEGMVDGWYGFRHQNSEGIGQAADLKSTQAAIDQINGKLNRLIGKTNEKFHQIEKEFSEVEGRIQDLEKYVEDTKIDLWSYNAELLVALENQHTIDLTDSEMNKLFEKTKKQLRENAEDLGNGCFKIYHKCDNACIGSIRNGTYDHDVYRDEALNNRFQIKGVELKSGYKDWILWISFAISCFLLCVALLGFIMWACQKGNIRCNICI

SEQ ID NO: 2355 - protein, 566 aa, synthetic construct
  REGION 1..566: note = hemagglutinin__InfluenzaA__ACF54565
MKTIIALSYILCLVFSQKLPGNDNSTATLCLGHHAVPNGTIVKTITNDQIEVTNATELVQSSSTGGICDSPHQILDGENCTLIDALLGDPQCDGFQNKKWDLFVERSKAYSNCYPYDVPDYASLRSLVASSGTLEFNNESFNWAGVTQNGTSSACKRRSNKSFFSRLNWLTHLKYKYPALNVTMPNNEKFDKLYIWGVHHPVTDSDQISLYAQASGRITVSTKRSQQTVIPNIGYRPRVRDISSRISIYWTIVKPGDILLINSTGNLIAPRGYFKIRSGKSSIMRSDAPIGKCNSECITPNGSIPNDKPFQNVNRITYGACPRYVKQNTLKLATGMRNVPEKQTRGIFGAIAGFIENGWEGMVDGWYGFRHQNSEGTGQAADLKSTQAAINQINGKLNRLIGKTNEKFHQIEKEFSEVEGRIQDLEKYVEDTKIDLWSYNAELLVALENQHTIDLTDSEMNKLFERTKKQLRENAEDMGNGCFKIYHKCDNACIESIRNGTYDHDVYRDEALNNRFQIKGVELKSGYKDWILWISFAISCFLLCVALLGFIMWACQKGNIRCNICI

SEQ ID NO: 2356 - protein, 566 aa, synthetic construct
  REGION 1..566: note = hemagglutinin__InfluenzaA__ACF54576
MKTIIALSYILCLVFAQKLPGNDNSTATLCLGHHAVPNGTIVKTITNDQIEVTNATELVQSSSTGGICDSPHQILDGENCTLIDALLGDPQCDGFQNKKWDLFVERSKAYSNCYPYDVPDYASLRSLVASSGTLEFNDESFNWTGVTQNGTSSSCKRRSNNSFFSRLNWLTQLKFKYPALNVTMPNNEKFDKLYIWGVHHPVTDNDQIFLYAQASGRITVSTKRSQQTVIPNIGSRPRIRNIPSRISIYWTIVKPGDILLINSTGNLIAPRGYFKIRSGKSSIMRSDAPIGKCNSECITPNGSIPNDKPFQNVNRITYGACPRYVKQNTLKLATGMRNVPEKQTRGIFGAIAGFIENGWEGMVDGWYGFRHQNSEGIGQAADLKSTQAAINQINGKLNRLIGKTNEKFHQIEKEFSEVEGRIQDLEKYVEDTKIDLWSYNAELLVALENQHTIDLTDSEMNKLFERTKKQLRENAEDMGNGCFKIYHKCDNACIGSIRNGTYDHDVYRDEALNNRFQIKGVELKSGYKDWILWISFAISCFLLCVALLGFIMWACQKGNIRCNICI

SEQ ID NO: 2357 - protein, 565 aa, synthetic construct
  REGION 1..565: note = hemagglutinin__InfluenzaA__ACF54598
MKAKLLVLLYAFVATDADTICIGYHANNSTDTVDTIFEKNVAVTHSVNLLEDRHNGKLCKLKGIAPLQLGKCNIIGWLLGNPECDSLLPARSWSYIVETPNSENGACYPGDFIDYEELREQLSSVSSLERFEIFPKESSWPNHTFNGVTASCSHRGKSSFYRNLLWLTKKGDSYPKLTNSYVNNKGKEVLVLWGVHHPSSSDEQQSLYSNGNAYVSVASSNYNRRFTPEIAARPKVKDQHGRMNYYWTLLEPGDTIIFEATGNLIAPWYAFALSRGFESGIITSNASMHECNTKCQTPQGSINSNLPFQNIHPVTIGECPKYVRSTKLRMVTGLRNIPSIQYRGLFGAIAGFIEGGWTGMIDGWYGYHHQNEQGSGYAADQKSTQNAINGITNKVNSIIEKMNTQFTAVGKEFNNLEKRMENLNKKVDDGFLDIWTYNAELLVLLENGRTLDFHDLNVKNLYEKVKSQLKNNAKEIGNGCFEFYHKCDNECMESVRNGTYDYPKYSEESKLNREKIDGVKLESMGVYQILAIYSTVASSLVLLVSLGAISFWMCSNGSLQCRICI

SEQ ID NO: 2358 - protein, 567 aa, synthetic construct
  REGION 1..567: note = hemagglutinin__InfluenzaA__ACG50699
MEKIVLLLAIVSLVKSDQICIGYHANNSTEQVDTIMEKNVTVTHAQDILEKTHNGKLCDLDGVKPLILRDCSVAGWLLGNPMCDEFINVPEWSYMVEKANPANDLCYPGNFNDYEELKHLLSRINHFEKIQIIPKSSWSDHEASLGVSSACPYQGSSSFFRNVVWLIKKNNAYPTIKRSYNNTNQEDLLVLWGIHHPNDEAEQTRLYQNPTTYISVGTSTLNQRLIPKIATRSKVNGQSGRMDFFWTILKPNDAINFESNGNFIAPEYAYKIVKKGDSAIMKSEVEYGNCNTKCQTPMGAINSSMPFHNIHPLTIGECPKYVKSNKLVLATGLRNSPQRERRRKRGLFGAIAGFIEGGWQGMVDGWYGYHHSNEQGSGYAADKESTQKAIDGVTNKVNSIIDKMNTQFEAVGREFNNLERRIENLNKKMEDGFLDVWTYNAELLVLMENERTLDFHDSNVKNLYDKVRLQLRDNAKELGNGCFEFYHKCDNECMESVRNGTYDYPQYSEEARLKREEISGVKLESIGTYQILSIYSTVASSLALAIMVAGLSLWMCSNGSLQCRICI

SEQ ID NO: 2359 - protein, 566 aa, synthetic construct; identical to SEQ ID NO: 1928
  REGION 1..566: note = hemagglutinin__InfluenzaA__ACG70142

SEQ ID NO: 2360 - protein, 566 aa, synthetic construct; identical to SEQ ID NO: 1928
  REGION 1..566: note = hemagglutinin__InfluenzaA__ACG70153

SEQ ID NO: 2361 - protein, 566 aa, synthetic construct
  REGION 1..566: note = hemagglutinin__InfluenzaA__ACG80410
MKTIIALSYILCLVFAQKLPGNDNSTATLCLGHHAVPNGTIVRTITNDQIEVTNATELVQSSSTGEICDSPHQILDGENCTLIDALLGDPQCDGFQNKKWDLFVERSKAYSNCYPYDVPDYASLRSLVASSGTLEFNNESFNWTGVTQNGTSSACIRRSNNSFFSRLNWLTHLRFKYPALNVTMPNNEQFDKLYIWGVHHPGTDNDQIFLYAQASGRITVSTKRSQQTVIPNIGSRPRVRNIPSRISIYWTIVKPGDILLINSTGNLIAPRGYFKIRNGKSSIMRSDAPIGKCNSECITPNGSIPNDKPFQNVNRITYGACPRYVKQNTLKLATGMRNVPEKQTRGIFGAIAGFIENGWEGMVDGWYGFRHQNSEGRGQAADLKSTQAAIDQINGKLNRLIGKTNEKFHQIEKEFSEVEGRIQDLEKYVEDTKIDLWSYNAELLVALENQHTIDLTDSEMNKLFEKTKKQLRENAEDMGNGCFKIYHKCDNACIGSIRNGTYDHDVYRDEALNNRFQIKGVELKSGYKDWILWISFAISCFLLCVALLGFIMWACQKGNIRCNICI

SEQ ID NO: 2362 - protein, 566 aa, synthetic construct
  REGION 1..566: note = hemagglutinin__InfluenzaA__ACG80420
MQTIIALSYILCLVFAQKLPGNDNSTATLCLGHHAVPNGTIVRTITNDQIEVTNATELVQSSSTGEICDSPHQILDGENCTLIDALLGDPQCDGFQNKKWDLFVERSKAYSNCYPYDVPDYASLRSLVASSGTLEFNNESFNWTGVTQNGTSSACIRRSNNSFFSRLNWLTHLRFKYPALNVTMPNNEQFDKLYIWGVHHPGTDNDQIFLYAQASGRITVSTKRSQQTVIPNIGSRPRVRNIPSRISIYWTIVKPGDILLINSTGNLIAPRGYFKIRNGKSSIMRSDAPIGKCNSECITPNGSIPNDKPFQNVNRITYGACPRYVKQNTLKLATGMRNVPEKQTRGIFGAIAGFIENGWEGMVDGWYGFRHQNSEGRGQAADLKSTQAAIDQINGKLNRLIGKTNEKFHQIEKEFSEVEGRIQDLEKYVEDTKIDLWSYNAELLVALENQHTIDLTDSEMNKLFEKTKKQLRENAEDMGNGCFKIYHKCDNACIGSIRNGTYDHDVYRDEALNNRFQIKGVELKSGYKDWILWISFAISCFLLCVALLGFIMWACQKGNIRCNICI

SEQ ID NO: 2363 - protein, 566 aa, synthetic construct; identical to SEQ ID NO: 2361
  REGION 1..566: note = hemagglutinin__InfluenzaA__ACG80426

SEQ ID NO: 2364 - protein, 566 aa, synthetic construct; identical to SEQ ID NO: 2361
  REGION 1..566: note = hemagglutinin__InfluenzaA__ACG80430

SEQ ID NO: 2365 - protein, 566 aa, synthetic construct
  REGION 1..566: note = hemagglutinin__InfluenzaA__ACG80436
MKTIIALSYILCLVFAQKFPGNDNSTATLCLGHHAVPNGTIVKTITNDQIEVTNATELVQSSSTGEICDSPHQILDGENCTLIDALLGDPQCDGFQNKKWDLFVERSKAYSNCYPYDVPDYASLRSLVASSGTLEFNNESFNWTGVTQNGTSSACIRRSNNSFFSRLNWLTHLRFKYPALNVTMPNNENFDKLYIWGVHHPGTDNDQIFLYAQASGRITVSTKRSQQTVIPNIGSRPRVRNIPSRISIYWTIVKPGDILLINSTGNLIAPRGYFKIRSGKSSIMRSDAPIGKCNSECITPNGSIPNDKPFQNVNRITYGACPRYVKQNTLKLATGMRNVPEKQTRGIFGAIAGFIENGWEGMVDGWYGFRHQNSEGIGQAADLKSTQAALDQINGKLNRLIGKTNEKFHQIEKEFSEVEGRIQDLEKYVEDTKIDLWSYNAELLVALENQHTIDLTDSEMNKLFEKTKKQLRENAEDMGNGCFKIYHKCDNACIGSIRNGTYDHNVYRDEALNNRFQIKGVELKSGYKDWILWISFAISCFLLCVALLGFIMWACQKGNIRCNICI

SEQ ID NO: 2366 - protein, 566 aa, synthetic construct
  REGION 1..566: note = hemagglutinin__InfluenzaA__ACG80445
MKTIIALSYILCLVFAQKLPGNDNSTATLCLGHHAVPNGTIVRTITNDQIEVTNATELVQSSSTGEICDSPHQILDGENCTLIDALLGDPQCDGFQNKKWDLFVERSKAYSNCYPYDVPDYASLRSLVASSGTLEFNNESFNWTGVTQNGTSSACIRRSNNSFFSRLNWLTHLRFKYPALNVTMPNNEQFDKLYIWGVHHPGTDNDQIFLYAQASGRITVSTKRSQQTVIPNIGSRPRVRNIPSRISIYWTIVKPGDILLINSTGNLIAPRGYFKIRNGKSSIMRSDAPIGKCNSECITPNGSIPNDKPFQNVNRITYGACPRYVKQNTLKLATGMRNVPEKQTRGIFGAIAGFIENGWEGMVDGWYGFRHQNSEGRGQAADLKSTQAAIDQINGKLNRLIGKTNEKFHQIEKEFSEVEGRIQDLEKYVEDTKIDLWSYNAELLVALENQHTIDLTDSEMNKLFEKTKNQLRENAEDMGNGCFKIYHKCDNACIGSIRNGTYDHDVYRDEALNNRFQIKGVELKSGYKDWILWISFAISCFLLCVALLGFIMWACQKGNIRCNICI

SEQ ID NO: 2367 - protein, 566 aa, synthetic construct; identical to SEQ ID NO: 2361
  REGION 1..566: note = hemagglutinin__InfluenzaA__ACG80454

SEQ ID NO: 2368 - protein, 566 aa, synthetic construct; identical to SEQ ID NO: 2361
  REGION 1..566: note = hemagglutinin__InfluenzaA__ACG80463

SEQ ID NO: 2369 - protein, 566 aa, synthetic construct
  REGION 1..566: note = hemagglutinin__InfluenzaA__ACG80472
MKTIIALSYILCLVFAQKLPGNDNSTATLCLGHHAVPNGTIVRTITNDQIEVTNATELVQSSSTGEICDSPHQILDGENCTLIDALLGDPQCDGFQNKKWDLFVERSKAYSNCYPYDVPDYASLRSLVASSGTLEFNNESFNWTGVTQNGTSSACIRRSNNSFFSRLNWLTHLRFKYPALNVTMPNNEQFDKLYIWGVHHPGTDNDQIFLYAQASGRITVSTKRSQQTVIPNIGSRPRVRNIPSRISIYWTIVKPGDILLINSTGNLIAPRGYFKIRSGKSSIMRSDAPIGKCNSECITPNGSIPNDKPFQNVNRITYGACPRYVKQNTLKLATGMRNVPEKQTRGIFGAIAGFIENGWEGMVDGWYGFRHQNSEGIGQAADLKSTQAALDQINGKLNRLIGKTNEKFHQIEKEFSEVEGRIQDLEKYVEDTKIDLWSYNAELLVALENQHTIDLTDSEMNKLFEKTKKQLRENAEDMGNGCFKIYHKCDNACIGSIRNGTYDHNVYRDEALNNRFQIKGVELKSGYKDWILWISFAISCFLLCVALLGFIMWACQKGNIRCNICI

SEQ ID NO: 2370 - protein, 566 aa, synthetic construct
  REGION 1..566: note = hemagglutinin__InfluenzaA__ACH69558
MKTIIALSYILCLVFAQKLPGNDNSTATLCLGHHAVPNGTIVKTITNDQIEVTNATELVQSSSTGGICNSPHQILDGENCTLIDALLGDPQCDGFQNKKWDLFVERSKAYSNCYPYDVPDYASLRSLVASSGTLEFNNESFNWTGVTQNGTSSACKRRSNNSFFSRLNWLTHLRFKYPALNVTMPNNEKFDKLYIWGVHHPGTDNDQIFLYAQASGRITVSTKRSQQTVIPNIGSRPRVRNIPSRISIYWTIVKPGDILLINSTGNLIAPRGYFKIRSGKSSIMRSDAPIGKCNSECITPNGSIPNDKPFQNVNRITYGACPRYVKQNTLKLATGMRNVPEKQTRGIFGAIAGFIENGWEGMVDGWYGFRHQNSEGIGQAADLKSTQAAINQINGKLNRLIGKTNEKFHQIEKEFSEVEGRIQDLEKYVEDTKIDLWSYNAELLVALENQHTIDLTDSEMNKLFERTKKQLRENAEDMGNGCFKIYHKCDNACIGSIRNGTYDHDVYRDEALNNRFQIKGVELKSGYKDWILWISFAISCFLLCVALLGFIMWACQKGNIRCNICI

SEQ ID NO: 2371 - protein, 566 aa, synthetic construct
  REGION 1..566: note = hemagglutinin__InfluenzaA__ACH69569
MKTIIALSYILCLVFAQKLPGNDNSTATLCLGHHAVPNGTIVKTITNDQIEVTNATELVQSSSTGGICNSPHQILDGENCTLIDALLGDPQCDGFQNKKWDLFVERSKAYSNCYPYDVPDYASLRSLVASSGTLEFNNESFNWTGVTQNGTSSACKRRSNNSFFSRLNWLTHLKFKYPALNVTMPNNEKFDKLYIWGVHHPGTDNDQIFLYAQASGRITVSTKRSQQTVIPNIGSRPRVRNIPSRISIYWTIVKPGDILLINSTGNLIAPRGYFKIRSGKSSIMRSDAPIGKCNSECITPNGSIPNDKPFQNVNRITYGACPRYVKQNSLKLATGMRNVPEKQTRGIFGAIAGFIENGWEGMVDGWYGFRHQNSEGIGQAADLKSTQAAINQINGKLNRLIGKTNEKFHQIEKEFSEVEGRIQDLEKYVEDTKIDLWSYNAELLVALENQHTIDLTDSEMNKLFERTKKQLRENAEDMGNGCFKIYHKCDNACIGSIRNGTYDHDVYRDEALNNRFQIKGVELKSGYKDWILWISFAISCFLLCVALLGFIMWACQKGNIRCNICI

SEQ ID NO: 2372 - protein, 566 aa, synthetic construct
  REGION 1..566: note = hemagglutinin__InfluenzaA__ACH69580
MKTIIALSYILCLVFAQKLPGNDNSTATLCLGHHAVPNGTIVKTITNDQIEVTNATELVQSSSTGGICDSPHQILDGENCTLIDALLGDPQCDDFQNKKWDLFVERSKAYSNCYPYDVPDYASLRSLVASSGTLEFNNESFNWTGVTQNGTSSACKRRSNNSFFSRLNWLTHLKFKYPALNVTMPNNEKFDKLYIWGVHHPGTDNDQIFLYAQASGRITVSTKRSQQTVIPNIGSRPRVRNIPSRISIYWTIVKPGDILLINSTGNLIAPRGYFKIRSGKSSIMRSDAPIGKCNSECITPNGSIPNDKPFQNVNRITYGACPRYVKQNTLKLATGMRNVPEKQTRGIFGAIAGFIENGWEGMVDGWYGFRHQNSEGIGQAADLKSTQAAINQINGKLNRLIGKTNEKFHQIEKEFSEVEGRIQDLEKYVEDTKIDLWSYNAELLVALENQHTIDLTDSEMNKLFERTKKQLRENAEDMGNGCFKIYHKCDNACIGSIRNGTYDHDVYRDEALNNRFQIKGVELKSGYKDWILWISFAISCFLLCVALLGFIMWACQKGNIRCNICI

SEQ ID NO: 2373 - protein, 566 aa, synthetic construct
  REGION 1..566: note = hemagglutinin__InfluenzaA__ACH69591
MKTIIALSYILCLAFAQKLPGNDNSTATLCLGHHAVPNGTLVKTITNDQIEVTNATELVQSSSTGRICDSPHQILDGENCTLIDALLGDPHCDGFQNKEWDLFVERSKAYSNCYPYDVPDYASLRSLVASSGTLEFNNESFNWTGVAQNGTSSACKRRSINSFFSRLNWLHQLKYRYPALNVTMPNNDKFDKLYIWGVHHPSTDSDQISVYAQASGRVTVSTKRSQQTVIPNIGSRPWVRGISSRISIYWTIVKPGDILLINSTGNLIAPRGYFKIRSGKSSIMRSDAPIGKCNSECITPNGSIPNDKPFQNVNRITYGACPRYVKQNTLKLATGMRNVPEKQTRGIFGAIAGFIENGWEGMMDGWYGFRHQNSEGTGQAADLKSTQAAINQINGKLNKLIEKTNEKFHQIENEFSEVEGRIQDLEKYVEDTKIDLWSYNAELLVALENQHTIDLTDSEMNKLFERTRKQLRENAEDMGNGCFKIYHKCDNACIGSIRNGTYDHDVYRDEALNNRFQIKGVELKSGYKDWILWISFAISCFLLCVVLLGFIMWACQKGNIRCNICI

SEQ ID NO: 2374 - protein, 566 aa, synthetic construct
  REGION 1..566: note = hemagglutinin__InfluenzaA__ACH69602
MKTIIALSYILCLAFAQKLPGNDNSTATLCLGHHAVPNGTLVKTITNDQIEVTNATELVQSSSTGRICDSPHQILDGENCTLIDALLGDPHCDGFQNKEWDLFVERSKAYSNCYPYDVPDYASLRSLVASSGTLEFNNESFNWTGVAQNGTSSACKRRSINSFFSRLNWLHQLKYRYPALNVTMPNNDKFDKLYIWGVHHPSTDSDQISVYAQASGRVTVSTKRSQQTVIPNIGSRPWVRGISSRISIYWTIVKPGDILLINSTGNLIAPRGYFKIRSGKSSIMRSDAPIGKCNSECITPNGSIPNDKPFQNVNRITYGACPRYVKQNTLKLATGMRNVPEKQTRGIFGAIAGFIENGWEGMMDGWYGFRHQNSEGTGQAADLKSTQAAINQINGKLNKLIEKTNEKFHQIEKEFSEVEGRIQDLEKYVEDTKIDLWSYNAELLVALENQHTIDLTDSEMNKLFERTRKQLRENAEDMGNGCFKIYHKCDNACIGSIRNGTYDHDVYRDEALNNRFQIKGVELKSGYKDWILWISFAISCFLLCVVLLGFIMWACQKGNIRCNICI

SEQ ID NO: 2375 - protein, 566 aa, synthetic construct
  REGION 1..566: note = hemagglutinin__InfluenzaA__ACH69613
MKTIIALSYILCLAFAQKLPGNDNSTPTLCLGHHAVPNGTLVKTITNDQIEVTNATELVQSSSTGGICDSPHQIIDGENCTLIDALLGDPHCDGFQNKEWDLFVERSKAYSNCYPYDVPDYASLRSLVASSGTLEFNNESFNWTGVAQNGTSSACKRRSINSFFSRLNWLHQLKYRYPALNVTMPNNDKFDKLYIWGVHHPSTDSDQISVYAQASGRVTVSTKRSQQTVIPNIGSRPWVRGISSRISIYWTIVKPGDILLINSTGNPIAPRGYFKIRSGKSSIMRSDAPIGKCNSECITPNGSIPNDKPFQNVNRITYGACPRYVKQNTLKLATGMRNVPEKQTRGIFGAIAGFIENGWEGMMDGWYGLRHQNSEGTGQAADLKSTQAAINQINGKLNKLIEKTNEKFHQIENEFSEVEGRIQDLEKYVEDTKIDLWSYNAELLVALENQHTIDLTDSEMNKLFERTRKQLRENAEDMGNGCFKIYHKCDNACIGSIRNGTYDHDVYRDEALNNRFQIKGVELKSGYKDWILWISFAISCFLLCVVLLGFIMWACQKGNIRCNICI

SEQ ID NO: 2376 - protein, 566 aa, synthetic construct; identical to SEQ ID NO: 630
  REGION 1..566: note = hemagglutinin__InfluenzaA__ACH82060

SEQ ID NO: 2377 - protein, 566 aa, synthetic construct; identical to SEQ ID NO: 2316
  REGION 1..566: note = hemagglutinin__InfluenzaA__ACI06123

SEQ ID NO: 2378 - protein, 566 aa, synthetic construct; identical to SEQ ID NO: 2316
  REGION 1..566: note = hemagglutinin__InfluenzaA__ACI06126

SEQ ID NO: 2379 - protein, 566 aa, synthetic construct; identical to SEQ ID NO: 2316
  REGION 1..566: note = hemagglutinin__InfluenzaA__ACI06127

SEQ ID NO: 2380 - protein, 566 aa, synthetic construct; identical to SEQ ID NO: 2316
  REGION 1..566: note = hemagglutinin__InfluenzaA__ACI06129

SEQ ID NO: 2381 - protein, 566 aa, synthetic construct; identical to SEQ ID NO: 2316
  REGION 1..566: note = hemagglutinin__InfluenzaA__ACI06130

SEQ ID NO: 2382 - protein, 566 aa, synthetic construct; identical to SEQ ID NO: 2316
  REGION 1..566: note = hemagglutinin__InfluenzaA__ACI06132

SEQ ID NO: 2383 - protein, 566 aa, synthetic construct; identical to SEQ ID NO: 2318
  REGION 1..566: note = hemagglutinin__InfluenzaA__ACI06133

SEQ ID NO: 2384 - protein, 566 aa, synthetic construct; identical to SEQ ID NO: 2318
  REGION 1..566: note = hemagglutinin__InfluenzaA__ACI06134

SEQ ID NO: 2385 - protein, 566 aa, synthetic construct; identical to SEQ ID NO: 2318
  REGION 1..566: note = hemagglutinin__InfluenzaA__ACI06135

SEQ ID NO: 2386 - protein, 566 aa, synthetic construct; identical to SEQ ID NO: 2318
  REGION 1..566: note = hemagglutinin__InfluenzaA__ACI06136

SEQ ID NO: 2387 - protein, 566 aa, synthetic construct; identical to SEQ ID NO: 2318
  REGION 1..566: note = hemagglutinin__InfluenzaA__ACI06137

SEQ ID NO: 2388 - protein, 566 aa, synthetic construct; identical to SEQ ID NO: 2318
  REGION 1..566: note = hemagglutinin__InfluenzaA__ACI06138

SEQ ID NO: 2389 - protein, 566 aa, synthetic construct; identical to SEQ ID NO: 2318
  REGION 1..566: note = hemagglutinin__InfluenzaA__ACI06139

SEQ ID NO: 2390 - protein, 566 aa, synthetic construct; identical to SEQ ID NO: 2318
  REGION 1..566: note = hemagglutinin__InfluenzaA__ACI06140

SEQ ID NO: 2391 - protein, 566 aa, synthetic construct; identical to SEQ ID NO: 2318
  REGION 1..566: note = hemagglutinin__InfluenzaA__ACI06141

SEQ ID NO: 2392 - protein, 566 aa, synthetic construct; identical to SEQ ID NO: 2318
  REGION 1..566: note = hemagglutinin__InfluenzaA__ACI06142

SEQ ID NO: 2393 - protein, 566 aa, synthetic construct; identical to SEQ ID NO: 2318
  REGION 1..566: note = hemagglutinin__InfluenzaA__ACI06143

SEQ ID NO: 2394 - protein, 566 aa, synthetic construct
  REGION 1..566: note = hemagglutinin__InfluenzaA__ACI06144
MKTIIALSYIFCLALGQDLPGNDNSTATLCLGHHAVPNGTLVKTITDDQIEVTNATELVQSSSTGKICNNPHRILDGIDCTLIDALLGDPHCDVFQNETWDLFVERSKAFSNCYPYDVPDYASLRSLVASSGTLEFITEGFTWTGVTQNGGSNACKRGPGSGFFSRLNWLTKSGSTYPVLNVTMPNNDNFDKLYIWGVHHPSTNQEQTSLYVQASGRVTVSTRRSQQTIIPNIGSRPWVRGLSSRISIYWTIVKPGDVLVINSNGNLIAPRGYFKMRTGKSSIMRSDAPIDTCISECITPNGSIPNDKPFQNVNKITYGACPKYVKQNTLKLATGMRNVPEKQTRGLFGAIAGFIENGWEGMIDGWYGFRHQNSEGTGQAADLKSTQAAIDQINGKLNRVIEKTNEKFHQIEKEFSEVEGRIQDLEKYVEDTKIDLWSYNAELLVALENQHTIDLTDSEMNRLFEKTRRQLRENAEDMGNGCFKIYHKCDNACIESIRNGTYDHDVYRDEALNNRFQIKGVELKSGYKDWILWISFAISCFLLCVVLLGFIMWACQRGNIRCNICI

SEQ ID NO: 2395 - protein, 566 aa, synthetic construct; identical to SEQ ID NO: 2318
  REGION 1..566: note = hemagglutinin__InfluenzaA__ACI06145

SEQ ID NO: 2396 - protein, 566 aa, synthetic construct
  REGION 1..566: note = hemagglutinin__InfluenzaA__ACI06146
MKTIIALSYIFCLALGQDLPGNDNSTATLCLGHHAVPNGTLVKTITDDQIEVTNATELVQSSSTGKICNNPHRILDGIDCTLIDALLGDPHCDVFQNETWDLFVERSKAFSNCYPYDVPDYASLRSLVASSGTLEFITEGFTWTGVTQNGGSNACKRGPGSGFFSRLNWLTKSGSTYPVLNVTMPNNDNFDKLYIWGVHHPSTNQEQTSLYVQASGRVTVSTRRSQQTIIPNIGSSPWVRGLSSRISIYWTIVKPGDVLVINSNGNLIAPRGYFKMRTGKSSIMRSDAPIDTCISECITPNGSIPNDKPFQNVNKITYGACPKYVKQNTLKLATGMRNVPEKQTRGLFGAIAGFIENGWEGMIDGWYGFRHQNYEGTGQAADLKSTQAAIDQINGKLNRVIEKTNEKFHQIEKEFSEVEGRIQDLEKYVEDTKIDLWSYNAELLVALENQHTIDLTDSEMNKLFEKTRRQLRENAEDMGNGCFKIYHKCDNACIESIRNGTYDHDVYRDEALNNRFQIKGVELKSGYKDWILWISFAISCFLLCVVLLGFIMWACQRGNIRCNICI

SEQ ID NO: 2397 - protein, 566 aa, synthetic construct; identical to SEQ ID NO: 2318
  REGION 1..566: note = hemagglutinin__InfluenzaA__ACI06147

SEQ ID NO: 2398 - protein, 566 aa, synthetic construct; identical to SEQ ID NO: 2318
  REGION 1..566: note = hemagglutinin__InfluenzaA__ACI06148

SEQ ID NO: 2399 - protein, 566 aa, synthetic construct
  REGION 1..566: note = hemagglutinin__InfluenzaA__ACI06149
MKTIIALSYIFCLALGQDLPGNDNSTATLCLGHHAVPNGTLVKTITDDQIEVTNATELVQSSSTGKICNNPHRILDGIDCTLIDALLGDPHCDVFQNETWDLFVERSKAFSNCYPYDVPDYASLRSLVASSGTLEFITEGFTWTGVTQNGGSNACKRGPGSGFFSRLNWLTKSGSTYPVLNVTMPNNDNFDKLYIWGVHHPSTNQEQTSLYVQASGRVTVSTRRSRQTIIPNIGSRPWVRGLSSRISIYWTIVKPGDVLVINSNGNLIAPRGYFKMRTGKSSIMRSDAPIDTCISECITPNGSIPNDKPFQNVNKITYGACPKYVKQNTLKLATGMRNVPEKQTRGLFGAIAGFIENGWEGMIDGWYGFRHQNSEGTGQAADLKSTQAAIDQINGKLNRVIEKTNEKFHQIEKEFSEVEGRIQDLEKYVEDTKIDLWSYNAELLVALENQHTIDLTDSEMNKLFEKTRRQLRENAEDMGNGCFKIYHKCDNACIESIRNGTYDHDVYRDEALNNRFQIKGVELKSGYKDWILWISFAISCFLLCVVLLGFIMWACQRGNIRCNICI

SEQ ID NO: 2400 - protein, 566 aa, synthetic construct; identical to SEQ ID NO: 2329
  REGION 1..566: note = hemagglutinin__InfluenzaA__ACI06151

SEQ ID NO: 2401 - protein, 566 aa, synthetic construct; identical to SEQ ID NO: 2329
  REGION 1..566: note = hemagglutinin__InfluenzaA__ACI06152

SEQ ID NO: 2402 - protein, 566 aa, synthetic construct
  REGION 1..566: note = hemagglutinin__InfluenzaA__ACI06153
MKTIIALSYIFCLALGQDLPGNDNSTATLCLGHHAVPNGTLVKTITDDQIEVTNATELVQSSSTGKICNNPHRILDGIDCTLIDALLGDPHCDVFQNETWDLFVERSKAFSNCYPYDVPDYASLRSLVASSGTLEFITEGFTWTGVTQNGGSNACKRGPGSGFFSRLNWLTKSGSTYPVLNVTMPNNDNFDKLYIWGVHHPSTNQEQTSLYVQASGRVTVSTRRSQQTIIPNIGSRPWVRGLSSRISIYWTIVKPGDELVINSNGNLIAPRGYFKMRTGKSSIMRSDAPIDTCISECITPNGSIPNDKPFQNVNKITYGACPKYVKQNTLKLATGMRNVPEKQTRGLFGAIAGFIENGWEGMIDGWYGFRHQNSEGTGQAADLKSTQAAIDQINGKLNRVIEKTNEKFHQIEKEFSEVEGRIQDLEKYVEDTKIDLWSYNAELLVALENQHTIDLTDSEMNKLFEKTRRQLRENAEDMGNGCFKIYHKCDNACIESIRNGTYDHDVYRDEALNNRFQIKGVELKSGYKDWILWISFAISCFLLCVVLLGFIMWACQRGNIRCNICI

SEQ ID NO: 2403 - protein, 566 aa, synthetic construct
  REGION 1..566: note = hemagglutinin__InfluenzaA__ACI06155
MKTIIALSYIFCLALGQDLPGNDNSTATLCLGHHAVPNGTLVKTITDDQIEVTNATELVQSSSTGKICNNPHRILDGIDCTLIDALLGDPHCDVFQNETWDLFVERSKAFSNCYPYDVPDYASLRSLVASSGTLEFITEGFTWTGVTQNGGSNACKRGPGSGFFSRLNWLTKSGSTYPVLNVTMPNNDNFDKLYIWGVHHPSTNQEQTSLYVQASGRVTVSTRRSQQTIIPNIESRPWVRGLSSRISIYWTIVKPGDVLVINSNGNLIAPRGYFKMRTGKSSIVRSDAPIDTCISECITPNGSIPNDKPFQNVNKITYGACPKYVKQNTLKLATGMRNVPEKQTRGLFGAIAGFIENGWEGMIDGWYGFRHQNSEGTGQAADLKSTQAAIDQINGKLNRVIEKTNEKFHQIEKEFSEVEGRIQDLEKYVEDTKIDLWSYNAELLVALENQHTIDLTDSEMNKLFEKTRRQLRENAEDMGNGCFKIYHKCDNACIESIRNGTYDHDVYRDEALNNRFQIKGVELKSGYKDWILWISFAISCFLLCVVLLGFIMWACQRGNIRCNICI

SEQ ID NO: 2404 - protein, 566 aa, synthetic construct; identical to SEQ ID NO: 2329
  REGION 1..566: note = hemagglutinin__InfluenzaA__ACI06156

SEQ ID NO: 2405 - protein, 566 aa, synthetic construct; identical to SEQ ID NO: 2329
  REGION 1..566: note = hemagglutinin__InfluenzaA__ACI06157

SEQ ID NO: 2406 - protein, 566 aa, synthetic construct; identical to SEQ ID NO: 2329
  REGION 1..566: note = hemagglutinin__InfluenzaA__ACI06158

SEQ ID NO: 2407 - protein, 566 aa, synthetic construct; identical to SEQ ID NO: 2329
  REGION 1..566: note = hemagglutinin__InfluenzaA__ACI06159

SEQ ID NO: 2408 - protein, 566 aa, synthetic construct; identical to SEQ ID NO: 2318
  REGION 1..566: note = hemagglutinin__InfluenzaA__ACI06160

SEQ ID NO: 2409 - protein, 566 aa, synthetic construct
  REGION 1..566: note = hemagglutinin__InfluenzaA__ACI06161
MKTIIALSYIFCLALGQDLPGNDNSTATLCLGHHAVPNGTLVKTITDDQIEVTNATELVQSSSTGKICNNPHRILDGIDCTLIDALLGDPHCDVFQNETWDLFVERSKAFSNCYPYDVPDYASLRSLVASSGTLEFITEGFTWTGVTQNGGSNACKRGPGSGFFSRLNWLTKSGSTYPVLNVTMPNNDNFDKLYIWGVHHPSTNQEQTSLYVQASGRVTVSTRRSQQTIIPNIESRPWVRGLSSRISIYWTIVKPGDVLVINSNGNLIAPRGYFKMRTGKSSIMRSDAPIDTCISECITPNGSIPNDKPFQNVNKITYGACPKYVKQNTLKLATGMRNVPEKQTRGLFGAIAGFIENGWEGMIDGWYGFRHQNSEGTGQAADLKSTQAAIDQINGKLNRVIEKTNEKFHQIEKEFSEVEGRIQDLEKYVEDTKIDLWSYNAELLVALENQHTIDLTDSEMNKLFEKTRRQLRENAEDMGNGCFKIYHKCDNACIESIRKGTYDHDVYRDEALNNRFQIKGVELKSGYKDWILWISFAISCFLLCVVLLGFIMWACQRGNIRCNICI

SEQ ID NO: 2410 - protein, 566 aa, synthetic construct
  REGION 1..566: note = hemagglutinin__InfluenzaA__ACI06162
MKTIIALSYIFCLALGQDLPGNDNSTATLCLGHHAVPNGTLVKTITDDQIEVTNATELVQSSSTGKICNNPHRILDGIDCTLIDALLGDPHCDVFQNETWDLFVERSKAFSNCYPYDVPDYASLRSLVASSGTLEFITEGFTWTGVTQNGGSNACKRGPGSGFFSRLNWLTKSGSTYPVLNVTMPNNDNFDKLYIWGVHHPSTNQEQTSLYVQASGRVTVSTRRSQQTIIPNIESRPWVRGLSSRISIYWTIVNPGDVLVINSNGNLIAPRGYFKMRTGKSSIMRSDAPIDTCISECITPNGSIPNDKPFQNVNKITYGACPKYVKQNTLKLATGMRNVPEKQTRGLFGAIAGFIENGWEGMIDGWYGFRHQNSEGTGQAADLKSTQAAIDQINGKLNRVIEKTNEKFHQIEKEFSEVEGRIQDLEKYVEDTKIDLWSYNAELLVALENQHTIDLTDSEMNKLFEKTRRQLRENAEDMGNGCFKIYHKCDNACIESIRNGTYDHDVYRDEALNNRFQIKGVELKSGYKDWILWISFAISCFLLCVVLLGFIMWACQRGNIRCNICI

SEQ ID NO: 2411 - protein, 566 aa, synthetic construct
  REGION 1..566: note = hemagglutinin__InfluenzaA__ACI06163
MKTIIALSYIFCLALGQDLPGNDNSTATLCLGHHAVPNGTLVKTITDDQIEVTNATELVQSSSTGKICNNPHRILDGIDCTLIDALLGDPHCDVFQNETWDLFVERSKAFSNCYPYDVPDYASLRSLVASSGTLEFITEGFTWTGVTQNGGSNACKRGPGSGFFSRLNWLTKSGSTYPVLNVTMPNNDNFDKLYIWGVHHPSTNQEQTSLYVQASGRVTVSTRRSQQTIIPNIGSRPWVRGLSSRISIYWTIVKPGDVLVINSNGNLIAPRGYFKMRTGKSSIMRSDAPIDTCISECITPNGSIPNDKPFQNVNKITYGACPKYVKQNTLKLATGMRNVPEKQTRGLFGAIAGFIENGWEGMIDGWYGFRHQNSEGTGQAADLKSTQAAIDQINGKLNRVIEKTNEKFHQIEKEFSEVEGRIQDLEKYVEDTKIDLWSYNAELLVALENQHTIDLTDSEMNKLFEKTRRQLRENAEDMGNGCFKIYHKCDNACIESIRKGTYDHDVYRDEALNNRFQIKGVELKSGYKDWILWISFAISCFLLCVVLLGFIMWACQRGNIRCNICI

SEQ ID NO: 2412 - protein, 566 aa, synthetic construct
  REGION 1..566: note = hemagglutinin__InfluenzaA__ACI06164
MKTIIALSYIFCLALGQDLPGNDNSTATLCLGHHAVPNGTLVKTITDDQIEVTNATELVQSSSTGKICNNPHRILDGIDCTLIDALLGDPHCDVFQNETWDLFVERSKAFSNCYPYDVPDYASLRSLVASSGTLEFITEGFTWTGVTQNGGSNACKRGPGSGFFSRLNWLTKSGSTYPVLNVTMPNNDNFDKLYIWGVHHPSTNQEQTSLYVQASGRVTVSTRRSQQTIIPNIGSRPWVRGLSSRINIYWTIVKPGDVLVINSNGNLIAPRGYFKMRNGKSSIMRSDAPIDTCISECITPNGSIPNDKPFQNVNKITYGACPKYVKQNTLKLATGMRNVPEKQTRGLFGAIAGFIENGWEGMIDGWYGFRHQNSEGTGQAADLKSTQAAIDQINGKLNRVIEKTNEKFHQIEKEFSEVEGRIQDLEKYVEDTKIDLWSYNAELLVALENQHTIDLTDSEMNKLFEKTRRQLRENAEDMGNGCFKIYHKCDNACIESIRNGTYDHDVYRDEALNNRFQIKGVELKSGYKDWILWISFAISCFLLCVVLLGFIMWACQRGNIRCNICI

SEQ ID NO: 2413 - protein, 566 aa, synthetic construct
  REGION 1..566: note = hemagglutinin__InfluenzaA__ACI06165
MKTIIALSYIFCLALGQDLPGNDNSTATLCLGHHAVPNGTLVKTITDDQIEVTNATELVQSSSTGKICNNPHRILDGIDCTLIDALLGDPHCDVFQNETWDLFVERSKAFSNCYPYDVPDYASLRSLVASSGTLEFITEGFTWTGVTQNGGSNACKRGPGSGFFSRLNWLTKSGSTYPVLNVTMPNNDNFDKLYIWGVHHPSTNQEQTSLYVQASGRVTVSTRRSQQTIIPNIGSRPWVRGLSSRISIYWTIVKPGDVLVINSNGNLIAPRGYFKMRNGKSSIMRSDAPIDTCISECITPNGSIPNDKPFQNVNKITYGACPKYVKQNTLKLATGMRNVPEKQTRGLFGAIAGFIENGWEGMIDGWYGFRHQNSEGTGQAADLKSTQAAIDQINGKLNRVIEKTNEKFHQIEKEFSEVEGRIQDLEKYVEDTKIDLWSYNAELLVALENQHTIDLTDSEMNKLFEKTRRQLRENAEDMGNGCFKIYHKCDNACIESIRNGTYDHDVYRDEALNNRFQIKGVELKSGYKDWILWISFAISCFLLCVVLLGFIMWACQRGNIRCNICI

SEQ ID NO: 2414 - protein, 566 aa, synthetic construct
  REGION 1..566: note = hemagglutinin__InfluenzaA__ACI06166
MKTIIALSYIFCLALGQDLPGNDNSTATLCLGHHAVPNGTLVKTITDDQIEVTNATELVQSSSTGKICNNPHRILDGIDCTLIDALLGDPHCDVFQNETWDLFVERSKAFSNCYPYDVPDYASLRSLVASSGTLEFITEGFTWTGVTQNGGSNACKRGPGSGFFSRLNWLTKSGSTYPVLNVTMPNNDNFDKLYIWGVHHPSTNQEQTSLYVQASGRVTVSTRRSQQTIIPNIGSRPWIRGLSSRINIYWTIVKPGDVLVINSNGNLIAPRGYFKMRNGKSSIMRSDAPIDTCISECITPNGSIPNDKPFQNVNKITYGACPKYVKQNTLKLATGMRNVPEKQTRGLFGAIAGFIENGWEGMIDGWYGFRHQNSEGTGQAADLKSTQAAIDQINGKLNRVIEKTNEKFHQIEKEFSEVEGRIQDLEKYVEDTKIDLWSYNAELLVALENQHTIDLTDSEMNKLFEKTRRQLRENAEDMGNGCFKIYHKCDNACIESIRNGTYDHDVYRDEALNNRFQIKGVELKSGYKDWILWISFAISCFLLCVVLLGFIMWACQRGNIRCNICI

SEQ ID NO: 2415 - protein, 566 aa, synthetic construct; identical to SEQ ID NO: 2399
  REGION 1..566: note = hemagglutinin__InfluenzaA__ACI06167

SEQ ID NO: 2416 - protein, 566 aa, synthetic construct
  REGION 1..566: note = hemagglutinin__InfluenzaA__ACI06168
MKTIIALSYIFCLALGQDLPGNDNSTATLCLGHHAVPNGTLVKTITDDQIEVTNATELVQSSSTGKICNNPHRILDGIDCTLIDALLGDPHCDVFQNETWDLFVERSKAFSNCYPYDVPDYASLRSLVASSGTLEFITEGFTWTGVTQNGGSNACKRGPGSGFFSRLNWLTKSGSTYPVLNVTMPNNDNFDKLYIWGVHHPSTNQEQTSLYVQASGRVTVSTRRSQQTIIPNIGSRPWVRGLSSRISIYWTIVKPGDVLVINSNGNLIAPRGYFKMRTGKSSIMRSDAPIDTCISECITPNGSIPNDKPFQNVNKITYGACPKYVKQNTLKLATGMRNVPEKQTRGLFGAIAGFIENGWEGMIDGWYGFRHQNSEGTGQAADLKSTQAAIDQINGKLNRVIEKTNEKFHQIEKEFSEVEGRIQDLEKYVEDTKIDLWSYNAELLVALENQHTIDLTDSEMNKLFEKTRKQLRENAEDMGNGCFKIYHKCDNACIESIRNGTYDHDVYRDEALNNRFQIKGVELKSGYKDWILWISFAISCFLLCVVLLGFIMWACQRGNIRCNICI

SEQ ID NO: 2417 - protein, 566 aa, synthetic construct; identical to SEQ ID NO: 2318
  REGION 1..566: note = hemagglutinin__InfluenzaA__ACI06169

SEQ ID NO: 2418 - protein, 566 aa, synthetic construct; identical to SEQ ID NO: 2335
  REGION 1..566: note = hemagglutinin__InfluenzaA__ACI06171

SEQ ID NO: 2419 - protein, 566 aa, synthetic construct; identical to SEQ ID NO: 2335
  REGION 1..566: note = hemagglutinin__InfluenzaA__ACI06172

SEQ ID NO: 2420 - protein, 566 aa, synthetic construct
  REGION 1..566: note = hemagglutinin__InfluenzaA__ACI06173
MKTIIALSYIFCLALGQDLPGNDNSTATLCLGHHAVPNGTLVKTITDDQIEVTNATELVQSSSTGKICNNPHRILDGIDCTLIDALLGDPHCDVFQNETWDLFVERSKAFSNCYPYDVPDYASLRSLVASSGTLEFITEGFTWTGVTQNGGSNACKRGPGSGFFSRLNWLTKSGSTYPVLNVTMPNNDNFDKLYIWGVHHPSTNQEQTSLYVQASGRVTVSTRRSQQTIIPNIGSRPWVRGLSSRISIYWTIVKPGDVLEINSNGNLIAPRGYFKMRTGKSSIMRSDAPIDTCISECITPNGSIPNDKPFQNVNKITYGACPKYVKQNTLKLATGMRNVPEKQTRGLFGAIAGFIENGWEGMIDGWYGFRHQNSEGTGQAADLKSTQAAIDQINGKLNRVIEKTNEKFHQIEKEFSEVEGRIQDLEKYVEDTKIDLWSYNAELLVALENQHTIDLTDSEMNKLFEKTRRQLRENAEDMGNGCFKIYHKCDNACIESIRNGTYDHDVYRDEALNNRFQIKGVELKSGYKDWILWISFAISCFLLCVVLLGFIMWACQRGNIRCNICI

SEQ ID NO: 2421 - protein, 566 aa, synthetic construct; identical to SEQ ID NO: 2335
  REGION 1..566: note = hemagglutinin__InfluenzaA__ACI06174

SEQ ID NO: 2422 - protein, 566 aa, synthetic construct; identical to SEQ ID NO: 2336
  REGION 1..566: note = hemagglutinin__InfluenzaA__ACI06175

SEQ ID NO: 2423 - protein, 566 aa, synthetic construct; identical to SEQ ID NO: 2336
  REGION 1..566: note = hemagglutinin__InfluenzaA__ACI06176

SEQ ID NO: 2424 - protein, 566 aa, synthetic construct; identical to SEQ ID NO: 2336
  REGION 1..566: note = hemagglutinin__InfluenzaA__ACI06177

SEQ ID NO: 2425 - protein, 562 aa, synthetic construct
  REGION 1..562: note = hemagglutinin__InfluenzaA__ACI25724
MAIIYLILLFATVRGDQICIGYHANNSTEKVDTILERNVTVTHAKDILEKTHNGKLCKLNGIPPLELGDCSIAGWLLGNPECDRLLRVPEWSYIMERENPRYSLCYPGSLNDYEELKHLLSSVKHFEKVRILPKDRWTQHTTTGGSKACAVSGKPSFFRNMVWLTKKGPNYPVAKGSYNNTSGEQMLIIWGVHHPKDEAEQRALYQEVGTYVSASTSTLNKRSIPEIAARPEVNGLGSRMEFSWTLLDVWDTINFESTGNLVAPEYGFKISKRGSSGIMKTEGTLGNCETKCQTPLGAINTTLPFHNVHPLTIGECPKYVKSEKLVLATGLRNVPQIESRGLFGAIAGFIEGGWQGMVDGWYGYHHSNDQGSGYAADKESTQKAFDGITNKVNSVIEKMNTQFEAVGKEFNNLEKRLENLNKKMEDGFLDVWTYNAELLVLMENERTLDFHDSNVKNLYEKVRMQLRDNVKELGNGCFEFYHKCDDECMNSVKNGTYDYPKYEEESKLKRNEIKGVKLSSMGVYQILAIYATVAGSLSLAIMVAGISFWMCSNGSLQCRICI

SEQ ID NO: 2426 - protein, 566 aa, synthetic construct
  REGION 1..566: note = hemagglutinin__InfluenzaA__ACI25746
MKTIIALSYIFCLALGQYLPGNDNSTATLCLGHHAVPNGTLVKTITDDQIEVTNATELVQSSSTGKICNNPHRILDGIDCTLIDALLGDPHCDVFQNETWDLFVERSKAFSNCYPYDVPDYASLRSLVASSGTLEFITEGFTWTGVTQNGGSNACKRGPGSGFFSRLNWLTKSGSTYPVLNVTMPNNDNFDKLYIWGVHHPSTNQEQTSLYVQASGRVTVSTRRSQQTIIPNIGSRPWVRGLSSRISIYWTIVKPGDVLVIDSNGNLIAPRGYFKMRTGKSSIMRSDAPIDTCISECITPNGSIPNDKPFQNVNKITYGACPKYVKQNTLKLATGMRNVPEKQTRGLFGAIAGFIENGWEGMIDGWYGFRHQNSEGTGQAADLKSTQAAIDQINGKLNRVIEKTNEKFHQIEKEFSEVEGRIQDLEKYVEDTKIDLWSYNAELLVALENQHTIDLTDSEMNKLFEKTRRQLRENAEDMGNGCFKIYHKCDNACIESIRNGTYDHDVYRDEALNNRFQIKGVELKSGYKDWILWISFAISCFLLCVVLLGFIMWACQRGNIRCNICI

SEQ ID NO: 2427 - protein, 566 aa, synthetic construct
  REGION 1..566: note = hemagglutinin__InfluenzaA__ACI25757
MKTIIALSYIFCLALGQDLPGNDNSTATLCLGHHAVPNGTLVKTITDDQIEVTNATELVQSSSTGKICNNPHRILDGIDCTLIDALLGDPHCDVFQNETWDLFVERSKAFSNCYPYDVPDYASLRSLVASSGTLEFITEGFTWTGVTQNGGSNACKRGPGSGFFSRLNWLTKSGSTYLVLNVTMPNNDNFDKLYIWGVHHPSTNQEQTSLYVQASGRVTVSTRRSQQTIIPNIGSRPWVRGLSSRISIYWTIVKPGDVLVINSNGNLIAPRGYFKMRTGKSSIMRSDAPIDTCISECITPNGSIPNDKPFQNVNKITYGACPKYVKQNTLKLATGMRNVPEKQTRGLFGAIAGFIENGWEGMIDGWYGFRHQNSEGTGQAADLKSTQAAIDQINGKLNRVIEKTNEKFHQIEKEFSEVEGRIQDLEKYVEDTKIDLWSYNAELLVALENQHTIDLTDSEMNKLFEKTRRQLRENAEDMGNGCFKIYHKCDNACIESIRNGTYNHDVYRDEALNNRFQIKGVELKSGYKDWILWISFAISCFLLCVVLLGFIMWACQRGNIRCNICI

SEQ ID NO: 2428 - protein, 566 aa, synthetic construct; identical to SEQ ID NO: 2316
  REGION 1..566: note = hemagglutinin__InfluenzaA__ACI25768

SEQ ID NO: 2429 - protein, 566 aa, synthetic construct
  REGION 1..566: note = hemagglutinin__InfluenzaA__ACI25779
MKTIIALSYIFCLALGQDLPGNDNSTATLCLGHHAVPNGTLVKTITDDQIEVTNATELVQSSSTGKICNNPHRILDGIDCTLIDALLGDPHCDVFQNETWDLFVERSKAFSNCYPYDVPDYASLRSLVASSGTLEFITEGFTWTGVTQNGGSNACKRGPGSGFFSRLNWLTKSGSTYPVLNVTMPNNDNFDKLYIWGVHHPSTNQEQTSLYVQASGRVTVSTRRSQQTIIPNIWSRPWVRGLSSRISIYWTIVKPGDVLVINSNGNLIAPRGYFKMRTGKSSIMRSDAPIDTCISECITPNGSIPNDKPFQNVNKITYGACPKYVKQNTLKLATGMRNVPEKQTRGLFGAIAGFIENGWEGMIDGWYGFRHQNSEGTGQAADLKSTQAAIDQINGKLNRVIEKTNEKFHQIEKEFSEVEGRIQDLEKYVEDTKIDLWSYNAELLVALENQHTIDLTDSEMNKLFEKTRRQLRENAEDMGNGCFKIYHKCDNACIESIRNGTYDHDVYRDEALNNRFQIKGVELKSGYKDWILWISFAISCFLLCVVLLGFIMWACQRGNIRCNICI

SEQ ID NO: 2430 - protein, 566 aa, synthetic construct
  REGION 1..566: note = hemagglutinin__InfluenzaA__ACI25790
MKTIIALSYIFCLALGQDLPGNDNSTATLCLGHHAVPNGTLVKTITDDQIEVTNATELVQSSSTGKICNNPHRILDGIDCTLIDALLGDPHCDVFQNETWDLFVERSKAFSNCYPYDVPDYASLRSLVASSGTLEFITEGFTWTGVTQNGGSNACKRGPGSGFFSRLNWLTKSGSTYPVLNVTMPNNDNFDKLYIWGVHHPSTNQEQTSLYVQASGRVTVSTRRSQQTIIPNIWSRPWVRGLSSRISIYWTIVKPGDVLVINSNGNLIAPRGYFKMRTGKSSIMRSDAPIDTCISECITPNGSIPNDKPFQNVNKITYGACPKYVKQNTLKLATGMRNVPEKQTRGLFGAIAGFIENGWEGMIDGWYGFRHQNSEGTGQAADLKSTQAAIDQINGKLNRVIEKTNEKFHQIEKEFSEVEGRIQDLEKYVEDTKIDLWSYNAELLVALENQHTIDLTDSEMNKLFEKTRRQLRENAEDMGNGCFKIYHKCDNACIESIRSGTYDHDVYRDEALNNRFQIKGVELKSGYKDWILWISFAISCFLLCVVLLGFIMWACQRGNIRCNICI

SEQ ID NO: 2431 - protein, 566 aa, synthetic construct
  REGION 1..566: note = hemagglutinin__InfluenzaA__ACI25801
MKTIIALSYIFCLALGQDLPGNDNSTATLCLGHHAVPNGTLVKTITDDQIEVTNATELVQSSSTGKICNNPHRILDGINCTLIDALLGDPHCDVFQNETWDLFVERSKAFSNCYPYDVPDYASLRSLVASSGTLEFITEDFTWTGVTQNGGSNACKRGPGSGFFSRLNWLTKSGSTYPVLDVTMPNNDNFDKLYIWGVHHPSTNQEQTSLYVQASGRVTVSTRRSQQTIIPNIGSRPWVRGLSSRISIYWTIVKPGDVLVINSNGNLIAPRGYFKMRTGKSSIMRSDAPIDTCISECITPNGSIPNDKPFQNVNKITYGACPKYVKQNTLKLATGMRNVPEKQTRGLFGAIAGFIENGWEGMIDGWYGFRHQNSEGTGQAADLKSTQAAIDQINGKLNRVIEKTNEKFHQIEKEFSEVEGRIQDLEKYVEDTKIDLWSYNAELLVALENQHTIDLTDSEMNKLFEKTRRQLRENAEDMGNGCFKIYHKCDNACIESIRNGTYDHDVYRDEALNNRFQIKGVELKSGYKDWILWISFAISCFLLCVVLLGFIMWACQRGNIRCNICI

SEQ ID NO: 2432 - protein, 562 aa, synthetic construct; identical to SEQ ID NO: 2350
  REGION 1..562: note = hemagglutinin__InfluenzaA__ACI26274

SEQ ID NO: 2433 - protein, 565 aa, synthetic construct
  REGION 1..565: note = hemagglutinin__InfluenzaA__ACI26307
MKTIIALSYILCLVFTQKLPGNDNSTATLCLGHHAVPNGTIVKTITNDQIEVTNATELVQSSSTGEICDSPHQILDGENCTLIDALLGDPQCDGFQNKKWDLFVERSKAYSNCYPYDVPDYASLRSLVASSGTLEFNNESFNWTGVTQNGTSSACIRRSNNSFFSRLNWLTHLKFKYPALNVTMPNNEKFDKLYIWGVHHPVTDNDQIFLYAQSGRITVSTKRSQQTVIPNIGSRPRVRNSPSRISIYWTIVKPGDILLINSTGNLIAPRGYFKIRSGKSSIMRSDAPIGKCNSECITPNGSIPNDKPFQNVNRITYGACPRYVKQNTLKLATGMRNVPEKQTRGIFGAIAGFIENGWEGMVDGWYGFRHQNSEGIGQAADLKSTQAAIDQINGKLNRLIGKTNEKFHQIEKEFSEVEGRIQDLEKYVEDTKIDLWSYNAELLVALENQHTIDLTDSEMNKLFEKTKKQLRENAEDMGNGCFKIYHKCDNACIGSIRNGTYDHDVYRDEALNNRFQIKGVELKSGYKDWILWISFAISCFLLCVALLGFIMWACQKGNIRCNICI

SEQ ID NO: 2434 - protein, 566 aa, synthetic construct
  REGION 1..566: note = hemagglutinin__InfluenzaA__ACI26362
MKTIIALSYILCLVFAQKLPGNDNSTATLCLGHHAVPNGTIVKTITNDQIEVTNATELVQSSSTGEICDSPHQILDGENCTLIDALLGDPQCDGFQNKKWDLFVERSKAYSNCYPYDVPDYASLRSLVASSGTLEFNNESFNWTGVTQNGTSSACIRRSNNSFFSRLNWLTHLKFKYPALNVTMPNNEQFDKLYIWGVHHPGTDNDQIFLYAQASGRITVSTKRSQQTVIPNIGSRPRVRNIPSRISIYWTIVKPGDILLINSTGNLIAPRGYFKIRSGKSSIMRSDAPIGKCNSECITPNGSIPNDKPFQNVNRITYGACPRYVKQNTLKLATGMRNVPEKQTRGIFGAIAGFIENGWEGMVDGWYGFRHQNSEGRGQAADLKSTQAAIDQINGKLNRLIGKTNEKFHQIEKEFSEVEGRIQDLEKYVEDTKIDLWSYNAELLVALENQHTIDLTDSEMNKLFEKTKKQLRENAEDMGNGCFKIYHKCDNACIGSIRNGTYDHDVYRDEALNNRFQIKGVELKSGYKDWILWISFAISCFLLCVALLGFIMWACQKGNIRCNICI

SEQ ID NO: 2435 - protein, 566 aa, synthetic construct
  REGION 1..566: note = hemagglutinin__InfluenzaA__ACI26373
MKTIIALSYILCLVFAQKLPGNDNSTATLCLGHHAVPNGTIVKTITNDQIEVTNATELVQSSSTGEICDSPHQILDGENCTLIDALLGDPQCDGFQNKKWDLFVERSKAYSNCYPYDVPDYASLRSLVASSGTLEFNNESFNWAGVTQNGTSSACIRKSNNSFFSRLNWLTHLKFKYPALNVTMPNNEQFDKLYIWGVHHPGTDNDQIFLYAQASGRITVSTKRSQQTVIPNIGSRPRVRNIPSRISIYWTIVKPGDILLINSTGNLIAPRGYFKIRSGKSSIMRSDAPIGKCNSECITPNGSIPNDKPFQNVNRITYGACPRYVKQNTLKLATGMRNVPEKQTRGIFGAIAGFIENGWEGMVDGWYGFRHQNSEGRGQAADLKSTQAAIDQINGKLNRLIGKTNEKFHQIEKEFSEVEGRIQDLEKYVEDTKIDLWSYNAELLVALENQHTIDLTDSEMNKLFEKTKKQLRENAEDMGNGCFKIYHKCDNACIGSIRNGTYDHDVYRDEALNNRFQIKGVELKSGYKDWILWISFAISCFLLCVALLGFIMWACQKGNIRCNICI

SEQ ID NO: 2436 - protein, 566 aa, synthetic construct; identical to SEQ ID NO: 2301
  REGION 1..566: note = hemagglutinin__InfluenzaA__ACI26395

SEQ ID NO: 2437 - protein, 566 aa, synthetic construct
  REGION 1..566: note = hemagglutinin__InfluenzaA__ACI26406
MKTIIALSYILCLVFAQKLPGNDNSTATLCLGHHAVPNGTIVKTITNDQIEVTNATELVQSSSTGEICDSPHQILDGENCTLIDALLGDPQCDGFQNKKWDLFVERSKAYSNCYPYDVPDYASLRSLVASSGTLEFNNESFNWTGVTQNGTSSACIRRSNNSFFSRLNWLTHLKFKHPALNVTMPNNEKFDKLYIWGVHHPGTDNDQIFLYAQASGRITVSTKRSQQTVIPNIGSRPRVRNIPSRISIYWTIVKPGDILLINSTGNLIAPRGYFKIRSGKSSIMRSDAPIGKCNSECITPNGSIPNDKPFQNVNRITYGACPRYVKQNTLKLATGMRNVPEKQTRGIFGAIAGFIENGWEGMVDGWYGFRHQNSEGIGQAADLKSTQAAIDQINGKLNRLIGKTNEKFHQIEKEFSEVEGRIQDLEKYVEDTKIDLWSYNAELLVALENQHTIDLTDSEMNKLFEKTKKQLRENAEDMGNGCFKIYHKCDNACIGSIRNGTYDHDVYRDEALNNRFQIKGVELKSGYKDWILWISFAISCFLLCVALLGFIMWACQKGNIRCNICI

SEQ ID NO: 2438 - protein, 566 aa, synthetic construct; identical to SEQ ID NO: 1928
  REGION 1..566: note = hemagglutinin__InfluenzaA__ACI26417

SEQ ID NO: 2439 - protein, 566 aa, synthetic construct
  REGION 1..566: note = hemagglutinin__InfluenzaA__ACI26428
MKTIIALSYILCLVFAQKLPGNDNSTATLCLGHHAVPNGTIVKTITNDQIEVTNATELVQISSTGGICDSPHQILDGENCTLIDALLGDPQCDGFQNKKWDLFVERSKAYSNCYPYDVPDYASLRSLVASSGTLEFNNESFNWTGVTQNGTSSSCKRRSNNSFFSRLNWLTHLKFKYPALNVTMPNNEKFDKLYIWGVHHPVTDNDQIRLYAQASGRITVSTKRSQQTVIPNIGYRPRVRDIPSRISIYWTIVKPGDILLINSTGNLIAPRGYFKIRSGKSSIMRSDAPIGKCNSECITPNGSIPNDKPFQNVNRITYGACPRYVKQNTLKLATGMRNVPEKQTRGIFGAIAGFIENGWEGMVDGWYGFRHQNSEGIGQAADLKSTQAAINQINGKLNRLIGKTNEKFHQIEKEFSEVEGRIQDLEKYVEDTKIDLWSYNAELLVALENQHTIDLTDSEMNKLFERTKKQLRENAEDMGNGCFKIYHKCDNACIGSIRNGTYDHDVYRDEALNNRFQIKGVELKSGYKDWILWISFAISCFLLCVVLLGFIMWACQKGNIRCNICI

SEQ ID NO: 2440 - protein, 565 aa, synthetic construct
  REGION 1..565: note = hemagglutinin__InfluenzaA__ACI26439
MKVKLLVLLCTFTATYADTICIGYHANNSTDTVDTVLEKNVTVTHSVNLLEDSHNGKLCLLKGIAPLQLGNCSVAGWILGNPECELLISKESWSYIVEKPNPENGTCYPGHFADYEELREQLSSVSSFERFEIFPKESSWPNHTVTGVSASCSHNGKSSFYKNLLWLTGKNGLYPNLSKSYANNKEKEVLVLWGVHHPPNIGNQRALYHTENAYVSVVSSHYSRKFTPEIAKRPKVRDQEGRINYYWTLLEPGDTIIFEANGNLIAPRYAFALSRGFGSGIINSNAPMDECDAKCQTPQGAINSSLPFQNVHPVTIGECPKYVRSAKLRMVTGLRNIPSIQSRGLFGAIAGFIEGGWTGMVDGWYGYHHQNEQGSGYAADQKSTQNAINGITNKVNSVIEKMNTQFTAVGKEFNKLERRMENLNKKVDDGFIDVWTYNAELLVLLENERTLDFHDSNVKNLYEKVKSQLKNNAKEIGNGCFEFYHKCNDECMESVKNGTYDYPKYSEESKLSREKIDGVKLESMGVYQILAIYSTVASSLVLLVSLGAISFWMCSNGSLQCRICI

SEQ ID NO: 2441 - protein, 565 aa, synthetic construct; identical to SEQ ID NO: 2440
  REGION 1..565: note = hemagglutinin__InfluenzaA__ACI26450

SEQ ID NO: 2442 - protein, 566 aa, synthetic construct
  REGION 1..566: note = hemagglutinin__InfluenzaA__ACI26461
MKTIIALSYILCLVFTQKLPGNDNSTATLCLGHHAVPNGTIVKTITNDQIEVTNATELVQSSSTGEICDSPHQILDGENCTLIDALLGDPQCDGFQNKKWDLFVERSKAYSNCYPYDVPDYASLRSLVASSGTLEFNNESFNWTGVTQNGTSSACIRRSNNSFFSRLNWLTHLKFKYPALNVTMPNNEKFDKLYIWGVHHPGTDNDQIFPYAQASGRITVSTKRSQQTVIPNIGSRPRVRNIPSRISIYWTIVKPGDILLINSTGNLIAPRGYFKIRSGKSSIMRSDAPIGKCNSECITPNGSIPNDKPFQNVNRITYGACPRYVKQNTLKLATGMRNVPEKQTRGIFGAIAGFIENGWEGMVDGWYGFRHQNSEGIGQAADLKSTQAAIDQINGKLNRLIGKTNEKFHQIEKEFSEVEGRIQDLEKYVEDTKIDLWSYNAELLVALENQHTIDLTDSEMNKLFEKTKKQLRENAEDMGNGCFKIYHKCDNACIGSIRNGTYDHNVYRDEALNNRFQIKGVELKSGYKDWILWISFAISCFLLCVALLGFIMWACQKGNIRCNICI

SEQ ID NO: 2443 - protein, 565 aa, synthetic construct
  REGION 1..565: note = hemagglutinin__InfluenzaA__ACI26472
MKTIIALSYILCLVFTQKLPGNDNSTATLCLGHHAVPNGTIVKTITNDQIEVTNATELVQSSSTGEICDSPHQILDGENCTLIDALLGDPQCDGFQNKKWDLFVERSKAYSNCYPYDVPDYASLRSLVASSGTLEFNNESFNWTGVTQNGTSSACIRRSNNSFFSRLNWLTHLKFKYPALNVTMPNNEKFDKLYIWGVHHPVTDNDQIFLYAQSGRITVSTKRSQQTVIPNIGYRPRVRNIPSRISIYWTIVKPGDILLINSTGNLIAPRGYFKIRSGKSSIMRSDAPIGKCNSECITPNGSIPNDKPFQNVNRITYGACPRYVKQNTLKLATGMRNVPEKQTRGIFGAIAGFIENGWEGMVDGWYGFRHQNSEGIGQAADLKSTQAAIDQINGKLNRLIGKTNEKFHQIEKEFSEVEGRIQDLEKYVEDTKIDLWSYNAELLVALENQHTIDLTDSEMNKLFEKTKKQLRENAEDMGNGCFKIYHKCDNACIGSIRNGTYDHDVYRDEALNNRFQIKGVELKSGYKDWILWISFAISCFLLCVALLGFIMWACQKGNIRCNICI

SEQ ID NO: 2444 - protein, 566 aa, synthetic construct; identical to SEQ ID NO: 2435
  REGION 1..566: note = hemagglutinin__InfluenzaA__ACI26483

SEQ ID NO: 2445 - protein, 566 aa, synthetic construct
  REGION 1..566: note = hemagglutinin__InfluenzaA__ACI26505
MKTIIALSYILCLVFAQKLPGNDNSTATLCLGHHAVPNGTIVKTITNDQIEVTNATELVQSSSTGEICDSPHQILDGENCTLIDALLGDPQCDGFQNKKWDLFVERSKAYSNCYPYDVPDYASLRSLVASSGTLEFNNESFNWAGVTQNGTSSACIRKSNNSFFSRLNWLTHLKFKYPALNVTMPNNEQFDKLYIWGVHHPGTDNDQIFLYAQASGRITVSTKRSQQTVIPNIGSRPRVRNIPSRISIYWTIVKPGDILLINSTGNLIAPRGYFKIRSGKSSIMRSDAPIGKCNSECITPNGSIPNDKPFQNVNRITYGACPRYVKQNTLKLATGMRNVPEKQTRGIFGAIAGFIENGWEGMVDGWYGFRHQNSEGRGQAADLKSTQAAIDQINGKLNRLIGKTNEKFHQIEKEFSEVEGRIQDLEKYVEDTKIDLWSYNAELLVALENQHTIDLTDSEMNKLFEKTKKQLRENAEDMGNGCFKIYHKCDNACIRSIRNGTYDHDVYRDEALNNRFQIKGVELKSGYKDWILWISFAISCFLLCVALLGFIMWACQKGNIRCNICI

SEQ ID NO: 2446 - protein, 566 aa, synthetic construct; identical to SEQ ID NO: 2434
  REGION 1..566: note = hemagglutinin__InfluenzaA__ACI26516

SEQ ID NO: 2447 - protein, 566 aa, synthetic construct; identical to SEQ ID NO: 2435
  REGION 1..566: note = hemagglutinin__InfluenzaA__ACI26527

SEQ ID NO: 2448 - protein, 566 aa, synthetic construct
  REGION 1..566: note = hemagglutinin__InfluenzaA__ACI26538
MKTIIALSYILCLVFAQKLPGNDNSTATLCLGHHAVPNGTIVKTITNDQIEVTNATELVQSSSTGEICDSPHQILDGENCTLIDALLGDPQCDGFQNKKWDLFVERSKAYSNCYPYDVPDYASLRSLVASSGTLEFNNESFNWTGVTQNGTSSACIRRSNNSFFSRLNWLTHLKFKYPALNVTMPNNEQFDKLYIWGVHHPGTDNDQIFLYAQASGRITVSTKRSQQTVIPNIGSRPRVRNIPSRISIYWTIVKPGDILLINSTGNLIAPRGYFKIRSGKSSIMRSDAPIGKCNSECITPNGSIPNDKPFQNVNRITYGACPRYVKQNTLKLATGMRNVPDKQTRGIFGAIAGFIENGWEGMVDGWYGFRHQNSEGRGQAADLKSTQAAIDQINGKLNRLIGKTNEKFHQIEKEFSEVEGRIQDLEKYVEDTKIDLWSYNAELLVALENQHTIDLTDSEMNKLFEKTKKQLRENAEDMGNGCFKIYHKCDNACIGSIRNGTYDHDVYRDEALNNRFQIKGVELKSGYKDWILWISFAISCFLLCVALLGFIMWACQKGNIRCNICI

SEQ ID NO: 2449 - protein, 566 aa, synthetic construct
  REGION 1..566: note = hemagglutinin__InfluenzaA__ACI26549
MKTIIALSYIFCLVFAQKLPGNDNSTATLCLGHHAVPNGTLVKTITNDQIEVTNATELVQSSSTGRICDSPHRILDGKNCTLIDALLGDPHCDGFQNEKWDLFVERSKAYSNCYPYDVPDYASLRSLVASSGTLEFINEDFNWTGVTQSGGSYSCKRGSVNSFFSRLNWLHESEYKYPALNVTMPNNGKFDKLYIWGVHHPSTDREQTKLYVRASGRVTVSTKRSQQTVIPNIGSRPWVRGLSSRISIYWTIVKPGDILLINSTGNLIAPRGYFKIRTGKSSIMRSDAPIGTCSSECITPNGSIPNDKPFQNVNKITYGACPRYVKQNTLKLATGMRNVPEKQTRGIFGAIAGFIENGWEGMVDGWYGFRHQNSEGTGQAADLKSTQAAIDQINGKLNRLIEKTNEKFHQIEKEFSEVEGRIQDLEEYVEDTKIDLWSYNAELLVALENQHTIDLTDSEMNKLFEKTRKQLRENAEDMGNGCFKIYHKCDNACIGSIRNGTYDHDVYRDEALNNRFQIKGVELKSGYKDWILWISFAISCFLLCVVLLGFIMWACQKGNIRCNICI

SEQ ID NO: 2450 - protein, 566 aa, synthetic construct
  REGION 1..566: note = hemagglutinin__InfluenzaA__ACI26560
MKTIIALSYIFCLVFAQKLPGNDNSTATLCLGHHAVPNGTLVKTITNDQIEVTNATELVQSSSTGRICDSPHRILDGKNCTLIDALLGDPHCDGFQNKEWDLFVERSKAYSNCYPYDVPDYASLRSLVASSGTLEFINEDFNWTGVAQSGGSYACKRGSVNSFFSRLNWLHESEYKYPALNVTMPNNGKFDKLYIWGVHHPITDREQTNLYVRASGRVTVSTKRSQQTVIPNIGSRPWVRGLSSRISIYWTIVKPGDILLINSTGNLIAPRGYFKIRTGKSSIMRSDAPIGTCSSECITPNGSIPNDKPFQNVNRITYGACPRYVKQNTLKLATGMRNVPEKQTRGIFGAIAGFIENGWEGMVDGWYGFRHQNSEGTGQAADLKSTQAAIDQINGKLNRLIEKTNEKFHQIEKEFSEVEGRIQDLEKYVEDTKIDLWSYNAELLVALENQHTIDLTDSEMNKLFEKTRKQLRENAEDMGNGCFKIYHKCDNACIGSIRNGTYDHDVYRDEALNNRFQIKGVELKSGYKDWILWISFAISCFLLCVVLLGFIMWACQKGNIRCNICI

SEQ ID NO: 2451 - protein, 566 aa, synthetic construct
  REGION 1..566: note = hemagglutinin__InfluenzaA__ACI26571
MKTIIALSYIFCLVFAQKLPGNDNSTATLCLGHHAVPNGTLVKTITNDQIEVTNATELVQSSSTGRICDSPHRILDGKNCTLIDALLGDPHCDGFQNKEWDLFVERSKAYSNCYPYDVPDYASLRSLVASSGTLEFINEDFNWTGVAQSGGSYACKRGSVNSFFSRLNWLHESEYKYPALNVTMPNNGKFDKLYIWGVHHPSTDREQTKLYVRASGRVTVSTKRSQQTVIPNIGSRPWVRGLSSRISIYWTIVKPGDILLINSTGNLIAPRGYFKIRTGKSSIMRSDAPIGTCSSECITPNGSIPNDKPFQNVNRITYGACPRYVKQNTLKLATGMRNVPEKQTRGIFGAIAGFIENGWEGMVDGWYGFRHQNSEGTGQAADLKSTQAAIDQINGKLNRLIEKTNEKFHQIEKEFSEVEGRIQDLEKYVEDTKIDLWSYNAELLVALENQHTIDLTDSEMNKLFEKTRKQLRENAEDMGNGCFKIYHKCDNACIGSIRNGTYNHDVYRDEALNNRFQIKGVELKSGYKDWILWISFAISCFLLCVVLLGFIMWACQKGNIRCNICI

SEQ ID NO: 2452 - protein, 566 aa, synthetic construct
  REGION 1..566: note = hemagglutinin__InfluenzaA__ACI26593
MKTIIALSYILCLVFAQKLPGNDNSTATLCLGHHAVPNGTLVKTITNDQIEVTNATELVQSSSTGRICDSPHRILDGKNCTLIDALLGDPHCDGFQNKEWDLFVERSKAYSNCYPYDVPDYASLRSLVASSGTLEFTNEDFNWTGVAQSGESYACKRGSVKSFFSRLNWLHKSDYKYPALNVTMPNNGKFDKLYIWGVHHPSTDREQTSLYVRASGRVTVSTKRSQQTVIPNIGSRPWVRGLSSRISIYWTIVKPGDILLINSTGNLIAPRGYFKIRTGKSSIMRSDAPIGTCSSECITPNGSIPNDKPFQNVNRITYGACPRYVKQNTLKLATGMRNVPEKQTRGIFGAIAGFIENGWEGMVDGWYGFRHQNSEGTGQAADLKSTQAAIDQINGKLNRLIEKTNEKFHQIEKEFSEVEGRIQDLEKYVEDTKIDLWSYNAELLVALENQHTIDLTDSEMNKLFEKTRKQLRENAEDMGNGCFKIYHKCDNACIGSIRNGTYDHDVYRDEALNNRFQIKGVELKSGYKDWILWISFAISCFLLCVVLLGFIMWACQKGNIRCNICI

SEQ ID NO: 2453 - protein, 565 aa, synthetic construct
  REGION 1..565: note = hemagglutinin__InfluenzaA__ACI32715
MKVKLLVLLCTFTATYADTICIGYHANNSTDTVDTVLEKNVTVTHSVNLLEDSHNGKLCLLKGIAPLQLGNCSVAGWILGNPECELLISKESWSYIVETPNPENGTCYPGYFADYEELREQLSSVSSFERFEIFPKESSWPNHTVTGVSASCSHNGKSSFYRNLLWLTGKNGLYPNLSKSYANNKEKEVLVLWGVHHPPNIGDQRALYHTENAYVSVVSSHYSRRFTPEIAKRPKVRDQEGRINYYWTLLEPGDTIIFEANGNLIAPRFAFALSRGFGSGIITSNAPMDECDAKCQTPQGAINSSLPFQNVHPVTIGECPKYVRSAKLRMATGLRNIPSIQSRGLFGAIAGFIEGGWTGMVDGWYGYHHQNEQGSGYAADQKSTQNAINGITNKVNTVIEKMNTQFTAVGKEFSKLERRMENLNKKVDDGFLDIWTYNAELLVLLENERTLDFHDSNVKNLYEKVKSQLKNNAKEIGNGCFEFYHKCNDECMESVKNGTYDYPKYSEESKLNREKIDGVKLESMGVYQILAIYSTVASSLVLLVSLGAISFWMCSNGSLQCRICI

SEQ ID NO: 2454 - protein, 565 aa, synthetic construct
  REGION 1..565: note = hemagglutinin__InfluenzaA__ACI32716
MKVKLLVLLCTFTATYADTICIGYHANNSTDTVDTVLEKNVTVTHSVNLLEDSHNGKLCLLKGIAPLQLGNCSVAGWILGNPECELLISKESWSYIVETPNPENGTCYPGYFADYEELREQLSSVSSFERFEIFPKESSWPNHTVTGVSASCSHNGKSSFYRNLLWLTGKNGLYPNLSKSYANNKEKEVLVLWGVHHPPNIGDQRALYHTENAYVSVVSSHYSRRFTPEIAKRPKVRDQEGRINYYWTLLEPGDTIIFEANGNLIAPRFAFALSRGFGSGIITSNAPMDECDAKCQTPQGAINSSLPFQNVHPVTIGECPKYVRSAKLRMATGLRNIPSIQSRGLFGAIAGFIEGGWTGMVDGWYGYHHQNEQGSGYAADQKSTQNAINGITNKVNSVIEKMNTQFTAVGKEFSKLERRMENLNKKVDDGFLDIWTYNAELLVLLENERTLDFHDSNVKNLYEKVKSQLKNNAKEIGNGCFEFYHKCNDECMESVKNGTYDYPKYSEESKLNREKIDGVKLESMGVYQILAIYSTVASSLVLLVSLGAISFWMCSNGSLQCTICI

SEQ ID NO: 2455 - protein, 565 aa, synthetic construct
  REGION 1..565: note = hemagglutinin__InfluenzaA__ACI32717
MKVKLLVLLCTFTATYADTICIGYHANNSTDTVDTVLEKNVTVTHSVNLLEDSHNGKLCLLKGIAPLQLGNCSVAGWILGNPECELLISKESWSYIVETPNPENGTCYPGYFADYEELREQLSSVSSFERFEIFPKESSWPNHTVTGVSASCSHNGKSSFYRNLLWLTGKNGLYPNLSKSYANNKEKEVLVLWGVHHPPNIGDQRALYHTENAYVSVVSSHYSRRFTPEIAKRPKVRDQEGRINYYWTLLEPGDTIIFEANGNLIAPRFAFALSRGFGSGIITSNAPMDECDAKCQTPQGAMNSSLPFQNVHPVTIGECPKYVRSAKLRMATGLRNIPSIQSRGLFGAIAGFIEGGWTGMVDGWYGYHHQNEQGSGYAADQKSTQNAINGITNKVNSVIEKMNTQFTAVGKEFSKLERRMENLNKKVDDGFLDIWTYNAELLVLLENERTLDFHDSNVKNLYEKVKSQLKNNAKEIGNGCFEFYHKCNDECMESVKNGTYDYPKYSEESKLNREKIDGVKLESMGVYQILAIYSTVASSLVLLVSLGAINFWMCSNGSLQCKICI

SEQ ID NO: 2456 - protein, 565 aa, synthetic construct
  REGION 1..565: note = hemagglutinin__InfluenzaA__ACI32718
MKVKLLVLLCTFTATYADTICIGYHANNSTDTVDTVLEKNVTVTHSVNLLEDSHNGKLCLLKGIAPLQLGNCSVAGWILGNPECELLISKESWSYIVETPNPENGTCYPGYFADYEELREQLSSVSSFERFEIFPKESSWPNHTATGVSASCSHNGKSSFYRNLLWLTGKNGLYPNLSKSYANNKEKEVLVLWGVHHPPNIGDQRALYHTENAYVSVVSSHYSRRFTPEIAKRPKVRDQEGRINYYWTLLEPGDTIIFEANGNLIAPRFAFALSRGFGSGIITSNAPMDECDAKCQTPQGAINSSLPFQNVHPVTIGECPKYVRSAKLRMATGLRNIPSIQSRGLFGAIAGFIEGGWTGMVDGWYGYHHQNEQGSGYAADQKSTQNAINGITNKVNSVIEKMNTQFTAVGKEFSKLERRMENLNKKVDDGFLDIWTYNAELLVLLENERTLDFHDSNVKNLYEKVKSQLKNNAKEVGNGCFEFYHKCNDECMESVKNGTYDYPKYSEESKLNREKIDGVKLESMGVYQILAIYSTVASSLVLLVSLGAISFWMCSNGSLQCTICI

SEQ ID NO: 2457 - protein, 565 aa, synthetic construct; identical to SEQ ID NO: 2454
  REGION 1..565: note = hemagglutinin__InfluenzaA__ACI32719

SEQ ID NO: 2458 - protein, 565 aa, synthetic construct; identical to SEQ ID NO: 2454
  REGION 1..565: note = hemagglutinin__InfluenzaA__ACI32720

SEQ ID NO: 2459 - protein, 565 aa, synthetic construct
  REGION 1..565: note = hemagglutinin__InfluenzaA__ACI32721
MKVKLLVLLCTFTATYADTICIGYHANNSTDTVDTVLEKNVTVTHSVNLLEDSHNGKLCLLKGIAPLQLGNCSVAGWILGNPECELLISKESWSYIVETPNPENGTCYPGYFADYEELREQLSSVSSFERFEIFPKESSWPNHTVTGVSASCSHNGKSSFYRNLLWLTGKNGLYPNLSKSYANNKEKEVLVLWGVHHPPNIGDQRALYHTENAYVSVVSSHYSRRFTPEIAKRPKVRDQEGRISYYWTLLEPGDTIIFEANGNLIAPRFAFALSRGFGSGIITSNAPMDECDAKCQTPQGAINSSLPFQNVHPVTIGECPKYVRSAKLRMATGLRNIPSIQSRGLFGAIAGFIEGGWTGMVDGWYGYHHQNEQGSGYAADQKSTQNAINGITNKVNSVIEKMNTQFTAVGKEFSKLERRMENLNKKVDDGFLDIWTYNAELLVLLENERTLDFHDSNVKNLYEKVKSQLKNNAKEIGNGCFEFYHKCNDECMESVKNGTYDYPKYSEESKLNREKIDGVKLESMGVYQILAIYSTVASSLVLLVSLGAISFWMCSNGSLQCRICI

SEQ ID NO: 2460 - protein, 565 aa, synthetic construct; identical to SEQ ID NO: 2454
  REGION 1..565: note = hemagglutinin__InfluenzaA__ACI32722

SEQ ID NO: 2461 - protein, 565 aa, synthetic construct
  REGION 1..565: note = hemagglutinin__InfluenzaA__ACI32723
MKVKLLVLLCTFTATYADTICIGYHANNSTDTVDTVLEKNVTVTHSVNLLEDSHNGKLCLLKGIAPLQLGNCSVAGWILGNPECELLISKESWSYIVETPNPENGTCYPGYFADYEELREQLSSVSSFERFEIFPKESSWPNHTVTGVSASCSHNGKSSFYRNLLWLTGKNGLYPNLSKSYANNKEKEVLVLWGVHHPPNIGDQRALYHTENAYVSVVSSHYSRRFTPEIAKRPKVRDQEGRINYYWTLLEPGDTIIFEANGNLIAPRFAFALSRGFGSGIITSNAPMDECDAKCQTPQGAINSSLPFQNVHPVTIGECPKYVRSAKLRMATGLRNIPSIQSRGLFGAIAGFIEGGWTGMVDGWYGYHHQNEQGSGYAADQKSTQNAINGITNKVNSVIEKMNTQFTAVGKEFSKLERRMENLNKKVDDGFLDIWTYNAELLVLLENERTLDFHDSNVKNLYEKVKSQLKNNAKEIGNGCFEFYHKCNDECMESVKNGTYDYPKYSEESKLNREKIDGVKLESMGVYQILAIYSTVASSLVLLVSLGAISFWMCSNGSLQCRICF

SEQ ID NO: 2462 - protein, 565 aa, synthetic construct
  REGION 1..565: note = hemagglutinin__InfluenzaA__ACI32724
MKVKLLVLLCTFTATYADTICIGYHANNSTDTVDTVLEKNVTVTHSVNLLEDSHNGKLCLLKGIAPLQLGNCSVAGWILGNPECELLISKESWSYIVETPNPENGTCYPGYFADYEELREQLSSVSSFERFEIFPKESSWPNHTVTGVSASCSHNGKSSFYRNLLWLTGKNGLYPNLSKSYANNKEKEVLVLWGVHHPPNIGDQRALYHTENAYVSVVSSHYSRRFTPEIAKRPKVRDQEGRINYYWTLLKPGDTIIFEANGNLIAPRFAFALSRGFGSGIITSNAPMDECDAKCQTPQGAINSSLPFQNVHPVTIGECPKYVRSAKLRMATGLRNIPSIQSRGLFGAIAGFIEGGWTGMVDGWYGYHHQNEQGSGYAADQKSTQNAINGITNKVNSVIEKMNTQFTAVGKEFSKLERRMENLNKKVDDGFLDIWTYNAELLVLLENERTLDFHDSNVKNLYEKVKSQLKNNAKEIGNGCFEFYHKCNDECMESVKNGTYDYPKYSEESKLNREKIDGVKLESMGVYQILAIYSTVASSLVLLVSLGAISFWMCSNGSLQCKICI

SEQ ID NO: 2463 - protein, 565 aa, synthetic construct; identical to SEQ ID NO: 1385
  REGION 1..565: note = hemagglutinin__InfluenzaA__ACI32725

SEQ ID NO: 2464 - protein, 565 aa, synthetic construct
  REGION 1..565: note = hemagglutinin__InfluenzaA__ACI32726
MKVKLLVLLCTFTATYADTICIGYHANNSTDTVDTVLEKNVTVTHSVNLLEDSHNGKLCLLKGIAPLQLGNCSVAGWILGNPECELLISKESWSYIVETPNPENGTCYPGYFADYEELREQLSSVSSFERFEIFPKESSWPNHTVTGVSASCSHNGKSSFYRNLLWLTGKNGLYPNLSKSYANNKEKEVLVLWGVHHPPNIGDQRALYHTENAYVSVVSSHYSRRFTPEIAKRPKVRDQEGRINYYWTLLEPGDTIIFEANGNLIAPRFAFALSRGFGSGIITSNAPMDECDAKCQTPQGAINSSLPFQNVHPVTIGECPKYVRSAKLRMATGLRNIPSIQSRGLFGAIAGFIEGGWTGMVDGWYGYHHQNEQGSGYAADQKSTQNAINGITNKVNSVIEKMNTQFTAVGKEFSKLEKRMENLNKKVDDGFLDIWTYNAELLVLLENERTLDFHDSNVKNLYEKVKSQLKNNAKEIGNGCFEFYHKCNDECMESVKNGTYDYPKYSEESKLNREKIDGVKLESMGIYQILAIYSTVTSSLVLLVSLGAISFWMCSNGSLQCRICI

SEQ ID NO: 2465 - protein, 565 aa, synthetic construct
  REGION 1..565: note = hemagglutinin__InfluenzaA__ACI32727
MKVKLLVLLCTFTATYADTICIGYHANNSTDTVDTVLEKNVTVTHSVNLLEDSHNGKLCLLKGIAPLQLGNCSVAGWILGNPECELLISKESWSYIVETPNPENGTCYPGYFADYEELREQLSSISSFERFEIFPKESSWPNHTVTGVSASCSHNGKSSFYRNLLWLTGKNGLYPNLSKSYANNKEKEVLVLWGVHHPPNIGDQRALYHTENAYVSVVSSHYSRRFTPEIAKRPKVRDQEGRINYYWTLLEPGDTIIFEANGNLIAPRFAFALSRGFGSGIITSNAPMDECDAKCQTPQGAINSSLPFQNVHPVTIGECPKYVRSAKLRMATGLRNIPSIQSRGLFGAIAGFIEGGWTGMVDGWYGYHHQNEQGSGYAADQKSTQNAINGITNKVNSVIEKMNTQFTAVGKEFSKLERRMENLNKKVDDGFLDIWTYNAELLVLLENERTLDFHDSNVKNLYEKVKSQLKNNAKEIGNGCFEFYHKCNDECMESVKNGTYDYPKYSEESKLNREKIDGVKLESMGVYQILAIYSTVASSLVLLVTLGAISFWMCSNGSLQCTICI

SEQ ID NO: 2466 - protein, 565 aa, synthetic construct
  REGION 1..565: note = hemagglutinin__InfluenzaA__ACI32729
MKVKLLVLLCTFTATYADTICIGYHANNSTDTVDTVLEKNVTVTHSVNLLEDSHNGKLCLLKGIAPLQLGNCSVAGWILGNPECELLIPKESWSYIVETPNPENGTCYPGYFADYEELREQLSSVSSFERFEIFPKESSWPNHTVTGVSASCSHNGKSSFYRNLLWLTGKNGLYPNLSKSYANNKEKEVLVLWGVHHPPNIGDQRALYHTENAYVSVVSSHYSRRFTPEIAKRPKVRDQEGRINYYWTLLEPGDTIIFEANGNLIAPRFAFALSRGFGSGIITSNAPMDECDAKCQTPQGAINSSLPFQNVHPVTIGECPKYVRSAKLRMVTGLRNIPSIQSRGLFGAIAGFIEGGWTGMVDGWYGYHHQNEQGSGYAADQKSTQNAINGVTNKVNSVIEKMNTQFTAVGKEFNKLERRMENLNKKVDDGFLDIWTYNAELLVLLENERTLDFHDSNVKNLYEKVKSQLKNNAKEIGNGCFEFYHKCNDECMESVKNGTYDYPKYSEESKLNREKIDGVKLESMGVYQILAIYSTVASSLVLLVSLGAISFWMCSNGSLQCRICI

SEQ ID NO: 2467 - protein, 565 aa, synthetic construct; identical to SEQ ID NO: 2466
  REGION 1..565: note = hemagglutinin__InfluenzaA__ACI32730

SEQ ID NO: 2468 - protein, 565 aa, synthetic construct
  REGION 1..565: note = hemagglutinin__InfluenzaA__ACI32731
MKVKLLVLLCTFTATYADTICIGYHANNSTDTVDTVLEKNVTVTHSVNLLEDSHNGKLCLLKGIAPLQLGNCSVAGWILGNPECELLISKESWSYIVEKPNPENGTCYPGHFADYEELREQLSSVSSFERFEIFPKESSWPNHTVTGVSASCSHNGKSSFYKNLLWLTGKNGLYPNLSKSYANNKEKEVLVLWGVHHPPNIGDQKALYHTENAYVSVVSSHYSRKFNPEIAKRPKVRDQEGRINYYWTLLEPGDTIIFEANGNLIAPRYAFALSRGFGSGIINSNAPMDECDAKCQTPQGAINSSLPFQNVHPVTIGECPKYVRSAKLRMVTGLRNIPSIQSRGLFGAIAGFIEGGWTGMVDGWYGYHHQNEQGSGYAADQKSTQNAINGITNKVNSVIEKMNTQFTAVGKEFNKLERRMENLNKKVDDGFIDIWTYNAELLVLLENERTLDFHDSNVKNLYEKVKSQLKNNAKEIGNGCFEFYHKCNDECMESVKNGTYDYPKYSEESKLNREKIDGVKLESMGVYQILAIYSTVASSLVLLVSLGAISFWMCSNGSLQCKICI

SEQ ID NO: 2469 - protein, 565 aa, synthetic construct
  REGION 1..565: note = hemagglutinin__InfluenzaA__ACI32732
MKVKLLVLLCTFTATYADTICIGYHANNSTDTVDTVLEKNVTVTHSVNLLEDSHNGKLCLLKGIAPLQLGNCSVAGWILGNPECELLISKESWSYIVETPNPENGTCYPGYFADYEELREQLSSVSSFERFEIFPKESSWPNHTVTGVSASCSHNGKSSFYRNLLWLTGKNGLYPNLSKSYANNKEKEVLVLWGVHHPPNIGDQRALYHTENAYVSVVSSHYSRRFTPEIAKRPKVRDQEGRINYYWTLLEPGDTIIFEANGNLIAPRFAFALSRGFGSGIITSNAPMDECDAKCQTPQGAINSSLPFQNVHPVTIGECPKYVRSAKLRMVTGLRNIPSIQSRGLFGAIAGFIEGGWTGMVDGWYGYHHQNEQGSGYAADQKSTQNAINGITNKVNSVIEKMNTQFTAVGKEFNKLERRMENLNKKVDDGFLDIWTYNAELLVLLENERTLDFHDSNVKNLYEKVKSQLKNNAKEIGNGCFEFYHKCNDECMESVKNGTYDYPKYSEESKLNREKIDGVKLESMGVYQILAIYSTVASSLVLLVSLGAISFWMCSNGSLQCTICI

SEQ ID NO: 2470 - protein, 565 aa, synthetic construct
  REGION 1..565: note = hemagglutinin__InfluenzaA__ACI32733
MKVKLLVLLCTFTATYADTICIGYHANNSTDTVDTVLEKNVTVTHSVNLLEDSHNGKLCLLKGIAPLQLGNCSVAGWILGNPECELLISKESWSYIVEKPNPENGTCYPGHFADYEELREQLSSVSSFERFEIFPKESSWPNHTVTGVSASCSHNGKSSFYKNLLWLTGKNGLYPNLSKSYANNKEKEVLVLWGVHHPPNIGDQKALYHTENAYVSVVSSHYSRKFNSEIAKRPKVRDQEGRINYYWTLLEPGDTIIFEANGNLIAPRYAFALSRGFGSGIINSNAPMDECDAKCQTPQGAINSSLPFQNVHPVTIGECPKYVRSAKLRMVTGLRNIPSIQSRGLFGAIAGFIEGGWTGMVDGWYGYHHQNEQGSGYAADQKSTQNAINGITNKVNSVIEKMNTQFTAVGKEFNKLERRMENLNKKVDDGFIDIWTYNAELLVLLENERTLDFHDSNVKNLYEKVKSQLKNNAKEIGNGCFEFYHKCNDECMESVKNGTYDYPKYSEESKLNREKIDGVKLESMGVYQILAIYSTVASSLVLLVSLGAISFWMCSNGSLQCTICI

SEQ ID NO: 2471 - protein, 565 aa, synthetic construct
  REGION 1..565: note = hemagglutinin__InfluenzaA__ACI32734
MKVKLLVLLCTFTATYADTICIGYHANNSTDTVDTVLEKNVTVTHSVNLLEDSHNGKLCLLKGIAPLQLGNCSVAGWILGNPECELLISKESWSYIVETPNPENGTCYPGYFADYEELREQLSSVSSFERFEIFPKESSWPNHTVTGVSASCSHNGKSSFYRNLLWLTGKNGLYPNLSKSYANNKKKEVLVLWGVHHPPNIGDQKALYHTENAYVSVVSSHYSRRFTPEIAKRPKVRDQEGRINYYWTLLEPGDTIIFEANGNLIAPRFAFALSRGFGSGIITSNAPMDECDAKCQTPQGAINSSLPFQNVHPVTIGECPKYVRSAKLRMVTGLRNIPSIQSRGLFGAIAGFIEGGWTGMVDGWYGYHHQNEQGSGYAADQKSTQNAINGITNKVNSVIEKMNTQFTAVGKEFNKLERRMENLNKKVDDGFLDIWTYNAELLVLLENERTLDFHDSNVKNLYEKVKSQLKNNAKEIGNGCFEFYHKCNDECMESVKNGTYDYPKYSEESKLNREKIDGVKLESMGVYQILAIYSTVASSLVLLVSLGAISFWMCSNGSLQCTICI

SEQ ID NO: 2472 - protein, 565 aa, synthetic construct
  REGION 1..565: note = hemagglutinin__InfluenzaA__ACI32736
MKVKLLVLLCTFTATYADTICIGYHANNSTDTVDTVLEKNVTVTHSVNLLEDSHNGKLCLLKGIAPLQLGNCSVAGWILGNPECELLISRESWSYIVEKPNPENGTCYPGHFADYEELREQLSSVSSFERFEIFPKESSWPNHTATGVSASCSHNGKSSFYKNLLWLTGKNGLYPNLSKSYANNKEKEVLVLWGVHHPPNIGDQRALYHTENAYVSVVSSHYSRKFTPEIAKRPKVRDQEGRINYYWTLLEPGDTIIFEANGNLIAPRYAFALSRGFGSGIINSNAPMDECDAKCQTPQGAINSSLPFQNVHPVTIGECPKYVRSAKLRMVTGLRNIPSIQSRGLFGAIAGFIEGGWTGMVDGWYGYHHQNEQGSGYAADQKSTQNAINGITNKVNSVIEKMNTQFTAVGKEFNKLERRMENLNKKVDDGFIDIWTYNAELLVLLENERTLDFHDSNVRNLYEKVKSQLKNNAKEIGNGCFEFYHKCNDECMESVKNGTYDYPKYSEESKLNREKIDGVKLESMGVYQILAIYSTVASSLVLLVSLGAISFWMCSNGSLQCRICI

SEQ ID NO: 2473 - protein, 565 aa, synthetic construct
  REGION 1..565: note = hemagglutinin__InfluenzaA__ACI32737
MKVKLLVLLCTFTATYADTICIGYHANNSTDTVDTVLEKNVTVTHSVNLLENSHNGKLCLLKGIAPLQLGNCSVAGWILGNPECELLIPKESWSYIVEIPNPENGTCYPGYFADYEELREQLSSVSSFERFEIFPKESSWPNHTVTGVSASCSHNGKSSFYRNLLWLTGKNGLYPNLSKSYANNKEKEVLVLWGVHHPPNIGDQRALYHTENAYVSVVSSHYSRRFTPEIAKRPKVRDQEGRINYYWTLLEPGDTIIFEANGNLIAPRFAFALSRGLGSGIITSNAPMDECDAKCQTPQGAINSSLPFQNVHPVTIGECPKYVRSAKLRMVTGLRNIPSIQSRGLFGAIAGFIEGGWTGMVDGWYGYHHQNEQGSGYAADQKSTQNAINGITNKVNSVIEKMNTQFTAVGKEFNKLERRMENLNKKVDDGFLDIWTYNAELLVLLENERTLDFHDSNVKNLYEKVKSQLRNNAKEIGNGCFEFYHKCNDECMESVKNGTYDYPKYSEESKLNREKIDGVKLESMGVYQILAIYSTVASSLVLLVSLGAISFWMCSNGSLQCRICI

SEQ ID NO: 2474 - protein, 565 aa, synthetic construct
  REGION 1..565: note = hemagglutinin__InfluenzaA__ACI32739
MKVKLLILLCTFTATYADTICIGYHANNSTDTVDTVLEKNVTVTHSVNLLEDSHNGKLCLLKGIAPLQLGNCSVAGWILGNPECELLISKESWSYIVETPNPENGTCYPGYFADYEELREQLSSVSSFERFEIFPKESSWPNHTVTGVSASCSHNGKSSFYRNLLWLTGKNGLYPNLSKSYANNKEKEVLILWGVHHPPNIGNQRTLYHTENAYVSVVSSHYSRRFTPEITKRPKVRDQEGRINYYWTLLEPGDTIIFEANGNLIAPWYAFALSRGFGSGIITSNAPMDECDAKCQTPQGAINSSLPFQNVHPVTIGECPKYVRSAKLRMVTGLRNIPSIQSRGLFGAIAGFIEGGWTGMVDGWYGYHHQNEQGSGYAADQKSTQNAINGITNKVNSVIEKMNTQFTAVGKEFNKLERRMENLNKKVDDGFLDIWTYNAELLVLLENERTLDFHDSNVKNLYEKVKSQLKNNAKEIGNGCFEFYHKCNNECMESVKNGTYDYPKYSEESKLNREKIDGVKLESMGVYQILAIYSTVASSLVLLVSLGAISFWMCSNGSLQCKICI

SEQ ID NO: 2475 - protein, 565 aa, synthetic construct
  REGION 1..565: note = hemagglutinin__InfluenzaA__ACI32740
MKVKLLILLCTFTATYADTICIGYHANNSTDTVDTVLEKNVTVTHSVNLLEDSHNGKLCLLKGIAPLQLGNCSVAGWILGNPECELLISKESWSYIVETPNPENGACYPGYFADYEELREQLSSVSSFERFEIFPKESSWPKHTVTGVSASCSHNGKSSFYRNLLWLTGKNGLYPNLSKSYANNKEKEVLILWGVHHPPNIGDQRTLYHTENAYVSVVSSHYSRRFTPEITKRPKVRDQEGRINYYWTLLEPGDTIIFEANGNLIAPWYAFALSRGFGSGIITSNAPMDECDAKCQTPQGAINSSLPFQNVHPVTIGECPKYVRSAKLRMVTGLRNIPSIQSRGLFGAIAGFIEGGWTGMVDGWYGYHHQNEQGSGYAADQKSTQNAINGITNKVNSVIEKMNTQFTAVGKEFNKLERRMENLNKKVDDGFLDIWTYNAELLVLLENERTLDFHDSNVKNLYEKVKSQLKNNAKEIGNGCFEFYHKCNNECMESVKNGTYDYPKYSEESKLNREKIDGVKLDSMGVYQILAIYSTVASSLVLLVSLGAISFWMCPNGSLQCTICI

SEQ ID NO: 2476 - protein, 565 aa, synthetic construct
  REGION 1..565: note = hemagglutinin__InfluenzaA__ACI32741
MKVKLLILLCTFTATYADTICIGYHANNSTDTVDTVLEKNVTVTHSVNLLEDSHNGKLCLLKGIAPLQLGNCSVAGWILGNPECELLISKESWSYIVETPNPENGACYPGYFADYEELREQLSSVSSFERFEIFPKESSWPKHTVTGVSASCSHNGKSSFYRNLLWLTGKNGLYPNLSKSYANNKEKEVLILWGVHHPPNIGDQRTLYHTENAYVSVVSSHYSRRFTPEITKRPKVRDQEGRINYYWTLLEPGDTIIFEANGNLIAPWYAFALSRGFGSGIITSNAPMDECDAKCQTPQGAINSSLPFQNVHPVTIGECPKYVRSAKLRMVTGLRNIPSIQSRGLFGAIAGFIEGGWTGMVDGWYGYHHQNEQGSGYAADQKSTQNAINGITNKVNSVIEKMNTQFTAVGKEFNKLERRMENLNKKVDDGFLDIWTYNAELLVLLENERTLDFHDSNVKNLYEKVKSQLKNNAKEIGNGCFEFYHKCNNECMESVKNGTYDYPKYSEESKLNREKIDGVKLDSMGVYQILAIYSTVASSLVLLVSLGAISFWMCPNGSLQCKICI

SEQ ID NO: 2477 - protein, 565 aa, synthetic construct
  REGION 1..565: note = hemagglutinin__InfluenzaA__ACI32742
MKVKLLILLCTFTATYADTICIGYHANNSTDTVDTVLEKNVTVTHSVNLLEDSHNGKLCLLKGIAPLQLGNCSVAGWILGNPECELLISKESWSYIVETPNPENGTCYPGYFADYEELREQLSSVSSFERFEIFPKESSWPNHTVTGVSASCSHNGKSSFYRNLLWLTGKNGLYPNLSKSYANNKEKEVLILWGVHHPPNIGDQRTLYHTENAYVSVVSSHYSRRFTPEITKRPKVRDQEGRINYYWTLLEPGDTIIFEANGNLIAPWYAFALSRGFGSGIITSNAPMDECDAKCQTPQGAINSSLPFQNVHPVTIGECPKYVRSAKLRMVTGLRNIPSIQSRGLFGAIAGFIEGGWTGMVDGWYGYHHQNEQGSGYAADQKSTQNAINGITNKVNSVIEKMNTQFTAVGKEFNKLERRMENLNKKVDDGFLDIWTYNAELLVLLENERTLDFHDSNVKNLYEKVKSQLKNNAKEIGNGCFEFYHKCNNECMESVKNGTYDYPKYSEESKLNREKIDGVKLDSMGVYQILAIYSTVASSLVLLVSLGAISFWMCSNGSLQCKICI

SEQ ID NO: 2478 - protein, 565 aa, synthetic construct
  REGION 1..565: note = hemagglutinin__InfluenzaA__ACI32743
MKVKLLILLCTFTATYADTICIGYHANNSTDTVDTVLEKNVTVTHSVNLLEDSHNGKLCLLKGIAPLQLGNCSVAGWILGNPECELLISKESWSYIVETPNPENGACYPGYFADYEELREQLSSVSSFERFEIFPKKSSWPNHTVTGVSASCSHNGKSSFYRNLLWLTGKNGLYPNLSKSYANNKEKEVLILWGVHHPPNIGNQRTLYHTENAYVSVVSSHYSRRFTPEITKRPKVRDQEGRINYYWTLLEPGDTIIFEANGNLIAPWYAFALSRGFGSGIITSNAPMDECDAKCQTPQGAINSSLPFQNVHPVTIGECPKYVRSAKLRMVTGLRNIPSIQSRGLFGAIAGFIEGGWTGMVDGWYGYHHQNEQGSGYAADQKSTQNAINGITNKVNSVIEKMNTQFTAVGKEFNKLERRMENLNKKVDDGFLDIWTYNAELLVLLENERTLDFHDSNVKNLYEKVKSQLKNNAKEIGNGCFEFYHKCNNECMESVKNGTYDYPKYSEESKLNREKIDGVKLDSMGVYQILAIYSTVASSLVLLVSLGAISFWMCSNGSLQCRICI

SEQ ID NO: 2479 - protein, 566 aa, synthetic construct
  REGION 1..566: note = hemagglutinin__InfluenzaA__ACJ09818
MKTIIALSYILCLVFAQKLPGNDNSTATLCLGHHAVPNGTIVKTITNDQVEVTNATELVQSSSTGEICDSPHQILDGENCTLIDALLGDPQCDGFQNKKWDLFVERSKAYSNCYPYDVPDYASLRSLVASSGTLEFNNESFNWTGVTQNGTSSACIRRSNNSFFSRLNWLTHLKFKYPALNVTMPNNEKFDKLYIWGVHHPGTDNDQIFLYAQASGRITVSTKRSQQTVIPNIGSRPRVRNIPSRISIYWTIVKPGDILLINSTGNLIAPRGYFKIRSGKSSIMRSDAPIGKCNSECITPNGSIPNDKPFQNVNRITYGACPRYVKQNTLKLATGMRNVPEKQTRGIFGAIAGFIENGWEGMVDGWYGFRHQNSEGIGQAADLKSTQAAIDQINGKLNRLIGKTNEKFHQIEKEFSEVEGRIQDLEKYVEDTKIDLWSYNAELLVALENQHTIDLTDSEMNKLFEKTKKQLRENAEDMGNGCFKIYHKCDNACIGSIRNGTYDHDVYRDEALNNRFQIKGVELKSGYKDWILWISFAMSCFLLCVALLGFIMWACQKGNIRCNICI

SEQ ID NO: 2480 - protein, 560 aa, synthetic construct
  REGION 1..560: note = hemagglutinin__InfluenzaA__ACJ67533
METISLITILLVVTASNADKICIGHQSTNSTETVDTLTETNVPVTHAKELLHTEHNGMLCATSLGHPLILDTCTIEGLVYGNPSCDLLLEGREWSYIVERSSAVNGTCYPGNVENLEELRTLFSSASSYQRIQIFPDTTWNVTYTGTSRACSGSFYRSMRWLTQKSGFYPVQDAQYTNNRGKSILFVWGIHHPPTYAEQTNLYIRNDTTTSVTTEDLNRTFKPVIGPRPLVNGLQGRIDYYWSVLKPGQTLRVRSNGNLIAPWYGHVLSGGSHGRILKTDLKSGSCVVQCQTEKGGLNSTLPFHNISKYAFGTCPKYVRVNSLKLAVGLRNVPARSSRGLFGAIAGFIEGGWPGLVAGWYGFQHSNDQGVGMAADRDSTQKAIDKITSKVNNIVDKMNKQYEIIDHEFSEVETRLNMINNKIDDQIQDVWAYNAELLVLLENQKTLDEHDANVNNLYNKVKRALGSNAMEDGKGCFELYHKCDDQCMETIRNGTYNRRKYREESRLERQKIEGVKLESERTYKILTIYSTVASSLVLAMGFAAFLFWAMSNGSCRCNICI

SEQ ID NO: 2481 - protein, 567 aa, synthetic construct
  REGION 1..567: note = hemagglutinin__InfluenzaA__ACJ68607
MEKIVLLLAIVSLVKSDQICIGYHANNSTEQVDTIMEKNVTVTHAQDILEKTHNGKLCDLDGVKPLILGDCSVAGWLLGNPMCDEFINVPEWSYIVEKANPANDLCYPGNFNDYEELKHLLSRINHFEKIQIIPKSSWSDHEASSGVSSACPYQGTPSFFRNVVWLIKKNNTYPTIKRSYNNTNQEDLLILWGIHHSNDAAEQTKLYQNPTTYISVGTSTLNQRLVPKIATRSKVNGQSGRMDFFWTILKPNDAINFESNGNFIAPEYAYKIVKKGDSAIMKSEVEYGNCNTKCQTPIGAINSSMPFHNIHPLTIGECPKYVKSNKLVLATGLRNSPLRERRRKRGLFGAIAGFIEGGWQGMVDGWYGYHHSNEQGSGYAADKESTQKAIDGVTNKVNSIIDKMNTQFEAVGREFNNLERRIENLNKKMEDGFLDVWTYNAELLVLMENERTLDFHDSNVKNLYDKVRLQLRDNAKELGNGCFEFYHKCDNECMESVRNGTYDYPQYSEEARLKREEISGVKLESIGTYQILSIYSTVASSLALAIMVAGLSLWMCSNGSLQCRICI

SEQ ID NO: 2482 - protein, 567 aa, synthetic construct
  REGION 1..567: note = hemagglutinin__InfluenzaA__ACJ68609
MEKIVLLLAIVSLVKSDQICIGYHANNSTEQVDTIMEKNVTVTHAQDILEKTHNGKLCDLDGVKPLILRDCSVAGWLLGNPMCDEFINVPEWSYIVEKANPANDLCYPGNFNDYEELKHLLSRINHFEKIQIIPKSSWSDHEASSGVSSACPYQGTPSFFRNVVWLIKKNNTYPTIKRSYNNTNQEDLLILWGIHHSNDAAEQTKLYQNPTTYISVGTSTLNQRLVPKIATRSKVNGQSGRMDFFWTILKPNDAINFESNGNFIAPEYAYKIVKKGDSAIMKSEVEYGNCNTKCQTPIGAINSSMPFHNIHPLTIGECPKYVKSNKLVLATGLRNSPLRERRRKRGLFGAIAGFIEGGWQGMVDGWYGYHHSNEQGSGYAADKESTQKAIDGVTNKVNSIIDKMNTQFEAVGREFNNLERRIENLNKKMEDGFLDVWTYNAELLVLMENERTLDFHDSNVKNLYDKVRLQLRDNAKELGNGCFEFYHKCDNECMESVRNGTYDYPQYSEEARLRREEISGVKLESIGTYQILSIYSTVASSLALAIMVAGLSLWMCSNGSLQCRICI

SEQ ID NO: 2483 - protein, 567 aa, synthetic construct
  REGION 1..567: note = hemagglutinin__InfluenzaA__ACJ68610
MEKIVLFLAIVSLVKSDQICIGYHANNSTEQVDTIMEKNVTVTHAQDILEKTHNGKLCDLDGVKPLILRDCSVAGWLLGNPMCDEFINVPEWSYIVEKANPANDLCYPGNFNDYEELKHLLSRINHFEKIQIIPKSSWSDHEASSGVSSACPYQGTPSFFRNVVWLIKKNNTYPTIKRSYNNTNQEDLLILWGIHHSNDAAEQTKLYQNPTTYISVGTSTLNQRLVPKIATRSKVNGQSGRMDFFWTILKPNDAINFESNGNFIAPEYAYKIVKKGDSAIIKSEVEYGNCNTKCQTPIGAINSSMPFHNIHPLTIGECPKYVKSNKLVLATGLRNSPLRERRRKRGLFGAIAGFIEGGWQGMVDGWYGYHHSNEQGSGYAADKESTQKAIDGVTNKVNSIIDKMNTQFEAVGREFNNLERRIENLNKKMEDGFLDVWTYNAELLVLMENERTLDFHDSNVKNLYDKVRLQLRDNAKELGNGCFEFYHKCDNECMESVRNGTYDYPQYSEEARLKREEISGVKLESIGTYQILSIYSTVASSLALAIMVAGLSLWMCSNGSLQCRICI

SEQ ID NO: 2484 - protein, 567 aa, synthetic construct
  REGION 1..567: note = hemagglutinin__InfluenzaA__ACJ68611
MEKIVLLLAIVSLVKSDQICIGYHANNSTEQVDTIMEKNVTVTHAQDILEKTHNGKLCDLDGVKPLILRDCSVAGWLLGNPMCDEFINVPEWSYIVEKANPANDLCYPGNFNDYEELKHLLSRINHFEKIQIIPKSSWSDHEASLGVSSACPYQGMPSFFRNVVWLIKKNNTYPTIKRSYNNTNQEDLLILWGIHHSNDAAEQTKLYQNPTTYISVGTSTLNQRLVPKIATRSKVNGQSGRMDFFWTILKPNDAINFESNGNFIAPEYAYKIVKKGDSAIMKSEVGYGNCNTKCQTPIGAINSSMPFHNIHPLTIGECPKYVKSNKLVLATGLRNSPLRERRRKRGLFGAIAGFIEGGWQGMVDGWYGYHHSNEQGSGYAADKESTQKAIDGVTNKVNSIIDKMNTQFEAVGREFNNLERRIENLNKKMEDGFLDVWTYNAELLVLMENERTLDFHDSNVKNLYDKVRLQLRDNAKELGNGCFEFYHKCDDECMESVRNGTYDYPQYSEEARLKREEISGVKLESIGTYQILSIYSTVASSLALAIMVAGLSLWMCSNGSLQCRICI

SEQ ID NO: 2485 - protein, 567 aa, synthetic construct
  REGION 1..567: note = hemagglutinin__InfluenzaA__ACJ68612
MEKIVLLLAIVSLVKSDQICIGYHANNSTEQVDTIMEKNVTVTHAQDILEKTHNGKLCDLDGVKPLILRDCSVAGWLLGNPMCDEFINVPEWSYIVEKANPANDLCYPGNFNDYEELKHLLSRINHFEKIQIIPKSSWPDHEASSGVSSACPYQGTPSFFRNVVWLIKKNNTYPTIKRSYNNTNQEDLLILWGIHHSNNAAEQTKLYQNPTTYISVGTSTLNLRLVPKIATRSKVNGQSGRMDFFWTILKPNDAINFESNGNFIAPEYAYKIVKKGDSAIMKSEVEYGNCNTKCQTPIGAINSSMPFHNIHPLTIGECPKYVKSNKLVLATGLRNSPLRERRRKRGLFGAIAGFIEGGWQGMVDGWYGYHHSNEQGSGYAADKESTQKAIDGVTNKVNSIIDKMNTQFEAVGREFNNLERRIENLNKKMEDGFLDVWTYNAELLVLMENERTLDFHDSNVKNLYDKVRLQLRDNAKELGNGCFEFYHKCDNECMESVRNGTYDYPQYSEEARLKREEISGVKLESIGAYQILSIYSTVASSLALAIMVAGLSLWMCSNGSLQCRICI

SEQ ID NO: 2486 - protein, 567 aa, synthetic construct
  REGION 1..567: note = hemagglutinin__InfluenzaA__ACJ68613
MEKIVLFLAIVSHVKSDQICIGYHANNSTEQVDTIMEKNVTVTHAQDILEKTHNGKLCDLGGVKPLILRDCSVAGWLLGNPMCDEFINVPEWSYIVEKANPANDLCYPGNFNDYEELKHLLSRINHFEKIQIIPKSSWSDHEASSGVSSVCPYQGTPSFFRNVVWLIKKNNTYPTIKKSYNNTNQEDLLILWGIHHSNDAAEQTKLYQNPTTYISVGTSTLNQRLVPKIATRSKVNGQSGRMDFFWTILKPNDAINFESNGNFIAPEYAYKIVKKGDSAIMKSEVEYGNCNTKCQTPIGAINSSMPFHNIHPLTIGECPKYVKSNKLVLATGLRNSPLRERRRKRGLFGAIAGFIEGGWQGMVDGWYGYHHSNEQGSGYAADKESTQKAIDGVTNKVNSIIDKMNTQFEAVGREFNNLERRIENLNKKMEDGFLDVWTYNAELLVLMENERTLDFHDSNVKNLYDKVRLQLRDNAKELGNGCFEFYHKCDNECMESVRNGTYDYPQYSEEARLKREEISGVKLESIGTYQILSIYSTVASSLALAIMVAGLSLWMCSNGSLQCRICI

SEQ ID NO: 2487 - protein, 568 aa, synthetic construct
  REGION 1..568: note = hemagglutinin__InfluenzaA__ACJ68614
MEKIVLLLAIVSLVKSDQICIGYHANNSTEQVDTIMEKNVTVTHAQDILEKTHNGKLCDLDGVKPLILRDCSVAGWLLGNPMCDEFLNVPEWSYIVEKINPVNDLCYPGNFNDYEELKHLLSRINHFEKIQIIPKSSWSDHEASSGVSSACPYQGRSSFFRNVVWLIKKNNTYPTIKRSYNNTNQEDLLVLWGIHHPNDAAEQTRLYQNPTTYISVGTSTLNQRLVPKLATRSKVNGQSGRMEFFWTILKPNDAINFESNGNFIAPENAYKIVKKGDSTIMKSELEYGNCNTKCQTPIGAINSSMPFHNIHPLTIGECPKYVKSNRLVLATGLRNSPQGERRRKKRGLFGAIAGFIEGGWQGMVDGWYGYHHSNERGSGYAADKESTQKAIDGVTNKVNSIIDKMNTQFEAVGREFNNLERRIENLNKKMEDGFLDVWTYNAELLVLMENERTLDFHDSNVKNLYDKVRLQLRDNAKELGNGCFEFYHRCDNECMESVRNGTYDYPQYSEEARLKREEISGVKLESIGTYQILSIYSTVASSLALAIMVAGLSLWMCSNGSLQCRICI

SEQ ID NO: 2488 - protein, 565 aa, synthetic construct
  REGION 1..565: note = hemagglutinin__InfluenzaA__ACK99007
MKVKLLVLLCTFTATYADTICIGYHANNSTDTVDTVLEKNVTVTHSVNLLENSHNGKLCLLKGIAPLQLGNCSVAGWILGNPECELLISKESWSYIVEKPNPENGTCYPGHFADYEELREQLSSVSSFERFEIFPKESSWPNHTVTGVSASCSHNGESSFYRNLLWLTGKNGLYPNLSKSYANNKEKEVLVLWGVHHPPNIGDQKALYHTENAYVSVVSSHYSRKFTPEIAKRPKVRDQEGRINYYWTLLEPGDTIIFEANGNLIAPRYAFALSRGFGSGIINSNAPMDKCDAKCQTPQGAINSSLPFQNVHPVTIGECPKYVRSAKLRMVTGLRNIPSIQSRGLFGAIAGFIEGGWTGMVDGWYGYHHQNEQGSGYAADQKSTQNAINGITNKVNSVIEKMNTQFTAVGKEFNKLERRMENLNKKVDDGFIDIWTYNAELLVLLENERTLDFHDSNVKNLYEKVKSQLKNNAKEIGNGCFEFYHKCNDECMESVKNGTYDYPKYSEESKLNREKIDGVKLESMGVYQILAIYSTVASSLVLLVSLGAISFWMCSNGSLQCRICI

SEQ ID NO: 2489 - protein, 565 aa, synthetic construct
  REGION 1..565: note = hemagglutinin__InfluenzaA__ACK99008
MKVKLLVLLCTFTATYADTICIGYHANNSTDTVDTVLEKNVTVTHSVNLLENSHNGKLCLLKGIAPLQLGNCSVAGWILGNPECELLISKESWSYIVEKPNPENGTCYPGHFADYEELREQLSSVSSFERFEIFPKESSWPNHTVTGVSASCSHNGESSFYRNLLWLTGKNGLYPNLSKSYANNKEKEVLVLWGVHHPPNIGDQKALYHTENAYVSVVSSHYSRKFTPEIAKRPKVRDQEGRINYYWTLLEPGDTIIFEANGNLIAPRYAFALSRGFGSGIINSNAPMDKCDAKCQTPQGAINSSLPFQNVHPVTIGECPKYVRSAKLRMVTGLRNIPSIQSRGLFGAIAGFIEGGWTGMVDGWYGYHHQNEQGSGYAADQKSTQNAINGITNKVNSVIEKMNTQFTAVGKEFNKLERRMENLNKKVDDGFIDIWTYNAELLVLLENERTLDFHDSNVKNLYEKVKSQLKNNAKEIGNGCFEFYHKCNDECMESVKNGTYDYPKYSEESKLNREKIDGVKLESMEVYQILAIYSTVASSLVLLVSLGAISFWMCSNGSLQCRICI

SEQ ID NO: 2490 - protein, 565 aa, synthetic construct
  REGION 1..565: note = hemagglutinin__InfluenzaA__ACK99009
MKVKLLVLLCTFTATYADTICIGYHANNSTDTVDTVLEKNVTVTHSVNLLENSHNGKLCLLKGIAPLQLGNCSVAGWILGNPECELLISKESWSYIVEKPNPENGTCYPGHFADYEELREQLSSVSSFERFEIFPKESSWPNHTVTGVSASCSHNGESSFYRNLLWLTGKNGLYPNLSKSYANNKEKEVLVLWGVHHPPNIGDQKALYHTENAYVSVVSSHYSRKFTPEIAKRPKVRDQEGRINYYWTLLEPGDTITFEANGNLIAPRYAFALSRGFGSGIINSNAPMDKCDAKCQTPQGAINSSLPFQNVHPVTIGECPKYVRSAKLRMVTGLRNIPSIQSRGLFGAIAGFIEGGWTGMVDGWYGYHHQNEQGSGYAADQKSTQNAINGITNKVNSVIEKMNTQFTAVGKEFNKLERRMENLNKKVDDGFIDIWTYNAELLVLLENERTLDFHDSNVKNLYEKVKSQLKNNAKEIGNGCFEFYHKCNDECMESVKNGTYDYPKYSEESKLNREKIDGVKLESMGVYQILAIYSTVASSLVLLVSLGAISFWMCSNGSLQCRICI

SEQ ID NO: 2491 - protein, 565 aa, synthetic construct; identical to SEQ ID NO: 2488
  REGION 1..565: note = hemagglutinin__InfluenzaA__ACK99011

SEQ ID NO: 2492 - protein, 565 aa, synthetic construct
  REGION 1..565: note = hemagglutinin__InfluenzaA__ACK99012
MKVKLLVLLCTFTATYADTICIGYHANNSTDTVDTVLEKNVTVTHSVNLLENSHNGKLCLLKGIAPLQLGNCSVAGWILGNPECELLISKESWSYIVEKPNPENGTCYPGHFADYEELREQLSSVSSFERFEIFPKESSWPNHTVTGVSASCSHNGESSFYRNLLWLTGKNGLYPNLSKSYANNKEKEVLVLWGVHHPPNIGDQKALYHTENAYVSVVSSHYSRKFTPEIAKRPKVRDQEGRINYYWTLLEPGDTIIFEANGNLIAPRYAFALSRGFGSGIINSNAPMDKCDAKCQTPQGAINSSLPFQNVHPVTIGECPKYVRSAKLRMVTGLRNIPSIQSRGLFGAIAGFIEGGWTGMVDGWYGYHHQNEQGSGYAADQKSTQNAINGITNKVNSVIEKMNTQFTAVGKEFNKLERRMENLNKKVDDGFIDIWTYNAELLVLLENERTLDFHDSNVKNLYEKVKSQLKNNAKEIGNGCFEFYHKCNDECMESVKNGTYDYPKYSEESKLNREKIDGVKLESMGVYQILAIYSTVASSLVLLISLGAISFWMCSNGSLQCRICI

SEQ ID NO: 2493 - protein, 565 aa, synthetic construct; identical to SEQ ID NO: 2488
  REGION 1..565: note = hemagglutinin__InfluenzaA__ACK99013

SEQ ID NO: 2494 - protein, 565 aa, synthetic construct
  REGION 1..565: note = hemagglutinin__InfluenzaA__ACK99014
MKVKLLVLLCTFTATYADTICIGYHANNSTDTVDTVLEKNVTVTHSVNLLENSHNGKLCLLKGIAPLQLGNCSVAGWILGNPECELLISKESWSYIVEKPNPENGTCYPGHFADYEELREQLSSVSSFERFEIFPKESSWPNHTVTGVSASCSHNGESSFYRNLLWLTGKNGLYPNLSKSYANNKEKEVLVLWGVHHPPNIGDQKALYHTENAYVSVVSSHYSRKFTPEIAKRPKVRDQEGRINYYWTLLEPGDTIIFEANGNLIAPRYAFTLSRGFGSGIINSNAPMDKCDAKCQTPQGAINSSLPFQNVHPVTIGECPKYVRSAKLRMVTGLRNIPSIQSRGLFGAIAGFIEGGWTGMVDGWYGYHHQNEQGSGYAADQKSTQNAINGITNKVNSVIEKMNTQFTAVGKEFNKLERRMENLNKKVDDGFIDIWTYNAELLVLLENERTLDFHDSNVKNLYEKVKSQLKNNAKEIGNGCFEFYHKCNDECMESVKNGTYDYPKYSEESKLNREKIDGVKLESMGVYQILAIYSTVASSLVLLVSLGAISFWMCSNGSLQCRICI

SEQ ID NO: 2495 - protein, 565 aa, synthetic construct; identical to SEQ ID NO: 2488
  REGION 1..565: note = hemagglutinin__InfluenzaA__ACK99016

SEQ ID NO: 2496 - protein, 565 aa, synthetic construct; identical to SEQ ID NO: 2488
  REGION 1..565: note = hemagglutinin__InfluenzaA__ACK99018

SEQ ID NO: 2497 - protein, 565 aa, synthetic construct; identical to SEQ ID NO: 2488
  REGION 1..565: note = hemagglutinin__InfluenzaA__ACK99023

SEQ ID NO: 2498 - protein, 565 aa, synthetic construct
  REGION 1..565: note = hemagglutinin__InfluenzaA__ACK99026
MKVKLLVLLCTFTATYADTICIGYHANNSTDTVDTVLEKNVTVTHSVNLLENSHNGKLCLLKGIAPLQLGNCSVAGWILGNPECELLISKESWSYIVEKPNPENGTCYPGHFADYEELREQLSSVSSFERFEIFPKESSWPNHTVTGVSASCSHNGESSFYRNLLWLTGKNGLYPNLSKSYANNKEKEVLVLWGVHHPPNIGDQKALYHTENAYVSVVSSHYSRKFTPEIAKRPKVRDQEGRINYYWTLLEPGDTIIFEANGNLIAPRYAFALSRGFGSGIINSNAPMDKCDAKCQTPQGAINSSLPFQNVHPITIGECPKYVRSAKLRMVTGLRNIPSIQSRGLFGAIAGFIEGGWTGMVDGWYGYHHQNEQGSGYAADQKSTQNAINGITNKVNSVIEKMNTQFTAVGKEFNKLERRMENLNKKVDDGFIDIWTYNAELLVLLENERTLDFHDSNVKNLYEKVKSQLKNNAKEIGNGCFEFYHKCNDECMESVKNGTYDYPKYSEESKLNREKIDGVKLESMGVYQILAIYSTVASSLVLLVSLGAISFWMCSNGSLQCRICI

SEQ ID NO: 2499 - protein, 565 aa, synthetic construct; identical to SEQ ID NO: 2172
  REGION 1..565: note = hemagglutinin__InfluenzaA__ACK99027

SEQ ID NO: 2500 - protein, 565 aa, synthetic construct
  REGION 1..565: note = hemagglutinin__InfluenzaA__ACK99028
MKVKLLVLLCTFTATYADTICIGYHANNSTDTVDTVLEKNVTVTHSVNLLENSHNGKLCLLKGIAPLQLGNCSVAGWILGNPECELLISKESWSYIVEKPNPENGTCYPGHFADYEELREQLSSVSSFERFEIFPKESSWPNHTVTGVSASCSHNGESSFYRNLLWLTGKNGLYPNLSKSYANNKEKEVLVLWGVHHPPNIGDQKALYHTENAYVSVVSSHYSRKFTPEIAKRPKVRDQEGRINYYWTLLEPGDTIIFEANGNLIAPRYAFALSRGFGSGIINSNAPMDKCDAKCQTPKGAINSSLPFQNVHPVTIGECPKYVRSAKLRMVTGLRNIPSIQSRGLFGAIAGFIEGGWTGMVDGWYGYHHQNEQGSGYAADQKSTQNAINGITNKVNSVIEKMNTQFTAVGKEFNKLERRMENLNKKVDDGFIDIWTYNAELLVLLENERTLDFHDSNVKNLYEKVKSQLKNNAKEIGNGCFEFYHKCNDECMESVKNGTYDYPKYSEESKLNREKIDGVKLESMGVYQILAIYSTVASSLVLLVSLGAISFWMCSNGSLQCRICI

SEQ ID NO: 2501 - protein, 565 aa, synthetic construct
  REGION 1..565: note = hemagglutinin__InfluenzaA__ACK99029
MKVKLLVLLCTFTATYADTICIGYHANNSTDTVDTVLEKNVTVTHSVNLLENSHNGKLCLLKGIAPLQLGNCSVAGWILGNPECELLISKESWSYIVEKPNPENGTCYPGHFADYEELREQLSSVSSFERFEIFPKESSWPNHTVTGVSASCSHNGESSFYRNLLWLTGKNGLYPNLSKSYANNKEKEVLVLWGVHHPPNIGDQKALYHTENAYVSVVSSHYSRKFTPEISKRPKVRDQEGRINYYWTLLEPGDTIIFEANGNLIAPRYAFALSRGFGSGIINSNAPMDKCDAKCQTPQGAINSSLPFQNVHPVTIGECPKYVRSAKLRMVTGLRNIPSIQSRGLFGAIAGFIEGGWTGMVDGWYGYHHQNEQGSGYAADQKSTQNAINGITNKVNSVIEKMNTQFTAVGKEFNKLERRMENLNKKVDDGFIDIWTYNAELLVLLENERTLDFHDSNVKNLYEKVKSQLKNNAKEIGNGCFEFYHKCNDECMESVKNGTYDYPKYSEESKLNREKIDGVKLESMGVYQILAIYSTVASSLVLLVSLGAISFWMCSNGSLQCRICI

SEQ ID NO: 2502 - protein, 565 aa, synthetic construct; identical to SEQ ID NO: 2488
  REGION 1..565: note = hemagglutinin__InfluenzaA__ACK99030

SEQ ID NO: 2503 - protein, 565 aa, synthetic construct; identical to SEQ ID NO: 2488
  REGION 1..565: note = hemagglutinin__InfluenzaA__ACK99031

SEQ ID NO: 2504 - protein, 565 aa, synthetic construct; identical to SEQ ID NO: 2488
  REGION 1..565: note = hemagglutinin__InfluenzaA__ACK99032

SEQ ID NO: 2505 - protein, 565 aa, synthetic construct; identical to SEQ ID NO: 2488
  REGION 1..565: note = hemagglutinin__InfluenzaA__ACK99033

SEQ ID NO: 2506 - protein, 565 aa, synthetic construct
  REGION 1..565: note = hemagglutinin__InfluenzaA__ACK99034
MKVKLLVLLCTFTATYADTICIGYHANNSTDTVDTVLEKNVTVTHSVNLLENSHNGKLCLLKGIAPLQLGNCSVAGWILGNPECELLISKESWSYIVEKPNPENGTCYPGHFADYEELREQLSSVSSFERFEIFPKESSWPNHTVTGVSASCSHNGESSFYRNLLWLTGKNGLYPNLSKSYANNKEKEVLVLWGVHHPPNIGDQKALYHTENAYVSVVSSHYSRKFTPEIAKRPKVRDQEGRINYYWTLLEPGDTIIFEANGNLIAPRYAFALSRDFGSGIINSNAPMDKCDAKCQTPQGAINSSLPFQNVHPVTIGECPKYVRSAKLRMVTGLRNIPSIQSRGLFGAIAGFIEGGWTGMVDGWYGYHHQNEQGSGYAADQKSTQNAINGITNKVNSVIEKMNTQFTAVGKEFNKLERRMENLNKKVDDGFIDIWTYNAELLVLLENERTLDFHDSNVKNLYEKVKSQLKNNAKEIGNGCFEFYHKCNDECMESVKNGTYDYPKYSEESKLNREKIDGVKLESMGVYQILAIYSTVASSLVLLVSLGAISFWMCSNGSLQCRICI

SEQ ID NO: 2507 - protein, 565 aa, synthetic construct
  REGION 1..565: note = hemagglutinin__InfluenzaA__ACK99035
MKVKLLVLLCTFTATYADTICIGYHANNSTDTVDTVLEKNVTVTHSVNLLENSHNGKLCLLKGIAPLQLGNCSVAGWILGNPECELLISKESWSYIVEKPNPENGTCYPGHFADYEELREQLSSVSAFERFEIFPKESSWPNHTVTGVSASCSHNGESSFYRNLLWLTGKNGLYPNLSKSYANNKEKEVLVLWGVHHPPNIGDQKALYHTENAYVSVVSSHYSRKFTPEISKRPKVRDQEGRINYYWTLLEPGDTIIFEANGNLIAPRYAFALSRGFGSGIINSNTPMDKCDAKCQTPQGAINSSLPFQNVHPVTIGECPKYVRSAKLRMVTGLRNIPSIQSRGLFGAIAGFIEGGWTGMVDGWYGYHHQNEQGSGYAADQKSTQNAINGITNKVNSVIEKMNTQFTAVGKEFNKLERRMENLNKKVDDGFIDIWTYNAELLVLLENERTLDFHDSNVKNLYEKVKSQLKNNAKEIGNGCFEFYHKCNDECMESVKNGTYDYPKYSEESKLNREKIDGVKLESMGVYQILAIYSTVASSLVLLVSLGAISFWMCSNGSLQCRICI

SEQ ID NO: 2508 - protein, 566 aa, synthetic construct; identical to SEQ ID NO: 2338
  REGION 1..566: note = hemagglutinin__InfluenzaA__ACK99421

SEQ ID NO: 2509 - protein, 562 aa, synthetic construct
  REGION 1..562: note = hemagglutinin__InfluenzaA__ACK99432
MAIIYLILLFTAVRGDQICIGYHANNSTEKIDTILERNVTVTHAKDILEKTHNGKLCKLNGIPPLELGDCSIAGWLLGNPECDRLLRVPEWSYIMEKENPRYSLCYPGSFNDYEELKHLLSSVKHFEKVKILPKDRWTQHTTTGGSMACAVSGKPSFFRNMVWLTTKGPNYPVAQGSYNNTSGEQMLIIWGVHHPNDEAEQRALYQKVGTYVSASTSTLYKRSIPEIAARPKVNGLGSRMEFSWTLLDMWDTINFESTGNLVAPEYGFKISKRGSSGIMKTEGTLENCETKCQTPLGAINTTLPFHNVHPLTIGECPKYVKSEKLVLATGLRNVPQIESRGLFGAIAGFIEGGWQGMVDGWYGYHHSNDQGSGYAADKESTQKAFDGITNKVNSVIEKMNTQFEAVGKEFSNLEKRLENLNKKMEDGFLDVWTYNAELLVLMENERTLDFHDSNVKNLYDKVRMQLRDNVKELGNGCFEFYHKCDNECMDSVKNGTYDYPKYEEESKLNRNEIKGVKLSSMGVYQILAIYATVAGSLSLAIMMAGISFWMCSNGSLQCRICI

SEQ ID NO: 2510 - protein, 566 aa, synthetic construct
  REGION 1..566: note = hemagglutinin__InfluenzaA__ACK99443
MKAKLLVLLCAFTATDADTICIGYHANNSTDTVDTVLEKNVTVTHSVNLLEDSHNGKLCRLKGIAPLQLGNCSIAGWILGNPECESLFSKESWSYIAETPNSENGTCYPGYFADYEELREQLSSVSSFERFEIFPKESSWPNHTVTKGVTAACSHNGKSSFYRNLLWLTEKNGLYPNLSKSYVNNKEKEVLVLWGVHHPSNIGDQRAIYHTENAYVSVVSSHYSRRFTPEIAKRPKVRGQEGRINYYWTLLEPGDTIIFEANGNLIAPWYAFALSRGFGSGIITSNASMDECDAKCQTPQGAINSSLPFQNVHPVTIGECPKYVRSTKLRMVTGLRNIPSVQSRGLFGAIAGFIEGGWTGMIDGWYGYHHQNEQGSGYAADQKSTQNAINGITNKVNSVIEKMNTQFTAVGKEFNKLERRMENLNKKVDDGFLDIWTYNAELLVLLENERTLDFHDSNVKNLYEKVKSQLKNNAKEIGNGCFEFYHKCNNECMESVKNGTYDYPKYSEESKLNREKIDGVKLESMGVYQILAIYSTVASSLVLLVSLGAISFWMCSNGSLQCRICI

SEQ ID NO: 2511 - protein, 566 aa, synthetic construct
  REGION 1..566: note = hemagglutinin__InfluenzaA__ACK99465
MKAKLLVLLCAFTATYADTICIGYHANNSTDTVDTVLEKNVTVTHSVNLLEDSHNGKLCRLKGTAPLQLGNCSVAGWILGNPECESLFSKESWSYIAEKPNPENGTCYPGYFADYEELREQLSSVSSFERFEIFPKESSWPNHTVTKGVTASCSHNGKSSFYKNLLWLTKKNGLYPNLSKSYVNNKEKEVLVLWGVHHPSNIGDQRAIYHTENAYVSVVSSHYSRRFTPEIAKRPKVRDQEGRINYYWTLLEPGDTIIFEANGNLIAPWYAFALSRGFGSGIITSNASMGECDAKCQTPQGAINSSLPFQNVHPVTIGECPKYVRSTKLRMVTGLRNIPSIQSRGLFGAIAGFIEGGWTGMIDGWYGYHHQNEQGSGYAADKKSTQNAIDGITNKVNSVIEKMNTQFTAVGKEFNKLERRMENLNKKVDDGFLDIWTYNAELLVLLENERTLDFHDSNVKNLYEKVKNQLKNNAKEIGNGCFEFYHKCNNECMESVKNGTYDYPKYSEESKLKREKIDGVKLESMGVYQILAIYSTVASSLVLLVSLGAISFWMCSNGSLQCRICI

SEQ ID NO: 2512 - protein, 566 aa, synthetic construct
  REGION 1..566: note = hemagglutinin__InfluenzaA__ACK99476
MKTIIALSYILCMVFAQKLPGNDNSTATLCLGHHAVPNGTLVKTITNDQIEVTNATELVQSSSTGRICDSPHRILDGKNCTLIDALLGDPHCDDFQNKEWDLFVERSKAYSNCYPYDVPDYASLRSLVASSGTLEFNNESFNWTGVAQNGTSYACKRRSVKSFFSRLNWLHKLEYKYPALNVTMPNNDKFDKLYIWGVHHPRTDSDQTSLYVQASGRVTVSTKRSQQTVIPNIGSSPWVRGVSSRISIYWTIVKPGDILLINSTGNLIAPRGYFKIRSGKSSIMRSDAPIGNCNSECITPNGSIPNDKPFQNVNRITYGACPRYVKQNTLKLATGMRNVPEKQTRGIFGAIAGFIENGWEGMVDGWYGFRHQNSEGTGQAADLKSTQAAINQINGKLNRLIEKTNEKFHQIEKEFSEVEGRIQDLEKYVEDTKIDLWSYNAELLVALENQHTIDLTDSEMNKLFERTRKQLRENAEDMGNGCFKIYHKCDNACIGSIRNGTYDHDVYRDEALNNRFQIKGVELKSGYKDWILWISFAISCFLLCVVLLGFIMWACQKGNIRCNICI

SEQ ID NO: 2513 - protein, 565 aa, synthetic construct; identical to SEQ ID NO: 1914
  REGION 1..565: note = hemagglutinin__InfluenzaA__ACL12063

SEQ ID NO: 2514 - protein, 566 aa, synthetic construct
  REGION 1..566: note = hemagglutinin__InfluenzaA__ACL12129
MKTIIALSYILCLVFAQKLPGNDNSTATLCLGHHAVPNGTLVKTITNDQIEVTNATELVQSSSTGRICGSPHRILDGKNCTLIDALLGDPHCDGFQNKEWDLFVERSKAYSNCYPYDVPDYASLRSLVASSGTLEFINEDFNWTGVAQDGGSYACKRGSVNSFFSRLNWLHKLEYKYPALNVTMPNNGKFDKLYIWGVHHPSTDSDQTSLYVRASGRVTVSTKRSQQTVTPNIGSRPWVRGQSSRISIYWTIVKPGDILLIDSTGNLIAPRGYFKIRNGKSSIMRSDAPIGNCSSECITPNGSIPNDKPFQNVNRITYGACPRYVKQNTLKLATGMRNVPEKQTRGIFGAIAGFIENGWEGMVDGWYGFRHQNSEGTGQAADLKSTQAAIDQINGKLNRLIEKTNEKFQQIEKEFSEVEGRIQDLEKYVEDTKIDLWSYNAELLVALENQHTIDLTDSEMNKLFEKTRKQLRENAEDMGNGCFKIYHKCDNACIGSIRNGTYDHDVYRDEALNNRFQIKGVELKSGYKDWILWISFAISCFLLCVVLLGFIMWACQKGNIRCNICI

SEQ ID NO: 2515 - protein, 566 aa, synthetic construct; identical to SEQ ID NO: 2356
  REGION 1..566: note = hemagglutinin__InfluenzaA__ACL12140

SEQ ID NO: 2516 - protein, 565 aa, synthetic construct; identical to SEQ ID NO: 2440
  REGION 1..565: note = hemagglutinin__InfluenzaA__ACL12151

SEQ ID NO: 2517 - protein, 566 aa, synthetic construct; identical to SEQ ID NO: 2434
  REGION 1..566: note = hemagglutinin__InfluenzaA__ACL12162

SEQ ID NO: 2518 - protein, 566 aa, synthetic construct
  REGION 1..566: note = hemagglutinin__InfluenzaA__ACL12173
MKTIIALSYILCLVFAQKLPGNDNSTATLCLGHHAVPNGTIVKTITNDQIEVTNATELVQSSSTGEICDSPHQILDGENCTLIDALLGDPQCDGFQNKKWDLFVERSKAYSNCYPYDVPDYASLRSLVASSGTLEFNNESFNWTGVTQNGTSSACIRRSNNSFFSRLNWLTHLKFKYPALNVTMPNNEQFDKLYIWGVHHPGTDNDQIFLYAQASGRITVSTKRSQQTVIPNIGSRPRVRNIPSRISIYWTIVKPGDILLINSTGNLIAPRGYFKIRSGKSSIMRSDAPIGKCNSECITPNGSIPNDKPFQNVNRITYGACPRYVKQNTLKLATGMRNVPEKQTRGIFGAIAGFIENGWEGMVDGWYGFRHQNSEGRGQAADLKSTQAAINQINGKLNRLIGKTNEKFHQIEKEFSEVEGRIQDLEKYVEDTKIDLWSYNAELLVALENQHTIDLTDSEMNKLFEKTKKQLRENAEDMGNGCFKIYHKCDNACIGSIRNGTYDHDVYRDEALNNRFQIKGVELKSGYKDWILWISFAISCFLLCVALLGFIMWACQKGNIRCNICI

SEQ ID NO: 2519 - protein, 566 aa, synthetic construct
  REGION 1..566: note = hemagglutinin__InfluenzaA__ACL12184
MKTIIALSYILCLVFAQKLPGNDNSTATLCLGHHAVPNGTIVKTITNDQIEVTNATELVQSSSTGEICDSPHQILDGENCTLIDALLGDPQCDGFQNKKWDLFVERSKAYSNCYPYDVPDYASLRSLVASSGTLEFNNESFNWTGVTQNGTSSACIRRSNNSFFSRLNWLTHLKFKYPALNVTMPNNEQFDKLYIWGVHHPGTDNDQIFLYAQASGRITVSTKRSQQTVIPNIGSRPRVRNIPSRISIYWTIVKPGDILLINSTGNLIAPRGYFKIRSGKSSIMRSDAPIGKCNSECITPNGSIPNDKPFQNVNRITYGACPRYVKQNTLKLATGMRNVPEKQTRGIFGAIAGFIENGWEGMVDGWYGFRHQNSEGRGQAADLKSTQAAIDQINGKLNRLIGKTNEKFHQIEKEFSEVEGRIQDLEKYVEDTKIDLWSYNAELLVALENQHTIDLTDSEMNKLFEKTKKQLRENAEDMGNGCFKIYHKCDNACIGSIRNGTYNHDVYRDEALNNRFQIKGVELKSGYKDWILWISFAISCFLLCVALLGFIMWACQKGNIRCNICI

SEQ ID NO: 2520 - protein, 566 aa, synthetic construct; identical to SEQ ID NO: 2434
  REGION 1..566: note = hemagglutinin__InfluenzaA__ACL12195

SEQ ID NO: 2521 - protein, 566 aa, synthetic construct
  REGION 1..566: note = hemagglutinin__InfluenzaA__ACL12217
MKTIIALSYILCLVFAQKLPGNDNSTATLCLGHHAVPNGTIVKTITNDQIEVTNATELVQSSSTGEICDSPHQILDGENCTLIDALLGDPQCDGFQNKKWDLFVERSKAYSNCYPYDVPDYASLRSLVASSGTLEFNNESFNWTGVTQNGTSSACIRRSNNSFFSRLNWLTHLKFKYPALNVTMPNNEQFDKLYIWGVHHPGTDNDQIFLYAQASGRITVSTKRSQQTVIPNIGSRPRVRNIPSRISIYWTIVKPGDVLLINSTGNLIAPRGYFKIRSGKSSIMRSDAPIGKCNSECITPNGSIPNDKPFQNVNRITYGACPRYVKQNTLKLATGMRNVPEKQTRGIFGAIAGFIENGWEGMVDGWYGFRHQNSEGRGQAADLKSTQAAIDQINGKLNRLIGKTNEKFHQIEKEFSEVEGRIQDLEKYVEDTKIDLWSYNAELLVALENQHTIDLTDSEMNKLFEKTKKQLRENAEDMGNGCFKIYHKCDNACIGSIRNGTYDHDVYRDEALNNRFQIKGVELKSGYKDWILWISFAISCFLLCVALLGFIMWACQKGNIRCNICI

SEQ ID NO: 2522 - protein, 566 aa, synthetic construct; identical to SEQ ID NO: 2434
  REGION 1..566: note = hemagglutinin__InfluenzaA__ACL12228

SEQ ID NO: 2523 - protein, 566 aa, synthetic construct; identical to SEQ ID NO: 2434
  REGION 1..566: note = hemagglutinin__InfluenzaA__ACL12239

SEQ ID NO: 2524 - protein, 566 aa, synthetic construct
  REGION 1..566: note = hemagglutinin__InfluenzaA__ACL12250
MKTIIALSYILCLVFAQKFPGNDNSTATLCLGHHAVPNGTIVKTITNDQIEVTNATELVQSSSTGEICDSPHQILDGENCTLIDALLGDPQCDGFQNKNWDLFVERSKAYSNCYPYDVPDYVSLRSLVASSGTLEFNNESFNWTGVTQNGTSSACIRRSNNSFFSRLNWLTHSKFKYPALNVTMPNNENFDKLYIWGVHHPGTDNDQIFLYAQASGRITVSTKRSQQTVIPNIGSRPRVRNIPSRISIYWTIVKPGDILLINSTGNLIAPRGYFKIRSGKSSIMRSDAPIGKCNSECITPNGSIPNDKPFQNVNRITYGACPRYVKQNTLKLATGMRNVPEKQTRGIFGAIAGFIENGWEGMVDGWYGFRHQNSEGIGQAADLKSTQAAIDQINGKLNRLIGKTNEKFHQIEKEFSEVEGRIQDLEKYVEDTKIDLWSYNAELLVALENQHTIDLTDSEMNKLFEKTKKQLRENAEDMGNGCFKIYHKCDNACIGSIRNGTYDHDVYRDEALNNRFQIKGVELKSGYKDWILWISFAISCFLLCIALLGFIMWACQKGNIRCNICI

SEQ ID NO: 2525 - protein, 566 aa, synthetic construct
  REGION 1..566: note = hemagglutinin__InfluenzaA__ACL12261
MKAKLLVLLCAFTATDADTICIGYHANNSTDTVDTVLEKNVTVTHSVNLLEDSHNGKLCRLKGIAPLQLGNCSIAGWILGNPECESLFSKKSWSYIAETPNSENGTCYPGYFADYEELREQLSSVSSFERFEIFPKESSWPNHTVTKGVTAACSHKGRSSFYRNLLWLTEKNGLYPNLSKSYVNNKEKEVLVLWGVHHPSNIGDQRAIYHTENAYVSVVSSHYNRRFTPEIAKRPKVRGQEGRINYYWTLLEPGDTIIFEANGNLIAPWYAFALSRGFGSGIITSNASMDECDAKCQTPQGAINSSLPFQNVHPVTIGECPKYVRSTKLRMVTGLRNIPSIQSRGLFGAIAGFIEGGWTGMIDGWYGYHHQNEQGSGYAADQKSTQNAINGITNKVNSVIEKMNTQFTAVGKEFNKLEKRMENLNKKVDDGFLDIWTYNAELLVLLENERTLDFHDSNVKNLYEKVKNQLKNNAKEIGNGCFEFYHKCNNECMESVKNGTYDYPKYSEESKLNREKIDGVKLESMGVYQILAIYSTVASSLVLLVSLGAISFWMCSNGSLQCRICI

SEQ ID NO: 2526 - protein, 562 aa, synthetic construct
  REGION 1..562: note = hemagglutinin__InfluenzaA__ACN32272
MAIIYLILLFTAVRGDQICIGYHANNSTEKIDTILERNVTVTHAKDILEKTHNGKLCKLNGIPPLELGDCSIAGWLLGNPECDRLLRVPEWSYIMEKENPRYSLCYPGSFNDYEELKHLLSSVKHFEKVKILPKDRWTQHTTTGGSMACAVSGKPSFFRNMVWLTTKGPNYPVAQGSYNNTSGEQMLIIWGVHHPNDEAEQRALYQNVGTYVSASTSTLYKRSIPEIAARPKVNGLGSRMEFSWTLLDMWDTINFESTGNLVAPEYGFKISKRGSSGIMKTEGTLENCETKCQTPLGAINTTLPFHNVHPLTIGECPKYVKSEKLVLATGLRNVPQIESRGLFGAIAGFIEGGWQGMVDGWYGYHHSNDQGSGYAADKESTQKAFDGITNKVNSVIEKMNTQFEAVGKEFSNLEKRLENLNKKMEDGFLDVWTYNAELLVLMENERTLDFHDSNVKNLYDKVRMQLRDNVKELGNGCFEFYHKCDNECMDSVKNGTYDYPKYEEESKLNRNEIKGVKLSSMGVYQILAIYATVAGSLSLAIMMAGISFWMCSNGSLQCRICI

SEQ ID NO: 2527 - protein, 566 aa, synthetic construct
  REGION 1..566: note = hemagglutinin__InfluenzaA__ACN32283
MKTIIALSYILCLVSAQKFPGNDNSTATLCLGHHAVPNGTIVKTITNDQIEVTNATELVQSSSTGEICDSPHQILDGENCTLIDALLGDPQCDGFQNKKWDLFVERSKAYSNCYPYDVPDYASLRSLVASSGTLEFNNESFNWTGVTQNGTSSACIRRSNNSFFSRLNWLTHLKFKYPALNVTMPNNEEFDKLYIWGVHHPGTDNDQIFLYAQASGRITVSTKRSQQTVIPNIGSRPRVRNIPSRISIYWTIVKPGDILLINSTGNLIAPRGYFKIRSGKSSIMRSDAPIGKCNSECITPNGSIPNDKPFQNVNRITYGACPRYVKQNTLKLATGMRNVPEKQTRGIFGAIAGFIENGWEGMVDGWYGFRHQNSEGIGQAADLKSTQAAIDQINGKLNRLIGKTNEKFHQIEKEFSEVEGRIQDLEKYVEDTKIDLWSYNAELLVALENQHTIDLTDSEMNKLFEKTKKQLRENAEDMGNGCFKIYHKCDNACIGSIRNGTYDHDVYRDEALNNRFQIKGVELKSGYKDWILWISFAISCFLLCVALLGFIMWACQKGNIRCNICI

SEQ ID NO: 2528 - protein, 566 aa, synthetic construct
  REGION 1..566: note = hemagglutinin__InfluenzaA__ACN32474
MKTIIALSYILCLVSAQKLPGNDNSTATLCLGHHAVPNGTIVKTITNDQIEVTNATELVQSSSTGEICDSPHQVLDGENCTLIDALLGDPQCDGFQNKKWDLFVERSKAYSNCYPYDVPDYTSLRSLVASSGTLEFNNESFNWTGVTQNGTSSACIRRSNNSFFSRLNWLTHLKFKYPALNMTMPNNEEFDKLYIWGVHHPGTDNDQIFLYAQASGRITVSTKRSQQTVIPNIGSRPRVRNIPSRISIYWTIVKPGDILLINSTGNLIAPRGYFKIRSGKSSIMRSDAPIGKCNSECITPNGSIPNDKPFQNVNRITYGACPRYVKQNTLKLATGMRNVPEKQTRGIFGAIAGFIENGWEGMVDGWYGFRHQNSEGIGQAADLKSTQAAIDQINGKLNRLIGKTNEKFHQIEKEFSEVEGRIQDLEKYVEDTKIDLWSYNAELLVALENQHTIDLTDSEMNKLFEKTKKQLRENAEDMGNGCFKIYHKCDNACIGSIRNGTYDHEVYRDEALNNRFQIKGVELKSGYKDWILWISFAISCFLLCVALLGFIMWACQKGNIRCNICI

SEQ ID NO: 2529 - protein, 565 aa, synthetic construct; identical to SEQ ID NO: 2488
  REGION 1..565: note = hemagglutinin__InfluenzaA__ACN32501

SEQ ID NO: 2530 - protein, 566 aa, synthetic construct
  REGION 1..566: note = hemagglutinin__InfluenzaA__ACN32534
MKTIIALSYILCLVFAQKLPGNDNSTATLCLGHHAVPNGTLVKTITNDQIEVTNATELVQSSSTGRICDSPHQILDGENCTLIDALLGDPHCDGFQNKEWDLFVERSKAYSNCYPYDVPDYVSLRSLVASSGTLEFNNESFNWTGVAQNGTSSACKRRSDKSFFSRLNWLHQLKYKYPALNVTMPNNEKFDKLYIWGVHHPGTDSDQISLYAQASGRVTVSTKRSQQTVIPNIGSGPWVRGVSSRISIYWTIVKPGDILLINSTGNLIAPRGYFKIRSGKSSIMRSDAPIGKCNSECITPNGSIPNGKPFQNVNRITYGACPRYVKQNTLKLATGMRNVPEKQTRGIFGAIAGFIENGWEGMMDGWYGFRHQNSEGTGQAADLKSTQAAINQINGKLNRLIEKTNEKFHQIEKEFSEVEGRIQDLEKYVEDTKIDLWSYNAELLVALENQHTIDLTDSEMNKLFERTKKQLRENAEDMGNGCFKIYHKCDNACIGSIRNGTYDHDVYRDEALNNRFQIKGVELKSGYKDWILWISFAISCFLLCIVLLGFIMWACQKGNIRCNICI

SEQ ID NO: 2531 - protein, 566 aa, synthetic construct
  REGION 1..566: note = hemagglutinin__InfluenzaA__ACN32545
MKTIIALSYILCLVFAQKLPGNDNSTATLCLGHHAVPNGTIVKTITNDQIEVTNATELVQSSSTGEICDSPHQILDGENCTLIDALLGDPHCDGFQNKKWDLFVERSKAYSNCYPYDVPDYASLRSLIASSGTLEFNNESFNWTGVTQNGTSSACIRRSNNSFFSRLNWLTHLKFKYPALNVTMPNNEKFDKLYIWGVHHPGTDNDQIFLYAQASGRITVSTKRSQQTVIPNIGSRPRVRNIPSRISIYWTIVKPGDILLINSTGNLIAPRGYFKIRSGKSSIMRSDAPIGKCNSECITPNGSIPNDKPFQNVNRITYGACPRYVKQNTLKLATGMRNVPEKQTRGIFGAIAGFIENGWEGMVDGWYGFRHQNSEGIGQAADLKSTQAAIDQINGKLNRLIGKTNEKFHQIEKEFSEVEGRIQDLEKYVEDTKIDLWSYNAELLVALENQHTIDLTDSEMNKLFEKTKKQLRENAEDMGNGCFKIYHKCDNACIGSIRNGTYDHDVYRDEALNNRFQIKGVELKSGYKDWILWISFAISCFLLCVALLGFIMWACQKGNIRCNICI

SEQ ID NO: 2532 - protein, 565 aa, synthetic construct
  REGION 1..565: note = hemagglutinin__InfluenzaA__ACN32793
MKVKLLVLLCTFTATYADTICIGYHANNSTDTVDTVLEKNVTVTHSVNLLEDSHNGKLCLLKGIAPLQLGNCSVAGWILGNPECELLISKESWSYIVETPNPENGTCYPGYFADYEELREQLSSVSSFERFEIFPKESSWPNHTVTGVSASCSHNGKSSFYRNLLWLTGKNGLYPNLSESYANNKEKEVLVLWGVHHPPNIGDQRALYHTENAYVSVVSSHYSRRFTPEIAKRPKVRDQEGRINYYWTLLEPGDTIIFEANGNLIAPRFAFALSRGFGSGIITSNAPMDECDAKCQTPQGAINSSLPFQNVHPVTIGECPKYVRSTKLRMVTGLRNIPSIQSRGLFGAIAGFIEGGWTGMVDGWYGYHHQNEQGSGYAADQKSTQNAINGITNKVNSVIEKMNTQFTAVGKEFNKLERRMENLNKKVDDGFLDIWTYNAELLVLLENERTLDFHDSNVKNLYEKVKSQLKNNAKEIGNGCFEFYHKCNDECMESVKNGTYDYPKYSEESKLNREKIDGVKLESMGVYQILAIYSTVASSLVLLVSLGAISFWMCSNGSLQCRICI

SEQ ID NO: 2533 - protein, 565 aa, synthetic construct; identical to SEQ ID NO: 1957
  REGION 1..565: note = hemagglutinin__InfluenzaA__ACN32804

SEQ ID NO: 2534 - protein, 565 aa, synthetic construct; identical to SEQ ID NO: 1945
  REGION 1..565: note = hemagglutinin__InfluenzaA__ACN32815

SEQ ID NO: 2535 - protein, 565 aa, synthetic construct; identical to SEQ ID NO: 1955
  REGION 1..565: note = hemagglutinin__InfluenzaA__ACN32826

SEQ ID NO: 2536 - protein, 566 aa, synthetic construct; identical to SEQ ID NO: 2434
  REGION 1..566: note = hemagglutinin__InfluenzaA__ACN32848

SEQ ID NO: 2537 - protein, 566 aa, synthetic construct
  REGION 1..566: note = hemagglutinin__InfluenzaA__ACN32870
MKTIIALSYILCLVFAQKFPGNDNSTATLCLGHHAVPNGTIVKTITNDQIEVTNATELVQSSSTGEICDSPHQILDGENCTLIDALLGDPQCDGFQNKNWDLFVERSKAYSNCYPYDVPDYASLRSLVASSGTLEFNNESFNWTGVTQNGTSSACIRRSNNSFFSRLNWLTHSKFKYPALNVTMPNNENFDKLYIWGVHHPGTDNDQIFLYAQASGRITVSTKRSQQTVIPNIGSRPRVRNIPSRISIYWTIVKPGDILLINSTGNLIAPRGYFKIRSGKSSIMRSDAPIGKCNSECITPNGSIPNDKPFQNVNRITYGACPRYVKQNTLKLATGMRNVPEKQTRGIFGAIAGFIENGWEGMVDGWYGFRHQNSEGIGQAADLKSTQAAIDQINGKLNRLIGKTNEKFHQIEKEFSEVEGRIQDLEKYVEDTKIDLWSYNAELLVALENQHTIDLTDSEMNKLFEKTKKQLRENAEDMGNGCFKIYHKCDNACIGSIRNGTYDHDVYRDEALNNRFQIKGVELKSGYKDWILWISFAISCFLLCIALLGFIMWACQKGNIRCNICI

SEQ ID NO: 2538 - protein, 566 aa, synthetic construct; identical to SEQ ID NO: 2537
  REGION 1..566: note = hemagglutinin__InfluenzaA__ACN32892

SEQ ID NO: 2539 - protein, 566 aa, synthetic construct; identical to SEQ ID NO: 2434
  REGION 1..566: note = hemagglutinin__InfluenzaA__ACN32903

SEQ ID NO: 2540 - protein, 566 aa, synthetic construct
  REGION 1..566: note = hemagglutinin__InfluenzaA__ACN32914
MKTIIALSYILCLAFAQKLPGNDNSTATLCLGHHAVPNGTIVKTITNDQIEVTNATELVQSSSTGEICDSPHQILDGENCTLIDALLGDPQCDGFQNKKWDLFVERSKAYSNCYPYDVPDYASLRSLVASSGTLEFNNESFNWTGVTQNGTSSACIRRSNNSFFSRLNWLTHLKFKYPALNVTMPNNEQFDKLYIWGVHHPGTDNDQIFLYAQASGRITVSTKRSQQTVIPNIGSRPRVRNIPSRISIYWTIVKPGDILLINSTGNLIAPRGYFKIRSGKSSIMRSDAPIGKCNSECITPNGSIPNDKPFQNVNRITYGACPRYVKQNTLKLATGMRNVPEKQTRGIFGAIAGFIENGWEGMVDGWYGFRHQNSEGRGQAADLKSTQAAIDQINGKLNRLIGKTNEKFHQIEKEFSEVEGRIQDLEKYVEDTKIDLWSYNAELLVALENQHTIDLTDSEMNKLFEKTKKQLRENAEDMGNGCFKIYHKCDNACIGSIRNGTYDHDVYRDEALNNRFQIKGVELKSGYKDWILWISFAISCFLLCVALLGFIMWACQKGNIRCNICI

SEQ ID NO: 2541 - protein, 566 aa, synthetic construct; identical to SEQ ID NO: 2434
  REGION 1..566: note = hemagglutinin__InfluenzaA__ACN32925

SEQ ID NO: 2542 - protein, 566 aa, synthetic construct
  REGION 1..566: note = hemagglutinin__InfluenzaA__ACN32936
MKTIIALSYILCLVFAQKFPGNDNSTATLCLGHHAVPNGTIVKTITNDQIEVTNATELVQSSSTGEICDSPHQILDGENCTLIDALLGDPQCDGFQNKNWDLFVERSKAYSNCYPYDVPDYASLRSLVASSGTLEFNNESFNWTGVTQNGTSSACIRRSNNSFFSRLNWLTHSKFKYPALNVTMPNNENFDKLYIWGVHHPGTDNDQIFLYAQASGRITVSTKRSQQTVIPNIGSRPRIKNIPSRISIYWTIVKPGDILLINSTGNLIAPRGYFKIRSGKSSIMRSDAPIGKCNSECITPNGSIPNDKPFQNVNRITYGACPRYVKQNTLKLATGMRNVPEKQTRGIFGAIAGFIENGWEGMVDGWYGFRHQNSEGIGQAADLKSTQAAIDQINGKLNRLIGKTNEKFHQIEKEFSEVEGRIQDLEKYVEDTKIDLWSYNAELLVALENQHTIDLTDSEMNKLFEKTKKQLRENAEDMGNGCFKIYHKCDNACIGSIRNGTYDHDVYRDEALNNRFQIKGVELKSGYKDWILWISFAISCFLLCIALLGFIMWACQKGNIRCNICI

SEQ ID NO: 2543 - protein, 566 aa, synthetic construct; identical to SEQ ID NO: 2434
  REGION 1..566: note = hemagglutinin__InfluenzaA__ACN32947

SEQ ID NO: 2544 - protein, 566 aa, synthetic construct
  REGION 1..566: note = hemagglutinin__InfluenzaA__ACN32958
MKTIIALSYILCLVFAQKLPGNDNSTATLCLGHHAVPNGTIVKTITNDQIEVTNATELVQSSSTGEICDSPHQILDGENCTLIDALLGDPQCDGFQNKKWDLFVERNKAYSNCYPYDVPDYASLRSLVASSGTLEFNNESFNWTGVTQNGTSSACIRRSNNSFFSRLNWLTHLKFKYPALNVTMPNNEQFDKLYIWGVHHPGTDNDQIFLYAQASGRITVSTKRSQQTVIPNIGSRPRVRNIPSRISIYWTIVKPGDILLINSTGNLIAPRGYFKIRSGKSSIMRSDAPIGKCNSECITPNGSIPNDKPFQNVNRITYGACPRYVKQNTLKLATGMRNVPEKQTRGIFGAIAGFIENGWEGMVDGWYGFRHQNSEGRGQAADLKSTQAAIDQINGKLNRLIGKTNEKFHQIEKEFSEVEGRIQDLEKYVEDTKIDLWSYNAELLVALENQHTIDLTDSEMNKLFEKTKKQLRENAEDMGNGCFKIYHKCDNACIGSIRNGTYDHDVYRDEALNNRFQIKGVELKSGYKDWILWISFAISCFLLCVALLGFIMWACQKGNIRCNICI

SEQ ID NO: 2545 - protein, 566 aa, synthetic construct
  REGION 1..566: note = hemagglutinin__InfluenzaA__ACN32969
MKTIIALSYILCLVSAQKLPGNDNSTATLCLGHHAVPNGTIVKTITNDQIEVTNATELVQSSSTGEICDSPHQVLDGENCTLIDALLGDPQCDGFQNKKWDLFVERSKAYSNCYPYDVPDYASLRSLVASSGTLEFNNESFNWTGVTQNGTSSACIRRSNNSFFSRLNWLTHSKFKYPALNVTMPNNEEFDKLYIWGVHHPGTDNDQIFLYAQASGRITVSTKRSQQTVIPNIGSRPRVRNIPSRISIYWTIVKPGDILLINSTGNLIAPRGYFKLRSGKSSIMRSDAPIGKCNSECITPNGSIPNDKPFQNVNRITYGACPRYVKQNTLKLATGMRNVPEKQTRGIFGAIAGFIENGWEGMVDGWYGFRHQNSEGIGQAADLKSTQAAIDQINGKLNRLIGKTNEKFHQIEKEFSEVEGRIQDLEKYVEDTKIDLWSYNAELLVALENQHTIDLTDSEMNKLFEKTKKQLRENAEDMGNGCFKIYHKCDNACIGSIRNGTYDHEVYRDEALNNRFQIKGVELKSGYKDWILWISFAISCFLLCVALLGFIMWACQKGNIRCNICI

SEQ ID NO: 2546 - protein, 566 aa, synthetic construct
  REGION 1..566: note = hemagglutinin__InfluenzaA__ACN32980
MKTIIALSYILCLVFAQKLPGNDNSTATLCLGHHAVPNGTIVKTITNDQIEVTNATELVQSSSTGEICDSPHQILDGENCTLIDALLGDPQCDGFQNKKWDLFVERSKAHSNCYPYDVPDYASLRSLVASSGTLEFNNESFNWTGVTQNGTSSACIRRSKNSFFSRLNWLTHLKFKYPALNVTMPNDEKFDKLYIWGVHHPGTDNDQIFLYAQASGRITVSTKRSQQTVIPNIGSRPRVRNIPSRISIYWTIVKPGDILLINSTGNLIAPRGYFKIRSGKSSIMRSDAPIGKCNSECITPNGSIPNDKPFQNVNRITYGACPRYVKQNTLKLATGMRNVPEKQTRGIFGAIAGFIENGWEGMVDGWYGFRHQNSEGIGQAADLKSTQAAIDQINGKLNRLIGKTNEKFHQIEKEFSEVEGRIQDLEKYVEDTKIDLWSYNAELLVALENQHTIDLTDSEMNKLFEKTKKQLRENAEDMGNGCFKIYHKCDNACVGSIRNGTYDHDVYRDEALNNRFQIKGVELKSGYKDWILWISFAISCFLLCVALLGFIMWACQKGNIRCNICI

SEQ ID NO: 2547 - protein, 566 aa, synthetic construct; identical to SEQ ID NO: 2434
  REGION 1..566: note = hemagglutinin__InfluenzaA__ACN32991

SEQ ID NO: 2548 - protein, 566 aa, synthetic construct; identical to SEQ ID NO: 2434
  REGION 1..566: note = hemagglutinin__InfluenzaA__ACN33002

SEQ ID NO: 2549 - protein, 566 aa, synthetic construct; identical to SEQ ID NO: 2434
  REGION 1..566: note = hemagglutinin__InfluenzaA__ACN33013

SEQ ID NO: 2550 - protein, 566 aa, synthetic construct
  REGION 1..566: note = hemagglutinin__InfluenzaA__ACN33035
MKTIIALSYILCLVFAQKLPGNDNSTATLCLGHHAVPNGTIVKTITNDQIEVTNATELVQSSSTGEICDSPHQILDGENCTLIDALLGDPQCDGFQNKKWDLFVERSKAYSNCYPYDVPDYASLRSLVASSGTLEFNNESFNWTGVTQNGTSSACIRRSNNSFFSRLNWLTHLKFKYPALNVTMPNNEQFDKLYVWGVHHPGTDNDQIFLYAQASGRITVSTKRSQQTVIPNIGSRPRVRNIPSRISIYWTIVKPGDILLINSTGNLIAPRGYFKIRSGKSSIMRSDAPIGKCNSECITPNGSIPNDKPFQNVNRITYGACPRYVKQNTLKLATGMRNVPEKQTRGIFGAIAGFIENGWEGMVDGWYGFRHQNSEGRGQAADLKSTQAAIDQINGKLNRLIGKTNEKFHQIEKEFSEVEGRIQDLEKYVEDTKIDLWSYNAELLVALENQHTIDLTDSEMNKLFEKTKKQLRENAEDMGNGCFKIYHKCDNACIGSIRNGTYDHDVYRDEALNNRFQIKGVELKSGYKDWILWISFAISCFLLCVALLGFIMWACQKGNIRCNICI

SEQ ID NO: 2551 - protein, 566 aa, synthetic construct; identical to SEQ ID NO: 2434
  REGION 1..566: note = hemagglutinin__InfluenzaA__ACN33046

SEQ ID NO: 2552 - protein, 566 aa, synthetic construct; identical to SEQ ID NO: 2434
  REGION 1..566: note = hemagglutinin__InfluenzaA__ACN33057

SEQ ID NO: 2553 - protein, 566 aa, synthetic construct; identical to SEQ ID NO: 2434
  REGION 1..566: note = hemagglutinin__InfluenzaA__ACN33068

SEQ ID NO: 2554 - protein, 566 aa, synthetic construct; identical to SEQ ID NO: 2537
  REGION 1..566: note = hemagglutinin__InfluenzaA__ACN33079

SEQ ID NO: 2555 - protein, 565 aa, synthetic construct
  REGION 1..565: note = hemagglutinin__InfluenzaA__ACN33090
MKVKLLILLCTFTATYADTICIGYHANNSTDTVDTVLEKNVTVTHSVNLLEDSHNGKLCLLKGIAPLQLGNCSVAGWILGNPECELLISKESWSYIVETPNPENGTCYPGYFADYEELREQLSSVSSFERFEIFPKESSWPNHTVTGVSASCSHNGKSSFYRNLLWLTGKNGLYPNLSKSYANNKEKEVLVLWGVHHPSNIGDQRALYHTENAYVSVVSSHYSRRFTPEIAKRPKVRDQEGRINYYWTLLEPGDTIIFEANGNLIAPRFAFALSRGFGSGIITSNAPMDECDAKCQTPQGAINSSLPFQNVHPVTIGECPKYVRSTKLRMVTGLRNIPSIQSRGLFGAIAGFIEGGWTGMVDGWYGYHHQNEQGSGYAADQKSTQNAINGITNKVNSVIEKMNTQFTAVGKEFNKLERRMENLNKKVDDGFLDIWTYNAELLVLLENERTLDFHDSNVKNLYEKVKSQLKNNAKEIGNGCFEFYHKCNDECMESVKNGTYDYPKYSEESKLNREKIDGVKLESMGVYQILAIYSTVASSLVLLVSLGAISFWMCSNGSLQCRICI

SEQ ID NO: 2556 - protein, 565 aa, synthetic construct; identical to SEQ ID NO: 1914
  REGION 1..565: note = hemagglutinin__InfluenzaA__ACN33101

SEQ ID NO: 2557 - protein, 566 aa, synthetic construct; identical to SEQ ID NO: 2537
  REGION 1..566: note = hemagglutinin__InfluenzaA__ACN33112

SEQ ID NO: 2558 - protein, 565 aa, synthetic construct; identical to SEQ ID NO: 2488
  REGION 1..565: note = hemagglutinin__InfluenzaA__ACN33123

SEQ ID NO: 2559 - protein, 565 aa, synthetic construct; identical to SEQ ID NO: 2488
  REGION 1..565: note = hemagglutinin__InfluenzaA__ACN33145

SEQ ID NO: 2560 - protein, 566 aa, synthetic construct; identical to SEQ ID NO: 2434
  REGION 1..566: note = hemagglutinin__InfluenzaA__ACN33156

SEQ ID NO: 2561 - protein, 566 aa, synthetic construct
  REGION 1..566: note = hemagglutinin__InfluenzaA__ACN33178
MKTIIALSYILCLVFAQKFPGNDNSTATLCLGHHAVPNGTIVKTITNDQIEVTNATELVQSSSTGEICDSPHQILDGENCTLIDALLGDPQCDGFQNKNWDLFVERSKAYSNCYPYDVPDYASLRSLVASSGTLEFNNESFNWTGVTQNGTSSACIRRSNNSFFSRLNWLTHSKFKYPALNVTMPNNENFDKLYIWGVHHPGTDNDQIFLYAQASGRITVSTKRSQQTVIPNIGSRPRVRNIPSRISIYWTIVKPGDILLINSTGNLIAPRGYFKIRSGKSSIMRSDAPIGKCNSECITPNGSIPNDKPFQNVNRITYGACPRYVKQNTLKLATGMRNVPEKQTRGIFGAIAGFIENGWEGMVDGWYGFRHQNSEGIGQAADLKSTQAAIDQINGKLNRLIGKTNEKFHQIEKEFSEVEGRIQDLEKYVEDTKIDLWSYNAELLVALENQHTIDLTDSEMNKLFEKTKKQLRENAEDMGNGCFKIYHKCDNACIGSIRNGTYDHDVYRDEALNNRFHIKGVELKSGYKDWILWISFAISCFLLCIALLGFIMWACQKGNIRCNICI

SEQ ID NO: 2562 - protein, 566 aa, synthetic construct; identical to SEQ ID NO: 2434
  REGION 1..566: note = hemagglutinin__InfluenzaA__ACN33189

SEQ ID NO: 2563 - protein, 566 aa, synthetic construct
  REGION 1..566: note = hemagglutinin__InfluenzaA__ACN33200
MKTIIALSYILCLVFAQKFPGNDNSTATLCLGHHAVPNGTIVKTITNDQIEVTNATELVQSSSTGEICDSPHQILDGENCTLIDALLGDPQCDGFQNKNWDLFVERSKAYSNCYPYDVPDYASLRSLVASSGTLEFNNESFNWTGVTQNGTSSACIRRSNNSFFSRLNWLTHSKFKYPALNVTMPNNENFDKLYIWGVHHPGTDNDQIFLYAQASGRITVSTKRSQQTVIPNIGSRPRVRNIPSRISIYWTIVEPGDILLINSTGNLIAPRGYFKIRSGKSSIMRSDAPIGKCNSECITPNGSIPNDKPFQNVNRITYGACPRYVKQNTLKLATGMRNVPEKQTRGIFGAIAGFIENGWEGMVDGWYGFRHQNSEGIGQAADLKSTQAAIDQINGKLNRLIGKTNEKFHQIEKEFSEVEGRIQDLEKYVEDTKIDLWSYNAELLVALENQHTIDLTDSEMNKLFEKTKKQLRENAEDMGNGCFKIYHKCDNACIGSIRNGTYDHDVYRDEALNNRFQIKGVELKSGYKDWILWISFAISCFLLCIALLGFIMWACQKGNIRCNICI

SEQ ID NO: 2564 - protein, 566 aa, synthetic construct
  REGION 1..566: note = hemagglutinin__InfluenzaA__ACN33211
MKTIIALSYILCLVFAQKLPGNDNSTATLCLGHHAVPNGTIVKTITNDQIEVTNATELVQSSSTGEICDSPHQILDGENCTLIDALLGDPQCDGFQNKKWDLFVERSKAYSNCYPYDVPDYASLRSLVASSGTLEFNNESFNWTGVTQNGTSSACIRRSNNSFFSRLNWLTHLKFKYPALNVTMPNNEQFDKLYIWGVHHPGTDNDQIFLYAQASGRITVSTKRSQQTVIPNIGSRPRVRNIPSRISIYWTIVKPGDILLINSTGNLIAPRGYFKIRSGKSSIMRSDAPIGKCNSECITPNGSIPNDKPFQNVNRITYGACPRYVKQNTLKLATGMRNVPEKQTRGIFGAIAGFIENGWEGMVDGWYGFRHQNSEGRGQAADLKSTQAAIDQINGKLNRLIGKTNEKFHQIEKEFSEVEGRIQDLEKYVEDTKIDLWSYNAELLVALENQHTIDLTDSEMNKLFEKTKKQLRENAEDMGNGCFKIYHKCDNACIGSIRNGTYDHDVYRDEALSNRFQIKGVELKSGYKDWILWISFAISCFLLCVALLGFIMWACQKGNIRCNICI

SEQ ID NO: 2565 - protein, 565 aa, synthetic construct; identical to SEQ ID NO: 1956
  REGION 1..565: note = hemagglutinin__InfluenzaA__ACN42981

SEQ ID NO: 2566 - protein, 565 aa, synthetic construct; identical to SEQ ID NO: 2190
  REGION 1..565: note = hemagglutinin__InfluenzaA__ACN42992

SEQ ID NO: 2567 - protein, 566 aa, synthetic construct; identical to SEQ ID NO: 2434
  REGION 1..566: note = hemagglutinin__InfluenzaA__ACN43003

SEQ ID NO: 2568 - protein, 566 aa, synthetic construct
  REGION 1..566: note = hemagglutinin__InfluenzaA__ACN43014
MKTIIALSYILCLVFAQKFPGNDNSTATLCLGHHAVPNGTIVKTITNDQIEVTNATELVQSSSTGEICDSPHQILDGENCTLIDALLGDPQCDGFQNKNWDLFVERSKAYSNCYPYDVPDYASLRSLVASSGTLEFNNESFNWIGVTQNGTSSACIRRSNNSFFSRLNWLTHSKFKYPALNVTMPNNENFDKLYIWGVHHPGTDNDQIFLYAQASGRITVSTKRSQQTVIPNIGSRPRVRNIPSRISIYWTIVKPGDILLINSTGNLIAPRGYFKIRSGKSSIMRSDAPIGNCNSECITPNGSIPNDKPFQNVNRITYGSCPRYVKQNTLKLATGMRNVPEKQTRGIFGAIAGFIENGWEGMVDGWYGFRHQNSEGIGQAADLKSTQAAIDQINGKLNRLIGKTNEKFHQIEKEFSEVEGRIQDLEKYVEDTKIDLWSYNAELLVALENQHTIDLTDSEMNKLFEKTKKQLRENAEDMGNGCFKIYHKCDNACIGSIRNGTYDHDVYRDEALNNRFQIKGVELKSGYKDWILWISFAISCFLLCIALLGFIMWACQKGNIRCNICI

SEQ ID NO: 2569 - protein, 566 aa, synthetic construct; identical to SEQ ID NO: 2434
  REGION 1..566: note = hemagglutinin__InfluenzaA__ACN43025

SEQ ID NO: 2570 - protein, 566 aa, synthetic construct; identical to SEQ ID NO: 2434
  REGION 1..566: note = hemagglutinin__InfluenzaA__ACN43036

SEQ ID NO: 2571 - protein, 566 aa, synthetic construct; identical to SEQ ID NO: 2434
  REGION 1..566: note = hemagglutinin__InfluenzaA__ACN43047

SEQ ID NO: 2572 - protein, 566 aa, synthetic construct
  REGION 1..566: note = hemagglutinin__InfluenzaA__ACN43058
MKTIIALSYILCLVFAQKLPGNDNSTATLCLGHHAVPNGTIVKTITNDQIEVTNATELVQSSSTGEICGSPHQILDGENCTLIDALLGDPQCDGFQNKKWDLFVERSKAYSNCYPYDVPDYASLRSLVASSGTLEFNNESFNWTGVTQNGTSSACIRRSNNSFFSRLNWLTHLKFKYPALNVTMPNNEQFDKLYIWGVHHPGTDNDQIFLYAQASGRITVSTKRSQQTVIPNIGSRPRVRNIPSRISIYWTIVKPGDILLINSTGNLIAPRGYFKIRSGKSSIMRSDAPIGKCNSECITPNGSIPNDKPFQNVNRITYGACPRYVKQNTLKLATGMRNVPEKQTRGIFGAIAGFIENGWEGMVDGWYGFRHQNSEGRGQAADLKSTQAAIDQINGKLNRLIGKTNEKFHQIEKEFSEVEGRIQDLEKYVEDTKIDLWSYNAELLVALENQHTIDLTDSEMNKLFEKTKKQLRENAEDMGNGCFKIYHKCDNACIGSIRNGTYDHDVYRDEALNNRFQIKGVELKSGYKDWILWISFAISCFLLCVALLGFIMWACQKGNIRCNICI

SEQ ID NO: 2573 - protein, 566 aa, synthetic construct; identical to SEQ ID NO: 2434
  REGION 1..566: note = hemagglutinin__InfluenzaA__ACN43069

SEQ ID NO: 2574 - protein, 566 aa, synthetic construct; identical to SEQ ID NO: 2537
  REGION 1..566: note = hemagglutinin__InfluenzaA__ACN43080

SEQ ID NO: 2575 - protein, 566 aa, synthetic construct
  REGION 1..566: note = hemagglutinin__InfluenzaA__ACN72617
MEAKLFVLFCAFTALKADTICVGYHANNSTDTVDTILEKNVTVTHSVNLLENSHNGKLCSLNGKAPLQLGNCNVAGWILGNPECDLLLTANSWSYIIETSDSKNGACYPGEFADYEELREQLSTVSSFERFEIFPKATSWPNHETTKGTTVACSHSGANSFYRNLLWIVKKGNSYPKLSKSYTNNKGKEVLVIWGVHHPPTDSDQQTLYQNKHTYVSVGSSKYYQRFTPEIVTRPKVREQAGRMNYYWTLLDQGDTITFEATGNLIAPWHAFALNKGSNSGIMMSDAHVHNCTTKCQTPHGALKGNLPFQNVHPITIGECPKYVKSTQLRMATGLRNIPSIQSRGLFGAIAGFIEGGWTGMIDGWYGYHHQNEQGSGYAADRKSTQIAIDGISNKVNSVIEKMNIQFTSVGKEFNNLEKRIENLNKKVDDGFLDVWTYNAELLILLENERTLDFHDFNVKNLYEKVKSQLRNNAKEIGNGCFEFYHKCDNECMESVKNGTYNYPRYSEESKLNREEIDGVKLESVGVHQILAIYSTVASSLVLLVSLGAISFWMCSNGSLQCRICI

SEQ ID NO: 2576 - protein, 566 aa, synthetic construct
  REGION 1..566: note = hemagglutinin__InfluenzaA__ACN72632
MKTVIALSYVFCLVFGQDLPGKGNNTATLCLGHHAVPNGTLVKTITDDQIEVTNATELVQNFSIGKICKNPHRILDGANCTLIDSLLGDPHCDGFQNEKWDLFIERSKAFSNCYPYDVPEYTSLRSLIASSGTLEFTNEDFNWTGVTQNGGSSACKRGPNNSFFSRLNWLYKSGNTYPMLNVTMPNSDDFDKLYIWGVHHPSTDREQTNLYIQASGKIIVSTKRSQQTIIPNIGSRPWVRGLSSRISIYWTIVKPGDILIINSNGNLIAPRGYFKIQTGKSSVMRSDAPIGTCNYECITPNGSIPNDKPFQNVNRITYGACPHYIKQNTLKLATGMRNIPERQTRGIFGAIAGFIENGWEGMVNGWYGFRHQNSEGIGQAADLKSTQAAINQINGKLNRVIEKTNEKFHQIEKEFSEVEGRIQDLERYVEDTKIDLWSYNAELLVALENQHTIDLTDSEMNKLFEKTRKQLRENAEDMGNGCFKIYHKCDNSCMESIRNGTYDHNEYRDEAVNNRFQIKSVELKSGYKDWILWISFAISCFLLCAVWLGFIIWACQKGNIRCNICI

SEQ ID NO: 2577 - protein, 566 aa, synthetic construct; identical to SEQ ID NO: 2434
  REGION 1..566: note = hemagglutinin__InfluenzaA__ACN76478

SEQ ID NO: 2578 - protein, 566 aa, synthetic construct
  REGION 1..566: note = hemagglutinin__InfluenzaA__ACN76489
MKTIIALGYILCLVSAQKLPGNDNSTATLCLGHHAVPNGTIVKTITNDQIEVTNATELVQSSSTGEICDSPHQVLDGENCTLIDALLGDPQCDGFQNKKWDLFVERSKAYSNCYPYDVPDYASLRSLVASSGTLEFNNESFNWTGVTQNGTSSACIRRSNNSFFSRLNWLTHLKFKYPALNVTMPNNEEFDKLYIWGVHHPGTDNDQIFLYAQASGRITVSTKRSQQTVIPNIGSRPRVRNIPSRISIYWTIVKPGDILLINSTGNLIAPRGYFKIRSGKSSIMRSDAPIGKCNSECITPNGSIPNDKPFQNVNRITYGACPRYVKQNTLKLATGMRNVPEKQTRGIFGAIAGFIENGWEGMVDGWYGFRHQNSEGIGQAADLKSTQAAIDQINGKLNRLIGKTNEKFHQIEKEFSEVEGRIQDLEKYVEDTKIDLWSYNAELLVALENQHTIDLTDSEMNKLFEKTKKQLRENAEDMGNGCFKIYHKCDNACIGSIRNGTYDHEVYRDEALNNRFQIKGVELKSGYKDWILWISFAISCFLLCVALLGFIMWACQKGNIRCNICI

SEQ ID NO: 2579 - protein, 566 aa, synthetic construct; identical to SEQ ID NO: 2434
  REGION 1..566: note = hemagglutinin__InfluenzaA__ACN76500

SEQ ID NO: 2580 - protein, 566 aa, synthetic construct; identical to SEQ ID NO: 2434
  REGION 1..566: note = hemagglutinin__InfluenzaA__ACN76511

SEQ ID NO: 2581 - protein, 566 aa, synthetic construct; identical to SEQ ID NO: 2434
  REGION 1..566: note = hemagglutinin__InfluenzaA__ACN76522

SEQ ID NO: 2582 - protein, 566 aa, synthetic construct; identical to SEQ ID NO: 2434
  REGION 1..566: note = hemagglutinin__InfluenzaA__ACO36331

SEQ ID NO: 2583 - protein, 566 aa, synthetic construct
  REGION 1..566: note = hemagglutinin__InfluenzaA__ACO36342
MKTIIALSYILCLVFAQKFPGNDNSTATLCLGHHAVPNGTIVKTITNDQIEVTNATELVQSSSTGEICDSPHQILDGENCTLIDALLGDPQCDGFQNKNWDLFVERSKAYSNCYPYDVPDYASLRSLVASSGTLEFNNESFNWTGVTQNGTSSACIRRSNNSFFSRLNWLTHSKFKYPALNVTMPNNENFDKLYIWGVHHPGTDNDQIFLYAQASGRITVSTKRSQQTVIPNIGSRPRVRNIPSRISIYWTIVKPGDILLINSTGNLIAPRGYFKIRSGKSSIMRSDAPIGKCNSECITPNGSIPNDKPFQNVNRITYGACPRYVKQNTLKLATGMRNVPEKQTRGIFGAIAGFIENGWEGMVDGWYGFRHQNSEGIGQAADLKSTQAAIDQINGKLNRLIGKTNEKFHQIEKEFSEIEGRIQDLEKYVEDTKIDLWSYNAELLVALENQHTIDLTDSEMNKLFEKTKKQLRENAEDMGNGCFKIYHKCDNACIGSIRNGTYDHDVYRDEALNNRFQIKGVELKSGYKDWILWISFAISCFLLCIALLGFIMWACQKGNIRCNICI

SEQ ID NO: 2584 - protein, 566 aa, synthetic construct
  REGION 1..566: note = hemagglutinin__InfluenzaA__ACO36364
MKTIIALSYILCLVFAQKLPGNDNSTATLCLGHHAVPNGTIVKTITNDQIEVTNATELVQSSSTGEICDSPHQILDGENCTLIDALLGDPQCDGFQNKKWDLFVERSKAYSNCYPYDVPDYASLRSLVASSGTLEFNNESFNWTGVTQNGTSSACIRRSNNSFFSRLNWLTHLKFKYPALNVTMPNNEKFDKLYIWGVHHPGTDNDQIFLYAQASGRITVSTKRSQQTVIPNIGSRPRVRNIPSRISIYWTIVKPGDILLINSTGNLIAPRGYFKIRSGKSSIMRSDAPIGKCNSECITPNGSIPNDKPFQNVNRITYGACPRYVKQNTLKLATGMRNVPEKQTRGIFGAIAGFIENGWEGMVDGWYGFRHQNSEGTGQAADLKSTQAAIDQINGKLNRLIGKTNEKFHQIEKEFSEVEGRIQDLEKYVEDTKIDLWSYNAELLVALENQHTIDLTDSEMNKLFEKTKKQLRENAEDMGNGCFKIYHKCDNACIGSIRNGTYDHDVYRDEALNNRFQIKGVELKSGYKDWILWISFAISCFLLCVALLGFIMWACQKGNIRCNICI

SEQ ID NO: 2585 - protein, 566 aa, synthetic construct; identical to SEQ ID NO: 2301
  REGION 1..566: note = hemagglutinin__InfluenzaA__ACO36375

SEQ ID NO: 2586 - protein, 565 aa, synthetic construct; identical to SEQ ID NO: 2488
  REGION 1..565: note = hemagglutinin__InfluenzaA__ACO36397

SEQ ID NO: 2587 - protein, 566 aa, synthetic construct; identical to SEQ ID NO: 2301
  REGION 1..566: note = hemagglutinin__InfluenzaA__ACO36408

SEQ ID NO: 2588 - protein, 566 aa, synthetic construct; identical to SEQ ID NO: 1928
  REGION 1..566: note = hemagglutinin__InfluenzaA__ACO36419

SEQ ID NO: 2589 - protein, 566 aa, synthetic construct; identical to SEQ ID NO: 1928
  REGION 1..566: note = hemagglutinin__InfluenzaA__ACO36430

SEQ ID NO: 2590 - protein, 566 aa, synthetic construct
  REGION 1..566: note = hemagglutinin__InfluenzaA__ACO36441
MKTIIALSYILCLVFAQKLPGNDNSTATLCLGHHAVPNGTIVKTITNDQIEVTNATELVQSSSTGGICDSPHQILDGENCTLIDALLGDPQCDGFQNKKWDLFVERSKAYSNCYPYDVPDYASLRSLVASSGTLEFNNESFDWTGVTQNGTSSACKRRSNKSFFSRLNWLTHLKYKYPALNVTMPNNEKFDKLYIWGVHHPGTDSDQISLYAQASGRITVSTKRSQQTVIPNIGSRPRVRDVSSRISIYWTIVKPGDILLINSTGNLIAPRGYFKIRSGKSSIMRSDAPIGKCNSECITPNGSIPNDKPFQNVNRITYGACPRYVKQNTLKLATGMRNVPEKQTRGIFGAIAGFIENGWEGMVDGWYGFRHQNSEGTGQAADLKSTQAAINQINGKLNRLIGKTNEKFHQIEKEFSEVEGRIQDLEKYVEDTKIDLWSYNAELLVALENQHTIDLTDSEMNKLFERTKKQLRENAEDMGNGCFKIYHKCDNACIGSIRNGTYDHDVYRDEALNNRFQIKGVELKSGYKDWILWISFAISCFLLCVALLGFIMWACQKGNIRCDICI

SEQ ID NO: 2591 - protein, 566 aa, synthetic construct
  REGION 1..566: note = hemagglutinin__InfluenzaA__ACO36452
MKTIIALSYILCLVFAQKLPGNDNSTATLCLGHHAVPNGTIVKTITNDQIEVTNATELVQSSSTGGICDSPHQILDGENCTLIDALLGDPQCDGFQNKKWDLFVERSKAYSNCYPYDVPDYASLRSLVASSGTLEFNNESFDWTGVTQNGTSSSCKRRSNNSFFSRLNWLTHLKYKYPALNVTMPNNEKFDKLYIWGVHHPGTDSDQISLYAQASGRITISTKRSQQTVIPNIGSRPRVRDVSSRISIYWTIVKPGDILLINSTGNLIAPRGYFKIRSGKSSIMRSDAPIGKCNSECITPNGSIPNDKPFQNVNRITYGACPRYVKQNTLKLATGMRNVPEKQTRGIFGAIAGFIENGWEGMVDGWYGFRHQNSEGTGQAADLKSTQAAINQINGKLNRLIGKTNEKFHQIEKEFSEVEGRIQDLEKYVEDTKIDLWSYNAELLVALENQHTIDLTDSEMNKLFERTKKQLRENAEDMGNGCFKIYHKCDNACIGSIRNGTYDHDVYRDEALNNRFQIKGVELKSGYKDWILWISFAISCFLLCVALLGFIMWACQKGNIRCNICI

SEQ ID NO: 2592 - protein, 566 aa, synthetic construct
  REGION 1..566: note = hemagglutinin__InfluenzaA__ACO36463
MKTIIALSYILCLVFAQKLPGNDNSTATLCLGHHAVPNGTIVKTITNDQIEVTNATELVQSSSTGGICDSPHQILDGENCTLIDALLGDPQCDGFQNKKWDLFIERSKAYSNCYPYDVPDYASLRSLVASSGTLEFNNESFNWTGVTQNGTSSACQRRSNKSFFSRLNWLTHLKFKYPALNVTMPNNEKFDKLYIWGVHHPGTDNDQISLYAQTSGRITVSTKRSQQTVIPNIGSRPRVRDVPSRISIYWTIVKPGDILLINSTGNLIAPRGYFKIRSGKSSIMRSDAPIGKCNSECITPNGSIPNDKPFQNVNRITYGACPRYVKQNTLKLATGMRNVPERQTRGIFGAIAGFIENGWEGMVDGWYGFRHQNSEGTGQAADLKSTQAAINQINGKLNRLIGKTNEKFHQIEKEFSEVEGRIQDLEKYVEDTKIDLWSYNAELLVALENQHTIDLTDSEMNKLFERTKKQLRENAEDMGNGCFKIYHKCDNACIGSIRNGTYDHDVYRDEALNNRFQIKGVELKSGYKDWILWISFAISCFVLCVALLGFIMWACQKGNIRCNICI

SEQ ID NO: 2593 - protein, 566 aa, synthetic construct
  REGION 1..566: note = hemagglutinin__InfluenzaA__ACO36474
MKTIIALSYILCLVFAQKLPGNDNSTATLCLGHHAVPNGTIVKTITNDQIEVTNATELVQSSSTGGICDSPHQILDGENCTLIDALLGDPQCDGFQNKKWDLFVERSKAYSNCYPYDVPDYASLRSLVASSGTLEFNNESFDWTGVTQNGTSSSCKRRSNNSFFSRLNWLTHLRYKYPALNVTMPNNEKFDKLYIWGVHHPGTDSDQISLYAQASGRITVSTKRSQQTVIPNIGSRPRVRDVSSRISIYWTIVKPGDILLINSTGNLIAPRGYFKIRSGKSSIMRSDAPIGKCNSECITPNGSIPNDKPFQNVNRITYGDCPRYVKQNTLKLATGMRNVPEKQTRGIFGAIAGFIENGWEGMVDGWYGFRHQNSEGTGQAADLKSTQAAINQINGKLNRLIGKTNEKFHQIEKEFSEVEGRIQDLEKYVEDTKIDLWSYNAELLVALENQHTIDLTDSEMNKLFERTKKQLRENAEDMGNGCFKIYHKCDNACIGSIRNGTYDHDVYRDEALNNRFQIKGVELKSGYKDWILWISFAISCFLLCVALLGFIMWACQKGNIRCNICI

SEQ ID NO: 2594 - protein, 566 aa, synthetic construct
  REGION 1..566: note = hemagglutinin__InfluenzaA__ACO36496
MKTIIALSYILCLVFAQKLPGNDNSTATLCLGHHAVPNGTIVKTITNDQIEVTNATELVQSSSTGGICDSPHQILDGENCTLIDALLGDPQCDGFQNKKWDLFVERSKAYSNCYPYDVPDYASLRSLVASSGTLEFNNESFNWTGVTQNGTSSACKRRSNNGFFSRLNWLTHLKFKYPALNVTMPNNEKFDKLYIWGVHHPGTDNDQISLYAQASGRITVSTKRSQQTVIPNIGSRPRVRDISSRISIYWTIVKPGDILLINSTGNLIAPRGYFKIRSGKSSIMRSDAPIGKCNSECITPNGSIPNDKPFQNVNRITYGACPRYVKQNTLKLATGMRNVPETQTRGIFGAIAGFIENGWEGMVDGWYGFRHQNSEGTGQAADLKSTQAAINQINGKLNRLIGKTNEKFHQIEKEFSEVEGRIQDLEKYVEDTKIDLWSYNAELLVALENQHTIDLTDSEMNKLFERTKKQLRENAEDMGNGCFKIYHKCDNACIGSIRNGTYDHDVYRDEALNNRFQIKGVELKSGYKDWILWISFAISCFLLCVALLGFIMWACQKGNIRCNICI

SEQ ID NO: 2595 - protein, 566 aa, synthetic construct
  REGION 1..566: note = hemagglutinin__InfluenzaA__ACO36518
MKTIIALSYILCLVFAQKLPGNDNSTATLCLGHHAVPNGTIVKTITNDQIEVTNATELVQSSSTGGICDSPHQILDGENCTLIDALLGDPQCDGFQNKKWDLFVERSKAYSNCYPYDVPDYASLRSLVASSGTLEFNNESFNWTGVTQNGTSSACKRRSNKSFFSRLNWLTHLKFKYPALNVTMPNNEKFDKLYIWGVHHPGTDNDQISLYAQASGRITVSTKRSQQTVIPNIGSRPRVRDVPSRISIYWTIVKPGDILLINSTGNLIAPRGYFKIRSGKSSIMRSDAPIGKCNSECITPNGSIPNDKPFQNVNRITYGTCPRYVKQNTLKLATGMRNVPEKQTRGIFGAIAGFIENGWEGMVDGWYGFRHQNSEGTGQAADLKSTQAAINQINGKLNRLIGKTNEKFHQIEKEFSEVEGRIQDLEKYVEDTKIDLWSYNAELLVALENQHTIDLTDSEMNKLFERTKKQLRENAEDMGNGCFKIYHKCDNACIGSIRNGTYDHDVYRDEALNNRFQIKGVELKLGYKDWILWISFAISCFLLCVALLGFIMWACQKGNIRCNICI

SEQ ID NO: 2596 - protein, 566 aa, synthetic construct
  REGION 1..566: note = hemagglutinin__InfluenzaA__ACO36551
MKTIIALSHILCLVFAQKPPGNDNSTATLCLGHHAVPNGTIVKTITNDQIEVTNATELVQSSSTGGICDSPHQILDGENCTLIDALLGDPQCDGFQNKKWDLFVERSKAYSNCYPYDVPDYASLRSLVASSGTLEFNNESFNWTGVTQNGTSSACKRRSNNSFFSRLNWLTHLKFKYPALNVTMPNNEKFDKLYIWGVHHPGTDNDQISLYAQASGRITVSTKRSQQTVIPNIGSRPRVRDISSRISIYWTIVKPGDILLINSTGNLIAPRGYFKIRSGKSSIMRSDAPIGKCNSECITPNGSIPNDKPFQNVNRITYGACPRYVKQNTLKLATGMRNVPETQTRGIFGAIAGFIENGWEGMVDGWYGFRHQNSEGTGQAADLKSTQAAINQINGKLNRLIGKTNEKFHQIEKEFSEVEGRIQDLEKYVEDTKIDLWSYNAELLVALENQHTIDLTDSEMNKLFERTKKQLRENAEDMGNGCFKIYHKCDNACIGSIRNETYDHDVYRDEALNNRFQIKGVELKSGYKDWILWISFAISCFLLCVALLGFIMWACQKGNIRCNICI

SEQ ID NO: 2597 - protein, 566 aa, synthetic construct
  REGION 1..566: note = hemagglutinin__InfluenzaA__ACO36562
MKTIIALSYILCLVFAQKLPGNDNSTATLCLGHHAVPNGTIVKTITNDQIEVTNATELVQSSSTGGICDSPHQILDGENCTLIDALLGDPQCDGFQNKKWDLFVERSKAYSNCYPYDVPDYASLRSLVASSGTLEFNNESFNWTGVTQNGTSSACKRRSNNSFFSRLNWLTHLKFKYPALNVTMPNNEKFDKLYIWGVHHPGTDNDQISLYAQASGRITVSTKRSQQTVIPNIGSRPRVRDIPSRISIYWTIVKPGDILLINSTGNLIAPRGYFKIRSGKSSIMRSDAPIGKCNSECITPNGSIPNDKPFQNVNRITYGACPRYVKQNTLKLATGMRNVPETQTRGIFGAIAGFIENGWEGMVDGWYGFRHQNSEGTGQAADLKSTQAAINQINGKLNRLIGKTNEKFHQIEKEFSEVEGRIQDLEKYVEDTKIDLWSYNAELLVALENQHTIDLTDSEMNKLFERTKKQLRENAEDMGNGCFKIYHKCDNACIGSIRNETYDHDVYRDEALNNRFQIKGVELKSGYKDWILWISFAISCFLLCVALLGFIMWACQKGNIRCNICI

SEQ ID NO: 2598 - protein, 566 aa, synthetic construct
  REGION 1..566: note = hemagglutinin__InfluenzaA__ACO36573
MKTIIALSYILCLVFAQKLPGNDNSTATLCLGHHAVPNGTIVKTITNDQIEVTNATELVQSSSTGGICDSPHQILDGENCTLIDALLGDPQCDGFQNKKWDLFVERSKAYSNCYPYDVPDYASLRSLVASSGTLEFNNESFNWTGVTQNGTSSACKRRSNNSFFSRLNWLTHLKFKYPALNVTMPNNEKFDKLYIWGVHHPGTDNDQISLYAQASGRITVSTKRSQQTVIPNIGSRPRVRDISSRISIYWTIVKPGDILLINSTGNLIAPRGYFKIRSGKSSIMRSDAPIGKCNSECITPNGSIPNDKPFQNVNRITYGACPRYVKQNTLKLATGMRNVPETQTRGIFGAIAGFIENGWEGMVDGWYGFRHQNSEGTGQAADLKSTQAAINQINGKLNRLIGKTNEKFHQIEKEFSEVEGRIQDLEKYVEDTKIDLWSYNAELLVALENQHTIDLTDSEMNKLFERTKKQLRENAEDMGNGCFKIYHKCDNACIGSIRNETYDHDVYRDEALNNRFQIKGVELKSGYKDWILWISFAISCFLLCVALLGFIMWACQKGNIRCNICI

SEQ ID NO: 2599 - protein, 566 aa, synthetic construct
  REGION 1..566: note = hemagglutinin__InfluenzaA__ACO36584
MKTIIALSYILCLVFSQKLPGNDNSTATLCLGHHAVPNGTIVKTITNDQIEVTNATELVQSSSTGGICDSPHQILDGENCTLIDALLGDPQCDGFQNKKWDLFVERSKAYSNCYPYDVPDYASLRSLVASSGTLEFNNESFNWTGVTQNGTSSACKRRSNNSFFSRLNWLTHLKFKYPALNVTMPNNEKFDKLYIWGVHHPGTDNDQISLYAQASGRITVSTKKSQQTVIPNIGSRPRVRDISSRISIYWTIVKPGDILLINSTGNLIAPRGYFKIRSGKSSIMRSDAPIGKCNSECITPNGSIPNDKPFQNVNRITYGACPRYVKQNTLKLATGMRNVPETQTRGIFGAIAGFIENGWEGMVDGWYGFRHQNSEGTGQAADLKSTQAAINQINGKLNRLIGKTNEKFHQIEKEFSEVEGRIQDLEKYVEDTKIDLWSYNAELLVALENQHTIDLTDSEMNKLFERTKKQLRENAEDMGNGCFKIYHKCDNACIGSIRNETYDHDVYRDEALNNRFQIKGVELKSGYKDWILWISFAISCFLLCVALLGFIMWACQKGNIRCNICI

SEQ ID NO: 2600 - protein, 566 aa, synthetic construct; identical to SEQ ID NO: 630
  REGION 1..566: note = hemagglutinin__InfluenzaA__ACO36595

SEQ ID NO: 2601 - protein, 566 aa, synthetic construct
  REGION 1..566: note = hemagglutinin__InfluenzaA__ACO36606
MKTIIALSYILCLVFAQKLPGNDNSTATLCLGHHAVPNGTIVKTITNDQIEVTNATELVQSSSTGGICDSPHQILDGENCTLIDALLGDPQCDGFQNKKWDLFVERSKAYSNCYPYDVPDYASLRSLVASSGTLEFKNESFNWTGVTQNGTSSACKRRSNNSFFSRLNWLTHLKFKYPALNVTMPNNEKFDKLYIWGVHHPGTDNDQIFLYAQASGRITVSTQRSQQTVIPNIGSRPRVRNIPSRISIYWTIVKPGDILLINSTGNLIAPRGYFKIRSGKSSIMRSDAPIGKCNSECITPNGSIPNDKPFQNVNRITYGACPRYVKQNTLKLATGMRNVPEKQTRGIFGAIAGFIENGWEGMVDGWYGFRHQNSEGIGQAADLKSTQAAINQINGKLNRLIGKTNEKFHQIEKEFSEVEGRIQDLEKYVEDTKIDLWSYNAELLVALENQHTIDLTDSEMNKLFERTKKQLRENAEDMGNGCFKIYHKCDNACIGSIRNGTYDHDVYRDEALNNRFQIKGVELKSGYKDWILWISFAISCFLLCVALLGFIMWACQKGNIRCNICI

SEQ ID NO: 2602 - protein, 566 aa, synthetic construct; identical to SEQ ID NO: 630
  REGION 1..566: note = hemagglutinin__InfluenzaA__ACO36617

SEQ ID NO: 2603 - protein, 566 aa, synthetic construct; identical to SEQ ID NO: 630
  REGION 1..566: note = hemagglutinin__InfluenzaA__ACO36628

SEQ ID NO: 2604 - protein, 566 aa, synthetic construct
  REGION 1..566: note = hemagglutinin__InfluenzaA__ACO36639
MKTIIALSYILCLVFAQKLPGNDNSTATLCLGHHAVPNGTIVKTITNDQIEVTNATELVQSSSTGGICDSPHQILDGENCTLIDALLGDPQCDGFQNKKWDLFVERSKAYSNCYPYDVPDYASLRSLVASSGTLEFNNESFNWTGVTQNGTSSACKRRSNNSFFSRLNWLTHLKFKYPALNVTMPNNEKFDKLYIWGVHHPGTDNDQIFLYAQASGRITVSTKRSQQTVIPNIGSRPRVRNIPSRISIYWTIVKPGDILLINSTGNLIAPRGYFKIRSGKSSIMRSDAPIGKCNSECITPNGSIPNDKPFQNVNRITYGACPRYVKQNTLKLATGMRNVPEKQTRGIFGAIAGFIENGWEGMVDGWYGFRHQNSEGIGQAADLKSTQAAINQINGKLNRLIGKTNEKFHQIEKEFSEVEGRIQDLEKYVEDTKIDLWSYNAELLVALENQHTIDLTDSEMNKLFERTKKQLRENAEDMGNGCFKIYHKCDNACIGSIRNGTYDHDVYRDEALNNRFQIKGVELKSGYKDWILWISFAISCFLLCFALLGFIMWACQKGNIRCNICI

SEQ ID NO: 2605 - protein, 566 aa, synthetic construct
  REGION 1..566: note = hemagglutinin__InfluenzaA__ACO36661
MKTIIALSYILCLVFAQKLPGNDNSTATLCLGHHAVPNGTIVKTITNDQIEVTNATELVQSSSTGGICDSPHQILDGENCTLIDALLGDPQCDGFQNKKWDLFVERSKAYSNCYPYDVPDYASLRSLVASSGTLEFNNESFNWTGVTQNGTSSACKRRSNNSFFSRLNWLTHLKFKYPALNVTMPNNEKFDKLYIWGVHHPGTDNDQIFLYAQASGRITVSTKRSQQTVIPNIGSRPRVRNIPSRISIYWTIVKPGDILLINSTGNLIAPRGYFKIRSGKSSIMRSDAPIGKCNSECITPNGSIPNDKPFQNVNRITYGACPRYVKQNTLKLATGMRNVPEKQTRGIFGAIAGFIENGWEGMVDGWYGFRHQNSEGIGQAADLKSTQAAINQINGKLNRLIGKTNEKFHQIEKEFSEVEGRIQDLEKYVEDIKIDLWSYNAELLVALENQHTIDLTDSEMNKLFERTKKQLRENAEDMGNGCFKIYHKCDNACIGSIRNGTYDHDVYRDEALNNRFQIKGVELKSGYKDWILWISFAISCFLLCVALLGFIMWACQKGNIRCNICI

SEQ ID NO: 2606 - protein, 566 aa, synthetic construct; identical to SEQ ID NO: 630
  REGION 1..566: note = hemagglutinin__InfluenzaA__ACO36683

SEQ ID NO: 2607 - protein, 566 aa, synthetic construct; identical to SEQ ID NO: 2597
  REGION 1..566: note = hemagglutinin__InfluenzaA__ACO37122

SEQ ID NO: 2608 - protein, 566 aa, synthetic construct
  REGION 1..566: note = hemagglutinin__InfluenzaA__ACO94514
MKTIIALSYILCLVFAQKLPGNDNSTATLCLGHHAVPNGTIVKTITNDQIEVTNATELVQSSSTGEICDSPHQILDGENCTLIDALLGDPQCDGFQNKKWDLFVERSKAYSNCYPYDVPDYASLRSLVASSGTLEFNNESFNWTGVTQNGTSSACIRKSNNSFFSRLNWLTHLKFKYPALNVTMPNNEQFDKLYIWGVHHPGTDNDQIFLYAQASGRITVSTKRSQQTVIPNIGSRPRVRNIPSRISIYWTIVKPGDILLINSTGNLIAPRGYFKIRSGKSSIMRSDAPIGKCNSECITPNGSIPNDKPFQNVNRITYGACPRYVKQNTLKLATGMRNVPEKQTRGIFGAIAGFIENGWEGMVDGWYGFRHQNSEGRGQAADLKSTQAAIDQINGKLNRLIGKTNEKFHQIEKEFSEVEGRIQDLEKYVEDTKIDLWSYNAELLVALENQHTIDLTDSEMNKLFEKTKKQLRENAEDMGNGCFKIYHKCDNACIGSIRNGTYDHDVYRDEALNNRFQIKGVELKSGYKDWILWISFAISCFLLCVALLGFIMWACQKGNIRCNICI

SEQ ID NO: 2609 - protein, 566 aa, synthetic construct
  REGION 1..566: note = hemagglutinin__InfluenzaA__ACO94515
MKTIIALSYILCLVFAQKLPGNDNSTATLCLGHHAVPNGTIVKTITNDQIEVTNATELVQSSSTGEICDSPHQILDGENCTLIDALLGDPQCDGFQNKKWDLFVERSKAYSNCYPYDVPDYASLRSLVASSGTLEFNNESFNWTGVTQNGTSSACIRKSNNSFFSRLNWLTHLKFKYPALNVTMPNNEQFDKLYIWGVHHPGTDNDQIFLYAQASGRITVSTKRSQQTVIPNIGSRPRVRNIPSRISIYWTIVKPGDILLINSTGNLIAPRGYFKIRSGKSSIMRSDAPIGKCNSECITPNGSIPNDKPFQNVNRITYGACPRYVKQNTLKLATGMRNVPEKQTRGIFGAIAGFIENGWEGMMDGWYGFRHQNSEGRGQAADLKSTQAAIDQINGKLNRLIGKTNEKFHQIEKEFSEVEGRIQDLEKYVEDTKIDLWSYNAELLVALENQHTIDLTDSEMNKLFEKTKKQLRENAEDMGNGCFKIYHKCDNACIGSIRNGTYDHDVYRDEALNNRFQIKGVELKSGYKDWILWISFAISCFLLCVALLGFIMWACQKGNIRCNICI

SEQ ID NO: 2610 - protein, 566 aa, synthetic construct; identical to SEQ ID NO: 2434
  REGION 1..566: note = hemagglutinin__InfluenzaA__ACO94516

SEQ ID NO: 2611 - protein, 566 aa, synthetic construct; identical to SEQ ID NO: 2434
  REGION 1..566: note = hemagglutinin__InfluenzaA__ACO94672

SEQ ID NO: 2612 - protein, 566 aa, synthetic construct
  REGION 1..566: note = hemagglutinin__InfluenzaA__ACO94683
MKTIIALSYILCLVSAQKLPGNDNSTATLCLGHHAVPNGTIVKTITNDQIEVTNATELVQSSSTGEICDSPHQVLDGENCTLIDALLGDPQCDGFQNKKWDLFVERSKAYSNCYPYDVPDYASLRSLVASSGTLEFNNESFNWTGVTQNGTSSACIRRSNNSFFSRLNWLTHSKFKYPALNVTMPNNEEFDKLYIWGVHHPGTDNDQIFLYAQASGRITVSTKRSQQTVIPNIGSRPRVRNIPSRISIYWTIVKPGDILLINSTGNLIAPRGYFKIRSGKSSIMRSDAPIGKCNSECITPNGSIPNDKPFQNVNRITYGACPRYVKQNTLKLATGMRNVPEKQTRGIFGAIAGFIENGWEGMVDGWYGFRHQNSEGIGQAADLKSTQAAIDQINGKLNRLIGKTNEKFHQIEKEFTEVEGRIQDLEKYVEDTKIDLWSYNAELLVALENQHTIDLTDSEMNKLFEKTKKQLRENAEDMGNGCFKIYHKCDNACIGSIRNGTYDHEVYRDEALNNRFQIKGVELKSGYKDWILWISFAISCFLLCVALLGFIMWACQKGNIRCNICI

SEQ ID NO: 2613 - protein, 566 aa, synthetic construct; identical to SEQ ID NO: 2434
  REGION 1..566: note = hemagglutinin__InfluenzaA__ACO94694

SEQ ID NO: 2614 - protein, 565 aa, synthetic construct; identical to SEQ ID NO: 2488
  REGION 1..565: note = hemagglutinin__InfluenzaA__ACO94705

SEQ ID NO: 2615 - protein, 566 aa, synthetic construct
  REGION 1..566: note = hemagglutinin__InfluenzaA__ACO94727
MKTIIALSYILCLVFAQKLPGNDNSTATLCLGHHAVPNGTIVKTITNDQIEVTNATELVQSSSTGEICDSPHQILDGENCTLIDALLGDPQCDGFQNKKWDLFVERSKAYSNCYPYDVPDYASLRSLVASSGTLEFNNESFNWTGVTQNGTSSACIRRSNNSFFSRLNWLTHLKFKYPALNVTMPNNEQFDKLYIWGVHHPGTDNDQIFLYAQASGRITVSTKRSQQTVIPNIGSRPRVRNIPSRISIYWTIVKPGDILLINSTGNLIAPRGYFKIRSGKSSIMKSDAPIGKCNSECITPNGSIPNDKPFQNVNRITYGACPRYVKQNTLKLATGMRNVPEKQTRGIFGAIAGFIENGWEGMVDGWYGFRHQNSEGRGQAADLKSTQAAIDQINGKLNRLIGKTNEKFHQIEKEFSEVEGRIQDLEKYVEDTKIDLWSYNAELLVALENQHTIDLTDSEMNKLFEKTKKQLRENAEDMGNGCFKIYHKCDNACIGSIRNGTYDHDVYRDEALNNRFQIKGVELKSGYKDWILWISFAISCLLLCVALLGFIMWACQKGNIRCNICI

SEQ ID NO: 2616 - protein, 566 aa, synthetic construct
  REGION 1..566: note = hemagglutinin__InfluenzaA__ACO94738
MKTIIALSYIQCLVFAQKFPGNDNSTATLCLGHHAVPNGTVVKTITNDQIEVTNATELVQSSSTGEICDSPHQILDGENCTLIDALLGDPQCDGFQNKNWDLFVERSKAYSNCYPYDVPDYASLRSLVASSGTLEFNNESFNWTGVTQNGTSSACIRRSNNSFFSRLNWLTHSKFKYPALNVTMPNNENFDKLYIWGVHHPGTDNDQIFLYARASGRITVSTKRSQQTVIPNIGSRPRVRNIPSRISIYWTIVKPGDILLINSTGNLIAPRGYFKIRSGKSSIMRSDAPIGKCNSECITPNGSIPNDKPFQNVNRITYGACPRYVKQNTLKLATGMRNVPEKQTRGIFGAIAGFIENGWEGMVDGWYGFRHQNSEGIGQAADLKSTQAAIDQINGKLNRLIGKTNEKFHQIEKEFSEVEGRIQDLEKYVEDTKIDLWSYNAELLVALENQHTIDLTDSEMNKLFEKTKKQLRENAEDMGNGCFKIYHKCDNACIGSIRNGTYDHDVYRDEALNNRFQIKGVELKSGYKDWILWISFAISCFLLCIALLGFIMWACQKGNIRCNICI

SEQ ID NO: 2617 - protein, 566 aa, synthetic construct; identical to SEQ ID NO: 2537
  REGION 1..566: note = hemagglutinin__InfluenzaA__ACO94760

SEQ ID NO: 2618 - protein, 566 aa, synthetic construct
  REGION 1..566: note = hemagglutinin__InfluenzaA__ACO94771
MKTIIALSYILCLVFAQKLPGNDNSTATLCLGHHAVPNGTIVKTITNDQIEVTNATELVQSSSTGEICDSPHQILDGENCTLIDALLGDPQCDGFQNKKWDLFVERSKAYSNCYPYDVPDYASLRSLVASSGTLEFNNESFNWTGVTQNGTSSACIRRSNNSFFSRLNWLTHLKFKYPALNVTMPNNEQFDKLYIWGVHHPGTDNDQIFLYAQASGRITVSTKRSQQTVIPNIGSRPRVRNIPSRISIYWTIVKPGDILLINSTGNLIAPRGYFKIRSGKSSIMRSDAPIGKCNSECITPNGSIPNDKPFQNVNRITYGACPRYVKQNTLKLATGMRNVPEKQTRGIFGAIAGFIENGWEGMVDGWYGFRHQNSEGRGQAADLKSTQAAIDQINGKLNRLIGKTNEKFHQIEKEFSEVEGRIQDLEKYVEDTKIDLWSYNAELLVALENQHTIDLTDSEMNKLFEKTKKQLRENAEDMGNGCFKIYHKCDNACIGSIRNGTYDHDVYRDEALNNRFQIKGVELKSGYKDWILWISFAISCLLLCVALLGFIMWACQKGNIRCNICI

SEQ ID NO: 2619 - protein, 566 aa, synthetic construct; identical to SEQ ID NO: 2434
  REGION 1..566: note = hemagglutinin__InfluenzaA__ACO94782

SEQ ID NO: 2620 - protein, 566 aa, synthetic construct; identical to SEQ ID NO: 2434
  REGION 1..566: note = hemagglutinin__InfluenzaA__ACO94793

SEQ ID NO: 2621 - protein, 565 aa, synthetic construct
  REGION 1..565: note = hemagglutinin__InfluenzaA__ACO94804
MKVKLLVLLCTFTATYADTICIGYHANNSTDTVDTVLEKNVTVTHSVNLLEDSHNGKLCLLKGIAPLQLGNCSVAGWILGNPECELLISRESWSYIVEKPNPENGTCYPGHFADYEELREQLSSVSSFERFEIFPKESSWPNHTTTGVSASCSHNGESSFYKNLLWLTGKNGLYPNLSKSYANNKEKEVLVLWGVHHPPNIGNQRALYHTENAYVSVVSSHYSRKFTPEIAKRPKVRDQEGRINYYWTLLEPGDTIIFEANGNLIAPRYAFALSRGFGSGIINSNAPMDGCDAKCQTPQGAINSSLPFQNVHPVTIGECPKYVRSAKLRMVTGLRNIPSIQSRGLFGAIAGFIEGGWTGMVDGWYGYHHQNEQGSGYAADQKSTQNAINGITNKVNSVIEKMNTQFTAVGKEFNKLERRMENLNKKVDDGFIDIWTYNAELLVLLENERTLDFHDSYVKNLYEKVKSQLKNNAKEIGNGCFEFYHKCNDECMESVKNGTYDYPKYSEESKLNREKIDGVKLESMGVYQILAIYSTVASSLVLLVSLGAISFWMCSNGSLQCRICI

SEQ ID NO: 2622 - protein, 566 aa, synthetic construct; identical to SEQ ID NO: 2301
  REGION 1..566: note = hemagglutinin__InfluenzaA__ACO94815

SEQ ID NO: 2623 - protein, 566 aa, synthetic construct; identical to SEQ ID NO: 2308
  REGION 1..566: note = hemagglutinin__InfluenzaA__ACO94848

SEQ ID NO: 2624 - protein, 565 aa, synthetic construct; identical to SEQ ID NO: 2488
  REGION 1..565: note = hemagglutinin__InfluenzaA__ACO94859

SEQ ID NO: 2625 - protein, 565 aa, synthetic construct
  REGION 1..565: note = hemagglutinin__InfluenzaA__ACO94870
MKVKLLVLLCTFTATYADTICIGYHANNSTDTVDTVLEKNVTVTHSVNLLENSHNGKLCLLKGIAPLQLGNCSVAGWILGNPECELLISKESWSYIVEKPNPENGTCYPGHFADYEELREQLSSVSSFERFEIFPKESSWPNHTVTGVSASCSHNGESSFYRNLLWLTGKNGLYPNLSKSYANNKGKEVLVLWGVHHPPNIGDQNTLYHTENAYVSVVSSHYSRKFTPEIAKRPKVRDQEGRINYYWTLLEPGDTIIFEANGNLIAPRYAFALNRGFGSGIINSNAPMDKCDAKCQTPQGAINSSLPFQNVHPVTIGECPKYVRSAKLRMVTGLRNIPSIQSRGLFGAIAGFIEGGWTGMVDGWYGYHHQNEQGSGYAADQKSTQNAINGITNKVNSVIEKMNTQFTAVGKEFNKLERRMENLNKKVDDGFIDIWTYNAELLVLLENERTLDFHDSNVKNLYEKVKSQLKNNAKEIGNGCFEFYHKCNDECMESVKNGTYDYPKYSEESKLNREKIDGVKLESMGVYQILAIYSTVASSLVLLVSLGAISFWMCSNGSLQCRICI

SEQ ID NO: 2626 - protein, 566 aa, synthetic construct
  REGION 1..566: note = hemagglutinin__InfluenzaA__ACO94881
MKTIIALSYILCLVFAQKLPGNDNSTATLCLGHHAVPNGTIVKTITNDQIEVTNATELVQSSSTGGICDSPHQILDGENCTLIDALLGDPQCDGFQNKKWDLFVERSKAYSNCYPYDVPDYASLRSLVASSGTLEFNNESFDWTGVTQNGTSSSCKRRSNNSFFSRLNWLTHLKYKYPALNVTMPNNEKFDKLYIWGVHHPGTDSDQISLYAQASGRITVSTKRSQQTVIPNIGSRPRVRDVSSRISIYWTIVKPGDILLINSTGNLIAPRGYFKIRSGKSSIMRSDAPIGKCNSECITPNGSIPNDKPFQNVNRITYGACPRYVKQNTLKLATGMRNVPEKQTRGIFGAIAGFIENGWEGMVDGWYGFRHQNSEGTGQAADLKSTQAAINQINGKLNRLIGKTNEKFHQIEKEFSEVEGRIQDLEKYVEDTKIDLWSYNAELLVALENQHTIDLTDSEMNKLFERTKKQLRENAEDMGNGCFKIYHRCDNACIGSIRNGTYDHDVYRDEALNNRFQIKGVELKSGYKDWILWISFAISCFLLCVALLGFIMWACQKGNIRCNICI

SEQ ID NO: 2627 - protein, 566 aa, synthetic construct
  REGION 1..566: note = hemagglutinin__InfluenzaA__ACO94892
MKTIIALSYILCLVFAQKLPGNDNSTATLCLGHHAVPNGTIVKTITNDQIEVTNATELVQSSSTGGICDSPHQILDGENCTLIDALLGDPQCDGFQNKKWDLFVERSKAYSNCYPYDVPDYASLRSLVASSGTLEFNNESFNWTGVTQNGTSSACQRRSNKSFFSRLNWLTHLKFKYPALNVTMPNNEKFDKLYIWGVHHPGTDNDQISLYAQTSGRITISTKRSQQTVIPNIGSRPRVRDVPSRISIYWTIVKPGDILLINSTGNLIAPRGYFKIRSGKSSIMRSDAPIVKCNSECITPNGSIPNDKPFQNVNRITYGACPRYVKQNTLKLATGMRNVPERQTRGIFGAIAGFIENGWEGMVDGWYGFRHQNSEGTGQAADLKSTQAAINQINGKLNRLIGKTNEKFHQIEKEFSEVEGRIQDLEKYVEDTKIDLWSYNAELLVALENQHTIDLTDSEMNKLFERTKKQLRENAEDMGNGCFKIYHKCDNACIGSIRNGTYDHDVYRDEALNNRFQIKGVELKSGYKDWILWISFAISCFLLCVALLGFIMWACQKGNIRCNICI

SEQ ID NO: 2628 - protein, 566 aa, synthetic construct
  REGION 1..566: note = hemagglutinin__InfluenzaA__ACO94903
MKTIIALSYILCLVFAQKLPGNDNSTATLCLGHHAVPNGTIVKTITNDQIEVTNATELVQSSSTGGICDSPHQILDGENCTLIDALLGDPQCDGFQNKKWDLFVERSEAYSNCYPYDVPDYASLRSLVASSGTLEFNNESFNWTGVTQNGTSSACKRRSNKSFFSRLNWLTHLKFKYPALNVTMPNNEKFDKLYIWGVHHPGTDNDQISLYAQASGRITVSTKRSQQTVIPNIGSRPRVRDVPSRISIYWTIVKPGDILLINSTGNLIAPRGYFKIRSGKSSIMRSDAPIGKCNSECITPNGSIPNDKPFQNVNRITYGACPRYVKQNTLKLATGMRNVPEKQTRGIFGAIAGFIENGWEGMVDGWYGFRHQNSEGTGQAADLKSTQAAINQINGKLNRLIGKTNEKFHQIEKEFSEVEGRIQDLEKYVEDTKIDLWSYNAELLVALENQHTIDLTDSEMNKLFERTKKQLRENAEDMGNGCFKIYHKCDNACIGSIRNGTYDHDVYRDEALNNRFQIKGVELKSGYKDWILWISFAISCFLLCVALLGFIMWACQKGNIRCNICI

SEQ ID NO: 2629 - protein, 566 aa, synthetic construct
  REGION 1..566: note = hemagglutinin__InfluenzaA__ACO94925
MKTIIALSYILCLVFAQKLPGNDNSTATLCLGHHAVPNGTVVKTITNDQIEVTNATELVQSSSTGGICDSPHQILDGENCTLIDALLGDPQCDGFQNKKWDLFVERSKAYSNCYPYDVPDYASLRSLVASSGTLEFNNESFNWTGVTQNGTSSACKRRSNKSFFSRLNWLTHLKFKYPALNVTMPNNEKFDKLYIWGVHHPGTDNDQISLYAQASGRITVSTKRSQQTVIPNIGSRPRVRDVPSRISIYWTIVKPGDILLINSTGNLIAPRGYFKIRSGKSSIMRSDAPIGKCNSECITPNGSIPNDKPFQNVNRITYGACPRYVKQNTLKLATGMRNVPEKQTRGIFGAIAGFIENGWEGMVDGWYGFRHQNSEGTGQAADLKSTQAAINQINGKLNRLIGKTNEKFHQIEKEFSEVEGRIQDLEKYVEDTKIDLWSYNAELLVALENQHTIDLTDSEMNKLFERTKKQLRENAEDMGNGCFKIYHKCDNACIGSIRNGTYDHDVYRDEALNNRFQIKGVELKSGYKDWILWISFAISCFLLCVALLGFIMWACQKGNIRCNICI

SEQ ID NO: 2630 - protein, 566 aa, synthetic construct
  REGION 1..566: note = hemagglutinin__InfluenzaA__ACO94936
MKTIIALSYILCLVFAQKLPGNDNSTATLCLGHHAVPNGTIVKTITNDQIEVTNATELVQSSSTGGICDSPHQILDGEDCTLIDALLGDPQCDGFQNKKWDLFVERSKAYSNCYPYDVPDYASLRSLVASSGTLEFNNESFDWTGVTQNGTSSSCKRRSNNSFFSRLNWLTHLKYKYPALNVTMPNNEKFDKLYIWGVHHPGTDSDQISLYAQASGRITVSTKRSQQTVIPNIGSRPRVRDVSSRISIYWTIVKPGDILLINSTGNLIAPRGYFKIRSGKSSIMRSDAPIGKCNSECITPNGSIPNDKPFQNVNRITYGACPRYVKQNTLKLATGMRNVPEKQTRGIFGAIAGFIENGWEGMVDGWYGFRHQNSEGTGQAADLKSTQAAINQINGKLNRLIGKTNEKFHQIEKEFSEVEGRIQDLEKYVEDTKIDLWSYNAELLVALENQHTIDLTDSEMNKLFERTKKQLRENAEDMGNGCFKIYHKCDNACIGSIRNGTYDHDVYRDEALNNRFQIKGVELKSGYKDWILWISFAISCFLLCVALLGFIMWACQKGNIRCNICI

SEQ ID NO: 2631 - protein, 566 aa, synthetic construct
  REGION 1..566: note = hemagglutinin__InfluenzaA__ACO94947
MKTIIALSYILCLVFAQKLPGNDNSTATLCLGHHAVPNGTIVKTITNDQIEVTNATELVQSSSTGGICDSPHQILDGENCTLIDALLGDPQCDGFQNKKWDLFVERSKAYSNCYPYDVPDYASLRSLVASSGTLEFNNESFNWTGVTQNGTSSACKRRSNKSFFSRLNWLTHLKFKYPALNVTMPNNEKFDKLYIWGVHHPGTDNDQISLYAQASGRITVSTKRSQQTVIPNIGSRPRVRDVPSRISIYWTIVKPGDILLINSTGNLIAPRGYFRIRSGKSSIMRSDAPIGKCNSECITPNGSIPNDKPFQNVNRITYGACPRYVKQNTLKLATGMRNVPEKQTRGIFGAIAGFIENGWEGMVDGWYGFRHQNSEGTGQAADLKSTQAAINQINGKLNRLIGKTNEKFHQIEKEFSEVEGRIQDLEKYVEDTKIDLWSYNAELLVALENQHTIDLTDSEMNKLFERTKKQLRENAEDMGNGCFKIYHKCDNACIGSIRNGTYDHDVYRDEALNNRFQIKGVELKSGYKDWILWISFAISCFLLCVALLGFIMWACQKGNIRCNICI

SEQ ID NO: 2632 - protein, 566 aa, synthetic construct
  REGION 1..566: note = hemagglutinin__InfluenzaA__ACO95153
MKTIIALSYILCLVFAQKLPGNDNSTATLCLGHHAVPNGTIVKTITNDQIEVTNATELVQSSSTGGICDSPHQILDGENCTLIDALLGDPQCDGFQNKKWDLFVERSKAYSNCYPYDVPDYASLRSLVASSGTLEFNNESFNWTGVTQNGTSSACKRRSNNSFFSRLNWLTHLKFKYPALNVTMPNNENFDKLYIWGVHHPGTDNDQISLYAQASGRITVSTKRSQQTVIPNIGSRPRVRDISSRISIYWTIVKPGDILLINSTGNLIAPRGYFKIRSGKSSIMRSDAPIGKCNSECITPNGSIPNDKPFQNVNRITYGACPRYVKQNTLKLATGMRNVPETQTRGIFGAIAGFIENGWEGMVDGWYGFRHQNSEGTGQAADLKSTQAAINQINGKLNRLIGKTNEKFHQIEKEFSEVEGRIQDLEKYVEDTKIDLWSYNAELLVALENQHTIDLTDSEMNKLFERTKKQLRENAEDMGNGCFKIYHKCDNACIGSIRNGTYDHDVYRDEALNNRFQIKGVELKSGYKDWILWISFAISCFLLCVALLGFIMWACQKGNIRCNICI

SEQ ID NO: 2633 - protein, 566 aa, synthetic construct; identical to SEQ ID NO: 2598
  REGION 1..566: note = hemagglutinin__InfluenzaA__ACO95171

SEQ ID NO: 2634 - protein, 566 aa, synthetic construct
  REGION 1..566: note = hemagglutinin__InfluenzaA__ACO95193
MKTIIALSYILCLVFAQKLPGNDKSTATLCLGHHAVPNGTIVKTITNDQIEVTNATELVQSSSTGGICDSPHQILDGENCTLIDALLGDPQCDGFQNKKWDLFVERSKAYSNCYPYDVPDYASLRSLVASSGTLEFNNENFNWTGVTQNGTSSACKRRSNNSFFSRLNWLTHLKFKYPALNVTMPNNEKFDKLYIWGVHHPGTDNDQISLYAQASGRITVSTKRSQQTVIPNIGSRPRVRDISSRISIYWTIVKPGDILLINSTGNLIAPRGYFKIRSGKSSIMRSDAPIGKCSSECITPNGSIPNDKPFQNVNRITYGACPRYVKQNTLKLATGMRNVPETQTRGIFGAIAGFIENGWEGMVDGWYGFRHQNSEGTGQAADLKSTQAAINQINGKLNRLIGKTNEKFHQIEKEFSEVEGRIQDLEKYVEDTKIDLWSYNAELLVALENQHTIDLTDSEMNKLFERTKKQLRENAEDMGNGCFKIYHKCDNACIGSIRNGTYDHDVYRDEALNNRFQIKGVELKSGYKDWILWISFAISCFLLCVALLGFIMWACQKGNIRCNICI

SEQ ID NO: 2635 - protein, 566 aa, synthetic construct; identical to SEQ ID NO: 2597
  REGION 1..566: note = hemagglutinin__InfluenzaA__ACO95204

SEQ ID NO: 2636 - protein, 566 aa, synthetic construct
  REGION 1..566: note = hemagglutinin__InfluenzaA__ACO95215
MKTIIALSYILCLVFAQKLPGNDNSTATLCLGHHAVPNGTIVKTITNDQIEVTNATELVQSSSTGGICDSPHQILDGENCTLIDALLGDPQCDGFQNKKWDLFVERSKAYSNCYPYDVPDYASLRSLIASSGTLEFNNESFNWTGVTQNGTSSACKRRSNNSFFSRLNWLTHLKFKYPALNVTMPNNEKFDKLYIWGVHHPGTDNDQISLYAQASGRITVSTKRSQQTVIPNIGSRPRVRDISSRISIYWTIVKPGDILLINSTGNLIAPRGYFKIRSGKSSIMRSDAPIGKCNSECITPNGSIPNDKPFQNVNRITYGACPRYVKQNTLKLATGMRNVPETQTRGIFGAIAGFIENGWEGMVDGWYGFRHQNSEGTGQAADLKSTQAAINQINGKLNRLIGKTNEKFHQIEKEFSEVEGRIQDLEKYVEDTKIDLWSYNAELLVALENQHTIDLTDSEMNKLFERTKKQLRENAEDMGNGCFKIYHKCDNACIGSIRNETYDHDVYRDEALNNRFQIKSVELKSGYKDWILWISFAISCFLLCVALLGFIMWACQKGNIRCNICI

SEQ ID NO: 2637 - protein, 566 aa, synthetic construct; identical to SEQ ID NO: 281
  REGION 1..566: note = hemagglutinin__InfluenzaA__ACO95226

SEQ ID NO: 2638 - protein, 566 aa, synthetic construct; identical to SEQ ID NO: 630
  REGION 1..566: note = hemagglutinin__InfluenzaA__ACO95248

SEQ ID NO: 2639 - protein, 566 aa, synthetic construct
  REGION 1..566: note = hemagglutinin__InfluenzaA__ACO95270
MKTIIALSYILCLVFTQKLPGNDNSTATLCLGHHAVPNGTIVKTITNDQIEVTNATELVQSSSTGEICDSPHQILDGENCTLIDALLGDPQCDGFQNKKWDLFVERSKAYSNCYPYDVPDYASLRSLVASSGTLEFNNESFNWTGVTQNGTSSACIRRSNNSFFSRLNWLTHLKFKYPALNVTMPNNEKFDKLYIWGVHHPVTDNNQIFLYAQASGRITVSTKRSQQTVIPNIGSRPRVRNIPSRISIYWTIVKPGDILLINSTGNLIAPRGYFKIRSGKSSIMRSDAPIGKCNSECITPNGSIPNDKPFQNVNRITYGACPRYVKQNTLKLATGMRNVPEKQTRGIFGAIAGFIENGWEGMVDGWYGFRHQNSEGIGQAADLKSTQAAIDQINGKLNRLIGKTNEKFHQIEKEFSEVEGRIQDLEKYVEDTKIDLWSYNAELLVALENQHTIDLTDSEMNKLFEKTKKQLRENAEDMGNGCFKIYHKCDNACIGSIRNGTYDHDVYRDEALNNRFQIKGVELKSGYKDWILWISFAISCFLLCVALLGFIMWACQKGNIRCNICI

SEQ ID NO: 2640 - protein, 566 aa, synthetic construct; identical to SEQ ID NO: 2434
  REGION 1..566: note = hemagglutinin__InfluenzaA__ACO95281

SEQ ID NO: 2641 - protein, 566 aa, synthetic construct
  REGION 1..566: note = hemagglutinin__InfluenzaA__ACO95292
MKTIIALSYILCLVFAQKLPGNDNSTATLCLGHHAVPNGTIVKTITNDQIEVTNATELVQSSSTGEICDSPHQILDGENCTLIDALLGDPQCDGFQNKKWDLFVERSKAYSNCYPYDVPDYASLRSLVASSGTLEFNNESFNWTGVTQNGTSSACIRRSNNSFFSRLNWLTHLKFKYPALNVTMPNNEQFDKLYIWGVHHPGTDNDQIFLYAQASGRITVSTKRSQQTVIPNIGSRPRVRNIPSRISIYWTIVKPGDILLINSTGNLIAPRGYFKIQSGKSSIMRSDAPIGKCNSECITPNGSIPNDKPFQNVNRITYGACPRYVKQNTLKLATGMRNVPEKQTRGIFGAIAGFIENGWEGMVDGWYGFRHQNSEGRGQAADLKSTQAAIDQINGKLNRLIGKTNEKFHQIEKEFSEVEGRIQDLEKYVEDTKIDLWSYNAELLVALENQHTIDLTDSEMNKLFEKTKKQLRENAEDMGNGCFKIYHKCDNACIGSIRNGTYDHDVYRDEALNNRFQIKGVELKSGYKDWILWISFAISCFLLCVALLGFIMWACQKGNIRCNICI

SEQ ID NO: 2642 - protein, 566 aa, synthetic construct; identical to SEQ ID NO: 2537
  REGION 1..566: note = hemagglutinin__InfluenzaA__ACO95303

SEQ ID NO: 2643 - protein, 565 aa, synthetic construct
  REGION 1..565: note = hemagglutinin__InfluenzaA__ACO95382
MKVKLLVLLCTFTATYADTICIGYHANNSTDTVDTVLEKNVTVTHSVNLLENSHNGKLCLLKGIAPLQLGNCSVAGWILGNPECELLISKESWSYIVEKPNPENGTCYPGHFADYEELREQLSSVSSFERFEIFPKEGSWPNHTVTGVSASCSHNGESSFYRNLLWLTGKNGLYPNLSKSYANNKEKEVLVLWGVHHPPNIGDQKALYHTENAYVSVVSSHYSRKFTPEIAKRPKVRDQEGRINYYWTLLEPGDTIIFEANGNLIAPRYAFALSRGFGSGIINSNAPMDKCDAKCQTPQGAINSSLPFQNVHPVTIGECPKYVRSAKLRMVTGLRNIPSIQSRGLFGAIAGFIEGGWTGMVDGWYGYHHQNEQGSGYAADQKSTQNAINGITNKVNSVIEKMNTQFTAVGKEFNKLERRMENLNKKVDDGFIDIWTYNAELLVLLENERTLDFHDSNVKNLYEKVKSQLKNNAKEIGNGCFEFYHKCNDECMESVKNGTYDYPKYSEESKLNREKIDGVKLESMGVYQILAIYSTVASSLVLLVSLGAISFWMCSNGSLQCRICI

SEQ ID NO: 2644 - protein, 565 aa, synthetic construct
  REGION 1..565: note = hemagglutinin__InfluenzaA__ACO95415
MKVKLLVLLCTFTATYADTICIGYHANNSTDTIDTVLEKNVTVTHSVNLLENSHNGKLCLLKGIAPLQLGNCSVAGWILGNPECELLISKESWSYIVEKPNPENGTCYPGHFADYEELREQLSSVSSFERFEIFPKESSWPNHTVTGVSASCSHNGESSFYRNLLWLTGKNGLYPNLSKSYANNKGKEVLVLWGVHHPPNIGDQNTLYHTENAYVSVVSSHYSRKFTPEIAKRPKVRDQEGRINYYWTLLEPGDTIIFEANGNLIAPRYAFALSRGFGSGIINSNAPMDKCDAKCQTPQGAINSSLPFQNVHPVTIGECPKYVRSAKLRMVTGLRNIPSIQSRGLFGAIAGFIEGGWTGMVDGWYGYHHQNEQGSGYAADQKSTQNAINGITNKVNSVIEKMNTQFTAVGKEFNKLERRMENLNKKVDDGFIDIWTYNAELLVLLENERTLDFHDSNVKNLYEKVKSQLKNNAKEIGNGCFEFYHKCNDECMESVKNGTYDYPKYSEESKLNREKIDGVKLESMGVYQILAIYSTVASSLVLLVSLGAISFWMCSNGSLQCRICI

SEQ ID NO: 2645 - protein, 566 aa, synthetic construct
  REGION 1..566: note = hemagglutinin__InfluenzaA__ACO95426
MKTIIALSYILCLVFAQKLPGNDNSTATLCLGHHAVPNGTIVKTITNDQIEVTNATELVQSSSTGGICDSPHQILDGENCTLIDALLGDPQCDGFQNKKWDLFVERSKAYSNCYPYDVPDYASLRSLVASSGTLEFNNESFDWTGVTQNGTSSSCKRRSNNSFFSRLNWLTHLKYKYPALNVTMPNNEKFDKLYIWGVHHPGTDSDQISLYAQASGRITVSTKRSQQTVIPNIGSRPRVRDVSSRISIYWTIVKPGDILLINSTGNLIAPRGYFKIRSGKSSIMRSDAPIGKCNSECITPNGSIPNDKPFQNVNRITYGACPRYVKQNTLKLATGMRNVPEKQTRGIFGAIAGFIENGWEGMVDGWYGFRHQNSEGTGQAADLKSTQAAINQINGKLNRLIGKTNEKFHQIEKEFSEVEGRIQDLEKYVEDTKIDLWSYNAELLVALENQHTIDLTDSEMNKLFERTKKQLRENAEDMGNGCFKIYHKCDNACIGSIRNGTYDHDVYRDEALNNRFQIKGVELKSGYKDWILWISFAISCFLLCVALLGFIMWACQKGNIRCNICI

SEQ ID NO: 2646 - protein, 566 aa, synthetic construct; identical to SEQ ID NO: 1795
  REGION 1..566: note = hemagglutinin__InfluenzaA__ACO95437

SEQ ID NO: 2647 - protein, 566 aa, synthetic construct
  REGION 1..566: note = hemagglutinin__InfluenzaA__ACO95448
MKTIIALSYILCLVFAQKLPGNDNSTATLCLGHHAVPNGTIVKTITNDQIEVTNATELVQSSSTGGICDSPHQILDGENCTLIDALLGDPQCDGFQNKKWDLFVERSKAYSNCYPYDVPDYASLRSLIASSGTLEFNNESFNWTGVTQNGTSSACKRRSNNSFFSRLNWLTHLKFKYPALNVTMPNNEEFDKLYIWGVHHPGTDNDQINLYAQASGRITVSTKRSQQTVIPNIGSRPRVRDIPSRISIYWTIVKPGDILLINSTGNLIAPRGYFKIRSGKSSIMRSDAPIGKCNSECITPNGSIPNDKPFQNVNRITYGACPRYVKQNTLKLATGMRNVPEKQTRGIFGAIAGFIENGWEGMVDGWYGFRHQNSEGIGQAADLKSTQAAIDQINGKLNRLIGKTNEKFHQIEKEFSEVEGRIQDLEKYVEDTKIDLWSYNAELLVALENQHTIDLTDSEMNKLFERTKKQLRENAEDMGNGCFKIYHKCDNACIGSIRNGTYDHDVYRDEALNNRFQIKGVELKSGYKDWILWISFAISCFLLCVALLGFIMWACQKGNIRCNICI

SEQ ID NO: 2648 - protein, 566 aa, synthetic construct; identical to SEQ ID NO: 630
  REGION 1..566: note = hemagglutinin__InfluenzaA__ACO95459

SEQ ID NO: 2649 - protein, 566 aa, synthetic construct
  REGION 1..566: note = hemagglutinin__InfluenzaA__ACO95470
MKTIIALSYILCLVFAQKLPGNDNSTATLCLGHHAVPNGTIVKTITNDQIEVTNATELVQSSSTGGICDSPHQILDGENCTLIDALLGDPQCDGFQNKKWDLFVERSKAYSNCYPYDVPDYASLRSLVASSGTLEFNNESFNWTGVTQNGTSSACKRRSNNSFFSRLNWLTHLKFKYPALNVTMPNNEKFDKLYIWGVHHPGTDNDQIFLYAQASGRITVSTKRSQQTVIPNIGSRPRVRNIPSRISIYWTIVKPGDILLINSTGNLIAPRGYFKIRSGKSSIMRSDAPIGRCNSECITPNGSIPNDKPFQNVNRITYGACPRYVKQNTLKLATGMRNVPEKQTRGIFGAIAGFIENGWEGMVDGWYGFRHQNSEGIGQAADLKSTQAAINQINGKLNRLIGKTNEKFHQIEKEFSEVEGRIQDLEKYVEDTKIDLWSYNAELLVALENQHTIDLTDSEMNKLFERTKKQLRENAEDMGNGCFKIYHKCDNACIGSIRNGTYDHDVYRDEALNNRFQIKGVELKSGYKDWILWISFAISCFLLCVALLGFIMWACQKGNIRCNICI

SEQ ID NO: 2650 - protein, 566 aa, synthetic construct
  REGION 1..566: note = hemagglutinin__InfluenzaA__ACO95481
MKTIIALSYILCLVFAQKLPGNDNSTATLCLGHHAVPNGTIVKTITNDQIEVTNATELVQSSSTGGICDSPHQILDGENCTLIDALLGDPQCDGFQNKKWDLFVERSKAYSNCYPYDVPDYASLRSLVASSGTLEFNNESFNWTGVTQNGTSSACKRRSNNSFFSRLNWLTHLKFKYPALNVTMPNNEKFDKLYIWGVHHPGTDNDQIFLYAQASGRITVSTKRSQQTVIPNIGSRPRVRNIPSRISIYWTIVKPGDILLINSTGNLIAPRGYFKIRSGKSSIMRSDAPIGKCNSECITPNGSIPNDKPFQNVNRITYGACPRYVKQNTLKLATGMRNLPEKQTRGIFGAIAGFIENGWEGMVDGWYGFRHQNSEGIGQAADLKSTQAAINQINGKLNRLIGKTNEKFHQIEKEFSEVEGRIQDLEKYVEDTKIDLWSYNAELLVALENQHTIDLTDSEMNKLFERTKKQLRENAEDMGNGCFKIYHKCDNACIGSIRNGTYDHDVYRDEALNNRFQIKGVELKSGYKDWILWISFAISCFLLCVALLGFIMWACQKGNIRCNICI

SEQ ID NO: 2651 - protein, 566 aa, synthetic construct; identical to SEQ ID NO: 630
  REGION 1..566: note = hemagglutinin__InfluenzaA__ACO95492

SEQ ID NO: 2652 - protein, 566 aa, synthetic construct; identical to SEQ ID NO: 630
  REGION 1..566: note = hemagglutinin__InfluenzaA__ACO95503

SEQ ID NO: 2653 - protein, 566 aa, synthetic construct; identical to SEQ ID NO: 630
  REGION 1..566: note = hemagglutinin__InfluenzaA__ACO95514

SEQ ID NO: 2654 - protein, 566 aa, synthetic construct; identical to SEQ ID NO: 630
  REGION 1..566: note = hemagglutinin__InfluenzaA__ACO95536

SEQ ID NO: 2655 - protein, 566 aa, synthetic construct; identical to SEQ ID NO: 630
  REGION 1..566: note = hemagglutinin__InfluenzaA__ACO95547

SEQ ID NO: 2656 - protein, 566 aa, synthetic construct
  REGION 1..566: note = hemagglutinin__InfluenzaA__ACP41963
MKAILVVLLYTFATANADTLCIGYHANNSTDTVDTVLEKNVTVTHSVNLLEDKHNGKLCKLRGVAPLHLGKCNIAGWILGNPECESLSTASSWSYIVETSSSDNGTCYPGDFIDYEELREQLSSVSSFERFEIFPKTSSWPNHDSNKGVTAACPHAGAKSFYKNLIWLVKKGNSYPKLSKSYINDKGKEVLVLWGIHHPSTSADQQSLYQNADAYVFVGSSRYSKKFKPEIAIRPKVRDQEGRMNYYWTLVEPGDKITFEATGNLVVPRYAFAMERNAGSGIIISDTPVHDCNTTCQTPKGAINTSLPFQNIHPITIGKCPKYVKSTKLRLATGLRNVPSIQSRGLFGAIAGFIEGGWTGMVDGWYGYHHQNEQGSGYAADLKSTQNAIDEITNKVNSVIEKMNTQFTAVGKEFNHLEKRIENLNKKVDDGFLDIWTYNAELLVLLENERTLDYHDSNVKNLYEKVRSQLKNNAKEIGNGCFEFYHKCDNTCMESVKNGTYDYPKYSEEAKLNREEIDGVKLESTRIYQILAIYSTVASSLVLVVSLGAISFWMCSNGSLQCRICI

SEQ ID NO: 2657 - protein, 565 aa, synthetic construct; identical to SEQ ID NO: 2643
  REGION 1..565: note = hemagglutinin__InfluenzaA__ACP44192

SEQ ID NO: 2658 - protein, 565 aa, synthetic construct; identical to SEQ ID NO: 2643
  REGION 1..565: note = hemagglutinin__InfluenzaA__ACP44203

SEQ ID NO: 2659 - protein, 565 aa, synthetic construct
  REGION 1..565: note = hemagglutinin__InfluenzaA__ACP44225
MKVKLLVLLCTFTATYADTICIGYHANNSTDTVDTVLEKNVTVTHSVNLLENSHNGKLCLLKGIAPLQLGNCSVAGWILGNPECGLLISKESWSYIVEKPNPENGTCYPGHFADYEELREQLSSVSSFERFEIFPKESSWPNHTVTGVSASCSHNGESSFYRNLLWLTGKNGLYPNLSKSYANNKEKEVLVLWGVHHPPNIGDQKALYHTENAYVSVVSSHYSRKFTPEIAKRPKVRDQEGRINYYWTLLEPGDTIIFEANGNLIAPRYAFALSRGFGSGIINSNAPMDKCDAKCQTPQGAINSSLPFQNVHPVTIGECPKYVRSAKLRMVTGLRNIPSIQSRGLFGAIAGFIEGGWTGMVDGWYGYHHQNEQGSGYAADQKSTQNAINGITNKVNSVIEKMNTQFTAVGKEFNKLERRMENLNKKVDDGFIDIWTYNAELLVLLENERTLDFHDSNVKNLYEKVKSQLKNNAKEIGNGCFEFYHKCNDECMESVKNGTYDYPKYSKESKLNREKIDGVKLESMGVYQILAIYSTVASSLVLLVSLGAISFWMCSNGSLQCRICI

SEQ ID NO: 2660 - protein, 566 aa, synthetic construct
  REGION 1..566: note = hemagglutinin__InfluenzaA__ACP44236
MKTIIALSYILCLVFAQKLPGNDNSTATLCLGHHAVPNGTIVKTITNDQIEVTNATELVQSSSTGGICDSPHQILDGENCTLIDALLGDPQCDGFQNKKWDLFVERSKAYSNCYPYDVPDYASLRSLVASSGTLEFNNESFNWTGVTQNGTSSACKRRSDKSFFSRLNWLTHLKFKYPALNVTMPNNEKFDKLYIWGVHHPGTDNDQISLYAQASGRITVSTKRSQQTVIPNIGSRPRVRDVPSRISIYWTIVKPGDILLINSTGNLIAPRGYFKIRSGKSSIMRSDAPIGKCNSECITPNGSIPNDKPFQNVNRITYGACPRYVKQNTLKLATGMRNVPEKQTRGIFGAIAGFIENGWEGMVDGWYGFRHQNSEGTGQAADLKSTQAAINQINGKLNRLIGKTNEKFHQIEKEFSEVEGRIQDLEKYVEDTKIDLWSYNAELLVALENQHTIDLTDSEMNKLFERTKKQLRENAEDMGNGCFKIYHKCDNACIGSIRNGTYDHDVYRDEALNNRFQIKGVELKSGYKDWILWISFAISCFLLCVALLGFIMWACQKGNIRCNICI

SEQ ID NO: 2661 - protein, 566 aa, synthetic construct; identical to SEQ ID NO: 2597
  REGION 1..566: note = hemagglutinin__InfluenzaA__ACP44247

SEQ ID NO: 2662 - protein, 566 aa, synthetic construct; identical to SEQ ID NO: 630
  REGION 1..566: note = hemagglutinin__InfluenzaA__ACP44258

SEQ ID NO: 2663 - protein, 566 aa, synthetic construct; identical to SEQ ID NO: 630
  REGION 1..566: note = hemagglutinin__InfluenzaA__ACP44269

SEQ ID NO: 2664 - protein, 566 aa, synthetic construct; identical to SEQ ID NO: 2656
  REGION 1..566: note = hemagglutinin__InfluenzaA__ACQ44554

SEQ ID NO: 2665 - protein, 566 aa, synthetic construct; identical to SEQ ID NO: 2656
  REGION 1..566: note = hemagglutinin__InfluenzaA__ACQ44556

SEQ ID NO: 2666 - protein, 566 aa, synthetic construct; identical to SEQ ID NO: 2656
  REGION 1..566: note = hemagglutinin__InfluenzaA__ACQ45338

SEQ ID NO: 2667 - protein, 566 aa, synthetic construct
  REGION 1..566: note = hemagglutinin__InfluenzaA__ACQ55359
MKAILVVLLYTFATANADTLCIGYHANNSTDTVDTVLEKNVTVTHSVNLLEDKHNGKLCKLRGVAPLHLGKCNIAGWILGNPECESLSTASSWSYIVETPSSDNGTCYPGDFIDYEELREQLSSVSSFERFEIFPKTSSWPNHDSNKGVTAACPHAGAKSFYKNLIWLVKKGNSYPKLSKSYINDKGKEVLVLWGIHHPSTSADQQSLYQNADAYVFVGSSRYSKKFKPEIAIRPKVRDQEGRMNYYWTLVEPGDKITFEATGNLVVPRYAFAMERNAGSGIIISDTPVHDCNTTCQTPKGAINTSLPFQNIHPITIGKCPKYVKSTKLRLATGLRNIPSIQSRGLFGAIAGFIEGGWTGMVDGWYGYHHQNEQGSGYAADLKSTQNAIDEITNKVNSVIEKMNTQFTAVGKEFNHLEKRIENLNKKVDDGFLDIWTYNAELLVLLENERTLDYHDSNVKNLYEKVRSQLKNNAKEIGNGCFEFYHKCDNTCMESVKNGTYDYPKYSEEAKLNREEIDGVKLESTRIYQILAIYSTVASSLVLVVSLGAISFWMCSNGSLQCRICI

SEQ ID NO: 2668 - protein, 566 aa, synthetic construct; identical to SEQ ID NO: 2656
  REGION 1..566: note = hemagglutinin__InfluenzaA__ACQ55361

SEQ ID NO: 2669 - protein, 566 aa, synthetic construct
  REGION 1..566: note = hemagglutinin__InfluenzaA__ACQ63223
MKAILVVLLYTFATANADTLCIGYHANNSTDTVDTVLEKNVTVTHSVNLLEDKHNGKLCKLRGVAPLHLGKCNIAGWILGNPECESLSTASSWSYIVETSSSDNGTCYPGDFIDYEELREQLSSVSSFERFEIFPKTSSWPNHDSNKGVTAACPHAGAKSFYKNLIWLVKKGNSYPKLSKSYINDKGKEVLVLWGIHHPSTSADQQSLYQNADAYVFVGTSRYSKKFKPEIAIRPKVRDQEGRMNYYWTLVEPGDKITFEATGNLVVPRYAFAMERNAGSGIIISDTPVHDCNTTCQTPKGAINTSLPFQNIHPITIGKCPKYVKSTKLRLATGLRNVPSIQSRGLFGAIAGFIEGGWTGMVDGWYGYHHQNEQGSGYAADLKSTQNAIDEITNKVNSVIEKMNTQFTAVGKEFNHLEKRIENLNKKVDDGFLDIWTYNAELLVLLENERTLDYHDSNVKNLYEKVRSQLKNNAKEIGNGCFEFYHKCDNTCMESVKNGTYDYPKYSEEAKLNREEIDGVKLESTRIYQILAIYSTVASSLVLVVSLGAISFWMCSNGSLQCRICI

SEQ ID NO: 2670 - protein, 566 aa, synthetic construct; identical to SEQ ID NO: 2669
  REGION 1..566: note = hemagglutinin__InfluenzaA__ACQ63239

SEQ ID NO: 2671 - protein, 566 aa, synthetic construct; identical to SEQ ID NO: 2669
  REGION 1..566: note = hemagglutinin__InfluenzaA__ACQ63244

SEQ ID NO: 2672 - protein, 566 aa, synthetic construct; identical to SEQ ID NO: 2669
  REGION 1..566: note = hemagglutinin__InfluenzaA__ACQ63257

SEQ ID NO: 2673 - protein, 566 aa, synthetic construct
  REGION 1..566: note = hemagglutinin__InfluenzaA__ACQ65691
MKTIIALSYILCLVFAQKLPGNDNSTATLCLGHHAVPNGTIVKTITNDQIEVTNATELVQSSSTGGICDSPHQILDGENCTLIDALLGDPQCDGFQNKKWDLFVERSKAYSNCYPYDVPDYASLRSLVASSGTLEFNNESFNWTGVTQNGTSSSCKRGSDNSFFSRLNWLTHLKFKYPALNVTMPNNEKFDKLYIWGVHHPGTDNDQIFPYAQASGRITVSTKRSQQTVIPNIGSRPRVRDIPSRISIYWTIVKPGDILLINSTGNLIAPRGYFKIRSGKSSIMRSDAPIGKCNSECITPNGSIPNDKPFQNVNRITYGACPRYVKQNTLKLATGMRNVPEKQTRGIFGAIAGFIENGWEGMVDGWYGFRHQNSEGIGQAADLKSTQAAINQINGKLNRLIGKTNEKFHQIEKEFSEVEGRIQDLEKYVEDTKIDLWSYNAELLVALENQHTIDLTDSEMNKLFERTKKQLRENAEDMGNGCFKIYHKCDNACIGSIRNGTYDHDVYRDEALNNRFQIKGVELKSGYKDWILWISFTISCFLLCVALLGFIMWACQKGNIRCNICI

SEQ ID NO: 2674 - protein, 566 aa, synthetic construct; identical to SEQ ID NO: 2434
  REGION 1..566: note = hemagglutinin__InfluenzaA__ACQ65713

SEQ ID NO: 2675 - protein, 566 aa, synthetic construct
  REGION 1..566: note = hemagglutinin__InfluenzaA__ACQ65724
MKTIIALSYILCLVFAQKLPGNDNSTATLCLGHHAVPNGTIVKTITNDQIEVTNATELVQSSSTGEICDSPHQILDGENCTLIDALLGDPQCDGFQNKKWDLFVERSKAYSNCYPYDVPDYASLRSLVASSGTLEFNNESFNWAGVTQNGTSSACIRRSNNSFFSRLNWLTHLKFKYPALNVTMPNNEQFDKLYIWGVHHPGTDNDQIFLYAQASGRITVSTKRSQQTVIPNIGSRPRVRNIPSRISIYWTIVKPGDILLINSTGNLIAPRGYFKIRSGKSSIMRSDAPIGKCNSECITPNGSIPNDKPFQNVNRITYGACPRYVKQNTLKLATGMRNVPEKQTRGIFGAIAGFIENGWEGMVDGWYGFRHQNSEGRGQAADLKSTQAAIDQINGKLNRLIGKTNEKFHQIEKEFSEVEGRIQDLEKYVEDTKIDLWSYNAELLVALENQHTIDLTDSEMNKLFEKTKKQLRENAEDMGNGCFKIYHKCDNACIGSIRNGTYDHDVYRDEALNNRFQIKGVELKSGYKDWILWISFAISCFLLCVALLGFIMWACQKGNIRCNICI

SEQ ID NO: 2676 - protein, 566 aa, synthetic construct
  REGION 1..566: note = hemagglutinin__InfluenzaA__ACQ65747
MKTIIALSYILCLVFAQKLPGNDNSTATLCLGHHAVPNGTIVKTITNDQIEVTNATELVQSSSTGEICDSPHQILDGENCTLIDALLGDPQCDGFQNKKWDLFVERSKAYSNCYPYDVPDYASLRSLVASSGTLEFNNESFNWTGVTQNGTSSACIRRTNNSFFSRLNWLTHLKFKYPALNVTMPNNEKFDKLYIWGVHHPGTDNDQIFLYAQASGRITVSTKRSQQTVIPNIGSRPRVRNIPSRISIYWTIVKPGDILLINSTGNLIAPRGYFKIRSGKSSIMRSDAPIGKCNSECITPNGSIPNDKPFQNVNRITYGACPRYVKQNTLKLATGMRNVPEKQTRGIFGAIAGFIENGWEGMMDGWYGFRHQNSEGIGQAADLKSTQAAIDQINGKLNGLIGKTNEKFHQIEKEFSEVEGRIQDLEKYVEDTKIDLWSYNAELLVALENQHTIDLTDSEMNKLFEKTKKQLRENAEDMGNGCFKIYHKCDNACIGSIRNGTYDHDVYRDEALNNRFQIKGVELKSGYKDWILWISFAISCFLLCVALLGFIMWACQKGNIRCNICI

SEQ ID NO: 2677 - protein, 565 aa, synthetic construct
  REGION 1..565: note = hemagglutinin__InfluenzaA__ACQ65758
MKVKLLVLLCTFTATYADTICIGYHANNSTDTVDTVLEKNVTVTHSVNLLENSHNGKLCLLKGIAPLQLGNCSVAGWILGNPECELLISKESWSYVVEKPNPENGTCYPGHFADYEELREQLSSVSSFERFEIFPKESSWPNHTVTGVSASCSHNGESSFYRNLLWLTGKNGLYPNLSKSYANNKGKEVLVLWGVHHPPNIGDQNTLYHTENAYVSVVSSHYSRKFTPEIAKRPKVRDQEGRINYYWTLLEPGDTIIFEANGNLIAPRYAFALSRGFGSGIINSNAPMDKCDAKCQTPQGAINSSLPFQNVHPVTIGECPKYVRSAKLRMVTGLRNIPSIQSRGLFGAIAGFIEGGWTGMVDGWYGYHHQNEQGSGYAADQKSTQNAINGITNKVNSVIEKMNTQFTAVGKEFNKLERRMENLNKKVDDGFIDIWTYNAELLVLLENERTLDFHDSNVKNLYEKVKSQLKNNAKEIGNGCFEFYHKCNDECMESVKNGTYDYPKYSEESKLNREKIDGVKLESMGVYQILAIYSTVASSLVLLVSLGAISFWMCSNGSLQCRICI

SEQ ID NO: 2678 - protein, 566 aa, synthetic construct; identical to SEQ ID NO: 2656
  REGION 1..566: note = hemagglutinin__InfluenzaA__ACQ73386

SEQ ID NO: 2679 - protein, 566 aa, synthetic construct; identical to SEQ ID NO: 2669
  REGION 1..566: note = hemagglutinin__InfluenzaA__ACQ73387

SEQ ID NO: 2680 - protein, 566 aa, synthetic construct
  REGION 1..566: note = hemagglutinin__InfluenzaA__ACQ73555
MKTIIALSYILCLVFAQKLPGNDNSTATLCLGHHAVPNGTIVKTITNDQIEVTNATELVQSSSTGGICDSPHQILDGENCTLIDALLGDPQCDGFQNKKWDLFVERSKAYSNCYPYDVPDYASLRSLVASSGTLEFNNESFNWTGVTQNGTSSACKRRSNNSFFSRLNWLTHLKFKYPALNVTKPNNEKFDKLYIWGVHHPGTDNDQIFLYAQASGRITVSTKRSQQTVIPNIGSRPRVRNIPSRISIYWTIVKPGDILLINSTGNLIAPRGYFKIRSGKSSIMRSDAPIGKCNSECITPNGSIPNDKPFQNVNRITYGACPRYVKQNTLKLATGMRNVPEKQTRGIFGAIAGFIENGWEGMVDGWYGFRHQNSEGIGQAADLKSTQAAINQINGKLNRLIGKTNEKFHQIEKEFSEVEGRIQDLEKYVEDTKIDLWSYNAELLVALENQHTIDLTDSEMNKLFERTKKQLRENAEDMGNGCFKIYHKCDNACIGSIRNGTYDHDVYRDEALNNRFQIKGVELKSGYKDWILWISFAISCFLLCVALLGFIMWACQKGNIRCNICI

SEQ ID NO: 2681 - protein, 566 aa, synthetic construct; identical to SEQ ID NO: 2669
  REGION 1..566: note = hemagglutinin__InfluenzaA__ACQ76294

SEQ ID NO: 2682 - protein, 566 aa, synthetic construct; identical to SEQ ID NO: 2669
  REGION 1..566: note = hemagglutinin__InfluenzaA__ACQ76314

SEQ ID NO: 2683 - protein, 566 aa, synthetic construct; identical to SEQ ID NO: 2669
  REGION 1..566: note = hemagglutinin__InfluenzaA__ACQ76317

SEQ ID NO: 2684 - protein, 566 aa, synthetic construct
  REGION 1..566: note = hemagglutinin__InfluenzaA__ACQ76318
MKAILVVLLYTFATANADTLCIGYHANNSTDTVDTVLEKNVTVTHSVNLLEDKHNGKLCKLRGVAPLHLGKCNIAGWILGNPECESLSTASSWSYIVETPSSDNGTCYPGDFIDYEELREQLSSVSSFERFEIFPKTSSWPNHDSNKGVTAACPHAGAKSFYKNLIWLVKKGNSYPKLSKSYINDKGKEVLVLWGIHHPSTSADQQSLYQNADTYVFVGSSRYSKKFKPEIAIRPKVRDQEGRMNYYWTLVEPGDKITFEATGNLVVPRYAFAMERNAGSGIIISDTPVHDCNTTCQTPKGAINTSLPFQNIHPITIGKCPKYVKSTKLRLATGLRNIPSIQSRGLFGAIAGFIEGGWTGMVDGWYGYHHQNEQGSGYAADLKSTQNAIDEITNKVNSVIEKMNTQFTAVGKEFNHLEKRIENLNKKVDDGFLDIWTYNAELLVLLENERTLDYHDSNVKNLYEKVRSQLKNNAKEIGNGCFEFYHKCDNTCMESVKNGTYDYPKYSEEAKLNREEIDGVKLESTRIYQILAIYSTVASSLVLVVSLGAISFWMCSNGSLQCRICI

SEQ ID NO: 2685 - protein, 566 aa, synthetic construct; identical to SEQ ID NO: 2656
  REGION 1..566: note = hemagglutinin__InfluenzaA__ACQ76326

SEQ ID NO: 2686 - protein, 566 aa, synthetic construct; identical to SEQ ID NO: 2656
  REGION 1..566: note = hemagglutinin__InfluenzaA__ACQ76336

SEQ ID NO: 2687 - protein, 566 aa, synthetic construct; identical to SEQ ID NO: 2656
  REGION 1..566: note = hemagglutinin__InfluenzaA__ACQ76347

SEQ ID NO: 2688 - protein, 566 aa, synthetic construct; identical to SEQ ID NO: 2669
  REGION 1..566: note = hemagglutinin__InfluenzaA__ACQ76365

SEQ ID NO: 2689 - protein, 566 aa, synthetic construct; identical to SEQ ID NO: 2669
  REGION 1..566: note = hemagglutinin__InfluenzaA__ACQ76370

SEQ ID NO: 2690 - protein, 566 aa, synthetic construct; identical to SEQ ID NO: 2656
  REGION 1..566: note = hemagglutinin__InfluenzaA__ACQ76376

SEQ ID NO: 2691 - protein, 566 aa, synthetic construct
  REGION 1..566: note = hemagglutinin__InfluenzaA__ACQ76383
MKAILVVLLYTFATANADTLCIGYHANNSTDTVDTVLEKNVTVTHSVNLLEDKHNGKLCKLRGVAPLHLGKCNIAGWILGNPECESLSTASSWSYIVETSSSDNGTCYPGDFIDYEELREQLSSVSSFERFEIFPKTSSWPNHDSNKGITAACPHAGAKSFYKNLIWLVKKGNSYPKLSKSYINDKGKEVLVLWGIHHPSTSADQQSLYQNADAYVFVGSSRYSKKFKPEIAIRPKVRDQEGRMNYYWTLVEPGDKITFEATGNLVVPRYAFAMERNAGSGIIISDTPVHDCNTTCQTPKGAINTSLPFQNIHPITIGKCPKYVKSTKLRLATGLRNVPSIQSRGLFGAIAGFIEGGWTGMVDGWYGYHHQNEQGSGYAADLKSTQNAIDEITNKVNSVIEKMNTQFTAVGKEFNHLEKRIENLNKKVDDGFLDIWTYNAELLVLLENERTLDYHDSNVKNLYEKVRSQLKNNAKEIGNGCFEFYHKCDNTCMESVKNGTYDYPKYSEEAKLNREEIDGVKLESTRIYQILAIYSTVASSLVLVVSLGAISFWMCSNGSLQCRICI

SEQ ID NO: 2692 - protein, 566 aa, synthetic construct; identical to SEQ ID NO: 2669
  REGION 1..566: note = hemagglutinin__InfluenzaA__ACQ76389

SEQ ID NO: 2693 - protein, 566 aa, synthetic construct; identical to SEQ ID NO: 2656
  REGION 1..566: note = hemagglutinin__InfluenzaA__ACQ76401

SEQ ID NO: 2694 - protein, 566 aa, synthetic construct; identical to SEQ ID NO: 2669
  REGION 1..566: note = hemagglutinin__InfluenzaA__ACQ76405

SEQ ID NO: 2695 - protein, 566 aa, synthetic construct
  REGION 1..566: note = hemagglutinin__InfluenzaA__ACQ76408
MKAILVVMLYTFATANADTLCIGYHANNSTDTVDTVLEKNVTVTHSVNLLEDKHNGKLCKLRGVAPLHLGKCNIAGWILGNPECESLSTASSWSYIVETSSSDNGTCYPGDFIDYEELREQLSSVSSFERFEIFPKTSSWPNHDSNKGVTAACPHAGAKSFYKNLIWLVKKGNSYPKLSKSYINDKGKEVLVLWGIHHPSTSADQQSLYQNADAYVFVGSSRYSKKFKPEIAIRPKVRDQEGRMNYYWTLVEPGDKITFEATGNLVVPRYAFAMERNAGSGIIISDTPVHDCNTTCQTPKGAINTSLPFQNIHPITIGKCPKYVKSTKLRLATGLRNVPSIQSRGLFGAIAGFIEGGWTGMVDGWYGYHHQNEQGSGYAADLKSTQNAIDEITNKVNSVIEKMNTQFTAVGKEFNHLEKRIENLNKKVDDGFLDIWTYNAELLVLLENERTLDYHDSNVKNLYEKVRSQLKNNAKEIGNGCFEFYHKCDNTCMESVKNGTYDYPKYSEEAKLNREEIDGVKLESTRIYQILAIYSTVASSLVLVVSLGAISFWMCSNGSLQCRICI

SEQ ID NO: 2696 - protein, 566 aa, synthetic construct
  REGION 1..566: note = hemagglutinin__InfluenzaA__ACQ77601
MKTIIALSYILCLAFAQKLPGNDNSTATLCLGHHAVPNGTLVKTITNDQIEVTNATELVQSSSTGRICDSPHQILDGENCTLIDALLGDPHCDGFQNKEWDLFVERSKAYSDCYPYDVPDYASLRSLVASSGTLEFNNESFNWTGVAQNGTSSACKRRSIKSFFSRLNWLHQLENRYPAPNVTMPNNDKFDKLYIWGVHHPSTDSDQISVYAQASGRVTVSTKRSQQTVIPNIGSRPWVRGISSRISIYWTIVKPGDILLINSTGNLIAPRGYFKIRSGKSSIMRSDAPIGKCNSECITPNGSIPNDKPFQNVNRITYGACPRYVKQNTLKLATGMRNVPEKQTRGIFGAIAGFIENGWEGMMDGWYGFRHQNSEGTGQAADLKSTQAAINQINGKLNKLIEKTNEKFHQIEKEFSEVEGRIQDLEKYVEDTKIDLWSYNAELLVALENQHTIDLTDSEMNKLFERTRKQLRENAEDMGNGCFKIYHKCDNACIGSIRNGTYDHDVYRDEALNNRFQIKGVELKSGYKDWILWISFAISCFLLCVVLLGFIMWACQKGNIRCNICI

SEQ ID NO: 2697 - protein, 566 aa, synthetic construct
  REGION 1..566: note = hemagglutinin__InfluenzaA__ACQ83310
MKAILVVLLYTFATANADTLCIGYHANNSTDTVDTVLEKNVTVTHSVNLLEDKHNGKLCKLRGVAPLHLGKCNIAGWILGNPECESLSTASSWSYIVETSSSDNGTCYPGDFIDYEELREQLSSMSSFERFEIFPKTSSWPNHDSNKGVTAACPHAGAKSFYKNLIWLVKKGNSYPKLSKSYINDKGKEVLVLWGIHHPSTSADQQSLYQNADAYVFVGSSRYSKKLKPEIAIRPKVRDQEGRMNYYWTLVEPGDKITFEATGNLVVPRYAFAMERNAGSGIIISDTPVHDCNTTCQTPKGAINTSLPFQNIHPITIGKCPKYVKSTKLRLATGLRNVPSIQSRGLFGAIAGFIEGGWTGMVDGWYGYHHQNEQGSGYAADLKSTQNAIDEITNKVNSVIEKMNTQFTAVGKEFNHLEKRIENLNKKVDDGFLDIWTYNAELLVLLENERTLDYHDSNVKNLYEKVRSQLKNNAKEIGNGCFEFYHKCDNTCMESVKNGTYDYPKYSEEAKLNREEIDGVKLESTRIYQILAIYSTVASSLVLVVSLGAISFWMCSNGSLQCRICI

SEQ ID NO: 2698 - protein, 566 aa, synthetic construct; identical to SEQ ID NO: 2656
  REGION 1..566: note = hemagglutinin__InfluenzaA__ACQ84451

SEQ ID NO: 2699 - protein, 566 aa, synthetic construct; identical to SEQ ID NO: 2656
  REGION 1..566: note = hemagglutinin__InfluenzaA__ACQ84457

SEQ ID NO: 2700 - protein, 566 aa, synthetic construct
  REGION 1..566: note = hemagglutinin__InfluenzaA__ACQ84477
MKAILLVLLYTFTAANADTLCIGYHANNSTDTVDTVLEKNVTVTHSVNLLEDRHNGKLCKLRGVAPLHLGKCNIAGWLLGNPECELLFTASSWSYIVETSNSDNGTCYPGDFINYEELREQLSSVSSFERFEIFPKASSWPDHETNRGVTAACPYAGANSFYRNLIWLVKKGNSYPKLSKSYVNNKEKEVLVLWGIHHPPTSTDQQSLYQNADAYVFVGSSKYNKKFKPEIATRPKVRGQAGRMNYYWTLVEPGDTITFEATGNLVVPRYAFAMKRGSGSGIIISDTPVHDCNTTCQTPKGAINTSLPFQNIHPVTIGECPKYVKSTKLRMATGLRNIPSIQSRGLFGAIAGFIEGGWTGMIDGWYGYHHQNEQGSGYAADQKSTQNAIDGITNKVNSVIEKMNTQFTAVGKEFNHLEKRIENLNKKVDDGFLDVWTYNAELLVLLENERTLDYHDSNVKNLYEKVRSQLKNNAKEIGNGCFEFYHKCDDTCMESVKNGTYDYPKYSEESKLNREEIDGVKLESTRIYQILAIYSTVASSLVLLVSLGAISFWMCSNGSLQCRICI

SEQ ID NO: 2701 - protein, 566 aa, synthetic construct
  REGION 1..566: note = hemagglutinin__InfluenzaA__ACQ89900
MKAILVVLLYTFATANADTLCIGYHANNSTDTVDTVLEKNVTVTHSVNLLEDKHNGKLCKLRGVAPLHLGKCNIAGWILGNPECESLSTASSWSYIVETSSSDNGTCYPGDFIDYEELREQLSSVSSFERFEIFPKTSSWPNHDSNKGVTAACPHAGAKSFYKNLIWLVKKGNSYPKLSKSYINDKGKEVLVLWGIHHPSTSADQQSLYQNADAYVFVGSSRYSKKFKPEIAIRPKVRDQEGRMNYYWTLVEPGDKITFEATGNLVVPRYAFAMERNAGSGIIISDTPVHDCNTTCQTPKGAINTSLPFQNIHPITIGKCPKYVKSTKLRLATGLRNVPSIQSRGLFGAIAGFIEGGWTGMVDGWYGYHHQNEQGSGYAADLKSTQNAIDEITNKVNSVVEKMNTQFTAVGKEFNHLEKRIENLNKKVDDGFLDIWTYNAELLVLLENERTLDYHDSNVKNLYEKVRSQLKNNAKEIGNGCFEFYHKCDNTCMESVKNGTYDYPKYSEEAKLNREEIDGVKLESTRIYQILAIYSTVASSLVLVVSLGAISFWMCSNGSLQCRICI

SEQ ID NO: 2702 - protein, 566 aa, synthetic construct; identical to SEQ ID NO: 2669
  REGION 1..566: note = hemagglutinin__InfluenzaA__ACQ89902

SEQ ID NO: 2703 - protein, 566 aa, synthetic construct
  REGION 1..566: note = hemagglutinin__InfluenzaA__ACQ89904
MKAILVVLLYTFATANADTLCIGYHANNSTDTVDTVLEKNVTVTHSVNLLEDKHNGKLCKLRGVAPLHLGKCNIAGWILGNPECESLSTASSWSYIVETSSSDKGTCYPGDFIDYEELREQLSSVSSFERFEIFPKTSSWPNHDSNKGVTAACPHAGAKSFYKNLIWLVKKGNSYPKLSKSYINDKGKEVLVLWGIHHPSTSADQQSLYQNADAYVFVGTSRYSKKFKPEIAIRPKVRDQEGRMNYYWTLVEPGDKITFEATGNLVVPRYAFAMERNAGSGIIISDTPVHDCNTTCQTPKGAINTSLPFQNIHPITIGKCPKYVKSTKLRLATGLRNVPSIQSRGLFGAIAGFIEGGWTGMVDGWYGYHHQNEQGSGYAADLKSTQNAIDEITNKVNSVIEKMNTQFTAVGKEFNHLEKRIENLNKKVDDGFLDIWTYNAELLVLLENERTLDYHDSNVKNLYEKVRSQLKNNAKEIGNGCFEFYHKCDNTCMESVKNGTYDYPKYSEEAKLNREEIDGVKLESTRIYQILAIYSTVASSLVLVVSLGAISFWMCSNGSLQCRICI

SEQ ID NO: 2704 - protein, 566 aa, synthetic construct; identical to SEQ ID NO: 2701
  REGION 1..566: note = hemagglutinin__InfluenzaA__ACQ89905

SEQ ID NO: 2705 - protein, 566 aa, synthetic construct; identical to SEQ ID NO: 2656
  REGION 1..566: note = hemagglutinin__InfluenzaA__ACQ99607

SEQ ID NO: 2706 - protein, 566 aa, synthetic construct; identical to SEQ ID NO: 2656
  REGION 1..566: note = hemagglutinin__InfluenzaA__ACQ99608

SEQ ID NO: 2707 - protein, 566 aa, synthetic construct; identical to SEQ ID NO: 2656
  REGION 1..566: note = hemagglutinin__InfluenzaA__ACQ99609

SEQ ID NO: 2708 - protein, 566 aa, synthetic construct; identical to SEQ ID NO: 2656
  REGION 1..566: note = hemagglutinin__InfluenzaA__ACQ99611

SEQ ID NO: 2709 - protein, 566 aa, synthetic construct
  REGION 1..566: note = hemagglutinin__InfluenzaA__ACQ99614
MKAILVVLLYTFATANADTLCIGYHANNSTDTVDTVLEKNVTVTHSVNLLEDKHNGKLCKLRGVAPLHLGKCNIAGWILGNPECESLSTASSWSYIVETSSSDNGTCYPGDFIDYEELREQLSSVSSFERFEIFPKTSSWPNHDSNKGVTAACPHAGAKSFYKNLIWLVKKGNSYPKLSKSYINDKGKEVLVLWGIHHPSTSADQQSLYQNADAYVFVGSSRYSKKFKPEIAIRPKVRDQEGRMNYYWTLVEPGDKITFEATGNLVVPRYAFAMERNAGSGIIISDTPVHDCNTTCQTPKGAINTSLPFQNIHPITIGKCPKYVKSTKLRLATGLRNVPSIQSRGLFGAIAGFIEGGWTGMVDGWYGYHHQNEQGSGYAADLKSTQNAIDEITNKVNSVIEKMNTQFTAVGKEFNHLEKRIENLNKKVDDGFLDIWTYNAELLILLENERTLDYHDSNVKNLYEKVRSQLKNNAKEIGNGCFEFYHKCDNTCMESVKNGTYDYPKYSEEAKLNREEIDGVKLESTRIYQILAIYSTVASSLVLVVSLGAISFWMCSNGSLQCRICI

SEQ ID NO: 2710 - protein, 566 aa, synthetic construct; identical to SEQ ID NO: 2709
  REGION 1..566: note = hemagglutinin__InfluenzaA__ACQ99616

SEQ ID NO: 2711 - protein, 566 aa, synthetic construct; identical to SEQ ID NO: 2656
  REGION 1..566: note = hemagglutinin__InfluenzaA__ACQ99617

SEQ ID NO: 2712 - protein, 566 aa, synthetic construct; identical to SEQ ID NO: 2656
  REGION 1..566: note = hemagglutinin__InfluenzaA__ACQ99618

SEQ ID NO: 2713 - protein, 566 aa, synthetic construct; identical to SEQ ID NO: 2656
  REGION 1..566: note = hemagglutinin__InfluenzaA__ACQ99619

SEQ ID NO: 2714 - protein, 566 aa, synthetic construct; identical to SEQ ID NO: 2656
  REGION 1..566: note = hemagglutinin__InfluenzaA__ACQ99620

SEQ ID NO: 2715 - protein, 566 aa, synthetic construct; identical to SEQ ID NO: 2709
  REGION 1..566: note = hemagglutinin__InfluenzaA__ACQ99621

SEQ ID NO: 2716 - protein, 566 aa, synthetic construct; identical to SEQ ID NO: 2656
  REGION 1..566: note = hemagglutinin__InfluenzaA__ACQ99622

SEQ ID NO: 2717 - protein, 566 aa, synthetic construct
  REGION 1..566: note = hemagglutinin__InfluenzaA__ACR01014
MKAILVVLLYTFATANADTLCIGYHANNSTDTVDTVLEKNVTVTHSVNLLEDKHNGKLCKLRGVAPLHLGKCNIAGWILGNPECESLSTASSWSYIVETSSSDNGTCYPGDFIDYEELREQLSSVSSFERFEIFPKTSSWPNHDSNKGVTAACPHAGAKSFYKNLIWLVKKGNSYPKLSKSYINDKGKEVLVLWGIHHPSTSADQQSLYQNADAYVFVGSSRYSKKFKPEIAIRPKVRDQEGRMNYYWTLVEPGDKITFEATGNLVVPRYAFAMERNAGSGIIISDTPVHDCNTTCQTPKGAINTSLPFQNIHPITIGKCPKYVKSTKLRLATGLRNVPSIQSRGLFGAIAGFIEGGWTGMVDGWYGYHHQNEQGSGYAADLKSTQNAIDEITNKVNSVIEKMNTQFTAVGKEFNHLEKRMENLNKKVDDGFLDIWTYNAELLVLLENERTLDYHDSNVKNLYEKVRSQLKNNAKEIGNGCFEFYHKCDNTCMESVKNGTYDYPKYSEEAKLNREEIDGVKLESTRIYQILAIYSTVASSLVLVVSLGAISFWMCSNGSLQCRICI

SEQ ID NO: 2718 - protein, 566 aa, synthetic construct; identical to SEQ ID NO: 2669
  REGION 1..566: note = hemagglutinin__InfluenzaA__ACR08419

SEQ ID NO: 2719 - protein, 566 aa, synthetic construct
  REGION 1..566: note = hemagglutinin__InfluenzaA__ACR08429
MKAILVVLLYTFATANADTLCIGYHANNSTDTVDTVLEKNVTVTHSVNLLEDKHNGKLCKLRGVAPLHLGKCNIAGWILGNPECESLSTASSWSYIVETSSSDNGTCYPGDFIDYEELREQLSSVSSFERFEIFPKTSSWPNHDSNKGVTAACPHAGAKSFYKNLIWLVKKGNSYPKLSKSYINDKGKEVLVLWGIHHPSTSADQQSLYQNADAYVFVGTSRYSKKFKPEIAIRPKVRDQEGRMNYYWTLVEPGDKITFEATGNLVVPRYAFAMERNTGSGIIISDTPVHDCNTTCQTPKGAINTSLPFQNIHPITIGKCPKYVKSTKLRLATGLRNVPSIQSRGLFGAIAGFIEGGWTGMVDGWYGYHHQNEQGSGYAADLKSTQNAIDEITNKVNSVIEKMNTQFTAVGKEFNHLEKRIENLNKKVDDGFLDIWTYNAELLVLLENERTLDYHDSNVKNLYEKVRSQLKNNAKEIGNGCFEFYHKCDNTCMESVKNGTYDYPKYSEEAKLNREEIDGVKLESTRIYQILAIYSTVASSLVLVVSLGAISFWMCSNGSLQCRICI

SEQ ID NO: 2720 - protein, 566 aa, synthetic construct; identical to SEQ ID NO: 2669
  REGION 1..566: note = hemagglutinin__InfluenzaA__ACR08439

SEQ ID NO: 2721 - protein, 566 aa, synthetic construct; identical to SEQ ID NO: 2669
  REGION 1..566: note = hemagglutinin__InfluenzaA__ACR08449

SEQ ID NO: 2722 - protein, 566 aa, synthetic construct
  REGION 1..566: note = hemagglutinin__InfluenzaA__ACR08459
MKAILVVLLYTFATANADTLCIGYHANNSTDTVDTVLEKNVTVTHSVNLLEDKHNGKLCKLRGVAPLHLGKCNIAGWILGNPECESLSTASSWSYIVETSSSDNGTCYPGDFIDYEELREQLSSVSSFERFEIFPKTSSWPNHDSNKGVTAACPHAGAKSFYKNLIWLVKKGNSYPKLSKSYINDKGKEVLVLWGIHHPSTSADQQSLYQNADAYVFVGSSRYSKKFKPEIAIRPKVRDQEGRMNYYWTLVEPGDKITFEATGNLVVPRYAFAMERNAGSGIIISDTPVHDCDTTCQTPKGAINTSLPFQNIHPITIGKCPKYVKSTKLRLATGLRNVPSIQSRGLFGAIAGFIEGGWTGMVDGWYGYHHQNEQGSGYAADLKSTQNAIDEITNKVNSVIEKMNTQFTAVGKEFNHLEKRIENLNKKVDDGFLDIWTYNAELLVLLENERTLDYHDSNVKNLYEKVRSQLKNNAKEIGNGCFEFYHKCDNTCMESVKNGTYDYPKYSEEAKLNREEIDGVKLESTRIYQILAIYSTVASSLVLVVSLGAISFWMCSNGSLQCRICI

SEQ ID NO: 2723 - protein, 566 aa, synthetic construct; identical to SEQ ID NO: 2656
  REGION 1..566: note = hemagglutinin__InfluenzaA__ACR08528

SEQ ID NO: 2724 - protein, 566 aa, synthetic construct; identical to SEQ ID NO: 2656
  REGION 1..566: note = hemagglutinin__InfluenzaA__ACR08530

SEQ ID NO: 2725 - protein, 566 aa, synthetic construct; identical to SEQ ID NO: 2722
  REGION 1..566: note = hemagglutinin__InfluenzaA__ACR08531

SEQ ID NO: 2726 - protein, 566 aa, synthetic construct; identical to SEQ ID NO: 2669
  REGION 1..566: note = hemagglutinin__InfluenzaA__ACR08533

SEQ ID NO: 2727 - protein, 566 aa, synthetic construct; identical to SEQ ID NO: 2722
  REGION 1..566: note = hemagglutinin__InfluenzaA__ACR08535

SEQ ID NO: 2728 - protein, 566 aa, synthetic construct; identical to SEQ ID NO: 2669
  REGION 1..566: note = hemagglutinin__InfluenzaA__ACR08536

SEQ ID NO: 2729 - protein, 566 aa, synthetic construct; identical to SEQ ID NO: 2722
  REGION 1..566: note = hemagglutinin__InfluenzaA__ACR08537

SEQ ID NO: 2730 - protein, 566 aa, synthetic construct; identical to SEQ ID NO: 2722
  REGION 1..566: note = hemagglutinin__InfluenzaA__ACR08538

SEQ ID NO: 2731 - protein, 566 aa, synthetic construct; identical to SEQ ID NO: 2669
  REGION 1..566: note = hemagglutinin__InfluenzaA__ACR08539

SEQ ID NO: 2732 - protein, 566 aa, synthetic construct; identical to SEQ ID NO: 2669
  REGION 1..566: note = hemagglutinin__InfluenzaA__ACR08540

SEQ ID NO: 2733 - protein, 566 aa, synthetic construct; identical to SEQ ID NO: 2656
  REGION 1..566: note = hemagglutinin__InfluenzaA__ACR08542

SEQ ID NO: 2734 - protein, 566 aa, synthetic construct; identical to SEQ ID NO: 2656
  REGION 1..566: note = hemagglutinin__InfluenzaA__ACR08543

SEQ ID NO: 2735 - protein, 566 aa, synthetic construct; identical to SEQ ID NO: 2695
  REGION 1..566: note = hemagglutinin__InfluenzaA__ACR08544

SEQ ID NO: 2736 - protein, 566 aa, synthetic construct; identical to SEQ ID NO: 2722
  REGION 1..566: note = hemagglutinin__InfluenzaA__ACR08545

SEQ ID NO: 2737 - protein, 566 aa, synthetic construct; identical to SEQ ID NO: 2656
  REGION 1..566: note = hemagglutinin__InfluenzaA__ACR08546

SEQ ID NO: 2738 - protein, 566 aa, synthetic construct; identical to SEQ ID NO: 2669
  REGION 1..566: note = hemagglutinin__InfluenzaA__ACR08547

SEQ ID NO: 2739 - protein, 566 aa, synthetic construct; identical to SEQ ID NO: 2722
  REGION 1..566: note = hemagglutinin__InfluenzaA__ACR08548

SEQ ID NO: 2740 - protein, 566 aa, synthetic construct; identical to SEQ ID NO: 2669
  REGION 1..566: note = hemagglutinin__InfluenzaA__ACR08549

SEQ ID NO: 2741 - protein, 566 aa, synthetic construct; identical to SEQ ID NO: 2669
  REGION 1..566: note = hemagglutinin__InfluenzaA__ACR08550

SEQ ID NO: 2742 - protein, 566 aa, synthetic construct; identical to SEQ ID NO: 2669
  REGION 1..566: note = hemagglutinin__InfluenzaA__ACR08551

SEQ ID NO: 2743 - protein, 566 aa, synthetic construct; identical to SEQ ID NO: 2656
  REGION 1..566: note = hemagglutinin__InfluenzaA__ACR08552

SEQ ID NO: 2744 - protein, 566 aa, synthetic construct; identical to SEQ ID NO: 2695
  REGION 1..566: note = hemagglutinin__InfluenzaA__ACR08553

SEQ ID NO: 2745 - protein, 566 aa, synthetic construct; identical to SEQ ID NO: 2695
  REGION 1..566: note = hemagglutinin__InfluenzaA__ACR08554

SEQ ID NO: 2746 - protein, 566 aa, synthetic construct; identical to SEQ ID NO: 2656
  REGION 1..566: note = hemagglutinin__InfluenzaA__ACR09365

SEQ ID NO: 2747 - protein, 566 aa, synthetic construct; identical to SEQ ID NO: 2656
  REGION 1..566: note = hemagglutinin__InfluenzaA__ACR09366

SEQ ID NO: 2748 - protein, 566 aa, synthetic construct; identical to SEQ ID NO: 2656
  REGION 1..566: note = hemagglutinin__InfluenzaA__ACR09367

SEQ ID NO: 2749 - protein, 566 aa, synthetic construct; identical to SEQ ID NO: 2656
  REGION 1..566: note = hemagglutinin__InfluenzaA__ACR09368

SEQ ID NO: 2750 - protein, 566 aa, synthetic construct; identical to SEQ ID NO: 2656
  REGION 1..566: note = hemagglutinin__InfluenzaA__ACR09369

SEQ ID NO: 2751 - protein, 566 aa, synthetic construct; identical to SEQ ID NO: 2656
  REGION 1..566: note = hemagglutinin__InfluenzaA__ACR09370

SEQ ID NO: 2752 - protein, 566 aa, synthetic construct; identical to SEQ ID NO: 2656
  REGION 1..566: note = hemagglutinin__InfluenzaA__ACR09371

SEQ ID NO: 2753 - protein, 566 aa, synthetic construct; identical to SEQ ID NO: 2656
  REGION 1..566: note = hemagglutinin__InfluenzaA__ACR09373

SEQ ID NO: 2754 - protein, 566 aa, synthetic construct; identical to SEQ ID NO: 2656
  REGION 1..566: note = hemagglutinin__InfluenzaA__ACR09374

SEQ ID NO: 2755 - protein, 566 aa, synthetic construct
  REGION 1..566: note = hemagglutinin__InfluenzaA__ACR09375
MKAILVVLLYTFATANADTLCIGYHANNSTDTVDTVLEKNVTVTHSVNLLEDKHNGKLCKLRGVAPLHLGKCNIAGWILGNPECESLSTASSWSYIVETSSSDNGTCYPGDFIDYEELREQLSSVSSFERFEIFPKTSSWPNHDSNKGVTAACPHAGAKSFYKNLIWLVKKGNSYPKLSKSYINDKGKEVLVLWGIHHPSTSADQQSLYQNADAYVFVGSSRYSKKFKPEIAIRPKVRDQEGRMNYYWTLVEPGDKITFEATGNLVVPRYAFAMEKNAGSGIIISDTPVHDCNTTCQTPKGAINTSLPFQNIHPITIGKCPKYVKSTKLRLATGLRNVPSIQSRGLFGAIAGFIEGGWTGMVDGWYGYHHQNEQGSGYAADLKSTQNAIDEITNKVNSVIEKMNTQFTAVGKEFNHLEKRIENLNKKVDDGFLDIWTYNAELLVLLENERTLDYHDSNVKNLYEKVRSQLKNNAKEIGNGCFEFYHKCDNTCMESVKNGTYDYPKYSEEAKLNREEIDGVKLESTRIYQILAIYSTVASSLVLVVSLGAISFWMCSNGSLQCRICI

SEQ ID NO: 2756 - protein, 566 aa, synthetic construct; identical to SEQ ID NO: 2656
  REGION 1..566: note = hemagglutinin__InfluenzaA__ACR09376

SEQ ID NO: 2757 - protein, 566 aa, synthetic construct; identical to SEQ ID NO: 2656
  REGION 1..566: note = hemagglutinin__InfluenzaA__ACR09377

SEQ ID NO: 2758 - protein, 566 aa, synthetic construct; identical to SEQ ID NO: 2656
  REGION 1..566: note = hemagglutinin__InfluenzaA__ACR09395

SEQ ID NO: 2759 - protein, 566 aa, synthetic construct; identical to SEQ ID NO: 2656
  REGION 1..566: note = hemagglutinin__InfluenzaA__ACR09396

SEQ ID NO: 2760 - protein, 566 aa, synthetic construct
  REGION 1..566: note = hemagglutinin__InfluenzaA__ACR10186
MKAILVVLLYTFATANADTLCIGYHANNSTDTVDTVLEKNVTVTHSVNLLEDKHNGKLCKLRGVAPLHLGKCNIAGWILGNPECESLSTASSWSYIVETSSSDNGTCYPGDFIDYEELREQLSSVSSFERFEIFPKTSSWPNHDSNKGVTAACPHAGAKSFYKNLIWLVKKGNSYPKLSKSYINDKGKEVLVLWGIHHPSTSADQQSLYQNADAYVFVGTSRYSKKFKPEIAIRPKVRDQEGRMNYYWTLVEPGDKITFEATGNLVVPRYAFAMERNAGSGIIISDTPVHDCNTTCQTPKGAINTSLPFQNIHPITIGKCPKYVKSTKLRLATGLRNVPSIQSRGLFGAIAGFIEGGWTGMVDGWYGYHHQNEQGSGYAADLKSTQNAIDEITNKVNSVIEKMNTQFTAVGKEFNHLEKRIENLNKKIDDGFLDIWTYNAELLVLLENERTLDYHDSNVKNLYEKVRSQLKNNAKEIGNGCFEFYHKCDNTCMESVKNGTYDYPKYSEEAKLNREEIDGVKLESTRIYQILAIYSTVASSLVLVVSLGAISFWMCSNGSLQCRICI

SEQ ID NO: 2761 - protein, 566 aa, synthetic construct; identical to SEQ ID NO: 2760
  REGION 1..566: note = hemagglutinin__InfluenzaA__ACR10222

SEQ ID NO: 2762 - protein, 566 aa, synthetic construct
  REGION 1..566: note = hemagglutinin__InfluenzaA__ACR10223
MKAILVVLLYTFTTANADTLCIGYHANNSTDTVDTVLEKNVTVTHSVNLLEDKHNGKLCKLRGVAPLHLGKCNIAGWILGNPECESLSTASSWSYIVETSSSDNGTCYPGDFIDYEELREQLSSVSSFERFEIFPKTSSWPNHDSNKGVTAACPHAGAKSFYKNLIWLVKKGNSYPKLSKSYINDKGKEVLVLWGIHHPSTSADQQSLYQNADAYVFVGSSRYSKKFKPEIAIRPKVRDQEGRMNYYWTLVEPGDKITFEATGNLVVPRYAFAMERNAGSGIIISDTPVHDCNTTCQTPKGAINTSLPFQNIHPITIGKCPKYVKSTKLRLATGLRNVPSIQSRGLFGAIAGFIEGGWTGMVDGWYGYHHQNEQGSGYAADLKSTQNAIDEITNKVNSVIEKMNTQFTAVGKEFNHLEKRIENLNKKVDDGFLDIWTYNAELLVLLENERTLDYHDSNVKNLYEKVRSQLKNNAKEIGNGCFEFYHKCDNTCMESVKNGTYDYPKYSEEAKLNREEIDGVKLESTRIYQILAIYSTVASSLVLVVSLGAISFWMCSNGSLQCRICI

SEQ ID NO: 2763 - protein, 566 aa, synthetic construct
  REGION 1..566: note = hemagglutinin__InfluenzaA__ACR15183
MKTIIALSYILCLVFAQKLPGNDNSTATLCLGHHAVPNGTIVKTITNDQIEVTNATELVQSSSTGGICDSPHQILDGENCTLIDALLGDPQCDGFQNKKWDLFVERSKAYSNCYPYDVPDYASLRSLVASSGTLEFNNESFNWTGVTQNGTSSACKRGSDNSFFSRLNWLTHLKFKYPALNVTMPNNEKFDKLYIWGVHHPGTDNDQIFPYAQASGRITVSTKRSQQTVIPNIGSRPRVRNIPSRISIYWTIVKPGDILLINSTGNLIAPRGYFKIRSGKSSIMRSDAPIGKCNSECITPNGSIPNDKPFQNVNRITYGACPRYVKQNTLKLATGMRNVPEKQTRGIFGAIAGFIENGWEGMVDGWYGFRHQNSEGIGQAADLKSTQAAINQINGKLNRLIGKTNEKFHQIEKEFSEVEGRIQDLEKYVEDTKIDLWSYNAELLVALENQHTIDLTDSEMNKLFERTKKQLRENAEDMGNGCFKIYHKCDNACIGSIRNGTYDHDVYRDEALNNRFQIKGVELKSGYKDWILWISFAISCFLLCVALLGFIMWACQKGNIRCNICI

SEQ ID NO: 2764 - protein, 565 aa, synthetic construct
  REGION 1..565: note = hemagglutinin__InfluenzaA__ACR15194
MKVKLLVLLCTFTATYADTICIGYHANNSTDTVDTVLEKNVTVTHSVNLLENSHNGKLCLLKGIAPLQLGNCSVAGWILGNPECELLISKESWSYIVEKPNPENGTCYPGHFADYEELREQLSSVSSFERFEIFPKESSWPNHTVTGVSASCSHNGESSFYRNLLWLTGKNGLYPNLSKSYANNKEKEVLVLWGVHHPPNIGNQKALYHTENAYVSVVSSHYSRKFTPEIAKRPKVRDQEGRINYYWTLLEPGDTIIFEANGNLIAPRYAFALSRGLGSGIINSNAPMDKCDAKCQTPQGAINSSLPFQNVHPVTIGECPKYVRSAKLRMVTGLRNIPSIQSRGLFGAIAGFIEGGWTGMVDGWYGYHHQNEQGSGYAADQKSTQNAINGITNKVNSVIEKMNTQFTAVGKEFNKLERRMENLNKKVDDGFIDIWTYNAELLVLLENERTLDFHDSNVKNLYEKVKSQLKNNAKEIGNRCFEFYHKCNDECMESVKNGTYDYPKYSEESKLNREKIDGVKLESMGVYQILAIYSTVASSLVLLVSLGAISFWMCSNGSLQCRICI

SEQ ID NO: 2765 - protein, 565 aa, synthetic construct; identical to SEQ ID NO: 870
  REGION 1..565: note = hemagglutinin__InfluenzaA__ACR15216

SEQ ID NO: 2766 - protein, 566 aa, synthetic construct
  REGION 1..566: note = hemagglutinin__InfluenzaA__ACR15227
MKTIIALSYILCLVFAQKLPGNDNSTATLCLGHHAVPNGTIVKTITNDQIEVTNATELVQSSSTGGICDSPHQILDGENCTLIDALLGDPQCDGFQNKKWDLFVERSKAYSNCYPYDVPDYASLRSLVASSGTLEFNNESFNWTGVTQNGTSSACQRRSNKSFFSRLNWLTHLKFKYPALNVTMPNNEKFDKLYIWGVHHPGTDNDQISLYAQTSGRITVSTKRSQQTVIPNIGSRPRVRDVPSRISIYWTIVKPGDILLINSTGNLIAPRGYFKIRSGKSSIMRSDAPIGKCNSECITPNGSIPNDKPFQNVNRITYGACPRYVKQNTLKLATGMRNVPERQTRGIFGAIAGFIENGWEGMMDGWYGFRHQNSEGTGQAADLKSTQAAINQINGKLNRLIGKTNEKFHQIEKEFSEVEGRIQDLEKYVEDTKIDLWSYNAELLVALENQHTIDLTDSEMNKLFERTKKQLRENAEDMGNGCFKIYHKCDNACIGSIRNGTYDHDVYRDEALNNRFQIKGVELKSGYKDWILWISFAISCFLLCVALLGFIMWACQKGNIRCNICI

SEQ ID NO: 2767 - protein, 565 aa, synthetic construct
  REGION 1..565: note = hemagglutinin__InfluenzaA__ACR15238
MKVKLLVLLCTFTATYADTICIGYHANNSTDTVDTVLEKNVTVTHSVNLLENSHNGKLCLLKGIAPLQLGNCSVAGWILGNPECELLISKESWSYIVEKPNPENGTCYPGHFADYEELREQLSSVSSFERFEIFPKESSWPNHTVTGVSASCSHNGESSFYRNLLWLTGKNGLYPNLSKSYANNKEKEVLVLWGVHHPPNIGVQKALYHTENAYVSVVSSHYSRKFTPEIAKRPKVRDQEGRINYYWTLLEPGDTIIFEANGNLIAPRYAFALSRGFGSGIINSNAPMDKCDAKCQTPQGAINSSLPFQNVHPVTIGECPKYVRSAKLRMVTGLRNIPSIQSRGLFGAIAGFIEGGWTGMVDGWYGYQHQNEQGSGYAADQKSTQNAINGITNKVNSVIEKMNTQFTAVGKEFNKLERRMENLNKKVDDGFIDIWTYNAELLVLLENERTLDFHDSNVKNLYEKVKSQLKNNAKEIGNGCFEFYHKCNDECMESVKNGTYDYPKYSEESKLNREKIDGVKLESMGVYQILAIYSTVASSLVLLVSLGAISFWMCSNGSLQCRICI

SEQ ID NO: 2768 - protein, 566 aa, synthetic construct
  REGION 1..566: note = hemagglutinin__InfluenzaA__ACR15249
MKTIIALSYILCLVFAQKLPGNDNSTATLCLGHHAVPNGTIVKTITNDQIEVTNATELVQSSSTGEICDSPHQILDGENCTLIDALLGDPQCDGFQNKKWDLFVERSKAYSNCYPYDVPDYASLRSLVASSGTLEFNNESFNWTGVTQNGTSSACIRRSNNSFFSRLNWLTHSKFKYPALNVTMPNNEKFDKLYIWGVHHPGTDNDQIFLYAQASGRITVSTKRSQQTVIPNIGSRPRVRNIPSRISIYWTIVKPGDILLINSTGNLIAPRGYFKIRSGKSSIMRSDAPIGKCNSECITPNGSIPNDKPFQNVNRITYGACPRYVKQNTLKLATGMRNVPEKQTRGIFGAIAGFIENGWEGMVDGWYGFRHQNSEGIGQAADLKSTQAAIDQINGKLNRLIGKTNEKFHQIEKEFSEVEGRIQDLEKYVEDTKIDLWSYNAELLVALENQHTIDLTDSEMNKLFEKTKKQLRENAEDMGNGCFKIYHKCDNACIGSIRNGTYDHDVYRDEALNNRFQIKGVELKSGYKDWILWISFAISCFLLCVALLGFIMWACQKGNIRCNICI

SEQ ID NO: 2769 - protein, 566 aa, synthetic construct
  REGION 1..566: note = hemagglutinin__InfluenzaA__ACR15282
MKTIIALSYILCLVFAQKLPGNDNSTATLCLGHHAVPNGTIVKTIMNDQIEVTNATELVQSSSTGEICDSPHQILDGENCTLIDALLGDPQCDGFQNKKWDLFVERSKAYSNCYPYDVPDYASLRSLVASSGTLEFNNESFNWTGVTQNGTSSACIRRSNNSFFSRLNWLTHSKFKYPALNVTMPNNEKFDKLYIWGVHHPGTDNDQIFLYAQASGRITVSTKRSQQTVIPNIGSRPRVRNIPSRISIYWTIVKPGDILLINSTGNLIAPRGYFKIRSGKSSIMRSDAPIGKCNSECITPNGSIPNDKPFQNVNRITYGACPRYVKQNTLKLATGMRNVPEKQTRGIFGAIAGFIENGWEGMVDGWYGFRHQNSEGIGQAADLKSTQAAIDQINGKLNRLIGKTNEKFHQIEKEFSEVEGRIQDLEKYVEDTKIDLWSYNAELLVALENQHTIDLTDSEMNKLFEKTKKQLRENAEDMGNGCFKIYHKCDNACIGSIRNGTYDHDVYRDEALNNRFQIKGVELKSGYKDWILWISFAISCFLLCVALLGFIMWACQKGNIRCNICI

SEQ ID NO: 2770 - protein, 566 aa, synthetic construct
  REGION 1..566: note = hemagglutinin__InfluenzaA__ACR15293
MKTIIALSYILCLVFAQKLPGNDNSTATLCLGHHAVPNGTIVKTITNDQIEVTNATELVQSSSTGGICDSPHQILDGENCTLIDALLGDPQCDGFQNKKWDLFVERSKAYSNCYPYDVPDYASLRSLIASSGTLEFNNENFNWTGVTQNGTSSACKRGSDNSFFSRLNWLTHLKFKYPALKVTMPNNEKFDKLYIWGVHHPGTDNDQIFLYAQASGRITVSTKRSQQTVIPNIGSRPRVRNIPSRISIYWTIVKPGDILLINSTGNLIAPRGYFKIRSGKSSIMRSDAPIGKCNSECITPNGSIPNDKPFQNVNRITYGACPRYVKQNTLKLATGMRNVPEKQTRGIFGAIAGFIENGWEGMVDGWYGFRHQNSEGIGQAADLKSTQAAINQINGKLNRLIGKTNEKFHQIEKEFSEVEGRIQDLEKYVEDTKIDLWSYNAELLVALENQHTIDLTDSEMNKLFERTKKQLRENAEDMGNGCFKIYHKCDNACIGSIRNGTYDHDVYRDEALNNRFQIKGVELKSGYKDWILWISFAISCFLLCVALLGFIMWACQKGNIRCNICI

SEQ ID NO: 2771 - protein, 565 aa, synthetic construct
  REGION 1..565: note = hemagglutinin__InfluenzaA__ACR15304
MKAKLLVLLCTFTATYADTICIGYHANNSTDTVDTVLEKNVTVTHSVNLLEDSHNGKLCLLKGIAPLQLGNCSVAGWILGNPECELLISKESWSYIVETPNPENGTCYPGYFADYEELREQLSSVSSFERFEIFPKESSWPNHTVTGVSASCSHNGKSSFYRNLLWLTGKNGLYPNLSKSYANNKEKEVLVLWGVHHPPNTGNQRALYHTENAYVSVVSSHYSRRFTPEIAKRPKVRDQEGRINYYWTLLEPGDTIIFEANGNLIAPWYAFALSRGFGSGIITSNAPMDECDAKCQTPQGAINSSLPFQNVHPVTIGECPKYVRSAKLRMVTGLRNIPSIQSRGLFGAIAGFIEGGWTGMVDGWYGYHHQNEQGSGYAADQKSTQNAINGITNKVNSVIEKMNTQFTAVGKEFNRLERRMENLNKKVDDGFLDIWTYNAELLVLLENERTLDFHDSNVKNLYEKVKSQLKNNAKEIGNGCFEFYHKCNNECMESVKNGTYDYPKYSEESKLNREKIDGVKLESMGVYQILAIYSTVASSLVLLVSLGAISFWMCSNGSLQCRICI

SEQ ID NO: 2772 - protein, 565 aa, synthetic construct
  REGION 1..565: note = hemagglutinin__InfluenzaA__ACR15315
MKAKLLVLLCTFTATYADTICIGYHANNSTDTVDTVLEKNVTVTHSVNLLEDSHNGKLCLLKGIAPLQLGNCSVAGWILGNPECELLISKESWSYIVETPNPENGTCYPGYFADYEELREQLSSVSSFERFEIFPKGSSWPNHTVTGVSASCSHNGKSSFYRNLLWLTGKNGLYPNLSMSYVNNKEKEVLVLWGVHHPPNIRDQRALYHTENAYVSVVSSHYSRRFTPEIAKRPKVRDQEGRINYYWTLLEPGDTIIFEANGNLIAPWYAFALSRGFGSGIITSNAPMGECDAKCQTPQGAINSSLPFQNVHPVTIGECPKYVRSAKLRMVTGLRNIPSIQSRGLFGAIAGFIEGGWTGMVDGWYGYHHQNEQGSGYAADQKSTQNAINGITNKVNSVIEKMNTQFTAVGKEFNKLERRMENLNKKVDDGFLDIWTYNAELLVLLENERTLDFHDSNVKNLYEKVKSQLKNNAKEIGNGCFEFYHKCNNECMESVKNGTYDYPKYSEESKLNREKIDGVKLESMGVYQILAIYSTVASSLVLLVSLGAISFWMCSNGSLQCRICI

SEQ ID NO: 2773 - protein, 565 aa, synthetic construct
  REGION 1..565: note = hemagglutinin__InfluenzaA__ACR15326
MKAKLLVLLCTFTATYADTICIGYHANNSTDTVDTVLEKNVTVTHSVNLLEDSHNGKLCLLKGIAPLQLGNCSVAGWILGNPECELLISKESWSYIVETPNPENGTCYPGYFADYEELREQLSSVSSFERFEIFPKGSSWPNHTVTGVSASCSHNGKSSFYRNLLWLTGKNGLYPNLSMSYVNNKEKEVLVLWGVHHPPNIGNQRALYHTENAYVSVVSSHYSRRFTPEIAKRPKVRDQEGRINYYWTLLEPGDTIIFEANGNLIAPWYAFALSRGFGSGIITSNAPMGECDEKCQTPQGAINSSLPFQNVHPVTIGECPKYVRSAKLRMVTGLRNIPSIQSRGLFGAIAGFIEGGWTGMVDGWYGYHHQNEQGSGYAADQKSTQNAINGITNKVNSVIEKMNTQFTAVGKEFNKLERRMENLNKKVDDGFLDIWTYNAELLVLLENERTLDFHDSNVKNLYEKVKSQLKNNAKEIGNGCFEFYHKCNNECMESVKNGTYDYPKYSEESKLNREKIDGVKLESMGVYQILAIYSTVASSLVLLVSLGAISFWMCSNGSLQCRICI

SEQ ID NO: 2774 - protein, 565 aa, synthetic construct
  REGION 1..565: note = hemagglutinin__InfluenzaA__ACR15359
MKVKLLVLLCTFTATYADTICIGYHANNSTDTVDTVLEKNVTVTHSVNLLENSHNGKLCLLKGIAPLQLGNCSVAGWILGNPECGLLISKESWSYIVEKPNPENGTCYPGHFADYEELREQLSSVSSFERFEIFPKESSWPNHTVTGVSASCSHNGESSFYRNLLWLTGKNGLYPNLSKSYANNKEKEVLVLWGVHHPPNIGDQKALYHTENAYVSVVSSHYSRKFTPEIAKRPKVRDQEGRINYYWTLLEPGDTIIFEANGNLIAPRYAFALSRGFGSGIINSNAPMDKCDAKCQTPQGAINSSLPFQNVHPVTIGECPKYVRSAKLRMVTGLRNIPSIQSRGLFGAIAGFIEGGWTGMVDGWYGYHHQNEQGSGYAADQKSTQNAINGITNKVNSVIEKMNTQFTAVGKEFNKLERRMENLNKKVDDGFIDIWTYNAELLVLLENERTLDFHDSNVKNLYEKVKSQLKNNAKEIGNGCFEFYHKCNDECMESVKNGTYDYPKYSEESKLNREKIDGVKLESMGVYQILAIYSTVASSLVLLVSLGAISFWMCSNGSLQCRICI

SEQ ID NO: 2775 - protein, 565 aa, synthetic construct
  REGION 1..565: note = hemagglutinin__InfluenzaA__ACR15370
MKVKLLVLLCTLTATYADTICIGYHANNSTDTVDTVLEKNVTVTHSVNLLENSHNGKLCLLKGIAPLQLGNCSVAGWILGNPECELLISKESWSYIVEKPNPENGTCYPGHFADYEELREQLSSVSSFERFEIFPKESSWPNHTVTGVSASCSHNGESSFYRNLLWLTGKNGLYPNLSKSYANNKEKEVLVLWGVHHPPNIGDQKALYHTENAYVSVVSSHYSRKFTPEIAKRPKVRDQEGRINYYWTLLEPGDTIIFEANGNLIAPRYAFALSRGFGSGIINSNAPMDKCDAKCQTPQGAINSSLPFQNVHPVTIGECPKYVRSAKLRMVTGLRNIPSIQSRGLFGAIAGFIEGGWTGMVDGWYGYHHQNEQGSGYAADQKSTQNAINGITNKVNSVIEKMNTQFTAVGKEFNKLERRMENLNKKVDDGFIDIWTYNAELLVLLENERTLDFHDSNVKNLYEKVKSQLKNNAKEIGNGCFEFYHKCNDECMESVKNGTYDYPKYSEESKLNREKIDGVKLESMGVYQILAIYSTVASSLILLVSLGAISFWMCSNGSLQCRICI

SEQ ID NO: 2776 - protein, 566 aa, synthetic construct; identical to SEQ ID NO: 2301
  REGION 1..566: note = hemagglutinin__InfluenzaA__ACR15381

SEQ ID NO: 2777 - protein, 566 aa, synthetic construct; identical to SEQ ID NO: 2308
  REGION 1..566: note = hemagglutinin__InfluenzaA__ACR15392

SEQ ID NO: 2778 - protein, 566 aa, synthetic construct; identical to SEQ ID NO: 1928
  REGION 1..566: note = hemagglutinin__InfluenzaA__ACR15403

SEQ ID NO: 2779 - protein, 566 aa, synthetic construct; identical to SEQ ID NO: 1928
  REGION 1..566: note = hemagglutinin__InfluenzaA__ACR15414

SEQ ID NO: 2780 - protein, 565 aa, synthetic construct; identical to SEQ ID NO: 2774
  REGION 1..565: note = hemagglutinin__InfluenzaA__ACR15425

SEQ ID NO: 2781 - protein, 565 aa, synthetic construct
  REGION 1..565: note = hemagglutinin__InfluenzaA__ACR15436
MKVKLLVLLCTFTATYADTICIGYHANNSTDTVDTVLEKNVTVTHSVNLLENSHNGKLCLLKGIAPLQLGNCSVAGWILGNPECELLISKESWSYIVEKPNPENGTCYPGHFADYEELREQLSSVSSFERFEIFPKESSWPNHTVTGVSASCSHNGESSFYRNLLWLTGKNGLYPNLSKSYANNKGKEVLVLWGVHHPPNIGDQNTLYHTENAYVSVVSSHYSRKFTPEIAKRPKVRDQEGRINYYWTLLEPGDTIIFEANGNLIAPRYAFALSRGFGSGIINSNAPMDKCDAKCQTPQGAINSSLPFQNVHPVTIGECPKYVRSAKLRMVTGLRNIPSIQSRGLFGAIAGFIEGGWTGMVDGWYGYHHQNEQGSGYAADQKSTQNAINGITNKVNSVIEKMNTQFTAVGKEFNKLERRMENLNKKVDDGFIDIWTYNAELLVLLENERTLDFHDSNVKNLYEKVKSQLKNNAKEIGNGCFEFYHKCNDECMESVKNGTYDYPKYSEESKLNREKIDGVKLESMGVYQILAIYSTVASSLVLLVSLGAISFWMCSNGSLQCRICI

SEQ ID NO: 2782 - protein, 565 aa, synthetic construct
  REGION 1..565: note = hemagglutinin__InfluenzaA__ACR15458
MKVKLLVLLCTFTATYADTICIGYHANNSTDTVDTVLEKNVTVTHSVNLLENSHNGKLCLLKGIAPLQLGNCSVAGWILGNPECELLISKESWSYIVENPNPENGTCYPGHFADYEELREQLSSVSSFERFEIFPKESSWPNHTVTGVSASCSHNGESSFYRNLLWLTGKNGLYPNLSKSYANNKEKEVLVLWGVHHPPNIGDQKALYHTENAYVSVVSSHYSRKFTPEIAKRPKVRDQEGRINYYWTLLEPGDTIIFEANGNLIAPRYAFALSRGFGSGIINSNAPMDKCDAKCQTPQGAINSSLPFQNVHPVTIGECPKYVRSAKLRMVTGLRNIPSIQSRGLFGAIAGFIEGGWTGMVDGWYGYHHQNEQGSGYAADQKSTQNAINGITNKVNSVIEKMNTQFTAVGKEFNKLERRMENLNKKVDDGFIDIWTYNAELLVLLENERTLDFHDSNVKNLYEKVKSQLKNNAKEIGNGCFEFYHKCNDECMESVKNGTYDYPKYSEESKLNREKIDGVKLESMGVYQILAIYSTVASSLVLLVSLGAISFWMCSNGSLQCRICI

SEQ ID NO: 2783 - protein, 565 aa, synthetic construct
  REGION 1..565: note = hemagglutinin__InfluenzaA__ACR15469
MKVKLLVLLCTFTATYADTICIGYHANNSTDTVDTVLEKNVTVTHSVNLLEDSHNGKLCLLKGIAPLQLGNCSVAGWILGNPECELLISKESWSYIVEKPDPENGTCYPGHFADYEELREQLSSVSSFERFEIFPKESSWPNHTVTGVSASCSHNGESSFYRNLLWLTGKNGLYPNLSKSYANNKEKEVLVLWGVHHPPNIGDQNTLYHTENAYVSVVSSHYSRKFTPEIAKRPKVRDQEGRINYYWTLLEPGDTIIFEANGNLIAPRYAFALSRGFGSGIINSNAPMDKCDAKCQTPQGAINSSLPFQNVHPVTIGECPKYVRSAKLRMVTGLRNIPSIQSRGLFGAIAGFIEGGWTGMVDGWYGYHHQNEQGSGYAADQKSTQNAINGITNKVNSVIEKMNTQFTAVGKEFNKLERRMENLNKKVDDGFIDIWTYNAELLVLLENERTLDFHDSNVKNLYEKVKSQLKNNAKEIGNGCFEFYHKCNDECMESVKNGTYDYPKYSEESKLNREKIDGVKLESMGVYQILAIYSTVASSLVLLVSLGAISFWMCSNGSLQCRICI

SEQ ID NO: 2784 - protein, 565 aa, synthetic construct; identical to SEQ ID NO: 2781
  REGION 1..565: note = hemagglutinin__InfluenzaA__ACR15480

SEQ ID NO: 2785 - protein, 565 aa, synthetic construct
  REGION 1..565: note = hemagglutinin__InfluenzaA__ACR15491
MKVKLLVLLCTFTATYADTICIGYHANNSTDTVDTVLEKNVTVTHSVNLLENSHNGKLCLLKGIAPLQLGNCSVAGWILGNPECELLISKESWSYIVEKPNPENGTCYPGHFADYEELREQLSSVSSFERFEIFPKESSWPNHTVTGVSASCSHNGESSFYRNLLWLTGRNGLYPNLSKSYANNKEKEVLVLWGVHHPPNIVDQKTLYRTENAYVSVVSSHYSRKFTPEIAKRPKVRDQEGRINYYWTLLEPGDTIIFEANGNLIAPRYAFALSRGFGSGIINSNAPMDKCDAKCQTPQGAINSSLPFQNVHPVTIGECPKYVRSAKLRMVTGLRNIPSIQSRGLFGAIAGFIEGGWTGMVDGWYGYHHQNEQGSGYAADQKSTQNAINGITNKVNSVIEKMNTQFTAVGKEFNKLERRMENLNKKVDDGFIDIWTYNAELLVLLENERTLDFHDSNVKNLYEKVKSQLKNNAKEIGNGCFEFYHKCNDECMESVKNGTYDYPKYSEESKLNREKIDGIKLESMGVYQILAIYSTVASSLVLLVSLGAISFWMCSNGSLQCRICI

SEQ ID NO: 2786 - protein, 565 aa, synthetic construct
  REGION 1..565: note = hemagglutinin__InfluenzaA__ACR15502
MKVKLLVLLCTFTATYADTICIGYHANNATDTVDTVLEKNVTVTHSVNLLENSHNGKLCLLKGIAPLQLGNCSVAGWILGNPECELLISKESWSYIVEKPNPENGTCYPGHFADYEELREQLSSVSSFERFEIFPKESSWPNHTVTGVSASCSHNGESSFYRNLLWLTGKNGLYPNLSKSYANNKGKEVLVLWGVHHPPNIGDQNTLYHTENAYVSVVSSHYSRKFTPEIAKRPKVRDQEGRINYYWTLLEPGDTIIFEANGNLIAPRYAFALSRGFGSGIINSNAPMDKCDAKCQTPQGAINSSLPFQNVHPVTIGECPKYVRSAKLRMVTGLRNIPSIQSRGLFGAIAGFIEGGWTGMVDGWYGYHHQNEQGSGYAADQKSTQNAINGITNKVNSVIEKMNTQFTAVGKEFNKLERRMENLNKKVDDGFIDIWTYNAELLVLLENERTLDFHDSNVKNLYEKVKSQLKNNAKEIGNGCFEFYHKCNDECMESVKNGTYDYPKYSEESKLNREKIDGVKLESMGVYQILAIYSTVASSLVLLVSLGAISFWMCSNGSLQCRICI

SEQ ID NO: 2787 - protein, 565 aa, synthetic construct; identical to SEQ ID NO: 2643
  REGION 1..565: note = hemagglutinin__InfluenzaA__ACR15513

SEQ ID NO: 2788 - protein, 566 aa, synthetic construct
  REGION 1..566: note = hemagglutinin__InfluenzaA__ACR15524
MKTIIALSYILCLVFAQKLPGNDNSTATLCLGHHAVPNGTIVKTITNDQIEVTNATELVQSSSTGGICDSPHQILDGENCTLIDALLGDPQCDGFQNKKWDLFVERSKAYSNCYPYDVPDYASLRSLVASSGTLEFNNESFNWTGVTQNGTSSACKRRSNKSFFSRLNWLTHLKFKYPALNVTMPNNEKFDKLYIWGVHHPGTDNDQISLYAQASGRITVSTKRSQQTVIPNIGSRPRVRDVPSRISIYWTIVKSGDILLINSTGNLIAPRGYFKIRSGKSSIMRSDAPIGKCNSECITPNGSIPNDKPFQNVNRITYGACPRYVKQNTLKLATGMRNVPEKQTRGIFGAIAGFIENGWEGMVDGWYGFRHQNSEGTGQAADLKSTQAAINQINGKLNRLIGKTNEKFHQIEKEFSEVEGRIQDLEKYVEDTKIDLWSYNAELLVALENQHTIDLTDSEMNKLFERTKKQLRENAEDMGNGCFKIYHKCDNACIGSIRNGTYDHDVYRDEALNNRFQIKGVELKSGYKDWILWISFAISCFLLCVVLLGFIMWACQKGNIRCNICI

SEQ ID NO: 2789 - protein, 566 aa, synthetic construct; identical to SEQ ID NO: 2597
  REGION 1..566: note = hemagglutinin__InfluenzaA__ACR15535

SEQ ID NO: 2790 - protein, 566 aa, synthetic construct
  REGION 1..566: note = hemagglutinin__InfluenzaA__ACR15546
MKTIIALSYILCLVFAQKLPGNDNSTATLCLGHHAVPNGTIVKTITNDQIEVTNATELVQSSSTGGICDSPHHILDGENCTLIDALLGDPQCDGFQNKKWDLFVERSKAYSNCYPYDVPDYASLRSLVASSGTLEFNNESFNWTGVTQNGTSSACKRRSNNSFFSRLNWLTHLKFKYPALNVTMPNNEKFDKLYIWGVHHPGTDNDQISLYAQASGRITVSTKRSQQTVIPNIGSRPRVRDISSRISIYWTIVKPGDILLINSTGNLIAPRGYFKIRSGKSSIMRSDAPIGKCNSECITPNGSIPNDKPFQNVNRITYGACPRYVKQNTLKLATGMRNVPETQTRGIFGAIAGFIENGWEGMVDGWYGFRHQNSEGTGQAADLKSTQAAINQINGKLNRLIGKTNEKFHQIEKEFSEVEGRIQDLEKYVEDTKIDLWSYNAELLVALENQHTIDLTDSEMNKLFERTKKQLRENAEDMGNGCFKIYHKCDNACIGSIRNETYDHDVYRDEALNNRFQIKGVELKSGYKDWILWISFAISCFLLCVALLGFIMWACQKGNIRCNICI

SEQ ID NO: 2791 - protein, 566 aa, synthetic construct; identical to SEQ ID NO: 2372
  REGION 1..566: note = hemagglutinin__InfluenzaA__ACR15557

SEQ ID NO: 2792 - protein, 566 aa, synthetic construct; identical to SEQ ID NO: 630
  REGION 1..566: note = hemagglutinin__InfluenzaA__ACR15568

SEQ ID NO: 2793 - protein, 566 aa, synthetic construct
  REGION 1..566: note = hemagglutinin__InfluenzaA__ACR15579
MKTIIALSYILCLVFAQKLPGNDNSTATLCLGHHAVPNGTIVKTITNDQIEVTNATELVQSSSTGGICDSPHQILDGENCTLIDALLGDPQCDGFQNKKWDLFVERSKAYSNCYPYDVPDYASLRSLVASSGTLEFNNESFNWTGVTQNGTSSACKRRSNNSFFSRLNWLTHLKFKYPALNVTMPNNEKFDKLYIWGVHHPGTDNDQIFLYAQASGRITVSTKRSQQTVIPNIGSRPRVRNIPSRISIYWTIVNPGDILLINSTGNLIAPRGYFKIRSGKSSIMRSDAPIGKCNSECITPNGSIPNDKPFQNVNRITYGACPRYVKQNTLKLATGMRNVPEKQTRGIFGAIAGFIENGWEGMVDGWYGFRHQNSEGIGQAADLKSTQAAINQINGKLNRLIGKTNEKFHQIEKEFSEVEGRIQDLEKYVEDTKIDLWSYNAELLVALENQHTIDLTDSEMNKLFERTKKQLRENAEDMGNGCFKIYHKCDNACIGSIRNGTYDHDVYRDEALNNRFQIKGVELKSGYKDWILWISFAISCFLLCVALLGFIMWACQKGNIRCNICI

SEQ ID NO: 2794 - protein, 566 aa, synthetic construct
  REGION 1..566: note = hemagglutinin__InfluenzaA__ACR15590
MKTIIALSYILCLVFTQKLPGNDNSTATLCLGHHAVPNGTIVKTITNDQIEVTNATELVQSSSTGGICDSPHQILDGENCTLIDALLGDPQCDGFQNKKWDLFVERSKAYSNCYPYDVPDYASLRSLVASSGTLEFNNESFNWTGVTQNGTSSACKRRSNNSFFSRLNWLTHLKFKYPALNVTMPNNEKFDKLYIWGVHHPGTDNDQIFLYAQASGRITVSTKRSQQTVIPNIGSRPRVRNIPSRISIYWTIVKPGDILLINSTGNLIAPRGYFKIRSGKSSIMRSDAPIGKCNSECITPNGSIPNDKPFQNVNRITYGACPRYVKQNTLKLATGMRNVPEKQTRGIFGAIAGFIENGWEGMVDGWYGFRHQNSEGIGQAADLKSTQAAINQINGKLNRLIGKTNEKFHQIEKEFSEVEGRIQDLEKYVEDTKIDLWSYNAELLVALENQHTIDLTDSEMNKLFERTKKQLRENAEDMGNGCFKIYHKCDNACIGSIRNGTYDHDVYRDEALNNRFQIKGVELKSGYKDWILWISFAISCFLLCVALLGFIMWACQKGNIRCNICI

SEQ ID NO: 2795 - protein, 566 aa, synthetic construct; identical to SEQ ID NO: 630
  REGION 1..566: note = hemagglutinin__InfluenzaA__ACR15601

SEQ ID NO: 2796 - protein, 566 aa, synthetic construct
  REGION 1..566: note = hemagglutinin__InfluenzaA__ACR18920
MKAILVVLLYTFATANADTLCIGYHANNSTDTVDTVLEKNVTVTHSVNLLEDKHNGKLCKLRGVAPLHLGKCNIAGWILGNPECESLSTASSWSYIVETSSSDNGTCYPGDFIDYEELREQLSSVSSFERFEIFPKTSSWPNHDSNKGVTAACPHAGAKSFYKNLIWLVKKGNSYPKLSKSYINDKGKEVLVLWGIHHPSTSADQQSLYQNADAYVFVGSSRYSKKFKPEIAIRPKVRDQEGRMNYYWTLVEPGDKITFEATGNLVVPRYAFAMERNAGSGIIISDTPVHDCNTTCQTPKGAINTSLPFQNIHPITIGKCPKYVKSTKLRLATGLRNVPSIQSRGLFGAIAGFIEGGWTGMVDGWYGYHHQNEQGSGYAADLKSTQNAIDEITNKVNSVIEKMNIQFTAVGKEFNHLEKRIENLNKKVDDGFLDIWTYNAELLVLLENERTLDYHDSNVKNLYEKVRSQLKNNAKEIGNGCFEFYHKCDNTCMESVKNGTYDYPKYSEEAKLNREEIDGVKLESTRIYQILAIYSTVASSLVLVVSLGAISFWMCSNGSLQCRICI

SEQ ID NO: 2797 - protein, 566 aa, synthetic construct; identical to SEQ ID NO: 2669
  REGION 1..566: note = hemagglutinin__InfluenzaA__ACR18975

SEQ ID NO: 2798 - protein, 566 aa, synthetic construct; identical to SEQ ID NO: 2656
  REGION 1..566: note = hemagglutinin__InfluenzaA__ACR18976

SEQ ID NO: 2799 - protein, 566 aa, synthetic construct; identical to SEQ ID NO: 2656
  REGION 1..566: note = hemagglutinin__InfluenzaA__ACR18977

SEQ ID NO: 2800 - protein, 566 aa, synthetic construct; identical to SEQ ID NO: 2669
  REGION 1..566: note = hemagglutinin__InfluenzaA__ACR18978

SEQ ID NO: 2801 - protein, 566 aa, synthetic construct; identical to SEQ ID NO: 2656
  REGION 1..566: note = hemagglutinin__InfluenzaA__ACR18979

SEQ ID NO: 2802 - protein, 566 aa, synthetic construct; identical to SEQ ID NO: 2722
  REGION 1..566: note = hemagglutinin__InfluenzaA__ACR18981

SEQ ID NO: 2803 - protein, 566 aa, synthetic construct; identical to SEQ ID NO: 2656
  REGION 1..566: note = hemagglutinin__InfluenzaA__ACR18982

SEQ ID NO: 2804 - protein, 566 aa, synthetic construct; identical to SEQ ID NO: 2669
  REGION 1..566: note = hemagglutinin__InfluenzaA__ACR18988

SEQ ID NO: 2805 - protein, 566 aa, synthetic construct
  REGION 1..566: note = hemagglutinin__InfluenzaA__ACR18991
MKAILVVLLYTFATANADTLCIGYHANNSTDTVDTVLEKNVTVTHSVNLLEDKHNRKLCKLRGVAPLHLGKCNIAGWILGNPECESLSTASSWSYIVETSSSDNGTCYPGDFIDYEELREQLSSVSSFERFEIFPKTSSWPNHDSNKGVTAACPHAGAKSFYKNLIWLVKKGNSYPKLSKSYINDKGKEVLVLWGIHHPSTSADQQSLYQNADAYVFVGSSRYSKKFKPEIAIRPKVRDQEGRMNYYWTLVEPGDKITFEATGNLVVPRYAFAMERNAGSGIIISDTPVHDCNTTCQTPKGAINTSLPFQNIHPITIGKCPKYVKSTKLRLATGLRNVPSIQSRGLFGAIAGFIEGGWTGMVDGWYGYHHQNEQGSGYAADLKSTQNAIDEITNKVNSVIEKMNTQFTAVGKEFNHLEKRIENLNKKVDDGFLDIWTYNAELLVLLENERTLDYHDSNVKNLYEKVRSQLKNNAKEIGNGCFEFYHKCDNTCMESVKNGTYDYPKYSEEAKLNREEIDGVKLESTRIYQILAIYSTVASSLVLVVSLGAISFWMCSNGSLQCRICI

SEQ ID NO: 2806 - protein, 566 aa, synthetic construct; identical to SEQ ID NO: 2656
  REGION 1..566: note = hemagglutinin__InfluenzaA__ACR18993

SEQ ID NO: 2807 - protein, 566 aa, synthetic construct; identical to SEQ ID NO: 2695
  REGION 1..566: note = hemagglutinin__InfluenzaA__ACR18995

SEQ ID NO: 2808 - protein, 566 aa, synthetic construct; identical to SEQ ID NO: 2717
  REGION 1..566: note = hemagglutinin__InfluenzaA__ACR23302

SEQ ID NO: 2809 - protein, 566 aa, synthetic construct; identical to SEQ ID NO: 2669
  REGION 1..566: note = hemagglutinin__InfluenzaA__ACR33743

SEQ ID NO: 2810 - protein, 566 aa, synthetic construct; identical to SEQ ID NO: 2656
  REGION 1..566: note = hemagglutinin__InfluenzaA__ACR38821

SEQ ID NO: 2811 - protein, 566 aa, synthetic construct; identical to SEQ ID NO: 2656
  REGION 1..566: note = hemagglutinin__InfluenzaA__ACR38822

SEQ ID NO: 2812 - protein, 566 aa, synthetic construct; identical to SEQ ID NO: 2656
  REGION 1..566: note = hemagglutinin__InfluenzaA__ACR38823

SEQ ID NO: 2813 - protein, 566 aa, synthetic construct; identical to SEQ ID NO: 2722
  REGION 1..566: note = hemagglutinin__InfluenzaA__ACR38824

SEQ ID NO: 2814 - protein, 566 aa, synthetic construct
  REGION 1..566: note = hemagglutinin__InfluenzaA__ACR38825
MKAILVVLLYTFATANADTLCIGYHANNSTDTVDTVLEKNVTVTHSVNLLEDKHNGKLCKLRGVAPLHLGKCNIAGWILGNPECESLSTASSWSYIVETSSSDNGTCYPGDFIDYEELREQLSSVSSFERFEIFPKTSSWPNHDSNKGVTAACPHAGAKSFYKNLIWLVKKGNSYPKLSKSYINDKGKEVLVLWGIHHPSTSADQQSLYQNADAYVFVGTSRYSKKFKPEIAIRPKVRGQEGRMNYYWTLVEPGDKITFEATGNLVVPRYAFAMERNAGSGIIISDTPVHDCNTTCQTPKGAINTSLPFQNIHPITIGKCPKYVKSTKLRLATGLRNVPSIQSRGLFGAIAGFIEGGWTGMVDGWYGYHHQNEQGSGYAADLKSTQNAIDEITNKVNSVIEKMNTQFTAVGKEFNHLEKRIENLNKKIDDGFLDIWTYNAELLVLLENERTLDYHDSNVKNLYEKVRSQLKNNAKEIGNGCFEFYHKCDNTCMESVKNGTYDYPKYSEEAKLNREEIDGVKLESTRIYQILAIYSTVASSLVLVVSLGAISFWMCSNGSLQCRICI

SEQ ID NO: 2815 - protein, 566 aa, synthetic construct; identical to SEQ ID NO: 2669
  REGION 1..566: note = hemagglutinin__InfluenzaA__ACR38826

SEQ ID NO: 2816 - protein, 566 aa, synthetic construct; identical to SEQ ID NO: 2656
  REGION 1..566: note = hemagglutinin__InfluenzaA__ACR38827

SEQ ID NO: 2817 - protein, 566 aa, synthetic construct; identical to SEQ ID NO: 2722
  REGION 1..566: note = hemagglutinin__InfluenzaA__ACR38828

SEQ ID NO: 2818 - protein, 566 aa, synthetic construct; identical to SEQ ID NO: 2656
  REGION 1..566: note = hemagglutinin__InfluenzaA__ACR38829

SEQ ID NO: 2819 - protein, 566 aa, synthetic construct; identical to SEQ ID NO: 2695
  REGION 1..566: note = hemagglutinin__InfluenzaA__ACR38830

SEQ ID NO: 2820 - protein, 566 aa, synthetic construct; identical to SEQ ID NO: 2669
  REGION 1..566: note = hemagglutinin__InfluenzaA__ACR39354

SEQ ID NO: 2821 - protein, 566 aa, synthetic construct; identical to SEQ ID NO: 2669
  REGION 1..566: note = hemagglutinin__InfluenzaA__ACR39393

SEQ ID NO: 2822 - protein, 566 aa, synthetic construct; identical to SEQ ID NO: 2669
  REGION 1..566: note = hemagglutinin__InfluenzaA__ACR39403

SEQ ID NO: 2823 - protein, 566 aa, synthetic construct; identical to SEQ ID NO: 2669
  REGION 1..566: note = hemagglutinin__InfluenzaA__ACR39413

SEQ ID NO: 2824 - protein, 566 aa, synthetic construct; identical to SEQ ID NO: 2669
  REGION 1..566: note = hemagglutinin__InfluenzaA__ACR39423

SEQ ID NO: 2825 - protein, 566 aa, synthetic construct; identical to SEQ ID NO: 2669
  REGION 1..566: note = hemagglutinin__InfluenzaA__ACR39433

SEQ ID NO: 2826 - protein, 566 aa, synthetic construct; identical to SEQ ID NO: 2669
  REGION 1..566: note = hemagglutinin__InfluenzaA__ACR39443

SEQ ID NO: 2827 - protein, 566 aa, synthetic construct
  REGION 1..566: note = hemagglutinin__InfluenzaA__ACR39453
MEAILVVLLYTFATANADTLCIGYHANNSTDTVDTVLEKNVTVTHSVNLLEDKHNGKLCKLRGVAPLHLGKCNIAGWILGNPECESLSTASSWSYIVETSSSDNGTCYPGDFIDYEELREQLSSVSSFERFEIFPKTSSWPNHDSNKGVTAACPHAGAKSFYKNLIWLVKKGNSYPKLSKSYINDKGKEVLVLWGIHHPSTSADQQSLYQNADAYVFVGTSRYSKKFKPEIAIRPKVRDQEGRMNYYWTLVEPGDKITFEATGNLVVPRYAFAMERNAGSGIIISDTPVHDCNTTCQTPKGAINTSLPFQNIHPITIGKCPKYVKSTKLRLATGLRNVPSIQSRGLFGAIAGFIEGGWTGMVDGWYGYHHQNEQGSGYAADLKSTQNAIDEITNKVNSVIEKMNTQFTAVGKEFNHLEKRIENLNKKVDDGFLDIWTYNAELLVLLENERTLDYHDSNVKNLYEKVRSQLKNNAKEIGNGCFEFYHKCDNTCMESVKNGTYDYPKYSEEAKLNREEIDGVKLESTRIYQILAIYSTVASSLVLVVSLGAISFWMCSNGSLQCRICI

SEQ ID NO: 2828 - protein, 566 aa, synthetic construct; identical to SEQ ID NO: 2669
  REGION 1..566: note = hemagglutinin__InfluenzaA__ACR39463

SEQ ID NO: 2829 - protein, 566 aa, synthetic construct; identical to SEQ ID NO: 2669
  REGION 1..566: note = hemagglutinin__InfluenzaA__ACR39473

SEQ ID NO: 2830 - protein, 566 aa, synthetic construct; identical to SEQ ID NO: 2669
  REGION 1..566: note = hemagglutinin__InfluenzaA__ACR39483

SEQ ID NO: 2831 - protein, 566 aa, synthetic construct; identical to SEQ ID NO: 2669
  REGION 1..566: note = hemagglutinin__InfluenzaA__ACR39493

SEQ ID NO: 2832 - protein, 566 aa, synthetic construct; identical to SEQ ID NO: 2669
  REGION 1..566: note = hemagglutinin__InfluenzaA__ACR40288

SEQ ID NO: 2833 - protein, 566 aa, synthetic construct; identical to SEQ ID NO: 2669
  REGION 1..566: note = hemagglutinin__InfluenzaA__ACR40298

SEQ ID NO: 2834 - protein, 566 aa, synthetic construct
  REGION 1..566: note = hemagglutinin__InfluenzaA__ACR40308
MKAILVVLLYTFATANADTLCIGYHANNSTDTVDTVLEKNVTVTHSVNLLEDKHNGKLCKLRGVAPLHLGKCNIAGWILGNPECESLSTASSWSYIVETSSSDNGTCYPGDFIDYEELREQLSSVSSFERFEIFPKTSSWPNHDSNKGVTAACPHAGAKSFYKNLIWLVKKGNSYPKLSKSYINDKGKEVLVLWGIHHPSTSADQQSLYQNADAYVFVGSSRYSKKFKPEIAIRPKVRDQEGRMNYYWTLVEPGDKITFEATGNLVVPRYAFAMERNAGSGIIISDTPVHDCNTTCQTPKGAINTSLPFQNIYPITIGKCPKYVKSTKLRLATGLRNVPSIQSRGLFGAIAGFIEGGWTGMVDGWYGYHHQNEQGSGYAADLKSTQNAIDEITNKVNSVIEKMNTQFTAVGKEFNHLEKRIENLNKKVDDGFLDIWTYNAELLVLLENERTLDYHDSNVKNLYEKVRSQLKNNAKEIGNGCFEFYHKCDNTCMESVKNGTYDYPKYSEEAKLNREEIDGVKLESTRIYQILAIYSTVASSLVLVVSLGAISFWMCSNGSLQCRICI

SEQ ID NO: 2835 - protein, 566 aa, synthetic construct; identical to SEQ ID NO: 2669
  REGION 1..566: note = hemagglutinin__InfluenzaA__ACR40318

SEQ ID NO: 2836 - protein, 566 aa, synthetic construct; identical to SEQ ID NO: 2669
  REGION 1..566: note = hemagglutinin__InfluenzaA__ACR40328

SEQ ID NO: 2837 - protein, 566 aa, synthetic construct; identical to SEQ ID NO: 2669
  REGION 1..566: note = hemagglutinin__InfluenzaA__ACR40338

SEQ ID NO: 2838 - protein, 566 aa, synthetic construct; identical to SEQ ID NO: 2669
  REGION 1..566: note = hemagglutinin__InfluenzaA__ACR40348

SEQ ID NO: 2839 - protein, 566 aa, synthetic construct; identical to SEQ ID NO: 2669
  REGION 1..566: note = hemagglutinin__InfluenzaA__ACR40358

SEQ ID NO: 2840 - protein, 566 aa, synthetic construct; identical to SEQ ID NO: 2669
  REGION 1..566: note = hemagglutinin__InfluenzaA__ACR40378

SEQ ID NO: 2841 - protein, 566 aa, synthetic construct; identical to SEQ ID NO: 2669
  REGION 1..566: note = hemagglutinin__InfluenzaA__ACR40388

SEQ ID NO: 2842 - protein, 566 aa, synthetic construct; identical to SEQ ID NO: 2656
  REGION 1..566: note = hemagglutinin__InfluenzaA__ACR46986

SEQ ID NO: 2843 - protein, 566 aa, synthetic construct; identical to SEQ ID NO: 2656
  REGION 1..566: note = hemagglutinin__InfluenzaA__ACR46988

SEQ ID NO: 2844 - protein, 566 aa, synthetic construct; identical to SEQ ID NO: 2656
  REGION 1..566: note = hemagglutinin__InfluenzaA__ACR46989

SEQ ID NO: 2845 - protein, 566 aa, synthetic construct; identical to SEQ ID NO: 2656
  REGION 1..566: note = hemagglutinin__InfluenzaA__ACR46990

SEQ ID NO: 2846 - protein, 566 aa, synthetic construct; identical to SEQ ID NO: 2656
  REGION 1..566: note = hemagglutinin__InfluenzaA__ACR46992

SEQ ID NO: 2847 - protein, 566 aa, synthetic construct; identical to SEQ ID NO: 2656
  REGION 1..566: note = hemagglutinin__InfluenzaA__ACR46993

SEQ ID NO: 2848 - protein, 566 aa, synthetic construct; identical to SEQ ID NO: 2656
  REGION 1..566: note = hemagglutinin__InfluenzaA__ACR46994

SEQ ID NO: 2849 - protein, 566 aa, synthetic construct
  REGION 1..566: note = hemagglutinin__InfluenzaA__ACR47006
MKAILVVLLYTFATANADTLCIGYHANNSTDTVDTVLEKNVTVTHSVNILEDKHNGKLCKLRGVAPLHLGKCNIAGWILGNPECESLSTASSWSYIVETSSSDNGTCYPGDFIDYEELREQLSSVSSFERFEIFPKTSSWPNHDSNKGVTAACPHAGAKSFYKNLIWLVKKGNSYPKLSKSYINDKGKEVLVLWGIHHPSTSADQQSLYQNADAYVFVGSSRYSKKFKPEIAIRPKVRDQEGRMNYYWTLVEPGDKITFEATGNLVVPRYAFAMERNAGSGIIISDTPVHDCNTTCQTPKGAINTSLPFQNIHPITIGKCPKYVKSTKLRLATGLRNVPSIQSRGLFGAIAGFIEGGWTGMVDGWYGYHHQNEQGSGYAADLKSTQNAIDEITNKVNSVIEKMNTQFTAVGKEFNHLEKRIENLNKKVDDGFLDIWTYNAELLVLLENERTLDYHDSNVKNLYEKVRSQLKNNAKEIGNGCFEFYHKCDNTCMESVKNGTYDYPKYSEEAKLNREEIDGVKLESTRIYQILAIYSTVASSLVLVVSLGAISFWMCSNGSLQCRICI

SEQ ID NO: 2850 - protein, 566 aa, synthetic construct; identical to SEQ ID NO: 2669
  REGION 1..566: note = hemagglutinin__InfluenzaA__ACR49281

SEQ ID NO: 2851 - protein, 566 aa, synthetic construct
  REGION 1..566: note = hemagglutinin__InfluenzaA__ACR49282
MKAILVVLLYTFATANADTLCIGYHANNSTDTVDTVLEKNVTVTHSVDLLEDKHNGKLCKLRGVAPLHLGKCNIAGWILGNPECESLSTASSWSYIVETSSSDNGTCYPGDFIDYEELREQLSSVSSFERFEIFPKTSSWPNHDSNKGVTAACPHAGAKSFYKNLIWLVKKGNSYPKLSKSYINDKGKEVLVLWGIHHPSTSADQQSLYQNADAYVFVGSSRYSKKFKPEIAIRPKVRDQEGRMNYYWTLVEPGDKITFEATGNLVVPRYAFAMERNAGSGIIISDTPVHDCNTTCQTPKGAINTSLPFQNIHPITIGKCPKYVKSTKLRLATGLRNVPSIQSRGLFGAIAGFIEGGWTGMVDGWYGYHHQNEQGSGYAADLKSTQNAIDEITNKVNSVIEKMNTQFTAVGKEFNHLEKRIENLNKKVDDGFLDIWTYNAELLVLLENERTLDYHDSNVKNLYEKVRSQLKNNAKEIGNGCFEFYHKCDNTCMESVKNGTYDYPKYSEEAKLNREEIDGVKLESTRIYQILAIYSTVASSLVLVVSLGAISFWMCSNGSLQCRICI

SEQ ID NO: 2852 - protein, 566 aa, synthetic construct; identical to SEQ ID NO: 2656
  REGION 1..566: note = hemagglutinin__InfluenzaA__ACR49283

SEQ ID NO: 2853 - protein, 566 aa, synthetic construct; identical to SEQ ID NO: 2656
  REGION 1..566: note = hemagglutinin__InfluenzaA__ACR49288

SEQ ID NO: 2854 - protein, 566 aa, synthetic construct; identical to SEQ ID NO: 2695
  REGION 1..566: note = hemagglutinin__InfluenzaA__ACR49290

SEQ ID NO: 2855 - protein, 566 aa, synthetic construct; identical to SEQ ID NO: 2669
  REGION 1..566: note = hemagglutinin__InfluenzaA__ACR49291

SEQ ID NO: 2856 - protein, 566 aa, synthetic construct; identical to SEQ ID NO: 2695
  REGION 1..566: note = hemagglutinin__InfluenzaA__ACR49293

SEQ ID NO: 2857 - protein, 566 aa, synthetic construct; identical to SEQ ID NO: 2695
  REGION 1..566: note = hemagglutinin__InfluenzaA__ACR49295

SEQ ID NO: 2858 - protein, 566 aa, synthetic construct; identical to SEQ ID NO: 2709
  REGION 1..566: note = hemagglutinin__InfluenzaA__ACR50993

SEQ ID NO: 2859 - protein, 566 aa, synthetic construct; identical to SEQ ID NO: 2669
  REGION 1..566: note = hemagglutinin__InfluenzaA__ACR50995

SEQ ID NO: 2860 - protein, 566 aa, synthetic construct; identical to SEQ ID NO: 2669
  REGION 1..566: note = hemagglutinin__InfluenzaA__ACR51005

SEQ ID NO: 2861 - protein, 566 aa, synthetic construct; identical to SEQ ID NO: 2669
  REGION 1..566: note = hemagglutinin__InfluenzaA__ACR51015

SEQ ID NO: 2862 - protein, 566 aa, synthetic construct; identical to SEQ ID NO: 2669
  REGION 1..566: note = hemagglutinin__InfluenzaA__ACR51025

SEQ ID NO: 2863 - protein, 566 aa, synthetic construct; identical to SEQ ID NO: 2669
  REGION 1..566: note = hemagglutinin__InfluenzaA__ACR51035

SEQ ID NO: 2864 - protein, 566 aa, synthetic construct; identical to SEQ ID NO: 2669
  REGION 1..566: note = hemagglutinin__InfluenzaA__ACR51045

SEQ ID NO: 2865 - protein, 566 aa, synthetic construct; identical to SEQ ID NO: 2669
  REGION 1..566: note = hemagglutinin__InfluenzaA__ACR51055

SEQ ID NO: 2866 - protein, 566 aa, synthetic construct; identical to SEQ ID NO: 2656
  REGION 1..566: note = hemagglutinin__InfluenzaA__ACR51065

SEQ ID NO: 2867 - protein, 566 aa, synthetic construct; identical to SEQ ID NO: 2669
  REGION 1..566: note = hemagglutinin__InfluenzaA__ACR52368

SEQ ID NO: 2868 - protein, 566 aa, synthetic construct; identical to SEQ ID NO: 2669
  REGION 1..566: note = hemagglutinin__InfluenzaA__ACR52378

SEQ ID NO: 2869 - protein, 566 aa, synthetic construct; identical to SEQ ID NO: 2669
  REGION 1..566: note = hemagglutinin__InfluenzaA__ACR52398

SEQ ID NO: 2870 - protein, 566 aa, synthetic construct; identical to SEQ ID NO: 2669
  REGION 1..566: note = hemagglutinin__InfluenzaA__ACR52408

SEQ ID NO: 2871 - protein, 566 aa, synthetic construct; identical to SEQ ID NO: 2669
  REGION 1..566: note = hemagglutinin__InfluenzaA__ACR52418

SEQ ID NO: 2872 - protein, 566 aa, synthetic construct; identical to SEQ ID NO: 2669
  REGION 1..566: note = hemagglutinin__InfluenzaA__ACR52428

SEQ ID NO: 2873 - protein, 566 aa, synthetic construct; identical to SEQ ID NO: 2669
  REGION 1..566: note = hemagglutinin__InfluenzaA__ACR52438

SEQ ID NO: 2874 - protein, 566 aa, synthetic construct; identical to SEQ ID NO: 2669
  REGION 1..566: note = hemagglutinin__InfluenzaA__ACR52448

SEQ ID NO: 2875 - protein, 566 aa, synthetic construct; identical to SEQ ID NO: 2669
  REGION 1..566: note = hemagglutinin__InfluenzaA__ACR52458

SEQ ID NO: 2876 - protein, 566 aa, synthetic construct; identical to SEQ ID NO: 2669
  REGION 1..566: note = hemagglutinin__InfluenzaA__ACR52468

SEQ ID NO: 2877 - protein, 566 aa, synthetic construct; identical to SEQ ID NO: 2669
  REGION 1..566: note = hemagglutinin__InfluenzaA__ACR52478

SEQ ID NO: 2878 - protein, 566 aa, synthetic construct; identical to SEQ ID NO: 2669
  REGION 1..566: note = hemagglutinin__InfluenzaA__ACR52488

SEQ ID NO: 2879 - protein, 566 aa, synthetic construct; identical to SEQ ID NO: 2669
  REGION 1..566: note = hemagglutinin__InfluenzaA__ACR54045

SEQ ID NO: 2880 - protein, 566 aa, synthetic construct
  REGION 1..566: note = hemagglutinin__InfluenzaA__ACR54047
MKAILVVLLYTFATANADTLCIGYHANNSTDTVDTVLEKNVTVTHSVNLLEDKHNGKLCKLRGVAPLHLGKCNIAGWILGNPECESLSTASSWSYIVETSSSDNGTCYPGDFIDYEELREQLSSVSSFERFEIFPKTSSWPNHDSNKGVTAACPHAGAKSFYKNLIWLVKKGNSYPKLSKSYINDKGKEVLVLWGIHHPSTSADQQSLYQNADAYVFVGSSRYSKKFKPEIAIRPKVRDQEGRMNYYWTLVEPGDKITFEATGNLVVPRYAFAMERNAGSGIIISDTPVHDCNTTCQTPKGAINTSLPFQNIHPITIGKCPKYVKSTKLRLATGLRNVPSIQSRGLFGAIAGFIEGGWTGMVDGWYGYHHQNEQGSGYAADLKSTQNAIDEITNKVNSVIEKMNTQFTAVGKEFNHLEKRIENLNKKVDDGFLDIWTYNAELLVLLENERTLDYHDSNVKNLYEKVRSQLKNNAKEIGNGCFEFYHKCDNTCMESVKNGTYDYPKYSEEAKLNREEIDGIKLESTRIYQILAIYSTVASSLVLVVSLGAISFWMCSNGSLQCRICI

SEQ ID NO: 2881 - protein, 566 aa, synthetic construct
  REGION 1..566: note = hemagglutinin__InfluenzaA__ACR54964
MKAILVVLLYTFATANADTLCIGYHANNSTDTVDTVLEKNVTVTHSVNLLEDKHNGKLCKLRGVAPLHLGKCNIAGWILGNPECESLSTASSWSYIVETSSSDNGTCYPGDFIDYEELREQLSSVSSFERFEIFPKTSSWPNHDSNKGVTAACPHAGAKSFYKNLIWLVKKGNSYPKLSKSYINDKGKEVLVLWGIHHPSTSADQQSLYQNADAYVFVGTSRYSKKFKPEIAIRPKVRDQEGRMNYYWTLVEPGDKITFEATGNLVVPRYAFAMERNAGSGIIISDTPVHDCNTTCQTPKGAINTSLPFQNIHPITIGKCPKYVKSTKLRLATGLRNVPSIQSRGLFGAIAGFIEGGWTGMVDGWYGYHHQNEQGSGYAADLKSTQNAIDEITNKVNSVIEKMNTQFIAVGKEFNHLEKRIENLNKKVDDGFLDIWTYNAELLVLLENERTLDYHDSNVKNLYEKVRSQLKNNAKEIGNGCFEFYHKCDNTCMESVKNGTYDYPKYSEEAKLNREEIDGVKLESTRIYQILAIYSTVASSLVLVVSLGAISFWMCSNGSLQCRICI

SEQ ID NO: 2882 - protein, 566 aa, synthetic construct; identical to SEQ ID NO: 2760
  REGION 1..566: note = hemagglutinin__InfluenzaA__ACR54974

SEQ ID NO: 2883 - protein, 566 aa, synthetic construct; identical to SEQ ID NO: 2669
  REGION 1..566: note = hemagglutinin__InfluenzaA__ACR54984

SEQ ID NO: 2884 - protein, 566 aa, synthetic construct; identical to SEQ ID NO: 2656
  REGION 1..566: note = hemagglutinin__InfluenzaA__ACR54994

SEQ ID NO: 2885 - protein, 566 aa, synthetic construct; identical to SEQ ID NO: 2656
  REGION 1..566: note = hemagglutinin__InfluenzaA__ACR55004

SEQ ID NO: 2886 - protein, 566 aa, synthetic construct; identical to SEQ ID NO: 2849
  REGION 1..566: note = hemagglutinin__InfluenzaA__ACR56380

SEQ ID NO: 2887 - protein, 566 aa, synthetic construct; identical to SEQ ID NO: 2722
  REGION 1..566: note = hemagglutinin__InfluenzaA__ACR56390

SEQ ID NO: 2888 - protein, 566 aa, synthetic construct; identical to SEQ ID NO: 2669
  REGION 1..566: note = hemagglutinin__InfluenzaA__ACR56400

SEQ ID NO: 2889 - protein, 566 aa, synthetic construct; identical to SEQ ID NO: 2669
  REGION 1..566: note = hemagglutinin__InfluenzaA__ACR56410

SEQ ID NO: 2890 - protein, 566 aa, synthetic construct; identical to SEQ ID NO: 2669
  REGION 1..566: note = hemagglutinin__InfluenzaA__ACR56420

SEQ ID NO: 2891 - protein, 566 aa, synthetic construct; identical to SEQ ID NO: 2669
  REGION 1..566: note = hemagglutinin__InfluenzaA__ACR56430

SEQ ID NO: 2892 - protein, 566 aa, synthetic construct; identical to SEQ ID NO: 2669
  REGION 1..566: note = hemagglutinin__InfluenzaA__ACR56440

SEQ ID NO: 2893 - protein, 565 aa, synthetic construct
  REGION 1..565: note = hemagglutinin__InfluenzaA__ACR58541
MKVKLLVLLCTFTATYADTICIGYHANNSTDTVDTVLEKNVTVTHSVNLLENSHNGKLCLLKGIAPLQLGNCSVAGWILGNPECELLISKESWSYIVEKPNPENGTCYPGHFADYEELREQLSSVSSFERFEIFPKESSWPNHTVTGVSASCSHNGESSFYRNLLWLTRKNGLYPNLSKSYANNKEKEVLVLWGVHHPPNIGDQKALYHTENAYVSVVSSHYSRKFTPEIAKRPKVRDQEGRINYYWTLLEPGDTIIFEANGNLIAPRYAFALSRGFGSGIINSNAPMDKCDAKCQTPQGAINSSLPFQNVHPVTIGECPKYVRSAKLRMVTGLRNIPSIQSRGLFGAIAGFIEGGWTGMVDGWYGYHHQNEQGSGYAADQKSTQNAINGITNKVNSVIDKMNTQFTAVGKEFNKLERRMENLNKKVDDGFIDIWTYNAELLVLLENERTLDFHDSNVKNLYEKVKSQLKNNAKEIGNGCFEFYHKCNDECMESVKNGTYDYPKYSEESKLNREKIDGVKLESMGVYQILAIYSTVASSLVLLVSLGAISFWMCSNGSLQCRICI

SEQ ID NO: 2894 - protein, 565 aa, synthetic construct; identical to SEQ ID NO: 1914
  REGION 1..565: note = hemagglutinin__InfluenzaA__ACR61655

SEQ ID NO: 2895 - protein, 565 aa, synthetic construct; identical to SEQ ID NO: 1930
  REGION 1..565: note = hemagglutinin__InfluenzaA__ACR61666

SEQ ID NO: 2896 - protein, 566 aa, synthetic construct; identical to SEQ ID NO: 2434
  REGION 1..566: note = hemagglutinin__InfluenzaA__ACR61677

SEQ ID NO: 2897 - protein, 566 aa, synthetic construct; identical to SEQ ID NO: 2434
  REGION 1..566: note = hemagglutinin__InfluenzaA__ACR61688

SEQ ID NO: 2898 - protein, 566 aa, synthetic construct; identical to SEQ ID NO: 2434
  REGION 1..566: note = hemagglutinin__InfluenzaA__ACR61699

SEQ ID NO: 2899 - protein, 566 aa, synthetic construct; identical to SEQ ID NO: 2656
  REGION 1..566: note = hemagglutinin__InfluenzaA__ACR67170

SEQ ID NO: 2900 - protein, 566 aa, synthetic construct; identical to SEQ ID NO: 2695
  REGION 1..566: note = hemagglutinin__InfluenzaA__ACR67171

SEQ ID NO: 2901 - protein, 566 aa, synthetic construct; identical to SEQ ID NO: 2656
  REGION 1..566: note = hemagglutinin__InfluenzaA__ACR67172

SEQ ID NO: 2902 - protein, 566 aa, synthetic construct; identical to SEQ ID NO: 2656
  REGION 1..566: note = hemagglutinin__InfluenzaA__ACR67177

SEQ ID NO: 2903 - protein, 566 aa, synthetic construct; identical to SEQ ID NO: 2656
  REGION 1..566: note = hemagglutinin__InfluenzaA__ACR67181

SEQ ID NO: 2904 - protein, 566 aa, synthetic construct
  REGION 1..566: note = hemagglutinin__InfluenzaA__ACR67183
MKAILVVLLYTFATANADTLCIGYHANNSTDTVDTVLEKNVTVTHSVNLLEDKHNGKLCKLRGVAPLHLGKCNIAGWILGNPECESLSTASSWSYIVETSSSDNGTCYPGDFIDYEELREQLSSVSSFERFEIFPKTSSWPNHDSNKGVTAACPHAGAKSFYKNLIWLVKKGNSYPKLSKSYINDKGKEVLVLWGIHHPSTSADQQSLYQNADAYVFVGSSRYSKKFKPEIAIRPKVRDREGRMNYYWTLVEPGDKITFEATGNLVVPRYAFAMERNAGSGIIISDTPVHDCNTTCQTPKGAINTSLPFQNIHPITIGKCPKYVKSTKLRLATGLRNVPSIQSRGLFGAIAGFIEGGWTGMVDGWYGYHHQNEQGSGYAADLKSTQNAIDEITNKVNSVIEKMNTQFTAVGKEFNHLEKRIENLNKKVDDGFLDIWTYNAELLVLLENERTLDYHDSNVKNLYEKVRSQLKNNAKEIGNGCFEFYHKCDNTCMESVKNGTYDYPKYSEEAKLNREEIDGVKLESTRIYQILAIYSTVASSLVLVVSLGAISFWMCSNGSLQCRICI

SEQ ID NO: 2905 - protein, 566 aa, synthetic construct; identical to SEQ ID NO: 2669
  REGION 1..566: note = hemagglutinin__InfluenzaA__ACR67184

SEQ ID NO: 2906 - protein, 566 aa, synthetic construct; identical to SEQ ID NO: 2656
  REGION 1..566: note = hemagglutinin__InfluenzaA__ACR67185

SEQ ID NO: 2907 - protein, 566 aa, synthetic construct; identical to SEQ ID NO: 2849
  REGION 1..566: note = hemagglutinin__InfluenzaA__ACR67186

SEQ ID NO: 2908 - protein, 566 aa, synthetic construct; identical to SEQ ID NO: 2656
  REGION 1..566: note = hemagglutinin__InfluenzaA__ACR67187

SEQ ID NO: 2909 - protein, 566 aa, synthetic construct; identical to SEQ ID NO: 2695
  REGION 1..566: note = hemagglutinin__InfluenzaA__ACR67188

SEQ ID NO: 2910 - protein, 566 aa, synthetic construct; identical to SEQ ID NO: 2695
  REGION 1..566: note = hemagglutinin__InfluenzaA__ACR67189

SEQ ID NO: 2911 - protein, 566 aa, synthetic construct
  REGION 1..566: note = hemagglutinin__InfluenzaA__ACR67190
MEAILVVLLYTFATANADTLCIGYHANNSTDTVDTVLEKNVTVTHSVNLLEDKHNGKLCKLRGVAPLHLGKCNIAGWILGNPECESLSTASSWSYIVETSSSDNGTCYPGDFIDYEELREQLSSVSSFERFEIFPKTSSWPNHDSNKGVTAACPHAGAKSFYKNLIWLVKKGNSYPKLSKSYINDKGKEVLVLWGIHHPSTSADQQSLYQNADAYVFVGSSRYSKKFKPEIAIRPKVRDQEGRMNYYWTLVEPGDKITFEATGNLVVPRYAFAMERNAGSGIIISDTPVHDCNTTCQTPKGAINTSLPFHNIHPITIGKCPKYVKSTKLRLATGLRNVPSIQSRGLFGAIAGFIEGGWTGMVDGWYGYHHQNEQGSGYAADLKSTQNAIDEITNKVNSVIEKMNTQFTAVGKEFNHLEKRIENLNKKVDDGFLDIWTYNAELLVLLENERTLDYHDSNVKNLYEKVRSQLKNNAKEIGNGCFEFYHKCDNTCMESVKNGTYDYPKYSEEAKLNREEIDGVKLESTRIYQILAIYSTVASSLVLVVSLGAISFWMCSNGSLQCRICI

SEQ ID NO: 2912 - protein, 566 aa, synthetic construct; identical to SEQ ID NO: 2656
  REGION 1..566: note = hemagglutinin__InfluenzaA__ACR67192

SEQ ID NO: 2913 - protein, 566 aa, synthetic construct
  REGION 1..566: note = hemagglutinin__InfluenzaA__ACR67193
MKAILVVLLYTFATANADTLCIGYHANNSTDTVDTVLEKNVTVTHSVNILEDKHNGKLCKLRGVAPLHLGKCNIAGWILGNPECESLSTASSWSYIVETSSSDNGTCYPGDFIDYEELREQLSSVSSFERFEIFPKTSSWPNHDSNKGVTAACPHAGAKSFYKNLIWLVKKGNSYPKLSKSYINDKGKEVLVLWGIHHPSTSADQQSLYQNADAYVFVGSSRYSKKFKPEIAIRPKVRDQEGRMNYYWTLVEPGDKITFEATGNLVVPRYAFAMERNAGSGIIISDTPVHECNTTCQTPKGAINTSLPFQNIHPITIGKCPKYVKSTKLRLATGLRNVPSIQSRGLFGAIAGFIEGGWTGMVDGWYGYHHQNEQGSGYAADLKSTQNAIDEITNKVNSVIEKMNTQFTAVGKEFNHLEKRIENLNKKVDDGFLDIWTYNAELLVLLENERTLDYHDSNVKNLYEKVRSQLKNNAKEIGNGCFEFYHKCDNTCMESVKNGTYDYPKYSEEAKLNREEIDGVKLESTRIYQILAIYSTVASSLVLVVSLGAISFWMCSNGSLQCRICI

SEQ ID NO: 2914 - protein, 566 aa, synthetic construct; identical to SEQ ID NO: 2656
  REGION 1..566: note = hemagglutinin__InfluenzaA__ACR67195

SEQ ID NO: 2915 - protein, 566 aa, synthetic construct; identical to SEQ ID NO: 2656
  REGION 1..566: note = hemagglutinin__InfluenzaA__ACR67197

SEQ ID NO: 2916 - protein, 566 aa, synthetic construct; identical to SEQ ID NO: 2913
  REGION 1..566: note = hemagglutinin__InfluenzaA__ACR67198

SEQ ID NO: 2917 - protein, 566 aa, synthetic construct; identical to SEQ ID NO: 2656
  REGION 1..566: note = hemagglutinin__InfluenzaA__ACR67199

SEQ ID NO: 2918 - protein, 566 aa, synthetic construct; identical to SEQ ID NO: 2669
  REGION 1..566: note = hemagglutinin__InfluenzaA__ACR67244

SEQ ID NO: 2919 - protein, 566 aa, synthetic construct
  REGION 1..566: note = hemagglutinin__InfluenzaA__ACR67254
MKAILVVLLYTFATANADTLCIGYHANNSTDTVDTVLEKNVTVTHSVNLLEDKHNGKLCKLRGVAPLHLGKCNIAGWILGNPECESLSTASSWSYIVETSSSDNGTCYPGDFIDYEELREQLSSVSSFERFEIFPKTSSWPNHDSNKGVTAACPHAGAKSFYKNLIWLVKKGNSYPKLSKSYINDKGKEVLVLWGIHHPSTSADQQSLYQNADAYVFVGSSRYSKKFKPEIAIRPKVRDQEGRMNYYWTLVEPGDKITFEATGNLVVPRYAFAMERNVGSGIIISDTPVHDCNTTCQTPKGAINTSLPFQNIHPITIGKCPKYVKSTKLRLATGLRNVPSIQSRGLFGAIAGFIEGGWTGMVDGWYGYHHQNEQGSGYAADLKSTQNAIDEITNKVNSVIEKMNTQFTAVGKEFNHLEKRIENLNKKVDDGFLDIWTYNAELLVLLENERTLDYHDSNVKNLYEKVRSQLKNNAKEIGNGCFEFYHKCDNTCMESVKNGTYDYPKYSEEAKLNREEIDGVKLESTRIYQILAIYSTVASSLVLVVSLGAISFWMCSNGSLQCRICI

SEQ ID NO: 2920 - protein, 566 aa, synthetic construct; identical to SEQ ID NO: 2669
  REGION 1..566: note = hemagglutinin__InfluenzaA__ACR77438

SEQ ID NO: 2921 - protein, 566 aa, synthetic construct; identical to SEQ ID NO: 2669
  REGION 1..566: note = hemagglutinin__InfluenzaA__ACR77448

SEQ ID NO: 2922 - protein, 566 aa, synthetic construct
  REGION 1..566: note = hemagglutinin__InfluenzaA__ACR77458
MKAILVVLLYTFATANADTLCIGYHANNSTDTVDTVLEKNVTVTHSVNLLEDKHNGKLCKLRGVAPLHLDKCNIAGWILGNPECESLSTASSWSYIVETSSSDNGTCYPGDFIDYEELREQLSSVSSFERFEIFPKTSSWPNHDSNKGVTAACPHAGAKSFYKNLIWLVKKGNSYPKLSKSYINDKGKEVLVLWGIHHPSTSADQQSLYQNADAYVFVGTSRYSKKFKPEIAIRPKVRDQEGRMNYYWTLVEPGDKITFEATGNLVVPRYAFAMERNAGSGIIISDTPVHDCNTTCQTPKGAINTSLPFQNIHPITIGKCPKYVKSTKLRLATGLRNVPSIQSRGLFGAIAGFIEGGWTGMVDGWYGYHHQNEQGSGYAADLKSTQNAIDEITNKVNSVIEKMNTQFTAVGKEFNHLEKRIENLNKKVDDGFLDIWTYNAELLVLLENERTLDYHDSNVKNLYEKVRSQLKNNAKEIGNGCFEFYHKCDNTCMESVKNGTYDYPKYSEEAKLNREEIDGVKLESTRIYQILAIYSTVASSLVLVVSLGAISFWMCSNGSLQCRICI

SEQ ID NO: 2923 - protein, 566 aa, synthetic construct; identical to SEQ ID NO: 2669
  REGION 1..566: note = hemagglutinin__InfluenzaA__ACR77468

SEQ ID NO: 2924 - protein, 566 aa, synthetic construct; identical to SEQ ID NO: 2669
  REGION 1..566: note = hemagglutinin__InfluenzaA__ACR77478

SEQ ID NO: 2925 - protein, 566 aa, synthetic construct; identical to SEQ ID NO: 2669
  REGION 1..566: note = hemagglutinin__InfluenzaA__ACR77488

SEQ ID NO: 2926 - protein, 566 aa, synthetic construct; identical to SEQ ID NO: 2669
  REGION 1..566: note = hemagglutinin__InfluenzaA__ACR77498

SEQ ID NO: 2927 - protein, 566 aa, synthetic construct; identical to SEQ ID NO: 2656
  REGION 1..566: note = hemagglutinin__InfluenzaA__ACR83525

SEQ ID NO: 2928 - protein, 566 aa, synthetic construct
  REGION 1..566: note = hemagglutinin__InfluenzaA__ACR83538
MKAILVVLLYTFATANADTLCIGYHANNSTDTVDTVLEKNVTVTHSVNLLEDKHNGKLCKLRGVAPLHLGKCNIAGWILGNPECESLSTASSWSYIVETSSSDNGTCYPGDFIDYEELREQLSSVSSFERFEIFPKTSSWPNHDSNKGVTAACPHAGAKSFYKNLIWLVKKGNSYPKLSKSYINDKGKEVLVLWGIHHPSTSADQQSLYQNADAYVFVGTSRYSKKFKPEIAIRPKVRDQEGRMNYYWTLVEPGDKITFEATGNLVVPRYAFAMERNAGSGIIISDTPVHDCNTTCQTPKGAINTSLPFQNIHPITIGKCPKYVKSTKLRLATGLRNVPSILSRGLFGAIAGFIEGGWTGMVDGWYGYHHQNEQGSGYAADLKSTQNAIDEITNKVNSVIEKMNTQFTAVGKEFNHLEKRIENLNKKVDDGFLDIWTYNAELLVLLENERTLDYHDSNVKNLYEKVRSQLKNNAKEIGNGCFEFYHKCDNTCMESVKNGTYDYPKYSEEAKLNREEIDGVKLESTRIYQILAIYSTVASSLVLVVSLGAISFWMCSNGSLQCRICI

SEQ ID NO: 2929 - protein, 566 aa, synthetic construct; identical to SEQ ID NO: 2669
  REGION 1..566: note = hemagglutinin__InfluenzaA__ACS14666

SEQ ID NO: 2930 - protein, 566 aa, synthetic construct; identical to SEQ ID NO: 2669
  REGION 1..566: note = hemagglutinin__InfluenzaA__ACS14676

SEQ ID NO: 2931 - protein, 566 aa, synthetic construct; identical to SEQ ID NO: 2669
  REGION 1..566: note = hemagglutinin__InfluenzaA__ACS14686

SEQ ID NO: 2932 - protein, 566 aa, synthetic construct; identical to SEQ ID NO: 2669
  REGION 1..566: note = hemagglutinin__InfluenzaA__ACS14696

SEQ ID NO: 2933 - protein, 566 aa, synthetic construct; identical to SEQ ID NO: 2669
  REGION 1..566: note = hemagglutinin__InfluenzaA__ACS14706

SEQ ID NO: 2934 - protein, 566 aa, synthetic construct; identical to SEQ ID NO: 2669
  REGION 1..566: note = hemagglutinin__InfluenzaA__ACS14716

SEQ ID NO: 2935 - protein, 566 aa, synthetic construct; identical to SEQ ID NO: 2669
  REGION 1..566: note = hemagglutinin__InfluenzaA__ACS14726

SEQ ID NO: 2936 - protein, 566 aa, synthetic construct; identical to SEQ ID NO: 2669
  REGION 1..566: note = hemagglutinin__InfluenzaA__ACS14736

SEQ ID NO: 2937 - protein, 566 aa, synthetic construct; identical to SEQ ID NO: 2849
  REGION 1..566: note = hemagglutinin__InfluenzaA__ACS27189

SEQ ID NO: 2938 - protein, 566 aa, synthetic construct; identical to SEQ ID NO: 2669
  REGION 1..566: note = hemagglutinin__InfluenzaA__ACS27199

SEQ ID NO: 2939 - protein, 566 aa, synthetic construct; identical to SEQ ID NO: 2669
  REGION 1..566: note = hemagglutinin__InfluenzaA__ACS27209

SEQ ID NO: 2940 - protein, 566 aa, synthetic construct; identical to SEQ ID NO: 2722
  REGION 1..566: note = hemagglutinin__InfluenzaA__ACS27219

SEQ ID NO: 2941 - protein, 566 aa, synthetic construct; identical to SEQ ID NO: 2669
  REGION 1..566: note = hemagglutinin__InfluenzaA__ACS27229

SEQ ID NO: 2942 - protein, 566 aa, synthetic construct
  REGION 1..566: note = hemagglutinin__InfluenzaA__ACS27239
MKAILVVLLYTFATANADTLCIGYHANNSTDTVDTVLEKNVTVTHSVNLLEDKHNGKLCKLRGVAPLHLGKCNIAGWILGNPECESLSTASSWSYIVETSSSDNGTCYPGDFIDYEELREQLSSMSSFERFEIFPKTSSWPNHDSNKGVTAACPHAGAKSFYKNLIWLVKKGNSYPKLSKSYINDKGKEVLVLWGIHHPSTSADQQSLYQNADAYVFVGSSRYSKKFKPEIAIRPKVRDQEGRMNYYWTLVEPGDKITFEATGNLVVPRYAFAMERNAGSGIIISDTPVHDCNTTCQTPKGAINTSLPFQNIHPITIGKCPKYVKSTKLRLATGLRNVPSIQSRGLFGAIAGFIEGGWTGMVDGWYGYHHQNEQGSGYAADLKSTQNAIDEITNKVNSVIEKMNTQFTAVGKEFNHLEKRIENLNKKVDDGFLDIWTYNAELLVLLENERTLDYHDSNVKNLYEKVRSQLKNNAKEIGNGCFEFYHKCDNTCMESVKNGTYDYPKYSEEAKLNREEIDGVKLESTRIYQILAIYSTVASSLVLVVSLGAISFWMCSNGSLQCRICI

SEQ ID NO: 2943 - protein, 566 aa, synthetic construct; identical to SEQ ID NO: 2669
  REGION 1..566: note = hemagglutinin__InfluenzaA__ACS27249

SEQ ID NO: 2944 - protein, 566 aa, synthetic construct; identical to SEQ ID NO: 2669
  REGION 1..566: note = hemagglutinin__InfluenzaA__ACS27775

SEQ ID NO: 2945 - protein, 566 aa, synthetic construct; identical to SEQ ID NO: 2656
  REGION 1..566: note = hemagglutinin__InfluenzaA__ACS34705

SEQ ID NO: 2946 - protein, 566 aa, synthetic construct; identical to SEQ ID NO: 2656
  REGION 1..566: note = hemagglutinin__InfluenzaA__ACS34966

SEQ ID NO: 2947 - protein, 566 aa, synthetic construct
  REGION 1..566: note = hemagglutinin__InfluenzaA__ACS34967
MKAILVVLLYTFATANADTLCIGYHANNSTDTVDTVLEKNVTVTHSVNLLEDKHNGKLCKLRGVAPLHLGKCNIAGWILGNPECESLSTASSWSYIVETSSSDNGTCYPGDFIDYEELREQLSSVSSFERFEIFPKTSSWPNHDSNKGVTAACPHAGAKSFYKNLIWLVKKGNSYPKLSKSYINDKGKEVLVLWGIHHPSTSADQQSLYQNADAYVFVGSSRYSKKFKPEIAIRPKVRDQEGRMNYYWTLVEPGDKITFEATGNLVVPRYAFAMERNAGSGIIISDTPVHDCNTTCQTPKGAINTSLPFQNIHPITIGKCPKYVKSTKSRLATGLRNVPSIQSRGLFGAIAGFIEGGWTGMVDGWYGYHHQNEQGSGYAADLKSTQKAIDEITNKVNSVIEKMNTQFTAVGKEFNHLEKRIENLNKKVDDGFLDIWTYNAELLVLLENERTLDYHDSNVKNLYEKVRSQLKNNAKEIGNGCFEFYHKCDNTCMESVKNGTYDYPKYSEEAKLNREEIDGVKLESTRIYQILAIYSTVASSLVLVVSLGAISFWMCSNGSLQCRICI

SEQ ID NO: 2948 - protein, 566 aa, synthetic construct
  REGION 1..566: note = hemagglutinin__InfluenzaA__ACS34968
MKAILVVLLYTFATANADTLCIGYHANNSTDTVDTVLEKNVTVTHSVNLLEDKHNGKLCKLRGVAPLHLGKCNIAGWILGNPECESLSTASSWSYIVESSSSDNGTCYPGDFIDYEELREQLSSVSSFERFEIFPKTSSWPNHDSNKGVTAACPHAGAKSFYKNLIWLVKKGNSYPKLSKSYINDKGKEVLVLWGIHHPSTSADQQSLYQNADAYVFVGSSRYSKKFKPEIAIRPKVRDQEGRMNYYWTLVEPGDKIIFEATGNLVVPRYAFAMERNAGSGIIISDTPVHDCNTTCQTPKGAINTSLPFQNIHPITIGKCPKYVKSTKLRLATGLRNVPSIQSRGLFGAIAGFIEGGWTGMVDGWYGYHHQNEQGSGYAADLKSTQNAIDEITNKVNSVIEKMNTQFTAVGKEFNHLEKRIENLNKKVDDGFLDIWTYNAELLVLLENERTLDYHDSNVKNLYEKVRSQLKNNAKEIGNGCFEFYHKCDNTCMESVKNGTYDYPKYSEEAKLNREEIDGVKLESTRIYQILAIYSTVASSLVLVVSLGAISFWMCSNGSLQCRICI

SEQ ID NO: 2949 - protein, 566 aa, synthetic construct
  REGION 1..566: note = hemagglutinin__InfluenzaA__ACS36632
MKAILVVLLYTFATANADTLCIGYHANNSTDTVDTVLEKNVTVTHSVNLLEDKHNGKLCKLRGVAPLHLGKCNIAGWILGNPECESLSTASSWSYIVETSSSDNGTCYPGDFIDYEELREQLSSVSSFERFEIFPKTSSWPNHDSNKGVTAACPHAGAKSFYKNLIWLVKKGNSYPKLSKSYINDKGKEVLVLWGIHHPSTSADQQSLYQNADAYVFVGSSRYSKKFKPEIAIRPKVRDQEGRMNYYWTLVEPGDKITFEATGNLVVPRYAFAMERNAGSGIIISDTPVHDCNTTCQTPKGAINTSLPFQNIHPITIGKCPKYVKSTKLRLATGLRNVPSIQSRGLFGAIAGFIEGGWTGMVDGWYGYHHQNEQGSGYAADLKSTQKAIDEITNKVNSVIEKMNTQFTAVGKEFNHLEKRIENLNKKVDDGFLDIWTYNAELLVLLENERTLDYHDSNVKNLYEKVRSQLKNNAKEIGNGCFEFYHKCDNTCMESVKNGTYDYPKYSEEAKLNREEIDGVKLESTRIYQILAIYSTVASSLVLVVSLGAISFWMCSNGSLQCRICI

SEQ ID NO: 2950 - protein, 566 aa, synthetic construct
  REGION 1..566: note = hemagglutinin__InfluenzaA__ACS36645
MKAILVVLLYTFATANADTLCIGYHANNSTDTVDTVLEKNVTVTHSVNLLEDKHNGKLCKLRGVAPLHLGKCNIAGWILGNPECESLSTASSWSYIVETSSSDNGTCYPGDFIDYEELREQLSSVSSFERFEIFPKTSSWPNHDSNKGVTAACPHAGTKSFYKNLIWLVKKGNSYPKLSKSYINDKGKEVLVLWGIHHPSTSADQQSLYQNADAYVFVGSSRYSKKFKPEIAIRPKVRDQEGRMNYYWTLVEPGDKITFEATGNLVVPRYAFAMERNAGSGIIISDTPVHDCNTTCQTPKGAINTSLPFQNIHPITIGKCPKYVKSTKLRLATGLRNVPSIQSRGLFGAIAGFIEGGWTGMVDGWYGYHHQNEQGSGYAADLKSTQNAIDEITNKVNSVIEKMNTQFTAVGKEFNHLEKRIENLNKKVDDGFLDIWTYNAELLVLLENERTLDYHDSNVKNLYEKVRSQLKSNAKEIGNGCFEFYHKCDNTCMESVKNGTYDYPKYSEEAKLNREEIDGIKLESTRIYQILAIYSTVASSLVLVVSLGAISFWMCSNGSLQCRICI

SEQ ID NO: 2951 - protein, 566 aa, synthetic construct
  REGION 1..566: note = hemagglutinin__InfluenzaA__ACS45035
MKAILVVLLYTFATANADTLCIGYHANNSTDTVDTVLEKNVTVTHSVNLLEDKHNGKLCKLRGVAPLHLGKCNIAGWILGNPECESLSTASSWSYIVETPSSDNGTCYPGDFIDYEELREQLSSVSSFERFEIFPKTSSWPNHDSNKGVTAACPHAGAKSFYKNLIWLVKKGNSYPKLSKSYINDKGKEVLVLWGIHHPSTSADQQSIYQNADTYVFVGSSRYSKKFKPEIAIRPKVRDQEGRMNYYWTLVEPGDKITFEATGNLVVPRYAFAMERNAGSGIIISDTPVHDCNTTCQTPKGAINTSLPFQNIHPITIGKCPKYVKSTKLRLATGLRNIPSIQSRGLFGAIAGFIEGGWTGMVDGWYGYHHQNEQGSGYAADLKSTQNAIDEITNKVNSVIEKMNTQFTAVGKEFNHLEKRIENLNKKVDDGFLDIWTYNAELLVLLENERTLDYHDSNVKNLYEKVRSQLKNNAKEIGNGCFEFYHKCDNTCMESVKNGTYDYPKYSEEAKLNREEIDGVKLESTRIYQILAIYSTVASSLVLVVSLGAISFWMCSNGSLQCRICI

SEQ ID NO: 2952 - protein, 566 aa, synthetic construct; identical to SEQ ID NO: 2669
  REGION 1..566: note = hemagglutinin__InfluenzaA__ACS50084

SEQ ID NO: 2953 - protein, 566 aa, synthetic construct; identical to SEQ ID NO: 2911
  REGION 1..566: note = hemagglutinin__InfluenzaA__ACS50095

SEQ ID NO: 2954 - protein, 566 aa, synthetic construct
  REGION 1..566: note = hemagglutinin__InfluenzaA__ACS54258
MKAILVVLLYTFATANADTLCIGYHANNSTDTVDTVLEKNVTVTHSVNLLEDKHNGKLCKLRGVAPLHLGKCNIAGWILGNPECESLSTASSWSYIVETSSSDNGTCYPGDFIDYEELREQLSSVSSFERFEIFPKTSSWPNHDSNKGVTAACPHAGAKSFYKNLIWLVKKGNSYPKLSKSYINDKGKEVLVLWGIHHPSTSADQQSLYQNADAYVFVGTSRYSKKFKPEIAIRPKVRDQEGRMNYYWTLVEPGDKITFEATGNLVVPRYAFAMERNAGSGIIISDTPVHDCNTTCQTPKGAINTSLPFQNIHPITIGKCPKYVKSTKLRLATGLRNVPSIQSRGLFGAIAGFIEGGWTGMVDGWYGYHHQNEQGSGYAADLKSTQNAIDEITNKVNSVIEKMNTQFTAVGKEFNHLEKRIENLNKKVDDGFLDIWTYNAELLVLLENERTLDYHDSNVKNLYEKVRSQLKNNAKEIGNGCFEFYHKCDNTCMESVKNGTYYYPKYSEEAKLNREEIDGVKLESTRIYQILAIYSTVASSLVLVVSLGAISFWMCSNGSLQCRICI

SEQ ID NO: 2955 - protein, 566 aa, synthetic construct; identical to SEQ ID NO: 2684
  REGION 1..566: note = hemagglutinin__InfluenzaA__ACS54259

SEQ ID NO: 2956 - protein, 566 aa, synthetic construct; identical to SEQ ID NO: 2656
  REGION 1..566: note = hemagglutinin__InfluenzaA__ACS54260

SEQ ID NO: 2957 - protein, 566 aa, synthetic construct; identical to SEQ ID NO: 2669
  REGION 1..566: note = hemagglutinin__InfluenzaA__ACS54261

SEQ ID NO: 2958 - protein, 566 aa, synthetic construct; identical to SEQ ID NO: 2669
  REGION 1..566: note = hemagglutinin__InfluenzaA__ACS54263

SEQ ID NO: 2959 - protein, 566 aa, synthetic construct; identical to SEQ ID NO: 2669
  REGION 1..566: note = hemagglutinin__InfluenzaA__ACS54301

SEQ ID NO: 2960 - protein, 566 aa, synthetic construct; identical to SEQ ID NO: 2656
  REGION 1..566: note = hemagglutinin__InfluenzaA__ACS66821

SEQ ID NO: 2961 - protein, 566 aa, synthetic construct
  REGION 1..566: note = hemagglutinin__InfluenzaA__ACS68822
MKAILVVLLYTFATANADTLCIGYHANNSTDTVDTVLEKNVTVTHSVNLLEDKHNGKLCKLRGVAPLHLGKCNIAGWILGNPECESLSTASSWSYIVETSSSDNGTCYPGDFIDYEGLREQLSSVSSFERFEIFPKTSSWPNHDSNKGVTAACPHAGAKSFYKNLIWLVKKGNSYPKLSKSYINDKGKEVLVLWGIHHPSTSADQQSLYQNADAYVFVGTSRYSKKFKPEIAIRPKVRDQEGRMNYYWTLVEPGDKITFEATGNLVVPRYAFAMERNAGSGIIISDTPVHDCNTTCQTPKGAINTSLPFQNIHPITIGKCPKYVKSTKLRLATGLRNVPSIQSRGLFGAIAGFIEGGWTGMVDGWYGYHHQNEQGSGYAADLKSTQNAIDEITNKVNSVIEKMNTQFTAVGKEFNHLEKRIENLNKKIDDGFLDIWTYNAELLVLLENERTLDYHDSNVKNLYEKVRSQLKNNAKEIGNGCFEFYHKCDNTCMESVKNGTYDYPKYSEEAKLNREEIDGVKLESTRIYQILAIYSTVASSLVLVVSLGAISFWMCSNGSLQCRICI

SEQ ID NO: 2962 - protein, 566 aa, synthetic construct; identical to SEQ ID NO: 2669
  REGION 1..566: note = hemagglutinin__InfluenzaA__ACS75821

SEQ ID NO: 2963 - protein, 566 aa, synthetic construct; identical to SEQ ID NO: 2669
  REGION 1..566: note = hemagglutinin__InfluenzaA__ACS77926

SEQ ID NO: 2964 - protein, 566 aa, synthetic construct; identical to SEQ ID NO: 2669
  REGION 1..566: note = hemagglutinin__InfluenzaA__ACS77936

SEQ ID NO: 2965 - protein, 566 aa, synthetic construct; identical to SEQ ID NO: 2762
  REGION 1..566: note = hemagglutinin__InfluenzaA__ACS77946

SEQ ID NO: 2966 - protein, 566 aa, synthetic construct; identical to SEQ ID NO: 2669
  REGION 1..566: note = hemagglutinin__InfluenzaA__ACS77956

SEQ ID NO: 2967 - protein, 566 aa, synthetic construct; identical to SEQ ID NO: 2669
  REGION 1..566: note = hemagglutinin__InfluenzaA__ACS77966

SEQ ID NO: 2968 - protein, 566 aa, synthetic construct; identical to SEQ ID NO: 2669
  REGION 1..566: note = hemagglutinin__InfluenzaA__ACS77976

SEQ ID NO: 2969 - protein, 566 aa, synthetic construct; identical to SEQ ID NO: 2911
  REGION 1..566: note = hemagglutinin__InfluenzaA__ACS77986

SEQ ID NO: 2970 - protein, 566 aa, synthetic construct
  REGION 1..566: note = hemagglutinin__InfluenzaA__ACS77996
MKATLVVLLYTFATANADTLCIGYHANNSTDTVDTVLEKNVTVTHSVNLLEDKHNGKLCKLRGVAPLHLGKCNIAGWILGNPECESLSTASSWSYIVETSSSDNGTCYPGDFIDYEELREQLSSVSSFERFEIFPKTSSWPNHDSNKGVTAACPHAGAKSFYKNLIWLVKKGNSYPKLSKSYINDKGKEVLVLWGIHHPSTSADQQSLYQNADAYVFVGTSRYSKKFKPEIAIRPKVRDQEGRMNYYWTLVEPGDKITFEATGNLVVPRYAFAMERNAGSGIIISDTPVHDCNTTCQTPKGAINTSLPFQNIHPITIGKCPKYVKSTKLRLATGLRNVPSIQSRGLFGAIAGFIEGGWTGMVDGWYGYHHQNEQGSGYAADLKSTQNAIDEITNKVNSVIEKMNTQFTAVGKEFNHLEKRIENLNKKVDDGFLDIWTYNAELLVLLENERTLDYHDSNVKNLYEKVRSQLKNNAKEIGNGCFEFYHKCDNTCMESVKNGTYDYPKYSEEAKLNREEIDGVKLESTRIYQILAIYSTVASSLVLVVSLGAISFWMCSNGSLQCRICI

SEQ ID NO: 2971 - protein, 566 aa, synthetic construct; identical to SEQ ID NO: 2669
  REGION 1..566: note = hemagglutinin__InfluenzaA__ACS78006

SEQ ID NO: 2972 - protein, 566 aa, synthetic construct; identical to SEQ ID NO: 2669
  REGION 1..566: note = hemagglutinin__InfluenzaA__ACS78016

SEQ ID NO: 2973 - protein, 566 aa, synthetic construct
  REGION 1..566: note = hemagglutinin__InfluenzaA__ACS78026
MKAILVVLLYTFATANADTLCIGYHANNSTDTVDTVLEKNVTVTHSVNLLEDKHNGKLCKLRGVAPLHLGKCNIAGWILGNPECESLSTASSWSYIVETSSSDNGTCYPGDFIDYEELREQLSSVSSFERFEIFPKISSWPNHDSNRGVTAACPHAGAKSFYKNLIWLVKKGNSYPKLIKSYINDKGKEVLVLWGIHHPSTSADQQSLYQNADAYVFVGSSRYSKKFKPEIAIRPKVRDQEGRMNYYWTLVEPGDKITFEATGNLVVPRYAFAMERNAGSGIIISDTPVHDCNTTCQTPKGAINTSLPFQNIHPITIGKCPKYVKSTKLRLATGLRNVPSIQSRGLFGAIAGFIEGGWTGMVDGWYGYHHQNEQGSGYAADLKSTQNAIDEITNKVNSVIEKMNTQFTAVGKEFNHLEKRIENLNKKVDDGFLDIWTYNAELLVLLENERTLDYHDSNVKNLYEKVRSQLKNNAKEIGNGCFEFYHKCDNTCMESVKNGTYDYPKYSEEAKLNREEIDGVKLESTRIYQILAIYSTVASSLVLVVSLGAISFWMCSNGSLQCRICI

SEQ ID NO: 2974 - protein, 566 aa, synthetic construct; identical to SEQ ID NO: 2911
  REGION 1..566: note = hemagglutinin__InfluenzaA__ACS78036

SEQ ID NO: 2975 - protein, 566 aa, synthetic construct; identical to SEQ ID NO: 2911
  REGION 1..566: note = hemagglutinin__InfluenzaA__ACS78046

SEQ ID NO: 2976 - protein, 566 aa, synthetic construct; identical to SEQ ID NO: 2684
  REGION 1..566: note = hemagglutinin__InfluenzaA__ACS92569

SEQ ID NO: 2977 - protein, 566 aa, synthetic construct; identical to SEQ ID NO: 2684
  REGION 1..566: note = hemagglutinin__InfluenzaA__ACS92579

SEQ ID NO: 2978 - protein, 566 aa, synthetic construct; identical to SEQ ID NO: 2669
  REGION 1..566: note = hemagglutinin__InfluenzaA__ACS92589

SEQ ID NO: 2979 - protein, 566 aa, synthetic construct
  REGION 1..566: note = hemagglutinin__InfluenzaA__ACS92612
MKAILVVLLYTFATANADTLCIGYHANNSTDTVDTVLEKNVTVTHSVNLLEDKHNGKLCKLRGVAPLHLGKCNIAGWILGNPECESLSTASSWSYIVETSSSDNGTCYPGDFIDYEELREQLSSVSSFERFEIFPKTSSWPIHDSNKGVTAACPHAGAKSFYKNLIWLVKKGNSYPKLSKSYINDKGKEVLVLWGIHHPSTSADQQSLYQNADAYVFVGSSRYSKKFKPEIAIRPKVRDQEGRMNYYWTLVEPGDKITFEATGNLVVPRYAFAMERNAGSGIIISDTPVHDCDTTCQTPKGAINTSLPFQNIHPITIGKCPKYVKSTKLRLATGLRNIPSIQSRGLFGAIAGFIEGGWTGMVDGWYGYHHQNEQGSGYAADLKSTQNAIDEITNKVNSVIEKMNTQFTAVGKEFNHLEKRIENLNKKVDDGFLDIWTYNAELLVLLENERTLDYHDSNVKNLYEKVRSQLKNNAKEIGNGCFEFYHKCDNTCMESVKNGTYDYPKYSEEAKLNREEIDGVKLESTRIYQILAIYSTVASSLVLVVSLGAISFWMCSNGSLQCRICI

SEQ ID NO: 2980 - protein, 566 aa, synthetic construct; identical to SEQ ID NO: 2669
  REGION 1..566: note = hemagglutinin__InfluenzaA__ACT10307

SEQ ID NO: 2981 - protein, 566 aa, synthetic construct; identical to SEQ ID NO: 2669
  REGION 1..566: note = hemagglutinin__InfluenzaA__ACT10314

SEQ ID NO: 2982 - protein, 566 aa, synthetic construct
  REGION 1..566: note = hemagglutinin__InfluenzaA__ACT11057
MKAILVVLLYTFATANADTLCIGYHANNSTDTVDTVLEKNVTVTHSVNILEDKHNGKLCKLRGVAPLHLGKCNIAGWILGNPECESLSTASSWSYIVETSSSDNGTCYPGDFIDYEELREQLSSVSSFERFEIFPKTSSWPNHDSNKGVTAACPHAGAKSFYKNLIWLVKKGNSYPKLSKSYINDKGKEVLVLWGIHHPSTSADQQSLYQNADAYVFVGSSRYSKKFKPEIAIRPKVRDQEGRMNYYWTLVEPGDKITFEATGNLVVPRYAFAMERNAGSGIIISDTPVHDCNTTCQTPKGAINTSLPFQNIHPITIGKCPKYVKSTKLRLATGLRNVPSIQSRGLFGAIAGFIEGGWTGMVDGWYGYHHQNEQGSGYAADLKSTQNAIDEITNKVNSVIEKMNTQFTAVGKEFNHLEKRIENLNKKVDDGFLDIWTYNAELLVLLENERTLDYHDSNVKNLYEKVRSQLKNNAKEVGNGCFEFYHKCDNTCMESVKNGTYDYPKYSEEAKLNREEIDGVKLESTRIYQILAIYSTVASSLVLVVSLGAISFWMCSNGSLQCRICI

SEQ ID NO: 2983 - protein, 567 aa, synthetic construct
  REGION 1..567: note = hemagglutinin__InfluenzaA__ACT15312
MEKIVLLLAIVSIVKSDQICIGYHANNSTEQVDTIMEKNVTVTHAQDILEKTHNGKLCNLDGVKPLILRDCSVAGWLLGNPMCDEFLNVPEWSYIVEKINPANDLCYPGNFNDYEELKHLLSRINHFEKIQIIPKNSWSDHEASGVSSACPYQGRSSFFRNVVWLTKKNNAYPTIKRSYNNTNQEDLLVLWGIHHPNDAAEQTRLYQNPTTYISVGTSTLNQRLVPKIATRSKVNGQSGRMEFFWTILKSNDAINFESNGNFIAPENAYKIVKKGDSTIMKSELEYGNCNTKCQTPIGAINSSMPFHNIHPLTIGECPKYVKSNRLVLATGLRNSPQGERRRKKRGLFGAIAGFIEGGWQGMVDGWYGYHHSNEQGSGYAADKESTQKAIDGVTNKVNSIIDKMNTQFEAVGREFNNLERRIENLNKKMEDGFLDVWTYNAELLVLMENERTLDFHDSNVKNLYDKVRLQLRDNAKELGNGCFEFYHRCDNECMESVRNGTYDYPQYSEEARLKREEISGVKLESIGTYQILSIYSTVASSLALAIMVAGLFLWMCSNGSLQCRICI

SEQ ID NO: 2984 - protein, 567 aa, synthetic construct
  REGION 1..567: note = hemagglutinin__InfluenzaA__ACT15314
MEKIVLLLAIVSLVKSDQICIGYHANNSTEQVDTIMEKNVTVTHAQDILEKTHNGKLCNLDGVKPLILRDCSVAGWLLGNPMCDEFLNVPEWSYIVEKINPANDLCYPGNFNDYEELKHLLSRINHFEKIQIIPKNSWSDHEASGVSSACPYQGRSSFFRNVVWLTKKNNAYPTIKRSYNNTNQEDLLVLWGIHHPNDAAEQTRLYQNPTTYISVGTSTLNQRLVPKITTRSKVNGQSGRMEFFWTILKSNDAINFESNGNFIAPENAYKIVKKGDSTIMKSELEYGNCNTKCQTPIGAINSSMPFHNIHPLTIGECPKYVKSNRLVLATGLRNSPQGERRRKKRGLFGAIAGFIEGGWQGMVDGWYGYHHSNEQGSGYAADKESTQKAIDGVTNKVNSIIDKMNTQFEAVGREFNNLERRIENLNKKMEDGFLDVWTYNAELLVLMENERTLDFHDSNVKNLYDKVRLQLRDNAKELGNGCFEFYHRCDNECMESVRNGTYDYPQYSEEARLKREEISGVKLESIGTYQILSIYSTVASSLALAIMVAGLFLWMCSNGSLQCRICI

SEQ ID NO: 2985 - protein, 567 aa, synthetic construct
  REGION 1..567: note = hemagglutinin__InfluenzaA__ACT15316
MEKIVLLLAIVSLVKSDQICIGYHANNSTEQVDTIMEKNVTVTHAQDILEKTHNGKLCNLDGVKPLILRDCSVAGWLLGNPMCDEFLNVPEWSYIVEKINPANDLCYPGNFNDYEELKHLLSRINHFEKIQIIPKNSWSDHEASGVSSACPYQGRSSFFRNVVWLTKKDNAYPTIKRSYNNTNQEDLLVLWGIHHPNDAAEQTRLYQNPTTYISVGTSTLNQRLIPKIATRSKVNGQSGRMEFFWTILKSNDAINFESNGNFIAPENAYKIVKKGDSTIMKSELEYGNCNTKCQTPIGAINSSMPFHNIHPLTIGECPKYVKSNRLVLATGLRNSPQGERRRKKRGLFGAIAGFIEGGWQGMVDGWYGYHHSNEQGSGYAADKESTQKAIDGVTNKVNSIIDKMNTQFEAVGREFNNLERRIENLNKKMEDGFLDVWTYNAELLVLMENERTLDFHDSNVKNLYDKVRLQLRDNAKELGNGCFEFYHRCDNECMESVRNGTYDYPQYSEEARLKREEISGVKLESIGTYQILSIYSTVASSLALAIMVAGLFLWMCSNGSLQCRICI

SEQ ID NO: 2986 - protein, 567 aa, synthetic construct
  REGION 1..567: note = hemagglutinin__InfluenzaA__ACT15320
MEKIVLLLAIVSLVKSDQICIGYHANNSTEQVDTIMEKNVTVTHAQDILEKTHNGKLCNLDGVKPLILRDCSVAGWLLGNPMCDEFLNVPEWSYIVEKINPANDLCYPGNFNDYEELKHLLSRINHFEKIQIIPKNSWSDHEASGMSSACPYQGRSSFFRNVVWLTKKDNAYPTIKRSYNNTNQEDLLVLWGIHHPNDAAEQTRLYQNPTTYISVGTSTLNQRLVPKIATRSKVNGQSGRMEFFWTILKSNDAINFESNGNFIAPENAYKIVKKGDSTIMKSELEYGNCNTKCQTPIGAINSSMPFHNIHPLTIGECPKYVKSNRLVLATGLRNSPQGERRRKKRGLFGAIAGFIEGGWQGMVDGWYGYHHSNEQGSGYAADKESTQKAIDGVTNKVNSIIDKMNTQFEAVGREFNNLERRIENLNKKMEDGFLDVWTYNAELLVLMENERTLDFHDSNVKNLYDKVRLQLRDNAKELGNGCFEFYHRCDNECMESVRNGTYDYPQYSEEARLKREEISGVKLESIGTYQILSIYSTVASSLALAIMVAGLFLWMCSNGSLQCRICI

SEQ ID NO: 2987 - protein, 567 aa, synthetic construct
  REGION 1..567: note = hemagglutinin__InfluenzaA__ACT15322
MEKIVLLLAIVSLVKSDQICIGYHANNSTEQVDTIMEKNVTVTHAQDILEKTHNGKLCNLDGVKPLILRDCSVAGWLLGNPMCDEFLNVPEWSYIVEKINPANDLCYPGNFNDYEELKHLLSRINHFEKIQIIPKNSWSDHEASGVSSACPYQGRSSFFRNVVWLTKKDNAYPTIKRSYNNTNQEDLLVLWGIHHPNDAAEQTRLYQNPTTYISVGTSTLNQRLVPKIATRSKVNGQSGRMEFFWTILKSNDAINFESNGNFIAPENAYKIVKKGDSTIMKSELEYGNCNTKCQTPIGAINSSMPFHNIHPLTIGECPKYVKSNRLVLATGLRNSPQGERRRKKRGLFGAIAGFIEGGWQGMVDGWYGYHHSNEQGSGYAADKESTQKAIDGVTNKVNSIIDKMNTQFEAVGREFNNLESRIENLNKKMEDGFLDVWTYNAELLVLMENERTLDFHDSNVKNLYDKVRLQLRDNAKELGNGCFEFYHRCDNECMESVRNGTYDYPQYSEEARLKREEISGVKLESIGTYQILSIYSTVASSLALAIMVAGLFLWMCSNGSLQCRICI

SEQ ID NO: 2988 - protein, 567 aa, synthetic construct
  REGION 1..567: note = hemagglutinin__InfluenzaA__ACT15326
MEKIVLLLAIVSLVKSDQICIGYHANNSTEQVDTIMEKNVTVTHAQDILEKTHNGKLCNLDGVKPLILRDCSVAGWLLGNPMCDEFLNVPEWSYIVEKINPANDLCYPGNFNDYEELKHLLSRINHFEKIQIIPKNSWSDHEASGVSSACPYQGRSSFFRNVVWLTKKDNAYPTIKRSYNNTNQEDLLVLWGIHHPNDAAEQTRLYQNPTTYISVGTSTLNQRLIPKIATRSKVNGQSGRMEFFWTILKPNDAINFESNGNFIAPENAYKIVKKGDSTIMKSELEYGNCNTKCQTPIGAINSSMPFHNIHPLTIGECPKYVKSNRLVLATGLRNSPQGERRRKKRGLFGAIAGFIEGGWQGMVDGWYGYHHSNEQGSGYAADKESTQKAIDGVTNKVNSIIDKMNTQFEAVGREFNNLERRIENLNKKMEDGFLDVWTYNAELLVLMENERTLDFHDSNVKNLYDKVRLQLRDNAKELGNGCFEFYHRCDNECMESVRNGTYDYPQYSEEARLKREEISGVKLESIGTYQILSIYSTVASSLALAIMVAGLFLWMCSNGSLQCRICI

SEQ ID NO: 2989 - protein, 567 aa, synthetic construct
  REGION 1..567: note = hemagglutinin__InfluenzaA__ACT15328
MEKIVLLLAIVSLVKSDQICIGYHANNSTEQVDTIMEKNVTVTHAQDILEKTHNGKLCNLDGVKPLILRDCSVAGWLLGNPMCDEFLNVPEWSYIVEKINPANDLCYPGNFNDYEELKHLLSRINHFEKIQIIPKNSWSDHEASGVSSACPYQGRSSFFRNVVWLTKKDNAYPTIKRSYNNTNQEDLLVLWGIHHPNDAAEQTRLYQNPTTYISVGTSTLNQRLVPKIATRSKVNGQNGRMEFFWTILKSNDAINFESNGNFIAPENAYKIVKKGDSTIMKSELEYGNCNTKCQTPIGAINSSMPFHNIHPLTIGECPKYVKSNRLVLATGLRNSPQGERRRKKRGLFGAIAGFIEGGWQGMVDGWYGYHHSNEQGSGYAADKESTQKAIDGVTNKVNSIIDKMNTQFEAVGREFNNLERRIENLNKKMEDGFLDVWTYNAELLVLMENERTLDFHDSNVKNLYDKVRLQLRDNAKELGNGCFEFYHRCDNECMESVRNGTYDYPHYSEEARLKREEISGVKLESIGTYQILSIYSTVASSLALAIMVAGLFLWMCSNGSLQCRICI

SEQ ID NO: 2990 - protein, 567 aa, synthetic construct
  REGION 1..567: note = hemagglutinin__InfluenzaA__ACT15330
MEKIVLLLAIVSLVKSDQICIGYHANNSTEQVDTIMEKNVTVTHAQDILEKTHNGKLCNLDGVKPLILRDCSVAGWLLGNPMCDEFLNVPEWSYIVEKINPANDLCYPGNFNDYEELKHLLSRINHFEKIQIIPKNSWSDHEASGVSSACPYQGRSSFFRNVVWLTKKDNAYPTIKRSYNNTNQEDLLVLWGIHHPNDAAEQTRLYQNPTTYISVGTSTLNQRLVPKIATRSKVNGQSGRMEFFWTILKSNDAINFESNGNFIAPENAYKIVKKGDSTIMKSELEYGNCNTKCQTPIGAINSSMPFHNIHPLTIGECPKYVKSNRLVLATGLRNSPQGERRRKKRGLFGAIAGFIEGGWQGMVDGWYGYHHSNEQGSGYAADKESTQKAIDGVTNKVNSIIDKMNTQFEAVGREFNNLERRIENLNKKMEDGFLDVWTYNAELLVLMENERTLDFHDSNVKNLYDKVRLQLRDNAKELGNGCFEFYHRCDNECMESVRNGTYDYPHYSEEARLKREEISGVKLESIGTYQILSIYSTVASSLALAIMVAGLFLWMCSNGSLQCRICI

SEQ ID NO: 2991 - protein, 568 aa, synthetic construct
  REGION 1..568: note = hemagglutinin__InfluenzaA__ACT15332
MEKIVLLLAIVSLVKSDQICIGYHANNSTEQVDTIMEKNVTVTHAQDILEKTHNGKLCDLDGVKPLILRDCSVAGWLLGNPMCDEFLNVPEWSYIVEKINPANDLCYPGDFNDYEELKHLLSRINHFEKIQIIPKSSWSDHEASSGVSSACPYQGRSSFFRNVVWLIKKDNAYPTIKRSYNNTNQEDLLVLWGIHHPNDAAEQTRLYHNPTTYISVGTSTLNQRLVPKIATRSKINGQSGRMEFFWTILKPNDAINFESNGNFIAPENAYKIVKKGDSTIMKSELEYGNCNTKCQTPIGAINSSMPFHNIHPLTIGECPKYVKSSRLVLATGLRNSPQGKSRRKKRGLFGAIAGFIEGGWQGMVDGWYGYHHSNEQGSGYAADKESTQRAIDGVTNKVNSIIDKMNTQFEAVGREFNNLERRIENLNKKMEDGFLDVWTYNAELLVLMENERTLDFHDSNVKNLYDKVRLQLRDNAKELGNGCFEFYHRCDNECMESVRNGTYDYPQYSEEARLKREEISGVKLESIGIYQILSIYSTVASSLALAIMVAGLFLWMCSNGSLQCRICI

SEQ ID NO: 2992 - protein, 567 aa, synthetic construct
  REGION 1..567: note = hemagglutinin__InfluenzaA__ACT15336
MEKIVLLLAIVSLVKSDQICIGYHANNSTEQVDTIMEKNVTVTHAQDILEKTHNGKLCNLDGVKPLILRDCSVAGWLLGNPMCDEFLNVPEWSYIVEKINPANDLCYPGNFNDYEELKHLLSRINHFEKIQIIPKNSWSDHEASGVSSACPYQGRSSFFRNVVWLTKKDNAYPTIKRSYNNTNQEDLLVLWGIHHPNDAAEQTRLYQNPTTYISVGTSTLNQRLVPKIATRSKVNGQSGRMEFFWTILKSNDAINFESNGNFIAPENAYKIVKKGDSTIMKSELEYGNCNTKCQTPIGAINSSMPFHNIHPLTIGECPKYVKSNRLVLATGLRNSPQGERRRKKRGLFGAIAGFIEGGWQGMVDGWYGYHHSNEQGSGYAADKESTQKAIDGVTNKVNSIIDKMNTQFEAVGREFNNLERRIENLNKKMEDGFLDVWTYNAELLVLMENERTLDFHDSNVKNLYDKVRLQLRDNAKELGNGCFEFYHRCDNECMESVRNGTYDYPQYSEEARLKREEISGVKLESIGTYQILSIYSTVASSLALAIMVAGLFLWMCSNGSLQCRICI

SEQ ID NO: 2993 - protein, 567 aa, synthetic construct
  REGION 1..567: note = hemagglutinin__InfluenzaA__ACT15338
MEKIVLLLAIVSLVKSDQICIGYHANNSTEQVDTIMEKNVTVTHAQDILEKTHNGKLCNLDGVKPLILRDCSVAGWLLGNPMCDEFLNVPEWSYIVEKINPANDLCYPGNFNDYEELKHLLSRINHFEKIQIIPKNSWSDHEASGVSSACPYQGRSSFFRNVVWLTKKNNAYPTIKRSYNNTNQEDLLVLWGIHHPNDATEQTRLYQNPTTYISVGTSTLNQRLIPKIATRSKVNGQSGRMEFFWTILKSNDAINFESNGNFIAPENAYKIVKKGDSTIMKSELEYGNCNTKCQTPIGAINSSMPFHNIHPLTIGECPKYVKSNRLVLATGLRNSPQEGRRRKKRGLFGAIAGFIEGGWQGMVDGWYGYHHSNEQGSGYAADKESTQKAIDGVTNKVNSIIDKMNTQFEAVGREFNNLERRIENLNKKMEDGFLDVWTYNAELLVLMENERTLDFHDSNVKNLYDKVRLQLRDNAKELGNGCFEFYHRCDNECMESVRNGTYDYPQYSEEARLKREEISGVKLESIGTYQILSIYSTVASSLALAIMVAGLFLWMCSNGSLQCRICI

SEQ ID NO: 2994 - protein, 567 aa, synthetic construct
  REGION 1..567: note = hemagglutinin__InfluenzaA__ACT15340
MEKIVLLLAIVSLVKSDQICIGYHANNSTEQVDTIMEKNVTVTHAQDILEKTHNGKLCNLDGVKPLILRDCSVAGWLLGNPMCDEFLNVPEWSYIVEKINPANDLCYPGNFNDYEELKHLLSRINHFEKIQIIPKNSWSDHEASGVSSACPYQGRSSFFRNVVWLTKKNNAYPTIKRSYNNTNQEDLLVLWGIHHPNDAEEQTRLYQNPTTYISVGTSTLNQRLVPKIATRSKVNGQSGRMEFFWTILKSNDAINFESNGNFIAPENAYKIVKKGDSTIMKSELEYGNCNTKCQTPIGAINSSMPFHNIHPLTIGECPKYVKSNRLVLATGLRNSPQGERRRKKRGLFGAIAGFIEGGWQGMVDGWYGYHHSNEQGSGYAADKESTQKAIDGVTNKVNSIIDKMNTQFEAVGREFNALERRIENLNKKMEDGFLDVWTYNAELLVLMENERTLDFHDSNVKNLYDKVRLQLRDNAKELGNGCFEFYHRCDNECMESVRNGTYDYPQYSEEARLKREEISGVKLESIGTYQILSIYSTVASSLALAIMVAGLFLWMCSNGSLQCRICI

SEQ ID NO: 2995 - protein, 567 aa, synthetic construct
  REGION 1..567: note = hemagglutinin__InfluenzaA__ACT15342
MEKIVLLLAIVSLVKSDQICIGYHANNSTEQVDTIMEKNVTVTHAQDILEKTHNGKLCNLDGVKPLILRDCSVAGWLLGNPMCDEFLNVPEWSYIVEKINPANDLCYPGSFNDYEELKHLLSRINHFEKIQIIPKNSWSDHEASGVSSACPYQGRSSFFRNVVWLTKKDNAYPTIKRSYNNTNQEDLLVLWGIHHPNDAAEQTRLYQNPTTYISVGTSTLNQRLVPKIATRSKVNGQSGRMEFFWTILKPNDAINFESNGNFIAPENAYKIVKKGDSTIMKSELEYGNCNTKCQTPIGAINSSMPFHNIHPLTIGECPKYVKSNRLILATGLRNSPQGERRRKKRGLFGAIAGFIEGGWQGMVDGWYGYHHSNEQGSGYAADKESTQKAIDGVTNKVNSIIDKMNTQFEAVGREFNNLERRIENLNKKMEDGFLDVWTYNAELLVLMENERTLDFHDSNVKNLYDKVRLQLRDNAKELGNGCFEFYHRCDNECMESVRNGTYDYPQYSEEARLKREEISGVKLESIGTYQILSIYSTVASSLALAIMVAGLFLWMCSNGSLQCRICI

SEQ ID NO: 2996 - protein, 567 aa, synthetic construct; identical to SEQ ID NO: 2992
  REGION 1..567: note = hemagglutinin__InfluenzaA__ACT15343

SEQ ID NO: 2997 - protein, 567 aa, synthetic construct
  REGION 1..567: note = hemagglutinin__InfluenzaA__ACT15345
MEKIVLLLAIVSLVKSDQICIGYHANNSTEQVDTIMEKNVTVTHAQDILEKTHNGKLCNLDGVKPLILRDCSVAGWLLGNPMCDEFLNVPEWSYIVEKINPANDLCYPGNFNDYEELKHLLSRINHFEKIQIIPKNSWSDHEASGVSSSCPYQGRSSFFRNVVWLTKKDNAYPTIKRSYNNTNQEDLLVLWGIHHPNDAAEQTRLYQNPTTYISVGTSTLNQRLVPKIATRSKVNGQSGRMEFFWTILKSNDAINFGSNGNFIAPENAYKIVKKGDSTIMKSELEYGNCNTKCQTPIGAINSSMPFHNIHPLTIGECPKYVKSNRLVLATGLRNSPQGERRRKKRGLFGAIAGFIEGGWQGMVDGWYGYHHSNEQGSGYAADKESTQKAIDGVTNKVNSIIDKMNTQFEAVGREFNNLERRIENLNKKMEDGFLDVWTYNAELLVLMENERTLDFHDSNVKNLYDKVRLQLRDNAKELGNGCFEFYHRCDNECMESVRNGTYDYPQYSEEARLKREEISGVKLESIGTYQILSIYSTVASSLALAIMVAGLFLWMCSNGSLQCRICI

SEQ ID NO: 2998 - protein, 568 aa, synthetic construct
  REGION 1..568: note = hemagglutinin__InfluenzaA__ACT15347
MEKIVLLLAIVSLVKSDQICIGYHANNSTEQVDTIMEKNVTVTHAQDILEKTHNGKLCDLDGVKPLILRDCSVAGWLLGNPMCDEFLNVPEWSYIVEKINPANDLCYPGDFNDYEELKHLLSRINHFEKIQIIPKSSWSDHEASSGVSSACPYQGRSSFFRNVVWLIKKDNAYPTIKRSYNNTNQEDLLVLWGIHHPNDAAEQTRLYHNPTTYISVGTSTLNQRLVPKIATRSKVNGQSGRMEFFWTILKPNDAINFESNGNFIAPENAYKIVKKGDSTIMKSELEYGNCNTKCQTPIGAINSSMPFHNIHPLTIGECPKYVKSSRLVLATGLRNSPQGKNRRKKRGLFGAIAGFIEGGWQGMVDGWYGYHHSNEQGSGYAADKESTQRAIDGVTNKVNSIIDKMNTQFEAVGREFNNLERRIENLNKKMEDGFLDVWTYNAELLVLMENERTLDFHDSNVKNLYDKVRLQLRDNAKELGNGCFEFYHRCDNECMESVRNGTYDYPQYSEEARLKREEISGVKLESIGIYQILSIYSTVASSLALAIMVAGLFLWMCSNGSLQCRICI

SEQ ID NO: 2999 - protein, 567 aa, synthetic construct
  REGION 1..567: note = hemagglutinin__InfluenzaA__ACT15349
MEKIVLLLAIVSLVKSDQICIGYHANNSTEQVDTIMEKNVTVTHAQDILEKTHNGKLCNLDGVKPLILRDCSVAGWLLGNPMCDEFLNVPEWSYIVEKINPANDLCYPGNFNDYEELKHLLSRINHFEKIQIIPKNSWSDHEASGVSSACPYQGRSSFFRNVVWLTKKDNAYPTIKRSYNNTNQEDLLVLWGIHHPNDATEQTRLYQNPTTYISVGTSTLNQRLIPKIATRSKVNGQSGRMEFFWTILKSNDAINFESNGNFIAPENAYKIVKKGDSTIMKSELEYGNCNTKCQTPIGAINSSMPFHNIHPLTIGECPKYVKSNRLVLATGLRNSPQEERRRKKRGLFGAIAGFIEGGWQGMVDGWYGYHHSNEQGSGYAADKESTQKAIDGVTNKVNSIIDKMNTQFEAVGREFNNLERRIENLNKKMEDGFLDVWTYNAELLVLMENERTLDFHDSNVKNLYDKVRLQLRDNAKELGNGCFEFYHRCDNECMESVRNGTYDYPQYSEEARLKREEISGVKLESIGTYQILSIYSTVASSLALAIMVAGLFLWMCSNGSLQCRICI

SEQ ID NO: 3000 - protein, 568 aa, synthetic construct
  REGION 1..568: note = hemagglutinin__InfluenzaA__ACT15351
MEKIVLLLAIVSLVKSDQICIGYHANNSTEQVDTIMEKNVTVTHAQDILEKTHNGKLCDLDGVKPLILRDCSVAGWLLGNPMCDEFLNVPEWSYIVEKINPANDLCYPGDFNDYEELKHLLSRINHFEKIQIIPKSSWSDHEASSGVSSACPYQGGSSFFRNVVWLIKKDNAYPTIKRSYNNTNQEDLLVLWGIHHPNDAAEQTRLYHNPTTYISVGTSTLNQRLVPKIATRSKVNGQSGRMEFFWTILKPNDAINFESNGNFIAPENAYKIVKKGDSTIMKSELEYGNCNTKCQTPIGAINSSMPFHNIHPLTIGECPKYVKSSRLVLATGLRNSPQGKSRRKKRGLFGAIAGFIEGGWQGMVDGWYGYHHSNEQGSGYAADKESTQRAIDGVTNKVNSIIDKMNTQFEAVGREFNKLERRIENLNKKMEDGFLDVWTYNAELLVLMENERTLDFHDSNVKNLYDKVRLQLRDNAKELGNGCFEFYHRCDNECMESVRNGTYDYPQYSEEARLKREEISGVKLESIGIYQILSIYSTVASSLALAIMVAGLFLWMCSNGSLQCRICI

SEQ ID NO: 3001 - protein, 567 aa, synthetic construct
  REGION 1..567: note = hemagglutinin__InfluenzaA__ACT15353
MEKIVLLLAIVSLVKSDQICIGYHANNSTEQVDTIMEKNVTVTHAQDILEKTHNGKLCNLDGVKPLILRDCSVAGWLLGNPMCDEFLNVPEWSYIVEKINPANDLCYPGNFNDYEELKHLLSRINHFEKIQIIPKNSWSDHEASGVSSACPYQGRSSFFRNVVWLTKKNSAYPTIKRSYNNTNQEDLLVLWGIHHPNDAAEQTRLYQNPTTYISVGTSTLNQRLVPKIATRSKVNGQSGRMEFFWTILKSNDAINFESNGNFIAPENAYKIVKKGDSTIMKSELEYSNCNTKCQTPIGAINSSMPFHNIHPLTIGECPKYVKSNRLVLATGLRNSPQGERRRKKRGLFGAIAGFIEGGWQGMVDGWYGYHHSNEQGSGYAADKESTQKAIDGVTNKVNSIIDKMNTQFEAVGREFNNLERRIENLNKKMEDGFLDVWTYNAELLVLMENERTLDFHDSNVKNLYDKVRLQLRDNAKELGNGCFEFYHRCDNECMESVRNGTYDYPQYSEEARLKREEISGVKLESIGTYQILSIYSTVASSLALAIMVAGLFLWMCSNGSLQCRICI

SEQ ID NO: 3002 - protein, 568 aa, synthetic construct
  REGION 1..568: note = hemagglutinin__InfluenzaA__ACT15355
MEKIVLLLAIVSLVKSDQICIGYHANNSTEQVDTIMEKNVTVTHAQDILEKTHNGKLCDLDGVKPLILRDCSVAGWLLGNPMCDEFLNVPEWSYIVEKINPANDLCYPGDFNDYEELKHLLSRINHFEKIQIIPKSSWSDHEASSGVSSACPYQGRSSFFRNVVWLIKKDNAYPTIKRSYNNTNQEDLLVLWGIHHPNDAAEQTRLYHNPTTYISVGTSTLNQRLVPKIATRSKVNGQSGRMEFFWTILKPNDAINFESNGNFIAPENAYKIVKKGDSTIMKSELEYGNCNTKCQTPIGAINSSMPFHNIHPLTIGECPKYVKSSRLVLATGLRNSPQGKSRRKKRGLFGAIAGFIEGGWQGMVDGWYGYHHSNEQGSGYAADKESTQRAIDGVTNKVNSIIDKMNTQFEAVGREFNNLERRIENLNKKMEDGFLDVWTYNAELLVLMENERTLDFHDSNVKNLYDKVRLQLRDNAKELGNGCFEFYHRCDNECMESVRNGTYDYPQYSEEARLKREEISGVKLESIGIYQILSIYSTVASSLALAIMVAGLFLWMCSNGSLQCRICI

SEQ ID NO: 3003 - protein, 567 aa, synthetic construct
  REGION 1..567: note = hemagglutinin__InfluenzaA__ACT15357
MEKIVLLLAIVSLVKSDQICIGYHANNSTEQVDTIMERNVTVTHAQDILEKTHNGKLCNLDGVKPLILRDCSVAGWLLGNPMCDEFLNVPEWSYIVEKINPANDLCYPGNFNDYEELKHLLSRINHFEKIQIIPKNSWSDHEASGVSSACPYQGRSSFFRNVVWLTQKDNAYPTIKRSYNNTNQEDLLVLWGIHHPNDAAEQTRLYQNPTTYISVGTSTLNQRLIPKIATRSKVNGQSGRMEFFWTILKSNDAINFESNGNFIAPENAYKIVKKGDSTIMKSELEYGNCNTKCQTPIGAINSSMPFHNIHPLTIGECPKYVKSNRLVLATGLRNSPQGERRRKKRGLFGAIAGFIEGGWQGMVDGWYGYHHSNEQGSGYAADKESTQKAIDGVTNKVNSIIDKMNTQFEAVGREFNNLERRIENLNKKMEDGFLDVWTYNAELLVLMENERTLDFHDSNVKNLYDKVRLQLRDNAKELGNGCFEFYHRCDNECMESVRNGTYDYPQYSEEARLKREEISGVKLESIGTYQILSIYSTVASSLALAIMVAGLFLWMCSNGSLQCRICI

SEQ ID NO: 3004 - protein, 566 aa, synthetic construct
  REGION 1..566: note = hemagglutinin__InfluenzaA__ACT20200
MKAILVVLLYTFATANADTLCIGYHANNSTDTVDTVLEKNVTVTHSVNLLEDKHNGKLCKLRGVAPLHLGKCNIAGWILGNPECESLSTASSWSYIVETSSSDNGTCYPGDFIDYEELREQLSSVSSFERFEIFPKTSSWPNHDSNKGVTAACPHAGAKSFYKNLIWLVKKGNSYPKLSKSYINDKGKEVLVLWGIHHPSTSADQQSLYQNADAYVFVGSSRYSKKFKPEIAIRPKVRDQEGRMNYYWTLVEPGDKITFEATGNLVVPRYAFAMERNAGSGIIISDTPVHDCNTTCQTPKGAINTSLPFQNIHPITIGKCPKYVKSTKLRLATGLRNVPSIQSRGLFGAIAGFIEGGWTGMVDGWYGYHHQNEQGSGYAADLKSTQNAIDEITNKVNSVIEKMNTQFTAVGKEFNHLEKRIENLNKKVDDGFLDIWTYNAELLVLLENERTLDYHDSNVKNLYEKVRNQLKNNAKEIGNGCFEFYHKCDNTCMESVKNGTYDYPKYSEEAKLNREEIDGVKLESTRIYQILAIYSTVASSLVLVVSLGAISFWMCSNGSLQCRICI

SEQ ID NO: 3005 - protein, 566 aa, synthetic construct
  REGION 1..566: note = hemagglutinin__InfluenzaA__ACT21466
MKTIIALSYILCLVFAQKLPGNDNSTATPCLGHHAVPNGTLVKTITNDQIEVTNATELVQSSSTGKICDSPHRILDGKNCTLIDALLGDPHCDGFKNKEWDLFVERSTAYSNCYPYDVPDYASLRSLVASSGTLEFTNEGFNWTGVAQDGTSYACKRGSVKSFFSRLNWLHKLEYKYPALNVTMPNNDKFDKLYIWGVHHPSTDSDQTSLYVQASGRVTVSTKRSQQTVIPNIGSRPWVRGISSRISIYWTIVKPGDILLINSTGNLIAPRGYFKIRSGKSSIMRSDAPIDNCNSECITPNGSIPNDKPFQNVNRITYGACPRYVKQNTLKLATGMRNVPEKQTRGIFGAIAGFIENGWEGMVDGWYGFRHQNSEGTGQAADLKSTQAAINQINGKLNRLIEKTNEKFHQIEKEFSEVEGRIQDLEKYVEDTKIDLWSYNAELLVALENQHTIDLTDSEMNKLFEKTRKQLRENAEDMGNGCFKIYHKCDNACIGSIRNGTYDHDVYRDEALNNRFQIKGVELKSGYKDWILWISFAISCFLLCVVLLGFIMWACQKGNIRCNICI

SEQ ID NO: 3006 - protein, 566 aa, synthetic construct
  REGION 1..566: note = hemagglutinin__InfluenzaA__ACT21467
MKTIIALSYILCLVFAQKLPGSDNSTATLCLGHHAVPNGTLVKTITNDQIEVTNATELVQSSSTGKICDSPHRILDGKNCTLIDALLGDPHCDGFKNKEWDLFVERSTAYSNCYPYDVPDYASLRSLVASSGTLEFTNEGFNWTGVAQDGTSYACKRGSVKSFFSRLNWLHKLEYKYPALNVTMPNNDKFDKLYIWGVHHPSTDSDQTSLYVQASGRVTVSTKRSQQTVIPNIGSRPWVRGISSRISVYWTIVKPRDILLINSTGNLIAPRGYFKIRSGKSSIMRSDAPIDNCNSECITPNGSIPNDKPFQNVNRITYGACPRYVKQNTLKLATGMRNVPEKQTRGIFGAIAGFIENGWEGMVDGWYGFRHQNSEGTGQAADLKSTQAAINRINGKLNRLIEKTNEKFHQIEKEFSEVEGRIQDLEKYVEDTKIDLWSYNAELLVALENQHTIDLTDSEMNKLFEKTRKQLRENAEDMGNGCFKIYHKCDNACIGSIRNGTYDHDVYRDEALNNRFQIKGVELKSGYKDWILWISFAISCFLLCVVLLGFIMWACQKGNIRCNICI

SEQ ID NO: 3007 - protein, 566 aa, synthetic construct
  REGION 1..566: note = hemagglutinin__InfluenzaA__ACT21468
MKTIIALSYILCLVFAQKLPGNDNSTATLCLGHHAVPNGTLVKTITNDQIEVTNATELVQSSSTGKICDSPHRILDGKNCTLIDALLGDPHCDGFKNKEWDLFVERSTAYSNCYPYDVPDYASLRSLVASSGTLEFTNEGFNWTGVAQDGTSYACKRGSVKSFFSRLNWLHKLEYKYPALNVTMPNNDKFDKLYIWGVHHPSTDSDQTSLYVQASGRVTVSTKRSQQTVIPNIGSRPWVRGISSRISIYWTIVKPGDILLINSTGNLIAPRGYFKIRSGKSSIMRSDAPIDNCNSECITPNGSIPNDKPFQNVNRITYGACPRYVKQNTLKLATGMRNVPEKQTRGIFGAIAGFIENGWEGMVDGWYGFRHQNSEGTGQAADLKSTQAAINQINGKLNRLIEKTNEKFHQIEKEFSEVEGRIQDLEKYVEDTKIDLWSYNAELLVALENQHTIDLTDSEMNKLFEKTRKQLRENVEDMGNGCFKIYHKCDNACIGSIRNGTYDHDVYRDEALNNRFQIKGVELKSGYKDWILWISFAISCFLLCVVLLGFIMWACQKGNIRCNICI

SEQ ID NO: 3008 - protein, 566 aa, synthetic construct
  REGION 1..566: note = hemagglutinin__InfluenzaA__ACT21469
MKTIIALSYISRLVFAQKLPGNDNSTATLCLGHHAVPNGTLVKTITNDQIEVTNATELVQSSSTGRICDSPHRILDGENCTLIDALLGDPHCDGFQNKEWDLFVERSKAYSNCYPYDVPDYASLRSLVASSGTLEFNNESFNWTGVAQDGTSYACKRRSIKSFFSRLNWLHQLKYKYPALNVTMPNNDKFDKLYIWGVHHPSTDSDQTSLYAQASGRVTVSTKRSQQTVIPNIGSRPWVRGVSSRISIYWTIVKPGDILLINSTGNLIAPRGYFKIRSGKSSIMRSDAPIGKCNSECITPNGSIPNDKPFQNVNRITYGACPRYVKQNTLKLATGMRNVPEKQTRGIFGAIAGFIENGWEGMVDGWYGFRHQNSEGTGQAADLKSTQAAINQINGKLNRLIEKTNEKFHQIEKEFSEVEGRIQDLEKYVEDTKIDLWSYNAELLVALENQHTIDLTDSEMNKLFERTRKQLRENAEDMGNGCFKIYHKCDNACIGSIRNGTYDHDVYRDEALNNRFQIKGVELKSGYKDWILWISFAISCFLLCVVLLGFIMWACQKGNIRCNICI

SEQ ID NO: 3009 - protein, 566 aa, synthetic construct
  REGION 1..566: note = hemagglutinin__InfluenzaA__ACT21471
MKTIIALSYISCLVFAQKLPGNDNSTATLCLGHHAVPNGTLVKTITNDQIEVTNATELVQSSSTGRICDSPHRILDGENCTLIDALLGDPHCDGFQNKEWDLFVERSKAYSNCYPYDVPDYASLRSLVASSGTLEFNNESFNWTGVAQDGTSYACKRRSIKSFFSRLNWLHQLKYKYPALNVTMPNNDKFDKLYIWGVHHPSTDSDQTSLYAQASGRVTVSTKRSQQTVIPNIGSRPWVRGVSSRISIYWTIVKPGDILLINSTGNLIAPRGYFKIRSGKSSIMRSDAPIGKCNSECITPNGSIPNDKPFQNVNRITYGACPRYVKQNTLKLATGMRNVPEKQTRGIFGAIAGFIENGWEGMVDGWYGFRHQNSEGTGQAADLKSTQAAINQINGKLNRLIEKTNEKFHQIEKEFSEVEGRIQDLEKYVEDTKIDLWSYNAELLVALENQHTIDLTDSEMNKLFERTRKQLRENAEDMGNGCFKIYHKCDNACIGSIRNGTYDHDVYRDEALNNRFQIKGVELKSGYKDWILWISFAISCFLLCVVLLGFIMWACQKGNIRCNICI

SEQ ID NO: 3010 - protein, 566 aa, synthetic construct
  REGION 1..566: note = hemagglutinin__InfluenzaA__ACT21472
MKTIIALSYISCLVFAQKLPGNDNSTATLCLGHHAVPNGTLVKTITNDQIEVTNATELVQSSSTGRICDSPHRILDGENCTLIDALLGDPHCDGFQNKEWDLFVERSKAYSNCYPYDVPDYASLRSLVASSGTLEFNNESFNWTGVAQDGTSYACKRRSIKSFFSTLNWLHQLKYKYPALNVTMPNNDKFDKLYIWGVHHPSTDSDQTSLYAQASGRVTVSTKRSQQTVIPNIGSRPWVRGVSSRISIYWTIVKPGDILLINSTGNLIAPRGYFKIRSGKSSIMRSDAPIGKCNSECITPNGSIPNDKPFQNVNRITYGACPRYVKQNTLKLATGMRNVPEKQTRGIFGAIAGFIENGWEGMVDGWYGFRHQNSEGTGQAADLKSTQAAINQINGKLNRLIEKTNEKFHQIEKEFSEVEGRIQDLEKYVEDTKIDLWSYNAELLVALENQHTIDLTDSEMNKLFERTRKQLRENAEDMGNGCFKIYHKCDNACIGSIRNGTYDHDVYRDEALNNRFQIKGVELKSGYKDWILWISFAISCFLLCVVLLGFIMWACQKGNIRCNICI

SEQ ID NO: 3011 - protein, 566 aa, synthetic construct
  REGION 1..566: note = hemagglutinin__InfluenzaA__ACT21507
MKTIIALSYILCLVFAQKLPGNDNSTATLCLGHHAVPNGTIVKTITNDQIEVTNATELVQSSSTGGICDSPHQILDGENRTLIDALLGDPQCDGFQNKKWDLFVERSKAYSNCYPYDVPDYASLRSLVASSGTLEFNNESFNWTGVTQNGTSSACKGRSNNSFFSRLNWLTHLKFKYPALNVTMPNNEKFDKLYIWGVHHPGTDNDQISLYAQASGRITVSTKRSQQTVIPNIGSRPRVRDIPSRISIYWTIVKPGDILLINSTGNLIAPRGYFKIRSGKSSIMRSDAPIGKCNSECITPNGSIPNDKPFQNVNRITYGACPRYVKQNTLKLATGMRNVPEKQTRGIFGAIAGFIENGWEGMVDGWYGFRHQNSEGIGQAADLKSTQAAINQINGKLNRLIGKTNEKFHQIEKEFSEVEGRIQDLEKYVEDTRIDLWSYNAELLVALESQHTIDLTDSEMNKLFERTKKQLRENAEDMGNGCFKIYHKCDNACIGSIRNGTYDHDVYRDEALNKRFQIKGVELKSGYKDWILWISFAISCFLLCVALLGFIMWACQKGNIRCNICI

SEQ ID NO: 3012 - protein, 566 aa, synthetic construct
  REGION 1..566: note = hemagglutinin__InfluenzaA__ACT21508
MKTIIALSYILCLVFAQKLPGNDNSTATLCLGHHAVPNGTIVKTITNDQIEVTNATELVQSSSTGGICDSPHQILDGENCTLIDALLGDPQCDGFQNKKWDLFVERSKAYSNCYPYDVPDYASLRSLVASSGTLEFNNESFNWTGVTQNGTSSACKRRSNNSFFSRLNWLTHLKFKYPALNVTMPNNEKFDKLYIWGVHHPGTDNDQISLYAQASGRITVSTKRSQQTVIPNIGSRPRVRDIPSRISIYWTIVKPGDILLINSTGNLIAPRGYFKIRSGKSSIMRSDAPIGKCNSECITPNGSIPNDKPFQNVNRITYGACPRYVKQDTLKLATGMRNVPEKQTRGIFGAIAGFIENGWEGMVDGWYGFRHQNSEGIGQAADLKSTQAAINQINGKLNRLIGKTNEKFHQIEKEFSEVEGRIQDLEKYVEDTKIDLWSYNAELLVALENQHTIDLTDSEMNKLFERTKKQLRENAEDMGNGCFKIYHKCDNACIGSIRNGTYDHDVYRDEALNNRFQIKGVELKSGYKDWILWISFAISCFLLCVALLGFIMWACQKGNIRCNICI

SEQ ID NO: 3013 - protein, 566 aa, synthetic construct
  REGION 1..566: note = hemagglutinin__InfluenzaA__ACT21509
MKTIIALSYILCLVFAQKLPGNDNSTATLCLGHHAVPNGTIVKTITNDQIEVTNATELVQSSSTGGICDSPHQILDGENCTLIDALLGDPQCDGFQNKKWDLFVERSKAYSNCYPYDVPDYASLRSLVASSGTLEFNNESFNWTGVTQNGTSSACKRRSNNSFFSRLNWLTHLKFKYPALNVTMPNNEKFDKLYIWGVHHPGTDNDQISLYAQASGRITVSTKRSQQTVIPNIGSRPRVRDIPSRISIYWTIVKPGDILLINSTGNLIAPRGYFKIRSGKSSIMRSDAPIGKCNSECITPNGSIPNDKPFQNVNRITYGACPRYVKQNTLKLATGMRNVPETQTRGIFGAIAGFIENGWEGMVDGWYGFRHQNSEGTGQAADLKSTQAAINQINGKPNRLIGKTNEKFHQIEKEFSEVEGRIQDLEKYVEDTKIDLWSYNAELLVALENQHTIDLTDSEMNKLFEKTKKQLRENAEDMGNGCFKIYHKCDNACIGSIRNETYDHDVYRDEALNNRFQIKGVELKSGYKDWILWISFAISCFLLCVALLGFIMWACQKGNIRCNICI

SEQ ID NO: 3014 - protein, 566 aa, synthetic construct
  REGION 1..566: note = hemagglutinin__InfluenzaA__ACT21510
MKTIIALSYILCPVFAQKLPGNDNSTATLCLGHHAVPNGTIVKTITNDQIEVTNATELVQSSSTGGICDSPHQILDGENCTLIDALLGDPQCDGFQNKKWDLFVERSKAYSNCYPYDVPDYASLRSLVASSGTLEFNNESFNWTGVTQNGTSSACKRRSNNSFFSRLNWLTHLKFKYPALNVTMPNNEKFDKLYIWGVHHPGTDNDQISLYAQASGRITVSTKRSQQTVIPNIGSRPRVRDIPSRISIYWTIVKPGDILLINSTGNLIAPRGYFKIRSGKSSIMRSDAPIGKCNSECITPNGSIPNDKPFQDVNRITYGACPRYVKQNTLKLATGMRNVPEKQTRGIFGAIAGFIENGWEGMVDGWYGFRHQNSEGIGQAADLKSTQAAINQINGKLNRLIGKTNEKFHQIEKEFSEVEGRIQDLEKYVEDTKIDLWSYNAELLVALENQHTIDLTDSEMNKLFERTEKQLRENAEDMGNGCFKIYHKCDNAGIGSIRNGTYDHDVYRDEALNNRFQIKGVELKSGYKDWILWISFAISCFLLCVALLGFIMWACQKGNIRCNICI

SEQ ID NO: 3015 - protein, 566 aa, synthetic construct; identical to SEQ ID NO: 2913
  REGION 1..566: note = hemagglutinin__InfluenzaA__ACT21572

SEQ ID NO: 3016 - protein, 566 aa, synthetic construct; identical to SEQ ID NO: 2669
  REGION 1..566: note = hemagglutinin__InfluenzaA__ACT22031

SEQ ID NO: 3017 - protein, 566 aa, synthetic construct; identical to SEQ ID NO: 2669
  REGION 1..566: note = hemagglutinin__InfluenzaA__ACT22032

SEQ ID NO: 3018 - protein, 566 aa, synthetic construct; identical to SEQ ID NO: 2669
  REGION 1..566: note = hemagglutinin__InfluenzaA__ACT22033

SEQ ID NO: 3019 - protein, 566 aa, synthetic construct; identical to SEQ ID NO: 2669
  REGION 1..566: note = hemagglutinin__InfluenzaA__ACT22034

SEQ ID NO: 3020 - protein, 566 aa, synthetic construct; identical to SEQ ID NO: 2684
  REGION 1..566: note = hemagglutinin__InfluenzaA__ACT22035

SEQ ID NO: 3021 - protein, 566 aa, synthetic construct
  REGION 1..566: note = hemagglutinin__InfluenzaA__ACT22036
MKAILVVLLYTFATANADTLCIGYHANNSTDTVDTVLEKNVTVTHSVNLLEDKHNGKLCKLRGVAPLHLGKCNIAGWILGNPECESLSTASSWSYIVETSSSDNGTCYPGDFIDYEELREQLSSVSSFERFEIFPKTSSWPNHDSNKGVTAACPHAGAKSFYKNLIWLIKKGNSYPKLSKSYINDKGKEVLVLWGIHHPSTSADQQSLYQNADAYVFVGSSRYSKKFKPEIAIRPKVRDQEGRMNYYWTLVEPGDKITFEATGNLVVPRYAFAMERNAGSGIIISDTPVHDCNTTCQTPKGAINTSLPFQNIHPITIGKCPKYVKSTKLRLATGLRNVPSIQSRGLFGAIAGFIEGGWTGMVDGWYGYHHQNEQGSGYAADLKSTQNAIDEITNKVNSVIEKMNTQFTAVGKEFNHLEKRIENLNKKVDDGFLDIWTYNAELLVLLENERTLDYHDSNVKNLYEKVRSQLKNNAKEIGNGCFEFYHKCDNTCMESVKNGTYDYPKYSEEAKLNREEIDGVKLESTRIYQILAIYSTVASSLVLVVSLGAISFWMCSNGSLQCRICI

SEQ ID NO: 3022 - protein, 566 aa, synthetic construct
  REGION 1..566: note = hemagglutinin__InfluenzaA__ACT22037
MKAILVVLLYTFATANADTLCIGYHANNSTDTVDTVLEKNVTVTHSVNLLEDKHNGKLCKLRGVAPLHLGKCNIAGWILGNPECESLSTASSWSYIVETSSSDNGTCYPGDFIDYEELREQLSSVSSFERFEIFPKTSSWPNHDSNKGVTAACPHAGAKSFYKNLIWLVKKGNSYPKLSKSYINDKGKEVLVLWGIHHPSTSADQQSLYQNADAYVFVGTSRYSKKFKPEIAIRPKVREQEGRMNYYWTLVEPGDKITFEATGNLVVPRYAFAMERNAGSGIIISDTPVHDCNTTCQTPKGAINTSLPFQNIHPITIGKCPKYVKSTKLRLATGLRNVPSIQSRGLFGAIAGFIEGGWTGMVDGWYGYHHQNEQGSGYAADLKSTQNAIDEITNKVNSVIEKMNTQFTAVGKEFNHLEKRIENLNKKVDDGFLDIWTYNAELLVLLENERTLDYHDSNVKNLYEKVRSQLKNNAKEIGNGCFEFYHKCDNTCMESVKNGTYDYPKYSEEAKLNREEIDGVKLESTRIYQILAIYSTVASSLVLVVSLGAISFWMCSNGSLQCRICI

SEQ ID NO: 3023 - protein, 566 aa, synthetic construct
  REGION 1..566: note = hemagglutinin__InfluenzaA__ACT22038
MKAILVVLLYTFATANADTLCIGYHANNSTDTVDTVLEKNVTVTHSVNLLEDKHNGKLCKLRGVAPLHLGKCNIAGWILGNPECESLSTASSWSYIVETSSSDNGTCYPGDFIDYEELREQLSSVSSFERFEIFPKTSSWPNHDSNKGVTAACPHAGAKSFYKNLIWLVKKGNSYPKLSKSYINDKGKEVLVLWGIHHPSTNADQQSLYQNADAYVFVGSSRYSKKFKPEIAIRPKVRDQEGRMNYYWTLVEPGDKITFEATGNLVVPRYAFAMERNAGSGIIISDTPVHDCNTTCQTPKGAINTSLPFQNIHPITIGKCPKYVKSTKLRLATGLRNVPSIQSRGLFGAIAGFIEGGWTGMVDGWYGYHHQNEQGSGYAADLKSTQNAIDEITNKVNSVIEKMNTQFTAVGKEFNHLEKRIENLNKKVDDGFLDIWTYNAELLVLLENERTLDYHDSNVKNLYEKVRSQLKNNAKEIGNGCFEFYHKCDNTCMESVKNGTYDYPKYSEEAKLNREEIDGVKLESTRIYQILAIYSTVASSLVLVVSLGAISFWMCSNGSLQCRICI

SEQ ID NO: 3024 - protein, 566 aa, synthetic construct
  REGION 1..566: note = hemagglutinin__InfluenzaA__ACT22055
MKAILVVLLYTFATANADTLCIGYHANNSTDTVDTVLEKNVTVTHSVNLLEDKHNGKLCKLRGVAPLHLGKCNIAGWILGNPECESLSTASSWSYIVETSSSDNGTCYPGDFIDYEELREQLSSVSSFERFEIFPKTSSWPNHDSNKGVTAACPHAGAKSFYKNLIWLVKKGNSYPKLRKSYINDKGKEVLVLWGIHHPSTSADQQSLYQNADAYVFVGTSRYSKKFKPEIAIRPKVRDQEGRMNYYWTLVEPGDKITFEATGNLVVPRYAFAMERNAGSGIIISDTPVHDCNTTCQTPKGAINTSLPFQNIHPITIGKCPKYVKSTKLRLATGLRNVPSIQSRGLFGAIAGFIEGGWTGMVDGWYGYHHQNEQGSGYAADLKSTQNAIDEITNKVNSVIEKMNTQFTAVGKEFNHLEKRIENLNKKVDDGFLDIWTYNAELLVLLENERTLDYHDSNVKNLYEKVRSQLKNNAKEIGNGCFEFYHKCDNTCMESVKNGTYDYPKYSEEAKLNREEIDGVKLESTRIYQILAIYSTVASSLVLVVSLGAISFWMCSNGSLQCRICI

SEQ ID NO: 3025 - protein, 566 aa, synthetic construct; identical to SEQ ID NO: 2982
  REGION 1..566: note = hemagglutinin__InfluenzaA__ACT22504

SEQ ID NO: 3026 - protein, 566 aa, synthetic construct; identical to SEQ ID NO: 2911
  REGION 1..566: note = hemagglutinin__InfluenzaA__ACT33122

SEQ ID NO: 3027 - protein, 566 aa, synthetic construct
  REGION 1..566: note = hemagglutinin__InfluenzaA__ACT33123
MKAILVVLLYTFATANADTLCIGYHANNSTDTVDTVLEKNVTVTHSVNLLEDKHNGKLCKLRGVAPLHLGKCNIAGWILGNPECESLSTASSWSYIVETSSSDNGTCYPGDFIDYEELREQLSSVSSFERFEIFPKTSSWPNHDSNKGVTAACPHAGAKSFYKNLIWLVKKGNSYPKLSKSYINDKGKEVLVLWGIHHPSTSADQQSLYQNADAYVFVGTSRYSKKFKPEIAIRPKVRDQEGRMNYYWTLVEPGDKITFEATGNLVVPRYAFAMERNAGSGIIISDTPVHDCNTTCQTPKGAINTSLPFQNIHPITIGKCPKYVKSTKLRLATGLRNVPSIQSRGLFGAIAGFIEGGWTGMVDGWYGYHHQNEQGSGYAADLKSTQNAIDEITNKVNSVIEKMNTQFTAVGKEFNHLEKRIENLNKKVDDGFLDIWTYNAELLVLLENERTLDYHDSNVKNLYEKVRSQLKNNAKEIGNGCFEFYHKCDNTCMESVKNGTYDYPKYSEEAKLNREEIDGVKLESTRIYQILAIYSTVASSLVLVVSLGAISFWMCSNGSLQFRICI

SEQ ID NO: 3028 - protein, 566 aa, synthetic construct; identical to SEQ ID NO: 2669
  REGION 1..566: note = hemagglutinin__InfluenzaA__ACT33125

SEQ ID NO: 3029 - protein, 566 aa, synthetic construct
  REGION 1..566: note = hemagglutinin__InfluenzaA__ACT36505
MKAILVVLLYTFATANADTLCIGYHANNSTDTVDTVLEKNVTVTHSVNLLEDKHNGKLCKLRGVAPLHLGKCNIAGWILGNPECESLSTASSWSYIVETSSSDNGTCYPGDFIDYEELREQLSSVSSFERFEIFPKTSSWPNHDSNKGVTAACPHAGAKSFYKNLIWLVKKGNSYPKLSKSYINDKGKEVLVLWGIHHPSTSADQQSLYQNADAYVFVGTSRYSKKFKPEIAIRPKVRDQEGRMNYYWTLIEPGDKITFEATGNLVVPRYAFAMERNAGSGIIISDTPVHDCNTTCQTPKGAINTSLPFQNIHPITIGKCPKYVKSTKLRLATGLRNVPSIQSRGLFGAIAGFIEGGWTGMVDGWYGYHHQNEQGSGYAADLKSTQNAIDEITNKVNSVIEKMNTQFTAVGKEFNHLEKRIENLNKKVDDGFLDIWTYNAELLVLLENERTLDYHDSNVKNLYEKVRSQLKNNAKEIGNGCFEFYHKCDNTCMESVKNGTYDYPKYSEEAKLNREEIDGVKLESTRIYQILAIYSTVASSLVLVVSLGAISFWMCSNGSLQCRICI

SEQ ID NO: 3030 - protein, 566 aa, synthetic construct
  REGION 1..566: note = hemagglutinin__InfluenzaA__ACT36649
MKAILVVLLYTFATANADTLCIGYHANNSTDTVDTVLEKNVTVTHSVNLLEDKHNGKLCKLRGVAPLHLGKCNIAGWILGNPECESLSTARSWSYIVETSSSDNGTCYPGDFIDYEELREQLNSVSSFERFEIFPKTSSWPNHDSNKGVTAACPHAGAKSFYKNLIWLVKKGNSYPKLSKSYINDKGKEVLVLWGIHHPSTSADQQSLYQNADAYVFVGSSRYSKKFKPEIAIRPKVRDQEGRMNYYWTLVEPGDKITFEATGNLVVPRYAFAMERNAGSGIIISDTPVHDCNTTCQTPKGAINTSLPFQNIHPITIGKCPKYVKSTKLRLATGLRNVPSIQSRGLFGAIAGFIEGGWTGMVDGWYGYHHQNEQGSGYAADLKSTQNAIDEITNKVNSVIEKMNTQFTAVGKEFNHLEKRIENLNKKVDDGFLDIWTYNAELLVLLENERTLDYHDSNVKSLYEKVRSQLKNNAKEIGNGCFEFYHKCDNTCMESVKNGTYDYPKYSEEAKLNREEIDGVKLESTRIYQILAIYSTVASSLVLVVSLGAISFWMCSNGSLQCRICI

SEQ ID NO: 3031 - protein, 566 aa, synthetic construct; identical to SEQ ID NO: 2669
  REGION 1..566: note = hemagglutinin__InfluenzaA__ACT36650

SEQ ID NO: 3032 - protein, 566 aa, synthetic construct; identical to SEQ ID NO: 2669
  REGION 1..566: note = hemagglutinin__InfluenzaA__ACT36652

SEQ ID NO: 3033 - protein, 566 aa, synthetic construct; identical to SEQ ID NO: 2667
  REGION 1..566: note = hemagglutinin__InfluenzaA__ACT36653

SEQ ID NO: 3034 - protein, 566 aa, synthetic construct
  REGION 1..566: note = hemagglutinin__InfluenzaA__ACT36655
MKAILVVLLYTFATANADTLCIGYHANNSTDTVDTVLEKNVTVTHSVNLLEDKHNGKLCKLRGVAPLHLGKCNIAGWILGNPECESLSTASSWSYIVETSSSGNGTCYPGDFIDYEELREQLSSVSSFERFEIFPKTSSWPNHDSNKGVTAACPHAGAKSFYKNLIWLVKKGNSYPKLSKSYINDKGKEVLVLWGIHHPSTSADQQSLYQNADAYVFVGSSRYSKKFKPEIAIRPKVRDQEGRMNYYWTLVEPGDKITFEATGNLVVPRYAFAMERNAGSGIIISDTPVHDCNTTCQTPKGAINTSLPFQNIHPITIGKCPKYVKSTKLRLATGLRNVPSIQSRGLFGAIAGFIEGGWTGMVDGWYGYHHQNEQGSGYAADLKSTQNAIDEITNKVNSVIEKMNTQFTAVGKEFNHLEKRIENLNKKVDDGFLDIWTYNAELLVLLENERTLDYHDSNVKNLYEKVRSQLKNNAKEIGNGCFEFYHKCDNTCMESVKNGTYDYPKYSEEAKLNREEIDGVKLESTRIYQILAIYSTVASSLVLVVSLGAISFWMCSNGSLQCRICI

SEQ ID NO: 3035 - protein, 566 aa, synthetic construct; identical to SEQ ID NO: 2656
  REGION 1..566: note = hemagglutinin__InfluenzaA__ACT36658

SEQ ID NO: 3036 - protein, 566 aa, synthetic construct; identical to SEQ ID NO: 2695
  REGION 1..566: note = hemagglutinin__InfluenzaA__ACT36659

SEQ ID NO: 3037 - protein, 566 aa, synthetic construct; identical to SEQ ID NO: 2656
  REGION 1..566: note = hemagglutinin__InfluenzaA__ACT36661

SEQ ID NO: 3038 - protein, 566 aa, synthetic construct; identical to SEQ ID NO: 2669
  REGION 1..566: note = hemagglutinin__InfluenzaA__ACT36663

SEQ ID NO: 3039 - protein, 566 aa, synthetic construct; identical to SEQ ID NO: 2669
  REGION 1..566: note = hemagglutinin__InfluenzaA__ACT36666

SEQ ID NO: 3040 - protein, 566 aa, synthetic construct
  REGION 1..566: note = hemagglutinin__InfluenzaA__ACT52687
MKAILVVLLYTFATANADTLCIGYHANNSTDTVDTVLEKNVTVTHSVNLLEDKHNGKLCKLRGVAPLHLGKCNIAGWILGNPECESLSTASSWSYIVETSSSDNGTCYPGDFIDYEELREQLSSVSSFERFEIFPKTSSWPNHDSNKGVTAACPHAGAKSFYKNLIWLVKKGNSYPKLSKSYINDKGKEVLVLWGIHHPSTSADQQSLYQNADAYVFVGSSRYSKKFKPEIAIRPKVRGQEGRMNYYWTLVEPGDKITFEATGNLVVPRYAFAMERNAGSGIIISDTPVHDCNTTCQTPKGAINTSLPFQNIHPITIGKCPKYVKSTKLRLATGLRNVPSIQSRGLFGAIAGFIEGGWTGMVDGWYGYHHQNEQGSGYAADLKSTQNAIDEITNKVNSVIEKMNTQFTAVGKEFNHLEKRIENLNKKVDDGFLDIWTYNAELLVLLENERTLDYHDSNVKNLYEKVRSQLKNNAKEIGNGCFEFYHKCDNTCMESVKNGTYDYPKYSEEAKLNREEIDGVKLESTRFYQILAIYSTVASSLVLVVSLGAISFWMCSNGSLQCRICI

SEQ ID NO: 3041 - protein, 566 aa, synthetic construct; identical to SEQ ID NO: 2656
  REGION 1..566: note = hemagglutinin__InfluenzaA__ACT54606

SEQ ID NO: 3042 - protein, 566 aa, synthetic construct; identical to SEQ ID NO: 2669
  REGION 1..566: note = hemagglutinin__InfluenzaA__ACT66146

SEQ ID NO: 3043 - protein, 566 aa, synthetic construct; identical to SEQ ID NO: 2911
  REGION 1..566: note = hemagglutinin__InfluenzaA__ACT66155

SEQ ID NO: 3044 - protein, 566 aa, synthetic construct
  REGION 1..566: note = hemagglutinin__InfluenzaA__ACT66162
MEAILVVLLYTFATANADTLCIGYHANNSTDTVDTVLEKNVTVTHSVNLLEDKHNGKLCKLRGVAPLHLGKCNIAGWILGNPECESLSTASSWSYIVETSSSDNGTCYPGDFIDYEELREHLSSVSSFERFEIFPKTSSWPNHDSNKGVTAACPHAGAKSFYKNLIWLVKKGNSYPKLSKSYINDKGKEVLVLWGIHHPSTSADQQSLYQNADAYVFVGSSRYSKKFKPEIAIRPKVRDQEGRMNYYWTLVEPGDKITFEATGNLVVPRYAFAMERNAGSGIIISDTPVHDCNTTCQTPKGAINTSLPFQNIHPITIGKCPKYVKSTKLRLATGLRNVPSIQSRGLFGAIAGFIEGGWTGMVDGWYGYHHQNEQGSGYAADLKSTQNAIDEITNKVNSVIEKMNTQFTAVGKEFNHLEKRIENLNKKVDDGFLDIWTYNAELLVLLENERTLDYHDSNVKNLYEKVRSQLKNNAKEIGNGCFEFYHKCDNTCMESVKNGTYDYPKYSEEAKLNREEIDGVKLESTRIYQILAIYSTVASSLVLVVSLGAISFWMCSNGSLQCRICI

SEQ ID NO: 3045 - protein, 566 aa, synthetic construct; identical to SEQ ID NO: 2669
  REGION 1..566: note = hemagglutinin__InfluenzaA__ACT67239

SEQ ID NO: 3046 - protein, 566 aa, synthetic construct; identical to SEQ ID NO: 2669
  REGION 1..566: note = hemagglutinin__InfluenzaA__ACT67255

SEQ ID NO: 3047 - protein, 566 aa, synthetic construct; identical to SEQ ID NO: 2656
  REGION 1..566: note = hemagglutinin__InfluenzaA__ACT68102

SEQ ID NO: 3048 - protein, 566 aa, synthetic construct
  REGION 1..566: note = hemagglutinin__InfluenzaA__ACT68103
MKAILVVLLYTFATANADTLCIGYHANNSTDTVDTVLEKNVTVTHSVNLLEDKHNGKLCKLRGVAPLHLGKCNIAGWILGNPECESLSTASSWSYIVETSSSDNGTCYPGDFIDYEELREQLSSVSSFERFEIFPKTSSWPNHDSNKGVTAACPHAGAKSFYKNLIWLVKKGNSYPKLSKSYINDKGKEVLVLWGIHHPSTSADQQSLYQNADAYVFVGSSRYSKKFKPEIAIRPKVRDQEGRMNYYWTLVEPGDKITFEATGNLVVPRYAFAMERNAGSGIIISDTPVHDCNTTCQTLKGAINTSLPFQNIHPITIGKCPKYVKSTKLRLATGLRNVPSIQSRGLFGAIAGFIEGGWTGMVDGWYGYHHQNEQGSGYAADLKSTQNAIDEITNKVNSVIEKMNTQFTAVGKEFNHLEKRIENLNKKVDDGFLDIWTYNAELLVLLENERTLDYHDSNVKNLYEKVRSQLKNNAKEIGNGCFEFYHKCDNTCMESVKNGTYDYPKYSEEAKLNREEIDGVKLESTRIYQILAIYSTVASSLVLVVSLGAISFWMCSNGSLQCRICI

SEQ ID NO: 3049 - protein, 566 aa, synthetic construct; identical to SEQ ID NO: 2656
  REGION 1..566: note = hemagglutinin__InfluenzaA__ACT68104

SEQ ID NO: 3050 - protein, 566 aa, synthetic construct
  REGION 1..566: note = hemagglutinin__InfluenzaA__ACT68105
MKAILVVLLYTFATANADTLCIGYHANNSTDTVDTVLEKNVTVTHSVNLLEDKHNGKLCKLRGVAPLHLGKCNIAGWILGNPECESLSTASSWSYIVETSSSDNGTCYPGDFIDYEELREQLSSVSSFERFEIFPKTSSWPNHDSNKGVTAACPHAGAKSFYKNLIWLVKKGNSYPKLSKSYINDKGKEVLVLWGIHHPSTSADQQSLYQNADAYVFVGSSKYSKKFKPEIAIRPKVRDQEGRMNYYWTLVEPGDKITFEATGNLVVPRYAFAMERNAGSGIIISDTPVHDCNTTCQTPKGAINTSLPFQNIHPITIGKCPKYVKSTKLRLATGLRNVPSIQSRGLFGAIAGFIEGGWTGMVDGWYGYHHQNEQGSGYAADLKSTQNAIDEITNKVNSVIEKMNTQFTAVGKEFNHLEKRIENLNKKVDDGFLDIWTYNAELLVLLENERTLDYHDSNVKNLYEKVRSQLKNNAKEIGNGCFEFYHKCDNTCMESVKNGTYDYPKYSGEAKLNREEIDGVKLESTRIYQILAIYSTVASSLVLVVSLGAISFWMCSNGSLQCRICI

SEQ ID NO: 3051 - protein, 566 aa, synthetic construct; identical to SEQ ID NO: 2656
  REGION 1..566: note = hemagglutinin__InfluenzaA__ACT68106

SEQ ID NO: 3052 - protein, 566 aa, synthetic construct; identical to SEQ ID NO: 2656
  REGION 1..566: note = hemagglutinin__InfluenzaA__ACT68107

SEQ ID NO: 3053 - protein, 566 aa, synthetic construct; identical to SEQ ID NO: 2849
  REGION 1..566: note = hemagglutinin__InfluenzaA__ACT68108

SEQ ID NO: 3054 - protein, 566 aa, synthetic construct
  REGION 1..566: note = hemagglutinin__InfluenzaA__ACT68109
MKAILVVLLYTFATANTDTLCIGYHANNSTDTVDTVLEKNVTVTHSVNLLEDKHNGKLCKLRGVAPLHLGKCNIAGWILGNPECESLSTASSWSYIVETSSSDNGTCYPGDFIDYEELREQLSSVSSFERFEIFPKTSSWPNHDSNKGVTAACPHAGAKSFYKNLIWLVKKGNSYPKLSKSYINDKGKEVLVLWGIHHPSTSADQQSLYQNADAYVFVGTSRYSKKFKPEIAIRPKVRDQEGRMNYYWTLVEPGDKITFEATGNLVVPRYAFAMERNAGSGIIISDTPVHDCNTTCQTPKGAINTSLPFQNIHPITIGKCPKYVKSTKLRLATGLRNVPSIQSRGLFGAIAGFIEGGWTGMVDGWYGYHHQNEQGSGYAADLKSTQNAIDEITNKVNSVIEKMNTQFTAVGKEFNHLEKRIENLNKKVDDGFLDIWTYNAELLVLLENERTLDYHDSNVKNLYEKVRSQLKNNAKEIGNGCFEFYHKCDNTCMESVKNGTYDYPKYSEEAKLNREEIDGVKLESTRIYQILAIYSTVASSLVLVVSLGAISFWMCSNGSLQCRICI

SEQ ID NO: 3055 - protein, 566 aa, synthetic construct; identical to SEQ ID NO: 2656
  REGION 1..566: note = hemagglutinin__InfluenzaA__ACT68110

SEQ ID NO: 3056 - protein, 566 aa, synthetic construct; identical to SEQ ID NO: 2656
  REGION 1..566: note = hemagglutinin__InfluenzaA__ACT68112

SEQ ID NO: 3057 - protein, 566 aa, synthetic construct; identical to SEQ ID NO: 2656
  REGION 1..566: note = hemagglutinin__InfluenzaA__ACT68113

SEQ ID NO: 3058 - protein, 566 aa, synthetic construct; identical to SEQ ID NO: 2656
  REGION 1..566: note = hemagglutinin__InfluenzaA__ACT68115

SEQ ID NO: 3059 - protein, 566 aa, synthetic construct; identical to SEQ ID NO: 2656
  REGION 1..566: note = hemagglutinin__InfluenzaA__ACT68119

SEQ ID NO: 3060 - protein, 566 aa, synthetic construct
  REGION 1..566: note = hemagglutinin__InfluenzaA__ACT79133
MKAILVVLLYTFATANADTLCIGYHANNSTDTVDTVLEKNVTVTHSVNLLEDKHNGKLCKLRGVAPLHLGKCNIAGWILGNPECESLSTASSWSYIVETSSSDNGTCYPGDFIDYEELREQLSSVSSFERFEIFPKTSSWPNHDSNKGVTAACPHAGAKSFYKNLIWLVKKGNSYPKLSKSYINDKGKEVLVLWGIHHPSTSADQQSLYQNADAYVFVGTSRYSKKFKPEIAIRPKVRDQEGRMNYYWKLVEPGDKITFEATGNLVVPRYAFAMERNAGSGIIISDTPVHDCNTTCQTPKGAINTSLPFQNIHPITIGKCPKYVKSTKLRLATGLRNVPSIQSRGLFGAIAGFIEGGWTGMVDGWYGYHHQNEQGSGYAADLKSTQNAIDEITNKVNSVIEKMNTQFTAVGKEFNHLEKRIENLNKKVDDGFLDIWTYNAELLVLLENERTLDYHDSNVKNLYEKVRSQLKNNAKEIGNGCFEFYHKCDNTCMESVKNGTYDYPKYSEEAKLNREEIDGVKLESTRIYQILAIYSTVASSLVLVVSLGAISFWMCSNGSLQCRICI

SEQ ID NO: 3061 - protein, 566 aa, synthetic construct; identical to SEQ ID NO: 2656
  REGION 1..566: note = hemagglutinin__InfluenzaA__ACT79143

SEQ ID NO: 3062 - protein, 566 aa, synthetic construct; identical to SEQ ID NO: 2695
  REGION 1..566: note = hemagglutinin__InfluenzaA__ACT79153

SEQ ID NO: 3063 - protein, 566 aa, synthetic construct; identical to SEQ ID NO: 2982
  REGION 1..566: note = hemagglutinin__InfluenzaA__ACT79163

SEQ ID NO: 3064 - protein, 566 aa, synthetic construct; identical to SEQ ID NO: 2982
  REGION 1..566: note = hemagglutinin__InfluenzaA__ACT79173

SEQ ID NO: 3065 - protein, 566 aa, synthetic construct
  REGION 1..566: note = hemagglutinin__InfluenzaA__ACT79625
MKAILVVLLYTFATANADTLCIGYHANNSTDTVDTVLEKNVTVTHSVNLLEDKHNGKLCKLRGVAPLHLGKCNIAGWILGNPECESLSTASSWSYIVETSSSDNGTCYPGDFIDYEELREQLSSVSSFERFEIFPKTSSWPNHDSNKGVTTACPHAGAKSFYKNLIWLVKKGNSYPKLSKSYINDKGKEVLVLWGIHHPSTSADQQSLYQNADAYVFVGTSRYSKKFKPEIAIRPKVRDQEGRMNYYWTLVEPGDKITFEATGNLVVPRYAFAMERNAGSGIIISDTPVHDCNTTCQTPKGAINTSLPFQNIHPITIGKCPKYVKSTKLRLATGLRNVPSIQSRGLFGAIAGFIEGGWTGMVDGWYGYHHQNEQGSGYAADLKSTQNAIDEITNKVNSVIEKMNTQFTAVGKEFNHLEKRIENLNKKIDDGFLDIWTYNAELLVLLKNERTLDYHDSNVKNLYEKVRSQLKNNAKEIGNGCFEFYHKCDNTCMESVKNGTYDYPKYSEEAKLNREEIDGVKLESTRIYQILAIYSTVASSLVLVVSLGAISFWMCSNGSLQCRICI

SEQ ID NO: 3066 - protein, 566 aa, synthetic construct; identical to SEQ ID NO: 2656
  REGION 1..566: note = hemagglutinin__InfluenzaA__ACT79627

SEQ ID NO: 3067 - protein, 566 aa, synthetic construct
  REGION 1..566: note = hemagglutinin__InfluenzaA__ACT82512
MKAILVVLLYTFATANADTLCIGYHANNSTDTVDTVLEKNVTVTHSVNLLEDKHNGKLCKLRGVAPLHLGKCNIAGWILGNPECESLSTASSWSYIVETSSSDNGTCYPGDFIDYEELREQLSSVSSFERFEIFPKTSSWPNHDSNKGVTAACPHAGAKSFYKNLIWLVKKGNSYPKLSKSYINDKGKEVLVLWGIHHPSTSADQQSLYQNADAYVFVGTSRYSKKFKPEIAIRPKVRDQEGRMNYYWTLVEPGDKITFEATGNLVVPRYAFAMERNAGSGIIISDTPVHDCNTTCQTPKGAINTSLPFQNIHPITIGKCPKYVKSTKLRLATGLRNVPSIQSRGLFGAIAGFIEGGWTGMVDGWYGYHHQNEQGSGYAADLKSTQNAIDEITNKVNSVIEKMNTQFTAVGKEFNHLEKRIENLNKKVDDGFLDIWTYNAELLVLLENERTLDYHDSNVKNLYEKVRSQFKNNAKEIGNGCFEFYHKCDNTCMESVKNGTYDYPKYSEEAKLNREEIDGVKLESTRIYQILAIYSTVASSLVLVVSLGAISFWMCSNGSLQCRICI

SEQ ID NO: 3068 - protein, 566 aa, synthetic construct; identical to SEQ ID NO: 2669
  REGION 1..566: note = hemagglutinin__InfluenzaA__ACT82513

SEQ ID NO: 3069 - protein, 566 aa, synthetic construct
  REGION 1..566: note = hemagglutinin__InfluenzaA__ACT82514
MKAILVVLLYTFATANADTLCIGYHANNSTDTVDTVLEKNVTVTHSVNLLEDKHNGKLCKLRGVAPLHLGKCNIAGWILGNPECESLSTASSWSYIVETSSSDNGTCYPGDFIDYEELREQLSSVSSFERFEIFPKTSSWPNHDSNKGVTAACPHAGAKSFYKNLIWLVKKGNSYPKLSKSYINDKGKEVLVLWGIHHPSTSADQQSLYQNADAYVFVGTSRYSKKFKPEIAIRPKVRDQEGRMNYYWTLVEPGDKITFEATGNLVVPRYAFAMERNAGSGIIISNTPVHDCNTTCQTPKGSINTSLPFQNIHPITIGKCPKYVKSTKLRLATGLRNVPSIQSRGLFGAIAGFIEGGWTGMVDGWYGYHHQNEQGSGYAADLKSTQNAIDEITNKVNSVIEKMNTQFTAVGKEFNHLEKRIENLNKKVDDGFLDIWTYNAELLVLLENERTLDYHDSNVKNLYEKVRSQLKNNAKEIGNGCFEFYHKCDNTCMESVKNGTYDYPKYSEEAKLNREEIDGVKLESTRIYQILAIYSTVASSLVLVVSLGAISFWMCSNGSLQCRICI

SEQ ID NO: 3070 - protein, 566 aa, synthetic construct; identical to SEQ ID NO: 2669
  REGION 1..566: note = hemagglutinin__InfluenzaA__ACT82515

SEQ ID NO: 3071 - protein, 566 aa, synthetic construct
  REGION 1..566: note = hemagglutinin__InfluenzaA__ACT82516
MKAILVVLLYTFATANADTLCIGYHANNSTDTVDTVLEKNVTVTHSVNLLEDKHNGKLCKLRGVAPLHLGKCNIAGWILGNPECESLSTASSWSYIVETSSSDNGTCYPGDFIDYEELREQLSSVSSFERFEIFPKTSSWPNHDSNKGVTAACPHAGAKSFYKNLIWLVKKGNSYPKLSKSYINDKGKEVLVLWGIHHPSTSADQQSLYQNADAYVFVGSSRYSKKFKPEIAIRPKVRDQEGRMNYYWTLVEPGDKITFEATGNLMVPRYAFAMERNAGSGIIISDTPVHDCNTTCQTPKGAINTSLPFHNIHPITIGKCPKYVKSTKLRLATGLRNVPSIQSRGLFGAIAGFIEGGWTGMVDGWYGYHHQNEQGSGYAADLKSTQNAIDEITNKVNSVIEKMNTQFTAVGKEFNHLEKRIENLNKKVDDGFLDIWTYNAELLVLLENERTLDYHDSNVKNLYEKVRSQLKNNAKEIGNGCFEFYHKCDNTCMESVKNGTYDYPKYSEEAKLNREEIDGVKLESTRIYQILAIYSTVASSLVLVVSLGAISFWMCSNGSLQCRICI

SEQ ID NO: 3072 - protein, 566 aa, synthetic construct; identical to SEQ ID NO: 2911
  REGION 1..566: note = hemagglutinin__InfluenzaA__ACT83795

SEQ ID NO: 3073 - protein, 566 aa, synthetic construct; identical to SEQ ID NO: 2911
  REGION 1..566: note = hemagglutinin__InfluenzaA__ACT83805

SEQ ID NO: 3074 - protein, 566 aa, synthetic construct; identical to SEQ ID NO: 2669
  REGION 1..566: note = hemagglutinin__InfluenzaA__ACT83815

SEQ ID NO: 3075 - protein, 566 aa, synthetic construct; identical to SEQ ID NO: 2669
  REGION 1..566: note = hemagglutinin__InfluenzaA__ACT83825

SEQ ID NO: 3076 - protein, 566 aa, synthetic construct; identical to SEQ ID NO: 2669
  REGION 1..566: note = hemagglutinin__InfluenzaA__ACT83835

SEQ ID NO: 3077 - protein, 566 aa, synthetic construct; identical to SEQ ID NO: 2762
  REGION 1..566: note = hemagglutinin__InfluenzaA__ACT83845

SEQ ID NO: 3078 - protein, 566 aa, synthetic construct; identical to SEQ ID NO: 2656
  REGION 1..566: note = hemagglutinin__InfluenzaA__ACT83855

SEQ ID NO: 3079 - protein, 566 aa, synthetic construct; identical to SEQ ID NO: 2669
  REGION 1..566: note = hemagglutinin__InfluenzaA__ACT83865

SEQ ID NO: 3080 - protein, 566 aa, synthetic construct; identical to SEQ ID NO: 2911
  REGION 1..566: note = hemagglutinin__InfluenzaA__ACT83875

SEQ ID NO: 3081 - protein, 566 aa, synthetic construct; identical to SEQ ID NO: 2911
  REGION 1..566: note = hemagglutinin__InfluenzaA__ACT85999

SEQ ID NO: 3082 - protein, 566 aa, synthetic construct; identical to SEQ ID NO: 2911
  REGION 1..566: note = hemagglutinin__InfluenzaA__ACT86009

SEQ ID NO: 3083 - protein, 566 aa, synthetic construct; identical to SEQ ID NO: 2669
  REGION 1..566: note = hemagglutinin__InfluenzaA__ACT86019

SEQ ID NO: 3084 - protein, 566 aa, synthetic construct; identical to SEQ ID NO: 2762
  REGION 1..566: note = hemagglutinin__InfluenzaA__ACT86029

SEQ ID NO: 3085 - protein, 566 aa, synthetic construct; identical to SEQ ID NO: 2669
  REGION 1..566: note = hemagglutinin__InfluenzaA__ACT86039

SEQ ID NO: 3086 - protein, 566 aa, synthetic construct; identical to SEQ ID NO: 2669
  REGION 1..566: note = hemagglutinin__InfluenzaA__ACT86059

SEQ ID NO: 3087 - protein, 566 aa, synthetic construct; identical to SEQ ID NO: 2669
  REGION 1..566: note = hemagglutinin__InfluenzaA__ACT86069

SEQ ID NO: 3088 - protein, 566 aa, synthetic construct; identical to SEQ ID NO: 2669
  REGION 1..566: note = hemagglutinin__InfluenzaA__ACT86079

SEQ ID NO: 3089 - protein, 566 aa, synthetic construct; identical to SEQ ID NO: 2669
  REGION 1..566: note = hemagglutinin__InfluenzaA__ACT86089

SEQ ID NO: 3090 - protein, 566 aa, synthetic construct; identical to SEQ ID NO: 2669
  REGION 1..566: note = hemagglutinin__InfluenzaA__ACT86099

SEQ ID NO: 3091 - protein, 566 aa, synthetic construct; identical to SEQ ID NO: 2911
  REGION 1..566: note = hemagglutinin__InfluenzaA__ACT86109

SEQ ID NO: 3092 - protein, 566 aa, synthetic construct; identical to SEQ ID NO: 2669
  REGION 1..566: note = hemagglutinin__InfluenzaA__ACT86119

SEQ ID NO: 3093 - protein, 566 aa, synthetic construct; identical to SEQ ID NO: 2911
  REGION 1..566: note = hemagglutinin__InfluenzaA__ACT86129

SEQ ID NO: 3094 - protein, 566 aa, synthetic construct; identical to SEQ ID NO: 2669
  REGION 1..566: note = hemagglutinin__InfluenzaA__ACT86139

SEQ ID NO: 3095 - protein, 566 aa, synthetic construct
  REGION 1..566: note = hemagglutinin__InfluenzaA__ACU00932
MKAILVVLLYTFATANADTLCIGYHANNSTDTVDTVLEKNVTVTHSVNLLEDKHNGKLCKLRGVAPLHLGKCNIAGWILGNPECESLSTASSWSYIVETSSSDNGTCYPGDFIDYEELREQLSSVSSFERFEIFPKTSSWPNHDSNKGVTAACPHAGAKSFYKNLIWLVKKGNSYPKLSKSYINDKGKEVLVLWGIHHPSTSADQQSLYQNADAYVFVGTSRYSKNFKPEIAIRPKVRDQEGRMNYYWTLVEPGDKITFEATGNLVVPRYAFAMERNAGSGIIISDTPVHDCNTTCQTPKGAINTSLPFQNIHPITIGKCPKYVKSTKLRLATGLRNVPSIQSRGLFGAIAGFIEGGWTGMVDGWYGYHHQNEQGSGYAADLKSTQNAIDEITNKVNSVIEKMNTQFTAVGKEFNHLEKRIENLNKKVDDGFLDIWTYNAELLVLLENERTLDYHDSNVKNLYEKVRSQLKNNAKEIGNGCFEFYHKCDNTCMESVKNGTYDYPKYSEEAKLNREEIDGVKLESTRIYQILAIYSTVASSLVLVVSLGAISFWMCSNGSLQCRICI

SEQ ID NO: 3096 - protein, 566 aa, synthetic construct; identical to SEQ ID NO: 2669
  REGION 1..566: note = hemagglutinin__InfluenzaA__ACU00942

SEQ ID NO: 3097 - protein, 566 aa, synthetic construct; identical to SEQ ID NO: 2669
  REGION 1..566: note = hemagglutinin__InfluenzaA__ACU00952

SEQ ID NO: 3098 - protein, 566 aa, synthetic construct
  REGION 1..566: note = hemagglutinin__InfluenzaA__ACU12494
MKTIIALSYILCLVFAQKLPGNDNSTATLCLGHHAVPNGTLVKTITNDQIEVTNATELVQSSSTGRICDSPHRILDGKNCTLIDALLGDPHCDGFQNKEWDLFVERSKAYSNCYPYDVPDYASLRSLVASSGTLEFINEDFNWTGVAQSGESYACKRGSVKSFFSRLNWLHESDYKYPALNVTMPNNGKFDKLYIWGVHHPITDREQTSLYVRASGRVTVSTKRSQQTVIPNIGSRPWVRGLSSRISIYWTIVKPGDILLINSTGNLIAPRGYFKIRTGKSSIMRSDAPIGTCSSECITPNGSIPNDKPFQNVNRITYGACPRYVKQNTLKLATGMRNVPEKQTRGIFGAIAGFIENGWEGMVDGWYGFRHQNSEGTGQAADLKSTQAAIDQINGKLNRLIEKTNEKFHQIEKEFSEVEGRIQDLEKYVEDTKIDLWSYNAELLVALENQHTIDLTDSEMNKLFEKTRKQLRENAEDMGNGCFKIYHKCDNACIGSIRNGTYDHDVYRDEALNNRFQIKGVELKSGYKDWILWISFAISCFLLCVVLLGFIMWACQKGNIRCNICI

SEQ ID NO: 3099 - protein, 565 aa, synthetic construct; identical to SEQ ID NO: 2781
  REGION 1..565: note = hemagglutinin__InfluenzaA__ACU12505

SEQ ID NO: 3100 - protein, 566 aa, synthetic construct
  REGION 1..566: note = hemagglutinin__InfluenzaA__ACU12516
MKTIIALSYILCLVFAQKLPGNDNSTATLCLGHHAVPNGTIVKTITNDQIEVTNATELVQSSSTGGICDSPHQILDGENCTLVDALLGDPQCDGFQNKKWDLFVERSKAYSNCYPYDVPDYASLRSLVASSGTLEFNNESFNWTGVTQNGTSSACKRRSNNSFFSRLNWLTHLKFKYPALNVTMPNNEKFDKLYIWGVHHPGTDNDQISLYAQASGRITVSTKRSQQTVIPNIGSRPRVRDISSRISIYWTIVKPGDILLINSTGNLIAPRGYFKIRSGKSSIMRSDAPIGKCNSECITPNGSIPNDKPFQNVNRITYGACPRYVKQNTLKLATGMRNVPETQTRGIFGAIAGFIENGWEGMVDGWYGFRHQNSEGTGQAADLKSTQAAINQINGKLNRLIGKTNEKFHQIEKEFSEVEGRIQDLEKYVEDTKIDLWSYNAELLVALENQHTIDLTDSEMNKLFERTKKQLRENAEDMGNGCFKIYHKCDNACIGSIRNGTYDHDVYRDEALNNRFQIKGVELKSGYKDWILWISFAISCFLLCVALLGFIMWACQKGNIRCNICI

SEQ ID NO: 3101 - protein, 566 aa, synthetic construct; identical to SEQ ID NO: 630
  REGION 1..566: note = hemagglutinin__InfluenzaA__ACU12527

SEQ ID NO: 3102 - protein, 566 aa, synthetic construct; identical to SEQ ID NO: 2372
  REGION 1..566: note = hemagglutinin__InfluenzaA__ACU12538

SEQ ID NO: 3103 - protein, 566 aa, synthetic construct; identical to SEQ ID NO: 1568
  REGION 1..566: note = hemagglutinin__InfluenzaA__ACU12549

SEQ ID NO: 3104 - protein, 565 aa, synthetic construct
  REGION 1..565: note = hemagglutinin__InfluenzaA__ACU12560
MKVKLLVLLCTFTATYADTICIGYHANNSTDTVDTVLEKNVTVTHSVNLLENSHNGKLCLLKGIAPLQLGNCSVAGWILGNPECELLISKESWSYIVEKPNPENGTCYPGHFADYEELREQLSSVSSFERFEIFPKESSWPNHTVTGVSASCSHNGESSFYRNLLWLTGKNGLYPNLSKSYANNKGKEVLVLWGVHHPPNIGDQNTLYHTENAYVSVVSSHYSRKFTPEIAKRPKVRDQEGRINYYWTLLEPGDTIIFEANGNLIAPRYAFALSRGFGSGIINSNVPMDKCDAKCQTPQGAINSSLPFQNVHPVTIGECPKYVRSAKLRMVTGLRNIPSIQSRGLFGAIAGFIEGGWTGMVDGWYGYHHQNEQGSGYAADQKSTQNAINGITNKVNSVIEKMNTQFTAVGKEFNKLERRMENLNKKVDDGFIDIWTYNAELLVLLENERTLDFHDSNVKNLYEKVKSQLKNNAKEIGNGCFEFYHKCNDECMESVKNGTYDYPKYSEESKLNREKIDGVKLESMGVYQILAIYSTVASSLVLLVSLGAISFWMCSNGSLQCRICI

SEQ ID NO: 3105 - protein, 565 aa, synthetic construct; identical to SEQ ID NO: 2488
  REGION 1..565: note = hemagglutinin__InfluenzaA__ACU12571

SEQ ID NO: 3106 - protein, 565 aa, synthetic construct
  REGION 1..565: note = hemagglutinin__InfluenzaA__ACU12582
MKVKLLVLLCTFTATYADTICIGYHANNSTDTVDTVLEKNVTVTHSVNLLENSHNGKLCLLKGIAPLQLGNCSVAGWILGNPECELLISKESWSYIVEKPNPENGTCYPGRFADYEELREQLSSVSSFERFEIFPKESSWPNHTVTGVSASCSHNGESSFYRNLLWLTGKNGLYPNLSKSYANNKGKEVLVLWGVHHPPNIGDQNTLYHTENAYVSVVSSHYSRKFTPEIAKRPKVRDQEGRINYYWTLLEPGDTIIFEANGNLIAPRYAFALSRGFGSGIINSNAPMDKCDAKCQTPQGAINSSLPFQNVHPVTIGECPKYVRSAKLRMVTGLRNIPSIQSRGLFGAIAGFIEGGWTGMVDGWYGYHHQNEQGSGYAADQKSTQNAINGITNKVNSVIEKMNTQFTAVGKEFNKLERRMENLNKKVDDGFIDIWTYNAELLVLLENERTLDFHDSNVKNLYEKVKSQLKNNAKEIGNGCFEFYHKCNDECMESVKNGTYDYPKYSEESKLNREKIDGVKLESMGVYQILAIYSTVASSLVLLVSLGAISFWMCSNGSLQCRICI

SEQ ID NO: 3107 - protein, 565 aa, synthetic construct
  REGION 1..565: note = hemagglutinin__InfluenzaA__ACU12593
MKVKLLVLLCTFTATYADTICIGYHANNSTDTVDTVLEKNVTVTHSVNLLENSHNGKLCLLKGIAPLQLGNCSVAGWILGNPECELLISKESWSYIVEKPNPENGTCYPGHFADYEELREQLSSVSSFERFEIFPKESSWPNHTVTGVSASCSHNGESSFYRNLLWLTGKNGLYPNLSKSYANNKEKEVLVLWGVHHPPNIVDQKTLYRTENAYVSVVSSHYSRKFTPEIAKRPKVRDQEGRINYYWTLLEPGDTIIFEANGNLIAPRYAFALSRGFGSGIINSNAPMDKCDAKCQTPQGAINSSLPFQNVHPVTIGECPKYVRSAKLRMVTGLRNIPSIQSRGLFGAIAGFIEGGWTGMVDGWYGYHHQNEQGSGYAADQKSTQNAIDGITNKVNSVIEKMNTQFTAVGKEFNKLERRMENLNKKVDDGFIDIWTYNAELLVLLENERTLDFHDSNVKNLYEKVKSQLKNNAKEIGNGCFEFYHKCNDECMESVKNGTYDYPKYSEESKLNREKIDGIKLESMGVYQILAIYSTVASSLVLLVSLGAISFWMCSNGSLQCRICI

SEQ ID NO: 3108 - protein, 566 aa, synthetic construct; identical to SEQ ID NO: 2669
  REGION 1..566: note = hemagglutinin__InfluenzaA__ACU13090

SEQ ID NO: 3109 - protein, 566 aa, synthetic construct; identical to SEQ ID NO: 2669
  REGION 1..566: note = hemagglutinin__InfluenzaA__ACU13091

SEQ ID NO: 3110 - protein, 566 aa, synthetic construct; identical to SEQ ID NO: 2669
  REGION 1..566: note = hemagglutinin__InfluenzaA__ACU13092

SEQ ID NO: 3111 - protein, 566 aa, synthetic construct; identical to SEQ ID NO: 2669
  REGION 1..566: note = hemagglutinin__InfluenzaA__ACU13093

SEQ ID NO: 3112 - protein, 566 aa, synthetic construct
  REGION 1..566: note = hemagglutinin__InfluenzaA__ACU13094
MKAILVVLLYTFATANADTLCIGYHANNSTDTVDTVLEKNVTVTHSVNLLEDKHNGKLCKLRGVAPLHLGKCNIAGWILGNPECESLSTASSWSYIVETSSSDNGTCYPGDFIDYEELREQLSSVSSFERFEIFPKTSSWPNHDSNKGVTAACPHAGAKSFYKNLIWLVKKGNSYPKLSKSYINDKGKEVLVLWGIHHPSTSADQQSLYQNADAYVFVGSSRYSKKFKPEIAIRPKVRGQEGRMNYYWTLVEPGDKITFEATGNLVVPRYAFAMERNAGSGIIISDTPVHDCNTTCQTPKGAINTSLPFQNIHPITIGKCPKYVKSTKLRLATGLRNVPSIQSRGLFGAIAGFIEGGWTGMVDGWYGYHHQNEQGSGYAADLKSTQNAIDEITNKVNSVIEKMNTQFTAVGKEFNHLEKRIENLNKKVDDGFLDIWTYNAELLVLLENERTLDYHDSNVKNLYEKVRSQLKNNAKEIGNGCFEFYHKCDNTCMESVKNGTYDYPKYSEEAKLNREEIDGVKLESTRIYQILAIYSTVASSLVLVVSLGAISFWMCSNGSLQCRICI

SEQ ID NO: 3113 - protein, 566 aa, synthetic construct; identical to SEQ ID NO: 2669
  REGION 1..566: note = hemagglutinin__InfluenzaA__ACU13095

SEQ ID NO: 3114 - protein, 566 aa, synthetic construct
  REGION 1..566: note = hemagglutinin__InfluenzaA__ACU13096
MKAILVVLLHTFATANADTLCIGYHANNSTDTVDTVLEKNVTVTHSVNLLEDKHNGKLCKLRGVAPLHLGKCNIAGWILGNPECESLSTASSWSYIVETSSSDNGTCYPGDFIDYEELREQLSSVSSFERFEIFPKTSSWPNHDSNKGVTAACPHAGAKSFYKNLIWLVKKGNSYPKLSKSYINDKGKEVLVLWGIHHPSTSADQQSLYQNADAYVFVGSSRYSKKFKPEIAIRPKVRDQEGRMNYYWTLVEPGDKITFEATGNLVVPRYAFAMERNAGSGIIISDTPVHDCNTTCQTPKGAINTSLPFQNIHPITIGKCPKYVKSTKLRLATGLRNVPSIQSRGLFGAIAGFIEGGWTGMVDGWYGYHHQNEQGSGYAADLKSTQNAIDEITNKVNSVIEKMNTQFTAVGKEFNHLEKRIENLNKKVDDGFLDIWTYNAELLVLLENERTLDYHDSNVKNLYEKVRSQLKNNAKEIGNGCFEFYHKCDNTCMESVKNGTYDYPKYSEEAKLNREEIDGVTLESTRIYQILAIYSTVASSLVLVVSLGAISFWMCSNGSLQCRICI

SEQ ID NO: 3115 - protein, 566 aa, synthetic construct; identical to SEQ ID NO: 2669
  REGION 1..566: note = hemagglutinin__InfluenzaA__ACU13098

SEQ ID NO: 3116 - protein, 566 aa, synthetic construct
  REGION 1..566: note = hemagglutinin__InfluenzaA__ACU13099
MKAILVVLLYTFATANADTLCIGYHANNSTDTVDTVLEKNVTVTHSVNLLEDKHNGKLCKLRGVAPLHLGKCNIAGWILGNPECESLSTASSWSYIVETSSSDNGTCYPGDFIDYEELREQLSSVSSFERFEIFPKTSSWPNHDSNKGVTAACPHAGAKSFYKNLIWLVKKGNSYPKLSKSYINDKGKEVLVLWGIHHPSTSADQQSLYQNADAYVFVGTSRYSKKFKPEIAIRPKVREQEGRMNYYWTLVEPGDKITFEATGNLVVPRYAFAMERNAGSGIIISDTPVHDCNTTCQTPKGAINTSLPFQNIHSITIGKCPKYVKSTKLRLATGLRNVPSIQSRGLFGAIAGFIEGGWTGMVDGWYGYHHQNEQGSGYAADLKSTQNAIDEITNKVNSVIEKMNTQFTAVGKEFNHLEKRIENLNKKVDDGFLDIWTYNAELLVLLENERTLDYHDSNVKNLYEKVRSQLKNNAKEIGNGCFEFYHKCDNTCMESVKNGTYDYPKYSEEAKLNREEIDGVKLESTRIYQILAIYSTVASSLVLVVSLGAISFWMCSNGSLQCRICI

SEQ ID NO: 3117 - protein, 566 aa, synthetic construct
  REGION 1..566: note = hemagglutinin__InfluenzaA__ACU13129
MKAILVVLLYTFATANADTLCIGYHANNSTDTVDTVLEKNVTVTHSVNLLEDKHNGKLCKLRGVAPLHLGKCNIAGWILGNPECESLSTASSWSYIVETSSSDNGTCYPGDFIDYEELREQLSSVSSFERFEIFPKTSSWPNHDSNKGVTAACPHAGAKSFYKNLIWLVKKGNSYPKLSKSYINDKGKEVLVLWGIHHPSTSADQQSLYQNADAYVFVGTSRYSKKFKPEIAIRPKVREQEGRMNYYWTLVEPGDKITFEATGNLVVPRYAFAMERNAGSGIIISDTPVHDCNTTCQTPKGAINTSLPFQNIHPITIGKCPKYVKSTKLRLATGLRNVPSIQSRGLFGAIAGFIEGGWTGMVDGWYGYHHQNEQGSGYAADLKSTQNAIDEITNKVNSVIEKMNTQFTAVGEEFNHLEKRIENLNKKVDDGFLDIWTYNAELLVLLENERTLDYHDSNVKNLYEKVRSQLKNNAKEIGNGCFEFYHKCDNTCMESVKNGTYDYPKYSEEAKLNREEIDGVKLESTRIYQILAIYSTVASSLVLVVSLGAISFWMCSNGSLQCRICI

SEQ ID NO: 3118 - protein, 566 aa, synthetic construct; identical to SEQ ID NO: 2669
  REGION 1..566: note = hemagglutinin__InfluenzaA__ACU16795

SEQ ID NO: 3119 - protein, 566 aa, synthetic construct; identical to SEQ ID NO: 2669
  REGION 1..566: note = hemagglutinin__InfluenzaA__ACU16858

SEQ ID NO: 3120 - protein, 566 aa, synthetic construct; identical to SEQ ID NO: 2669
  REGION 1..566: note = hemagglutinin__InfluenzaA__ACU16930

SEQ ID NO: 3121 - protein, 566 aa, synthetic construct; identical to SEQ ID NO: 2669
  REGION 1..566: note = hemagglutinin__InfluenzaA__ACU16993

SEQ ID NO: 3122 - protein, 566 aa, synthetic construct; identical to SEQ ID NO: 2669
  REGION 1..566: note = hemagglutinin__InfluenzaA__ACU17059

SEQ ID NO: 3123 - protein, 566 aa, synthetic construct; identical to SEQ ID NO: 2669
  REGION 1..566: note = hemagglutinin__InfluenzaA__ACU17126

SEQ ID NO: 3124 - protein, 566 aa, synthetic construct; identical to SEQ ID NO: 2760
  REGION 1..566: note = hemagglutinin__InfluenzaA__ACU17187

SEQ ID NO: 3125 - protein, 566 aa, synthetic construct; identical to SEQ ID NO: 2669
  REGION 1..566: note = hemagglutinin__InfluenzaA__ACU17258

SEQ ID NO: 3126 - protein, 566 aa, synthetic construct
  REGION 1..566: note = hemagglutinin__InfluenzaA__ACU17389
MEAILVVLLYTFATANADTLCIGYHANNSTDTVDTVLEKNVTVTHSVNLLEDKHNGKLCKLRGVAPLHLGKCNIAGWILGNPECESLSTASSWSYIVETSSSDNGTCYPGDFIDYEELREQLSSVSSFERFEIFPKTSSWPNHDSNKGVTAACPHAGAKSFYKNLIWLVKKGNSYPKLSKSYINDKGKEVLVLWGIHHPSTSADQQSLYQNADAYVFVGSSRYSKKFKPEIAIRPKVRDQEGRMNYYWTLVEPGDKITFEATGNLVVPRYAFAMERNAGSGIIISDTPVHDCNTACQTPKGAINTSLPFHNIHPITIGKCPKYVKSTKLRLATGLRNVPSIQSRGLFGAIAGFIEGGWTGMVDGWYGYHHQNEQGSGYAADLKSTQNAIDEITNKVNSVIEKMNTQFTAVGKEFNHLEKRIENLNKKVDDGFLDIWTYNAELLVLLENERTLDYHDSNVKNLYEKVRSQLKNNAKEIGNGCFEFYHKCDNTCMESVKNGTYDYPKYSEEAKLNREEIDGVKLESTRIYQILAIYSTVASSLVLVVSLGAISFWMCSNGSLQCRICI

SEQ ID NO: 3127 - protein, 566 aa, synthetic construct; identical to SEQ ID NO: 2669
  REGION 1..566: note = hemagglutinin__InfluenzaA__ACU17450

SEQ ID NO: 3128 - protein, 566 aa, synthetic construct; identical to SEQ ID NO: 2669
  REGION 1..566: note = hemagglutinin__InfluenzaA__ACU17521

SEQ ID NO: 3129 - protein, 566 aa, synthetic construct; identical to SEQ ID NO: 2656
  REGION 1..566: note = hemagglutinin__InfluenzaA__ACU27041

SEQ ID NO: 3130 - protein, 565 aa, synthetic construct
  REGION 1..565: note = hemagglutinin__InfluenzaA__ACU27406
MKVKLLVLLCTFTATYADTICIGYHANNSTDTVDTVLEKNVTVTHSVNLLENSHNGKLCLLKGIAPLQLGNCSVAGWILGNPECELLISKESWSYIVEKPNPENGTCYPGHFADYEELREQLSSVSSFERFEIFPKESSWPNHTVTGVSASCSHNGESSFYRNLLWLTGKNGLYPNLSKSYANNKEKEVLVLWGVHHPPNIVDQKTLYRTENAYVSVVSSHYSRKFTPEIAKRPKIRDQEGRINYYWTLLEPGDTIIFEANGNLIAPRYAFALSRGFGSGIINSNAPMDKCDAKCQTPQGAINSSLPFQNVHPVTIGECPKYVRSAKLRMVTGLRNIPSIQSRGLFGAIAGFIEGGWTGMVDGWYGYHHQNEQGSGYAADQKSTQNAINGITNKVNSVIERMNTQFTAVGKEFNKLERRMENLNKKVDDGFIDIWTYNAELLVLLENERTLDFHDSNVKNLYEKVKSQLKNNAKEIGNGCFEFYHKCNDECMESVKNGTYDYPKYSEESKLNREKIDGVKLESMGVYQILAIYSTVASSLVLLVSLGAISFWMCSNGSLQCRICI

SEQ ID NO: 3131 - protein, 565 aa, synthetic construct
  REGION 1..565: note = hemagglutinin__InfluenzaA__ACU27407
MKVKLLVLLCTFTATYADTICIGYHANNSTDTVDTVLEKNVTVTHSVNLLENSHNGKLCLLKGIAPLQLGNCSVAGWILGNPECELLISKESWSYIVEKPNPENGTCYPGHFADYEELREQLSSVSSFERFEIFPKESSWPNHTVTGVSASCSHNGESSFYRNLLWLTGKNGLYPNLSKSYANNKEKEVLVLWGVHHPPNIVDQKTLYRTENAYVSVVSSHYSRKFTPEIAKRPKVRDQEGRINYYWTLLEPGDTIIFEANGNLIAPRYAFALSRGFGSGIINSNAPMDKCDAKCQTPQGAINSSLPFQNVHPVTIGECPKYVRSAKLRMVTGLRNIPSIQSRGLFGAIAGFIEGGWTGMVDGWYGYHHQNEQGSGYAADQKSTQNAINGITNKVNSVIEKMNTQFTAVGKEFNKLERRMENLNKKVDDGFIDIWTYNAELLVLLENERTLDFHDSNVKNLYEKVKSQLKNNAKEIGNGCFEFYHKCNDECMESVKNGTYDYPKYSEESKLNREKIDGVKLESMGVYQILAIYSTVASSLVLLVSLGAISFWMCSNGSLQCRICI

SEQ ID NO: 3132 - protein, 566 aa, synthetic construct; identical to SEQ ID NO: 2656
  REGION 1..566: note = hemagglutinin__InfluenzaA__ACU29949

SEQ ID NO: 3133 - protein, 566 aa, synthetic construct
  REGION 1..566: note = hemagglutinin__InfluenzaA__ACU29979
MKAILVVLLYTFAAANADTLCIGYHANNSTDTVDTVLEKNVTVTHSVNLLEDKHNGKLCKLRGVAPLHLGKCNIAGWILGNPECESLSTASSWSYIVETSSSDNGTCYPGDFIDYEELREQLSSVSSFERFEIFPKTSSWPNHDSNKGVTAACPHAGAKSFYKNLIWLVKKGNSYPKLSKSYINDKGKEVLVLWGIHHPSTSADQQSLYQNADAYVFVGTSRYSKKFKPEIAIRPKVRDQEGRMNYYWTLVEPGDKITFEATGNLVVPRYAFAMERNAGSGIIISDTPVHDCNTTCQTPKGAINTSLPFQNIHPITIGKCPKYVKSTKLRLATGLRNVPSIQSRGLFGAIAGFIEGGWTGMVDGWYGYHHQNEQGSGYAADLKSTQNAIDEITNKVNSVIEKMNTQFTAVGKEFNHLEKRIENLNKKVDDGFLDIWTYNAELLVLLENERTLDYHDSNVKNLYEKVRSQLKNNAKEIGNGCFEFYHKCDNTCMESVKNGTYDYPKYSEEAKLNREEIDGVKLESTRIYQILAIYSTVASSLVLVVSLGAISFWMCSNGSLQCRICI

SEQ ID NO: 3134 - protein, 566 aa, synthetic construct; identical to SEQ ID NO: 2669
  REGION 1..566: note = hemagglutinin__InfluenzaA__ACU29989

SEQ ID NO: 3135 - protein, 567 aa, synthetic construct
  REGION 1..567: note = hemagglutinin__InfluenzaA__ACU29999
MKAILVVLLYTFATANADTLCIGYHANNSTDTVDTVLEKNVTVTHSVNLLEDKHNGKLCKLRGVAPLHLGKCNIAGWILGNPECESLSTASSWSYIVETSSSDNGTCYPGDFIDYEELREQLSSVSSFERFEIFPKTSSWPNHDSNKGVTAACPHAGAKSFYKNLIWLVKKGNSYPKLSKSYINDKGKEVLVLWGIHHPSTSADQQSLYQNADAYVFVGTSRYSKKFKPEIAIRPKVRDQEGRMNYYWTLVEPGDKITFEATGNLVVPRYAFAMERNAGSGIIISDTPVHDCNTTCQTPKGAINTSLPFQNIHPITIGKCPKYVKSTKLRLATGLRNVPSIQSRGLFGAIAGFIEGGWTGMVDGWYGYHHQNEQGSGYAADLKSTQNAIDEITNKVNSVIEKMNTQFTAVGKEFNHLEKRIENLNKKVDDGFLDIWTYNAELLVLLENERTLDYHDSNVKNLYEKVRSQLKNNAKEIGNGCFEFYHKCDNTCMESVKNGTYDYPKYSEEAKLNREEIDGVKLESTRIYQILAIYSTVASSLVLVVSLGAISFWMCSNGSLLQCRICI

SEQ ID NO: 3136 - protein, 567 aa, synthetic construct
  REGION 1..567: note = hemagglutinin__InfluenzaA__ACU30009
MEAILVVLLYTFATANADTLCIGYHANNSTDTVDTVLEKNVTVTHSVNLLEDKHNGKLCKLRGVAPLHLGKCNIAGWILGNPECESLSTASSWSYIVETSSSDNGTCYPGDFIDYEELREQLSSVSSFERFEIFPKTSSWPNHDSNKGVTAACPHAGAKSFYKNLIWLVKKGNSYPKLSKSYINDKGKEVLVLWGIHHPSTSADQQSLYQNADAYVFVGSSRYSKKFKPEIAIRPKVRDQEGRMNYYWTLVEPGDKITFEATGNLVVPRYAFAMERNAGSGIIISDTPVHDCNTTCQTPKGAINTSLPFHNIHPITIGKCPKYVKSTKLRLATGLRNVPSIQSRGLFGAIAGFIEGGWTGMVDGWYGYHHQNEQGSGYAADLKSTQNAIDEITNKVNSVIEKMNTQFTAVGKEFNHLEKRIENLNKKVDDGFLDIWTYNAELLVLLENERTLDYHDSNVKNLYEKVRSQLKNNAKEIGNGCFEFYHKCDNTCMESVKNGTYDYPKYSEEAKLNREEIDGVKLESTRIYQILAIYSTVASSLVLVVSLGAISFWMCSGYGSLQCRICI

SEQ ID NO: 3137 - protein, 566 aa, synthetic construct; identical to SEQ ID NO: 3029
  REGION 1..566: note = hemagglutinin__InfluenzaA__ACU30019

SEQ ID NO: 3138 - protein, 566 aa, synthetic construct; identical to SEQ ID NO: 2849
  REGION 1..566: note = hemagglutinin__InfluenzaA__ACU30093

SEQ ID NO: 3139 - protein, 566 aa, synthetic construct
  REGION 1..566: note = hemagglutinin__InfluenzaA__ACU30103
MKAILVVLLYTFATANADTLCIGYHANNSTDTVDTVLEKNVTVTHSVNLLEDKHNGKLCKLRGVAPLHLGKCNIAGWILGNPECESLSTASSWSYIVETSSSDNGTCYPGDFIDYEELREQLSSVSSFERFEIFPKTSSWPNHDSNKGVTAACPHAGAKSFYKNLIWLVKKGNSYPKLSKSYINDKGKEVLVLWGIHHPSTSADQQSLYQNADAYVFVGTSRYSKKFKPEIAIRPKVRDQEGRMNYHWTLVEPGDKITFEATGNLVVPRYAFAMERNAGSGIIISDTPVHDCNTTCQTPKGAINTSLPFQNIHPITIGKCPKYVKSTKLRLATGLRNVPSIQSRGLFGAIAGFIEGGWTGMVDGWYGYHHQNEQGSGYAADLKSTQNAIDEITNKVNSVIEKMNTQFTAVGKEFNHLEKRIENLNKKVDDGFLDIWTYNAELLVLLENERTLDYHDSNVKNLYEKVRSQLKNNAKEIGNGCFEFYHKCDNTCMESVKNGTYDYPKYSEEAKLNREEIDGVKLESTRIYQILAIYSTVASSLVLVVSLGAISFWMCSNGSLQCRICI

SEQ ID NO: 3140 - protein, 567 aa, synthetic construct
  REGION 1..567: note = hemagglutinin__InfluenzaA__ACU30112
MEAILVVLLYTFATANADTLCIGYHANNSTDTVDTVLEKNVTVTHSVNLLEDKHNGKLCKLRGVAPLHLGKCNIAGWILGNPECESLSTASSWSYIVETSSSDNGTCYPGDFIDYEELREQLSSVSSFERFEIFPKTSSWPNHDSNKGVTAACPHAGAKSFYKNLIWLVKKGNSYPKLSKSYINDKGKEVLVLWGIHHPSTSADQQSLYQNADAYVFVGSSRYSKKFKPEIAIRPKVRDQEGRMNYYWTLVEPGDKITFEATGNLVVPRYAFAMERNAGSGIIISDTPVHDCNTTCQTPKGAINTSLPFHNIHPITIGKCPKYVKSTKLRLATGLRNVPSIQSRGLFGAIAGFIEGGWTGMVDGWYGYHHQNEQGSGYAADLKSTQNAIDEITNKVNSVIEKMNTQFTAVGKEFNHLEKRIENLNKKVDDGFLDIWTYNAELLVLLENERTLDYHDSNVKNLYEKVRSQLKNNAKEIGNGCFEFYHKCDNTCMESVKNGTYDYPKYSEEAKLNREEIDGVKLESTRIYQILAIYSTVASSLVLVVSLGAISFWMCSHMVLLQCRICI

SEQ ID NO: 3141 - protein, 566 aa, synthetic construct
  REGION 1..566: note = hemagglutinin__InfluenzaA__ACU30121
MEAILVVLLYTFATANADTLCIGYHANNSTDTVDTVLEKNVTVTHSVNLLEDKHNGKLCKLRGVAPLHLGKCNIAGWILGNPECESLSTASSWSYIVETSSSDNGTCYPGDFIDYEELREQLSSVSSFERFEIFPKTSSWPNHDSNKGVTAACPHAGAKSFYKNLIWLVKKGNSYPKLSKSYINDKGKEVLVLWGIHHPSTSADQQSLYQNADAYVFVGSSRYSKKFKPEIAIRPKVRDQEGRMNYYWTLVEPGDKITFEATGNLVVPRYAFAMERNAGSGIIISDTPVHDCNTTCQTPKGAINTSLPFHNIHPITIGKCPKYVKSTKLRLATGLRNVPSIQSRGLFGAIAGFIEGGWTGMVDGWYGYHHQNEQGSGYAADLKSTQNAIDEITNKVNSVIEKMNTQFTAVGKEFNHLEKRIENLNKKVDDGFLDIWTYNAELLVLLENERTLDYHDSNVKNLYEKVRNQLKNNAKEIGNGCFEFYHKCDNTCMESVKNGTYDYPKYSEEAKLNREEIDGVKLESTRIYQILAIYSTVASSLVLVVSLGAISFWMCSNGSLQCRICI

SEQ ID NO: 3142 - protein, 566 aa, synthetic construct; identical to SEQ ID NO: 2762
  REGION 1..566: note = hemagglutinin__InfluenzaA__ACU31124

SEQ ID NO: 3143 - protein, 566 aa, synthetic construct; identical to SEQ ID NO: 2701
  REGION 1..566: note = hemagglutinin__InfluenzaA__ACU31143

SEQ ID NO: 3144 - protein, 566 aa, synthetic construct; identical to SEQ ID NO: 2701
  REGION 1..566: note = hemagglutinin__InfluenzaA__ACU31144

SEQ ID NO: 3145 - protein, 566 aa, synthetic construct; identical to SEQ ID NO: 2701
  REGION 1..566: note = hemagglutinin__InfluenzaA__ACU31145

SEQ ID NO: 3146 - protein, 566 aa, synthetic construct; identical to SEQ ID NO: 2849
  REGION 1..566: note = hemagglutinin__InfluenzaA__ACU31146

SEQ ID NO: 3147 - protein, 566 aa, synthetic construct; identical to SEQ ID NO: 2669
  REGION 1..566: note = hemagglutinin__InfluenzaA__ACU31147

SEQ ID NO: 3148 - protein, 566 aa, synthetic construct
  REGION 1..566: note = hemagglutinin__InfluenzaA__ACU31148
MKAILVIMLYTFATANADTLCIGYHANNSTDTVDTVLEKNVTVTHSVNLLEDKHNGKLCKLRGVAPLHLGKCNIAGWILGNPECESLSTASSWSYIVETSSSDNGTCYPGDFIDYEELREQLSSVSSFERFEIFPKTSSWPNHDSNKGVTAACPHAGAKSFYKNLIWLVKKGNSYPKLSKSYINDKGKEVLVLWGIHHPSTSADQQSLYQNADAYVFVGSSRYSKKFKPEIAIRPKVRDQEGRMNYYWTLVEPGDKITFEATGNLVVPRYAFAMERNAGSGIIISDTPVHDCNTTCQTPKGAINTSLPFQNIHPITIGKCPKYVKSTKLRLATGLRNVPSIQSRGLFGAIAGFIEGGWTGMVDGWYGYHHQNEQGSGYAADLKSTQNAIDEITNKVNSVIEKMNTQFTAVGKEFNHLEKRIENLNKKVDDGFLDIWTYNAELLVLLENERTLDYHDSNVKNLYEKVRSQLKNNAKEIGNGCFEFYHKCDNTCMESVKNGTYDYPKYSEEAKLNREEIDGVKLESTRIYQILAIYSTVASSLVLVVSLGAISFWMCSNGSLQCRICI

SEQ ID NO: 3149 - protein, 566 aa, synthetic construct; identical to SEQ ID NO: 2656
  REGION 1..566: note = hemagglutinin__InfluenzaA__ACU31149

SEQ ID NO: 3150 - protein, 566 aa, synthetic construct; identical to SEQ ID NO: 2656
  REGION 1..566: note = hemagglutinin__InfluenzaA__ACU31150

SEQ ID NO: 3151 - protein, 566 aa, synthetic construct; identical to SEQ ID NO: 2656
  REGION 1..566: note = hemagglutinin__InfluenzaA__ACU31151

SEQ ID NO: 3152 - protein, 566 aa, synthetic construct; identical to SEQ ID NO: 2656
  REGION 1..566: note = hemagglutinin__InfluenzaA__ACU31152

SEQ ID NO: 3153 - protein, 568 aa, synthetic construct
  REGION 1..568: note = hemagglutinin__InfluenzaA__ACU46644
MEKIVLLFAIVSLVKSDQICIGYHANNSTEQVDTIMEKNVTVTHAQDILEKTHNGKLCDLDGGKPLILRDCRVAGWLLGNPMCDEFINVPEWSYIVEKANPVNDLCYPGDFNDYEELKHLLSRINHFEKIQIIPKSSWSSHEASLGVSSACPYQGKSSFFRNVVWLIKKNSTYPTIKRSYNNTNQEDLLVLWWIHHPNDAAEQTKLYQNPTTYISVGTSTLNQRLVPRIATRSKVNGQSGRMEFFWTILKPNDAINFESNGNFIAPEYAYKIVKKGDSTIMKSELEYGNCNTKCQTPMGAINSSMPFHHIHPLTIGECPKYVKSNRLVLATGLRNSPQRERRRKKRGLFGAIAGFIEGGWQGMVDGWYGYHHSNEQGSGYAADKESTQKAIDGVTNKVNSIIDKMNTQFEAVGREFNHLERRIENLNKKMEDGFLDVWTYNAELLVLMENERTLDFHDSNVKNLYDKVRLQLRDNAKELGNGCFEFYHKCDDECMESVRNGTYDYPQYSEEARLKREEISGVKLESIGIYQILSIYSTVASSLALAIMVAGLSLWMCSNGSLQCRICI

SEQ ID NO: 3154 - protein, 566 aa, synthetic construct
  REGION 1..566: note = hemagglutinin__InfluenzaA__ACU56924
MKAILVVLLYTFATANADTLCIGYHANNSTDTVDTVLEKNVTVTHSVNLLEDKHNGKLCKLRGVAPLHLGKCNIAGWILGNPECESLSTASSWSYIVETSSSDNGTCYPGDFIDYEELREQLSSVSSFERFEIFPKTSSWPNHDSNKGVTAACPHAGAKSFYKNLIWLVKKGNSYPKLSKSYINDKGKEVLVLWGIHHPSTSADQQSLYQNADAYVFVGTSRYSKKFKPEIAIRPKVRDREGRMNYYWTLVEPGDKITFEATGNLVVPRYAFAMERNAGSGIIISDTPVHDCNTTCQTPKGAINTSLPFQNIHPITIGKCPKYVKSTKLRLATGLRNVPSIQSRGLFGAIAGFIEGGWTGMVDGWYGYHHQNEQGSGYAADLKSTQNAIDEITNKVNSVIEKMNTQFTAVGKEFNHLEKRIENLNKKVDDGFLDIWTYNAELLVLLENERTLDYHDSNVKNLYEKVRSQLKNNAKEIGNGCFEFYHKCDNTCMESVKNGTYDYPKYSEEAKLNREEIDGVKLESTRIYQILAIYSTVASSLVLVVSLGAISFWMCSNGSLQCRICI

SEQ ID NO: 3155 - protein, 566 aa, synthetic construct; identical to SEQ ID NO: 3022
  REGION 1..566: note = hemagglutinin__InfluenzaA__ACU56931

SEQ ID NO: 3156 - protein, 566 aa, synthetic construct; identical to SEQ ID NO: 2669
  REGION 1..566: note = hemagglutinin__InfluenzaA__ACU64792

SEQ ID NO: 3157 - protein, 566 aa, synthetic construct; identical to SEQ ID NO: 2849
  REGION 1..566: note = hemagglutinin__InfluenzaA__ACU64801

SEQ ID NO: 3158 - protein, 566 aa, synthetic construct; identical to SEQ ID NO: 2849
  REGION 1..566: note = hemagglutinin__InfluenzaA__ACU64812

SEQ ID NO: 3159 - protein, 566 aa, synthetic construct; identical to SEQ ID NO: 2318
  REGION 1..566: note = hemagglutinin__InfluenzaA__ACU79871

SEQ ID NO: 3160 - protein, 566 aa, synthetic construct; identical to SEQ ID NO: 2316
  REGION 1..566: note = hemagglutinin__InfluenzaA__ACU79882

SEQ ID NO: 3161 - protein, 566 aa, synthetic construct; identical to SEQ ID NO: 2329
  REGION 1..566: note = hemagglutinin__InfluenzaA__ACU79893

SEQ ID NO: 3162 - protein, 566 aa, synthetic construct; identical to SEQ ID NO: 2329
  REGION 1..566: note = hemagglutinin__InfluenzaA__ACU79904

SEQ ID NO: 3163 - protein, 565 aa, synthetic construct
  REGION 1..565: note = hemagglutinin__InfluenzaA__ACU79937
MKAKLLVLLCTFTATYADTICIGYHANNSTDTVDTVLEKNVTVTHSVNLLEDSHNGKLCLLKGIAPLQLGNCSVAGWILGNPECESLISKESWSYIVETPNPENGTCYPGYFADYEELREQLSSVSSFERFEIFPKESSWPNHTVTGVTASCSHNGKSSFYRNLLWLTEKNGLYPNLSNSYVNNKEKEVLVLWGVHHPSNIGVQRAIYHTENAYVSVVSSHYSRRFTPEIAKRPKVRGQEGRINYYWTLLEPGDTIIFEANGNLIAPWYAFALSRGFGSGIITSNAPMNECDAKCQTPQGAINSSLPFQNVHPVTIGECPKYVRSTKLRMVTGLRNIPSIQSRGLFGAIAGFIEGGWTGMMDGWYGYHHQNEQGSGYAADQKSTQNAINGITNKVNSVIEKMNTQFTAVGKEFNKLERRMENLNKKVDDGFLDIWTYNAELLVLLENERTLDFHDSNVKNLYEKVKSQLKNNAKEIGNGCFEFYHKCNNECMESVKNGTYDYPKYSEESKLNREKIDGVKLESMGVYQILAIYSTVASSLVLLVSLGAISFWMCSNGSLQCRICI

SEQ ID NO: 3164 - protein, 562 aa, synthetic construct
  REGION 1..562: note = hemagglutinin__InfluenzaA__ACU79948
MAIIYLILLFTAVRGDQICIGYHANNSTEKVDTILERNVTVTHAKDILEKTHNGKLCKLNGIPPLELGDCSIAGWLLGNPECDRLLSVPEWSYIMEKENPRDGLCYPGSFNDYEELKHLLSSVKHFEKVKILPKDRWTQHTTTGGSRACAVSGNPSFFRNMVWLTKKGSDYPVAKGSYNNTSGEQMLIIWGVHHPNDETEQRTLYQNVGTYVSVGTSTLNKRSTPEIATRPKVNGQGGRMEFSWTLLDMWDTINFESTGNLIAPEYGFKISKRGSSGIMKTEGTLENCETKCQTPLGAINTTLPFHNVHPLTIGECPKYVKSEKLVLATGLRNVPQIESRGLFGAIAGFIEGGWQGMVDGWYGYHHSNDQGSGYAADKESTQKAFDGITNNVNSVIEKMNTQFEAVGKEFSNLERRLENLNKKMEDGFLDVWTYNAELLVLMENERTLDFHDSNVKNLYDKVRMQLRDNVKELGNGCFEFYHKCDDECMNSVKNGTYDYPKYEEESKLNRNEIKGVKLSSMGVYQILAIYATVAGSLSLAIMMAGISFWMCSNGSLQCRICI

SEQ ID NO: 3165 - protein, 562 aa, synthetic construct
  REGION 1..562: note = hemagglutinin__InfluenzaA__ACU79959
MAIIYLILLFTAVRGDQICIGYHANNSTEKVDTILERNVTVTHAKDILEKTHNGKLCKLNGIPPLELGDCSIAGWLLGNPECDRLLSVPEWSYIMEKENPRDGLCYPGSFNDYEELKHLLSSVKHFEKVKILPKDRWTQHTTTGGSRACAVSGNPSFFRNMVWLTKKGSDYPVAKGSYNNTSGEQMLIIWGVHHPNDETEQRTLYQNVGTYVSVGTSTLNKRSTPEIATRPKVNGQGGRMEFSWTLLDMWDTINFESTGNLIAPEYGFKISKRGSSGIMKTEGTLENCETKCQTPLGAINTTLPFHNVHPLTIGECPKYVKSEKLVLATGLRNVPQIESRGLFGAIAGFIEGGWQGMVDGWYGYHHSNDQGSGYAADKESTQKAFDGITNKVNSVIEKMNTQFEAVGKEFSNLERRLENLNKKMEDGFLDVWTYNAELLVLMENERTLDFHDSNVKNLYDKVRMQLRDNVKELGNGCFEFYHKCDDECMNSVKNGTYDYPKYEEESKLNRNEIKGVKLSSMGVYQILAIYATVAGSLSLAIMMAGISFWMCSNGSLQCRICI

SEQ ID NO: 3166 - protein, 566 aa, synthetic construct
  REGION 1..566: note = hemagglutinin__InfluenzaA__ACU79970
MKTIIALSYIQCLVFAQKFPGNDNSTATLCLGHHAVPNGTIVKTITNDQIEVTNATELVQSSSTGEICDSPHQILDGENCTLIDALLGDPQCDGFQNKNWDLFVERSKAYSNCYPYDVPDYASLRSLVASSGTLEFNNESFNWTGVTQNGTSSACIRRSNNSFFSKLNWLTHSKFKYPALNVTMPNNENFDKLYIWGVHHPGTDNDQIFLYAQASGRITVSTKRSQQTVIPNIGSRPRVRNIPSRISIYWTIVKPGDILLINSTGNLIAPRGYFKIRSGKSSIMRSDAPIGKCNSECITPNGSIPNDKPFQNVNRITYGACPRYVKQNTLKLATGMRNVPEKQTRGIFGAIAGFIENGWEGMVDGWYGFRHQNSEGIGQAADLKSTQAAIDQINGKLNRLIGKTNEKFHQIEKEFSEVEGRIQDLEKYVEDTKIDLWSYNAELLVALENQHTIDLTDSEMNKLFEKTKKQLRENAEDMGNGCFKIYHKCDNACIGSIRNGTYDHDVYRDEALNNRFQIKGVELKSGYKDWILWISFAISCFLLCIALLGFIMWACQKGNIRCNICI

SEQ ID NO: 3167 - protein, 565 aa, synthetic construct
  REGION 1..565: note = hemagglutinin__InfluenzaA__ACU79981
MKVKLLVLLCTFTATYADTICIGYHANNSTDTVDTVLERNVTVTHSVNLLENSHNGKLCLLKGIAPLQLGNCSVAGWILGNPECELLISKESWSYIVEKPNPENGTCYPGHFADYEELREQLSSVSSFERFEIFPKESSWPNHTVTGVSASCSHNGESSFYRNLLWLTGKNGLYPNLSKSYANNKEKEVLVLWGVHHPPNIGDQKALYHTENAYVSVVSSHYSRKFTPEIAKRPKVRDQEGRINYYWTLLKPGDTIIFEANGNLIAPRYAFALSRGFGSGIINSNAPMDKCDAKCQTPQGAINSSLPFQNVHPVTIGECPKYVRSAKLRMVTGLRNIPSIQSRGLFGAIAGFIEGGWTGMVDGWYGYHHQNEQGSGYAADQKSTQNAINGITNKVNSVIEKMNTQFTAVGKEFNKLERRMENLNKKVDDGFIDIWTYNAELLVLLENERTLDFHDSNVKNLYEKVKSQLKNNAKEIGNGCFEFYHKCNDECMESVKNGTYDYPKYSEESKLNREKIDGVKLESMGVYQILAIYSTVASSLVLLVSLGAISFWMCSNGSLQCRICI

SEQ ID NO: 3168 - protein, 565 aa, synthetic construct
  REGION 1..565: note = hemagglutinin__InfluenzaA__ACU79992
MKVKLLVLLCTFTATYADTICIGYHANNSTDTVDTVLEKNVTVTHSVNLLEDNHNGKLCLLKGKAPLQLGNCSVAGWILGNPECGLLISKESWSYIVERPNPENGTCYPGHFADYEELREQLSSVSSFERFEIFPKESSWPNHTVTGVSASCSHNGESSFYKNLLWLTGKNGLYPNLSKSYANNKEKEVLVLWGVHHPPNIGDQMTLYHKENAYVSVVSSHYSRKFTPEIAKRPKVRDQEGRINYYWTLLEPGDTIIFEANGNLIAPRYAFALSRGFGSGIINSNAPMDECDAKCQTPQGAINSSLPFQNVHPVTIGECPKYVRSAKLRMVTGLRNIPSIQSRGLFGAIAGFIEGGWTGMVDGWYGYHHQNEQGSGYAADQKSTQNAINGITNKVNSVIEKMNTQFTAVGKEFNKLERRMENLNKKVDDGFIDVWTYNAELLVLLENERTLDFHDSNVKNLYEKVKNQLKNNAKEIGNGCFEFYHKCNDECMESVKNGTYDYPKYSEESKLSREKIDGVKLESMGVYQILAIYSTVASSLVLLVSLGAISFWMCSNGSLQCRICI

SEQ ID NO: 3169 - protein, 566 aa, synthetic construct; identical to SEQ ID NO: 2434
  REGION 1..566: note = hemagglutinin__InfluenzaA__ACU80003

SEQ ID NO: 3170 - protein, 565 aa, synthetic construct
  REGION 1..565: note = hemagglutinin__InfluenzaA__ACU80025
MKVKLLVLLCTFAATYADTICIGYHANNSTDTVDTVLEKNVTVTHSVNLLENSHNGKLCLLKGIAPLQLGNCSVAGWILGNPECELLISKESWSYIVEKPNPENGTCYPGHFADYEELREQLSSVSSFERFEIFPKESSWPNHTVTGVSASCSHNGESSFYRNLLWLTGKNGLYPNLSKSYANNKEKEVLVLWGVHHPPNIGDQKALYHTENAYVSVVSSHYSRKFTPEIAKRPKVRDQEGRINYYWTLLEPGDTIIFEANGNLIAPRYAFALSRGFGSGIINSNAPMDKCDAKCQTPQGAINSSLPFQNVHPVTIGECPKYVRSAKLRMVTGLRNIPSIQSRGLFGAIAGFIEGGWTGMVDGWYGYHHQNEQGSGYAADQKSTQNAINGITNKVNSVIEKMNTQFTAVGKEFNKLERRMENLNKKVDDGFIDIWTYNAELLVLLENERTLDFHDSNVKNLYEKVKSQLKNNAKEIGNGCFEFYHKCNDECMESVKNGTYDYPKYSEESKLNREKIDGVKLESMGVYQILAIYSTVASSLVLLVSLGAISFWMCSNGSLQCRICI

SEQ ID NO: 3171 - protein, 566 aa, synthetic construct
  REGION 1..566: note = hemagglutinin__InfluenzaA__ACU80036
MKTIIALSYILCLVFAQKLPGNDNSTATLCLGHHAVPNGTIVKTITNDQIEVTNATELVQSSSTGEICDSPHQILDGENCTLIDALLGDPQCDGFQNKKWDLFVERSKAYSNCYPYDVPDYASLRSLVASSGTLEFNNESFNWTGVTQNGTSSACIRRSNNSFFSRLNWLTHLKFKYPALNVTMPNNEQFDKLYIWGVHHPGTDNDQIFLYAQASGRITVSTKRSQQTVIPNIGSRPRVRNIPSRISIYWTIVKPGDILLINSTGNLIAPRGYFKIRSGKSSIMRSDAPIGKCSSECITPNGSIPNDKPFQNVNRITYGACPRYVKQNTLKLATGMRNVPEKQTRGIFGAIAGFIENGWEGMVDGWYGFRHQNSEGRGQAADLKSTQAAIDQINGKLNRLIGKTNEKFHQIEKEFSEVEGRIQDLEKYVEDTKIDLWSYNAELLVALENQHTIDLTDSEMNKLFEKTKKQLRENAEDIGNGCFKIYHKCDNACIGSIRNGTYDHDVYRDEALNNRFQIKGVELKSGYKDWILWISFAISCFLLCVALLGFIMWACQKGNIRCNICI

SEQ ID NO: 3172 - protein, 565 aa, synthetic construct; identical to SEQ ID NO: 2643
  REGION 1..565: note = hemagglutinin__InfluenzaA__ACU80047

SEQ ID NO: 3173 - protein, 566 aa, synthetic construct
  REGION 1..566: note = hemagglutinin__InfluenzaA__ACU80058
MKTIIALSYILCLVFAQKLPGNDNSTATLCLGHHAVPNGTIVKTITNDQIEVTNATELVQSSSTGGICDSPHQILDGENCTLIDALLGDPQCDGFQNKKWDLFVERSKACSNCYPYDVPDYASLRSLVASSGTLEFNNESFNWTGVTQNGTSSACKRRSNNSFFSRLNWLTHLKFKYPALNVTMPNNEKFDKLYIWGVHHPGTDNDQIFLYAQASGRITVSTKRSQQTVIPNIGSRPRVRNIPSRISIYWTIVKPGDILLINSTGNLIAPRGYFKIRSGKSSIMRSDAPIGKCNSECITPNGSIPNDKPFQNVNRITYGACPRYVKQNTLKLATGMRNVPEKQTRGIFGAIAGFIENGWEGMVDGWYGFRHQNSEGIGQAADLKSTQAAINQINGKLNRLIGKTNEKFHQIEKEFSEVEGRIQDLEKYVEDTKIDLWSYNAELLVALENQHTIDLTDSEMNKLFERTKKQLRENAEDMGNGCFKIYHKCDNACIGSIRNGTYDHDVYRDEALNNRFQIKGVELKSGYKDWILWISFAISCFLLCVALLGFIMWACQKGNIRCNICI

SEQ ID NO: 3174 - protein, 565 aa, synthetic construct; identical to SEQ ID NO: 2488
  REGION 1..565: note = hemagglutinin__InfluenzaA__ACU80069

SEQ ID NO: 3175 - protein, 565 aa, synthetic construct
  REGION 1..565: note = hemagglutinin__InfluenzaA__ACU80080
MKVKLLVLLCTFTATYADTICIGYHANNSTDTVDTVLEKNVTVTHSVNLLENSHNGKLCLLKGIAPLQLGNCSVAGWILGNPECELLISKESWSYIVEKPNPENGTCYPGHFADYEELREQLSSVSSFERFEIFPKESSWPNHTVTGVSASCSHNGESSFYRNLLWLTGKNGLYPNLSKSYANNKEKEVLVLWGVHHPPNIVDQKTLYRTENAYVSVVSSHYSRKFTPEIAKRPKVRDQEGRINYYWTLLEPGDTIIFEANGNLIAPRYAFALSRGFGSGIINSNAPMDKCDAKCQTPQGAINSSLPFQNVHPVTIGECPKYVRSAKLRMVTGLRNIPSIQSRGLFGAIAGFIEGGWTGMVDGWYGYHHQNEQGSGYAADQKSTQNAINGITNKVNSVIEKMNTQFTAVGKEFNKLERRMENLNKKVDDGFIDIWTYNAELLVLLENERTLDFHDSNVKNLYEKVKSQLKNNAKEIGNGCFEFYHKCNDECMESVKNGTYDYPKYSEESKLNREKIDGIKLESMGVYQILAIYSTVASSLVLLVSLGAISFWMCSNGSLQCRICI

SEQ ID NO: 3176 - protein, 565 aa, synthetic construct; identical to SEQ ID NO: 2774
  REGION 1..565: note = hemagglutinin__InfluenzaA__ACU80091

SEQ ID NO: 3177 - protein, 566 aa, synthetic construct; identical to SEQ ID NO: 2537
  REGION 1..566: note = hemagglutinin__InfluenzaA__ACU80102

SEQ ID NO: 3178 - protein, 566 aa, synthetic construct
  REGION 1..566: note = hemagglutinin__InfluenzaA__ACU80113
MKTIIALSYILCLVFAQKFPGNDNSTATLCLGHHAVPNGTIVKTITNDQIEVTNATELVQSSSTGEICDSPHQILDGENCTLIDALLGDPQCDGFQNKNWDLFVERSKAYSNCYPYDVPDYASLRSLVASSGTLEFNNESFNWTGVTQNGTSSACIRRSNNSFFSRLNWLTHSKFKYPALNVTMPNNENFDKLYIWGVHHPGTDNDQIFLYAQASGRITVSTKRSQQTVIPNIGSRPRVRNIPSRISIYWTIVKPGDILLINSTGNLIAPRGYFKIRSGKSSIMRSDAPIGKCNSECITPNGSIPNDKPFQNVNRITYGACPRYVKQNTLKLATGMRNVPEKQTRGIFGAIAGFIENGWEGMVDGWYGFRHQNSEGIGQAADLKSTQAAIDQINGKLNRLIGKTNEKFHQIEKEFSEIEGRIQDLEKYVEDTKIDLWSYNAELLVALENQHTIDLTDSEMNKLFEKTKKQLRENAEDMGNGCFKIYHKCDNACIGSIRNGTYDHDVYRDEALNNRFQIKGVELKSGYKNWILWISFAISCFLLCIALLGFIMWACQKGNIRCNICI

SEQ ID NO: 3179 - protein, 566 aa, synthetic construct
  REGION 1..566: note = hemagglutinin__InfluenzaA__ACU80135
MKTIIALSYILCLVFAQKFPGNDNSTATLCLGHHAVPNGTMVKTITNDQIEVTNATELVQSSSTGEICDSPHQILDGENCTLIDALLGDPQCDGFQNKNWDLFVERSKAYSNCYPYDVPDYASLRSLVASSGTLEFNNESFNWTGVTQNGTSSACIRRSNNSFFSRLNWLTHSKFKYPALNVTMPNNENFDKLYIWGVHHPGTDNDQIFLYAQASGRITVSTKRSQQTVIPNIGSRPRVRNIPSRISIYWTIVKPGDILLINSTGNLIAPRGYFKIRSGKSSIMRSDAPIGKCNSECITPNGSIPNDKPFQNVNRITYGACPRYVKQNTLKLATGMRNVPEKQTRGIFGAIAGFIENGWEGMVDGWYGFRHQNSEGIGQAADLKSTQAAIDQINGKLNRLIGKTNEKFHQIEKEFSEVEGRIQDLEKYVEDTKIDLWSYNAELLVALENQHTIDLTDSEMNKLFEKTKKQLRENAEDMGNGCFKIYHKCDNACIGSIRNGTYDHDVYRDEALNNRFQIKGVELKSGYKDWILWISFAISCFLLCIALLGFIMWACQKGNIRCNICI

SEQ ID NO: 3180 - protein, 566 aa, synthetic construct
  REGION 1..566: note = hemagglutinin__InfluenzaA__ACU80146
MKTIIALSYILCLVFAQKLPGNDNSTATLCLGHHAVPNGTIVKTITNDQIEVTNATELVQSSSTGEICDSPHQILDGENCTLIDALLGDPQCDGFQNKKWDLFVERSKAYSNCYPYDVPDYASLRSLVASSGTLEFNNESFNWTGVTQNGTSSACIRRSNNSFFSRLNWLTHSKFKYPALNVTMPNNEEFDKLYIWGVHHPGTDNDQIFLYAQASGRITVSTKRSQQTVIPNIGSRPRVRNIPSRISIYWTIVKPGDILLINSTGNLIAPRGYFKIRSGKSSIMRSDAPIGKCNSECITPNGSIPNDKPFQNVNRITYGACPRYVKQNTLKLATGMRNVPEKQTRGIFGAIAGFIENGWEGMVDGWYGFRHQNSEGIGQAADLKSTQAAIDQINGKLNRLIGKTNEKFHQIEKEFSEVEGRIQDLEKYVEDTKIDLWSYNAELLVALENQHTIDLTDSEMNKLFEKTKKQLRENAEDMGNGCFKIYHKCDNACIGSIRNGTYDHDVYRDEALNNRFQIKGVELKSGYKDWILWISFAISCFLLCVALLGLIMWACQKGNIRCNICI

SEQ ID NO: 3181 - protein, 566 aa, synthetic construct; identical to SEQ ID NO: 2434
  REGION 1..566: note = hemagglutinin__InfluenzaA__ACU80157

SEQ ID NO: 3182 - protein, 565 aa, synthetic construct; identical to SEQ ID NO: 3170
  REGION 1..565: note = hemagglutinin__InfluenzaA__ACU80168

SEQ ID NO: 3183 - protein, 566 aa, synthetic construct; identical to SEQ ID NO: 2434
  REGION 1..566: note = hemagglutinin__InfluenzaA__ACU80179

SEQ ID NO: 3184 - protein, 566 aa, synthetic construct
  REGION 1..566: note = hemagglutinin__InfluenzaA__ACU80190
MKTIIALSYILCLVFAQKLPGNDNSTATLCLGHHAVPNGTIVKTITNDQIEVTNATELVQSSSTGEICDSPHQILDGENCTLIDALLGDPQCDGFQNKKWDLFVERSKAYSNCYPYDVPDYASLRSLVASSGTLEFNNESFNWTGVTQNGTSSACIRRSNNSFFSRLNWLTHSKFKYPALNVTMPNNEEFDKLYIWGVHHPGTDNDQIFLYAQASGRITVSTKRSQQTVIPNIGSRPRVRNIPSRISIYWTIVKPGDILLINSTGNLIAPRGYFKIRSGKSSIMRSDAPIGKCNSECITPNGSIPNDKPFQNVNRITYGACPRYVKQNTLKLATGMRNVPEKQTRGIFGAIAGFIENGWEGMVDGWYGFRHQNSEGIGQAADLKSTQAAIDQINGKLNRLIGKTNEKFHQIEKEFSEVEGRIQDLEKYVEDTKIDLWSYNAELLVALENQHTIDLTDSEMNKLFEKTKKQLRENAEDMGNGCFKIYHKCDNACIGSIRNGTYDHDVYRDEALNNRFQIKGIELKSGYKDWILWISFAISCFLLCVALLGFIMWACQKGNIRCNICI

SEQ ID NO: 3185 - protein, 566 aa, synthetic construct
  REGION 1..566: note = hemagglutinin__InfluenzaA__ACU80201
MKTIIALSYILCLVFAQKLPGNDNSTATLCLGHHAVPNGTIVKTITNDQIEVTNATELVQSSSTGEICDSPHQILDGENCTLIDALLGDPQCDGFQNKKWDLFVERSKAYSNCYPYDVPDYASLRSLVASSGTLEFNNESFNWTGVTQNGTSSACIRRSNNSFFSRLNWLTHLKFKYPALNVTMPNNEQFDKLYIWGVHHPGTDNDQIFLYAQASGRITVSTKRSQQTVIPNIGSRPRVRNIPSRISIYWTIVKPGDILLINSTGNLIAPRGYFKIRSGKSSIMRSDAPIGKCNSECITPNGSIPNDKPFQNVNRITYGACPRYVKQNTLKLATGMRNVPEKQTRGIFGAIAGFIENGWEGMVDGWYGFRHQNSEGRGQAADLKSTQAAIDQINGKLNRLIGKTNEKFHQIEKEFSEVEGRIQDLEKYVEDTKIDLWSYNAELLVALENQHTIDLTDSEMNKLFEKTKKQLRENAEDMGNGCFKIYHKCDNACIGSIRNGTYDHDVYRDEALNNRFQIKGVELKSGYKDWILWISFAISCFLLCVALLGFIMWACQKGNIKCNICI

SEQ ID NO: 3186 - protein, 566 aa, synthetic construct; identical to SEQ ID NO: 2434
  REGION 1..566: note = hemagglutinin__InfluenzaA__ACU80212

SEQ ID NO: 3187 - protein, 565 aa, synthetic construct
  REGION 1..565: note = hemagglutinin__InfluenzaA__ACU80234
MKVKLLVLLCTFAATYADTICIGYHANNSTDTVDTVLEKNVTVTHSVNLLENSHNGKLCLLKGIAPLQLGNCSVAGWILGNPECELLISKESWSYIVEKPNPENGTCYPGHFADYEELREQLSSVSSFERFEIFPKESSWPNHTVTGVSASCSHNGESSFYKNLLWLTGKNGLYPNLSKSYANNKEKEVLVLWGVHHPPNIGDQKALYHTENAYVSVVSSHYSRKFTPEIAKRPKVRDQEGRINYYWTLLEPGDTIIFEANGNLIAPRYAFALSRGFGSGIINSNAPMDKCDAKCQTPQGAINSSLPFQNVHPVTIGECPKYVRSAKLRMVTGLRNIPSIQSRGLFGAIAGFIEGGWTGMVDGWYGYHHQNEQGSGYAADQKSTQNAINGITNKVNSVIEKMNTQFTAVGKEFNKLERRMENLNKKVDDGFIDIWTYNAELLVLLENERTLDFHDSNVKNLYEKVKSQLKNNAKEIGNGCFEFYHKCNDECMESVKNGTYDYPKYSEESKLNREKIDGVKLESMGVYQILAIYSTVASSLVLLVSLGAISFWMCSNGSLQCRICI

SEQ ID NO: 3188 - protein, 566 aa, synthetic construct
  REGION 1..566: note = hemagglutinin__InfluenzaA__ACU80245
MKTIIALSYILCLVFAQKFPGNDNSTATLCLGHHAVPNGTIVKTITNDQIEVTNATELVQSSSTGEICDSPHQILDGENCTLIDALLGDPQCDGFQNKNWDLFVERSKAYSNCYPYDVPDYASLRSLVASSGTLEFNNESFNWTGVTQNGTSSACIRRSNNSFFSRLNWLTHSKFKYPALNVTMPNNENFDKLYIWGVHHPGTDNDQIFLYAQASGRITVSTKRSQQTVIPNIGSRPRVRNIPSRISIYWTIVKPGDILLINSTGNLIAPRGYFKIRSGKSSIMRSDAPIGRCNSECITPNGSIPNDKPFQNVNRITYGACPRYVKQNTLKLATGMRNVPEKQTRGIFGAIAGFIENGWEGMVDGWYGFRHQNSEGIGQAADLKSTQAAIDQINGKLNRLIGKTNEKFHQIEKEFSEVEGRIQDLEKYVEDTKIDLWSYNAELLVALENQHTIDLTDSEMNKLFEKTKKQLRENAEDMGNGCFKIYHKCDNACIGSIRNGTYDHDVYRDEALNNRFQIKGVELKSGYKDWILWISFAISCFLLCIALLGFIMWACQKGNIRCNICI

SEQ ID NO: 3189 - protein, 566 aa, synthetic construct; identical to SEQ ID NO: 2537
  REGION 1..566: note = hemagglutinin__InfluenzaA__ACU80256

SEQ ID NO: 3190 - protein, 565 aa, synthetic construct; identical to SEQ ID NO: 2488
  REGION 1..565: note = hemagglutinin__InfluenzaA__ACU80267

SEQ ID NO: 3191 - protein, 565 aa, synthetic construct; identical to SEQ ID NO: 3170
  REGION 1..565: note = hemagglutinin__InfluenzaA__ACU80278

SEQ ID NO: 3192 - protein, 566 aa, synthetic construct; identical to SEQ ID NO: 2434
  REGION 1..566: note = hemagglutinin__InfluenzaA__ACU80289

SEQ ID NO: 3193 - protein, 566 aa, synthetic construct; identical to SEQ ID NO: 2537
  REGION 1..566: note = hemagglutinin__InfluenzaA__ACU80300

SEQ ID NO: 3194 - protein, 566 aa, synthetic construct
  REGION 1..566: note = hemagglutinin__InfluenzaA__ACU80311
MRTIIALSYILCLVFAQKFPGNDNSTATLCLGHHAVPNGTIVKTITNDQIEVTNATELVQSSSTGEICDSPHQILDGENCTLIDALLGDPQCDGFQNKNWDLFVERSKAYSNCYPYDVPDYASLRSLVASSGTLEFNNESFNWTGVTQNGTSSACIRRSNNSFFSRLNWLTHSKFKYPALNVTMPNNENFDKLYIWGVHHPGTDNDQIFLYAQASGRITVSTKRSQQTVIPNIGSRPRVRNIPSRISIYWTIVKPGDILLINSTGNLIAPRGYFKIRSGKSSIMRSDAPIGKCNSECITPNGSIPNDKPFQNVNRITYGACPRYVKQNTLKLATGMRNVPEKQTRGIFGAIAGFIENGWEGMVDGWYGFRHQNSEGIGQAADLKSTQAAIDQINGKLNRLIGKTNEKFHQIEKEFSEVEGRIQDLEKYVEDTKIDLWSYNAELLVALENQHTIDLTDSEMNKLFEKTKKQLRENAEDMGNGCFKIYHKCDNACIGSIRNGTYDHDVYRDEALNNRFQIKGVELKSGYKDWILWISFAISCFLLCIALLGFIMWACQKGNIRCNICI

SEQ ID NO: 3195 - protein, 566 aa, synthetic construct; identical to SEQ ID NO: 2537
  REGION 1..566: note = hemagglutinin__InfluenzaA__ACU80322

SEQ ID NO: 3196 - protein, 566 aa, synthetic construct; identical to SEQ ID NO: 2434
  REGION 1..566: note = hemagglutinin__InfluenzaA__ACU80333

SEQ ID NO: 3197 - protein, 566 aa, synthetic construct; identical to SEQ ID NO: 2537
  REGION 1..566: note = hemagglutinin__InfluenzaA__ACU80344

SEQ ID NO: 3198 - protein, 566 aa, synthetic construct; identical to SEQ ID NO: 2537
  REGION 1..566: note = hemagglutinin__InfluenzaA__ACU80355

SEQ ID NO: 3199 - protein, 566 aa, synthetic construct; identical to SEQ ID NO: 2537
  REGION 1..566: note = hemagglutinin__InfluenzaA__ACU80366

SEQ ID NO: 3200 - protein, 566 aa, synthetic construct
  REGION 1..566: note = hemagglutinin__InfluenzaA__ACU80377
MKTIIALSYILCLVFAQKFPGNDNSTATLCLGHHAVPNGTIVKTITNDQIEVTNATELVQSSSTGEICDSPHQILDGENCTLIDALLGDPQCDGFQNKNWDLFVERSKAYSNCYPYDVPDYASLRSLVASSGTLEFNNESFNWTGVTQNGTSSACIRRSNNSFFSRLNWLTHSKFKYPALNVTMPNNENFDKLYIWGVHHPGTDNDQIFLYAQASGRITVSTKRSQQTVIPNIGSRPRVRNIPSRISIYWTIVKPGDILLINSTGNLIAPRGYFKIRSGKSSIMRSDAPIGKCNFECITPNGSIPNDKPFQNVNRITYGACPRYVKQNTLKLATGMRNVPEKQTRGIFGAIAGFIENGWEGMVDGWYGFRHQNSEGIGQAADLKSTQAAIDQINGKLNRLIGKTNEKFHQIEKEFSEVEGRIQDLEKYVEDTKIDLWSYNAELLVALENQHTIDLTDSEMNKLFEKTRKQLRENAEDMGNGCFKIYHKCDNACIGSIRNGTYDHDVYRDEALNNRFQIKGVELKSGYKDWILWISFAMSCFLLCIALLGFIMWACQKGNIRCNICI

SEQ ID NO: 3201 - protein, 566 aa, synthetic construct; identical to SEQ ID NO: 2537
  REGION 1..566: note = hemagglutinin__InfluenzaA__ACU80388

SEQ ID NO: 3202 - protein, 566 aa, synthetic construct; identical to SEQ ID NO: 2434
  REGION 1..566: note = hemagglutinin__InfluenzaA__ACU80399

SEQ ID NO: 3203 - protein, 565 aa, synthetic construct
  REGION 1..565: note = hemagglutinin__InfluenzaA__ACU80410
MKVKLLVLLCTFTATYADTICIGYHANNSTDTVDTVLEKNVTVTHSVNLLENSHNGKLCLLKGIAPLQLGNCSVAGWILGNPECELLISKESWSYIVEKPNPENGTCYPGHFADYEELREQLSSVSSFERFEIFPKESSWPNHTVTGVSASCSHNGESSFYRNLLWLTGKNGLYPNLSKSYANNKEKEVLVLWGVHHPPNIGDQKALYHTENAYVSVVSSHYSRKFTPEIAKRPKVRDQEGRINYYWTLLEPGDTIIFEANGNLIAPRYAFALSRGFGSGIINSNAPMDKCDAKCQTPQGAINSSLPFQNVHPVTIGECPKYVRSAKLRMVTGLRNIPSIQSRGLFGAIAGFIEGGWTGMVDGWYGYHHQNEQGSGYAADQKSTQNAINGITNKVNSVIEKMNTQFTAVGKEFNKLERRMENLNKKVDDGFIDIWTYNAELLVLLENERTLDFHDSNVKNLYEKVKNQLKNNAKEIGNGCFEFYHKCNDECMESVKNGTYDYPKYSEESKLNREKIDGVKLESMGVYQILAIYSTVASSLVLLVSLGAISFWMCSNGSLQCRICI

SEQ ID NO: 3204 - protein, 566 aa, synthetic construct
  REGION 1..566: note = hemagglutinin__InfluenzaA__ACU80424
MKTIIALSYILCLVFAQKFPGNDNSTATLCLGHHAVPNGTIVKTITNDQIEVTNATELVQSSSTGEICDSPHQILDGENCTLIDALLGDPQCDGFQNKNWDLFVERSKAYSNCYPYDVPDYASLRSLVASSGTLEFNNESFNWTGVTQNGTSSACIRRSNNSFFSRLNWLTHSKFKYPALNVTMPNNENFDKLYIWGVHHPGTDNDQIFLYAQASGRITVSTKRSQQTVIPNIGSRPRVRNIPSRISIYWTIVKPGDILLINSTGNLIAPRGYFKIRSGKSSIMRSDAPIGKCNFECITPNGSIPNDKPFQNVNRITYGACPRYVKQNTLKLATGMRNVPEKQTRGIFGAIAGFIENGWEGMVDGWYGFRHQNSEGIGQAADLKSTQAAIDQINGKLNRLIGKTNEKFHQIEKEFSEVEGRIQDLEKYVEDTKIDLWSYNAELLVALENQHTIDLTDSEMNKLFEKTRKQLRENAEDMGNGCFKIYHKCDNACIGSIRNGTYDHDVYRDEALNNRFQIKGVELKSGYKDWILWISFAISCFLLCIALLGFIMWACQKGNIRCNICI

SEQ ID NO: 3205 - protein, 566 aa, synthetic construct; identical to SEQ ID NO: 3204
  REGION 1..566: note = hemagglutinin__InfluenzaA__ACU80435

SEQ ID NO: 3206 - protein, 565 aa, synthetic construct
  REGION 1..565: note = hemagglutinin__InfluenzaA__ACU80446
MKVKLLVLLCTFTATYADTICIGYHANNSTDTVDTVLEKNVTVTHSVNLLENSHNGKLCLLKGIAPLQLGNCSVAGWILGNPECELLISKESWSYIVEKPNPENGTCYPGHFADYEELREQLSSVSSFERFEIFPKESSWPNHTVTGVSASCSHNGESSFYRNLLWLTGKNGLYPNLSKSYANNKEKEVLVLWGVHHPPNIGDQKTLYHTENAYVSVVSSHYSRKFTPEIAKRPKVRDQEGRINYYWTLLEPGDTIIFEANGNLIAPRYAFALSRGFGSGIINSNAPMDKCDAKCQTPQGAINSSLPFQNVHPVTIGECPKYVRSAKLRMVTGLRNIPSIQSRGLFGAIAGFIEGGWTGMVDGWYGYHHQNEQGSGYAADQKSTQNAINGITNKVNSVIEKMNTQFTAVGKEFNKLERRMENLNKKVDDGFIDIWTYNAELLVLLENERTLDFHDSNVKNLYEKVKSQLKNNAKEIGNGCFEFYHKCNDECMESVKNGTYDYPKYSEESKLNREKIDGVKLESMEVYQILAIYSTVASSLVLLVSLGAISFWMCSNGSLQCRICI

SEQ ID NO: 3207 - protein, 566 aa, synthetic construct; identical to SEQ ID NO: 2434
  REGION 1..566: note = hemagglutinin__InfluenzaA__ACU80458

SEQ ID NO: 3208 - protein, 566 aa, synthetic construct; identical to SEQ ID NO: 2434
  REGION 1..566: note = hemagglutinin__InfluenzaA__ACU80470

SEQ ID NO: 3209 - protein, 566 aa, synthetic construct; identical to SEQ ID NO: 2537
  REGION 1..566: note = hemagglutinin__InfluenzaA__ACU80600

SEQ ID NO: 3210 - protein, 566 aa, synthetic construct; identical to SEQ ID NO: 3204
  REGION 1..566: note = hemagglutinin__InfluenzaA__ACU80611

SEQ ID NO: 3211 - protein, 566 aa, synthetic construct; identical to SEQ ID NO: 2537
  REGION 1..566: note = hemagglutinin__InfluenzaA__ACU80622

SEQ ID NO: 3212 - protein, 566 aa, synthetic construct; identical to SEQ ID NO: 2434
  REGION 1..566: note = hemagglutinin__InfluenzaA__ACU80633

SEQ ID NO: 3213 - protein, 566 aa, synthetic construct
  REGION 1..566: note = hemagglutinin__InfluenzaA__ACU80644
MKTIIALSYILCLVFAQKLPGNDNSTATLCLGHHAVPNGTIVKTITNDQIEVTNATELVQSSSTGEICDSPHQILDGENCTLIDALLGDPQCDGFQNKKWDLFVERSKAYSNCYPYDVPDYASLRSLVASSGTLEFNNESFNWTGVTQNGTSSACIRRSNNSFFSRLNWLTHSKFKYPALNVTMPNNEEFDKLYIWGVHHPGTDNDQIFLYAQASGRITVSTKRSQQTVIPNIGSRPRVRNIPSRISIYWTIVKPGDILLINSTGNLIAPRGYFKIRSGKSSIMRSDAPIGKCNSECITPNGSIPNDKPFQNVNRITYGACPRYVKQNTLKLATGMRNVPEKQTRGIFGAIAGFIENGWEGMVDGWYGFRHQNSEGIGQAADLKSTQAAIDQINGKLNRLIGKTNEKFHQIEKEFSEVEGRIQDLEKYVEDTKIDLWSYNAELLVALENQHTIDLTDSEMNKLFEKTKKQLRENAEDMGNGCFKIYHKCDNACIGSIRNGTYDHDVYRDEALNNRFQIKGVELKSGYKDWILWISFAISCFLLCVALLGFIMWACQKGNIRCNICI

SEQ ID NO: 3214 - protein, 566 aa, synthetic construct; identical to SEQ ID NO: 2434
  REGION 1..566: note = hemagglutinin__InfluenzaA__ACU80655

SEQ ID NO: 3215 - protein, 566 aa, synthetic construct; identical to SEQ ID NO: 2434
  REGION 1..566: note = hemagglutinin__InfluenzaA__ACU80666

SEQ ID NO: 3216 - protein, 566 aa, synthetic construct; identical to SEQ ID NO: 1928
  REGION 1..566: note = hemagglutinin__InfluenzaA__ACU80677

SEQ ID NO: 3217 - protein, 566 aa, synthetic construct; identical to SEQ ID NO: 2434
  REGION 1..566: note = hemagglutinin__InfluenzaA__ACU80688

SEQ ID NO: 3218 - protein, 566 aa, synthetic construct; identical to SEQ ID NO: 2537
  REGION 1..566: note = hemagglutinin__InfluenzaA__ACU80699

SEQ ID NO: 3219 - protein, 566 aa, synthetic construct; identical to SEQ ID NO: 2537
  REGION 1..566: note = hemagglutinin__InfluenzaA__ACU80710

SEQ ID NO: 3220 - protein, 566 aa, synthetic construct
  REGION 1..566: note = hemagglutinin__InfluenzaA__ACU80721
MKTIIALSYILCLVFAQKLPGNDNSTATLCLGHHAVPNGTIVKTITNDQTEVTNATELVQSSSTGEICDSPHQILDGENCTLIDALLGDPQCDGFQNKKWDLFVERSKAYSNCYPYDVPDYASLRSLVASSGTLEFNNESFNWTGVTQNGTSSACIRRSNNSFFSRLNWLTHLKFKYPALNVTMPNNEQFDKLYIWGVHHPGTDNDQIFLYAQASGRITVSTKRSQQTVIPNIGSRPRVRNIPSRISIYWTIVKPGDILLINSTGNLIAPRGYFKIRSGKSSIMRSDAPIGKCNSECITPNGSIPNDKPFQNVNRITYGACPRYVKQNTLKLATGMRNVPEKQTRGIFGAIAGFIENGWEGMVDGWYGFRHQNSEGRGQAADLKSTQAAIDQINGKLNRLIGKTNEKFHQIEKEFSEVEGRIQDLEKYVEDTKIDLWSYNAELLVALENQHTIDLTDSEMNKLFEKTKKQLRENAEDMGNGCFKIYHKCDNACIGSIRNGTYDHDVYRDEALNNRFQIKGVELKSGYKDWILWISFAISCFLLCVALLGFIMWACQKGNIRCNICI

SEQ ID NO: 3221 - protein, 566 aa, synthetic construct; identical to SEQ ID NO: 2434
  REGION 1..566: note = hemagglutinin__InfluenzaA__ACU80732

SEQ ID NO: 3222 - protein, 566 aa, synthetic construct; identical to SEQ ID NO: 2434
  REGION 1..566: note = hemagglutinin__InfluenzaA__ACU80743

SEQ ID NO: 3223 - protein, 566 aa, synthetic construct
  REGION 1..566: note = hemagglutinin__InfluenzaA__ACU80754
MKTIIALSYILCLVFAQKLPGNDNSTATLCLGHHAVPNGTIVKTITNDQIEVTNATELVQSSSTGEICDSPHQILDGENCTLIDALLGDPQCDGFQNKKWDLFVERSKAYSNCYPYDVPDYASLRSLVASSGTLEFNNESFNWTGVTQNGTSSACIRRSNNSFFSRLNWLTHLKFKYPALNVTMPNNEQFDKLYIWGVHHPGTDNDQIFLYAQASGRITVSTKRSQQTVIPNIGSRPRVRNIPSRISIYWTIVKPGDILLINSTGNLIAPRGYFKIRSGKSSIMRSDAPIGKCNSECITPNGSIPNDKPFQNVNRITYGACPRYVKQNTLKLATGMRNVPEKQTRGIFGAIAGFIENGWEGMVDGWYGFRHQNSEGRGQAADLKSTQAAIDQINGKLNRLIGKTNEKFHQIEKEFSEVEGRIQDLEKYVEDTKIDLWSYNAELLVALENQHTIDLTDSEMNKLFEKTKKQLRENAEDMGNGCFKIYHKCDNACIGSIRNGTYDHDVYRDEALNNRFQIKGVELKSGYKDWILWISFAISCFLLCVVLLGFIMWACQKGNIRCNICI

SEQ ID NO: 3224 - protein, 566 aa, synthetic construct
  REGION 1..566: note = hemagglutinin__InfluenzaA__ACU80765
MKTIIALSYILCLVFAQKLPGNDNSTATLCLGHHAVPNGTIVKTITNDQIEVTNATELVQSSSTGEICDSPHQILDGENCTLIDALLGDPQCDGFQNKKWDLFVERSKAYSNCYPYDVPDYASLRSLVASSGTLEFNNESFNWTGVTQNGTSSACIRRSNNSFFSRLNWLTHSKFKYPALNVTMPNNEEFDKLYIWGVHHPGTDNDQIFLYAQASGRITVSTKRSQQTVIPNIGSRPRVRNIPSRISIYWTIVKPGDILLINSTGNLIAPRGYFKIRSGKSSIMRSDAPIGKCNSECITPNGSIPNDKPFQNVNRITYGACPRYVKQNTLKLATGMRNVPEKQTRGIFGAIAGFIENGWEGMVDGWYGFRHQNSEGIGQAADLKSTQAAIDQINGKLNRLIGKTNEKFHQIEKEFSEVEGRIQDLEKYVEDTKIDLWSYNAELLVALENQHTIDLTDSEMNKLFEKTKKQLRENAEDMGNGCFKIYHKCDNACIGSIRNGTYDHDVYRDEALNNRFQIKGVELKSGYKDWILWISFAISCFLLCIALLGFIMWACQKGNIRCNICI

SEQ ID NO: 3225 - protein, 566 aa, synthetic construct
  REGION 1..566: note = hemagglutinin__InfluenzaA__ACU80787
MKTIIALSYILCLVFAQKLPGNDNSTATLCLGHHAVPNGTIVKTITNDQIEVTNATELVQSSSTGEICDSPHQILDGENCTLIDALLGDPQCDGFQNKKWDLFVERSKAYSNCYPYDVPDYASLRSLVASSGTLEFNNESFNWTGVTQNGTSSACIRRSNNSFFSRLNWLTHLKFKYPALNVTMPNNEQFDKLYIWGVHHPGTDNDQIFLYAQASGRITVSTKRSQQTVIPNIGSRPRVRNIPSRISIYWTIVKPGDILLINSTGNLIAPRGYFKIRSGKSSIMRSDAPIGKCNSECITPNGSIPNDKPFQNVNRITYGACPRYVKQNTLKLATGMRNVPEKQTRGIFGAIAGFIENGWEGMMDGWYGFRHQNSEGRGQAADLKSTQAAIDQINGKLNRLIGKTNEKFHQIEKEFSEVEGRIQDLEKYVEDTKIDLWSYNAELLVALENQHTIDLTDSEMNKLFEKTKKQLRENAEDMGNGCFKIYHKCDNACIGSIRNGTYDHDVYRDEALNNRFQIKGVELKSGYKDWILWISFAISCFLLCVALLGFIMWACQKGNIRCNICI

SEQ ID NO: 3226 - protein, 566 aa, synthetic construct; identical to SEQ ID NO: 2434
  REGION 1..566: note = hemagglutinin__InfluenzaA__ACU80798

SEQ ID NO: 3227 - protein, 566 aa, synthetic construct; identical to SEQ ID NO: 2434
  REGION 1..566: note = hemagglutinin__InfluenzaA__ACU81103

SEQ ID NO: 3228 - protein, 566 aa, synthetic construct
  REGION 1..566: note = hemagglutinin__InfluenzaA__ACU87270
MKAILVVLLYTFATANADTLCIGYHANNSTDTVDTVLEKNVTVTHSVNLLEDKHNGKLCKLRGVAPLHLGKCNIAGWILGNPECESLSTASSWSYIVETSSSDNGTCYPGDFIDYEELREQLSSVSSFERFEIFPKTSSWPNHDSNKGVTAACPHAGAKSFYKNLIWLVKKGNSYPKLSKSYINDKGKEVLVLWGIHHPSTSADQQSLYQNADAYVFVGTSRYSKKFKPEIAIRPKVRDREGRMNYYWTLIEPGDKITFEATGNLVVPRYAFAMERNAGSGIIISDTPVHDCNTTCQTPKGAINTSLPFQNIHPITIGKCPKYVKSTKLRLATGLRNVPSIQSRGLFGAIAGFIEGGWTGMVDGWYGYHHQNEQGSGYAADLKSTQNAIDEITNKVNSVIEKMNTQFTAVGKEFNHLEKRIENLNKKVDDGFLDIWTYNAELLVLLENERTLDYHDSNVKNLYEKVRSQLKNNAKEIGNGCFEFYHKCDNTCMESVKNGTYDYPKYSEEAKLNREEIDGVKLESTRIYQILAIYSTVASSLVLVVSLGAISFWMCSNGSLQCRICI

SEQ ID NO: 3229 - protein, 566 aa, synthetic construct; identical to SEQ ID NO: 2669
  REGION 1..566: note = hemagglutinin__InfluenzaA__ACV04228

SEQ ID NO: 3230 - protein, 566 aa, synthetic construct; identical to SEQ ID NO: 2669
  REGION 1..566: note = hemagglutinin__InfluenzaA__ACV04238

SEQ ID NO: 3231 - protein, 566 aa, synthetic construct
  REGION 1..566: note = hemagglutinin__InfluenzaA__ACV04248
MEAILVVLLYTFATANADTLCIGYHANNSTDTVDTVLEKNVTVTHSVNLLEDKHNGKLCKLRGVAPLHLGKCNIAGWILGNPECESLSTASSWSYIVETSSSDNGTCYPGDFIDYEELREQLSSVSSFERFEIFPKTSSWPNHDSNKGITAACPHAGAKSFYKNLIWLVKKGNSYPKLSKSYINDKGKEVLVLWGIHHPSTSADQQSLYQNADAYVFVGSSRYSKKFKPEIAIRPKVRDQEGRMNYYWTLVEPGDKITFEATGNLVVPRYAFAMERNAGSGIIISDTPVHDCNTTCQTPKGAINTSLPFHNIHPITIGKCPKYVKSTKLRLATGLRNVPSIQSRGLFGAIAGFIEGGWTGMVDGWYGYHHQNEQGSGYAADLKSTQNAIDEITNKVNSVIEKMNTQFTAVGKEFNHLEKRIENLNKKVDDGFLDIWTYNAELLVLLENERTLDYHDSNVKNLYEKVRSQLKNNAKEIGNGCFEFYHKCDNTCMESVKNGTYDYPKYSEEAKLNREEIDGVKLESTRIYQILAIYSTVASSLVLVVSLGAISFWMCSNGSLQCRICI

SEQ ID NO: 3232 - protein, 566 aa, synthetic construct; identical to SEQ ID NO: 2669
  REGION 1..566: note = hemagglutinin__InfluenzaA__ACV04258

SEQ ID NO: 3233 - protein, 566 aa, synthetic construct; identical to SEQ ID NO: 2669
  REGION 1..566: note = hemagglutinin__InfluenzaA__ACV04268

SEQ ID NO: 3234 - protein, 566 aa, synthetic construct; identical to SEQ ID NO: 2669
  REGION 1..566: note = hemagglutinin__InfluenzaA__ACV04278

SEQ ID NO: 3235 - protein, 566 aa, synthetic construct; identical to SEQ ID NO: 2669
  REGION 1..566: note = hemagglutinin__InfluenzaA__ACV04288

SEQ ID NO: 3236 - protein, 566 aa, synthetic construct
  REGION 1..566: note = hemagglutinin__InfluenzaA__ACV04298
MKAILVVLLYTFATANADTLCIGYHANNSTDTVDTVLEKNVTVTHSVNLLEDKHNGKLCKLRGVAPLHLGKCNIAGWILGNPECESLSTASSWSYIVETSSSDNGTCYPGDFIDYEELREQLSSVSSFERFEIFPKTSSWPNHDSNKGVTAACPHAGAKSFYKNLIWLVKKGNSYPKLSKSYINDKGKEVLVLWGIHHPSTSADQQSLYQNADAYVFVGTSRYSKKFKPEIAIRPKVRDQEGRMNYYWTLVEPGDKITFEATGNLVVPRYAFAMERNAGSGIIISDTPVHDCNTTCQTPKGAINTSLPFQNIHPVTIGKCPKYVKSTKLRLATGLRNVPSIQSRGLFGAIAGFIEGGWTGMVDGWYGYHHQNEQGSGYAADLKSTQNAIDEITNKVNSVIEKMNTQFTAVGKEFNHLEKRIENLNKKVDDGFLDIWTYNAELLVLLENERTLDYHDSNVKNLYEKVRSQLKNNAKEIGNGCFEFYHKCDNTCMESVKNGTYDYPKYSEEAKLNREEIDGVKLESTRIYQILAIYSTVASSLVLVVSLGAISFWMCSNGSLQCRICI

SEQ ID NO: 3237 - protein, 566 aa, synthetic construct; identical to SEQ ID NO: 2669
  REGION 1..566: note = hemagglutinin__InfluenzaA__ACV04308

SEQ ID NO: 3238 - protein, 566 aa, synthetic construct
  REGION 1..566: note = hemagglutinin__InfluenzaA__ACV04318
MKAILVVLLYTFATANADTLCIGYHANNSTDTVDTVLEKNVTVTHSVNLLEDKHNGKLCKLRGVAPLHLGKCNIAGWILGNPECESLSTASSWSYIVETSSSDNGTCYPGDFIDYEELREQLSSVSSFERFEIFPKTSSWPNHDSNKGVTAACPHAGAKSFYKNLIWLVKKGNSYPKLSKSYINDKGKEVLVLWGIHHPSTSADQQSLYQNADAYVFVGTSRYSKKFKPEIAIRPKVRDQEGRMNYYWTLVEPGDKITFEATGNLVVPRYAFAMERNAGSGIIISDTPVHNCNTTCQTPKGAINTSLPFQNIHPITIGKCPKYVKSTKLRLATGLRNVPSIQSRGLFGAIAGFIEGGWTGMVDGWYGYHHQNEQGSGYAADLKSTQNAIDEITNKVNSVIEKMNTQFTAVGKEFNHLEKRIENLNKKVDDGFLDIWTYNAELLVLLENERTLDYHDSNVKNLYEKVRSQLKNNAKEIGNGCFEFYHKCDNTCMESVKNGTYDYPKYSEEAKLNREEIDGVKLESTRIYQILAIYSTVASSLVLVVSLGAISFWMCSNGSLQCRICI

SEQ ID NO: 3239 - protein, 566 aa, synthetic construct; identical to SEQ ID NO: 2669
  REGION 1..566: note = hemagglutinin__InfluenzaA__ACV04328

SEQ ID NO: 3240 - protein, 566 aa, synthetic construct; identical to SEQ ID NO: 2669
  REGION 1..566: note = hemagglutinin__InfluenzaA__ACV04338

SEQ ID NO: 3241 - protein, 566 aa, synthetic construct; identical to SEQ ID NO: 2911
  REGION 1..566: note = hemagglutinin__InfluenzaA__ACV04358

SEQ ID NO: 3242 - protein, 566 aa, synthetic construct
  REGION 1..566: note = hemagglutinin__InfluenzaA__ACV04368
MKAILVVLLYTFATANADTLCIGYHANNSTDTVDTVLEKNVTVTHSVNLLEDKHNGKLCQLRGVAPLHLGKCNIAGWILGNPECESLSTASSWSYIVETSSSDNGTCYPGDFIDYEELREQLSSVSSFERFEIFPKTSSWPNHDSNKGVTAACPHAGAKSFYKNLIWLVKKGNSYPKLSKSYINDKGKEVLVLWGIHHPSTSADQQSLYQNADAYVFVGTSRYSKKFKPEIAIRPKVRDQEGRMNYYWTLVEPGDKITFEATGNLVVPRYAFAMERNAGSGIIISDTPVHDCNTTCQTPKGAINTSLPFQNIHPITIGKCPKYVKSTKLRLATGLRNVPSIQSRGLFGAIAGFIEGGWTGMVDGWYGYHHQNEQGSGYAADLKSTQNAIDEITNKVNSVIEKMNTQFTAVGKEFNHLEKRIENLNKKVDDGFLDIWTYNAELLVLLENERTLDYHDSNVKNLYEKVRSQLKNNAKEIGNGCFEFYHKCDNTCMESVKNGTYDYPKYSEEAKLNREEIDGVKLESTRIYQILAIYSTVASSLVLVVSLGAISFWMCSNGSLQCRICI

SEQ ID NO: 3243 - protein, 566 aa, synthetic construct
  REGION 1..566: note = hemagglutinin__InfluenzaA__ACV04378
MKAILVVLLYTFATANADTLCIGYHANNSTDTVDTVLEKNVTVTHSVNLLEDKHNGKLCKLRGVAPLHLGKCNIAGWILGNPECESLSTASSWSYIVETSSSDNGTCYPGDFIDYEELREQLSSVSSFERFEIFPKTSSWPNHDSNKGVTAACPHAGAKSFYKNLIWLVKKGNSYPKLSKSYINDKGKEVLVLWGIHHPSTSADQQSLYQNADAYVFVGTSRYSKKFKPEIAIRPKVRDQEGRMNYYWTLVEPGDKITFEATGNLVVPRYAFAMERNAGSGIIISDTPVHDCNTTCQTPKGAINTSLPFQNIHPITIGKCPKYVKSTKLRLATGLRNIPSIQSRGLFGAIAGFIEGGWTGMVDGWYGYHHQNEQGSGYAADLKSTQNAIDEITNKVNSVIEKMNTQFTAVGKEFNHLEKRIENLNKKVDDGFLDIWTYNAELLVLLENERTLDYHDSNVKNLYEKVRSQLKNNAKEIGNGCFEFYHKCDNTCMESVKNGTYDYPKYSEEAKLNREEIDGVKLESTRIYQILAIYSTVASSLVLIVSLGAISFWMCSNGSLQCRICI

SEQ ID NO: 3244 - protein, 566 aa, synthetic construct; identical to SEQ ID NO: 2911
  REGION 1..566: note = hemagglutinin__InfluenzaA__ACV04388

SEQ ID NO: 3245 - protein, 566 aa, synthetic construct; identical to SEQ ID NO: 2669
  REGION 1..566: note = hemagglutinin__InfluenzaA__ACV04398

SEQ ID NO: 3246 - protein, 566 aa, synthetic construct; identical to SEQ ID NO: 2913
  REGION 1..566: note = hemagglutinin__InfluenzaA__ACV04408

SEQ ID NO: 3247 - protein, 566 aa, synthetic construct; identical to SEQ ID NO: 2669
  REGION 1..566: note = hemagglutinin__InfluenzaA__ACV04489

SEQ ID NO: 3248 - protein, 566 aa, synthetic construct; identical to SEQ ID NO: 2669
  REGION 1..566: note = hemagglutinin__InfluenzaA__ACV04499

SEQ ID NO: 3249 - protein, 566 aa, synthetic construct; identical to SEQ ID NO: 2849
  REGION 1..566: note = hemagglutinin__InfluenzaA__ACV04509

SEQ ID NO: 3250 - protein, 566 aa, synthetic construct; identical to SEQ ID NO: 2669
  REGION 1..566: note = hemagglutinin__InfluenzaA__ACV04519

SEQ ID NO: 3251 - protein, 566 aa, synthetic construct; identical to SEQ ID NO: 2669
  REGION 1..566: note = hemagglutinin__InfluenzaA__ACV04529

SEQ ID NO: 3252 - protein, 566 aa, synthetic construct; identical to SEQ ID NO: 2669
  REGION 1..566: note = hemagglutinin__InfluenzaA__ACV04549

SEQ ID NO: 3253 - protein, 566 aa, synthetic construct; identical to SEQ ID NO: 2669
  REGION 1..566: note = hemagglutinin__InfluenzaA__ACV04559

SEQ ID NO: 3254 - protein, 566 aa, synthetic construct; identical to SEQ ID NO: 2669
  REGION 1..566: note = hemagglutinin__InfluenzaA__ACV04579

SEQ ID NO: 3255 - protein, 566 aa, synthetic construct
  REGION 1..566: note = hemagglutinin__InfluenzaA__ACV04751
MEAILVVMLYTFATANADTLCIGYHANNSTDTVDTVLEKNVTVTHSVNLLEDKHNGKLCKLRGVAPLRLGKCNIAGWILGNPECESLSTASSWSYIVETSSSDNGTCYPGDFIDYEELREQLSSVSSFERFEIFPKTSSWPNHDSNKGVTAACPHAGAKSFYKNLIWLVKKGNSYPKLSKSYINDKGKEVLVLWGIHHPSTSADQQSLYQNADAYVFVGTSRYSKKFKPEIAIRPKVRDQEGRMNYYWTLVEPGDKITFEATGNLVVPRYAFAMERNAGSGIIISDTPVHNCNTTCQTPKGAINTSLPFQNIHPITIGKCPKYVKSTKLRLATGLRNVPSIQSRGLFGAIAGFIEGGWTGMVDGWYGYHHQNEQGSGYAADLKSTQNAIDEITNKVNSVIEKMNTQFTAVGKEFNHLEKRIENLNKKVDDGFLDIWTYNAELLVLLENERTLDYHDSNVKNLYEKVRSQLKNNTKEIGNGCFEFYHKCDNTCMESVKNGTYDYPKYSEEAKLNREEIDGVKLESTRIYQILAIYSTVASSLVLVVSLGAISFWMCSNGSLQCRICI

SEQ ID NO: 3256 - protein, 566 aa, synthetic construct
  REGION 1..566: note = hemagglutinin__InfluenzaA__ACV04752
MEAILVVLLYTFATANADTLCIGYHANNSTDTVDTVLEKNVTVTHSVNILEDKHNGKLCKLRGVAPLHLGKCNIAGWILENPECESLSTASSWSYIVETSSSDNGTCYPGDFIDYEELREQLSSVSSFERFEIFPKTSSWPNHDSNKGVTAACPHAGAKSFYKNLIWLVKKGNSYPKLSKSYINDKGKEVLVLWGIHHPSTSADQQSLYQNADAYVFVGSSRYSKKFKPEIAIRPKVRDQEGRMNYYWTLVEPGDKITFEATGNLVVPRYAFAMERNAGSGIIISDTPVHDCNTTCQTPKGAINTSLPFHNIHPITIGKCPKYVKSTKLRLATGLRNVPSIQSRGLFGAIAGFIEGGWTGMVDGWYGYHHQNEQGSGYAADLKSTQNAIDEITNKVNSVIEKMNTQFTAVGKEFNHLEKRIENLNKKVDDGFLDIWTYNAELLVLLENERTLDYHDSNVKNLYEKVRSQLKNNAKEIGNGCFEFYHKCDNTCMESVKNGTYDYPKYSEEAKLNREEIDGVKLESTRIYQILAIYSTVASSLVLVVSLGAISFWMCSNGSLQCRICI

SEQ ID NO: 3257 - protein, 566 aa, synthetic construct
  REGION 1..566: note = hemagglutinin__InfluenzaA__ACV04753
MEAILVVLLYTFATANADTLCIGYHANNSTDTVDTVLEKNVTVTHSVNLLEDKHNGKLCKLRGVAPLHLGKCNIAGWILGNPECESLSTASSWSYIVETSSSDNGTCYPGDFIDYEELREQLSSVSSFERFEIFPKTSSWPNHDSNKGVTAACPHAGAKSFYKNLIWLVKKGNSYPKLSKSYINDKGKEVLVLWGIHHPSTSADQQSLYQNADAYVFVGTSRYSKKFKPEIAIRPKVRDREGRMNYYWTLVEPGDKITFEATGNLVVPRYAFAMERNAGSGIIISDTPVHDCNTTCQTPKGAINTSLPFQNIHPITIGKCPKYVKSTKLRLATGLRNVPSIQSRGLFGAIAGFIEGGWTGMVDGWYGYHHQNEQGSGYAADLKSTQNAIDEITNKVNSVIEKMNTQFTAVGKEFNHLEKRIENLNKKVDDGFLDIWTYNAELLVLLENERTLDYHDSNVKNLYEKVRSQLKNNAKEIGNGCFEFYHKCDNTCMESVKNGTYDYPKYSEEAKLNREEIDGVKLESTRIYQILAIYSTVASSLVLVVSLGAISFWMCSNGSLQCRICI

SEQ ID NO: 3258 - protein, 566 aa, synthetic construct
  REGION 1..566: note = hemagglutinin__InfluenzaA__ACV04754
MEAILVVLLYTFATANADTLCIGYHANNSTDTVDTVLEKNVPVTHSVNLLKDKHNGKLCKLRGVAPLHLGKCNIAGWILGNPECESLSTASSWSYIVETSSSDNGTCYPGDFIDYEELREQLSSVSSFERFEIFPKTSSWPNHESNKGVTAACPHAGAKSFYKNLIWLVKKGNSYPKLSKSYINDKGKEVLVLWGIHHPSTSADQQSLYQNADAYVFVGTSRYSKKFKPEIAIRPKVRDQEGRMNYYWTLVEPGDKITFEATGNLVVPRYAFAMERNAGSGIIISDTPVHDCNTTCQTPKGAINTSLPFQNIHPITIGKCPKYVKSTKLRLATGLRNVPSIQSRGVFGAIAGFIEGGWTGMVDGWYGYHHQNEQGSGYAADLKSTQNAIDEITNKVNSVIEKMNTQFTAVGKEFNHLEKRIENLNKKVDDGFLDIWTYNAELLVLLENERTLDYHDSNVKNLYEKVRSQLKNNAKEIGNGCFEFYHKCDNTCMESVKNGTYDYPKYSEEAKLNREEIDGVKLESTRIYQILAIYSTVASSLVLVVSLGAISFWMCSNGSLQCRICI

SEQ ID NO: 3259 - protein, 566 aa, synthetic construct; identical to SEQ ID NO: 3154
  REGION 1..566: note = hemagglutinin__InfluenzaA__ACV04755

SEQ ID NO: 3260 - protein, 566 aa, synthetic construct; identical to SEQ ID NO: 2849
  REGION 1..566: note = hemagglutinin__InfluenzaA__ACV33084

SEQ ID NO: 3261 - protein, 566 aa, synthetic construct; identical to SEQ ID NO: 2669
  REGION 1..566: note = hemagglutinin__InfluenzaA__ACV33094

SEQ ID NO: 3262 - protein, 566 aa, synthetic construct; identical to SEQ ID NO: 2669
  REGION 1..566: note = hemagglutinin__InfluenzaA__ACV33104

SEQ ID NO: 3263 - protein, 566 aa, synthetic construct; identical to SEQ ID NO: 2669
  REGION 1..566: note = hemagglutinin__InfluenzaA__ACV33114

SEQ ID NO: 3264 - protein, 566 aa, synthetic construct; identical to SEQ ID NO: 2669
  REGION 1..566: note = hemagglutinin__InfluenzaA__ACV33124

SEQ ID NO: 3265 - protein, 566 aa, synthetic construct; identical to SEQ ID NO: 2669
  REGION 1..566: note = hemagglutinin__InfluenzaA__ACV33134

SEQ ID NO: 3266 - protein, 566 aa, synthetic construct; identical to SEQ ID NO: 3231
  REGION 1..566: note = hemagglutinin__InfluenzaA__ACV33144

SEQ ID NO: 3267 - protein, 566 aa, synthetic construct; identical to SEQ ID NO: 2669
  REGION 1..566: note = hemagglutinin__InfluenzaA__ACV33154

SEQ ID NO: 3268 - protein, 566 aa, synthetic construct; identical to SEQ ID NO: 2669
  REGION 1..566: note = hemagglutinin__InfluenzaA__ACV33164

SEQ ID NO: 3269 - protein, 566 aa, synthetic construct; identical to SEQ ID NO: 2669
  REGION 1..566: note = hemagglutinin__InfluenzaA__ACV33174

SEQ ID NO: 3270 - protein, 566 aa, synthetic construct; identical to SEQ ID NO: 2656
  REGION 1..566: note = hemagglutinin__InfluenzaA__ACV41981

SEQ ID NO: 3271 - protein, 566 aa, synthetic construct; identical to SEQ ID NO: 2695
  REGION 1..566: note = hemagglutinin__InfluenzaA__ACV41991

SEQ ID NO: 3272 - protein, 566 aa, synthetic construct; identical to SEQ ID NO: 2695
  REGION 1..566: note = hemagglutinin__InfluenzaA__ACV42001

SEQ ID NO: 3273 - protein, 566 aa, synthetic construct; identical to SEQ ID NO: 2669
  REGION 1..566: note = hemagglutinin__InfluenzaA__ACV42008

SEQ ID NO: 3274 - protein, 566 aa, synthetic construct; identical to SEQ ID NO: 2669
  REGION 1..566: note = hemagglutinin__InfluenzaA__ACV42018

SEQ ID NO: 3275 - protein, 566 aa, synthetic construct; identical to SEQ ID NO: 2316
  REGION 1..566: note = hemagglutinin__InfluenzaA__ACV49501

SEQ ID NO: 3276 - protein, 566 aa, synthetic construct
  REGION 1..566: note = hemagglutinin__InfluenzaA__ACV49512
MKTIIALSYIFCLALGQDLPGNDNSTATLCLGHHAVPNGTLVKTITDDQIEVTNATELVQSSSTGKICNNPHRILDGIDCTLIDALLGDPHCDVFQNETWDLFVERSKAFSNCYPYDVPDYASLRSLVASSGTLEFITEGFTWTGVTQNGGSNACKRGPGSGFFSRLNWLTKSGSTYPVLNVTMPNNDNFDKLYIWGVHHPSTNQEQTSLYVQASGRVTVSTRRSQQTIIPNIESRPWVRGLSSRISIYWTIVKPGDVLVINSNGNLIAPRGYFKMRTGKSSIMRSDAPIDTCISECITPNGSIPNDKPFQNVNKITYGACPKYVKQNTLKLATGMRNVPEKQTRGLFGAIAGFIENGWEGMIDGWYGFRHQNSEGTGQAADLKSTQAAIDQINGKLNRVIEKTNEKFHQIEKEFSEVEGRIQDLEKYVEDTKIDLWSYNAELLVALENQHTIDLTDSEMNKLFEKTRRQLRENAEDMGNGCFKIYHKCDNACIESIRNGTYDHDVYRDEALNNRFQIKDVELKSGYKDWILWISFAISCFLLCVVLLGFIMWACQRGNIRCNICI

SEQ ID NO: 3277 - protein, 566 aa, synthetic construct; identical to SEQ ID NO: 2329
  REGION 1..566: note = hemagglutinin__InfluenzaA__ACV49523

SEQ ID NO: 3278 - protein, 565 aa, synthetic construct
  REGION 1..565: note = hemagglutinin__InfluenzaA__ACV49545
MKANLLVLLCALAAADADTICIGYHANNSTDTVDTVLEKNVTVTHSVNLLEDSHNGKLCRLKGIAPLQLGKCNIAGWLLGNPECDPLLPVRSWSYIVETPNSENGICYPGDFIDYEELREQLSSVSSFERFEIFPKESSWPNHNTNGVTAACSHEGKSSFYRNLLWLTEKEGSYPKLKNSYVNKKGKEVLVLWGIHHPPNSKEQQNLYQNENAYVSVVTSNYNRRFTPEIAERPKVRDQAGRMNYYWTLLKPGDTIIFEANGNLIAPMYAFALSRGFGSGIITSNASMHECNTKCQTPLGAINSSLPYQNIHPVTIGECPKYVRSAKLRMVTGLRNIPSIQSRGLFGAIAGFIEGGWTGMIDGWYGYHHQNEQGSGYAADQKSTQNAINGITNKVNTVIEKMNIQFTAVGKEFNKLEKRMENLNKKVDDGFLDIWTYNAELLVLLENERTLDFHDSNVKNLYEKVKSQLKNNAKEIGNGCFEFYHKCDNECMESVRNGTYDYPKYSEESKLNREKVDGVKLESMGIYQILAIYSTVASSLVLLVSLGAISFWMCSNGSLQCRICI

SEQ ID NO: 3279 - protein, 566 aa, synthetic construct
  REGION 1..566: note = hemagglutinin__InfluenzaA__ACV49556
MKARLLILLCALAATDADTICIGYHANNSTDTVDTVLEKNVTVTHSVNLLEDSHNGKLCRLKGIAPLQLGKCNIAGWILGNPECDSLLPASSWSYIVETPNSKNGICYPGDFIDYEELREQLSSVSSFERFEIFPKESSWPKHSTTKGVTAACSHAGKSSFYRNLLWLTKKEDSYPKLSNSYVNKKGKEVLVLWGVHHPSSSKEQQTLYQNENAYVSVVSSNYNRRFIPEIAERPEVKDQAGRINYYWTLLEPGDTIIFEANGNLVAPWYAFALSRGFGSGIITSNASMHECNTKCQTPQGAINSSLPFQNIHPVTIGECPKYVKSAKLRMVTGLRNIPSIQSRGLFGAIAGFIEGGWTGMIDGWYGYHHQNEQGSGYAADQKSTQNAINGITNKVNSVIEKMNTQFTAVGKEFNNLEKRMENLNKKVDDGFLDIWTYNAELLVLLENERTLDFHDSNVKNLYEKVKIQLKNNAKEIGNGCFEFYHKCDNECMESVRNGTYDYPKYSKESKLNREKIDGVKLESMGVYQILAIYSTVASSLVLLVSLGAISFWMCSNGSLQCRICI

SEQ ID NO: 3280 - protein, 566 aa, synthetic construct
  REGION 1..566: note = hemagglutinin__InfluenzaA__ACV49567
MKAKLLILLCALTATDADTICIGYHANNSTDTVDTVLEKNVTVTHSVNLLEDSHNGKLCRLKGIAPLQLGKCNIAGWILGNPECESLLSKRSWSYIAETPNSENGACYPGDFADYEELREQLSSVSSFERFEIFPKERSWPKHNITRGVTAACSHAGKSSFYKNLLWLTETDGSYPKLSKSYVNNKEKEVLVLWGVHHPSNIEDQKTLYRKENAYVSVVSSNYNRRFTPEIAERPKVRGQAGRINYYWTLLEPGDTIIFEANGNLIAPWYAFALSRDFGSGIITSNASMDECDTKCQTPQGAINSSLPFQNIHPVTIGECPKYVKSTKLRMVTGLRNIPSIQSRGLFGAIAGFIEGGWTGMIDGWYGYHHQNEQGSGYAADQKSTQNAINWITNKVNSVIEKMNTQFTAVGKEFNKLEKRMENLNKKVDDGFLDIWTYNAELLVLLENERTLDFHDSNVKNLYEKVKNQLRNNAKEIGNGCFEFYHKCNNECMESVKNGTYDYPKYSEESKLNREKIDGVKLESMGVYQILAIYSTVASSLVLLVSLGAISFWMCSNGSLQCRICI

SEQ ID NO: 3281 - protein, 562 aa, synthetic construct
  REGION 1..562: note = hemagglutinin__InfluenzaA__ACV49578
MAIIYLILLFTAVRGDQICIGYHANNSTEKVDTILERNVTVTHAKDILEKTHNGKLCKLNGIPPLELGDCSIAGWLLGNPECDRLLRVPEWSYIMEKENPKYSLCYPGSFNDYEELKHLLSSVKHFEKVKILPKDRWTQHTTTGGSRACAVSGNPSFFRNMVWLTKKGPNYPVAKGSYNNTSGEQMLIIWGVHHPIDEAEQIALYQKVGTYVSASTSTLNKRSTPEIAARPEVNGLGSRMEFSWTLLDMWDTINFESTGNLVAPEYGFKISKRGSSGIMKTEGTLENCETKCQTPLGAINTTLPFHNVHPLTIGECPKYVKSEKLVLATGLRNVPQIESRGLFGAIAGFIEGGWQGMVDGWYGYHHSNDQGSGYAADKESTQKAFDGITNKVNSVIEKMNTQFEAVGKEFSNLEKRLENLNKKMEDGFLDVWTYNAELLVLMENERTLDFHDSNVKNLYDKVRMQLRDNVKELGNGCFEFYHKCDDECMDSVKNGTYDYPKYEEESKLNRNEIKGVKLSSMGVYQILAIYATVAGSLSLAIMMAGISFWMCSNGSLQCRICI

SEQ ID NO: 3282 - protein, 562 aa, synthetic construct; identical to SEQ ID NO: 3281
  REGION 1..562: note = hemagglutinin__InfluenzaA__ACV49589

SEQ ID NO: 3283 - protein, 562 aa, synthetic construct
  REGION 1..562: note = hemagglutinin__InfluenzaA__ACV49600
MAIIYLILLFTAVRGDQICIGYHANNSTEKVDTILERNVTVTHAKDILEKTHNGKLCKLNGIPPLELGDCSIAGWLLGNPECDRLLSVPEWSYIMEKENPRDGLCYPGSFNDYEELKHLLSSVKHFEKVKILPKDRWTQHTTTGGSRACAVSGNPSFFRNMVWLTEKGSNYPVAKGSYNNTSGEQMLIIWGVHHPNDETEQRTLYQNVGTYVSVGTSTLNKRSTPEIATRPKVNGQGGRMEFSWTLLDMWDTINFESTGNLIAPEYGFKISKRGSSGIMKTEGTLENCETKCQTPLGAINTTLPFHNVHPLTIGECPKYVKSEKLVLATGLRNVPQIESRGLFGAIAGFIEGGWQGMVDGWYGYHHSNDQGSGYAADKESTQKAFDGITNKVNSVIEKMNTQFEAVGKEFSNLERRLENLNKKMEDGFLDVWTYNAELLVLMENERTLDFHDSNVKNLYDKVRMQLRDNVKELGNGCFEFYHKCDDECMNSVKNGTYDYPKYEEESKLNRNEIKGVKLSSMGVYQILAIYATVAGSLSLAIMMAGISFWMCSNGSLQCRICI

SEQ ID NO: 3284 - protein, 562 aa, synthetic construct
  REGION 1..562: note = hemagglutinin__InfluenzaA__ACV49611
MAIIYLILLFTAVRGDQICIGYHANNSTEKVDTILERNVTVTHAKDILEKTHNGKLCKLNGIPPLELGDCSIAGWLLGNPECDRLLSVPEWSYIMEKENPRDGLCYPGSFNDYEELKHLLSSVKHFEKVKILPKDRWTQHTTTGGSRACAVSGNPSFFRNMVWLTEKGSNYPVAKGSYNNTSGEQMLIIWGVHHPNDETEQRTLYQNVGTYVSVGTSTLNKRSTPKIATRPKVNGQGGRMEFSWTLLDMWDTINFESTGNLIAPEYGFKISKRGSSGIMKTEGTLENCETKCQTPLGAINTTLPFHNVHPLTIGECPKYVKSEKLVLATGLRNVPQIESRGLFGAIAGFIEGGWQGMVDGWYGYHHSNDQGSGYAADKESTQKAFDGITNKVNSVIEKMNTQFEAVGKEFSNLERRLENLNKKVEDGFLDVWTYNAELLVLMENERTLDFHDSNVKNLYDKVRMQLRDNVKELGNGCFEFYHKCDDECMNSVKNGTYDYPKYEEESKLNRNEIKGVKLSSMGVYQILAIYATVAGSLSLAIMMAGISFWMCSNGSLQCRICI

SEQ ID NO: 3285 - protein, 566 aa, synthetic construct
  REGION 1..566: note = hemagglutinin__InfluenzaA__ACV49633
MKTIIALSYILCLVFAQKLPGNDNSTATLCLGHHAVPNGTLVKTITNDQIEVTNATELVQSSSTGRICDSPHRILDGKNCTLIDALLGDPHCDGFQNKEWDLFVERSKAYSNCYPYDVPDYASLRSLVASSGTLEFTNEGFNWTGVAQDGTSYACKRGSVKSFFSRLNWLHKLEYKYPALNVTMPNNDKFDKLYIWGVHHPSTDSVQTSLYVQASGRVTVSTKRSQQTVIPNIGSRPWVRGISSRISIYWTIVKPGDILLINSTGNLIAPRGYFKIRSGKSSIMRSDAPIGNCNSECITPNGSIPNDKPFQNVNRITYGACPRYVKQNTLKLATGMRNVPEKQTRGIFGAIAGFIENGWEGMVDGWYGFRHQNSEGTGQAADLKSTQAAINQINGKLNRLIEKTNEKFPQIEKEFSEVEGRIQDLEKYVEDTKIDLWSYNAELLVALENQHTIDLTDSEMNKLFERTRKQLRENAEDMGNGCFKIYHKCDNACIGSIRNGTYDHDVYRDEALNNRFQIKGVELKSGYKDWILWISFAISCFLLCVVLLGFIMWACQKGNIRCNICI

SEQ ID NO: 3286 - protein, 566 aa, synthetic construct; identical to SEQ ID NO: 2356
  REGION 1..566: note = hemagglutinin__InfluenzaA__ACV49644

SEQ ID NO: 3287 - protein, 565 aa, synthetic construct; identical to SEQ ID NO: 3175
  REGION 1..565: note = hemagglutinin__InfluenzaA__ACV49676

SEQ ID NO: 3288 - protein, 566 aa, synthetic construct; identical to SEQ ID NO: 2656
  REGION 1..566: note = hemagglutinin__InfluenzaA__ACV53450

SEQ ID NO: 3289 - protein, 566 aa, synthetic construct; identical to SEQ ID NO: 2656
  REGION 1..566: note = hemagglutinin__InfluenzaA__ACV53460

SEQ ID NO: 3290 - protein, 566 aa, synthetic construct; identical to SEQ ID NO: 2656
  REGION 1..566: note = hemagglutinin__InfluenzaA__ACV53480

SEQ ID NO: 3291 - protein, 566 aa, synthetic construct
  REGION 1..566: note = hemagglutinin__InfluenzaA__ACV53490
MEAILVVLLYTFATANADTLCIGYHANNSTDTVDTVLEKNVTVTHSVNLLEDKHNGKLCKLRGVAPLHLGKCDIAGWILGNPECESLSTASSWSYIVETSSSDNGTCYPGDFIDYEELREQLSSVSSFERFEIFPKTSSWPNHDSNKGVTAACPHAGAKSFYKNLIWLVKKGNSYPKLSKSYINDKGKEVLVLWGIHHPSTSADQQSLYQNADAYVFVGSSRYSKKFKPEIAIRPKVRDQEGRMNYYWTLVEPGDKITFEATGNLVVPRYAFAMERNAGSGIIISDTPVHDCNTTCQTPKGAINTSLPFHNIHPITIGKCPKYVKSTKLRLATGLRNVPSIQSRGLFGAIAGFIEGGWTGMVDGWYGYHHQNEQGSGYAADLKSTQNAIDEITNKVNSVIEKMNTQFTAVGKEFNHLETRIENLNKKVDDGFLDIWTYNAELLVLLENERTLDYHDSNVKNLYEKVRSQLKNNAKEIGNGCFEFYHKCDNTCMESVKNGTYDYPKYSEEAKLNREEIDGVKLESTRIYQILAIYSTVASSLVLVVSLGAISFWMCSNGSLQCRICI

SEQ ID NO: 3292 - protein, 566 aa, synthetic construct
  REGION 1..566: note = hemagglutinin__InfluenzaA__ACV53500
MEAILVVLLYTFATANADTLCIGYHANNSTDTVDTVLEKNVTVTHSVNLLEDKHNGKLCKLRGVAPLHLGKCNIAGWILGNPECESLSTASSWSYIVETSSSDNGTCYPGDFIDYEELREQLSSVSSFERFEIFPKTSSWPNHDSNKGVTAACPHAGAKSFYKNLIWLVKKGNSYPKLSKSYINDKGKEVLVLWGIHHPSTSADQQSLYQNADAYVFVGSSRYSKKFKPEIAIRPKVRDQEGRMNYYWTLVEPGDKITFEATGNLVVPRYAFAMERNAGSGIIISDTPVHDCNTTCQTPKGAINTSLPFHNIHPITIGKCPKYVKSTKLRLATGLRNVPSIQSRGLFGAIAGFIEGGWTGMVDGWYGYHHQNEQGSGYAADLKSTQNAIDEITNKVNSVIEKMNTQFTAVGKEFNHLETRIENLNKKVDDGFLDIWTYNAELLVLLENERTLDYHDSNVKNLYEKVRSQLKNNAKEIGNGCFEFYHKCDNTCMESVKNGTYDYPKYSEEAKLNREEIDGVKLESTRIYQILAIYSTVASSLVLVVSLGAISFWMCSNGSLQCRICI

SEQ ID NO: 3293 - protein, 566 aa, synthetic construct
  REGION 1..566: note = hemagglutinin__InfluenzaA__ACV53880
MKAILVVLLYTFATANADTLCIGYHANNSTDTVDTVLEKNVTVTHSVNLLEDKHNGKLCKLRGVAPLHLGKCNIAGWILGNPECESLSTASSWSYIVETSSSDNGTCYPGDFIDYEELREQLSSVSSFERFEIFPKTSSWPNHDSNKGVTTACPHAGAKSFYKNLIWLVKKGNSYPKLSKSYINDKGKEVLVLWGIHHPSTSADQQSLYQNADAYVFVGTSRYSKKFKPEIAIRPKVRDQEGRMNYYWTLVEPGDKITFEATGNLVVPRYAFAMERNAGSGIIISDTPVHDCNTTCQTPKGAINTSLPFQNIHPITIGKCPKYVKSTKLRLATGLRNVPSIQSRGLFGAIAGFIEGGWTGMVDGWYGYHHQNEQGSGYAADLKSTQNAIDEITNKVNSVIEKMNTQFTAVGKEFNHLEKRIENLNKKVDDGFLDIWTYNAELLVLLENERTLDYHDSNVKNLYEKVRSQLKNNAKEIGNGCFEFYHKCDNTCMESVKNGTYDYPKYSEEAKLNREEIDGVKLESTRIYQILAIYSTVASSLVLVVSLGAISFWMCSNGSLQCRICI

SEQ ID NO: 3294 - protein, 566 aa, synthetic construct; identical to SEQ ID NO: 2669
  REGION 1..566: note = hemagglutinin__InfluenzaA__ACV53881

SEQ ID NO: 3295 - protein, 566 aa, synthetic construct; identical to SEQ ID NO: 2656
  REGION 1..566: note = hemagglutinin__InfluenzaA__ACV53882

SEQ ID NO: 3296 - protein, 566 aa, synthetic construct; identical to SEQ ID NO: 2669
  REGION 1..566: note = hemagglutinin__InfluenzaA__ACV53883

SEQ ID NO: 3297 - protein, 566 aa, synthetic construct; identical to SEQ ID NO: 2669
  REGION 1..566: note = hemagglutinin__InfluenzaA__ACV53885

SEQ ID NO: 3298 - protein, 566 aa, synthetic construct
  REGION 1..566: note = hemagglutinin__InfluenzaA__ACV53899
MKAILVVLLYTFATANADTLCIGYHANNSTDTVDTVLEKNVTVTHSVNLLEDKHNGKLCKLRGVAPLHLGKCNIAGWILGNPECESLSTASSWSYIVETSSSDNGTCYPGDFIDYEELREQLSSVSSFERFEIFPKTSSWPNHDSNKGVTAACPHAGAKSFYKNLIWLVKKGNSYPKLSKSYINDKGKEVLVLWGIHHPSTSADQQSLYQNADAYVFVGTSRYSKKFKPEIAIRPKVRDQEGRMNYYWTLVEPGDKITFEATGNLVVPRYAFAMERNAGSGIIISDTPVHDCNTTCQTPEGAINTSLPFQNIHPITIGKCPKYVKSTKLRLATGLRNVPSIQSRGLFGAIAGFIEGGWTGMVDGWYGYHHQNEQGSGYAADLKSTQNAIDEITNKVNSVIEKMNTQFTAVGKEFNHLEKRIENLNKKVDDGFLDIWTYNAELLVLLENERTLDYHDSNVKNLYEKVRSQLKNNAKEIGNGCFEFYHKCDNTCMESVKNGTYDYPKYSEEAKLNREEIDGVKLESTRIYQILAIYSTVASSLVLVVSLGAISFWMCSNGSLQCRICI

SEQ ID NO: 3299 - protein, 566 aa, synthetic construct; identical to SEQ ID NO: 2669
  REGION 1..566: note = hemagglutinin__InfluenzaA__ACV53909

SEQ ID NO: 3300 - protein, 566 aa, synthetic construct; identical to SEQ ID NO: 2669
  REGION 1..566: note = hemagglutinin__InfluenzaA__ACV67220

SEQ ID NO: 3301 - protein, 566 aa, synthetic construct
  REGION 1..566: note = hemagglutinin__InfluenzaA__ACV67221
MKAILVVLLYTFATANADTLCIGYHANNSTDTVDTVLEKNVTVTHSVNLLEDKHNGKLCKLRGVAPLHLGKCNIAGWILGNPECGSLSTASSWSYIVETSSSDNGTCYPGDFIDYEELREQLSSVSSFERFEIFPKTSSWPNHDSNKGVTAACPHAGAKSFYKNLIWLVKKGNSYPKLSKSYINDKGKEVLVLWGIHHPSTSADQQSLYQSADAYVFVGTSRYSKKFKPEIAIRPKVRDQEGRMNYYWTLVEPGDKITFEATGNLVVPRYAFAMERNAGSGIIISDTPVHDCNTTCQTPKGAINTSLPFQNIHPITIGKCPKYVKSTKLRLATGLRNVPSIQSRGLFGAIAGFIEGGWTGMVDGWYGYHHQNEQGSGYAADLKSTQNAIDEITNKVNSVIEKMNTQFTAVGKEFNHLEKRIENLNKKVDDGFLDIWTYNAELLVLLENERTLDYHDSNVKNLYEKVRSQLKNNAKEIGNGCFEFYHKCDNTCMESVKNGTYDYPKYSEEAKLNREEIDGVKLESTRIYQILAIYSTVASSLVLVVSLGAISFWMCSNGSLQCRICI

SEQ ID NO: 3302 - protein, 566 aa, synthetic construct; identical to SEQ ID NO: 2656
  REGION 1..566: note = hemagglutinin__InfluenzaA__ACV67222

SEQ ID NO: 3303 - protein, 566 aa, synthetic construct; identical to SEQ ID NO: 2695
  REGION 1..566: note = hemagglutinin__InfluenzaA__ACV67223

SEQ ID NO: 3304 - protein, 566 aa, synthetic construct; identical to SEQ ID NO: 2911
  REGION 1..566: note = hemagglutinin__InfluenzaA__ACV67224

SEQ ID NO: 3305 - protein, 566 aa, synthetic construct; identical to SEQ ID NO: 2849
  REGION 1..566: note = hemagglutinin__InfluenzaA__ACV67225

SEQ ID NO: 3306 - protein, 566 aa, synthetic construct; identical to SEQ ID NO: 2669
  REGION 1..566: note = hemagglutinin__InfluenzaA__ACV67226

SEQ ID NO: 3307 - protein, 566 aa, synthetic construct
  REGION 1..566: note = hemagglutinin__InfluenzaA__ACV67227
MKAILVVLLYTFATANADTLCIGYHANNSTDTVDTVLEKNVTVTHSVNLLEDKHNGKLCKLRGVAPLHLGKCNIAGWILGNPECESLSTASSWSYIVETSSSDNGTCYPGDFIDYEELREQLSSVSSFERFEIFPKTSSWPNHDSNKGVTAACPHAGAKSFYKNLIWLVKKGNSYPKLSKSYINDKGKEVLVLWGIHHPSTSADQQSLYQNADAYVFVGTSRYSKKFKPEIAIRPKVRDQEGRMNYYWTLVEPGDKITFEATGNLVVPRYAFAMERNAGSGIIISNTPVHDCNTTCQTPKGAINTSLPFQNIHPITIGKCPKYVKSTKLRLATGLRNVPSIQSRGLFGAIAGFIEGGWTGMVDGWYGYHHQNEQGSGYAADLKSTQNAIDEITNKVNSVIEKMNTQFTAVGKEFNHLEKRIENLNKKVDDGFLDIWTYNAELLVLLENERTLDYHDSNVKNLYEKVRSQLKNNAKEIGNGCFEFYHKCDNTCMESVKNGTYDYPKYSEEAKLNREEIDGVKLESTRIYQILAIYSTVASSLVLVVSLGAISFWMCSNGSLQCRICI

SEQ ID NO: 3308 - protein, 566 aa, synthetic construct; identical to SEQ ID NO: 2911
  REGION 1..566: note = hemagglutinin__InfluenzaA__ACV67228

SEQ ID NO: 3309 - protein, 566 aa, synthetic construct
  REGION 1..566: note = hemagglutinin__InfluenzaA__ACV67229
MKAILVVLLYTFATANADTLCIGYHANNSTDTVDTVLEKNVTVTHSVNLLEDKHNGKLCKLRGVAPLHLGKCNIAGWILGNPECESLSTASSWSYIVETSSSDNGTCYPGDFIDYEELREQLSSVSSFERFEIFPKTSSWPNHDSNKGVTAACPHAGAKSFYKNLIWLVKKGNSYPKLSKSYINDKGKEVLVLWGIHHPSTSADQQSLYQNADAYVFVGTSRYSKKFKPEIAIRPKVRDQEGRMNYYWTLVEPGDKITFEATGNLVVPRYAFAMERNAGSGIIISDTPVHDCNTTCQTPKGAINTSLPFQNIHPITIGKCPKYVKSTKLRLATGLRNVPSIQSRGLFGAIAGFIEGGWTGMVDGWYGYHHQNEQGSGYAADLKSTQNPIDEITNKVNSVIEKMNTQFTAVGKEFNHLEKRIENLNKKVDDGFLDIWTYNAELLVLLENERTLDYHDSNVKNLYEKVRSQLKNNAKEIGNGCFEFYHKCDNTCMESVKNGTYDYPKYSEEAKLNREEIDGVKLESTRIYQILAIYSTVASSLVLVVSLGAISFWMCSNGSLQCRICI

SEQ ID NO: 3310 - protein, 566 aa, synthetic construct; identical to SEQ ID NO: 2656
  REGION 1..566: note = hemagglutinin__InfluenzaA__ACV67230

SEQ ID NO: 3311 - protein, 566 aa, synthetic construct; identical to SEQ ID NO: 2669
  REGION 1..566: note = hemagglutinin__InfluenzaA__ACV67231

SEQ ID NO: 3312 - protein, 566 aa, synthetic construct; identical to SEQ ID NO: 2669
  REGION 1..566: note = hemagglutinin__InfluenzaA__ACV67232

SEQ ID NO: 3313 - protein, 566 aa, synthetic construct; identical to SEQ ID NO: 2656
  REGION 1..566: note = hemagglutinin__InfluenzaA__ACV67233

SEQ ID NO: 3314 - protein, 566 aa, synthetic construct; identical to SEQ ID NO: 2911
  REGION 1..566: note = hemagglutinin__InfluenzaA__ACV67234

SEQ ID NO: 3315 - protein, 566 aa, synthetic construct
  REGION 1..566: note = hemagglutinin__InfluenzaA__ACV67235
MKAILVVLLYTFATANADTLCIGYHANNSTDTVDTVLEKNVTVTHSVNLLEDKHNGKLCKLRGVAPLHLGKCNIAGWILGNPECESLSTASSWSYIVETSSSDNGTCYPGDFIDYEELREQLSSVSSFERFEIFPKTSSWPNHDSNKGVTAACPHAGAKSFYKNLIWLVKKGNSYPKLSKSYINDKGKEVLVLWGIHHPSTSADQQSLYQNADAYVFVGSSRYSKKFKPEIAIRPKVRDQEGRMNYYWTLVEPGDKITFEATGNLVVPRYAFAMERNAGSGIIISDTPVHDCNTTCQTPKGAINTSLPFQNIHPITIGKCPKYVKSTKLRLATGLRNVPSIQSRGLFGAIAGFIEGGWTGMVDGWYGYHHQNEQGSGYAADLKSTQNAIDEITNKVNSVIEKMNTQFTAVGKEFNHLEKRIENLNKKVDDGFLDIWTYNAELLVLLENERTLDYHDSNVKNLYEKVRSQLKNNANEIGNGCFEFYHKCDNTCMESVKNGTYDYPKYSEEAKLNREEIDGVKLESTRIYQILAIYSTVASSLVLVVSLGAISFWMCSNGSLQCRICI

SEQ ID NO: 3316 - protein, 566 aa, synthetic construct; identical to SEQ ID NO: 2913
  REGION 1..566: note = hemagglutinin__InfluenzaA__ACV67236

SEQ ID NO: 3317 - protein, 566 aa, synthetic construct; identical to SEQ ID NO: 2656
  REGION 1..566: note = hemagglutinin__InfluenzaA__ACV67238

SEQ ID NO: 3318 - protein, 566 aa, synthetic construct
  REGION 1..566: note = hemagglutinin__InfluenzaA__ACV67239
MKAILVVLLYTFTTANADTLCIGYHANNSTDTVDTVLEKNVTVTHSVNLLEDKHNGKLCKLRGVAPLHLGKCNIAGWILGNPECESLSTASSWSYIVETSSSDNGTCYPGDFIDYEELREQLSSVSSFERFEIFPKTSSWPNHDSNKGVTAACPHAGAKSFYKNLIWLVKKGNSYPKLSKSYINDKGKEVLVLWGIHHPSTSADQQSLYQNADAYVFVGSSRYSKKFKPEIAIRPKVRDQEGRMNYYWTLVEPGDKITFEATGNLVVPRYAFAMERNAGSGIIISDTPVHDCNTTCQTPKGAINTSLPFQNIHPITIGKCPKYVKSTKLRLATGLRNVPSIQSRGLFGAIAGFIEGGWTGMVDGWYGYHHQNEQGSGYAADLKSTQNAIDEITNKVNSVIEKMNTQFTAVGKEFNHLEKRIENLNKKVDDGFLDIWTYNAELLVLLENERTLDYHDSNVKNLYEKVRSQLKNNAKEIGNGCFEFYHKCNNTCMESVKNGTYDYPKYSEEAKLNREEIDGVKLESTRIYQILAIYSTVASSLVLVVSLGAISFWMCSNGSLQCRICI

SEQ ID NO: 3319 - protein, 566 aa, synthetic construct; identical to SEQ ID NO: 2913
  REGION 1..566: note = hemagglutinin__InfluenzaA__ACV67240

SEQ ID NO: 3320 - protein, 566 aa, synthetic construct
  REGION 1..566: note = hemagglutinin__InfluenzaA__ACV67241
MKAILVVLLYTFATANADTLCIGYHANNSTDTVDTVLEKNVTVTHSVNLLEDKHNGKLCKLRGVAPLHLGKCNIAGWILGNPECESLSTASSWSYIVETSSSDNGTCYPGDFIDYEELREQLSSVSSFERFEIFPKTSSWPNHDSNKGVTAACPHAGAKSFYKNLIWLVKNGNSYPKLSKSYINDKGKEVLVLWGIHHPSTSADQQSLYQNADAYVFVGTSRYSKKFKPEIAIRPKVRDQEGRMNYYWTLVEPGDKITFEATGNLVVPRYAFAMERNAGSGIIISDTPVHDCNTTCQTPKGAINTSLPFQNIHPITIGKCPKYVKSTKLRLATGLRNVPSIQSRGLFGAIAGFIEGGWTGMVDGWYGYHHQNEQGSGYAADLKSTQNAIDEITNKVNSVIEKMNTQFTAVGKEFNHLEKRIENLNKKVDDGFLDIWTYNAELLVLLENERTLDYHDSNVKNLYEKVRSQLKNNAKEIGNGCFEFYHKCDNTCMESVKNGTYDYPKYSEEAKLNREEIDGVKLESTRIYQILAIYSTVASSLVLVVSLGAISFWMCSNGSLQCRICI

SEQ ID NO: 3321 - protein, 566 aa, synthetic construct; identical to SEQ ID NO: 2911
  REGION 1..566: note = hemagglutinin__InfluenzaA__ACV67242

SEQ ID NO: 3322 - protein, 566 aa, synthetic construct; identical to SEQ ID NO: 2849
  REGION 1..566: note = hemagglutinin__InfluenzaA__ACV67244

SEQ ID NO: 3323 - protein, 566 aa, synthetic construct; identical to SEQ ID NO: 2762
  REGION 1..566: note = hemagglutinin__InfluenzaA__ACV67246

SEQ ID NO: 3324 - protein, 566 aa, synthetic construct; identical to SEQ ID NO: 3293
  REGION 1..566: note = hemagglutinin__InfluenzaA__ACV67247

SEQ ID NO: 3325 - protein, 566 aa, synthetic construct; identical to SEQ ID NO: 2656
  REGION 1..566: note = hemagglutinin__InfluenzaA__ACV70073

SEQ ID NO: 3326 - protein, 566 aa, synthetic construct; identical to SEQ ID NO: 2656
  REGION 1..566: note = hemagglutinin__InfluenzaA__ACV70093

SEQ ID NO: 3327 - protein, 566 aa, synthetic construct; identical to SEQ ID NO: 2656
  REGION 1..566: note = hemagglutinin__InfluenzaA__ACV70103

SEQ ID NO: 3328 - protein, 566 aa, synthetic construct; identical to SEQ ID NO: 2656
  REGION 1..566: note = hemagglutinin__InfluenzaA__ACV70113

SEQ ID NO: 3329 - protein, 566 aa, synthetic construct; identical to SEQ ID NO: 2656
  REGION 1..566: note = hemagglutinin__InfluenzaA__ACV70123

SEQ ID NO: 3330 - protein, 566 aa, synthetic construct; identical to SEQ ID NO: 2656
  REGION 1..566: note = hemagglutinin__InfluenzaA__ACV70154

SEQ ID NO: 3331 - protein, 566 aa, synthetic construct
  REGION 1..566: note = hemagglutinin__InfluenzaA__ACV70164
MKAILVVLLYTFTTANADTLCIGYHANNSTDTVDTVLEKNVTVTHSVNLLEDKHNGKLCKLRGVAPLHLGKCNIAGWILGNPECESLSTASSWSYIVETSSSDNGTCYPGDFIDYEELREQLSSVSSFERFEIFPKTSSWPNHDSNKGVTAACPHAGAKSFYKNLIWLVKKGNSYPKLSKSYINDKGKEVLVLWGIHHPSTSADQQSLYQNADAYVFVGSSRYSKKFKPEIAIRPKVRDQEGRMNYYWTLVEPGDKITFEATGNLVVPRYAFAMERNAGSGIIISDTPVHDCNTTCQTLKGAINTSLPFQNIHPITIGKCPKYVKSTKLRLATGLRNVPSIQSRGLFGAIAGFIEGGWTGMVDGWYGYHHQNEQGSGYAADLKSTQNAIDEITNKVNSVIEKMNTQFTAVGKEFNHLEKRIENLNKKVDDGFLDIWTYNAELLVLLENERTLDYHDSNVKNLYEKVRSQLKNNAKEIGNGCFEFYHKCDNTCMESVKNGTYDYPKYSEEAKLNREEIDGVKLESTRIYQILAIYSTVASSLVLVVSLGAISFWMCSNGSLQCRICI

SEQ ID NO: 3332 - protein, 566 aa, synthetic construct; identical to SEQ ID NO: 2656
  REGION 1..566: note = hemagglutinin__InfluenzaA__ACV70174

SEQ ID NO: 3333 - protein, 566 aa, synthetic construct; identical to SEQ ID NO: 2656
  REGION 1..566: note = hemagglutinin__InfluenzaA__ACV70184

SEQ ID NO: 3334 - protein, 566 aa, synthetic construct; identical to SEQ ID NO: 2656
  REGION 1..566: note = hemagglutinin__InfluenzaA__ACV70194

SEQ ID NO: 3335 - protein, 566 aa, synthetic construct; identical to SEQ ID NO: 2656
  REGION 1..566: note = hemagglutinin__InfluenzaA__ACV70204

SEQ ID NO: 3336 - protein, 566 aa, synthetic construct; identical to SEQ ID NO: 2656
  REGION 1..566: note = hemagglutinin__InfluenzaA__ACV70214

SEQ ID NO: 3337 - protein, 566 aa, synthetic construct; identical to SEQ ID NO: 2656
  REGION 1..566: note = hemagglutinin__InfluenzaA__ACV70224

SEQ ID NO: 3338 - protein, 566 aa, synthetic construct; identical to SEQ ID NO: 2656
  REGION 1..566: note = hemagglutinin__InfluenzaA__ACV70234

SEQ ID NO: 3339 - protein, 566 aa, synthetic construct; identical to SEQ ID NO: 2656
  REGION 1..566: note = hemagglutinin__InfluenzaA__ACV70254

SEQ ID NO: 3340 - protein, 566 aa, synthetic construct; identical to SEQ ID NO: 2656
  REGION 1..566: note = hemagglutinin__InfluenzaA__ACV70264

SEQ ID NO: 3341 - protein, 566 aa, synthetic construct; identical to SEQ ID NO: 2656
  REGION 1..566: note = hemagglutinin__InfluenzaA__ACV70274

SEQ ID NO: 3342 - protein, 566 aa, synthetic construct; identical to SEQ ID NO: 2656
  REGION 1..566: note = hemagglutinin__InfluenzaA__ACV70284

SEQ ID NO: 3343 - protein, 566 aa, synthetic construct; identical to SEQ ID NO: 2656
  REGION 1..566: note = hemagglutinin__InfluenzaA__ACV70294

SEQ ID NO: 3344 - protein, 566 aa, synthetic construct; identical to SEQ ID NO: 2656
  REGION 1..566: note = hemagglutinin__InfluenzaA__ACV70304

SEQ ID NO: 3345 - protein, 566 aa, synthetic construct; identical to SEQ ID NO: 3331
  REGION 1..566: note = hemagglutinin__InfluenzaA__ACV70314

SEQ ID NO: 3346 - protein, 566 aa, synthetic construct
  REGION 1..566: note = hemagglutinin__InfluenzaA__ACV70324
MKAILVVLLYTFATANADTLCIGYHANNSTDTVDTVLEKNVTVTHSVNLLEDKHNGKLCKLRGVAPLHLGKCNIAGWILGNPECESLFTASSWSYIVETSSSDNGTCYPGDFIDYEELREQLSSVSSFERFEIFPKTSSWPNHDSNKGVTAACPHAGAKSFYKNLIWLVKKGNSYPKLSKSYINDKGKEVLVLWGIHHPSTSADQQSLYQNADAYVFVGSSRYSKKFKPEIAIRPKVRDQEGRMNYYWTLVEPGDKITFEATGNLVVPRYAFAMERNAGSGIIISDTPVHDCNTTCQTPKGAINTSLPFQNIHPITIGKCPKYVKSTKLRLATGLRNVPSIQSRGLFGAIAGFIEGGWTGMVDGWYGYHHQNEQGSGYAADLKSTQNAIDEITNKVNSVIEKMNTQFTAVGKEFNHLEKRIENLNKKVDDGFLDIWTYNAELLVLLENERTLDYHDSNVKNLYEKVRSQLKNNAKEIGNGCFEFYHKCDNTCMESVKNGTYDYPKYSEEAKLNREEIDGVKLESTRIYQILAIYSTVASSLVLVVSLGAISFWMCSNGSLQCRICI

SEQ ID NO: 3347 - protein, 566 aa, synthetic construct; identical to SEQ ID NO: 2656
  REGION 1..566: note = hemagglutinin__InfluenzaA__ACV70334

SEQ ID NO: 3348 - protein, 566 aa, synthetic construct; identical to SEQ ID NO: 2656
  REGION 1..566: note = hemagglutinin__InfluenzaA__ACV70344

SEQ ID NO: 3349 - protein, 566 aa, synthetic construct; identical to SEQ ID NO: 2656
  REGION 1..566: note = hemagglutinin__InfluenzaA__ACV70354

SEQ ID NO: 3350 - protein, 566 aa, synthetic construct; identical to SEQ ID NO: 2656
  REGION 1..566: note = hemagglutinin__InfluenzaA__ACV70364

SEQ ID NO: 3351 - protein, 566 aa, synthetic construct; identical to SEQ ID NO: 2656
  REGION 1..566: note = hemagglutinin__InfluenzaA__ACV70374

SEQ ID NO: 3352 - protein, 566 aa, synthetic construct; identical to SEQ ID NO: 2656
  REGION 1..566: note = hemagglutinin__InfluenzaA__ACV70384

SEQ ID NO: 3353 - protein, 566 aa, synthetic construct; identical to SEQ ID NO: 2656
  REGION 1..566: note = hemagglutinin__InfluenzaA__ACV70394

SEQ ID NO: 3354 - protein, 566 aa, synthetic construct; identical to SEQ ID NO: 2656
  REGION 1..566: note = hemagglutinin__InfluenzaA__ACV70404

SEQ ID NO: 3355 - protein, 566 aa, synthetic construct; identical to SEQ ID NO: 3331
  REGION 1..566: note = hemagglutinin__InfluenzaA__ACV70414

SEQ ID NO: 3356 - protein, 566 aa, synthetic construct; identical to SEQ ID NO: 2656
  REGION 1..566: note = hemagglutinin__InfluenzaA__ACV70424

SEQ ID NO: 3357 - protein, 566 aa, synthetic construct; identical to SEQ ID NO: 2656
  REGION 1..566: note = hemagglutinin__InfluenzaA__ACV70434

SEQ ID NO: 3358 - protein, 566 aa, synthetic construct; identical to SEQ ID NO: 2656
  REGION 1..566: note = hemagglutinin__InfluenzaA__ACV70444

SEQ ID NO: 3359 - protein, 566 aa, synthetic construct; identical to SEQ ID NO: 2656
  REGION 1..566: note = hemagglutinin__InfluenzaA__ACV70454

SEQ ID NO: 3360 - protein, 566 aa, synthetic construct; identical to SEQ ID NO: 2656
  REGION 1..566: note = hemagglutinin__InfluenzaA__ACV70464

SEQ ID NO: 3361 - protein, 566 aa, synthetic construct; identical to SEQ ID NO: 2656
  REGION 1..566: note = hemagglutinin__InfluenzaA__ACV70474

SEQ ID NO: 3362 - protein, 566 aa, synthetic construct; identical to SEQ ID NO: 2656
  REGION 1..566: note = hemagglutinin__InfluenzaA__ACV70484

SEQ ID NO: 3363 - protein, 566 aa, synthetic construct; identical to SEQ ID NO: 2656
  REGION 1..566: note = hemagglutinin__InfluenzaA__ACV70494

SEQ ID NO: 3364 - protein, 566 aa, synthetic construct; identical to SEQ ID NO: 2656
  REGION 1..566: note = hemagglutinin__InfluenzaA__ACV70504

SEQ ID NO: 3365 - protein, 566 aa, synthetic construct; identical to SEQ ID NO: 2656
  REGION 1..566: note = hemagglutinin__InfluenzaA__ACV70514

SEQ ID NO: 3366 - protein, 566 aa, synthetic construct; identical to SEQ ID NO: 2656
  REGION 1..566: note = hemagglutinin__InfluenzaA__ACV70524

SEQ ID NO: 3367 - protein, 566 aa, synthetic construct; identical to SEQ ID NO: 2849
  REGION 1..566: note = hemagglutinin__InfluenzaA__ACV70534

SEQ ID NO: 3368 - protein, 566 aa, synthetic construct; identical to SEQ ID NO: 2656
  REGION 1..566: note = hemagglutinin__InfluenzaA__ACV70544

SEQ ID NO: 3369 - protein, 566 aa, synthetic construct; identical to SEQ ID NO: 2656
  REGION 1..566: note = hemagglutinin__InfluenzaA__ACV70564

SEQ ID NO: 3370 - protein, 566 aa, synthetic construct; identical to SEQ ID NO: 2656
  REGION 1..566: note = hemagglutinin__InfluenzaA__ACV70584

SEQ ID NO: 3371 - protein, 566 aa, synthetic construct; identical to SEQ ID NO: 3331
  REGION 1..566: note = hemagglutinin__InfluenzaA__ACV70594

SEQ ID NO: 3372 - protein, 566 aa, synthetic construct; identical to SEQ ID NO: 2656
  REGION 1..566: note = hemagglutinin__InfluenzaA__ACV70604

SEQ ID NO: 3373 - protein, 566 aa, synthetic construct; identical to SEQ ID NO: 2656
  REGION 1..566: note = hemagglutinin__InfluenzaA__ACV70614

SEQ ID NO: 3374 - protein, 566 aa, synthetic construct; identical to SEQ ID NO: 2656
  REGION 1..566: note = hemagglutinin__InfluenzaA__ACV70624

SEQ ID NO: 3375 - protein, 566 aa, synthetic construct; identical to SEQ ID NO: 2656
  REGION 1..566: note = hemagglutinin__InfluenzaA__ACV70634

SEQ ID NO: 3376 - protein, 566 aa, synthetic construct; identical to SEQ ID NO: 2656
  REGION 1..566: note = hemagglutinin__InfluenzaA__ACV70644

SEQ ID NO: 3377 - protein, 566 aa, synthetic construct; identical to SEQ ID NO: 2656
  REGION 1..566: note = hemagglutinin__InfluenzaA__ACV70654

SEQ ID NO: 3378 - protein, 566 aa, synthetic construct; identical to SEQ ID NO: 2656
  REGION 1..566: note = hemagglutinin__InfluenzaA__ACV70664

SEQ ID NO: 3379 - protein, 566 aa, synthetic construct; identical to SEQ ID NO: 2656
  REGION 1..566: note = hemagglutinin__InfluenzaA__ACV70674

SEQ ID NO: 3380 - protein, 566 aa, synthetic construct; identical to SEQ ID NO: 2656
  REGION 1..566: note = hemagglutinin__InfluenzaA__ACV70684

SEQ ID NO: 3381 - protein, 566 aa, synthetic construct; identical to SEQ ID NO: 2656
  REGION 1..566: note = hemagglutinin__InfluenzaA__ACV70694

SEQ ID NO: 3382 - protein, 566 aa, synthetic construct; identical to SEQ ID NO: 2656
  REGION 1..566: note = hemagglutinin__InfluenzaA__ACV70704

SEQ ID NO: 3383 - protein, 566 aa, synthetic construct; identical to SEQ ID NO: 2656
  REGION 1..566: note = hemagglutinin__InfluenzaA__ACV70714

SEQ ID NO: 3384 - protein, 566 aa, synthetic construct; identical to SEQ ID NO: 2656
  REGION 1..566: note = hemagglutinin__InfluenzaA__ACV70724

SEQ ID NO: 3385 - protein, 566 aa, synthetic construct; identical to SEQ ID NO: 3293
  REGION 1..566: note = hemagglutinin__InfluenzaA__ACV70734

SEQ ID NO: 3386 - protein, 566 aa, synthetic construct; identical to SEQ ID NO: 2656
  REGION 1..566: note = hemagglutinin__InfluenzaA__ACV70744

SEQ ID NO: 3387 - protein, 566 aa, synthetic construct; identical to SEQ ID NO: 2656
  REGION 1..566: note = hemagglutinin__InfluenzaA__ACV70754

SEQ ID NO: 3388 - protein, 566 aa, synthetic construct; identical to SEQ ID NO: 2656
  REGION 1..566: note = hemagglutinin__InfluenzaA__ACV70764

SEQ ID NO: 3389 - protein, 566 aa, synthetic construct; identical to SEQ ID NO: 2656
  REGION 1..566: note = hemagglutinin__InfluenzaA__ACV70784

SEQ ID NO: 3390 - protein, 566 aa, synthetic construct
  REGION 1..566: note = hemagglutinin__InfluenzaA__ACV70794
MKAILVVLLYTFATANADTLCIGYHANNSTDTVDTVLEKNVTVTHSVNLLEDKHNGKLCKLRGVAPLHLGKCNIAGWILGNPECESLSTASSWSYIVETSSSDNGTCYPGDFIDYEELREQLSSVSSFERFEIFPKTSSWPNHDSNKGATAACPHAGAKGFYKNLIWLVKKGNSYPKLSKSYINDKGKEVLVLWGIHHPSTSADQQSLYQNADAYVFVGSSRYSKKFKPEIAIRPKVRDQEGRMNYYWTLVEPGDKITFEATGNLVVPRYAFAMERNAGSGIIISDTPVHDCNTTCQTPKGAINTSLPFQNIHPITIGKCPKYVKSTKLRLATGLRNVPSIQSRGLFGAIAGFIEGGWTGMVDGWYGYHHQNEQGSGYAADLKSTQNAIDEITNKVNSVIEKMNTQFTAVGKEFNHLEKRIENLNKKVDDGFLDIWTYNAELLVLLENERTLDYHDSNVKNLYEKVRSQLKNNAKEIGNGCFEFYHKCDNTCMESVKNGTYDYPKYSEEAKLNREEIDGVKLESTRIYQILAIYSTVASSLVLVVSLGAISFWMCSNGSLQCRICI

SEQ ID NO: 3391 - protein, 566 aa, synthetic construct; identical to SEQ ID NO: 2656
  REGION 1..566: note = hemagglutinin__InfluenzaA__ACV70804

SEQ ID NO: 3392 - protein, 566 aa, synthetic construct; identical to SEQ ID NO: 3331
  REGION 1..566: note = hemagglutinin__InfluenzaA__ACV70824

SEQ ID NO: 3393 - protein, 566 aa, synthetic construct; identical to SEQ ID NO: 2656
  REGION 1..566: note = hemagglutinin__InfluenzaA__ACV70834

SEQ ID NO: 3394 - protein, 566 aa, synthetic construct
  REGION 1..566: note = hemagglutinin__InfluenzaA__ACV70844
MKAILVVLLYTFATANADTLCIGYHANNSTDTVDTVLEKNVTVTHSVNLLEDKHNGKLCKLRGVAPLHLGKCNIAGWILGNPECESLSTASSWSYIVETSSSDNGTCYPGDFIDYEELREQLSSVSSFERFEIFPKTSSWPNHDSNKGVTAACPHAGAKGFYKNLIWLVKKGNSYPKLSKSYINDKGKEVLVLWGIHHPSTSADQQSLYQNADAYVFVGSSRYSKKFKPEIAIRPKVRDQEGRMNYYWTLVEPGDKITFEATGNLLVPRYAFAMERNAGSGIIISDTPVHDCNTTCQTPKGAINTSLPFQNIHPITIGKCPKYVKSTKLRLATGLRNVPSIQSRGLFGAIAGFIEGGWTGMVDGWYGYHHQNEQGSGYAADLKSTQNAIDEITNKVNSVIEKMNTQFTAVGKEFNHLEKRIENLNKKVDDGFLDIWTYNAELLVLLENERTLDYHDSNVKNLYEKVRSQLKNNAKEIGNGCFEFYHKCDNTCMESVKNGTYDYPKYSEEAKLNREEIDGVKLESTRIYQILAIYSTVASSLVLVVSLGAISFWMCSNGSLQCRICI

SEQ ID NO: 3395 - protein, 566 aa, synthetic construct; identical to SEQ ID NO: 2656
  REGION 1..566: note = hemagglutinin__InfluenzaA__ACV70854

SEQ ID NO: 3396 - protein, 566 aa, synthetic construct
  REGION 1..566: note = hemagglutinin__InfluenzaA__ACV70864
MKAILVVLLYTFATANADTLCIGYHANNSTDTVDTVLEKNVTVTHSVNLLEDKHNGKLCKLRGVAPLHLGKCNIAGWILGNPECESLSTASSWSYIVETSSSDNGTCYPGDFIDYEELREQLSSVSSFERFEIFPKTSSWPNHDSNKGVTAACPHAGAKSFYKNLIWLVKKGTSYPKLSKSYINDKGKEVLVLWGIHHPSTSADQQSLYQNADAYVFVGSSRYSKKFKPEIAIRPKVRDQEGRMNYYWTLVEPGDKITFEATGNLVVPRYAFAMERNAGSGIIISDTPVHDCNTTCQTPKGAINTSLPFQNIHPITIGKCPKYVKSTKLRLATGLRNVPSIQSRGLFGAIAGFIEGGWTGMVDGWYGYHHQNEQGSGYAADLKSTQNAIDEITNKVNSVIEKMNTQFTAVGKEFNHLEKRIENLNKKVDDGFLDIWTYNAELLVLLENERTLDYHDSNVKNLYEKVRSQLKNNAKEIGNGCFEFYHKCDNTCMESVKNGTYDYPKYSEEAKLNREEIDGVKLESTRIYQILAIYSTVASSLVLVVSLGAISFWMCSNGSLQCRICI

SEQ ID NO: 3397 - protein, 566 aa, synthetic construct; identical to SEQ ID NO: 2656
  REGION 1..566: note = hemagglutinin__InfluenzaA__ACV70874

SEQ ID NO: 3398 - protein, 566 aa, synthetic construct; identical to SEQ ID NO: 2849
  REGION 1..566: note = hemagglutinin__InfluenzaA__ACV70884

SEQ ID NO: 3399 - protein, 566 aa, synthetic construct
  REGION 1..566: note = hemagglutinin__InfluenzaA__ACV70904
MKAILVVLLYTFATANADTLCIGYHANNSTDTVDTVLEKNVTVTHSVNLLEDKHNGKLCKLRGVAPLHLGKCNIAGWILGNPECESLSTASSWSYIVETSSSDNGTCYPGDFIDYEELREQLSSVSSFERFEIFPKTSSWPNHDSNKGVTAACPHAGAKSFYKNLIWLVKKGNSYPKLSKSYINDKGKEVLVLWGIHHPSTSADQQSLYQNADAYVFVGSSRYSKKFKPEIAIRPKVRDQEGRMNYYWTLVEPGDKITFEATGNLVVPRYAFAMERNAGSGIIISDTPVHDCNTTCQTPKGAINTSLPFQNIHPITIGKCPKYVKSTKLRLATGLRNIPSIQSRGLFGAIAGFIEGGWTGMVDGWYGYHHQNEQGSGYAADLKSTQNAIDEITNKVNSVIEKMNTQFTAVGKEFNHLEKRIENLNKKVDDGFLDIWTYNAELLVLLENERTLDYHDSNVKNLYEKVRSQLKNNAKEIGNGCFEFYHKCDNTCMESVKNGTYDYPKYSEEAKLNREEIDGVKLESTRIYQILAIYSTVASSLVLVVSLGAISFWMCSNGSLQCRICI

SEQ ID NO: 3400 - protein, 566 aa, synthetic construct; identical to SEQ ID NO: 2656
  REGION 1..566: note = hemagglutinin__InfluenzaA__ACV70914

SEQ ID NO: 3401 - protein, 566 aa, synthetic construct; identical to SEQ ID NO: 2656
  REGION 1..566: note = hemagglutinin__InfluenzaA__ACV70924

SEQ ID NO: 3402 - protein, 566 aa, synthetic construct; identical to SEQ ID NO: 2656
  REGION 1..566: note = hemagglutinin__InfluenzaA__ACV70934

SEQ ID NO: 3403 - protein, 566 aa, synthetic construct; identical to SEQ ID NO: 2656
  REGION 1..566: note = hemagglutinin__InfluenzaA__ACV70944

SEQ ID NO: 3404 - protein, 566 aa, synthetic construct
  REGION 1..566: note = hemagglutinin__InfluenzaA__ACV70954
MKAILVVLLYTFATANADTLCIGYHANNSTDTVDTVLEKNVTVTHSVNLLEDKHNGKLCKLRGVAPLHLGKCNIAGWILGNPECESLSTASSWSYIVETSSSDNGTCYPGDFIDYEELREQLSSVSSFERFEIFPKTSSWPNHDSNKGVTAACPHAGAKSFYKNLIWLVKKGNSYPKLSKSYINDKGKEVLVLWGIHHPSTSADQQSLYQNADAYVFVGSSRYSKKFKPEIAIRPKVRDQEGRMNYYWTLVEPGDKITFEATGNLLVPRYAFAMERNAGSGIIISDTPVHDCNTTCQTPKGAINTSLPFQNIHPITIGKCPKYVKSTKLRLATGLRNVPSIQSRGLFGAIAGFIEGGWTGMVDGWYGYHHQNEQGSGYAADLKSTQNAIDEITNKVNSVIEKMNTQFTAVGKEFNHLEKRIENLNKKVDDGFLDIWTYNAELLVLLENERTLDYHDSNVKNLYEKVRSQLKNNAKEIGNGCFEFYHKCDNTCMESVKNGTYDYPKYSEEAKLNREEIDGVKLESTRIYQILAIYSTVASSLVLVVSLGAISFWMCSNGSLQCRICI

SEQ ID NO: 3405 - protein, 566 aa, synthetic construct; identical to SEQ ID NO: 2656
  REGION 1..566: note = hemagglutinin__InfluenzaA__ACV70964

SEQ ID NO: 3406 - protein, 566 aa, synthetic construct; identical to SEQ ID NO: 2656
  REGION 1..566: note = hemagglutinin__InfluenzaA__ACV70974

SEQ ID NO: 3407 - protein, 566 aa, synthetic construct; identical to SEQ ID NO: 3399
  REGION 1..566: note = hemagglutinin__InfluenzaA__ACV70984

SEQ ID NO: 3408 - protein, 566 aa, synthetic construct; identical to SEQ ID NO: 3404
  REGION 1..566: note = hemagglutinin__InfluenzaA__ACV70994

SEQ ID NO: 3409 - protein, 566 aa, synthetic construct; identical to SEQ ID NO: 2656
  REGION 1..566: note = hemagglutinin__InfluenzaA__ACV71004

SEQ ID NO: 3410 - protein, 566 aa, synthetic construct
  REGION 1..566: note = hemagglutinin__InfluenzaA__ACV82230
MKTIIALSYILCLVFAQKLPGNDNSTATLCLGHHAVPNGTIVKTITNDQIEVTNATELVQSSSTGEICDSPHQILDGKNCTLIDALLGDPQCDGFQNKKWDLFVERSQAYSNCYPYDVPDYASLRSLVASSGTLEFNNESFNWTGVTQNGTSSACIRRSKNSFFSRLNWLTHLNFKYQALNVTMPNNEQFDKLYIWGVHHPGTDKDQIFLYAQASGRITVSTKRSQQTVIPNIGSRPRVRNIPSRISIYWTIVKPGDILLINSTGNLIAPRGYFKIQSGKSSIMRSDAPIGKCNSECITPNGSIPNDKPFQNVNRITYGACPRYVKQNTLKLATGMRNVPEKQTRGIFGAIAGFIENGWEGMVDGWYGFRHQNSEGRGQAADLKSTQAAIDQINGKLNRLIGKTNEKFHQIEKEFSEVEGRIQDLEKYVEDTKIDLWSYNAELLVALENQHTIDLTDSEMNKLFEKTKKQLRENAEDMGNGCFKIYHKCDNACIGSIRNGTYDHDVYRDEALNNRFQIKGVELKSGYKDWILWISFAISCFLLCVALLGFIMWACQKGNIRCNICI

SEQ ID NO: 3411 - protein, 566 aa, synthetic construct
  REGION 1..566: note = hemagglutinin__InfluenzaA__ACV82232
MKTIIALSYILCLVFAQKLPGNDNSTATLCLGHHAVPNGTIVKTITNDQIEVTNATELVQSSSTGEICDSPHQILDGENCTLIDALLGDPQCDGFQNKKWDLFVERSKAYSNCYPYDVPDYASLRSLVASSGTLEFNNESFNWTGVTQNGTSSACIRRSNNSFFSRLNWLTHLNFKYPALNVTMPNNEQFDKLYIWGVHHPGTDKDQIFLYAQASGRITVSTKRSQQAVIPNIGSRPRVRNIPSRISIYWTIVKPGDILLINSTGNLIAPRGYFKIRSGKSSIMRSDAPIGKCNSECITPNGSIPNDKPFQNVNRITYGACPRYVKQNTLKLATGMRNVPEKQTRGIFGAIAGFIENGWEGMVDGWYGFRHQNSEGRGQAADLKSTQAAIDQINGKLNRLIGKTNEKFHQIEKEFSEVEGRIQDLEKYVEDTKIDLWSYNAELLVALENQHTIDLTDSEMNKLFEKTKKQLRENAEDMGNGCFKIYHKCDNACIGSIRNGTYDHDVYRDEALNNRFQIKGVELKSGYKDWILWISFAISCFLLCVALLGFIMWACQKGNIRCNICI

SEQ ID NO: 3412 - protein, 565 aa, synthetic construct
  REGION 1..565: note = hemagglutinin__InfluenzaA__ACV82233
MKVKLLVLLCTFTATYADTICIGYHANNSTDTVDTVLEKNVTVTHSVNLLENNHNGKLCLLKGIAPLQLGNCSVAGWILGNPECELLISKESWSYIVEKPNPENGTCYPGHFADYEELREQLSSVSSFERFEIFPKESSWPNHTVTGVSASCSHNGENSFYRNLLWLTGKNGLYPNLSKSYANNKEKEVLVLWGVHHPPNIADQKTLYHTENAYVSVVSSHYSRKFTPEIAKRPKIRDQEGRINYYWTLLEPGDTIIFEANGNLIAPRYAFALSRGFGSGIINSNAPMDKCDAKCQTPQGAINSSLPFQNVHPVTIGECPKYVRSAKLRMVTGLRNIPSIQSRGLFGAIAGFIEGGWTGMVDGWYGYHHQNEQGSGYAADQKSTQNAINGITNKVNSVIEKMNTQFTAVGKEFNKLERRMENLNKKVDDGFIDIWTYNAELLVLLENERTLDFHDSNVKNLYEKVKSQLKNNAKEIGNGCFEFYHKCNDECMESVKNGTYDYPKYSEESKLNREKIDGVKLESMGVYQILAIYSTVASSLVLLVSLGAISFWMCSNGSLQCRICI

SEQ ID NO: 3413 - protein, 566 aa, synthetic construct
  REGION 1..566: note = hemagglutinin__InfluenzaA__ACV83662
MKAILVVLLYTFATANADTLCIGYHANNSTDTVDTVLEKNVTVTHSVNLLEDKHNGKLCKLRGVAPLHLGKCNIAGWILGNPECESLSTASSWSYIVETSSSDNGTCYPGDFIDYEELREQLSSVSSFERFEIFPKTSSWPNHDSNKGVTAACPHAGAKSFYKNLIWLVKKGNSYPKLSKSYINDKGKEVLVLWGIHHPSTSADQQSLYQNADAYVFVGTSRYSKKFKPEIAIRPKVRDREGRMNYYWTLVEPGDKITFEATGNLVVPRYAFAMVRNAGSGIIISDTPVHDCNTTCQTPKGAINTSLPFQNIHPITIGKCPKYVKSTKLRLATGLRNVPSIQSRGLFGAIAGFIEGGWTGMVDGWYGYHHQNEQGSGYAADLKSTQNAIDEITNKVNSVIEKMNTQFTAVGKEFNHLEKRIENLNKKVDDGFLDIWTYNAELLVLLENERTLDYHDSNVKNLYEKVRSQLKNNAKEIGNGCFEFYHKCDNTCMESVKNGTYDYPKYSEEAKLNREEIDGVKLESTRIYQILAIYSTVASSLVLVVSLGAISFWMCSNGSLQCRICI

SEQ ID NO: 3414 - protein, 566 aa, synthetic construct
  REGION 1..566: note = hemagglutinin__InfluenzaA__ACV83663
MKAILVVLLYTFATANADTLCIGYHANNSTDTVDTVLEKNVTVTHSVNLLEDKHNGKLCKLRGVAPLHLGKCNIAGWILGNPECESLSTASSWSYIVETSSSDNGTCYPGDFIDYEELREQLSSVSSFERFEIFPKTSSWPNHDSNKGVTAACPHAGAKSFYKNLIWLVKKGNSYPKLSKSYINDKGKEVLVLWGIHHPSTSADQQSLYQNADAYVFVGTSRYSKKFKPEIAIRPKVRGQEGRMNYYWTLVEPGDKITFEATGNLVVPRYAFAMERNAGSGIIISDTPVHDCNTTCQTPKGAINTSLPFQNIHPITIGKCPKYVKSTKLRLATGLRNVPSIQSRGLFGAIAGFIEGGWTGMVDGWYGYHHQNEQGSGYAADLKSTQNAIDEITNKVNSVIEKMNTQFTAVGKEFNHLEKRIENLNKKVDDGFLDIWTYNAELLVLLENERTLDYHDSNVKNLYEKVRSQLKNNAKEIGNGCFEFYHKCDNTCMESVKNGTYDYPKYSEEAKLNREEIDGVKLESTRIYQILAIYSTVASSLVLVVSLGAISFWMCSNGSLQCRICI

SEQ ID NO: 3415 - protein, 566 aa, synthetic construct; identical to SEQ ID NO: 3414
  REGION 1..566: note = hemagglutinin__InfluenzaA__ACV83664

SEQ ID NO: 3416 - protein, 566 aa, synthetic construct
  REGION 1..566: note = hemagglutinin__InfluenzaA__ACV83665
MEAILVVLLYTFATANADTLCIGYHANNSTDTVDTVLEKNVTVTHSVNLLEDKHNGKLCKLRGVAPLHLGKCNIAGWILGNPECESLSTASSWSYIVETSSSDNGTCYPGDFIDYEELREQLSSVSSFERFEIFPKTSSWPNHDSNKGVTAACPHAGAKSFYKNLIWLVKKGNSYPKLSKSYINDKGKEVLVLWGIHHPSTIADQQSLYQNADAYVFVGSSRYSKKFKPEIAIRPKVRDQEGRMNYYWTLVEPGDKITFEATGNLVVPRYAFAMERNAGSGIIISDTPVHDCNTTCQTPKGAINTSLPFHNIHPITIGKCPKYVKSTKLRLATGLRNVPSIQSRGLFGAIAGFIEGGWTGMVDGWYGYHHQNEQGSGYAADLKSTQNAIDEITNKVNSVIEKMNTQFTAVGKEFNHLEKRIENLNKKVDDGFLDIWTYNAELLVLLENERTLDYHDSNVKNLYEKVRSQLKNNAKEIGNGCFEFYHKCDNTCMESVKNGTYDYPKYSEEAKLNREEIDGVKLESTRIYQILAIYSTVASSLVLVVSLGAISFWMCSNGSLQCRICI

SEQ ID NO: 3417 - protein, 566 aa, synthetic construct
  REGION 1..566: note = hemagglutinin__InfluenzaA__ACV83667
MKAILVVLLYTFATANADTLCIGYHANNSTDTVDTVLEKNVTVTHSVNLLEDKHNGKLCKLRGVAPLHLGKCNIAGWILGNPECESLSTASSWSYIVETSSSDNGTCYPGDFIDYEELREQLSSVSSFERFEIFPKTSSWPNHDSNKGVTAACPHAGAKSFYKNLIWLVKKGNSYPKLSKSYINDKGKEVLVLWGIHHPSTSADQQSLYQNADAYVFVGTSRYSKKFKPEIAIRPKVRNQEGRMNYYWTLVEPGDKITFEATGNLVVPRYAFAMERNAGSGIIISDTPVHDCNTTCQTPKGAINTSLPFQNIHPITIGKCPKYVKSTKLRLATGLRNVPSIQSRGLFGAIAGFIEGGWTGMVDGWYGYHHQNEQGSGYAADLKSTQNAIDEITNKVNSVIEKMNTQFTAVGKEFNHLEKRIENLNKKVDDGFLDIWTYNAELLVLLENERTLDYHDSNVKNLYEKVRSQLKNNAKEIGNGCFEFYHKCDNTCMESVKNGTYDYPKYSEEAKLNREEIDGVKLESTRIYQILAIYSTVASSLVLVVSLGAISFWMCSNGSLQCRICI

SEQ ID NO: 3418 - protein, 566 aa, synthetic construct; identical to SEQ ID NO: 2669
  REGION 1..566: note = hemagglutinin__InfluenzaA__ACV83668

SEQ ID NO: 3419 - protein, 566 aa, synthetic construct; identical to SEQ ID NO: 2669
  REGION 1..566: note = hemagglutinin__InfluenzaA__ACV83670

SEQ ID NO: 3420 - protein, 566 aa, synthetic construct; identical to SEQ ID NO: 2911
  REGION 1..566: note = hemagglutinin__InfluenzaA__ACV83671

SEQ ID NO: 3421 - protein, 566 aa, synthetic construct; identical to SEQ ID NO: 3231
  REGION 1..566: note = hemagglutinin__InfluenzaA__ACV88399

SEQ ID NO: 3422 - protein, 566 aa, synthetic construct; identical to SEQ ID NO: 3231
  REGION 1..566: note = hemagglutinin__InfluenzaA__ACV88409

SEQ ID NO: 3423 - protein, 566 aa, synthetic construct; identical to SEQ ID NO: 2656
  REGION 1..566: note = hemagglutinin__InfluenzaA__ACV88419

SEQ ID NO: 3424 - protein, 565 aa, synthetic construct; identical to SEQ ID NO: 3278
  REGION 1..565: note = hemagglutinin__InfluenzaA__ACV89502

SEQ ID NO: 3425 - protein, 566 aa, synthetic construct
  REGION 1..566: note = hemagglutinin__InfluenzaA__ACV89516
MKARLLILLCALAATDADTICIGYHANNSTDTVDTVLEKNVTVTHSVNLLEDSHNGKLCRLKGIAPLQLGKCNIAGWILGNPECDSLLPASSWSYIVETPNSKNGICYPGDFIDYEELREQLSSVSSFERFEIFPKESSWPKHSTTKGVTAACSHAGKSSFYRNLLWLTKKGDSYPKLSNSYVNKKGKEVLVLWGVHHPSSSKEQQTLYQNENAYVSVVSSNYNRRFIPEIAERPEVKDQAGRINYYWTLLEPGDTIIFEANGNLVAPWYAFALSRGFGSGIITSNASMHECNTKCQTPQGAINSSLPFQNIHPVTIGECPKYVKSAKLRMVTGLRNIPSIQSRGLFGAIAGFIEGGWTGMIDGWYGYHHQNEQGSGYAADQKSTQNAINGITNKVNSVIEKMNTQFTAVGKEFNNLEKRMENLNKKVDDGFLDIWTYNAELLVLLENERTLDFHDSNVKNLYEKVKIQLKNNAKEIGNGCFEFYHKCDNECMESVRNGTYDYPKYSKESKLNREKIDGVKLESMGVYQILAIYSTVASSLVLLVSLGAISFWMCSNGSLQCRICI

SEQ ID NO: 3426 - protein, 565 aa, synthetic construct
  REGION 1..565: note = hemagglutinin__InfluenzaA__ACV90512
MNVKLLVLLCTFTATYADTICIGYHANNSTDTVDTVLEKNVTVTHSVNLLENSHNGKLCLLKGIAPLQLGNCSVAGWILGNPECELLISKESWSYIVEKPNPENGTCYPGHFADYEELREQLSSVSSFERFEIFPKESSWPNHTVTGVSASCSHNGENSFYRNLLWLTGKNGLYPNLSKSYANNKEKEVLVLWGVHHPPNIADQKTLYHTENAYVSVVSSHYSRKFTPEIAKRPKVRDQEGRINYYWTLLEPGDTIIFEANGNLIAPRYAFALSRGFGSGIINSNAPIDKWDAKCQTPQGAINSSLPFQNVHPVTIGEWPKYVRSAKLRMVTGLRNIPSIQSRGLFGAIAGFIEGGWTGMVDGWYGYHHQNEQGSGYAADQKSTQNAINGITNKMNSVIEKMNTQFTAVGKEFNKLERRMENLNKKVDDGFIDIWTYNAELLVLLENERTLDFHDSNVKNLYEKVKSQLKNNAKEIGNGCFEFYHKCNDECMESVKNGTYDYPKYSEESKLNREKIDGVTLESMGVYQILAIYSTVASSLVLLVSLGAISFWMCSNGSLQCRICI

SEQ ID NO: 3427 - protein, 566 aa, synthetic construct; identical to SEQ ID NO: 2669
  REGION 1..566: note = hemagglutinin__InfluenzaA__ACV91672

SEQ ID NO: 3428 - protein, 566 aa, synthetic construct; identical to SEQ ID NO: 2669
  REGION 1..566: note = hemagglutinin__InfluenzaA__ACV91676

SEQ ID NO: 3429 - protein, 566 aa, synthetic construct; identical to SEQ ID NO: 2669
  REGION 1..566: note = hemagglutinin__InfluenzaA__ACV91680

SEQ ID NO: 3430 - protein, 566 aa, synthetic construct
  REGION 1..566: note = hemagglutinin__InfluenzaA__ACX31591
MKTIIALSYILCLVFAQKLPGNDNSTATLCLGHHAVPNGTIVKTITNDQIEVTNATELVQSSSTGEICDSPHQILDGKNCTLIDALLGDPQCDGFQNKKWDLFVERSKAYSNCYPYDVPDYASLRSLVASSGTLEFNNESFNWTGVTQNGTSSACIRRSKNSFFSRLNWLTHLNFKYQALNVTMPNNEQFDKLYIWGVHHPGTDKDQIFLYAQASGRITVSTKRSQQTVIPNIGSRPRVRNIPSRISIYWTIVKPGDILLINSTGNLIAPRGYFKIQSGKSSIMRSDAPIGKCNSECITPNGSIPNDKPFQNVNRITYGACPRYVKQNTLKLATGMRNVPEKQTRGIFGAIAGFIENGWEGMVDGWYGFRHQNSEGRGQAADLKSTQAAIDQINGKLNRLIGKTNEKFHQIEKEFSEVEGRIQDLEKYVEDTKIDLWSYNAELLVALENQHTIDLTDSEMNKLFEKTKKQLRENAEDMGNGCFKIYHKCDNACIGSIRNGTYDHDVYRDEALNNRFQIKGVELKSGYKDWILWISFAISCFLLCVALLGFIMWACQKGNIRCNICI

SEQ ID NO: 3431 - protein, 566 aa, synthetic construct
  REGION 1..566: note = hemagglutinin__InfluenzaA__ACX31933
MKAILVVLLYTFATANADTLCIGYHANNSTDTVDTVLEKNVTVTHSVNLLEDKHNGKLCKLRGVAPLHLGKCNIAGWILGNPECESLSTASSWSYIVETSSSGNGTCYPGDFIDYEELREQLSSVSSFERFEIFPKTSSWPNHDSNKGVTAACPHAGAKSFYKNLIWLVKKGNSYPKLSKSYINDKGKEVLVLWGIHHPSTSADQQSLYQNADAYVFVGTSRYSKKFKPEIAIRPKVRDQEGRMNYYWTLVEPGDKITFEATGNLVVPRYAFAMERNAGSGIIISDTPVHDCNTTCQTPKGAINTSLPFQNIHPITIGKCPKYVKSTKLRLATGLRNVPSIQSRGLFGAIAGFIEGGWTGMVDGWYGYHHQNEQGSGYAADLKSTQNAIDEITNKVNSVIEKMNTQFTAVGKEFNHLEKRIENLNKKVDDGFLDIWTYNAELLVLLENERTLDYHDSNVKNLYEKVRSQLKNNAKEIGNGCFEFYHKCDNTCMESVKNGTYDYPKYSEEAKLNREEINGVKLESTRIYQILAIYSTVASSLVLVVSLGAISFWMCSNGSLQCRICI

SEQ ID NO: 3432 - protein, 566 aa, synthetic construct
  REGION 1..566: note = hemagglutinin__InfluenzaA__ACX31934
MKAILVVLLYTFATANADTLCIGYHANNSTDTVDTVLEKNVTVTHSVNLLEDKHNGKLCKLRGVAPLHLGKCNIAGWILGNPECESLSTASSWSYIVETSSSDNGTCYPGDFIDYEELREQLSSVSSFERFEIFPKTSSWPNHDSNKGVTAACPHAGAKSFYKNLIWLVKKGNSYPKLSKSYINDKGKEVLVLWGIHHPSTSADQQSLYQNADAYVFVGTSRYSKKFKPEITIRPKVRGQEGRMNYYWTLVEPGDKITFEATGNLVVPRYAFAMERNAGSGIIISDTPVHDCNTTCQTPKGAINTSLPFQNIHPITIGKCPKYVKSTKLRLATGLRNVPSIQSRGLFGAIAGFIEGGWTGMVDGWYGYHHQNEQGSGYAADLKSTQNAIDEITNKVNSVIEKMNTQFTAVGKEFNHLEKRIENLNKKVDDGFLDIWTYNAELLVLLENERTLDYHDSNVKNLYEKVRSQLKNNAKEIGNGCFEFYHKCDNTCMESVKNGTYDYPKYSEEAKLNREEIDGVKLESTRIYQILAIYSTVASSLVLVVSLGAISFWMCSNGSLQCRICI

SEQ ID NO: 3433 - protein, 566 aa, synthetic construct; identical to SEQ ID NO: 2669
  REGION 1..566: note = hemagglutinin__InfluenzaA__ACX31935

SEQ ID NO: 3434 - protein, 566 aa, synthetic construct; identical to SEQ ID NO: 2669
  REGION 1..566: note = hemagglutinin__InfluenzaA__ACX31936

SEQ ID NO: 3435 - protein, 566 aa, synthetic construct; identical to SEQ ID NO: 2760
  REGION 1..566: note = hemagglutinin__InfluenzaA__ACX31939

SEQ ID NO: 3436 - protein, 566 aa, synthetic construct; identical to SEQ ID NO: 2760
  REGION 1..566: note = hemagglutinin__InfluenzaA__ACX31940

SEQ ID NO: 3437 - protein, 566 aa, synthetic construct; identical to SEQ ID NO: 2669
  REGION 1..566: note = hemagglutinin__InfluenzaA__ACX31943

SEQ ID NO: 3438 - protein, 566 aa, synthetic construct; identical to SEQ ID NO: 2669
  REGION 1..566: note = hemagglutinin__InfluenzaA__ACX31946

SEQ ID NO: 3439 - protein, 566 aa, synthetic construct; identical to SEQ ID NO: 2669
  REGION 1..566: note = hemagglutinin__InfluenzaA__ACX31947

SEQ ID NO: 3440 - protein, 566 aa, synthetic construct; identical to SEQ ID NO: 2669
  REGION 1..566: note = hemagglutinin__InfluenzaA__ACX31948

SEQ ID NO: 3441 - protein, 566 aa, synthetic construct
  REGION 1..566: note = hemagglutinin__InfluenzaA__ACX31949
MKAILVVLLYTFATANADTLCIGYHANNSTDTVDTVLEKNVTVTHSVNLLEDKHNGKLCKLRGVAPLHLGKCNIAGWILGNPECESLSTASSWSYIVETSSSDNGTCYPGDFIDYEELREQLSSVSSFERFEIFPKTSSWPNHDSNKGVTAACPHAGAKSFYKNLIWLVKKGNSYPKLSKSYINDKGKEVLVLWGIHHPSTSADQQSLYQNADAYVFVGTSRYSKKFKPEIAIRPKVRDQEGRMNYYWTLVEPGDKITFEATGNLVVPRYAFAMERNAGSGIIISDTPVHYCNTTCQTPKGAINTSLPFQNIHPITIGKCPKYVKSTKLRLATGLRNVPSIQSRGLFGAIAGFIEGGWTGMVDGWYGYHHQNEQGSGYAADLKSTQNAIDEITNKVNSVIEKMNTQFTAVGKEFNHLEKRIENLNKKVDDGFLDIWTYNAELLVLLENERTLDYHDSNVKNLYEEVRSQLKNNAKEIGNGCFEFYHKCDNTCMESVKNGTYDYPKYSEEAKLNREEIDGVKLESTRIYQILAIYSTVASSLVLVVSLGAISFWMCSNGSLQCRICI

SEQ ID NO: 3442 - protein, 566 aa, synthetic construct; identical to SEQ ID NO: 2669
  REGION 1..566: note = hemagglutinin__InfluenzaA__ACX31950

SEQ ID NO: 3443 - protein, 566 aa, synthetic construct; identical to SEQ ID NO: 2669
  REGION 1..566: note = hemagglutinin__InfluenzaA__ACX31951

SEQ ID NO: 3444 - protein, 566 aa, synthetic construct; identical to SEQ ID NO: 2669
  REGION 1..566: note = hemagglutinin__InfluenzaA__ACX31954

SEQ ID NO: 3445 - protein, 566 aa, synthetic construct; identical to SEQ ID NO: 2669
  REGION 1..566: note = hemagglutinin__InfluenzaA__ACX31955

SEQ ID NO: 3446 - protein, 566 aa, synthetic construct; identical to SEQ ID NO: 2656
  REGION 1..566: note = hemagglutinin__InfluenzaA__ACX31956

SEQ ID NO: 3447 - protein, 566 aa, synthetic construct; identical to SEQ ID NO: 2669
  REGION 1..566: note = hemagglutinin__InfluenzaA__ACX31957

SEQ ID NO: 3448 - protein, 566 aa, synthetic construct; identical to SEQ ID NO: 2656
  REGION 1..566: note = hemagglutinin__InfluenzaA__ACX31958

SEQ ID NO: 3449 - protein, 566 aa, synthetic construct; identical to SEQ ID NO: 2911
  REGION 1..566: note = hemagglutinin__InfluenzaA__ACX31960

SEQ ID NO: 3450 - protein, 566 aa, synthetic construct
  REGION 1..566: note = hemagglutinin__InfluenzaA__ACX31961
MKAILVVMLYTFATANADTLCIGYHANNSTDTVDTVLEKNVTVTHSVNLLEDKHNGKLCKLRGVAPLHLGKCNIAGWILGNPECESLSTASSWSYIVETSSSDNGTCYPGDFIDYEELREQLSSVSSFERFEIFPKTSSWPNHDSNKGVTAACPHAGAKSFYKNLIWLVKKGNSYPKLSKSYINDKGKEVLVLWGIHHPSTSADQQSLYQNADAYVFVGSSRYSKKFKPEIAIRPKVRDQEGRMNYYWTLVEPGDKITFEATGNLVVPRYAFAMERNAGSGIIISDTPVHDCNTTCQTPKGAINTSLPFQNIHPITIGKCPKYVKSTKLRLATGLRNVPSIQSRGLFGAIAGFIEGGWTGMVDGWYGYHHQNEQGSGYAADLKSTQNAIDEITNKVNSVIEKMNTQFTAVGKEFNHLEKRIENLNKKVDDGFMDIWTYNAELLVLLENERTLDYHDSNVKNLYEKVRSQLKNNAKEIGNGCFEFYHKCDNTCMESVKNGTYDYPKYSEEAKLNREEIDGVKLESTRIYQILAIYSTVASSLVLVVSLGAISFWMCSNGSLQCRICI

SEQ ID NO: 3451 - protein, 566 aa, synthetic construct; identical to SEQ ID NO: 2669
  REGION 1..566: note = hemagglutinin__InfluenzaA__ACX31962

SEQ ID NO: 3452 - protein, 566 aa, synthetic construct; identical to SEQ ID NO: 2669
  REGION 1..566: note = hemagglutinin__InfluenzaA__ACX31964

SEQ ID NO: 3453 - protein, 566 aa, synthetic construct; identical to SEQ ID NO: 2656
  REGION 1..566: note = hemagglutinin__InfluenzaA__ACX35237

SEQ ID NO: 3454 - protein, 566 aa, synthetic construct; identical to SEQ ID NO: 2669
  REGION 1..566: note = hemagglutinin__InfluenzaA__ACX35247

SEQ ID NO: 3455 - protein, 566 aa, synthetic construct; identical to SEQ ID NO: 2669
  REGION 1..566: note = hemagglutinin__InfluenzaA__ACX35257

SEQ ID NO: 3456 - protein, 566 aa, synthetic construct; identical to SEQ ID NO: 2669
  REGION 1..566: note = hemagglutinin__InfluenzaA__ACX35267

SEQ ID NO: 3457 - protein, 566 aa, synthetic construct; identical to SEQ ID NO: 2669
  REGION 1..566: note = hemagglutinin__InfluenzaA__ACX35277

SEQ ID NO: 3458 - protein, 566 aa, synthetic construct; identical to SEQ ID NO: 2669
  REGION 1..566: note = hemagglutinin__InfluenzaA__ACX35287

SEQ ID NO: 3459 - protein, 566 aa, synthetic construct; identical to SEQ ID NO: 2669
  REGION 1..566: note = hemagglutinin__InfluenzaA__ACX35297

SEQ ID NO: 3460 - protein, 566 aa, synthetic construct
  REGION 1..566: note = hemagglutinin__InfluenzaA__ACX35307
MKAILVVLLYTFATANADTLCIGYHANNSTDTVDTVLEKNVTVTHSVNLLEDKHNGKLCKLRGVAPLHLGKCNIAGWILGNPECESLSTASSWSYIVETSSSDNGTCYPGDFIDYEELREQLSSVSSFERFEIFPKTSSWPNHDSNKGVTAACPHAGAKSFYKNLIWLVKKGNSYPKLSKSYINDKGKEVLVLWGIHHPSTSADQQSLYQNADAYVFVGTSRYSKKFKPEIAIRPKVRDQEGRMNYYWTLVGPGDKITFEATGNLVVPRYAFAMERNAGSGIIISDTPVHDCNTTCQTPKGAINTSLPFQNIHPITIGKCPKYVKSTKLRLATGLRNVPSIQSRGLFGAIAGFIEGGWTGMVDGWYGYHHQNEQGSGYAADLKSTQNAIDEITNKVNSVIEKMNTQFTAVGKEFNHLEKRIENLNKKVDDGFLDIWTYNAELLVLLENERTLDYHDSNVKNLYEKVRSQLKNNAKEIGNGCFEFYHKCDNTCMESVKNGTYDYPKYSEEAKLNREEIDGVKLESTRIYQILAIYSTVASSLVLVVSLGAISFWMCSNGSLQCRICI

SEQ ID NO: 3461 - protein, 566 aa, synthetic construct; identical to SEQ ID NO: 2911
  REGION 1..566: note = hemagglutinin__InfluenzaA__ACX35317

SEQ ID NO: 3462 - protein, 566 aa, synthetic construct
  REGION 1..566: note = hemagglutinin__InfluenzaA__ACX35327
MKAILVVLLYTFATANADTLCIGYHANNSTDTVDTVLEKNVTVTHSVNLLEDKHNGKLCKLRGVAPLHLGKCNIAGWILGNPECESLSTASSWSYIVETSSSDNGTCYPGDFIDYEELREQLSSVSSFERFEIFPKTSSWPNHDSNKGVTAACPHAGAKSFYKNLIWLVKKGNSYPKLSKSYINDKGKEVLVLWGIHHPSTSADQQSLYQNADSYVFVGTSRYSKKFKPEIAIRPKVRDQEGRMNYYWTLVEPGDKITFEATGNLVVPRYAFAMERNAGSGIIISDTPVHDCNTTCQTPKGAINTSLPFQNIHPITIGKCPKYVKSTKLRLATGLRNVPSIQSRGLFGAIAGFIEGGWTGMVDGWYGYHHQNEQGSGYAADLKSTQNAIDEITNKVNSVIEKMNTQFTAVGKEFNHLEKRIENLNKKVDDGFLDIWTYNAELLVLLENERTLDYHDSNVKNLYEKVRSQLKNNAKEIGNGCFEFYHKCDNTCMESVKNGTYDYPKYSEEAKLNREEIDGVKLESTRIYQILAIYSTVASSLVLVVSLGAISFWMCSNGSLQCRICI

SEQ ID NO: 3463 - protein, 566 aa, synthetic construct
  REGION 1..566: note = hemagglutinin__InfluenzaA__ACX36501
MKAILVVLLYTFATANADTLCIGYHANNSTDTVDTVLEKNVTVTHSVNLLEDKHNGKLCKLRGVAPLHLGKCNIAGWILGNPECESLSTASSWSYIVETSSSDNGTCYPGDFIDYEELREQLSSVSSFERFEIFPKTSSWPNHDSNKGVTAACPHAGAKSFYKNLIWLVKKGNSYPKLSKSYINDKGKEVLVLWGIHHPSTSADQQSIYQNADAYVFVGTSRYSKKFKPEIAIRPKVRDQEGRMNYYWTLVEPGDKITFEATGNLVVPRYAFAMERNAGSGIIISDTPVHDCNTTCQTPKGAINTSLPFQNIHPITIGKCPKYVKSTKLRLATGLRNVPSIQSRGLFGAIAGFIEGGWTGMVDGWYGYHHQNEQGSGYAADLKSTQNAIDEITNKVNSVIEKMNTQFTAVGKEFNHLEKRIENLNKKVDDGFLDIWTYNAELLVLLENERTLDYHDSNVKNLYEKVRSQLKNNAKEIGNGCFEFYHKCDNTCMESVKNGTYDYPKYSEEAKLNREEIDGVKLESTRIYQILAIYSTVASSLVLVVSLGAISFWMCSNGSLQCRICI

SEQ ID NO: 3464 - protein, 566 aa, synthetic construct
  REGION 1..566: note = hemagglutinin__InfluenzaA__ACX36502
MKAILVVLLYTFATANADTLCIGYHANNSTDTVDTILEKNVTVTHSVNLLEDKHNGKLCKLRGVAPLHLGKCNIAGWILGNPECESLSTASSWSYIVETSSSDNGTCYPGDFIDYEELREQLSSVSSFERFEIFPKTSSWPNHDSNKGVTAACPHAGAKSFYKNLIWLVKKGNSYPKLSKSYINDKGKEVLVLWGIHHPSTSADQQSIYQNADAYVFVGTSRYSKKFKPEIAIRPKVRDQEGRMNYYWTLVEPGDKITFEATGNLVVPRYAFAMERNAGSGIIISDTPVHDCNTTCQTPKGAINTSLPFQNIHPITIGKCPKYVKSTKLRLATGLRNVPSIQSRGLFGAIAGFIEGGWTGMVDGWYGYHHQNEQGSGYAADLKSTQNAIDEITNKVNSVIEKMNTQFTAVGKEFNHLEKRIENLNKKVDDGFLDIWTYNAELLVLLENERTLDYHDSNVKNLYEKVRSQLKNNAKEIGNGCFEFYHKCDNTCMESVKNGTYDYPKYSEEAKLNREEIDGVKLESTRIYQILAIYSTVASSLVLVVSLGAISFWMCSNGSLQCRICI

SEQ ID NO: 3465 - protein, 566 aa, synthetic construct
  REGION 1..566: note = hemagglutinin__InfluenzaA__ACX36503
MKAILVVLLYTFATANADTLCIGYHANNSTDTVDTILEKNVTVTHSVNLLEDKHNGKLCKLRGVAPLHLGKCNIAGWILGNPECESLSTASSWSYIVETSSSDNGTCYPGDFIDYEELREQLSSVSSFERFEIFPKTSSWPNHDSNKGVTAACPHAGAKSFYKNLIWLVKKGNSYPKLSKSYINDKGKEVLVLWGIHHPSTSADQQSIYQNADAYVFVGTSRYSKKFKPEIAIRPKVRDQEGRMNYYWTLVEPGDKITFEATGNLVVPRYAFAMERNAGSGIIISDTPVHDCNTTCQTPKGAINTSLPFQNIHPITIGKCPKYVKSTKLRLATGLRNVPSIQSRGLFGAIAGFIEGGWTGMVDGWYGYHHQNEQGSGYAADLKSTQNAIDEITNKVNSVIEKMNTQFTAVGKEFNHLEKRIENLNKKVDDGFLDIWTYNAELLVLLENERTLDYHDSNVKNLYEKVRSQLKNNTKEIGNGCFEFYHKCDNTCMESVKNGTYDYPKYSEEAKLNREEIDGVKLESTRIYQILAIYSTVASSLVLVVSLGAISFWMCSNGSLQCRICI

SEQ ID NO: 3466 - protein, 566 aa, synthetic construct
  REGION 1..566: note = hemagglutinin__InfluenzaA__ACX47367
MKAILVVLLYTFATANADTLCIGYHANNSTDTVDTVLEKNVTVTHSVNLLEDKHNGKLCKLRGVAPLHLGKCNIAGWILGNPECESLSTASSWSYIVETSSSDNGTCYPGDFIDYEELREQLSSVSSFERFEIFPKTSSWPNHDPNKGVTAACPHAGAKSFYKNLIWLVKKGNSYPKLSKSYINDKGKEVLVLWGIHHPSTSADQQSLYQNADAYVFVGTSRYSKKFKPEIAIRPKVRDQEGRMNYYWTLVKPGDKITFEATGNLVVPRYAFAMERNAGSGIIISDTPVHDCNTTCQTPKGAINTSLPFQNIHPITIGKCPKYVKSTKLRLATGLRNVPSIQSRGLFGAIAGFIEGGWTGMVDGWYGYHHQNEQGSGYAADLKSTQNAIDEITNKVNSVIEKMNTQFTAVGKEFNHLEKRIENLNKKVDDGFLDIWTYNAELLVLLENERTLDYHDSNVKNLYEKVRSQLKNNAKEIGNGCFEFYHKCDNTCMESVKNGTYDYPKYSEEAKLNREEIDGVKLESTRIYQILAIYSTVASSLVLVVSLGAISFWMCSNGSLQCRICI

SEQ ID NO: 3467 - protein, 566 aa, synthetic construct
  REGION 1..566: note = hemagglutinin__InfluenzaA__ACX47368
MKAILVVLLYTFATANADTLCIGYHANNSTDTVDTVLEKNVTVTHSVNLLEDKHNGKLCKLRGVAPLHLGKCNIAGWILGNPECESLSTASSWSYIVETSSSDNGTCYPGDFIDYEELREQLSSVSSFERFEIFPKTSSWPNHDPNKGVTAACPHAGAKSFYKNLIWLVKKGNSYPKLSKSYINDKGKEVLVLWGIHHPSTSADQQSLYQNADAYVFVGTSRYSKKFKPEIAIRPKVRDQEGRMNYYWTLVEPGDKITFEATGNLVVPRYAFAMERNAGSGIIISDTPVHDCNTTCQTPKGAINTSLPFQNIHPITIGKCPKYVKSTKLRLATGLRNVPSIQSRGLFGAIAGFIEGGWTGMVDGWYGYHHQNEQGSGYAADLKSTQNAIDEITNKVNSVIEKMNTQFTAVGKEFNHLEKRIENLNKKVDDGFLDIWTYNAELLVLLENERTLDYHDSNVKNLYEKVRSQLKNNAKEIGNGCFEFYHKCDNTCMESVKNGTYDYPKYSEEAKLNREEIDGVKLESTRIYQILAIYSTVASSLVLVVSLGAISFWMCSNGSLQCRICI

SEQ ID NO: 3468 - protein, 566 aa, synthetic construct; identical to SEQ ID NO: 3467
  REGION 1..566: note = hemagglutinin__InfluenzaA__ACX47369

SEQ ID NO: 3469 - protein, 566 aa, synthetic construct
  REGION 1..566: note = hemagglutinin__InfluenzaA__ACX47370
MKAILVVLLYTFATANADTLCIGYHANNSTDTVDTVLEKNVTVTHSVNLLEDKHNGKLCKLRGVAPLHLGKCNIAGWILGNPECESLSTASSWSYIVETSSSDNGTCYPGDFIDYEELREQLSSVSSFERFEIFPKTSSWPNHDPNKGVTAACPHAGAKSFYKNLIWLVKKGNSYPKLSKSYINDKGKEVLVLWGIHHPSTSADRQSLYQNADAYVFVGTSRYSKKFKPEIAIRPKVRDQEGRMNYYWTLVEPGDKITFEATGNLVVPRYAFAMERNAGSGIIISDTPVHDCNTTCQTPKGAINTSLPFQNIHPITIGKCPKYVKSTKLRLATGLRNVPSIQSRGLFGAIAGFIEGGWTGMVDGWYGYHHQNEQGSGYAADLKSTQNAIDEITNKVNSVIEKMNTQFTAVGKEFNHLEKRIENLNKKVDDGFLDIWTYNAELLVLLENERTLDYHDSNVKNLYEKVRSQLKNNAKEIGNGCFEFYHKCDNTCMESVKNGTYDYPKYSEEAKLNREEIDGVKLESTRIYQILAIYSTVASSLVLVVSLGAISFWMCSNGSLQCRICI

SEQ ID NO: 3470 - protein, 566 aa, synthetic construct; identical to SEQ ID NO: 3467
  REGION 1..566: note = hemagglutinin__InfluenzaA__ACX47371

SEQ ID NO: 3471 - protein, 566 aa, synthetic construct; identical to SEQ ID NO: 3467
  REGION 1..566: note = hemagglutinin__InfluenzaA__ACX47372

SEQ ID NO: 3472 - protein, 566 aa, synthetic construct; identical to SEQ ID NO: 3467
  REGION 1..566: note = hemagglutinin__InfluenzaA__ACX47373

SEQ ID NO: 3473 - protein, 566 aa, synthetic construct; identical to SEQ ID NO: 3467
  REGION 1..566: note = hemagglutinin__InfluenzaA__ACX47374

SEQ ID NO: 3474 - protein, 566 aa, synthetic construct
  REGION 1..566: note = hemagglutinin__InfluenzaA__ACX47375
MKAILVVLLYTFATANADTLCIGYHANNSTDTVDTVLEKNVTVTHSVNLLEDKHNGKLCKLRGVAPLHLGKCNIAGWILGNPECESLSTASSWSYIVETSSSDNGTCYPGDFIDYEELREQLSSVSSFERFEIFPKTSSWPNHDPNKGVTAACPHAGAKSFYKNLIWLVKKGNSYPKLSKSYINDKGKEVLVLWGIHHPSTSADQQSLYQNADAYVFVGTSRYSKKFKPEIAIRPKVRDQEGRMNYYWTLVEPGDKITFEATGNLVVPRYAFAMERNAGSGIIISDTPVHDCNTTCQTPNGAINTSLPFQNIHPITIGKCPKYVKSTKLRLATGLRNVPSIQSRGLFGAIAGFIEGGWTGMVDGWYGYHHQNEQGSGYAADLKSTQNAIDEITNKVNSVIEKMNTQFTAVGKEFNHLEKRIENLNKKVDDGFLDIWTYNAELLVLLENERTLDYHDSNVKNLYEKVRSQLKNNAKEIGNGCFEFYHKCDNTCMESVKNGTYDYPKYSEEAKLNREEIDGVKLESTRIYQILAIYSTVASSLVLVVSLGAISFWMCSNGSLQCRICI

SEQ ID NO: 3475 - protein, 566 aa, synthetic construct; identical to SEQ ID NO: 3467
  REGION 1..566: note = hemagglutinin__InfluenzaA__ACX47376

SEQ ID NO: 3476 - protein, 566 aa, synthetic construct; identical to SEQ ID NO: 3467
  REGION 1..566: note = hemagglutinin__InfluenzaA__ACX47377

SEQ ID NO: 3477 - protein, 566 aa, synthetic construct
  REGION 1..566: note = hemagglutinin__InfluenzaA__ACX47380
MKAILVVLLYTFATANADTLCIGYHANNSTDTVDTVLEKNVTVTHSVNLLEDKHNGKLCKLRGVAPLHLGKCNIAGWILGNPECESLSTTSSWSYIVETSSSDNGTCYPGDFIDYEELREQLSSVSSFERFEIFPKTSSWPNHDSNKGVTAACPHAGAKSFYKNLIWLVKKGNSYPKLSKSYINDKGKEVLVLWGIHHPSTSADQQSLYQNADAYVFVGTSRYSKKFKPEIAIRPKVRDQEGRMNYYWTLVEPGDKITFEATGNLVVPRYAFVMERNAGSGIIISDTPVHDCNTTCQTPKGAINTSLPFQNIHPITIGKCPKYVKSTKLRLATGLRNVPSIQSRGLFGAIAGFIEGGWTGMVDGWYGYHHQNEQGSGYAADLKSTQNAIDEITNKVNSVIEKMNTQFTAVGKEFNHLEKRIENLNKKVDDGFLDIWTYNAELLVLLENERTLDYHDSNVKNLYEKVRSQLKNNAKEIGNGCFEFYHKCDNTCMESVKNGTYDYPKYSEEAKLNREEIDGVKLESTRIYQILAIYSTVASSLVLVVSLGAISFWMCSNGSLQCRICI

SEQ ID NO: 3478 - protein, 566 aa, synthetic construct; identical to SEQ ID NO: 3477
  REGION 1..566: note = hemagglutinin__InfluenzaA__ACX47381

SEQ ID NO: 3479 - protein, 566 aa, synthetic construct; identical to SEQ ID NO: 3477
  REGION 1..566: note = hemagglutinin__InfluenzaA__ACX47382

SEQ ID NO: 3480 - protein, 566 aa, synthetic construct
  REGION 1..566: note = hemagglutinin__InfluenzaA__ACX47383
MKAILVVLLYTFATANADTLCIGYHANNSTDTVDTVLEKNVTVTHSVNLLEDKHNGKLCKLRGVAPLHLGKCNIAGWILGNPECESLSTTSSWSYIVETSSSDNGTCYPGDFIDYEELREQLSSVSSFERFEIFPKTSSWPNHDSNKGVTAACPHAGAKSFYKNLIWLVKKGNSYPKLSKSYINDKGKEVLVLWGIHHPSTSADQQSLYQNADAYVFVGTSRYSKKFKPEIAIRPKVRDQEGRMNYYWTLVEPGDKITFEATGNLVVPRYAFAMERNAGSGIIISDTPVHDCNTTCQTPKGAINTSLPFQNIHPITIGKCPKYVKSTKLRLATGLRNVPSIQSRGLFGAIAGFIEGGWTGMVDGWYGYHHQNEQGSGYAADLKSTQNAIDEITNKVNSVIEKMNTQFTAVGKEFNHLEKRIENLNKKVDDGFLDIWTYNAELLVLLENERTLDYHDSNVKNLYEKVRSQLKNNAKEIGNGCFEFYHKCDNTCMESVKNGTYDYPKYSEEAKLNREKIDGVKLESTRIYQILAIYSTVASSLVLVVSLGAISFWMCSNGSLQCRICI

SEQ ID NO: 3481 - protein, 566 aa, synthetic construct
  REGION 1..566: note = hemagglutinin__InfluenzaA__ACX47384
MKAILVVLLYTFATANADTLCIGYHANNSTDTVDTVLEKNVTVTHSVNLLEDKHNGKLCKLRGVAPLHLGKCNIAGWILGNPECESLSTTSSWSYIVETSSSDNGTCYPGDFIDYEELREQLSSVSSFERFEIFPKTSSWPNHDSNKGVTAACPHAGAKSFYKNLIWLVKKGNSYPKLSKSYINDKGKEVLVLWGIHHPSTSADQQSLYQNADAYVFVGTSRYSKKFKPEIAIRPKVRDQEGRMNYYWTLVEPGDKITFEATGNLVVPRYAFAMERNAGSGIIISDTPVHDCNTTCQTPKGAINTSLPFQNIHPITIGKCPKYVKSTKLRLATGLRNVPSIQSRGLFGAIAGFIEGGWTGMVDGWYGYHHQNEQGSGYAADLKSTQNAIDEITNKVNSVIEKMNTQFTAVGKEFNHLEKRIENLNKKVDDGFLDIWTYNAELLVLLENERTLDYHDSNVKNLYEKVRSQLKNNAKEIGNGCFEFYHKCDNTCMESVKNGTYDYPKYSEEAKLNREEIDGVKLESTRIYQILAIYSTVASSLVLVVSLGAISFWMCSNGSLQCRICI

SEQ ID NO: 3482 - protein, 566 aa, synthetic construct; identical to SEQ ID NO: 3481
  REGION 1..566: note = hemagglutinin__InfluenzaA__ACX47385

SEQ ID NO: 3483 - protein, 566 aa, synthetic construct; identical to SEQ ID NO: 3481
  REGION 1..566: note = hemagglutinin__InfluenzaA__ACX47387

SEQ ID NO: 3484 - protein, 566 aa, synthetic construct; identical to SEQ ID NO: 2669
  REGION 1..566: note = hemagglutinin__InfluenzaA__ACX55834

SEQ ID NO: 3485 - protein, 566 aa, synthetic construct; identical to SEQ ID NO: 3467
  REGION 1..566: note = hemagglutinin__InfluenzaA__ACX61574

SEQ ID NO: 3486 - protein, 566 aa, synthetic construct; identical to SEQ ID NO: 2669
  REGION 1..566: note = hemagglutinin__InfluenzaA__ACX61575

SEQ ID NO: 3487 - protein, 566 aa, synthetic construct
  REGION 1..566: note = hemagglutinin__InfluenzaA__ACX83577
MKAILVVLLYTFATANADTLCIGYHANNSTDTVDTVLEKNVTVTHSVNLLEDKHNGKLCKLRGVAPLHLGKCNIAGWILGNPECESFSTSSSWSYIVETSSSDNGTCYPGDFIDYEELREQLSSVSSFERFEIFPKTSSWPNHDSNKGVTAACPHAGAKSFYKNLIWLVKKGNSYPKLSKSYINDKGKEVLVLWGIHHPSTSADQQSLYQNADAYVFVGTSRYSKKFKPEIAIRPKVRGQEGRMNYYWTLVEPGDKITFEATGNLVVPRYAFAMERNAGSGIIISDTPVHDCNTTCQTPKGAINTSLPFQNIHPITIGKCPKYVKSTKLRLATGLRNVPSIQSRGLFGAIAGFIEGGWTGMVDGWYGYHHQNEQGSGYAADLKSTQNAIDEITNKVNSVIEKMNTQFTAVGKEFNHLEKRIENLNKKVDDGFLDIWTYNAELLVLLENERTLDYHDSNVKNLYEKVRSQLKNNAKEIGNGCFEFYHKCDNTCMESVKNGTYDYPKYSEEAKLNREEIDGVKLESTRIYQILAIYSTVASSLVLVVSLGAISFWMCSNGSLQCRICI

SEQ ID NO: 3488 - protein, 566 aa, synthetic construct
  REGION 1..566: note = hemagglutinin__InfluenzaA__ACX94091
MKAILVVLLYTFATANADTLCIGYHANNSTDTVDTVLEKNVTVTHSVNLLEDKHNGKLCKLRGVAPLHLGKCNIAGWILGNPECESLSTASSWSYIVETSSSDNGTCYPGDFIDYEELREQLSSVSSFERFEIFPKTISWPNHDSNKGVTAACPHAGAKSFYKNLIWLVKKGNSYPKLSKSYINDKGKEVLVLWGIHHPSTSADQQSLYQNADAYVFVGTSRYSKKFKPEIAIRPKVRDQEGRMNYYWTLVEPGDKITFEATGNLVVPRYAFAMERNAGSGIIISDTPVHDCNTTCQTPKGAINTSLPFQNIHPITIGKCSKYVKSTKLRLATGLRNVPSIQSRGLFGAIAGFIEGGWTGMVDGWYGYHHQNEQGSGYAADLKSTQNAIDEITNKVNSVIEKMNTQFTAVGKEFNHLEKRIENLNKKVDDGFLDIWTYNAELLVLLENERTLDYHDSNVKNLYEKVRSQLKNNAKEIGNGCFEFYHKCDNTCMESVKNGTYDYPKYSEEAKLNREEIDGVKLESTRIYQILAIYSTVASSLVLVVSLGAISFWMCSNGSLQCRICI

SEQ ID NO: 3489 - protein, 566 aa, synthetic construct
  REGION 1..566: note = hemagglutinin__InfluenzaA__ACY26192
MKAILVVLLYTFATANADTLCIGYHANNSTDTVDTVLEKNVTVTHSVNLLEDKHNGKLCKLRGVAPLHLGKCNIAGWILGNPECESLSTASSWSYIVETSSSDNGTCYPGDFIDYEELREQLSSVSSFERFEIFPKTSSWPNHDSNKGVTAACPHAGAKSFYKNLIWLVKKGNSYPKLSKSYINDKGKEVLVLWGIHHPSTSADQQSLYQNADAYVFVGTSRYSKKFKPEIAIRPKVRDQEGRMNYYWTLVEPGDKITFEATGNLVVPRYAFAMERNAGSGIIISDTPVHNCNTTCQTPKGAINTSLPFQNIHPITIGKCPKYVKSTKLRLATGLRNVPSIQSRGLFGAIAGFIEGGWTGMVDGWYGYHHQNEQGSGYAADLKSTQDAIDEITNKVNSVIEKMNTQFTAVGKEFNHLEKRIENLNKKVDDGFLDIWTYNAELLVLLENERTLDYHDSNVKNLYEKVRSQLKNNAKEIGNGCFEFYHKCDNTCMESVKNGTYDYPKYSEEAKLNREEIDGVKLESTRIYQILAIYSTVASSLVLVVSLGAISFWMCSNGSLQCRICI

SEQ ID NO: 3490 - protein, 566 aa, synthetic construct; identical to SEQ ID NO: 3238
  REGION 1..566: note = hemagglutinin__InfluenzaA__ACY26202

SEQ ID NO: 3491 - protein, 566 aa, synthetic construct; identical to SEQ ID NO: 2669
  REGION 1..566: note = hemagglutinin__InfluenzaA__ACY46103

SEQ ID NO: 3492 - protein, 566 aa, synthetic construct; identical to SEQ ID NO: 2669
  REGION 1..566: note = hemagglutinin__InfluenzaA__ACY46113

SEQ ID NO: 3493 - protein, 566 aa, synthetic construct
  REGION 1..566: note = hemagglutinin__InfluenzaA__ACY46123
MKAILVVLLYTFATANADTLCIGYHANNSTDTVDTVLEKNVTVTHSVNLLEDKHNGKLCKLRGVAPLHLGKCNIAGWILGNPECESLSTASSWSYIVETSSSDNGTCYPGDFIDYEELREQLSSVSSFERFEIFPKTSSWPNHDSNKGVTAACPHAGAKSFYKNLIWLVKKGNSYPKLSKSYINDKGKEVLVLWGIHHPSTSADQQSLYQNADAYVFVGTSRYSKKFKPEIAIRPKVGDQEGRMNYYWTLVEPGDKITFEATGNLVVPRYAFAMERNAGSGIIISDTPVHDCNTTCQTPKGAINTSLPFQNIHPITIGKCPKYVKSTKLRLATGLRNVPSIQSRGLFGAIAGFIEGGWTGMVDGWYGYHHQNEQGSGYAADLKSTQNAIDEITNKVNSVIEKMNTQFTAVGKEFNHLEKRIENLNKKVDDGFLDIWTYNAELLVLLENERTLDYHDSNVKNLYEKVRSQLKNNAKEIGNGCFEFYHKCDNTCMESVKNGTYDYPKYSEEAKLNREEIDGVKLESTRIYQILAIYSTVASSLVLVVSLGAISFWMCSNGSLQCRICI

SEQ ID NO: 3494 - protein, 566 aa, synthetic construct; identical to SEQ ID NO: 2669
  REGION 1..566: note = hemagglutinin__InfluenzaA__ACY46133

SEQ ID NO: 3495 - protein, 566 aa, synthetic construct; identical to SEQ ID NO: 2669
  REGION 1..566: note = hemagglutinin__InfluenzaA__ACY46163

SEQ ID NO: 3496 - protein, 566 aa, synthetic construct
  REGION 1..566: note = hemagglutinin__InfluenzaA__ACY46173
MKAILVVLLYTFATANADTLCIGYHANNSTDTVDTVLEKNVTVTHSVNLLEDKHNGKLCKLRGVAPLHLGKCNIAGWILGNPECESLSTASSWSYIVETSSSDNGTCYPGDFIDYEELREQLSSVSSFERFEIFPKTSSWPNHDSNKGVTAACPHAGAKSFYKNLIWLVKKGNSYPKLSKSYINDKGKEVLVLWGIHHPSTSADQQSLYQNADAYVFVGSSKYSKKFKPEIAIRPKVRDQEGRMNYYWTLVEPGDKITFEATGNLVVPRYAFAMERNAGSGIIISDTPVHDCNTTCQTPKGAINTSLPFQNIHPITIGKCPKYVKSTKLRLATGLRNVPSIQSRGLFGAIAGFIEGGWTGMVDGWYGYHHQNEQGSGYAADLKSTQNAIDEITNKVNSVIEKMNTQFTAVGKEFNHLEKRIENLNKKVDDGFLDIWTYNAELLVLLENERTLDYHDSNVKNLYEKVRSQLKNNAKEIGNGCFEFYHKCDNTCMESVKNGTYDYPKYSEEAKLNREEIDGVKLESTRIYQILAIYSTVASSLVLVVSLGAISFWMCSNGSLQCRICI

SEQ ID NO: 3497 - protein, 566 aa, synthetic construct; identical to SEQ ID NO: 2669
  REGION 1..566: note = hemagglutinin__InfluenzaA__ACY46213

SEQ ID NO: 3498 - protein, 566 aa, synthetic construct; identical to SEQ ID NO: 2669
  REGION 1..566: note = hemagglutinin__InfluenzaA__ACY46223

SEQ ID NO: 3499 - protein, 566 aa, synthetic construct; identical to SEQ ID NO: 2669
  REGION 1..566: note = hemagglutinin__InfluenzaA__ACY46233

SEQ ID NO: 3500 - protein, 566 aa, synthetic construct; identical to SEQ ID NO: 2669
  REGION 1..566: note = hemagglutinin__InfluenzaA__ACY46243

SEQ ID NO: 3501 - protein, 566 aa, synthetic construct; identical to SEQ ID NO: 2669
  REGION 1..566: note = hemagglutinin__InfluenzaA__ACY46253

SEQ ID NO: 3502 - protein, 566 aa, synthetic construct; identical to SEQ ID NO: 2669
  REGION 1..566: note = hemagglutinin__InfluenzaA__ACY46263

SEQ ID NO: 3503 - protein, 566 aa, synthetic construct; identical to SEQ ID NO: 2669
  REGION 1..566: note = hemagglutinin__InfluenzaA__ACY46273

SEQ ID NO: 3504 - protein, 566 aa, synthetic construct; identical to SEQ ID NO: 2669
  REGION 1..566: note = hemagglutinin__InfluenzaA__ACY46283

SEQ ID NO: 3505 - protein, 566 aa, synthetic construct
  REGION 1..566: note = hemagglutinin__InfluenzaA__ACY46293
MKAILVVLLYTFATANADTLCIGYHANNSTDTVDTVLEKNVTVTHSVNLLEDKHNGKLCKLRGVAPLHLGKCNIAGWILGNPECESLSTASSWSYIVETSSSDNGTCYPGDFIDYEELREQLSSVSSFERFEIFPKTSSWPNHDSNKGVTAACPHAGAKSFYKNLIWLVKKGNSYPKLSKSYINDKGKEVLVLWGIHHPSTSADQQSLYQNADAYVFVGTSRYSKKFKPEIAIRPKVRDQEGRMNYYWTLVEPGDKITFEATGNLVVPRYAFAMERNAGSGIIISDTPVHDCNTTCQTPKGAINTSLPFQNIHPITIGKCPKYVKSTKLRLAAGLRNVPSIQSRGLFGAIAGFIEGGWTGMVDGWYGYHHQNEQGSGYAADLKSTQNAIDEITNKVNSVIEKMNTQFTAVGKEFNHLEKRIENLNKKVDDGFLDIWTYNAELLVLLENERTLDYHDSNVKNLYEKVRSQLKNNAKEIGNGCFEFYHKCDNTCMESVKNGTYDYPKYSEEAKLNREEIDGVKLESTRIYQILAIYSTVASSLVLVVSLGAISFWMCSNGSLQCRICI

SEQ ID NO: 3506 - protein, 566 aa, synthetic construct; identical to SEQ ID NO: 2669
  REGION 1..566: note = hemagglutinin__InfluenzaA__ACY46303

SEQ ID NO: 3507 - protein, 566 aa, synthetic construct; identical to SEQ ID NO: 2669
  REGION 1..566: note = hemagglutinin__InfluenzaA__ACY46313

SEQ ID NO: 3508 - protein, 566 aa, synthetic construct; identical to SEQ ID NO: 2669
  REGION 1..566: note = hemagglutinin__InfluenzaA__ACY46323

SEQ ID NO: 3509 - protein, 566 aa, synthetic construct; identical to SEQ ID NO: 2669
  REGION 1..566: note = hemagglutinin__InfluenzaA__ACY46343

SEQ ID NO: 3510 - protein, 566 aa, synthetic construct; identical to SEQ ID NO: 2669
  REGION 1..566: note = hemagglutinin__InfluenzaA__ACY46353

SEQ ID NO: 3511 - protein, 566 aa, synthetic construct
  REGION 1..566: note = hemagglutinin__InfluenzaA__ACY46373
MKAILIVLLYTFATANADTLCIGYHANNSTDTVDTVLEKNVTVTHSVNLLEDKHNGKLCKLRGVAPLHLGKCNIAGWILGNPECESLSTASSWSYIVETSSSDNGTCYPGDFIDYEELREQLSSVSSFERFEIFPKTSSWPNHDSNKGVTAACPHAGAKSFYKNLIWLVKKGNSYPKLSKSYINDKGKEVLVLWGIHHPSTSADQQSLYQNADAYVFVGTSRYSKKFKPEIAIRPKVRDQEGRMNYYWTLVEPGDKITFEATGNLVVPRYAFAMERNAGSGIIISDTPVHDCNTTCQTPKGAINTSLPFQNIHPITIGKCPKYVKSTKLRLATGLRNVPSIQSRGLFGAIAGFIEGGWTGMVDGWYGYHHQNEQGSGYAADLKSTQNAIDEITNKVNSVIEKMNTQFTAVGKEFNHLEKRIENLNKKVDDGFLDIWTYNAELLVLLENERTLDYHDSNVKNLYEKVRSQLKNNAKEIGNGCFEFYHKCDNTCMESVKNGTYDYPKYSEEAKLNREEIDGVKLESTRIYQILAIYSTVASSLVLVVSLGAISFWMCSNGSLQCRICI

SEQ ID NO: 3512 - protein, 566 aa, synthetic construct
  REGION 1..566: note = hemagglutinin__InfluenzaA__ACY46383
MKAILVVLLYTFATANADTLCIGYHANNSTDTVDTVLEKNVTVTHSVNLLEDKHNGKLCKLRGVAPLHLGKCNIAGWILGNPECESLSTASSWSYIVETSSSDNGTCYPGDFIDYEELREQLSSVSSFERFEIFPKTSSWPNHDSNKGVTAACPHAGAKSFYKNLIWLVKKGNSYPKLSKSYINDKGKEVLVLWGIHHPSTSADQQSLYQNADAYVFVGSSRYSKKFKPEIAIRPKVRDQEGRMNYYWTLVEPGDKITFEATGNLVVPRYAFAMERNAGSGIIISDTPVHDCNTTCQTPKGAINTSLPFHNIHPITIGKCPKYVKSTKLRLATGLRNVPSIQSRGLFGAIAGFIEGGWTGMVDGWYGYHHQNEQGSGYAADLKSTQNAIDEITNKVNSVIEKMNTQFTAVGKEFNHLEKRIENLNKKVDDGFLDIWTYNAELLVLLENERTLDYHDSNVKNLYEKVRSQLKNNAKEIGNGCFEFYHKCDNTCMESVKNGTYDYPKYSEEAKLNREEIDGVKLESTRIYQILAIYSTVASSLVLVVSLGAISFWMCSNGSLQCRICI

SEQ ID NO: 3513 - protein, 566 aa, synthetic construct; identical to SEQ ID NO: 2669
  REGION 1..566: note = hemagglutinin__InfluenzaA__ACY46393

SEQ ID NO: 3514 - protein, 566 aa, synthetic construct; identical to SEQ ID NO: 2669
  REGION 1..566: note = hemagglutinin__InfluenzaA__ACY46403

SEQ ID NO: 3515 - protein, 566 aa, synthetic construct; identical to SEQ ID NO: 2669
  REGION 1..566: note = hemagglutinin__InfluenzaA__ACY46413

SEQ ID NO: 3516 - protein, 566 aa, synthetic construct; identical to SEQ ID NO: 2669
  REGION 1..566: note = hemagglutinin__InfluenzaA__ACY46433

SEQ ID NO: 3517 - protein, 566 aa, synthetic construct; identical to SEQ ID NO: 2669
  REGION 1..566: note = hemagglutinin__InfluenzaA__ACY46443

SEQ ID NO: 3518 - protein, 566 aa, synthetic construct; identical to SEQ ID NO: 2669
  REGION 1..566: note = hemagglutinin__InfluenzaA__ACY46453

SEQ ID NO: 3519 - protein, 566 aa, synthetic construct
  REGION 1..566: note = hemagglutinin__InfluenzaA__ACY46463
MKAILVVMLYTFATANADTLCIGYHANNSTDTVDTVLEKNVTVTHSVNLLEDKHNGKLCKLRGVAPLHLGKCNIAGWILGNPECESLSTASSWSYIVETSSSDNGTCYPGDFIDYEELREQLSSVSSFERFEIFPKTSSWPNHDSNKGVTAACPHAGAKSFYKNLIWLVKKGNSYPKLSKSYINDKGKEVLVLWGIHHPSTSADQQSLYQNADAYVFVGTSRYSKKFKPEIAIRPKVRDQEGRMNYYWTLVEPGDKITFEATGNLVVPRYAFAMVRNAGSGIIISDTPVHDCNTTCQTPKGAINTSLPFQNIHPITIGKCPKYVKSTKLRLATGLRNVPSIQSRGLFGAIAGFIEGGWTGMVDGWYGYHHQNEQGSGYAADLKSTQNAIDEITNKVNSVIEKMNTQFTAVGKEFNHLEKRIENLNKKVDDGFLDIWTYNAELLVLLENERTLDYHDSNVKNLYEKVRSQLKNNAKEIGNGCFEFYHKCDNTCMESVKNGTYDYPKYSEEAKLNREEIDGVKLESTRIYQILAIYSTVASSLVLVVSLGAISFWMCSNGSLQCRICI

SEQ ID NO: 3520 - protein, 566 aa, synthetic construct; identical to SEQ ID NO: 2669
  REGION 1..566: note = hemagglutinin__InfluenzaA__ACY46473

SEQ ID NO: 3521 - protein, 566 aa, synthetic construct; identical to SEQ ID NO: 2656
  REGION 1..566: note = hemagglutinin__InfluenzaA__ACY46493

SEQ ID NO: 3522 - protein, 566 aa, synthetic construct
  REGION 1..566: note = hemagglutinin__InfluenzaA__ACY46513
MKAILVVLLYTFATANADTLCIGYHANNSTDTVDTVLEKNVTVTHSVNLLEDKHNGKLCKLRGVAPLHLGKCNIAGWILGNPECESLSTASSWSYIVETSSSDNGTCYPGDFIDYEELREQLSSVSSFERFEIFPKTSSWPNHDSNKGVTAACPHAGAKSFYKNLIWLVKKGNSYPKLSKSYINDKGKEVLVLWGIHHPSTSADQQSLYQNADAYVFVGSSKYSKKFKPEIAIRPKVRDQEGRMNYYWTLVEPGDKITFEATGNLVVPRYAFAMERNAGSGIIISDTPVHDCNTTCQTPKGAINTSLPFQNIHPITIGKCPKYVKSTKLRLATGLRNVPSIQSRGLFGAIAGFIEGGWTGMVDGWYGYHHQNEQGSGYAADLKSTQNAIDEITNKVNSVIEKMNTQFTAVGKEFNHLEKRIENLNKKVDDGFLDIWTYNAELLVLLDNERTLDYHDSNVKNLYEKVRSQLKNNAKEIGNGCFEFYHKCDNTCMESVKNGTYDYPKYSEEAKLNREEIDGVKLESTRIYQILAIYSTVASSLVLVVSLGAISFWMCSNGSLQCRICI

SEQ ID NO: 3523 - protein, 566 aa, synthetic construct; identical to SEQ ID NO: 2669
  REGION 1..566: note = hemagglutinin__InfluenzaA__ACY46523

SEQ ID NO: 3524 - protein, 566 aa, synthetic construct; identical to SEQ ID NO: 2669
  REGION 1..566: note = hemagglutinin__InfluenzaA__ACY46533

SEQ ID NO: 3525 - protein, 566 aa, synthetic construct; identical to SEQ ID NO: 2669
  REGION 1..566: note = hemagglutinin__InfluenzaA__ACY46562

SEQ ID NO: 3526 - protein, 566 aa, synthetic construct; identical to SEQ ID NO: 2669
  REGION 1..566: note = hemagglutinin__InfluenzaA__ACY46572

SEQ ID NO: 3527 - protein, 566 aa, synthetic construct; identical to SEQ ID NO: 2669
  REGION 1..566: note = hemagglutinin__InfluenzaA__ACY46582

SEQ ID NO: 3528 - protein, 566 aa, synthetic construct; identical to SEQ ID NO: 2669
  REGION 1..566: note = hemagglutinin__InfluenzaA__ACY46592

SEQ ID NO: 3529 - protein, 566 aa, synthetic construct; identical to SEQ ID NO: 2669
  REGION 1..566: note = hemagglutinin__InfluenzaA__ACY46622

SEQ ID NO: 3530 - protein, 566 aa, synthetic construct
  REGION 1..566: note = hemagglutinin__InfluenzaA__ACY46672
MKAILVVLLYTFATANADTLCIGYHANNSTDTVDTVLEKNVTVTHSVNLLEDKHNGKLCKLRGVAPLHLGKCNIAGWILGNPECESLSTASSWSYIVETSSSDNGTCYPGDFIDYEELREQLSSVSSFERFEIFPKTSSWPNHDSNKGVTAACPHAGAKSFYKNLIWLVKKGNSYPKLSKSYINDKGKEVLVLWGIHHPSTSADQQSLYQNADAYVFVGTSRYSKKFKPEIAIRPKVRDQEGRMNYYWTLVEPGDKITFEATGNLVVPRYAFAMVRNAGSGIIISDTPVHDCNTTCQTPKGAINTSLPFQNIHPITIGKCPKYVKSTKLRLATGLRNVPSIQSRGLFGAIAGFIEGGWTGMVDGWYGYHHQNEQGSGYAADLKSTQNAIDEITNKVNSVIEKMNTQFTAVGKEFNHLEKRIENLNKKVDDGFLDIWTYNAELLVLLENERTLDYHDSNVKNLYEKVRSQLKNNAKEIGNGCFEFYHKCDNTCMESVKNGTYDYPKYSEEAKLNREEIDGVKLESTRIYQILAIYSTVASSLVLVVSLGAISFWMCSNGSLQCRICI

SEQ ID NO: 3531 - protein, 566 aa, synthetic construct; identical to SEQ ID NO: 2669
  REGION 1..566: note = hemagglutinin__InfluenzaA__ACY46682

SEQ ID NO: 3532 - protein, 566 aa, synthetic construct; identical to SEQ ID NO: 2669
  REGION 1..566: note = hemagglutinin__InfluenzaA__ACY46692

SEQ ID NO: 3533 - protein, 566 aa, synthetic construct; identical to SEQ ID NO: 2669
  REGION 1..566: note = hemagglutinin__InfluenzaA__ACY46712

SEQ ID NO: 3534 - protein, 566 aa, synthetic construct
  REGION 1..566: note = hemagglutinin__InfluenzaA__ACY46722
MKAILVVLLYTFATANADTLCIGYHANNSTDTVDTVLEKNVTVTHSVNLLEDKHNGKLCKLRGVAPLHLGKCNIAGWILGNPECESLSTASSWSYIVETSSSDNGTCYPGDFIDYEELREQLSSVSSFERFEIFPKTSSWPNHDSNKGVTAACPHAGAKSFYKNLIWLVKKGNSYPKLSKSYINDKGKEVLVLWGIHHPSTSAGQQSLYQNADAYVFVGTSRYSKKFKPEIAIRPKVRDQEGRMNYYWTLVEPGDKITFEATGNLVVPRYAFAMERNAGSGIIISDTPVHDCNTTCQTPKGAINTSLPFQNIHPITIGKCPKYVKSTKLRLATGLRNVPSIQSRGLFGAIAGFIEGGWTGMVDGWYGYHHQNEQGSGYAADLKSTQNAIDEITNKVNSVIEKMNTQFTAVGKEFNHLEKRIENLNKKVDDGFLDIWTYNAELLVLLENERTLDYHDSNVKNLYEKVRSQLKNNAKEIGNGCFEFYHKCDNTCMESVKNGTYDYPKYSEEAKLNREEIDGVKLESTRIYQILAIYSTVASSLVLVVSLGAISFWMCSNGSLQCRICI

SEQ ID NO: 3535 - protein, 566 aa, synthetic construct
  REGION 1..566: note = hemagglutinin__InfluenzaA__ACY46742
MKAILVVLLYTFATANADTLCIGYHANNSTDTVDTVLEKNVTVTHSVNLLEDKHNGKLCKLRGVAPLHLGKCNIAGWILGNPECESLSTASSWSYIVETSSSDNGTCYPGNFIDYEELREQLSSVSSFERFEIFPKTSSWPNHDSNKGVTAACPHAGAKSFYKNLIWLVKKGNSYPKLSKSYINDKGKEVLVLWGIHHPSTSADQQSLYQNADAYVFVGTSRYSKKFKPEIAIRPKVRDQEGRMNYYWTLVEPGDKITFEATGNLVVPRYAFAMERNAGSGIIISDTPVHDCNTTCQTPKGAINTSLPFQNIHPITIGKCPKYVKSTKLRLATGLRNVPSIQSRGLFGAIAGFIEGGWTGMVDGWYGYHHQNEQGSGYAADLKSTQNAIDEITNKVNSVIEKMNTQFTAVGKEFNHLEKRIENLNKKVDDGFLDIWTYNAELLVLLENERTLDYHDSNVKNLYEKVRSQLKNNAKEIGNGCFEFYHKCDNTCMESVKNGTYDYPKYSEEAKLNREEIDGVKLESTRIYQILAIYSTVASSLVLVVSLGAISFWMCSNGSLQCRICI

SEQ ID NO: 3536 - protein, 566 aa, synthetic construct; identical to SEQ ID NO: 2669
  REGION 1..566: note = hemagglutinin__InfluenzaA__ACY46762

SEQ ID NO: 3537 - protein, 566 aa, synthetic construct; identical to SEQ ID NO: 2669
  REGION 1..566: note = hemagglutinin__InfluenzaA__ACY46772

SEQ ID NO: 3538 - protein, 566 aa, synthetic construct; identical to SEQ ID NO: 2669
  REGION 1..566: note = hemagglutinin__InfluenzaA__ACY46903

SEQ ID NO: 3539 - protein, 566 aa, synthetic construct; identical to SEQ ID NO: 2695
  REGION 1..566: note = hemagglutinin__InfluenzaA__ACY77534

SEQ ID NO: 3540 - protein, 565 aa, synthetic construct
  REGION 1..565: note = hemagglutinin__InfluenzaA__ACY77544
MKAILVVMLYTFATANADTLCIGYHANNSTDTVDTVLEKNVTVTHSVNLLEDKHNGKLCKLRGVAPLHLGKCNIAGWILGNPECESLSTASSWSYIVETSSSDNGTCYPGDFIDYEELREQLSSVSSFERFEIFPKTSSWPNHDSNKGVTAACPHAGAKSFYKNLIWLVKKGNSYPKLSKSYINDKGKEVLVLWGIHHPSTSADQQSLYQNADAYVFVGSSRYSKKFKPEIAIRPKVRDQEGRMNYYWTLVEPGDKITFEATGNLVVPRYAFAMERNAGSGIIISDTTVHDCNTTCQTPKGAINTSLPFQNIHPITIGKCPKYVKSTKLRLATGLRNVPSIQSRGLFGAIAGFIEGGWTGMVDGWYGYHHQNEQGSGYAADLKSTQNAIDEITNKVNSVIEKMNTQFTAVGKEFNHLEKRIENLNKKVDDGFLDIWTYNAELLVLLENERTLDYHDSNVKNLYEKVRSQLKNNAKEIGNGCFEFYHKCDNTCMESVKNGTYDYPKYSEEAKLNREEIDGVKLESTRIYQILAIYSTVASSLVLVVSLGAISFWMCSWSLQCRICI

SEQ ID NO: 3541 - protein, 565 aa, synthetic construct
  REGION 1..565: note = hemagglutinin__InfluenzaA__ACY77554
MKAILVVLLYTFATANADTLCIGYHANNSTDTVDTVLEKNVTVTHSVNLLEDKHNGKLCKLRGVAPLHLGKCNIAGWILGNPECESLSTASSWSYIVETSSSDNGTCYPGDFIDYEELREQLSSVSSFERFEIFPKTSSWPNHDSNKGVTAACPHAGAKSFYKNLIWLVKKGNSYPKLSKSYINDKGKEVLVLWGIHHPSTSADQQSLYQNADAYVFVGTSRYSKKFKPEIAIRPKVRDQEGRMNYYWTLVEPGDKITFEATGNLVVPRYAFAMERNAGSGIIISDTPVHNCNTTCQTPKGAINTSLPFQNIHPITIGKCPKYVKSTKLRLATGLRNVPSIQSRGLFGAIAGFIEGGWTGMVDGWYGYHHQNEQGSGYAADLKSTQNAIDEITNKVNSVIEKMNTQFTAVGKEFNHLEKRIENLNKKVDDGFLDIWTYNAELLVLLENERTLDYHDSNVKNLYEKVRSQLKNNAKEIGNGCFEFYHKCDNTCMESVKNGTYDYPKYSEEAKLNREEIDGVKLESTRIYQILAIYSTVASSLVLVVSLGAISFWMCSGHLQCRICI

SEQ ID NO: 3542 - protein, 564 aa, synthetic construct
  REGION 1..564: note = hemagglutinin__InfluenzaA__ACY77573
MKAILVVLLYTFATANADTLCIGYHANNSTDTVDTVLEKNVTVTHSVNLLEDKHNGKLCKLRGVAPLHLGKCNIAGWILGNPECESLSTASSWSYIVETSSSDNGTCYPGDFIDYEELREQLSSVSSFERFEIFPKTSSWPNHDSNKGVTAACPHAGAKSFYKNLIWLVKKGNSYPKLSKSYINDKGKEVLVLWGIHHPSTSADQQSLYQNADAYVFVGSSRYSKKFKPEIAIRPKVRDQEGRMNYYWTLVEPGDKITFEATGNLVVPRYAFAMERNAGSGIIISDTPVHDCNTTCQTPKGAINTSLPFQNIHPITIGKCPKYVKSTKLRLATGLRNVPSIQSRGLFGAIAGFIEGGWTGMVDGWYGYHHQNEQGSGYAADLKSTQSAIDEITNKVNSVIEKMNTQLTGQCKEFNHLEKRIENLNKKVDDGFLDIWTYNAELLVLLENERTLDYHDSNVKNLYEKVRSQLKNNANEIGNGCFEFYHKCDNTCMESVKNGTYDYPKYSEEAKLNREEIDGVKLESTRIYQILAIYSTVASSLVLVVSLGAISFWMCSGHSCRICI

SEQ ID NO: 3543 - protein, 566 aa, synthetic construct
  REGION 1..566: note = hemagglutinin__InfluenzaA__ACY77593
MKAILVVMLYTFATANADTLCIGYHANNSTDTVDTVLEKNVTVTHSVNLLEDKHNGKLCKLRGVAPLHLGKCNIAGWILGNPECESLSTASSWSYIVETSSSDNGTCYPGDFIDYEELREQLSSVSSFERFEIFPKTSSWPNHDSNKGVTAACPHAGAKSFYKNLIWLVKKGNSYPKLSKSYINDKGKEVLVLWGIHHPSTSADQQSLYQNADAYVFVGSSRYSKKFKPEIAIRPKVRDQEGRMNYYWTLVEPGDKITFEATGNLVVPRYAFAMERNAGSGIIISDTTVHDCNTTCQTPKGAINTSLPFQNIHPITIGKCPKYVKSTKLRLATGLRNVPSIQSRGLFGAIAGFIEGGWTGMVDGWYGYHHQNEQGSGYAADLKSTQNAIDEITNKVNSVIEKMNTQFTAVGKEFNHLEKRIENLNKKVDDGFLDIWTYNAELLVLLENERTLDYHDSNVKNLYEKVRSQLKNNAKEIGNGCFEFYHKCDNTCMESVKNGTYDYPKYSEEAKLNREEIDGVKLESTRIYQILAIYSTVASSLVLVVSLGAISFWMCSNGSLQCRICI

SEQ ID NO: 3544 - protein, 565 aa, synthetic construct
  REGION 1..565: note = hemagglutinin__InfluenzaA__ACY77603
MKAILVVMLYTFATANADTLCIGYHANNSTDTVDTVLEKNVTVTHSVNLLEDKHNGKLCKLRGVAPLHLGKCNIAGWILGNPECESLSTASSWSYIVETSSSDNGTCYPGDFIDYEELREQLSSVSSFERFEIFPKTSSWPNHDSNKGVTAACPHAGAKSFYKNLIWLVKKGNSYPKLSKSYINDKGKEVLVLWGIHHPSTSADQQSLYQNADAYVFVGSSRYSKKFKPEIAIRPKVRDQEGRMNYYWTLVEPGDKITFEATGNLVVPRYAFAMERNAGSGIIISDTPVHDCNTTCQTPKGAINTSLPFQNIHPITIGKCPKYVKSTKLRLATGLRNVPSIQSRGLFGAIAGFIEGGWTGMVDGWYGYHHQNEQGSGYAADLKSTQNAIDEITNKVNSVIEKMNTQFTAVGKEFNHLEKRIENLNKKVDDGFLDIWTYNAELLVLLENERTLDYHDSNVKNLYEKVRSQLKNNAKEIGNGCFEFYHKCDNTCMESVKNGTYDYPKYSEEAKLNREEIDGVKLESTRIYQILAIYSTVASSLVLVVSLGAISFWMCSWSLQCRICI

SEQ ID NO: 3545 - protein, 564 aa, synthetic construct
  REGION 1..564: note = hemagglutinin__InfluenzaA__ACY77613
MKAILVVLLYTFATANADTLCIGYHANNSTDTVDTVLEKNVTVTHSVNLLEDKHNGKLCKLRGVAPLHLGKCNIAGWILGNPECESLSTASSWSYIVETSSSDNGTCYPGDFIDYEELREQLSSVSSFERFEIFPKTSSWPNHDSNKGVTAACPHAGAKSFYKNLIWLVKKGNSYPKLSKSYINDKGKEVLVLWGIHHPSTSADQQSLYQNADAYVFVGTSRYSKKFKPEIAIRPKVRDQEGRMNYYWTLVEPGDKITFEATGNLVVPRYAFAMERNAGSGIIISDTPVHDCNTTCQTPKGAINTSLPFQNIHPITIGKCPKYVKSTKLRLATGLRNVPSIQSRGLFGAIAGFIEGGWTGMVDGWYGYHHQNEQGSGYAADLKSTQNAIDEITNKVNSVIEKMNTQFTGQCKEFNHLEKRIENLNKKVDDGFLDIWTYNAELLVLLENERTLDYHDSNVKNLYEKVRSQLKNNAKEIGNGCFEFYHKCDNTCMESVKNGTYDYPKYSEEAKLNREEIDGVKLESTRIYQILAIYSTVASSLVLVVSLGAISFWMCSGHSCRICI

SEQ ID NO: 3546 - protein, 566 aa, synthetic construct; identical to SEQ ID NO: 2669
  REGION 1..566: note = hemagglutinin__InfluenzaA__ACY77623

SEQ ID NO: 3547 - protein, 568 aa, synthetic construct
  REGION 1..568: note = hemagglutinin__InfluenzaA__ACY77653
MKAILVVLLYTFATANADTLCIGYHANNSTDTVDTVLEKNVTVTHSVNILEDKHNGKLCKLRGVAPLHLGKCNIAGWILGNPECESLSTASSWSYIVETSSSDNGTCYPGDFIDYEELREQLSSVSSFERFEIFPKTSSWPNHDSNKGVTAACPHAGAKSFYKNLIWLVKKGNSYPKLSKSYINDKGKEVLVLWGIHHPSTSADQQSLYQNADAYVFVGSSRYSKKFKPEIAIRPKVRDQEGRMNYYWTLVEPGDKITFEATGNLVVPRYAFAMERNAGSGIIISDTPVHDCNTTCQTPKGAINTSLPFQNIHPITIGKCPKYVKSTKLRLATGLRNVPSIQSRGLFGAIAGFIEGGWTGMVDGWYGYHHQNEQGSGYAADLKSTQNAIDEITNKVNSVIEKMNTQFTAVGKEFNHLEKRIENLNKKVDDGFLDIWTYNAELLVLLENERTLDYHDSNVKNLYEKVRSQLKNNAKEVGNGCFEFYHKCDNTCMESVKNGTYDYPKYSEEAKLNREEIDGVKLESTRIYQILAIYSTVASSLVLVVSLGAISFWMCSGHSGSLQCRICI

SEQ ID NO: 3548 - protein, 565 aa, synthetic construct
  REGION 1..565: note = hemagglutinin__InfluenzaA__ACY77663
MKAILVVLLYTFATANADTLCIGYHANNSTDTVDTVLEKNVTVTHSVNLLEDKHNGKLCKLRGVAPLHLGKCNIAGWILGNPECESLSTASSWSYIVETSSSDNGTCYPGDFIDYEELREQLSSVSSFERFEIFPKTSSWPNHDSNKGVTAACPHAGAKSFYKNLIWLVKKGNSYPKLSKSYINDKGKEVLVLWGIHHPSTSADQQSLYQNADAYVFVGTSRYSKKFKPEIAIRPKVRDQEGRMNYYWTLVEPGDKITFEATGNLVVPRYAFAMERNAGSGIIISDTPVHDCNTTCQTPKGAINTSLPFQNIHPITIGKCPKYVKSTKLRLATGLRNVPSIQSRGLFGAIAGFIEGGWTGMVDGWYGYHHQNEQGSGYAADLKSTQNAIDEITNKVNSVIEKMNTQFTAVGKEFNHLEKRIENLNKKVDDGFLDIWTYNAELLVLLENERTLDYHDSNVKNLYEKVRSQLKNNAKEIGNGCFEFYHKCDNTCMESVKNGTYDYPKYSEEAKLNREEIDGVKLESTRIYQILAIYSTVASSLVLVVSLGAISFWMCSWSLLCRICI

SEQ ID NO: 3549 - protein, 565 aa, synthetic construct
  REGION 1..565: note = hemagglutinin__InfluenzaA__ACY77683
MKAILVVLLYTFATANADTLCIGYHANNSTDTVDTVLEKNVTVTHSVNILEDKHNGKLCKLRGVAPLHLGKCNIAGWILGNPECESLSTASSWSYIVETSSSDNGTCYPGDFIDYEELREQLSSVSSFERFEIFPKTSSWPNHDSNKGVTAACPHAGAKSFYKNLIWLVKKGNSYPKLSKSYINDKGKEVLVLWGIHHPSTSADQQSLYQNADAYVFVGSSRYSKKFKPEIAIRPKVRDQEGRMNYYWTLVEPGDKITFEATGNLVVPRYAFAMERNAGSGIIISDTPVHDCNTTCQTPKGAINTSLPFQNIHPITIGKCPKYVKSTKLRLATGLRNVPSIQSRGLFGAIAGFIEGGWTGMVDGWYGYHHQNEQGSGYAADLKSTQNAIDEITNKVNSVIEKMNTQFTAVGKEFNHLEKRIENLNKKVDDGFLDIWTYNAELLVLLENERTLDYHDSNVKNLYEKVRSQLKNNAKEVGNGCFEFYHKCDNTCMESVKNGTYDYPKYSEEAKLNREEIDGVKLESTRIYQILAIYSTVASSLVLVVSLGAISFWMCSWSLQCRICI

SEQ ID NO: 3550 - protein, 565 aa, synthetic construct
  REGION 1..565: note = hemagglutinin__InfluenzaA__ACY77693
MKAILVVLLYTFATANADTLCIGYHANNSTDTVDTVLEKNVTVTHSVNILEDKHNGKLCKLRGVAPLHLGKCNIAGWILGNPECESLSTASSWSYIVETSSSDNGTCYPGDFIDYEELREQLSSVSSFERFEIFPKTSSWPNHDSNKGVTAACPHAGAKSFYKNLIWLVKKGNSYPKLSKSYINDKGKEVLVLWGIHHPSTSADQQSLYQNADAYVFVGSSRYSKKFKPEITIRPKVRDQEGRMNYYWTLVEPGDKITFEATGNLVVPRYAFAMERNAGSGIIISDTPVHDCNTTCQTPKGAINTSLPFQNIHPITIGKCPKYVKSTKLRLATGLRNVPSIQSRGLFGAIAGFIEGGWTGMVDGWYGYHHQNEQGSGYAADLKSTQNAIDEITNKVNSVIEKMNTQFTGQCKEFNHLEKRIENLNKKVDDGFLDIWTYNAELLVLLENERTLDYHDSNVKNLYEKVRSQLKNNAKEVGNGCFEFYHKCDNTCMESVKNGTYDYPKYSEEAKLNREEIDGVKLESTRIYQILAIYSTVASSLVLVVSLGAISFWMCSWSLQCRICI

SEQ ID NO: 3551 - protein, 565 aa, synthetic construct
  REGION 1..565: note = hemagglutinin__InfluenzaA__ACY77703
MKAILVVLLYTFATANADTLCIGYHANNSTDTVDTVLEKNVTVTHSVNILEDKHNGKLCKLRGVAPLHLGKCNIAGWILGNPECESLSTASSWSYIVETSSSDNGTCYPGDFIDYEELREQLSSVSSFERFEIFPKTSSWPNHDSNKGVTAACPHAGAKSFYKNLIWLVKKGNSYPKLSKSYINDKGKEVLVLWGIHHPSTSADQQSLYQNADAYVFVGSSRYSKKFKPEIAIRPKVRDQEGRMNYYWTLVEPGDKITFEATGNLVVPRYAFAMERNAGSGIIISDTPVHDCNTTCQTPKGAINTSLPFQNIHPITIGKCPKYVKSTKLRLATGLRNVPSIQSRGLFGAIAGFIEGGWTGMVDGWYGYHHQNEQGSGYAADLKSTQNAIDEITNKVNSVIEKMNTQFTGQCKEFNHLEKRIENLNKKVDDGFLDIWTYNAELLVLLENERTLDYHDSNVKNLYEKVRSQLKNNAKEVGNGCFEFYHKCDNTCMESVKNGTYDYPKYSEEAKLNREEIDGVKLESTRIYQILAIYSTVASSLVLVVSLGAISFWMCSWSLQCRICI

SEQ ID NO: 3552 - protein, 565 aa, synthetic construct
  REGION 1..565: note = hemagglutinin__InfluenzaA__ACY77713
MKAILVVLLYTFATANADTLCIGYHANNSTDTVDTVLEKNVTVTHSVNILEDKHNGKLCKLRGVAPLHLGKCNIAGWILGNPECESLSTASSWSYIVETSSSDNGTCYPGDFIDYEELREQLSSVSSFERFEIFPKTSSWPNHDSNKGVTAACPHAGAKSFYKNLIWLVKKGNSYPKLSKSYINDKGKEVLVLWGIHHPSTSADQQSLYQNADAYVFVGSSRYSKKFKPEIAIRPKVRDQEGRMNYYWTLVEPGDKITFEATGNLVVPRYAFAMERNAGSGIIISDTPVHDCNTTCQTPKGAINTSLPFQNIHPITIGKCPKYVKSTKLRLATGLRNVPSIQSRGLFGAIAGFIEGGWTGMVDGWYGYHHQNEQGSGYAADLKSTQNAIDEITNKVNSVIEKMNTQFTGQCKEFNHLEKRIENLNKKVDDGFLDIWTYNAELLVLLENERTLDYHDSNVKNLYEKVRSQLKNNAKEVGNGCFEFYHKCDNTCMESVKNGTYDYPKYSEEAKLNREEIDGVKLESTRIYQILAIYSTVASSLVLVVSLGAISFWMCSGHLQCRICI

SEQ ID NO: 3553 - protein, 566 aa, synthetic construct; identical to SEQ ID NO: 2982
  REGION 1..566: note = hemagglutinin__InfluenzaA__ACY77723

SEQ ID NO: 3554 - protein, 564 aa, synthetic construct
  REGION 1..564: note = hemagglutinin__InfluenzaA__ACY77733
MKAILVVLLYTFATANADTLCIGYHANNSTDTVDTVLEKNVTVTHSVNILEDKHNGKLCKLRGVAPLHLGKCNIAGWILGNPECESLSTASSWSYIVETSSSDNGTCYPGDFIDYEELREQLSSVSSFERFEIFPKTSSWPNHDSNKGVTAACPHAGAKSFYKNLIWLVKTGNSYPKLSKSYINDKGKEVLVLWGIHHPSTSADQQSLYQNADAYVFVGSSRYSKKFKPEIAIRPKVRDQEGRMNYYWTLVEPGDKITFEATGNLVVPRYAFAMERNAGSGIIISDTPVHDCNTTCQTPKGAINTSLPFQNIHPITIGKCPKYVKSTKLRLATGLRNVPSIQSRGLFGAIAGFIEGGWTGMVDGWYGYHHQNEQGSGYAADLKSTQNAIDEITNKVNSVIEKMNTQFTAVGKEFNHLEKRIENLNKKVDDGFLDIWTYNAELLVLLENERTLDYHDSNVKNLYEKVRSQLKNNAKEIGNGCFEFYHKCDNTCMESVKNGTYDYPKYSEEAKLNREEIDGVKLESTRIYQILAIYSTVASSLVLVVSLGAISFWMCSGLQCRICI

SEQ ID NO: 3555 - protein, 565 aa, synthetic construct
  REGION 1..565: note = hemagglutinin__InfluenzaA__ACY77743
MKAILVVLLYTFATANADTLCIGYHANNSTDTVDTVLEKNVTVTHSVNLLEDKHNGKLCKLRGVAPLHLGKCNIAGWILGNPECESLSTASSWSYIVETSSSDNGTCYPGDFIDYEELREQLSSVSSFERFEIFPKTSSWPNHDSNKGVTAACPHAGAKSFYKNLIWLVKKGNSYPKLSKSYINDKGKEVLVLWGIHHPSTSADQQSLYQNADAYVFVGSSRYSKKFKPEIAIRPKVRDQEGRMNYYWTLVEPGDKITFEATGNLVVPRYAFAMERNAGSGIIISDTPVHDCNTTCQTPKGAINTSLPFQNIHPITIGKCPKYVKSTKLRLATGLRNVPSIQSRGLFGAIAGFIEGGWTGMVDGWYGYHHQNEQGSGYAADLKSTQNAIDEITNKVNSVIEKMNTQFTAVGKEFNHLEKRIENLNKKVDDGFLDIWTYNAELLVLLENERTLDYHDSNVKNLYEKVRSQLKNNAKEVGNGCFEFYHKCDNTCMESVKNGTYDYPKYSEEAKLNREEIDGVKLESTRIYQILAIYSTVASSLVLVVSLGAISFWMCSWSLQCRICI

SEQ ID NO: 3556 - protein, 566 aa, synthetic construct; identical to SEQ ID NO: 2669
  REGION 1..566: note = hemagglutinin__InfluenzaA__ACY77753

SEQ ID NO: 3557 - protein, 564 aa, synthetic construct
  REGION 1..564: note = hemagglutinin__InfluenzaA__ACY77783
MKAILVVLLYTFATANADTLCIGYHANNSTDTVDTVLEKNVTVTHSVNLLGDKHNGKLCKLRGVAPLHLGKCNIAGWILGNPECESLSTASSWSYIVETSSSDNGTCYPGDFIDYEELREQLSSVSSFERFEIFPKTSSWPNHDSDKGVTAACPHAGAKSFYKNLIWLVKKGNSYPKLSKSYINDKGKEVLVLWGIHHPSTSADQQSLYQNADTYVFVGTSRYSKKFKPEIAIRPKVRDQEGRMNYYWTLVEPGDKITFEATGNLVVPRYAFAMERNAGSGIIISDTPVHDCNTTCQTPKGAINTSLPFQNIHPITIGKCPKYVKSTKLRLATGLRNVPSIQSRGLFGAIAGFIEGGWTGMVDGWYGYHHQNEQGSGYAADLKSTQNAIDEITNKVNSVIEKMNTQFTAVGKEFNHLEKRIENLNKKVDDGFLDIWTYNAELLVLLENERTLDYHDSNVKSLYEKVRSQLKNNAKEIGNGCFEFYHKCDNTCMESVKNGTYDYPKYSEEAKLNREEIDGVKLESTRIYQILAIYSTVASSLVLVVSLGAISFWMCSGHSCRICI

SEQ ID NO: 3558 - protein, 565 aa, synthetic construct
  REGION 1..565: note = hemagglutinin__InfluenzaA__ACY77813
MKAILVVLLYTFATANADTLCIGYHANNSTDTVDTVLEKNVTVTHSVNLLEDKHNGKLCKLRGVAPLHLGKCNIAGWILGNPECESLSTASSWSYIVETSSSDNGTCYPGDFIDYEELREQLSSVSSFERFEIFPKTSSWPNHDSNKGVTAACPHAGAKSFYKNLIWLVKKGNSYPKLSKSYINDKGKEVLVLWGIHHPSTSADQQSLYQNADAYVFVGTSRYSKKFKPEIAIRPKVRDQEGRMNYYWTLVEPGDKITFEATGNLVVPRYAFAMERNAGSGIIISDTPVHDCNTTCQTPKGAINTSLPFQNIHPITIGKCPKYVKSTKLRLATGLRNVPSIQSRGLFGAIAGFIEGGWTGMVDGWYGYHHQNEQGSGYAADLKSTQNAIDEITNKVNSVIEKMNTQFTGQCKEFNHLEKRIENLNKKVDDGFLDIWTYNAELLVLLENERTLDYHDSNVKNLYEKVRSQLKNNAKEIGNGCFEFYHKCDNTCMESVKNGTYDYPKYSEEAKLNREEIDGVKLESTRIYQILAIYSTVASSLVLVVSLGAISFWMCSGHLQCRICI

SEQ ID NO: 3559 - protein, 565 aa, synthetic construct
  REGION 1..565: note = hemagglutinin__InfluenzaA__ACY77823
MKAILVVLLYTFATANADTLCIGYHANNSTDTVDTVLEKNVTVTHSVNLLEDKHNGKLCKLRGVAPLHLGKCNIAGWILGNPECESLSTASSWSYIVETSSSDNGTCYPGDFIDYEELREQLSSVSSFERFEIFPKTSSWPNHDSNKGVTAACPHAGAKSFYKNLIWLVKKGNSYPKLSKSYINDKGKEVLVLWGIHHPSTSADQQSLYQNADAYVFVGTSRYSKKFKPEIAIRPKVRDQEGRMNYYWTLVEPGDKITFEATGNLVVPRYAFAMERNAGSGIIISDTPVHDCNTTCQTPKGAINTSLPFQNIHPITIGKCPKYVKSTKLRLATGLRNVPSIQSRGLFGAIAGFIEGGWTGMVDGWYGYHHQNEQGSGYAADLKSTQNAIDEITNKVNSVIEKMNTQFTGQCKEFNHLEKRIENLNKKVDDGFLDIWTYNAELLVLLENERTLDYHDSNVKNLYEKVRSQLKNNAKEIGNGCFEFYHKCDNTCMESVKNGTYDYPKYSEEAKLNREEIDGVKLESTRIYQILAIYSTVASSLVLVVSLGAISFWMCSWSLQCRICI

SEQ ID NO: 3560 - protein, 565 aa, synthetic construct
  REGION 1..565: note = hemagglutinin__InfluenzaA__ACY77833
MKAILVVLLYTFATANADTLCIGYHANNSTDTVDTVLEKNVTVTHSVNLLEDKHNGKLCKLRGVAPLHLGKCNIAGWILGNPECESLSTASSWSYIVETSSSDNGTCYPGDFIDYEELREQLSSVSSFERFEIFPKTSSWPNHDSNKGVTAACPHAGAKSFYKNLIWLVKKGNSYPKLSKSYINDKGKEVLVLWGIHHPSTSADQQSLYQNADAYVFVGTSRYSKKFKPEIAIRPKVRDQEGRMNYYWTLVEPGDKITFEATGNLVVPRYAFAMERNAGSGIIISDTPVHDCNTTCQTPKGAINTSLPFQNIHPITIGKCPKYVKSTKLRLATGLRNVPSIQSRGLFGAIAGFIEGGWTGMVDGWYGYHHQNEQGSGYAADLKSTQNAIDEITNKVNSVIEKMNTQFTAVGKEFNHLEKRIENLNKKVDDGFLDIWTYNAELLVLLENERTLDYHDSNVKNLYEKVRSQLKNNAKEIGNGCFEFYHKCDNTCMESVKNGTYDYPKYSEEAKLNREEIDGVKLESTRIYQILAIYSTVASSLVLVVSLGAISFWMCSWSLQCRICI

SEQ ID NO: 3561 - protein, 565 aa, synthetic construct
  REGION 1..565: note = hemagglutinin__InfluenzaA__ACY77843
MKAILVVMLYTFATANADTLCIGYHANNSTDTVDTVLEKNVTVTHSVNLLEDKHNGKLCKLRGVAPLHLGKCNIAGWILGNPECESLSTASSWSYIVETSSSDNGTCYPGDFIDYEELREQLSSVSSFERFEIFPKTSSWPNHDSNKGVTAACPHAGAKSFYKNLIWLVKKGNSYPKLSKSYINDKGKEVLVLWGIHHPSTSADQQSLYQNADAYVFVGSSRYSKKFKPEIAIRPKVRDQEGRMNYYWTLVEPGDKITFEATGNLVVPRYAFAMERNAGSGIIISDTTVHDCNTTCQTPKGAINTSLPFQNIHPITIGKCPKYVKSTKLRLATGLRNVPSIQSRGLFGAIAGFIEGGWTGMVDGWYGYHHQNEQGSGYAADLKSTQNAIDEITNKVNSVIEKMNTQFTAVGKEFNHLEKRIENLNKKVDDGFLDIWTYNAELLVLLENERTLDYHDSNVKNLYEKVRSQLKNNAKEIGNGCFEFYHKCDNTCMESVKNGTYDYPKYSEEAKLNREEIDGVKLESTRIYQILAIYSTVASSLVLVVSLGAISFWMCSGHLQCRICI

SEQ ID NO: 3562 - protein, 566 aa, synthetic construct
  REGION 1..566: note = hemagglutinin__InfluenzaA__ACY77863
MKAILVVLLYTFATANADTLCIGYHANNSTDTVDTVLEKNVTVTHSVNLLEDKHNGKLCKLRGVAPLHLGKCNIAGWILGNPECESLSTASSWSYIVETSSSDNGTCYPGDFIDYEELREQLSSVSSFERFEIFPKTSSWPNHDSNKGVTAACPHAGAKSFYKNLIWLVKKGNSYPKLSKSYINDKGKEVLVLWGIHHPSTSADQQSLYQNADAYVFVGTSRYSKKFKPEIAIRPKVRDQEGRMNYYWTLVEPGDKITFEATGNLVVPRYAFAMERNAGSGIIISDTPVHDCNTTCQTPKGAINTSLPFQNIHPITIGKCPKYVKSTKLRLATGLRNVPSIQSRGLFGAIAGFIEGGWTGMVDGWYGYHHQNEQGSGYAADLKSTQNAIDEITNKVNSVIEKMNTQFTAVGKEFNHLEKRIENLNKKVDDGFLDIWTYNAELLVLLENERTLDYHDSNVKNLYEKVRSQLKNNAKEIGNGCFEFYHKCDNTCMESVKNGTYDYPKYSEEAKLNREEIDGVKLESTRIYQILAIYSTVASSLVLVVSLGAISFWMCSGMSLQCRICI

SEQ ID NO: 3563 - protein, 566 aa, synthetic construct; identical to SEQ ID NO: 2656
  REGION 1..566: note = hemagglutinin__InfluenzaA__ACY77874

SEQ ID NO: 3564 - protein, 566 aa, synthetic construct; identical to SEQ ID NO: 2656
  REGION 1..566: note = hemagglutinin__InfluenzaA__ACY77884

SEQ ID NO: 3565 - protein, 566 aa, synthetic construct
  REGION 1..566: note = hemagglutinin__InfluenzaA__ACY77904
MKAILVVLLYTFATANADTLCIGYHANNSTDTVDTVLEKNVTVTHSVNLLEDKHNGKLCKLRGVAPLHLGKCNIAGWILGNPECESLSTASSWSYIVETSSSDNGTCYPGDFIDYEELREQLSSVSSFERFEIFPKTSSWPNHDSNKGVTAACPHAGAKSFYKNLIWLVKKGNSYPKLSKSYINDKGKEVLVLWGIHHPSTSADQQSLYQNADAYVFVGSSKYSKKFKPEIAIRPKVRDQEGRMNYYWTLVEPGDKITFEATGNLVVPRYAFAMERNAGSGIIISDTPVHDCNTTCQTPKGAINTSLPFQNIHPITIGKCPKHVKSTKLRLATGLRNVPSIQSRGLFGAIAGFIEGGWTGMVDGWYGYHHQNEQGSGYAADLKSTQNAIDEITNKVNSVIEKMNTQFTAVGKEFNHLEKRIENLNKKVDDGFLDIWTYNAELLVLLENERTLDYHDSNVKNLYEKVRSQLKNNAKEIGNGCFEFYHKCDNTCMESVKNGTYDYPKYSEEAKLNREEIDGVKLESTRIYQILAIYSTVASSLVLVVSLGAISFWMCSNGSLQCRICI

SEQ ID NO: 3566 - protein, 566 aa, synthetic construct; identical to SEQ ID NO: 2849
  REGION 1..566: note = hemagglutinin__InfluenzaA__ACY77914

SEQ ID NO: 3567 - protein, 566 aa, synthetic construct
  REGION 1..566: note = hemagglutinin__InfluenzaA__ACY77924
MKAILVVLLYTFATANADTLCIGYHANNSTDTVDTVLEKNVTVTHSVNLLEDKHDGKLCKLRGVAPLHLGKCNIAGWILGNPECESLSTASSWSYIVETSSSDNGTCYPGDFIDYEELREQLSSVSSFERFEIFPKTSSWPNHDSNKGVTAACPHAGAKSFYKNLIWLVKKGNSYPKLSKSYINDKGKEVLVLWGIHHPSTSADQQSLYQNADAYVFVGTSRYSKKFKPEIAIRPKVRDQEGRMNYYWTLVEPGDKITFEATGNLVVPRYAFAMERNAGSGIIISDTPVHDCNTTCQTPKGAINTSLPFQNIHPITIGKCPKYVKSTKLRLATGLRNVPSIQSRGLFGAIAGFIEGGWTGMVDGWYGYHHQNEQGSGYAADLKSTQNAIDEITNKVNSVIEKMNTQFTAVGKEFNHLEKRIENLNKKVDDGFLDIWTYNAELLVLLENERTLDYHDSNVKNLYEKVRSQLKNNAKEIGNGCFEFYHKCDNTCMESVKNGTYDYPKYSEEAKLNREEIDGVKLESTRIYQILAIYSTVASSLVLVVSLGAISFWMCSNGSLQCRICI

SEQ ID NO: 3568 - protein, 566 aa, synthetic construct; identical to SEQ ID NO: 3417
  REGION 1..566: note = hemagglutinin__InfluenzaA__ACY77934

SEQ ID NO: 3569 - protein, 566 aa, synthetic construct
  REGION 1..566: note = hemagglutinin__InfluenzaA__ACY77944
MKAILVVLLYTFATANADTLCIGYHANNSTDTVDTVLEKNVTVTHSVNLLEDKHNGKLCKLRGVAPLHLGKCNIAGWILGNPECESLSTASSWSYIVETSSSDNGTCYPGDFIDYEELREQLSSVSSFERFEIFPKTSSWPNHDSNKGVTAACPHAGAKSFYKNLIWLVKKGNSYPKLSKSYINDKGKEVLVLWGIHHPSTSADQQSLYQNADAYVFVGSSRYSKKFKPEIAIRPKVRDQEGRMNYYWTLVEPGDKITFEATGNLVVPRYAFAMERNAESGIIISDTPVHDCNTTCQTPKGAINTSLPFQNIHPITIGKCPKYVKSTKLRLATGLRNVPSIQSRGLFGAIAGFIEGGWTGMVDGWYGYHHQNEQGSGYAADLKSTQNAIDEITNKVNSVIEKMNTQFTAVGKEFNHLEKRIENLNKKVDDGFLDIWTYNAELLVLLENERTLDYHDSNVKNLYEKVRSQLKNNAKEIGNGCFEFYHKCDNTCMESVKNGTYDYPKYSEEAKLNREEIDGVKLESTRIYQILAIYSTVASSLVLVVSLGAISFWMCSNGSLQCRICI

SEQ ID NO: 3570 - protein, 566 aa, synthetic construct; identical to SEQ ID NO: 2656
  REGION 1..566: note = hemagglutinin__InfluenzaA__ACY77954

SEQ ID NO: 3571 - protein, 566 aa, synthetic construct; identical to SEQ ID NO: 2656
  REGION 1..566: note = hemagglutinin__InfluenzaA__ACY77964

SEQ ID NO: 3572 - protein, 566 aa, synthetic construct; identical to SEQ ID NO: 2656
  REGION 1..566: note = hemagglutinin__InfluenzaA__ACY77974

SEQ ID NO: 3573 - protein, 566 aa, synthetic construct; identical to SEQ ID NO: 2656
  REGION 1..566: note = hemagglutinin__InfluenzaA__ACY77984

SEQ ID NO: 3574 - protein, 566 aa, synthetic construct; identical to SEQ ID NO: 2656
  REGION 1..566: note = hemagglutinin__InfluenzaA__ACY77994

SEQ ID NO: 3575 - protein, 566 aa, synthetic construct
  REGION 1..566: note = hemagglutinin__InfluenzaA__ACY79633
MKEILVVLLYTFATANADTLCIGYHANNSTDTVDTVLEKNVTVTHSVNLLEDKHNGKLCKLRGVAPLHLGKCNIAGWILGNPECESLSTASSWSYIVETSSSDNGTCYPGDFIDYEELREQLSSVSSFERFEIFPKTSSWPNHDSNKGVTAACPHAGAKSFYKNLIWLVKKGNSYPKLSKSYINDKGKEVLVLWGIHHPSTSADQQSLYQNADAYVFVGTSRYSKKFKPEIAIRPKVRDQEGRMNYYWTLVEPGDKITFEATGNLVVPRYAFAMERNARSGIIISDTPVHDCNTTCQTPKGAINTSLPFQNIHPITIGKCPKYVKSTKLRLATGLRNVPSIQSRGLFGAIAGFIEGGWTGMVDGWYGYHHQNEQGSGYAADLKSTQNAIDEITNKVNSVIEKMNTQFTAVGKEFNHLEKRIENLNKKVDDGFLDIWTYNAELLVLLENERTLDYHDSNVKNLYEKVRSQLKNNAKEIGNGCFEFYHKCDNTCMESVKNGTYDYPKYSEEAKLNREEIDGVKLESTRIYQILAIYSTVASSLVLVVSLGAISFWMCSNGSLQCRICI

SEQ ID NO: 3576 - protein, 566 aa, synthetic construct; identical to SEQ ID NO: 3467
  REGION 1..566: note = hemagglutinin__InfluenzaA__ACZ01953

SEQ ID NO: 3577 - protein, 566 aa, synthetic construct
  REGION 1..566: note = hemagglutinin__InfluenzaA__ACZ05050
MKAILVVLLYTFATANADTLCIGYHANNSTDTVDTVLEKNVTVTHSVNLLEDKHNGKLCKLRGVAPLHLGKCNIAGWILGNPECESLSTASSWSYIVETSSSDNGTCYPGDFIDYEELREQLSSVSSFERFEIFPKTSSWPNHDSNKGVTAACSHAGAKSFYKNLIWLVKKGNSYPKLSKSYINDKGKEVLVLWGIHHPSTSADQQSLYQNADAYVFVGSSRYSKKFKPEIAIRPKVRDQEGRMNYYWTLVEPGDKITFEATGNLVVPRYAFAMERNAGSGIIISDTPVHDCNTTCQTPKGAINTSLPFQNIHPITIGKCPKYVKSTKLRLATGLRNVPSIQSRGLFGAIAGFIEGGWTGMVDGWYGYHHQNEQGSGYAADLKSTQNAIDEITNKVNSVIEKMNTQFTAVGKEFNHLEKRIENLNKKVDDGFLDIWTYNAELLVLLENERTLDYHDSNVKNLYEKVRSQLKNNAKEIGNGCFEFYHKCDNTCMESVKNGTYDYPKYSEEAKLNREEIDGVKLESTRIYQILAIYSTVASSLVLVVSLGAISFWMCSNGSLQCRICI

SEQ ID NO: 3578 - protein, 566 aa, synthetic construct
  REGION 1..566: note = hemagglutinin__InfluenzaA__ACZ05061
MEAILVVLLYTFTTANADTLCIGYHANNSTDTVDTVLEKNVTVTHSVNLLEDKHNGKLCKLRGVAPLHLGKCNIAGWILGNPECESLSTASSWSYIVETSSSDNGTCYPGDFIDYEELREQLSSVSSFERFEIFPKTSSWPNHDSNKGVTAACPHAGAKSFYKNLIWLVKKGNSYPKLSKSYINDKGKEVLVLWGIHHPSTSADQQSLYQNADAYVFVGSSRYSKKFKPEIAIRPKVRDQEGRMNYYWTLVEPGDKITFEATGNLVVPRYAFAMERNAGSGIIISDTPVHDCNTTCQTLKGAINTSLPFQNIHPITIGKCPKYVKSTKLRLATGLRNVPSIQSRGLFGAIAGFIEGGWTGMVDGWYGYHHQNEQGSGYAADLKSTQNAIDEITNKVNSVIEKMNTQFTAVGKEFNHLEKRIENLNKKVDDGFLDIWTYNAELLVLLENERTLDYHDSNVKNLYEKVRSQLKNNAKEIGNGCFEFYHKCDNTCMESVKNGTYDYPKYSEEAKLNREEIDGVKLESTRIYQILAIYSTVASSLVLVVSLGAISFWMCSNGSLQCRICI

SEQ ID NO: 3579 - protein, 566 aa, synthetic construct; identical to SEQ ID NO: 2656
  REGION 1..566: note = hemagglutinin__InfluenzaA__ACZ05071

SEQ ID NO: 3580 - protein, 566 aa, synthetic construct; identical to SEQ ID NO: 2656
  REGION 1..566: note = hemagglutinin__InfluenzaA__ACZ05081

SEQ ID NO: 3581 - protein, 566 aa, synthetic construct; identical to SEQ ID NO: 2656
  REGION 1..566: note = hemagglutinin__InfluenzaA__ACZ05091

SEQ ID NO: 3582 - protein, 566 aa, synthetic construct; identical to SEQ ID NO: 2656
  REGION 1..566: note = hemagglutinin__InfluenzaA__ACZ05101

SEQ ID NO: 3583 - protein, 566 aa, synthetic construct; identical to SEQ ID NO: 2656
  REGION 1..566: note = hemagglutinin__InfluenzaA__ACZ05111

SEQ ID NO: 3584 - protein, 566 aa, synthetic construct
  REGION 1..566: note = hemagglutinin__InfluenzaA__ACZ05121
MKAILVVLLYTFATANADTLCIGYHANNSTDTVDTVLEKNVTVTHSVNLLEDKHNGKLCKLRGVAPLHLGKCNIAGWILGNPECESLSTASSWSYIVETSSSDNGTCYPGDFIDYEELREQLSSVSSFERFEIFPKTSSWPNHDSNKGVTAACPHAGAKSFYNNLIWLVKKGNSYPKLSKSYINDKGKEVLVLWGIHHPSTSADQQSLYQNADAYVFVGSSRYSKKFKPEIAIRPKVRDQEGRMNYYWTLVEPGDKITFEATGNLVVPRYAFAMERNAGSGIIISDTPVHDCNTTCQTPKGAINTSLPFQNIHPITIGKCPKYVKSTKLRLATGLRNVPSIQSRGLFGAIAGFIEGGWTGMVDGWYGYHHQNEQGSGYAADLKSTQNAIDEITNKVNSVIEKMNTQFTAVGKEFNHLEKRIENLNKKVDDGFLDIWTYNAELLVLLENERTLDYHDSNVKNLYEKVRSQLKNNAKEIGNGCFEFYHKCDNTCMGSVKNGTYDYPKYSEEAKLNREEIDGVKLESTRIYQILAIYSTVASSLVLVVSLGAISFWMCSNGSLQCRICI

SEQ ID NO: 3585 - protein, 566 aa, synthetic construct; identical to SEQ ID NO: 2656
  REGION 1..566: note = hemagglutinin__InfluenzaA__ACZ05131

SEQ ID NO: 3586 - protein, 566 aa, synthetic construct; identical to SEQ ID NO: 2656
  REGION 1..566: note = hemagglutinin__InfluenzaA__ACZ05141

SEQ ID NO: 3587 - protein, 566 aa, synthetic construct; identical to SEQ ID NO: 2656
  REGION 1..566: note = hemagglutinin__InfluenzaA__ACZ05151

SEQ ID NO: 3588 - protein, 566 aa, synthetic construct
  REGION 1..566: note = hemagglutinin__InfluenzaA__ACZ05172
MKTIIALSYILCLVFAQKLPGNDNSTATLCLGHHAVPNGTIVKTITNDQIEVTNATELVQSSSTGEICDSPHQILDGKNCTLIDALLGDPQCDGFQNKKWDLFVERSKAYSNCYPYDVPDYASLRSLVASSGTLEFNNESFNWTGVTQDGTSSACIRRSKNSFFSRLNWLTHLNFKYPALNVTMPNNEQFDKLYIWGVHHPGTDKDQIFLYAQASGRITVSTKRSQQTAIPNIGSRPRVRNIPSRISIYWTIVKPGDILLINSTGNLIAPRGYFKIRSGKSSIMRSDAPIGKCNSECITPNGSIPNDKPFQNVNRITYGACPRYVKQNTLKLATGMRNVPEKQTRGIFGAIAGFIENGWEGMVDGWYGFRHQNSEGRGQAADLKSTQAAIDQINGKLNRLIGKTNEKFHQIEKEFSEVEGRIQDLEKYVEDTKIDLWSYNAELLVALENQHTIDLTDSEMNKLFEKTKKQLRENAEDMGNGCFKIYHKCDNACIGSIRNGTYDHDVYRDEALNNRFQIKGVELKSGYKDWILWISFAISCFLLCVALLGFIMWACQKGNIRCNICI

SEQ ID NO: 3589 - protein, 565 aa, synthetic construct; identical to SEQ ID NO: 3131
  REGION 1..565: note = hemagglutinin__InfluenzaA__ACZ05194

SEQ ID NO: 3590 - protein, 566 aa, synthetic construct; identical to SEQ ID NO: 3588
  REGION 1..566: note = hemagglutinin__InfluenzaA__ACZ05205

SEQ ID NO: 3591 - protein, 566 aa, synthetic construct
  REGION 1..566: note = hemagglutinin__InfluenzaA__ACZ05216
MKTIIALSYILCLVFAQKIPGNDNNTATLCLGHHAVPNGTIVKTITNDQIEVTNATELVQSSSTGEICDSPHQILDGENCTLIDALLGDPQCDGFQNKKWDLFVERSKAYSNCYPYDVPDYASLRSLVASSGTLEFNNESFNWTGVTQNGTSSACIRRSNNSFFSRLNWLTHLKFKYPALNVTMPNNEQFDKLYIWGVHHPGTDNDQIFLYAQASGRITVSTKRSQQTVIPNIGSRPRVRNIPSRISIYWTIVKPGDILLINSTGNLIAPRGYFKIRSGKSSIMRSDAPIGKCNSECITPNGSIPNDKPFQNVNRITYGACPRYVKQNTLKLATGMRNVPEKQTRGIFGAIAGFIENGWEGMVDGWYGFRHQNSEGRGQAADLKSTQAAIDQINGKLNRLIGKTNEKFHQIEKEFSEVEGRIQDLEKYVEDTKIDLWSYNAELLVALENQHTIDLTDSEMNKLFEKTKKQLRENAEDMGNGCFKIYHKCDNACIGSIRNGTYDHDVYRDEALNNRFQIKGVELKSGYKDWILWISFAISCFLLCVALLGFIMWACQKGNIRCNICI

SEQ ID NO: 3592 - protein, 566 aa, synthetic construct; identical to SEQ ID NO: 3588
  REGION 1..566: note = hemagglutinin__InfluenzaA__ACZ05227

SEQ ID NO: 3593 - protein, 566 aa, synthetic construct
  REGION 1..566: note = hemagglutinin__InfluenzaA__ACZ05238
MKTIIALSYILCLVFAQKLPGNDNSTATLCLGHHAVPNGTIVKTITNDQIEVTNATELVQSSSTGEICDSPHQILDGKNCTLIDALLGDPQCDGFQNKKWDLFVERSKAYSNCYPYDVPDYASLRSLVASSGTLEFNNESFNWAGVTQNGTSSACIRRSKNSFFSRLNWLTHLNFKYPALNVTMPNNEQFDKLYIWGVHHPGTDKDQIFLYAQASGRITVSTKRSQQTAIPNIGSRPRVRNIPSRISIYWTIVKPGDILLINSTGNLIAPRGYFKIRSGKSSIMRSDAPIGKCNSECITPNGSIPNDKPFQNVNRITYGACPRYVKQNTLKLATGMRNVPEKQTRGIFGAIAGFIENGWEGMVDGWYGFRHQNSEGRGQAADLKSTQAAIDQINGKLNRLIGKTNEKFHQIEKEFSEVEGRIQDLEKYVEDTKIDLWSYNAELLVALENQHTIDLTDSEMNKLFEKTKKQLRENAEDMGNGCFKIYHKCDNACIGSIRNGTYDHDVYRDEALNNRFQIKGVELKSGYKDWILWISFAISCFLLCVALLGFIMWACQKGNIRCNICI

SEQ ID NO: 3594 - protein, 566 aa, synthetic construct; identical to SEQ ID NO: 3588
  REGION 1..566: note = hemagglutinin__InfluenzaA__ACZ05249

SEQ ID NO: 3595 - protein, 566 aa, synthetic construct; identical to SEQ ID NO: 3588
  REGION 1..566: note = hemagglutinin__InfluenzaA__ACZ05260

SEQ ID NO: 3596 - protein, 566 aa, synthetic construct
  REGION 1..566: note = hemagglutinin__InfluenzaA__ACZ05271
MKTIIALSYILCLVFAQKLPGNDNSTATLCLGHHAVPNGTIVKTITNDQIEVTNATELVQSSSTGEICDSPHQILDGENCTLIDALLGDPQCDGFQNKKWDLFVERSKAYSNCYPYDVPDYASLRSLVASSGTLEFNNESFNWTGVTQNGTSSACIRRSNNSFFSRLNWLTHLKFKYPALNVTMPNNEQFDKLYIWGVHHPGTDNDQIFLYAQASGRITVSTKRSQQTVIPNIGSRPRVRNIPSRISIYWTIVKPGDILLINSTGNLIAPRGYFKIRSGKSSIMRSDAPIGKCNSECITPNGSIPNDKPFQNVNRITYGACPRYVKQNTLKLATGMRNVPERQTRGIFGAIAGFIENGWEGMVDGWYGFRHQNSEGRGQAADLKSTQAAIDQINGKLNRLIGKTNEKFHQIEKEFSEVEGRIQDLEKYVEDTKIDLWSYNAELLVALENQHTIDLTDSEMNKLFEKTKKQLRENAEDMGNGCFKIYHKCDNACIGSIRNGTYDHDVYRDEALNNRFQIKGVELKSGYKDWILWISFAISCFLLCVALLGFIMWACQKGNIRCNICI

SEQ ID NO: 3597 - protein, 566 aa, synthetic construct
  REGION 1..566: note = hemagglutinin__InfluenzaA__ACZ05282
MKTTIALSYILCLVFAQKLPGNDNSTATLCLGHHAVPNGTIVKTITNDQIEVTNATELVQSSSTGEICDSPHQILDGENCTLIDALLGDPQCDGFQNKKWDLFVERSKAYSNCYPYDVPDYASLRSLVASSGTLEFNNESFNWTGVTQNGTSSACIRRSNNSFFSRLNWLTHLKFKYPALNVTMPNNEQFDKLYIWGVHHPGTDNDQIFLYAQASGRITVSTKRSQQTVIPNIGSRPRVRNIPSRISIYWTIVKPGDILLINSTGNLIAPRGYFKIQSGKSSIMRSDAPIGKCNSECITPNGSIPNDKPFQNVNRITYGACPRYVKQNTLKLATGMRNVPEKQTRGIFGAIAGFIENGWEGMVDGWYGFRHQNSEGRGQAADLKSTQAAIDQINGKLNRLIGKTNEKFHQIEKEFSEVEGRIQDLEKYVEDTKIDLWSYNAELLVALENQHTIDLTDSEMNKLFEKTKKQLRENAEDMGNGCFKIYHKCDNACIGSIRNGTYDHDVYRDEALNNRFQIKGVELKSGYKDWILWISFAISCFLLCVALLGFIMWACQKGNIRCNICI

SEQ ID NO: 3598 - protein, 566 aa, synthetic construct; identical to SEQ ID NO: 3588
  REGION 1..566: note = hemagglutinin__InfluenzaA__ACZ05304

SEQ ID NO: 3599 - protein, 566 aa, synthetic construct; identical to SEQ ID NO: 3411
  REGION 1..566: note = hemagglutinin__InfluenzaA__ACZ05315

SEQ ID NO: 3600 - protein, 566 aa, synthetic construct; identical to SEQ ID NO: 3588
  REGION 1..566: note = hemagglutinin__InfluenzaA__ACZ05326

SEQ ID NO: 3601 - protein, 566 aa, synthetic construct
  REGION 1..566: note = hemagglutinin__InfluenzaA__ACZ05337
MKTIIALSYILCLVFTQKLPGNDNSTATLCLGHHAVPNGTIVKTITNDQIEVTNATELVQSSSTGEICDSPHQILDGKNCTLIDALLGDPQCDGFQNKKWDLFVERSKAYSNCYPYDVPDYASLRSLVASSGTLEFNNERFNWTGVTQNGTSSACIRRSKNSFFSRLNWLTHLNFKYPALNVTMPNNEQFDKLYIWGVHHPGTDKDQIFLYAQASGRITVSTKRSQQTVIPNIGSRPRVRNIPSRISIYWTIVKPGDILLISSTGNLIAPRGYFKIRSGKSSIMRSDAPIGKCNSECITPNGSIPNDKPFQNVNRITYGACPRYVKQNTLKLATGMRNVPEKQTRGIFGAIAGFIENGWEGMVDGWYGFRHQNSEGRGQAADLKSTQAAIDQINGKLNRLIGKTNEKFHQIEKEFSEVEGRIQDLEKYVEDTKIDLWSYNAELLVALENQHTIDLTDSEMNKLFEKTKKQLRENAEDMGNGCFKIYHKCDNACIGSIRNGTYDHDVYRDEALNNRFQIKGVELKSGFKDWILWISFAISCFLLCVALLGFIMWACQKGNIRCNICI

SEQ ID NO: 3602 - protein, 566 aa, synthetic construct; identical to SEQ ID NO: 3588
  REGION 1..566: note = hemagglutinin__InfluenzaA__ACZ05348

SEQ ID NO: 3603 - protein, 566 aa, synthetic construct; identical to SEQ ID NO: 3593
  REGION 1..566: note = hemagglutinin__InfluenzaA__ACZ05359

SEQ ID NO: 3604 - protein, 566 aa, synthetic construct; identical to SEQ ID NO: 3588
  REGION 1..566: note = hemagglutinin__InfluenzaA__ACZ05370

SEQ ID NO: 3605 - protein, 566 aa, synthetic construct
  REGION 1..566: note = hemagglutinin__InfluenzaA__ACZ05392
MKTIIALSYILCLVFAQKLPGNDNSTATLCLGHHAVPNGTIVKTITNDQIEVTNATELVQSSSTGEICDSPHQILDGKNCTLIDALLGDPQCDGFQNKKWDLFVERSKAYSNCYPYDVPDYASLRSLVASSGTLEFNNESFNWTGVTQNGASSACIRRSKNSFFSRLNWLTHLNFKYPALNVTMPNNEQFDKLYIWGVHHPGTDKDQIFLYAQASGRITVSTKRSQQTAIPNIGSRPRVRNIPSRISIYWTIVKPGDILLINSTGNLIAPRGYFKIRSGKSSIMRSDAPIGKCNSECITPNGSIPNDKPFQNVNRITYGACPRYVKQNTLKLATGMRNVPEKQTRGIFGAIAGFIENGWEGMVDGWYGFRHQNSEGRGQAADLKSTQAAIDQINGKLNRLIGKTNEKFHQIEKEFSEVEGRIQDLEKYVEDTKIDLWSYNAELLVALENQHTIDLTDSEMNKLFEKTKKQLRENAEDMGNGCFKIYHKCDNACIGSIRNGTYDHDVYRDEALNNRFQIKGVELKSGYKDWILWISFAISCFLLCVALLGFIMWACQKGNIRCNICI

SEQ ID NO: 3606 - protein, 566 aa, synthetic construct; identical to SEQ ID NO: 3588
  REGION 1..566: note = hemagglutinin__InfluenzaA__ACZ05403

SEQ ID NO: 3607 - protein, 566 aa, synthetic construct
  REGION 1..566: note = hemagglutinin__InfluenzaA__ACZ05436
MKTIIALSYILCLVFAQKLPGNDNSTATLCLGHHAVPNGTIVKTITNDQIEVTNATELVQSSSTGEICDSPHQILDGKSCTLIDALLGDPQCDGFQNKKWDLFVERSKAYSNCYPYDVPDYASLRSLVASSGTLEFNNESFNWTGVTQNGTSSACIRRSKNSFFSRLNWLTHLNFKYPALNVTMPNNEQFDKLYIWGVHHPGTDKDQIFLYAQASGRITVSTKRSQQTAIPNIGSRPRVRNIPSRISIYWTIVKPGDILLINSTGNLIAPRGYFKIRSGKSSIMRSDAPIGKCNSECITPNGSIPNDKPFQNVNRITYGACPRYVKQNTLKLATGMRNVPEKQTRGIFGAIAGFIENGWEGMVDGWYGFRHQNSEGRGQAADLKSTQAAIDQINGKLNRLIGKTNEKFHQIEKEFSEVEGRIQDLEKYVEDTKIDLWSYNAELLVALENQHTIDLTDSEMNKLFEKTKKQLRENAEDMGNGCFKIYHKCDNACIGSIRNGTYDHDVYRDEALNNRFQIKGVELKSGYKDWILWISFAISCFLLCVALLGFIMWACQKGNIRCNICI

SEQ ID NO: 3608 - protein, 566 aa, synthetic construct; identical to SEQ ID NO: 3588
  REGION 1..566: note = hemagglutinin__InfluenzaA__ACZ05458

SEQ ID NO: 3609 - protein, 566 aa, synthetic construct; identical to SEQ ID NO: 3588
  REGION 1..566: note = hemagglutinin__InfluenzaA__ACZ05469

SEQ ID NO: 3610 - protein, 566 aa, synthetic construct; identical to SEQ ID NO: 3607
  REGION 1..566: note = hemagglutinin__InfluenzaA__ACZ05480

SEQ ID NO: 3611 - protein, 566 aa, synthetic construct; identical to SEQ ID NO: 3411
  REGION 1..566: note = hemagglutinin__InfluenzaA__ACZ05513

SEQ ID NO: 3612 - protein, 566 aa, synthetic construct; identical to SEQ ID NO: 3588
  REGION 1..566: note = hemagglutinin__InfluenzaA__ACZ05524

SEQ ID NO: 3613 - protein, 566 aa, synthetic construct
  REGION 1..566: note = hemagglutinin__InfluenzaA__ACZ05535
MKTIIALSYILCLVFAQKLPGNDNSTATLCLGHHAVPNGTIVKTITNDQIEVTNATELVQSSSTGEICDSPHQILDGKNCTLIDALLGDPQCDGFQNKKWDLFVERSKAYSNCYPYDVPDYASLRSLVASSGTLEFNNESFNWTGVTQNGTSSACIRRSKNSFFSRLNWLTHLNFKYPALNVTMPNNEQFDKLYIWGVHHPGTDKDQIFLYAQASGRITVSTKRSQQTAIPNIGSRPRVRNIPSRISIYWTIVKPGDILLINSTGNLIAPRGYFKIRSGKSSIMRSDAPIGKCNSECITPNGSIPNDKPFQNVNRITYGACPRYVKQNTLKLATGMRNVPEKQTRGIFGAIAGFIENGWEGMVDGWYGFRHQNSEGRGQAADLKSTQAAIDQINGKLNRLIGKTNEKFHQIEKEFSEVEGRIQDLEKYVEDTKIDLWSYNAELLVALENQHTIDLTDSEMNKLFEKTKKQLRENAEDMGNGCFKIYHKCDNACIGSIRNGTYDHDVYRDEALNNRFQIKGVELKSGYKDWILWISFAISCFLLCVALLGFIMWACQKGNIRCNICI

SEQ ID NO: 3614 - protein, 566 aa, synthetic construct; identical to SEQ ID NO: 3613
  REGION 1..566: note = hemagglutinin__InfluenzaA__ACZ05546

SEQ ID NO: 3615 - protein, 566 aa, synthetic construct; identical to SEQ ID NO: 3588
  REGION 1..566: note = hemagglutinin__InfluenzaA__ACZ05557

SEQ ID NO: 3616 - protein, 565 aa, synthetic construct
  REGION 1..565: note = hemagglutinin__InfluenzaA__ACZ05579
MKVKLLVLLCTFTATYADTICIGYHANNSTDTVDTVLEKNVTVTHSVNLLENSHNGKLCLLKGIAPLQLGNCSVAGWILGNPECELLISKESWSYIVEKPNPENGTCYPGHFADYEELREQLSSVSSFERFEIFPKESSWPNHTVTGVSASCSHNGESSFYRNLLWLTVKNGLYPNLSKSYANNKEKEVLVLWGVHHPPNIVDQKTLYRTENAYVSVVSSHYSRKFTPEIAKRPKVRDQEGRINYYWTLLEPGDTIIFEANGNLIAPRYAFALSRGFGSGIINSNAPMDKCDAKCQTPRGAINSSLPFQNVHPVTIGECPKYVRSAKLRMVTGLRNIPSIQSRGLFGAIAGFIEGGWTGMVDGWYGYHHQNEQGSGYAADQKSTQNAINGITNKVNSVIEKMNTQFTAVGKEFNKLERRMENLNKKVDDGFIDIWTYNAELLVLLENERTLDFHDSNVKNLYEKVKSQLKNNAKEIGNGCFEFYHKCNDECMESVKNGTYDYPKYSEESKLNREKIDGVKLESMGVYQILAIYSTVASSLVLLVSLGAISFWMCSNGSLQCRICI

SEQ ID NO: 3617 - protein, 565 aa, synthetic construct
  REGION 1..565: note = hemagglutinin__InfluenzaA__ACZ05590
MKVKLLVLLCTFTATYADTICIGYHANNSTDTVDTVLEKNVTVTHSVNLLENSHNGKLCLLKGIAPLQLGNCSVAGWILGNPECELLISKESWSYIVEKPNPENGTCYPGHFADYEELREQLSSVSSFERFEIFPKESSWPNHTVTGVSASCSHNGESSFYRNLLWLTGKNGLYPNLSKSYANNKEKEVLVLWGVHHPPSISDQKTLYHTEDAYVSVVSSHYSRKFTPEIAKRPKVRDQEGRINYYWTLLEPGDTIIFEANGNLIAPRYAFALSRGFGSGIINSNAPMGKCDAKCQTPQGAINSSLPFQNVHPVTIGECPKYVRSAKLRMVTGLRNIPSIQSRGLFGAIAGFIEGGWTGMVDGWYGYHHQNEQGSGYAADQKSTQNAINGITNKVNSVIEKMNTQFTAVGKEFNKLERRMENLNKKVDDGFIDIWTYNAELLVLLENERTLDFHDSNVKNLYEKVKSQLKNNAKEIGNGCFEFYHKCNDECMESVKNGTYDYPKYSEESKLNREKIDGVKLESMGVYQILAIYSTVASSLVLLVSLGAISFWMCSNGSLQCRICI

SEQ ID NO: 3618 - protein, 566 aa, synthetic construct; identical to SEQ ID NO: 3613
  REGION 1..566: note = hemagglutinin__InfluenzaA__ACZ05950

SEQ ID NO: 3619 - protein, 566 aa, synthetic construct; identical to SEQ ID NO: 3588
  REGION 1..566: note = hemagglutinin__InfluenzaA__ACZ05961

SEQ ID NO: 3620 - protein, 566 aa, synthetic construct
  REGION 1..566: note = hemagglutinin__InfluenzaA__ACZ05972
MKTIIALSYILCLVFAQKLPGNDNSTATLCLGHHAVPNGTIVKTITNDQIEVTNATELVQSSSTGEICDSPHQILDGKNCTLIDALLGDPQCDGFQNKKWDLFVERSKAYSNCYPYDVPDYASLRSLVASSGTLEFNNESFNWTGVTQNGTSSACIRRSKNSFFSRLNWLTHLNFKYPALNVTMPNNEQFDKLYIWGVHHPGTDKDQIFLYAQASGRITVSTKRSQQTAIPNIGSRPRVRNIPSRISIYWTIVKPGDILLINSTGNLIAPRGYFKIRSGKSSIMRSDAPIGKCNSECITPNGSIPNDKPFQNVNRITYGACPRYVKQNTLKLATGMRNVPEKQTRGIFGAIAGFIENGWEGMVDGWYGFRHQNSEGRGQAADLKSTQAAIDQINGKLNRLIGKTNEKFHQIEKEFSEVEGRIQDLEKYVEDTKIDLWSYNAELLVALENQHTIDLTDSEMNKLFEKTKKQLRENAEDMGNGCFKIYHKCDNACIGSIRNGTYDHDVYRDEALNNRFQIKGVELKSGYKDWILWISFAISCSLLCVALLGFIMWACQKGNIRCNICI

SEQ ID NO: 3621 - protein, 566 aa, synthetic construct
  REGION 1..566: note = hemagglutinin__InfluenzaA__ACZ05983
MKTIIALSYILCLVFAQKLPGNDNSTATLCLGHHAVPNGTIVKTITNDQIEVTNATELVQSSSTGEICDSPHQILDGKNCTLIDALLGDPQCDGFQNKKWDLFVERSKAYSNCYPYDVPDYASLRSLVASSGTLEFNNESFNWTGVTQNGTSSACIRRSKNSFFSRLNWLTHLNFKYPALNVTMPNNEQFDKLYIWGVHHPGTDKDQIFLYAQASGRITVSTKRSQQTAIPNIGSRPRVRNIPSRISIYWTIVKPGDILLINSTGNLIAPRGYFKIRSGKSSIMRSDAPIGKCNSECITPNGSIPNDKPFQNVNRNTYGACPRYVKQNTLKLATGMRNVPEKQTRGIFGAIAGFIENGWEGMVDGWYGFRHQNSEGRGQAADLKSTQAAIDQINGKLNRLIGKTNEKFHQIEKEFSEVEGRIQDLEKYVEDTKIDLWSYNAELLVALENQHTIDLTDSEMNKLFEKTKKQLRENAEDMGNGCFKIYHKCDNACIGSIRNGTYDHDVYRDEALNNRFQIKGVELKSGYKDWILWISFAISCFLLCVALLGFIMWACQKGNIRCNICI

SEQ ID NO: 3622 - protein, 566 aa, synthetic construct
  REGION 1..566: note = hemagglutinin__InfluenzaA__ACZ05994
MKTIIALSYILCLVFAQKLPGNDNSTATLCLGHHAVPNGTIVKTITNDQIEVTNATELVQSSSTGEICDSPHQILDGKNCTLIDALLGDPQCDGFQNKKWDLFVERSKAYSNCYPYDVPDYASLRSLVASSGTLEFNNESFNWTGVTQNGTSSACIRRSKNSFFSRLNWLTHLNFKYPALNVTVPNNEQFDKLYIWGVHHPGTDKDQIFLYAQASGRITVSTKRSQQTAIPNIGSRPRVRNIPSRISIYWTIVKPGDILLINSTGNLIAPRGYFKIRSGKSSIMRSDAPIGKCNSECITPNGSIPNDKPFQNVNRITYGACPRYVKQNTLKLATGMRNVPEKQTRGIFGAIAGFIENGWEGMVDGWYGFRHQNSEGRGQAADLKSTQAAIDQINGKLNRLIGKTNEKFHQIEKEFSEVEGRIQDLEKYVEDTKIDLWSYNAELLVALENQHTIDLTDSEMNKLFEKTKKQLRENAEDMGNGCFKIYHKCDNACIGSIRNGTYDHDVYRDEALNNRFQIKGVELKSGYKDWILWISFAISCFLLCVALLGFIMWACQKGNIRCNICI

SEQ ID NO: 3623 - protein, 566 aa, synthetic construct; identical to SEQ ID NO: 3588
  REGION 1..566: note = hemagglutinin__InfluenzaA__ACZ06005

SEQ ID NO: 3624 - protein, 566 aa, synthetic construct; identical to SEQ ID NO: 3588
  REGION 1..566: note = hemagglutinin__InfluenzaA__ACZ06016

SEQ ID NO: 3625 - protein, 565 aa, synthetic construct
  REGION 1..565: note = hemagglutinin__InfluenzaA__ACZ16013
MKVKLLVLLCTFTATYADTICIGYHANNSTDTVDTVLEKNVTVTHSVNLLENSHNGKLCLLKGIAPLQLGNCSVAGWILGNPECELLISKESWSYIVEKPNPENGTCYPGHFADYEELREQLSSVSSFERFEIFPKESSWPNHTVTGVSASCSHNGENSFYRNLLWLTGKNGLYPNLSKSYANNKEKEVLVLWGVHHPPNIADQKTLYHTEKAYVSVVSSHYSRKFTPEIAKRPKVRDQEGRINYYWTLLEPGDTIIFEANGNLIAPRYAFALSRGFGSGIINSNAPMDKCDAKCQTPQGAINSSLPFQNVHPVTIGECPKYVRSAKLRMVTGLRNIPSIQSRGLFGAIAGFIEGGWTGMVDGWYGYHHQNEQGSGYAADQKSTQNAINGITNKVNSVIEKMNTQFTAVGKEFNKLERRMENLNKKVDDGFIDIWTYNAELLVLLENERTLDFHDSNVKNLYEKVKSQLKNNAKEIGNGCFEFYHKCNDECMESVKNGTYDYPKYSEESKLNREKIDGVKLESMGVYQILAIYSTVASSLVLLVSLGAISFWMCSNGSLQCRICI

SEQ ID NO: 3626 - protein, 565 aa, synthetic construct
  REGION 1..565: note = hemagglutinin__InfluenzaA__ACZ16023
MKVKLLVLLCTFTATYADTICIGYHANNSTDTVDTVLEKNVTVTHSVNLLENSHNGKLCLLKGIAPLQLGNCSVAGWILGNPECELLISKESWSYIVEKPNPENGTCYPGHFADYEELREQLSSVSSFERFEIFPKESSWPNHTVTGVSASCSHNGENSFYRNLLWLTGKNGLYPNLSKSYANNKEKEVLVLWGVHHPPNIADQKTLYHTENAYVSVVSSHYSRKFTPEIAKRPKVRDQEGRINYYWTLLEPGDTIIFEANGNLIAPRYAFALSRGFGSGIINSNAPMDKCDAKCQTPQGAINSSLPFQNVHPVTIGECPKYVRSAKLRMVTGLRNIPSIQSRGLFGAIAGFIEGGWTGMVDGWYGYHHQNEQGSGYAADQKSTQNAINGITNKVNSVIEKMNTQFTAVGKEFNKLERRMENLNKKVDDGFIDIWTYNAELLVLLENERTLDFHDSNVKNLYEKVKSQLKNNAKEIGNGCFEFYHKCNDECMESVKNGTYDYPKYSEESKLNREKIDGVKLESMGVYQILAIYSTVASSLVLLVSLGAISFWMCSNGSLQCRICI

SEQ ID NO: 3627 - protein, 565 aa, synthetic construct
  REGION 1..565: note = hemagglutinin__InfluenzaA__ACZ16033
MKVKLLVLLCTFTATYADTICIGYHANNSTDTVDTVLEKNVTVTHSVNLLENSHNGKLCLLKGIAPLQLGNCSVAGWILGNPECELLISKESWSYIVEKPNPENGTCYPGHFADYEELREQLSSVSSFERFEIFPKESSWPNHTVTGASASCSHNGENSFYRNLLWLTGKNGLYPNLSKSYANNKEKEVLVLWGVHHPPNIADQKTLYHTENAYVSVVSSHYSRKFTPEIAKRPKVRDQEGRINYYWTLLEPGDTIIFEANGNLIAPRYAFALSRGFGSGIINSNAPMDKCDAKCQTPQGAINSSLPFQNIHPVTIGECPKYVRSAKLRMVTGLRNIPSIQSRGLFGAIAGFIEGGWTGMVDGWYGYHHQNEQGSGYAADQKSTQNAINGITNKVNSVIEKMNTQFTAVGKEFNKLERRMENLNKKVDDGFIDIWTYNAELLVLLENERTLDFHDSNVKNLYEKVKSQLKNNAKEIGNGCFEFYHKCNDECMESVKNGTYDYPKYSEESKLNKEKIDGVKLESMGVYQILAIYSTVASSLVLLVSLGAISFWMCSNGSLQCRICI

SEQ ID NO: 3628 - protein, 566 aa, synthetic construct; identical to SEQ ID NO: 2656
  REGION 1..566: note = hemagglutinin__InfluenzaA__ACZ16040

SEQ ID NO: 3629 - protein, 566 aa, synthetic construct; identical to SEQ ID NO: 2656
  REGION 1..566: note = hemagglutinin__InfluenzaA__ACZ16050

SEQ ID NO: 3630 - protein, 566 aa, synthetic construct; identical to SEQ ID NO: 2656
  REGION 1..566: note = hemagglutinin__InfluenzaA__ACZ16060

SEQ ID NO: 3631 - protein, 566 aa, synthetic construct
  REGION 1..566: note = hemagglutinin__InfluenzaA__ACZ16070
MKAILVVLLYTFATANADTLCIGYHANNSTDTVDTVLEKNVTVTHSVSLLEDKHNGKLCKLRGVAPLHLGKCNIAGWILGNPECESLSTASSWSYIVETSSSDNGTCYPGDFIDYEELREQLSSVSSFERFEIFPKTSSWPNHDSNKGVTAACPHAGAKSFYKNLIWLVKKGNSYPKLSKSYINDKGKEVLVLWGIHHPSTSADQQSLYQNADAYVFVGSSRYSKKFKPEIAIRPKVRDQEGRMNYYWTLVEPGDKITFEATGNLVVPRYAFAMERNAGSGIIISDTPVHDCNTTCQTPKGAINTSLPFQNIHPITIGKCPKYVKSTKLRLATGLRNVPSIQSRGLFGAIAGFIEGGWTGMVDGWYGYHHQNEQGSGYAADLKSTQNAIDEITNKVNSVIEKMNTQFTAVGKEFNHLEKRIENLNKKVDDGFLDIWTYNAELLVLLENERTLDYHDSNVKNLYEKVRSQLKNNAKEIGNGCFEFYHKCDNTCMESVKNGTYDYPKYSEEAKLNREEIDGVKLESTRIYQILAIYSTVASSLVLVVSLGAISFWMCSNGSLQCRICI

SEQ ID NO: 3632 - protein, 566 aa, synthetic construct
  REGION 1..566: note = hemagglutinin__InfluenzaA__ACZ16080
MKAILVVLLYTFATANADTLCIGYHANNSTDTVDTVLEKNVTVTHSVNLLEDKHNGKLCKLRGVAPLHLGKCNIAGWILGNPECESLSTASSWSYIVETSSSDNGTCYPGDFIDYEELREQLSSVSSFERFEIFPKTSSWPNHDSNKGVTAACPHAGAKSFYKNLIWLVKKGNSYPKLSKSYINDKGKEVLVLWGIHHPSTSADQQSLYQNADAYVFVGSSRYSKKFKPEIAIRPKVRDQEGRMNYYWTLVEPGDKITFEATGNLVVPRYAFAMERNDGSGIIISDTPVHDCNTTCQTPKGAINTSLPFQNIHPITIGKCPKYVKSTKLRLATGLRNVPSIQSRGLFGAIAGFIEGGWTGMVDGWYGYHHQNEQGSGYAADLKSTQNAIDEITNKVNSVIEKMNTQFTAVGKEFNHLEKRIENLNKKVDDGFLDIWTYNAELLVLLENERTLDYHDSNVKNLYEKVRSQLKNNAKEIGNGCFEFYHKCDNTCMESVKNGTYDYPKYSEEAKLNREEIDGVKLESTRIYQILAIYSTVASSLVLVVSLGAISFWMCSNGSLQCRICI

SEQ ID NO: 3633 - protein, 566 aa, synthetic construct
  REGION 1..566: note = hemagglutinin__InfluenzaA__ACZ16090
MKAILLVLLYTFATANADTLCIGYHANNSTDTVDTVLEKNVTVTHSVNLLEDKHNGKLCKLRGVAPLHLGKCNIAGWILGNPECESLSTASSWSYIVETSSSDNGTCYPGDFIDYEELREQLSSMSSFERFEIFPKTSSWPNHDSNKGVTAACPHAGAKSFYKNLIWLVKKGNSYPKLSKSYINDKGKEVLVLWGIHHPSTSADQQSLYQNADAYVFVGSSRYSKKFKPEIAIRPKVRDQEGRMNYYWTLVEPGDKITFEATGNLVVPRYAFAMERNAGSGIIISDTPVHDCNTTCQTPKGAINTSLPFQNIHPITIGKCPKYVKSTKLRLATGLRNVPSIQSRGLFGAIAGFIEGGWTGMVDGWYGYHHQNEQGSGYAADLKSTQNAIDEITNKVNSVIEKMNTQFTAVGKEFNHLEKRIENLNKKVDDGFLDIWTYNAELLVLLENERTLDYHDSNVKNLYEKVRSQLKNNAKEIGNGCFEFYHKCDNTCMESVKNGTYDYPKYSEEAKLNREEIDGVKLESTRIYQILAIYSTVASSLVLVVSLGAISFWMCSNGSLQCRICI

SEQ ID NO: 3634 - protein, 566 aa, synthetic construct; identical to SEQ ID NO: 2656
  REGION 1..566: note = hemagglutinin__InfluenzaA__ACZ16100

SEQ ID NO: 3635 - protein, 566 aa, synthetic construct; identical to SEQ ID NO: 2656
  REGION 1..566: note = hemagglutinin__InfluenzaA__ACZ16110

SEQ ID NO: 3636 - protein, 566 aa, synthetic construct; identical to SEQ ID NO: 2656
  REGION 1..566: note = hemagglutinin__InfluenzaA__ACZ16120

SEQ ID NO: 3637 - protein, 566 aa, synthetic construct; identical to SEQ ID NO: 3404
  REGION 1..566: note = hemagglutinin__InfluenzaA__ACZ16130

SEQ ID NO: 3638 - protein, 566 aa, synthetic construct; identical to SEQ ID NO: 2656
  REGION 1..566: note = hemagglutinin__InfluenzaA__ACZ16140

SEQ ID NO: 3639 - protein, 566 aa, synthetic construct; identical to SEQ ID NO: 2656
  REGION 1..566: note = hemagglutinin__InfluenzaA__ACZ16150

SEQ ID NO: 3640 - protein, 566 aa, synthetic construct; identical to SEQ ID NO: 2656
  REGION 1..566: note = hemagglutinin__InfluenzaA__ACZ16160

SEQ ID NO: 3641 - protein, 566 aa, synthetic construct; identical to SEQ ID NO: 2849
  REGION 1..566: note = hemagglutinin__InfluenzaA__ACZ16170

SEQ ID NO: 3642 - protein, 566 aa, synthetic construct
  REGION 1..566: note = hemagglutinin__InfluenzaA__ACZ16180
MKAILVVLLYTFATANADTLCIGYHANNSTDTVDTVLEKNVTVTHSVNLLEDKHNGKLCKLRGVAPLHLGKCNIAGWILGNPECESLYTASSWSYIVETSSSDNGTCYPGDFIDYEELREQLSSVSSFERFEIFPKTSSWPNHDSNKGVTAACPHAGAKSFYKNLIWLVKKGNSYPKLSKSYINDKGKEVLVLWGIHHPSTSADQQSLYQNADAYVFVGSSRYSKKFKPEIAIRPKVRDQEGRMNYYWTLVEPGDKITFEATGNLVVPRYAFAMERNAGSGIIISDTPVHDCNTTCQTPKGAINTSLPFQNIHPITIGKCPKYVKSTKLRLATGLRNVPSIQSRGLFGAIAGFIEGGWTGMVDGWYGYHHQNEQGSGYAADLKSTQNAIDEITNKVNSVIEKMNTQFTAVGKEFNHLEKRIENLNKKVDDGFLDIWTYNAELLVLLENERTLDYHDSNVKNLYEKVRSQLKNNAKEIGNGCFEFYHKCDNTCMESVKNGTYDYPKYSEEAKLNREEIDGVKLESTRIYQILAIYSTVASSLVLVVSLGAISFWMCSNGSLQCRICI

SEQ ID NO: 3643 - protein, 566 aa, synthetic construct; identical to SEQ ID NO: 2656
  REGION 1..566: note = hemagglutinin__InfluenzaA__ACZ16190

SEQ ID NO: 3644 - protein, 566 aa, synthetic construct
  REGION 1..566: note = hemagglutinin__InfluenzaA__ACZ16200
MKAILVVLLYTFATANPDTLCIGYHANNSTDTVDTVLEKNVTVTHSVNLLEDKHNGKLCKLRGVAPLHLGKCNIAGWILGNPECESLSTASSWSYIVETSSSDNGTCYPGDFIDYEELREQLSSVSSFERFEIFPKTSSWPNHDSNKGVTAACPHAGAKSFYKNLIWLVKKGNSYPKLSKSYINDKGKEVLVLWGIHHPSTSADQQSLYQNADAYVFVGSSRYSKKFKPEIAIRPKVRDQEGRMNYYWTLVEPGDKITFEATGNLVVPRYAFAMERNAGSGIIISDTPVHDCNTTCQTPKGAINTSLPFQNIHPITIGKCPKYVKSTKLRLATGLRNVPSIQSRGLFGAIAGFIEGGWTGMVDGWYGYHHQNEQGSGYAADLKSTQNAIDEITNKVNSVIEKMNTQFTAVGKEFNHLEKRIENLNKKVDDGFLDIWTYNAELLVLLENERTLDYHDSNVKNLYEKVRSQLKNNAKEIGNGCFEFYHKCDNTCMESVKNGTYDYPKYSEEAKLNREEIDGVKLESTRIYQILAIYSTVASSLVLVVSLGAISFWMCSNGSLQCRICI

SEQ ID NO: 3645 - protein, 566 aa, synthetic construct; identical to SEQ ID NO: 2656
  REGION 1..566: note = hemagglutinin__InfluenzaA__ACZ16210

SEQ ID NO: 3646 - protein, 566 aa, synthetic construct; identical to SEQ ID NO: 2656
  REGION 1..566: note = hemagglutinin__InfluenzaA__ACZ16220

SEQ ID NO: 3647 - protein, 566 aa, synthetic construct; identical to SEQ ID NO: 3404
  REGION 1..566: note = hemagglutinin__InfluenzaA__ACZ16230

SEQ ID NO: 3648 - protein, 566 aa, synthetic construct
  REGION 1..566: note = hemagglutinin__InfluenzaA__ACZ16240
MKAILVVLLYTFATANADTLCIGYHANNSTDTVDTVLEKNVTVTHSVNILEDKHNGKLCKLRGVAPLHLGKCNIAGWILGNPECESLSTASSWSYIVETSSSDNGTCYPGDFIDYEELREQLSSVSSFERFEIFPKTSSWPNHDSNKGVTAACPHAGAKSFYKNLIWLVKKGNSYPKLSKSYINDKGKEVLVLWGIHHPSTSADQQSLYQNADAYVFVGSSRYSKKFKPEIAIRPKVRDQEGRMNYYWTLVEPGDKITFEATGNLVVPRYAFAMERNAGSGIIISDTPVHDCNTTCQTPKGAINTSLPFQNIHPITIGKCPKYVKSTKLRLATGLRNVPSIQSRGLFGAIAGFIEGGWTGMVDGWYGYHHQNEQGSGYAADLKSTQNALDEITNKVNSVIEKMNTQFTAVGKEFNHLEKRIENLNKKVDDGFLDIWTYNAELLVLLENERTLDYHDSNVKNLYEKVRSQLKNNAKEIGNGCFEFYHKCDNTCMESVKNGTYDYPKYSEEAKLNREEIDGVKLESTRIYQILAIYSTVASSLVLVVSLGAISFWMCSNGSLQCRICI

SEQ ID NO: 3649 - protein, 566 aa, synthetic construct; identical to SEQ ID NO: 2656
  REGION 1..566: note = hemagglutinin__InfluenzaA__ACZ16260

SEQ ID NO: 3650 - protein, 566 aa, synthetic construct
  REGION 1..566: note = hemagglutinin__InfluenzaA__ACZ16270
MKAILVVLLYTFATANADTLCIGYHANNSTDTVDTVLEKNVTVTHSVNLLEDKHNGKLCKLRGVAPLHLGKCNIAGWILGNPECESLSTASSWSYIVETSSSDNGTCYPGDFIDYEELREQLSSVSSFERFEIFPKTSSWPNHDSNKGVTAACPHAGAKSFYKNLIWLVKKGNSYPKLSKSYINDKGKEVLVLWGIHHPSTSADQQNLYQNADAYVFVGSSRYSKKFKPEIAIRPKVRDQEGRMNYYWTLVEPGDKITFEATGNLVVPRYAFAMERNAGSGIIISDTPVHDCNTTCQTPKGAINTSLPFQNIHPITIGKCPKYVKSTKLRLATGLRNVPSIQSRGLFGAIAGFIEGGWTGMVDGWYGYHHQNEQGSGYAADLKSTQNAIDEITNKVNSVIEKMNTQFTAVGKEFNHLEKRIENLNKKVDDGFLDIWTYNAELLVLLENERTLDYHDSNVKNLYEKVRSQLKNNAKEIGNGCFEFYHKCDNTCMESVKNGTYDYPKYSEEAKLNREEIDGVKLESTRIYQILAIYSTVASSLILVVSLGAISFWMCSNGSLQCRICI

SEQ ID NO: 3651 - protein, 566 aa, synthetic construct; identical to SEQ ID NO: 3331
  REGION 1..566: note = hemagglutinin__InfluenzaA__ACZ16280

SEQ ID NO: 3652 - protein, 566 aa, synthetic construct; identical to SEQ ID NO: 2656
  REGION 1..566: note = hemagglutinin__InfluenzaA__ACZ16290

SEQ ID NO: 3653 - protein, 566 aa, synthetic construct
  REGION 1..566: note = hemagglutinin__InfluenzaA__ACZ16300
MKAILVVLLYTFATANADTLCIGYHANNSTDTVDTVLEKNVIVTHSVNLLEDKHNGKLCKLRGVAPLHLGKCNIAGWILGNPECESLSTASSWSYIVETSSSDNGTCYPGDFIDYEELREQLSSVSSFERFEIFPKTSSWPNHDSNKGVTAACPHAGAKSFYKNLIWLVKKGNSYPKLSKSYINDKGKEVLVLWGIHHPSTSADQQSLYQNADAYVFVGSSRYSKKFKPEIAIRPKVRDQEGRMNYYWTLVEPGDKITFEATGNLLVPRYAFAMERNAGSGIIISDTPVHDCNTTCQTPKGAINTSLPFQNIHPITIGKCPKYVKSTKLRLATGLRNVPSIQSRGLFGAIAGFIEGGWTGMVDGWYGYHHQNEQGSGYAADLKSTQNAIDEITNKVNSVIEKMNTQFTAVGKEFNHLEKRIENLNKKVDDGFLDIWTYNAELLVLLENERTLDYHDSNVKNLYEKVRSQLKNNAKEIGNGCFEFYHKCDNTCMESVKNGTYDYPKYSEEAKLNREEIDGVKLESTRIYQILAIYSTVASSLVLVVSLGAISFWMCSNGSLQCRICI

SEQ ID NO: 3654 - protein, 566 aa, synthetic construct; identical to SEQ ID NO: 3399
  REGION 1..566: note = hemagglutinin__InfluenzaA__ACZ16310

SEQ ID NO: 3655 - protein, 566 aa, synthetic construct
  REGION 1..566: note = hemagglutinin__InfluenzaA__ACZ16320
MKAILVVLLYTFATANADTLCIGYHANNSTDTVDTVLEKNVTVTHSVNLLEDKHNGKLCKLRGVAPLHLGKCNIAGWILGNPECESLSTASSWSYIVETSSSDNGTCYPGDFIDYEELREQLSSVSSFERFEIFPKTSSWPNHDSNKGVTAACPHAGAKSFYKNLIWLVKKGNSYPKLSKSYINDKGKEVLVLWGIHHPSTSADQQSLYQNADAYVFVGSSRYSKKFKPEIAIRPKVRDQEGRMNYYWTLVEPGDKITFEATGNLVVPRYAFAMERNAGSGIIISDTPVHDCNTTCQTPKGAINTSLPFQNIHPITIGKCPKYVKSTRLRLATGLRNVPSIQSRGLFGAIAGFIEGGWTGMVDGWYGYHHQNEQGSGYAADLKSTQNAIDEITNKVNSVIEKMNTQFTAVGKEFNHLEKRIENLNKKVDDGFLDIWTYNAELLVLLENERTLDYHDSNVKNLYEKVRSQLKNNAKEIGNGCFEFYHKCDNTCMESVKNGTYDYPKYSEEAKLNREEIDGVKLESTRIYQILAIYSTVASSLVLVVSLGAISFWMCSNGSLQCRICI

SEQ ID NO: 3656 - protein, 566 aa, synthetic construct; identical to SEQ ID NO: 3399
  REGION 1..566: note = hemagglutinin__InfluenzaA__ACZ16330

SEQ ID NO: 3657 - protein, 566 aa, synthetic construct; identical to SEQ ID NO: 2849
  REGION 1..566: note = hemagglutinin__InfluenzaA__ACZ16340

SEQ ID NO: 3658 - protein, 566 aa, synthetic construct; identical to SEQ ID NO: 2656
  REGION 1..566: note = hemagglutinin__InfluenzaA__ACZ16350

SEQ ID NO: 3659 - protein, 566 aa, synthetic construct; identical to SEQ ID NO: 2656
  REGION 1..566: note = hemagglutinin__InfluenzaA__ACZ16360

SEQ ID NO: 3660 - protein, 566 aa, synthetic construct; identical to SEQ ID NO: 2849
  REGION 1..566: note = hemagglutinin__InfluenzaA__ACZ16370

SEQ ID NO: 3661 - protein, 566 aa, synthetic construct; identical to SEQ ID NO: 2656
  REGION 1..566: note = hemagglutinin__InfluenzaA__ACZ16380

SEQ ID NO: 3662 - protein, 566 aa, synthetic construct; identical to SEQ ID NO: 2656
  REGION 1..566: note = hemagglutinin__InfluenzaA__ACZ16390

SEQ ID NO: 3663 - protein, 566 aa, synthetic construct; identical to SEQ ID NO: 2656
  REGION 1..566: note = hemagglutinin__InfluenzaA__ACZ16400

SEQ ID NO: 3664 - protein, 566 aa, synthetic construct; identical to SEQ ID NO: 2656
  REGION 1..566: note = hemagglutinin__InfluenzaA__ACZ16410

SEQ ID NO: 3665 - protein, 566 aa, synthetic construct; identical to SEQ ID NO: 3293
  REGION 1..566: note = hemagglutinin__InfluenzaA__ACZ16420

SEQ ID NO: 3666 - protein, 566 aa, synthetic construct; identical to SEQ ID NO: 2656
  REGION 1..566: note = hemagglutinin__InfluenzaA__ACZ16430

SEQ ID NO: 3667 - protein, 566 aa, synthetic construct; identical to SEQ ID NO: 2656
  REGION 1..566: note = hemagglutinin__InfluenzaA__ACZ16440

SEQ ID NO: 3668 - protein, 566 aa, synthetic construct
  REGION 1..566: note = hemagglutinin__InfluenzaA__ACZ16450
MKAILVVLLYTFATANADTLCIGYHANNSTDTVDTVLEKNVTVTHSVNLLEDKHNGKLCKLRGVAPLHLGKCNIAGWILGNPECESLSTASSWSYIVETSSSDNGTCYPGDFIDYEELREQLSSVSSFERFEIFPKTSSWPNHDSNKGVTAACPHAGAKSFYKNLIWLVKKGNSYPKLSKSYINDKGKEVLVLWGIHHPSTSADQQSLYQNADAYVFVGSSRYSKKFKPEIAIRPKVRDQEGRMNYYWTLVKPGDKITFEATGNLVVPRYAFAMERNAGSGIIISDTPVHDCNTTCQTPKGAINTSLPFQNIHPITIGKCPKYVKSTKLRLATGLRNVPSIQSRGLFGAIAGFIEGGWTGMVDGWYGYHHQNEQGSGYAADLKSTQNAIDEITNKVNSVIEKMNTQFTAVGKEFNHLEKRIENLNKKVDDGFLDIWTYNAELLVLLENERTLDYHDSNVKNLYEKVRSQLKNNAKEIGNGCFEFYHKCDNTCMESVKNGTYDYPKYSEEAKLNREEIDGVKLESTRIYQILAIYSTVASSLVLVVSLGAISFWMCSNGSLQCRICI

SEQ ID NO: 3669 - protein, 566 aa, synthetic construct; identical to SEQ ID NO: 2849
  REGION 1..566: note = hemagglutinin__InfluenzaA__ACZ16460

SEQ ID NO: 3670 - protein, 566 aa, synthetic construct; identical to SEQ ID NO: 2656
  REGION 1..566: note = hemagglutinin__InfluenzaA__ACZ16470

SEQ ID NO: 3671 - protein, 566 aa, synthetic construct; identical to SEQ ID NO: 2656
  REGION 1..566: note = hemagglutinin__InfluenzaA__ACZ16480

SEQ ID NO: 3672 - protein, 566 aa, synthetic construct; identical to SEQ ID NO: 3404
  REGION 1..566: note = hemagglutinin__InfluenzaA__ACZ16490

SEQ ID NO: 3673 - protein, 566 aa, synthetic construct; identical to SEQ ID NO: 2656
  REGION 1..566: note = hemagglutinin__InfluenzaA__ACZ16500

SEQ ID NO: 3674 - protein, 566 aa, synthetic construct; identical to SEQ ID NO: 2849
  REGION 1..566: note = hemagglutinin__InfluenzaA__ACZ16510

SEQ ID NO: 3675 - protein, 566 aa, synthetic construct; identical to SEQ ID NO: 2656
  REGION 1..566: note = hemagglutinin__InfluenzaA__ACZ16530

SEQ ID NO: 3676 - protein, 566 aa, synthetic construct
  REGION 1..566: note = hemagglutinin__InfluenzaA__ACZ16540
MKAILVVLLYTFATANADTLCIGYHANNSTDTVDTVLEKNVTVTHSVNILEDKHNGKLCKLRGVAPLHLGKCNIAGWILGNPECESLSTASSWSYIVETSSSDNGTCYPGDFIDYEELREQLSSVSSFERFEIFPKTSSWPNHDSNKGVTAACPHAGAKSFYKNLIWLVKKGNSYPKLSKSYINDKGKEVLVLWGIHHPSTSADQQSLYQNADAYVFVGSSRYSKKFKPEIAIRPKVRDQEGRMNYYWTLVEPGDKITFEATGNLVVPRYAFAMERNAGSGIIISDTPVHDCNTTCQTPKGAINTSLPFQNIHPITIGKCPKYVKSTKLRLATGLRNVPSIQSRGLLGAIAGFIEGGWTGMVDGWYGYHHQNEQGSGYAADLKSTQNAIDEITNKVNSVIEKMNTQFTAVGKEFNHLEKRIENLNKKVDDGFLDIWTYNAELLVLLENERTLDYHDSNVKNLYEKVRSQLKNNAKEIGNGCFEFYHKCDNTCMESVKNGTYDYPKYSEEAKLNREEIDGVKLESTRIYQILAIYSTVASSLVLVVSLGAISFWMCSNGSLQCRICI

SEQ ID NO: 3677 - protein, 566 aa, synthetic construct; identical to SEQ ID NO: 3399
  REGION 1..566: note = hemagglutinin__InfluenzaA__ACZ16550

SEQ ID NO: 3678 - protein, 566 aa, synthetic construct; identical to SEQ ID NO: 2656
  REGION 1..566: note = hemagglutinin__InfluenzaA__ACZ16583

SEQ ID NO: 3679 - protein, 566 aa, synthetic construct; identical to SEQ ID NO: 3399
  REGION 1..566: note = hemagglutinin__InfluenzaA__ACZ16593

SEQ ID NO: 3680 - protein, 566 aa, synthetic construct; identical to SEQ ID NO: 2656
  REGION 1..566: note = hemagglutinin__InfluenzaA__ACZ16603

SEQ ID NO: 3681 - protein, 566 aa, synthetic construct; identical to SEQ ID NO: 3399
  REGION 1..566: note = hemagglutinin__InfluenzaA__ACZ16630

SEQ ID NO: 3682 - protein, 566 aa, synthetic construct; identical to SEQ ID NO: 2656
  REGION 1..566: note = hemagglutinin__InfluenzaA__ACZ16640

SEQ ID NO: 3683 - protein, 566 aa, synthetic construct; identical to SEQ ID NO: 2656
  REGION 1..566: note = hemagglutinin__InfluenzaA__ACZ16650

SEQ ID NO: 3684 - protein, 566 aa, synthetic construct; identical to SEQ ID NO: 2656
  REGION 1..566: note = hemagglutinin__InfluenzaA__ACZ16660

SEQ ID NO: 3685 - protein, 566 aa, synthetic construct; identical to SEQ ID NO: 2656
  REGION 1..566: note = hemagglutinin__InfluenzaA__ACZ16670

SEQ ID NO: 3686 - protein, 566 aa, synthetic construct; identical to SEQ ID NO: 2656
  REGION 1..566: note = hemagglutinin__InfluenzaA__ACZ16680

SEQ ID NO: 3687 - protein, 566 aa, synthetic construct; identical to SEQ ID NO: 2656
  REGION 1..566: note = hemagglutinin__InfluenzaA__ACZ16690

SEQ ID NO: 3688 - protein, 566 aa, synthetic construct; identical to SEQ ID NO: 2656
  REGION 1..566: note = hemagglutinin__InfluenzaA__ACZ16700

SEQ ID NO: 3689 - protein, 566 aa, synthetic construct; identical to SEQ ID NO: 2656
  REGION 1..566: note = hemagglutinin__InfluenzaA__ACZ16710

SEQ ID NO: 3690 - protein, 566 aa, synthetic construct; identical to SEQ ID NO: 2656
  REGION 1..566: note = hemagglutinin__InfluenzaA__ACZ16720

SEQ ID NO: 3691 - protein, 566 aa, synthetic construct; identical to SEQ ID NO: 3399
  REGION 1..566: note = hemagglutinin__InfluenzaA__ACZ16730

SEQ ID NO: 3692 - protein, 566 aa, synthetic construct; identical to SEQ ID NO: 3399
  REGION 1..566: note = hemagglutinin__InfluenzaA__ACZ16740

SEQ ID NO: 3693 - protein, 566 aa, synthetic construct; identical to SEQ ID NO: 2656
  REGION 1..566: note = hemagglutinin__InfluenzaA__ACZ16750

SEQ ID NO: 3694 - protein, 566 aa, synthetic construct; identical to SEQ ID NO: 2656
  REGION 1..566: note = hemagglutinin__InfluenzaA__ACZ16760

SEQ ID NO: 3695 - protein, 566 aa, synthetic construct; identical to SEQ ID NO: 2849
  REGION 1..566: note = hemagglutinin__InfluenzaA__ACZ16770

SEQ ID NO: 3696 - protein, 566 aa, synthetic construct; identical to SEQ ID NO: 2656
  REGION 1..566: note = hemagglutinin__InfluenzaA__ACZ16780

SEQ ID NO: 3697 - protein, 566 aa, synthetic construct; identical to SEQ ID NO: 2656
  REGION 1..566: note = hemagglutinin__InfluenzaA__ACZ16790

SEQ ID NO: 3698 - protein, 566 aa, synthetic construct; identical to SEQ ID NO: 2656
  REGION 1..566: note = hemagglutinin__InfluenzaA__ACZ16800

SEQ ID NO: 3699 - protein, 566 aa, synthetic construct; identical to SEQ ID NO: 2656
  REGION 1..566: note = hemagglutinin__InfluenzaA__ACZ16810

SEQ ID NO: 3700 - protein, 566 aa, synthetic construct; identical to SEQ ID NO: 3331
  REGION 1..566: note = hemagglutinin__InfluenzaA__ACZ16820

SEQ ID NO: 3701 - protein, 566 aa, synthetic construct; identical to SEQ ID NO: 2656
  REGION 1..566: note = hemagglutinin__InfluenzaA__ACZ16830

SEQ ID NO: 3702 - protein, 566 aa, synthetic construct
  REGION 1..566: note = hemagglutinin__InfluenzaA__ACZ16840
MKAILVVLLYTFATANADTLCIGYHANNSTDTVDTVLEKNVTVTHSVNLLEDKHNGKLCKLRGVAPLHLGKCNIAGWILGNPECESLSTASSWSYIVETSSSDNGTCYPGDFIDYEELREQLSSVSSFERFEIFPKTSSWPNHDSNKGVTAACPHAGAKSFYKNLIWLVKKGNSYPKLSKSYINDKGKEVLVLWGIHHPSTSADQQSLYQNADAYVFVGSSRYSKKFKPEIAIRTKVRDQEGRMNYYWTLVEPGDKITFEATGNLVVPRYAFAMERNAGSGIIISDTPVHDCNTTCQTPKGAINTSLPFQNIHPITIGKCPKYVKSTKLRLATGLRNVPSIQSRGLFGAIAGFIEGGWTGMVDGWYGYHHQNEQGSGYAADLKSTQNAIDEITNKVNSVIEKMNTQFTAVGKEFNHLEKRIENLNKKVDDGFLDIWTYNAELLVLLENERTLDYHDSNVKNLYEKVRSQLKNNAKEIGNGCFEFYHKCDNTCMESVKNGTYDYPKYSEEAKLNREEIDGVKLESTRIYQILAIYSTVASSLVLVVSLGAISFWMCSNGSLQCRICI

SEQ ID NO: 3703 - protein, 566 aa, synthetic construct; identical to SEQ ID NO: 2656
  REGION 1..566: note = hemagglutinin__InfluenzaA__ACZ16850

SEQ ID NO: 3704 - protein, 566 aa, synthetic construct
  REGION 1..566: note = hemagglutinin__InfluenzaA__ACZ16860
MKAILVVLLYTFATANADTLCIGYHANNSTDTVDTVLEKNVTVTHSVNLLEDKHNGKLCKLRGVAPLHLGKCNIAGWILGNPECESLSTASSWSYIVETSSSDNGTCYPGDFIDYEELREQLSSVSSFERFEIFPKTSSWPNHDSNKGVTAACPHAGAKSFYKNLIWLVKKGNSYPKLSKSYINDKGKEVLVLWGIHHPSTSADQQSLYQNADAYVFVGSSRYSKKFKPEIAIRPKVRDQEGRMNYYWTLVEPGDKITFEATGNLVAPRYAFAMERNAGSGIIISDTPVHDCNTTCQTPKGAINTSLPFQNIHPITIGKCPKYVKSTKLRLATGLRNVPSIQSRGLFGAIAGFIEGGWTGMVDGWYGYHHQNEQGSGYAADLKSTQNAIDEITNKVNSVIEKMNTQFTAVGKEFNHLEKRIENLNKKVDDGFLDIWTYNAELLVLLENERTLDYHDSNVKNLYEKVRSQLKNNAKEIGNGCFEFYHKCDNTCMESVKNGTYDYPKYSEEAKLNREEIDGVKLESTRIYQILAIYSTVASSLVLVVSLGAISFWMCSNGSLQCRICI

SEQ ID NO: 3705 - protein, 566 aa, synthetic construct; identical to SEQ ID NO: 3399
  REGION 1..566: note = hemagglutinin__InfluenzaA__ACZ16870

SEQ ID NO: 3706 - protein, 566 aa, synthetic construct
  REGION 1..566: note = hemagglutinin__InfluenzaA__ACZ16880
MKAILVVLLYTFATANADTLCIGYHANNSTDTVDTVLEKNVTVTHSVNLLEDKHNGKLCKLRGVAPLHLGKCNIAGWILGNPECESLSTASSWSYIVETSSSDNGTCYPGDFIDYEELREQLSSVSSFERFEIFPKTSSWPNHDSNKGVTAACPHAGAKSFYKNLIWLVKKGNSYPKLSKSYINDKGKEVLVLWGIHHPSTSADQQSLYQNADAYVFVGSSRYSKKFKPEIAIRPKVRDQEGRMNYYWTLVEPGDKITFEATGNLVVPRYAFAMERNDGSGIIISDTPVHDCNTTCQTPKGAINTSLPFQNIHPITIGKCPKYVKSTKLRLATGLRNVPSIQSRGLFGAIAGFIEGGWTGMVDGWYGYHHQNEQGSGYAADLKSTQNAIDEITNKVNSVIEKMNTQFTAVGKEFNHLEKRIENLNKKVDDGFLDIWTYNAELLVLLENERTLDYHDSNVKNLYEKVRSQLKNNAKEIGNGCFEFYHKCNNTCMESVKNGTYDYPKYSEEAKLNREEIDGVKLESTRIYQILAIYSTVASSLVLVVSLGAISFWMCSNGSLQCRICI

SEQ ID NO: 3707 - protein, 566 aa, synthetic construct; identical to SEQ ID NO: 3404
  REGION 1..566: note = hemagglutinin__InfluenzaA__ACZ16890

SEQ ID NO: 3708 - protein, 566 aa, synthetic construct; identical to SEQ ID NO: 2656
  REGION 1..566: note = hemagglutinin__InfluenzaA__ACZ16900

SEQ ID NO: 3709 - protein, 566 aa, synthetic construct; identical to SEQ ID NO: 2656
  REGION 1..566: note = hemagglutinin__InfluenzaA__ACZ16910

SEQ ID NO: 3710 - protein, 566 aa, synthetic construct; identical to SEQ ID NO: 2656
  REGION 1..566: note = hemagglutinin__InfluenzaA__ACZ16920

SEQ ID NO: 3711 - protein, 566 aa, synthetic construct; identical to SEQ ID NO: 2669
  REGION 1..566: note = hemagglutinin__InfluenzaA__ACZ16930

SEQ ID NO: 3712 - protein, 566 aa, synthetic construct; identical to SEQ ID NO: 2669
  REGION 1..566: note = hemagglutinin__InfluenzaA__ACZ16940

SEQ ID NO: 3713 - protein, 566 aa, synthetic construct; identical to SEQ ID NO: 2656
  REGION 1..566: note = hemagglutinin__InfluenzaA__ACZ16950

SEQ ID NO: 3714 - protein, 566 aa, synthetic construct; identical to SEQ ID NO: 2911
  REGION 1..566: note = hemagglutinin__InfluenzaA__ACZ16960

SEQ ID NO: 3715 - protein, 566 aa, synthetic construct
  REGION 1..566: note = hemagglutinin__InfluenzaA__ACZ16970
MKAILVVLLYTFATANADTLCIGYHANNSTDTVDTVLEKNVTVTHSVNLLEDKHNGKLCKLRGVAPLHLGKCNIAGWILGNPECESLSTASSWSYIVETSSSDNGTCYPGDFIDYEELREQLSSVSSFERFEIFPKTSSWPNHDSNKGVTAACPHAGAKSFYKNLIWLVKEGNSYPKLSKSYINDKGKEVLVLWGIHHPSTSADQQSLYQNADAYVFVGTSRYSKKFKPEIAIRPKVRDQEGRMNYYWTLVEPGDKITFEATGNLVVPRYAFAMERNAGSGIIISDTPVHDCNTTCQTPKGAINTSLPFQNIHPITIGKCPKYVKSTKLRLATGLRNVPSIQSRGLFGAIAGFIEGGWTGMVDGWYGYHHQNEQGSGYAADLKSTQNAIDEITNKVNSVIEKMNTQFTAVGKEFNHLEKRIENLNKKVDDGFLDIWTYNAELLVLLENERTLDYHDSNVKNLYEKVRSQLKNNAKEIGNGCFEFYHKCDNTCMESVKNGTYDYPKYSEEAKLNREEIDGVKLESTRIYQILAIYSTVASSLVLVVSLGAISFWMCSNGSLQCRICI

SEQ ID NO: 3716 - protein, 566 aa, synthetic construct; identical to SEQ ID NO: 2669
  REGION 1..566: note = hemagglutinin__InfluenzaA__ACZ16980

SEQ ID NO: 3717 - protein, 566 aa, synthetic construct; identical to SEQ ID NO: 2669
  REGION 1..566: note = hemagglutinin__InfluenzaA__ACZ17000

SEQ ID NO: 3718 - protein, 566 aa, synthetic construct
  REGION 1..566: note = hemagglutinin__InfluenzaA__ACZ17010
MKAILVVLLYTFATANADTLCIGYHANNSTDTVDTVLEKNVTVTHSVNLLEDKHNGKLCKLRGVAPLHLGKCNIAGWILGNPECESLSTASSWSYIVETSSSDNGTCYPGDFIDYEELREQLSSVSSFERFEIFPKTSSWPNHDSNKGVTAACPHAGAKSFYKNLIWLVKKGNSYPKLSKSYINDKGKEVLVLWGIHHPSTSADQQSLYQNADAYVFVGSSKYSKKFKPEIAIRPKVRDQEGRMNYYWTLVEPGDKITFEATGNLVVPRYAFAMERNAGSGIIISDTPVHDCNTTCQTPKGAINTSLPFQNIHPITIGKCPKYVKSTKLRLATGLRNVPSIQSRGLFGAIAGFIEGGWTGMVDGWYGYHHQNEQGSGYAADLKSTQNAIDKITNKVNSVIEKMNTQFTAVGKEFNHLEKRIENLNKKVDDGFLDIWTYNAELLVLLENERTLDYHDSNVKNLYEKVRSQLKNNAKEIGNGCFEFYHKCDNTCMESVKNGTYDYPKYSEEAKLNREEIDGVKLESTRIYQILAIYSTVASSLVLVVSLGAISFWMCSNGSLQCRICI

SEQ ID NO: 3719 - protein, 566 aa, synthetic construct; identical to SEQ ID NO: 2669
  REGION 1..566: note = hemagglutinin__InfluenzaA__ACZ17020

SEQ ID NO: 3720 - protein, 566 aa, synthetic construct
  REGION 1..566: note = hemagglutinin__InfluenzaA__ACZ17030
MKATLVVLLYTFATANADTLCIGYHANNSTDTVDTVLEKNVTVTHSVNLLEDKHNGKLCKLRGVAPLHLGKCNIAGWILGNPECESLSTASSWSYIVEASSSDNGTCYPGDFIDYEELREQLSSVSSFERFEIFPKTSSWPNHDSNKGVTAACPHAGAKSFYKNLIWLVKKGNSYPKLSKSYINDKGKEVLVLWGIHHPSTSADQQSLYQNADAYVFVGTSRYSKKFKPEIAIRPKVRDQEGRMNYYWTLVEPGDKITFEATGNLVVPRYAFAMERNAGSGIIISDTPVHDCNTTCQTPKGAINTSLPFQNIHPITIGKCPKYVKSTKLRLATGLRNVPSIQSRGLFGAIAGFIEGGWTGMVDGWYGYHHQNEQGSGYAADLKSTQNAIDEITNKVNSVIEKMNTQFTAVGKEFNHLEKRIENLNKKVDDGFLDIWTYNAELLVLLENERTLDYHDSNVKNLYEKVRSQLKNNAKEIGNGCFEFYHKCDNTCMESVKNGTYDYPKYSEEAKLNREEIDGVKLESTRIYQILAIYSTVASSLVLVVSLGAISFWMCSNGSLQCRICI

SEQ ID NO: 3721 - protein, 566 aa, synthetic construct
  REGION 1..566: note = hemagglutinin__InfluenzaA__ACZ17040
MKAILVVLLYTFATANADTLCIGYHANNSTDTVDTVLEKNVTVTHSVNLLEDKHNGKLCKLRGVAPLHLGKCNIAGWILGNPECESLSTASSWSYIVETSSSDNGTCYPGDFIDYEELREQLSSVSSFERFEIFPKTSSWPNHDSNKGVTAACPHAGAKSFYKNLIWLVKKGNSYPKLSKSYINDKGKEVLVLWGIHHPSTSADQQSLYQNADAYVFVGTSRYSKKFKPEIAIRPKVRDQEGRMNYYWTLVEPGDKITFEATGNLVVPRYAFAMERNAGSGIIISDTPVHDCNTTCQTPKGAINTSLPFQNIHPITIGKCPKYVKSTKLRLATGLRNVPSIQSRGLFGAIAGFIEGGWTGMVDGWYGYHHQNEQGSGYAADLKSTQNAIDEITNKVNSVIEKMNTQFTAVGKEFNHLEKRIENLNKKVDDGFLDIWTYNAELLVLLENERTLDYHDSNVKNLYEKVRSQLKNNAKEIGNGCFEFYHKCDNTCMESVKNGTYDYPKYSKEAKLNREEIDGVKLESTRIYQILAIYSTVASSLVLVVSLGAISFWMCSNGSLQCRICI

SEQ ID NO: 3722 - protein, 566 aa, synthetic construct; identical to SEQ ID NO: 2669
  REGION 1..566: note = hemagglutinin__InfluenzaA__ACZ17050

SEQ ID NO: 3723 - protein, 566 aa, synthetic construct; identical to SEQ ID NO: 2669
  REGION 1..566: note = hemagglutinin__InfluenzaA__ACZ17060

SEQ ID NO: 3724 - protein, 566 aa, synthetic construct; identical to SEQ ID NO: 2669
  REGION 1..566: note = hemagglutinin__InfluenzaA__ACZ17070

SEQ ID NO: 3725 - protein, 566 aa, synthetic construct; identical to SEQ ID NO: 2849
  REGION 1..566: note = hemagglutinin__InfluenzaA__ACZ17080

SEQ ID NO: 3726 - protein, 566 aa, synthetic construct
  REGION 1..566: note = hemagglutinin__InfluenzaA__ACZ17090
MKAILVVLLYTFATANADTLCIGYHANNSTDTVDTVLEKNVTVTHSVNLLGDKHNGKLCKLRGVAPLHLGKCNIAGWILGNPECESLSTASSWSYIVETSSSDNGTCYPGDFIDYEELREQLSSVSSFERFEIFPKTSSWPNHDSNKGVTAACPHAGAKSFYKNLIWLVKKGNSYPKLSKSYINDKGKEVLVLWGIHHPSTSADQQSLYQNADAYVFVGTSRYSKKFKPEIAIRPKVRDQEGRMNYYWTLVEPGDKITFEATGNLVVPRYAFAMERNAGSGIIISDTPVHDCNTTCQTPKGAINTSLPFQNIHPITIGKCPKYVKSTKLRLATGLRNVPSIQSRGLFGAIAGFIEGGWTGMVDGWYGYHHQNEQGSGYAADLKSTQNAIDEITNKVNSVIEKMNTQFTAVGKEFNHLEKRIENLNKKVDDGFLDIWTYNAELLVLLENERTLDYHDSNVKNLYEKVKSQLKNNAKEIGNGCFEFYHKCDNTCMESVKNGTYDYPKYSEEAKLNREEIDGVKLESTRIYQILAIYSTVASSLVLVVSLGAISFWMCSNGSLQCRICI

SEQ ID NO: 3727 - protein, 566 aa, synthetic construct; identical to SEQ ID NO: 2656
  REGION 1..566: note = hemagglutinin__InfluenzaA__ACZ17100

SEQ ID NO: 3728 - protein, 566 aa, synthetic construct
  REGION 1..566: note = hemagglutinin__InfluenzaA__ACZ17110
MKAILVVLLYTFATANADTLCIGYHANNSTDTVDTVLEKNVTVTHSVNLLEDKHNGKLCKLRGVAPLHLGKCNIAGWILGNPECESLSTASSWSYIVETSSSDNGTCYPGDFIDYEELREQLSSVSSFERFEIFPKTSSWPNHDSNKGVTAACPHAGAKSFYKNLIWLVKKGNSYPELSKSYINDKGKEVLVLWGIHHPSTSADQQSLYQNADAYVFVGTSRYSKKFKPEIAIRPKVRDQEGRMNYYWTLVEPGDKITFEATGNLVVPRYAFAMERNAGSGIIISDTPVHDCNTTCQTPKGAINTSLPFQNIHPITIGKCPKYVKSTKLRLATGLRNVPSIQSRGLFGAIAGFIEGGWTGMVDGWYGYHHQNEQGSGYAADLKSTQNAIDEITNKVNSVIEKMNTQFTAVGKEFNHLEKRIENLNKKVDDGFLDIWTYNAELLVLLENERTLDYHDSNVKNLYEKVRSQLKNNAKEIGNGCFEFYHKCDNTCMESVKNGTYDYPKYSEEAKLNREEIDGVKLESTRIYQILAIYSTVASSLVLVVSLGAISFWMCSNGSLQCRICI

SEQ ID NO: 3729 - protein, 566 aa, synthetic construct
  REGION 1..566: note = hemagglutinin__InfluenzaA__ACZ17120
MKAILVVLLYTFATANADTLCIGYHANNSTDTVDTVLEKNVTVTHSVNLLEDKHNGKLCKLRGVAPLHLGKCNIAGWILGNPECESLSTASSWSYIVETSSSDNGTCYPGDFIDYEELREQLSSVSSFERFEIFPKTSSWPNHDSNKGVTAACPHAGAKSFYKNLIWLVKKGNSYPKLSKSYINDKGKEVLVLWGIHHPSTSADQQSLYQNADAYVFVGTSRYSKKFKPEIAIRPKVRDQEGRMNYYWTLVEPGDKITFEATGNLVVPRYAFAMERNAGSGIIISDTPVHDCNTTCQTPKGAINTSLPFQNIHPITIGKCPKYVKSTKLRLATGLRNVPSIQSRGLFGAIAGFIEGGWTGMVDGWYGYHHQNEQGSGYAADLKSTQNAIDEITNKVNSVIEKMNTQFTAVGKEFNHLEKRIENLNKKVDDGFLDIWTYNAELLVLLENERTLDYHDSNVKNLYEKVRSQLKTNAKEIGNGCFEFYHKCDNTCMESVKNGTYDYPKYSEEAKLNREEIDGVKLESTRIYQILAIYSTVASSLVLVVSLGAISFWMCSNGSLQCRICI

SEQ ID NO: 3730 - protein, 566 aa, synthetic construct
  REGION 1..566: note = hemagglutinin__InfluenzaA__ACZ17130
MKAILVVLLYTFATANADTLCIGYHANNSTDTVDTVLEKNVTVTHSVNLLEDKHNGKLCKLRGVAPLHLGKCNIAGWILGNPECESLSTASSWSYIVETSSSDNGTCYPGDFIDYEELREQLSSVSSFERFEIFPKTSSWPNHDSNKGVTAACPHAGAKSFYKNLIWLVKKGNSYPKLSKSYINDKGKEVLVLWGIHHPSTSADQQSLYQNADAYVFVGTSRYSKKFKPEIAIRPKVRDQEGRMNYYWTLVEPGDKITFEATGNLVVPRYAFAMERNAGSGIIISDTPVHDCNTTCQTPKGAINTSLPFQNIHPITIGKCPKYVKSTKLRLATGLRNVPSIQSRGLFGAIAGFIEGGWTGMVDGWYGYHHQNEQGSGYAADLKSTQNAIDEITNKVNSVIEKMNAQFTAVGKEFNHLEKRIENLNKKVDDGFLDIWTYNAELLVLLENERTLDYHDSNVKNLYEKVRSQLKNNAKEIGNGCFEFYHKCDNTCMESVKNGTYDYPKYSEEAKLNREEIDGVKLESTRIYQILAIYSTVASSLVLVVSLGAISFWMCSNGSLQCRICI

SEQ ID NO: 3731 - protein, 566 aa, synthetic construct; identical to SEQ ID NO: 3467
  REGION 1..566: note = hemagglutinin__InfluenzaA__ACZ17140

SEQ ID NO: 3732 - protein, 566 aa, synthetic construct; identical to SEQ ID NO: 3298
  REGION 1..566: note = hemagglutinin__InfluenzaA__ACZ17150

SEQ ID NO: 3733 - protein, 566 aa, synthetic construct; identical to SEQ ID NO: 3298
  REGION 1..566: note = hemagglutinin__InfluenzaA__ACZ17160

SEQ ID NO: 3734 - protein, 566 aa, synthetic construct; identical to SEQ ID NO: 3298
  REGION 1..566: note = hemagglutinin__InfluenzaA__ACZ17170

SEQ ID NO: 3735 - protein, 566 aa, synthetic construct
  REGION 1..566: note = hemagglutinin__InfluenzaA__ACZ17190
MKAILVVLLYTFATANADTLCIGYHANNSTDTVDTVLEKNVTVTHSVNLLEDKHNGKLCKLRGVAPLHLGKCNIAGWILGNPECESLSTASSWSYIVETSSSDNGTCYPGDFIDYEELREQLSSVSSFERFEIFPKTSSWPNHDSNKGVTAACPHAGAKSFYKNLIWLVKKGNSYPKLSKSYINDKGKEVLVLWGIHHPSTSADQQSLYQNADAYVFVGTSRYSKKFKPEIAIRPKVRDQEGRMNYYWTLVEPGDKITFEATGNLVVPRYAFAMERNAGSGIIISDTPVHDCSTTCQTPEGAINTSLPFQNIHPITIGKCPKYVKSTKLRLATGLRNVPSIQSRGLFGAIAGFIEGGWTGMVDGWYGYHHQNEQGSGYAADLKSTQNAIDEITNKVNSVIEKMNTQFTAVGKEFNHLEKRIENLNKKVDDGFLDIWTYNAELLVLLENERTLDYHDSNVKNLYEKVRSQLKNNAKEIGNGCFEFYHKCDNTCMESVKNGTYDYPKYSEEAKLNREEIDGVKLESTRIYQILAIYSTVASSLVLVVSLGAISFWMCSNGSLQCRICI

SEQ ID NO: 3736 - protein, 566 aa, synthetic construct; identical to SEQ ID NO: 3735
  REGION 1..566: note = hemagglutinin__InfluenzaA__ACZ17200

SEQ ID NO: 3737 - protein, 566 aa, synthetic construct; identical to SEQ ID NO: 2669
  REGION 1..566: note = hemagglutinin__InfluenzaA__ACZ17220

SEQ ID NO: 3738 - protein, 566 aa, synthetic construct
  REGION 1..566: note = hemagglutinin__InfluenzaA__ACZ17230
MKAILVVLLYTFATANADTLCIGYHANNSTDTVDTVLEKNVTVTHSVNLLEDKHNGKLCKLRGVAPLHLGKCNIAGWILGNPECESLSTASSWSYIVETSSSDNGTCYPGDFIDYEELKEQLSSVSSFERFEIFPKTSSWPNHDSNKGVTAACPHAGAKSFYKNLIWLVKKGNSYPKLSKSYINDKGKEVLVLWGIHHPSTSADQQSLYQNADAYVFVGTSRYSKKFKPEIAIRPKVRDQEGRMNYYWTLVEPGDKITFEATGNLVVPRYAFAMERNAGSGIIISDTPVHDCNTTCQTPKGAINTSLPFQNIHPITIGKCPKYVKSTKLRLATGLRNVPSIQSRGLFGAIAGFIEGGWTGMVDGWYGYHHQNEQGSGYAADLKSTQNAIDEITNKVNSVIEKMNTQFTAVGKEFNHLEKRIENLNKKVDDGFLDIWTYNAELLVLLENERTLDYHDSNVKNLYEKVRSQLKNNAKEIGNGCFEFYHKCDNTCMESVKNGTYDYPKYSEEAKLNREEIDGVKLESTRIYQILAIYSTVASSLVLVVSLGAISFWMCSNGSLQCRICI

SEQ ID NO: 3739 - protein, 566 aa, synthetic construct; identical to SEQ ID NO: 2669
  REGION 1..566: note = hemagglutinin__InfluenzaA__ACZ17240

SEQ ID NO: 3740 - protein, 566 aa, synthetic construct; identical to SEQ ID NO: 2669
  REGION 1..566: note = hemagglutinin__InfluenzaA__ACZ17250

SEQ ID NO: 3741 - protein, 566 aa, synthetic construct; identical to SEQ ID NO: 2669
  REGION 1..566: note = hemagglutinin__InfluenzaA__ACZ17260

SEQ ID NO: 3742 - protein, 566 aa, synthetic construct
  REGION 1..566: note = hemagglutinin__InfluenzaA__ACZ17270
MKAILVVLLYTFATANADTLCIGYHANNSTDTVDTVLEKNVTVTHSVNLLEDKHNGKLCKLRGVAPLHLGRCNIAGWILGNPECESLSTASSWSYIVETSSSDNGTCYPGDFIDYEELREQLSSVSSFERFEIFPKTSSWPNHDSNKGVTAACPHAGAKSFYKNLIWLVKKGNSYPKLSKSYINDKGKEVLVLWGIHHPSTSADQQSLYQNADAYVFVGTSRYSKKFKPEIAIRPKVRDQEGRMNYYWTLVEPGDKITFEATGNLVVPRYAFAMERNAGSGIIISDTPVHDCNTTCQTPKGAINTSLPFQNIHPITIGKCPKYVKSTKLRLATGLRNVPSIQSRGLFGAIAGFIEGGWTGMVDGWYGYHHQNEQGSGYAADLKSTQNAIDEITNKVNSVIEKMNTQFTAVGKEFNHLEKRIENLNKKVDDGFLDIWTYNAELLVLLENERTLDYHDSNVKKLYEKVRSQLKNNAKEIGNGCFEFYHKCDNTCMESVKNGTYDYPKYSEEAKLNREEIDGVKLESTRVYQILAIYSTVASSLVLVVSLGAISFWMCSNGSLQCRICI

SEQ ID NO: 3743 - protein, 566 aa, synthetic construct; identical to SEQ ID NO: 2849
  REGION 1..566: note = hemagglutinin__InfluenzaA__ACZ17290

SEQ ID NO: 3744 - protein, 566 aa, synthetic construct; identical to SEQ ID NO: 2849
  REGION 1..566: note = hemagglutinin__InfluenzaA__ACZ17300

SEQ ID NO: 3745 - protein, 566 aa, synthetic construct; identical to SEQ ID NO: 2849
  REGION 1..566: note = hemagglutinin__InfluenzaA__ACZ17310

SEQ ID NO: 3746 - protein, 566 aa, synthetic construct; identical to SEQ ID NO: 2669
  REGION 1..566: note = hemagglutinin__InfluenzaA__ACZ17398

SEQ ID NO: 3747 - protein, 566 aa, synthetic construct; identical to SEQ ID NO: 2669
  REGION 1..566: note = hemagglutinin__InfluenzaA__ACZ17408

SEQ ID NO: 3748 - protein, 566 aa, synthetic construct; identical to SEQ ID NO: 2669
  REGION 1..566: note = hemagglutinin__InfluenzaA__ACZ17418

SEQ ID NO: 3749 - protein, 566 aa, synthetic construct
  REGION 1..566: note = hemagglutinin__InfluenzaA__ACZ17438
MKAILVVLLYTFATANADTLCIGYHANNSTDTVDTVLEKNVTVTHSVNLLEDKHNGKLCKLRGVAPLHLGKCNIAGWILGNPECESLSTASSWSYIVETSSSDNGTCYPGDFIDYEELREQLSSVSSFERFEIFPKTSSWPNHDSNKGVTAACPHAGAKSFYKNLIWLVKKGNSYPKLSKSYINDKGKEVLVLWGIHHPSTSADQQSLYQNADSYVFVGSSRYSKKFKPEIAIRPKVRDQEGRMNYYWTLVEPGDKITFEATGNLVVPRYAFAMERNAGSGIIISDTPVHDCNTTCQTPKGAINTSLPFQNIHPITIGKCPKYVKSTKLRLATGLRNVPSIQSRGLFGAIAGFIEGGWTGMVDGWYGYHHQNEQGSGYAADLKSTQNAIDEITNKVNSVIEKMNTQFTAVGKEFNHLEKRIENLNKKVDDGFLDIWTYNAELLVLLENERTLDYHDSNVKNLYEKVRSQLKNNAKEIGNGCFEFYHKCDNTCMESVKNGTYDYPKYSEEAKLNREEIDGVKLESTRIYQILAIYSTVASSLVLVVSLGAISFWMCSNGSLQCRICI

SEQ ID NO: 3750 - protein, 566 aa, synthetic construct; identical to SEQ ID NO: 2656
  REGION 1..566: note = hemagglutinin__InfluenzaA__ACZ17448

SEQ ID NO: 3751 - protein, 566 aa, synthetic construct; identical to SEQ ID NO: 2669
  REGION 1..566: note = hemagglutinin__InfluenzaA__ACZ17458

SEQ ID NO: 3752 - protein, 566 aa, synthetic construct; identical to SEQ ID NO: 2656
  REGION 1..566: note = hemagglutinin__InfluenzaA__ACZ17478

SEQ ID NO: 3753 - protein, 566 aa, synthetic construct; identical to SEQ ID NO: 2669
  REGION 1..566: note = hemagglutinin__InfluenzaA__ACZ17488

SEQ ID NO: 3754 - protein, 566 aa, synthetic construct
  REGION 1..566: note = hemagglutinin__InfluenzaA__ACZ18240
MKAILVVLLYTFATANADTLCIGYHANNSTDTVDTVLEKNVTVTHSVNLLEDKHNGKLCKLRGVAPLHLGKCNIAGWILGNPECESLSTTSSWSYIVETSSSDNGTCYPGDFIDYEELREQLSSVSSFERFEIFPKTSSWPNHDPNKGVTAACPHAGAKSFYKNLIWLVKKGNSYPKLSKSYINDKGKEVLVLWGIHHPSTSADQQSLYQNADAYVFVGTSRYSKKFKPEIAIRPKVRDQEGRMNYYWTLVEPGDKITFEATGNLVVPRYAFAMERNAGSGIIISDTPVHDCNTTCQTPKGAINTSLPFQNIHPITIGKCPKYVKSTKLRLATGLRNVPSIQSRGLFGAIAGFIEGGWTGMVDGWYGYHHQNEQGSGYAADLKSTQNAIDEITNKVNSVIEKMNTQFTAVGKEFNHLEKRIENLNKKVDDGFLDIWTYNAELLVLLENERTLDYHDSNVKNLYEKVRSQLKNNAKEIGNGCFEFYHKCDNTCMESVKNGTYDYPKYSEEAKLNREEIDGVKLESTRIYQILAIYSTVASSLVLVVSLGAISFWMCSNGSLQCRICI

SEQ ID NO: 3755 - protein, 566 aa, synthetic construct; identical to SEQ ID NO: 2669
  REGION 1..566: note = hemagglutinin__InfluenzaA__ACZ18241

SEQ ID NO: 3756 - protein, 566 aa, synthetic construct
  REGION 1..566: note = hemagglutinin__InfluenzaA__ACZ27800
MKAILVVLLYTFATANADTLCIGYHANNSTDTVDTVLEKNVTVTHSVNLLEDKHNGKLCKLRGVAPLHLGKCNIAGWILGNPECESLSTASSWSYIVETSSSDNGTCYPGDFIDYEELREQLSSVSSFERFEIFPKTSSWPNHDSNKGVTAACPHAGAKSFYKNLIWLVKKGNSYPKLSKSYINDKGKEVLVLWGIHHPSTSADQQSLYQNADAYVFVGSSRYSKEFKPEIAIRPKVRGQEGRMNYYWTLVEPGDKITFEATGNLVVPRYAFAMERNAGSGIIISDTPVHDCNTTCQTPKGAINTSLPFQNIHPITIGKCPKYVKSTKLRLATGLRNVPSIQSRGLFGAIAGFIEGGWTGMVDGWYGYHHQNEQGSGYAADLKSTQNAIDEITNKVNSVIEKMNTQFTAVGKEFNHLEKRIENLNKKVDDGFLDIWTYNAELLVLLENERTLDYHDSNVKNLYEKVRSQLKNNAKEIGNGCFEFYHKCDNTCMESVKNGTYDYPKYSEEAKLNREEIDGVKLESTRIYQILAIYSTVASSLVLVVSLGAISFWMCSNGSLQCRICI

SEQ ID NO: 3757 - protein, 566 aa, synthetic construct; identical to SEQ ID NO: 2669
  REGION 1..566: note = hemagglutinin__InfluenzaA__ACZ27810

SEQ ID NO: 3758 - protein, 566 aa, synthetic construct; identical to SEQ ID NO: 2669
  REGION 1..566: note = hemagglutinin__InfluenzaA__ACZ27820

SEQ ID NO: 3759 - protein, 566 aa, synthetic construct; identical to SEQ ID NO: 2669
  REGION 1..566: note = hemagglutinin__InfluenzaA__ACZ27830

SEQ ID NO: 3760 - protein, 566 aa, synthetic construct; identical to SEQ ID NO: 3022
  REGION 1..566: note = hemagglutinin__InfluenzaA__ACZ27840

SEQ ID NO: 3761 - protein, 566 aa, synthetic construct; identical to SEQ ID NO: 2656
  REGION 1..566: note = hemagglutinin__InfluenzaA__ACZ45006

SEQ ID NO: 3762 - protein, 566 aa, synthetic construct
  REGION 1..566: note = hemagglutinin__InfluenzaA__ACZ45007
MKAILVVLLYTFATANADTLCIGYHANNSTDTVDTVLEKNVTVTHSVNLLEDKHNGKLCKLRGVAPLHLGKCNIAGWILGNPECESLSTASSWSYIVETSSSDNGTCYPGDFIDYEELREQLSSVSSFERFEIFPKTSSWPNHDSNKGVTAACPHAGAKSFYKNLIWLVKKGNSYPKLSKSYINDKGKEVLVLWGIHHPSTSADQQSLYQNADAYVFVGTSRYSKKFKPEIAIRPKVRDQEGRMNYYWTLVEPGDKITFEATGNLVVPRYAFAMERNAGSGIIISDTPVHDCNTTCQTPKGAINTSLPFQNIHPITIGKCPKYVKSTKLRLATGLRNVPSIQSRGLFGAIAGFIEGGWTGMVDGWYGYHHQNEQGSGDAADLKSTQNAIDEITNKVNSVIEKMNTQFTAVGKEFNHLEKRIENLNKKVDDGFLDIWTYNAELLVLLENERTLDYHDSNVKNLYEKVRSQLKNNAKEIGNGCFEFYHKCDNTCMESVKNGTYDYPKYSEEAKLNREEIDGVKLESTRIYQILAIYSTVASSLVLVVSLGAISFWMCSNGSLQCRICI

SEQ ID NO: 3763 - protein, 566 aa, synthetic construct; identical to SEQ ID NO: 3022
  REGION 1..566: note = hemagglutinin__InfluenzaA__ACZ45008

SEQ ID NO: 3764 - protein, 566 aa, synthetic construct; identical to SEQ ID NO: 3022
  REGION 1..566: note = hemagglutinin__InfluenzaA__ACZ45009

SEQ ID NO: 3765 - protein, 566 aa, synthetic construct; identical to SEQ ID NO: 2911
  REGION 1..566: note = hemagglutinin__InfluenzaA__ACZ45010

SEQ ID NO: 3766 - protein, 566 aa, synthetic construct; identical to SEQ ID NO: 2669
  REGION 1..566: note = hemagglutinin__InfluenzaA__ACZ45012

SEQ ID NO: 3767 - protein, 566 aa, synthetic construct
  REGION 1..566: note = hemagglutinin__InfluenzaA__ACZ45013
MKAILVVLLYTFATANADTLCIGYHANNSTDTVDTVLEKNVTVTHSVNLLEDKHNGKLCKLRGVAPLHLGKCNIAGWILGNPECESLSTASSWSYIVETSSSDNGTCYPGDFIDYEELREQLSSVSSFERFEIFPKTSSWPNHDSSKGVTAACPHAGAKSFYKNLIWLVKKGNSYPKLSKSYINDKGKEVLVLWGIHHPSTSADQQSLYQNADAYVFVGTSRYSKKFKPEIAIRPKVREQEGRMNYYWTLVEPGDKITFEATGNLVVPRYAFAMERNAGSGIIISDTPVHDCNTTCQTPKGAINTSLPFQNIHPITIGKCPKYVKSTKLRLATGLRNVPSIQSRGLFGAIAGFIEGGWTGMVDGWYGYHHQNEQGSGYAADLKSTQNAIDEITNKVNSVIEKMNTQFTAVGKEFNHLEKRIENLNKKVDDGFLDIWTYNAELLVLLENERTLDYHDSNVKNLYEKVRSQLKNNAKEIGNGCFEFYHKCDNTCMESVKNGTYDYPKYSEEAKLNREEIDGVKLESTRIYQILAIYSTVASSLVLVVSLGAISFWMCSNGSLQCRICI

SEQ ID NO: 3768 - protein, 566 aa, synthetic construct; identical to SEQ ID NO: 2669
  REGION 1..566: note = hemagglutinin__InfluenzaA__ACZ45014

SEQ ID NO: 3769 - protein, 566 aa, synthetic construct; identical to SEQ ID NO: 2669
  REGION 1..566: note = hemagglutinin__InfluenzaA__ACZ45016

SEQ ID NO: 3770 - protein, 566 aa, synthetic construct
  REGION 1..566: note = hemagglutinin__InfluenzaA__ACZ45028
MKAILVVLLYTFATANADTLCIGYHANNSTDTVDTVLEKNVTVTHSVNLLEDKHNGKLCKLRGVAPLHLGKCNIAGWILGNPECESLSTASSWSYIVETSSSDNGTCYPGDFIDYEELREQLSSVSSFERFEIFPKTSSWPNHDSNKGVTAACPHAGAKSFYKNLIWLVKKGNSYPKLSKSYINDKGKEVLVLWGIHHPSTSADQQSLYQNADAYVFVGTSRYSKKFKPEIAIRPKVRDQEGRMNYYWTLVEPGDKITFEATGNLVVPRYAFAMERNAGSGIIISDTPVHDCNTTCQTPKGAINTSLPFQNIHPITIGKCPKYVKSTKLRLATGLRNIPSIQSRGLFGAIAGFIEGGWTGMVDGWYGYHHQNEQGSGYAADLKSTQNAIDEITNKVNSVIEKMNTQFTAVGKEFNHLEKRIENLNKKVDDGFLDIWTYNAELLVLLENERTLDYHDSNVKNLYEKVRSQLKNNAKEIGNGCFEFYHKCDNTCMESVKNGTYDYPKYSEEAKLNREEIDGVKLESTRIYQILAIYSTVASSLVLVVSLGAISFWMCSNGSLQCRICI

SEQ ID NO: 3771 - protein, 566 aa, synthetic construct
  REGION 1..566: note = hemagglutinin__InfluenzaA__ACZ45029
MKAILVVLLYTFATANADTLCIGYHANNSTDTVDTVLEKNVTVTHSVNLLEDKHNGKLCKLRGVAPLHLGKCNIAGWILGNPECESLSTASSWSYIVETSSSGNGTCYPGDFIDYEELREQLSSVSSFERFEIFPKTSSWPNHDSNKGVTAACPHAGAKSFYKNLIWLVKKGNSYPKLSKSYINDKGKEVLVLWGIHHPSTSADQQSLYQNADAYVFVGTSRYSKKFKPEIAIRPKVRDQEGRMNYYWTLVEPGDKITFEATGNLVVPRYAFAMERNAGSGIIISDTPVHDCNTTCQTPKGAINTSLPFQNIHPITIGKCPKYVKSTKLRLATGLRNVPSIQSRGLFGAIAGFIEGGWTGMVDGWYGYHHQNEQGSGYAADLKSTQNAIDEITNKVNSVIEKMNTQFTAVGKEFNHLEKRIENLNKKVDDGFLDIWTYNAELLVLLENERTLDYHDSNVKNLYEKVRSQLKNNAKEIGNGCFEFYHKCDNTCMESVKNGTYDYPKYSEEAKLNREEIDGVKLESTRIYQILAIYSTVASSLVLVVSLGAISFWMCSNGSLQCRICI

SEQ ID NO: 3772 - protein, 566 aa, synthetic construct
  REGION 1..566: note = hemagglutinin__InfluenzaA__ACZ45030
MKAILVVLLYTFATANADTLCIGYHANNSTDTVDTVLEKNVTVTHSVNLLEDKHNGKLCKLRGVAPLHLGKCNIAGWILGNPECESLSTASSWSYIVETSSSDNGTCYPGDFIDYEELREQLSSVSSFERFEIFPKTSSWPNHDSNKGVTAACPHAGAKSFYKNLIWLVKKGNSYPKLSKSYINDKGKEVLVLWGIHHPSTSADQQSLYQNADAYVFVGTSTYSKKFKPEIAIRPKVRDQEGRMNYYWTLVEPGDKITFEATGNLVVPRYAFTMERNAGSGIIISDTPVHDCNTTCQTPKGAINTSLPFQNIHPITIGKCPKYVKSTKLRLATGLRNIPSIQSRGLFGAIAGFIEGGWTGMVDGWYGYHHQNEQGSGYAADLKSTQNAIDEITNKVNSVIEKMNTQFTAVGKEFNHLEKRIENLNKKVDDGFLDIWTYNAELLVLLENERTLDYHDSNVKNLYEKVRSQLKNNAKEIGNGCFEFYHKCDNTCMESVKNGTYDYPKYSEEAKLNREEIDGVKLESTRIYQILAIYSTVASSLVLVVSLGAISFWMCSNGSLQCRICI

SEQ ID NO: 3773 - protein, 566 aa, synthetic construct
  REGION 1..566: note = hemagglutinin__InfluenzaA__ACZ45031
MKAILVVLLYTFATANADTLCIGYHANNSTDTVDTVLEKNVTVTHSVNLLEDKHNGKLCKLRGVAPLHLGKCNIAGWILGNPECESLSTASSWSYIVETSSSDNGTCYPGDFIDYEELREQLSSVSSFERFEIFPKTSSWPNHDSNKGVTAACPHAGAKSFYKNLIWLVKKGNSYPKLSKSYINDKGKEVLVLWGIHHPSTSADQQSLYQNADAYVFVGTSRYSKKFKPEIAIRPKVREQEGRMNYYWTLVEPGDKITFEATGNLVVPRYAFTMERNVGSGIIISDTPVHDCNTTCQTPKGAINTSLPFQNIHPITIGKCPKYVKSTKLRLATGLRNVPSIQSRGLFGAIAGFIEGGWTGMVDGWYGYHHQNEQGSGYAADLKSTQNAIDEITNKVNSVIEKMNTQFTAVGKEFNHLEKRIENLNKKVDDGFLDIWTYNAELLVLLENERTLDYHDSNVKNLYEKVRSQLKNNAKEIGNGCFEFYHKCDNTCMESVKNGTYDYPKYSEEAKLNREEIDGVKLESTRIYQILAIYSTVASSLVLVVSLGAISFWMCSNGSLQCRICI

SEQ ID NO: 3774 - protein, 566 aa, synthetic construct
  REGION 1..566: note = hemagglutinin__InfluenzaA__ACZ45034
MKAILVVLLYTFATANADTLCIGYHANNSTDTVDTVLEKNVTVTHSVNLLEDKHNGKLCKLRGVAPLHLGKCNIAGWILGNPECESLSTASSWSYIVETSSSDNGTCYPGDFIDYEELREQLSSVSSFERFEIFPKTSSWPNHDSNKGVTAACPHAGAKSFYKNLIWLVKKGNSYPKLSKSYINDKGKEVLVLWGIHHPSTSADQQSLYQNADAYVFVGTSRYSKKFKPEIAIRPKVRDQEGRMNYYWTLVEPGDKITFEATGNLVVPRYAFAMERNAGSGIIISDTPVHDCNTTCQTPKGAINTSLPFQNVHPITIGKCPKYVKSTKLRLATGLRNVPPIQSRGLFGAIAGFIEGGWTGMVDGWYGYHHQNEQGSGYAADLKSTQNAIDEITNKVNSVIEKMNTQFTAVGKEFNHLEKRIENLNKKVDDGFLDIWTYNAELLVLLENERTLDYHDSNVKNLYEKVRSQLKNNAKEIGNGCFEFYHKCDNTCMESVKNGTYDYPKYSEEAKLNREEIDGVKLESTRIYQILAIYSTVASSLVLVVSLGAISFWMCSNGSLQCRICI

SEQ ID NO: 3775 - protein, 566 aa, synthetic construct; identical to SEQ ID NO: 2669
  REGION 1..566: note = hemagglutinin__InfluenzaA__ACZ45036

SEQ ID NO: 3776 - protein, 566 aa, synthetic construct; identical to SEQ ID NO: 2669
  REGION 1..566: note = hemagglutinin__InfluenzaA__ACZ45037

SEQ ID NO: 3777 - protein, 566 aa, synthetic construct; identical to SEQ ID NO: 3770
  REGION 1..566: note = hemagglutinin__InfluenzaA__ACZ45038

SEQ ID NO: 3778 - protein, 566 aa, synthetic construct; identical to SEQ ID NO: 3022
  REGION 1..566: note = hemagglutinin__InfluenzaA__ACZ45039

SEQ ID NO: 3779 - protein, 566 aa, synthetic construct; identical to SEQ ID NO: 2669
  REGION 1..566: note = hemagglutinin__InfluenzaA__ACZ45040

SEQ ID NO: 3780 - protein, 566 aa, synthetic construct; identical to SEQ ID NO: 2669
  REGION 1..566: note = hemagglutinin__InfluenzaA__ACZ52567

SEQ ID NO: 3781 - protein, 566 aa, synthetic construct; identical to SEQ ID NO: 2669
  REGION 1..566: note = hemagglutinin__InfluenzaA__ACZ52568

SEQ ID NO: 3782 - protein, 566 aa, synthetic construct; identical to SEQ ID NO: 3238
  REGION 1..566: note = hemagglutinin__InfluenzaA__ACZ52569

SEQ ID NO: 3783 - protein, 566 aa, synthetic construct
  REGION 1..566: note = hemagglutinin__InfluenzaA__ACZ53956
MKTIIALSYIFCLALAQKLPGNDNSTATLCLGHHAVPNGTLVKTITNDQIEVTNATELVQSSSTGRICDSPHQILDGENCTLIDALLGDPHCDGFQNKEWDLFVERSKAYSNCYPYDVPDYASLRSLVASSGTLEFNNESFNWTGVAQNGTSSACKRRSIKSFFSTLNWLHQLQNRYPALNVTMPNNDKFDKLYIWGVHHPSTDSDQISVYAQASGRVTVSTKRSQQTVIPNIGSRPWVRGVSSRISIYWTIVKPGDILLINSTGNLIAPRGYFKIRSGKSSIMRSDAPIGKCNSECITPNGSIPNDKPFQNVNRITYGACPRYVKQNTLKLATGMRNVPEKQTRGIFGAIAGFIENGWEGMMDGWYGFRHQNSEGTGQAADLKSTQAAINQINGKLNRLIEKTNEKFHQIEKEFSEVEGRIQDLEKYVEDTKIDLWSYNAELLVALENQHTIDLTDSEMNKLFERTRKQLRENAEDMGNGCFKIYHKCDNACIGSIRNGTYDHDVYRDEALNNRFQIKGVELKSGYKDWILWISFAISCFLLCVVLLGFIMWACQRGNIRCNICI

SEQ ID NO: 3784 - protein, 566 aa, synthetic construct
  REGION 1..566: note = hemagglutinin__InfluenzaA__ACZ53967
MKTIIALSYIFCLALAQKLPGNDNSTATLCLGHHAVPNGTLVKTITNDQIEVTNATELVQSSSTGRICDSPHQILDGENCTLIDALLGDPHCDGFQNKEWDLFVERSKAYSNCYPYDVPDYASLRSLVASSGTLEFNNESFNWTGVAQNGTSSACKRRSIKSFFSTLNWLHQLQNRYPALNVTMPNNDKFDKLYIWGVHHPSTDSDQTSLYAQASGRVTVSTKRSQQTVIPNIGSRPWVRGVSSRISIYWTIVKPGDVLVINSNGNLIAPRGYFKMRSGKSSIMRSDAPIGKCNSECITPNGSIPNDKPFQNVNRITYGACPRYVKQNTLKLATGMRNVPEKQTRGIFGAIAGFIENGWEGMMDGWYGFRHQNSEGTGQAADLKSTQAAINQINGKLNKLIEKTNEKFHQIEKEFSEVEGRIQDLEKYVEDTKIDLWSYNAELLVALENQHTIDLTDSEMNKLFERTRKQLRENAEDMGNGCFKIYHKCDNACIGSIRNGTYDHDVYRDEALNNRFQIKGVELKSGYKDWILWISFAISCFLLCVVLLGSIMWACQRGNIRCNICI

SEQ ID NO: 3785 - protein, 566 aa, synthetic construct
  REGION 1..566: note = hemagglutinin__InfluenzaA__ACZ53978
MKTIIALSYIFCLALAQKLPGNDNSTATLCLGHHAVPNGTLVKTITNDQIEVTNATELVQSSSTGRICDSPHQILDGENCTLIDALLGDPHCDGFQNKEWDLFVERSKAYSNCYPYDVPDYASLKSLIASSGTLEFNNESFNWIGVSQNGTSSACKRISITVSFNKLNWLHQLKYRYPALNVTMPNNDKFDKLYIWGVHHPSTDSDQTSLYAQASGRVTVSTKRSQQTVIPNIGSRPWVRGVSSRISIYWTIVKPGDVLVINSNGNLIAPRGYFKMRSGKSSIMRSDAPIGKCNSECITPNGSIPNDKPFQNVNRITYGACPRYVKQNTLKLATGMRNVPEKQTRGIFGAIAGFIENGWEGMVDGWYGFRHQNSEGTGQAADLKSTQAAINQITGKLNKLIEKTNEKFHQIEKEFSEVEGRIQDLEKYVEDTKIDLWSYNAELLVALENQHTIDLTDSEMNKLFERTRKQLRENAEDMGNGCFKIYHKCDNACIGSIRNGTYDHDVYRDEALNNRFQIKGVELKSGYKDWILWISFAISCFLLCVVLLGFIMWACQRGNIRCNICI

SEQ ID NO: 3786 - protein, 566 aa, synthetic construct
  REGION 1..566: note = hemagglutinin__InfluenzaA__ACZ56080
MKAILVVLLYTFATANADTLCIGYHANNSTDTVDTVLEKNVTVTHSVNLLEDKHNGKLCKLRGVAPLHLGKCNIAGWILGNPECESLSTASSWSYIVETSSSDNGTCYPGDFIDYEELREQLSSVSSFERFEIFPKTSSWPNHDSNKGVTAACSHAGAKSFYKNLIWLVKKGNSYPKLSKSYINDKGKEVLVLWGIHHPSTSADQQSLYQNADAYVFVGTSRYSKKFKPEIAIRPKVRGQEGRMNYYWTLVEPGDKITFEATGNLVVPRYAFAMERNAGSGIIISDTPVHDCNTTCQTPKGAINTSLPFQNIHPITIGKCPKYVKSTKLRLATGLRNVPSIQSRGLFGAIAGFIEGGWTGMVDGWYGYHHQNEQGSGYAADLKSTQNAIDEITNKVNSVIEKMNTQFTAVGKEFNHLEKRIENLNKKVDDGFLDIWTYNAELLVLLENERTLDYHDSNVKNLYEKVRSQLKNNAKEIGNGCFEFYHKCDNTCMESVKNGTYDYPKYSEEAKLNREEIDGVKLESTRIYQILAIYSTVASSLVLVVSLGAISFWMCSNGSLQCRICI

SEQ ID NO: 3787 - protein, 566 aa, synthetic construct
  REGION 1..566: note = hemagglutinin__InfluenzaA__ACZ61118
MKAILVVLLYTFATANADTLCIGYHANNSTDTVDTVLEKNVTVTHSVNLLEDKHNGKLCKLRGVAPLHLGKCNIAGWILGNPECESLSTASSWSYIVETSSSDNGTCYPGDFIDYEELREQLSSVSSFERFEIFPKTSSWPNHDSNKGVTAACPHAGAKSFYKNLIWLVKKGNSYPKLSKSYINDKGKEVLVLWGIHHQSTSADQQSLYQNADAYVFVGSSRYSKKFKPEIAIRPKVRDQEGRMNYYWTLVEPGDKITFEATGNLVVPRYAFAMERNAGSGIIISDTPVHDCNTTCQTPKGAINTSLPFQNIHPITIGKCPKYVKSTKLRLATGLRNVPSIQSRGLFGAIAGFIEGGWTGMVDGWYGYHHQNEQGSGYAADLKSTQNAIDEITNKVNSVIEKMNTQFTAVGKEFNHLEKRIENLNKKVDDGFLDIWTYNAELLVLLENERTLDYHDSNVKNLYEKVRSQLKNNAKEIGNGCFEFYHKCDNTCMESVKNGTYDYPKYSEEAKLNREEIDGVKLESTRIYQILAIYSTVASSLVLVVSLGAISFWMCSNGSLQCRICI

SEQ ID NO: 3788 - protein, 566 aa, synthetic construct
  REGION 1..566: note = hemagglutinin__InfluenzaA__ACZ61119
MEAILVVLLYTFATANADTLCIGYHANNSTDTVDTVLEKNVTVTHSVNLLEDKHNGKLCKLRGVAPLHLGKCNIAGWILGNPECESLSTASSWSYIVETSSSDNGTCYPGDFIDYEELREQLSSVSSFERFEIFPKTSSWPNHDSNKGVTAACPHAGAKSFYKNLIWLVKKGNSYPKLSKSYINDKGKEVLVLWGIHHPSTSADQQSLYQNADAYVFVGSSRYSKKFKPEIAIRPKVRDQEGRMNYYWTLVEPGDKITFEATGNLVVPRYAFAMERNAGSGIIISDTPVHDCNTTCQTPKGAINTSLPFHNIHPITIGKCPKYVKSTKLRLATGLRNVPSIQSRGLFGAIAGFIEGGWTGMVDGWYGYHHQNEQGSGYAADLKSTQNAIDEITNKVNSVIEKMNTQFTAVGKEFNHLEKRIENLNKKVDDGFLDIWTYNAELLILLENERTLDYHDSNVKNLYEKVRSQLKNNAKEIGNGCFEFYHKCDNTCMESVKNGTYDYPKYSEEAKLNREEIDGVKLESTRIYQILAIYSTVASSLVLVVSLGAISFWMCSNGSLQCRICI

SEQ ID NO: 3789 - protein, 566 aa, synthetic construct; identical to SEQ ID NO: 2669
  REGION 1..566: note = hemagglutinin__InfluenzaA__ACZ61122

SEQ ID NO: 3790 - protein, 566 aa, synthetic construct; identical to SEQ ID NO: 2669
  REGION 1..566: note = hemagglutinin__InfluenzaA__ACZ61123

SEQ ID NO: 3791 - protein, 566 aa, synthetic construct; identical to SEQ ID NO: 3467
  REGION 1..566: note = hemagglutinin__InfluenzaA__ACZ74627

SEQ ID NO: 3792 - protein, 565 aa, synthetic construct
  REGION 1..565: note = hemagglutinin__InfluenzaA__ACZ81554
MKVKLLVLLCTFTATYADTICIGYHANNSTDTVDTVLEKNVTVTHSVNLLENNHNGKLCLLKGIAPLQLGNCTVAGWILGNPECELLISKESWSYIVEKPNPENGTCYPGHFADYEELREQLSSVSSFERFEIFPKESSWPNHTVTGVSASCSHNGENSFYRNLLWLTGKNGLYPNLSKSYANNKEKEVLVLWGVHHPPNIADQKTLYHTENAYVSVVSSHYSRKFTPEIAKRPKIRDQEGRINYYWTLLEPGDTIIFEANGNLIAPRYAFALSRGFGSGIINSNAPMDKCDAKCQTPQGAINSSLPFQNVHPVTIGECPKYVRSAKLRMVTGLRNIPSIQSRGLFGAIAGFIEGGWTGMVDGWYGYHHQNEQGSGYAADQKSTQNAINGITNKVNSVIEKMNTQFTAVGKEFNKLERRMENLNKKVDDGFIDIWTYNAELLVLLENERTLDFHDSNVKNLYEKVKSQLKNNAKEIGNGCFEFYHKCNDECMESVKNGTYDYPKYSEESKLNREKIDGVKLESMGVYQILAIYSTVASSLVLLVSLGAISFWMCSNGSLQCRICI

SEQ ID NO: 3793 - protein, 565 aa, synthetic construct
  REGION 1..565: note = hemagglutinin__InfluenzaA__ACZ81555
MKVKLLVLLCTFTATYADTICIGYHANNSTDTVDTVLEKNVTVTHSVNLLENSHNGKLCLLKGIAPLQLGNCSVAGWILGNPECELLISKESWSYIVEKPNPENGTCYPGHFADYEELREQLSSVSSFERFEIFPKESSWPNHTVTGVSASCSHNGENSFYRNLLWLTGKNGLYPNLSKSYANNKEKEVLVLWGVHHPPNIGDQKTLYHTENAYVSVVSSHYSRKFTPEIAKRPKVRDQEGRINYYWALLEPGDTIIFEANGNLIAPRYAFALSRGFGSGIINSNAPMDKCDAKCQTPQGAINSSLPFQNVHPVTIGECPKYVRSAKLRMVTGLRNIPSIQSRGLFGAIAGFIEGGWTGMVDGWYGYHHQNEQGSGYAADQKSTQNAINGITNKVNSVIEKMNTQFTAVGKEFNKLERRMENLNKKVDDGFIDIWTYNAELLVLLENERTLDFHDSNVKNLYEKVKSQLKNNAKEIGNGCFEFYHKCNDECMESVKNGTYDYPKYSEESKLNREKIDGVKLESMGVYQILAIYSTVASSLVLLVSLGAISFWMCSNGSLQCRICI

SEQ ID NO: 3794 - protein, 565 aa, synthetic construct
  REGION 1..565: note = hemagglutinin__InfluenzaA__ACZ81556
MKVKLLVLLCTFTATYADTICIGYHANNSTDTVDTVLEKNVTVTHSVNLLENSHNGKLCLLKGIAPLQLGNCSVAGWILGNPECELLISKESWSYIVEKPNPENGTCYPGHFADYEELREQLSSVSSFERFEIFPKESSWPNHTVTGASASCSHNGENSFYRNLLWLTGKNGLYPNLSKSYANNKEKEVLVLWGVHHPPNIADQKTLYHTENAYVSVVSSHYSRKFTPEIAKRPKVRDQEGRINYYWTLLEPGDTIIFEANGNLIAPRYAFALSRGFGSGIINSNAPMDKCDAKCQTPQGAINSSLPFQNVHPVTIGECPKYVRSAKLRMVTGLRNIPSIQSRGLFGAIAGFIEGGWTGMVDGWYGYHHQNEQGSGYAADQKSTQNAINGITNKVNSVIEKMNTQFTAVGKEFNKLERRMENLNKKVDDGFIDIWTYNAELLVLLENERTLDFHDSNVKNLYEKVKSQLKNNAKEIGNGCFEFYHKCNDECMESVKNGTYDYPKYSEESKLNKEKIDGVKLESMGVYQILAIYSTVASSLVLLVSLGAISFWMCSNGSLQCRICI

SEQ ID NO: 3795 - protein, 566 aa, synthetic construct
  REGION 1..566: note = hemagglutinin__InfluenzaA__ACZ81557
MKTIIALSYILCLVFAQKLPGNDNSTATLCLGHHAVPNGTIVKTITNDQIEVTNATELVQSSSTGEICGSPHQILDGKNCTLIDALLGDPQCDGFQNKKWDLFVERSKAYSNCYPYDVPDYASLRSLVASSGTLEFNNESFNWTGVTQNGTSSACIRRSKNSFFSRLNWLTHLNFKYQALNVTMPNNEQFDKLYIWGVHHPGTDKDQIFLYAQASGRITVSTKRSQQTVIPNIGSRPRVRNIPSRISIYWTIVKPGDILLINSTGNLIAPRGYFKIQSGKSSIMRSDAPIGKCNSECITPNGSIPNDKPFQNVNRITYGACPRYVKQNTLKLATGMRNVPEKQTRGIFGAIAGFIENGWEGMVDGWYGFRHQNSEGRGQAADLKSTQAAIDQINGKLNRLIGKTNEKFHQIEKEFSEVEGRIQDLEKYVEDTKIDLWSYNAELLVALENQHTIDLTDSEMNKLFEKTKKQLRENAEDMGNGCFKIYHKCDNACIGSIRNGTYDHDVYRDEALNNRFQIKGVELKSGYKDWILWISFAISCFLLCVALLGFIMWACQKGNIRCNICI

SEQ ID NO: 3796 - protein, 566 aa, synthetic construct
  REGION 1..566: note = hemagglutinin__InfluenzaA__ACZ81558
MKTIIALSYILCLVFAQKLPGNDNSTATLCLGHHAVPNGTIVKTITNDQIEVTNATELVQSSSTGEICDSPHQILDGKNCTLIDALLGDPHCDGFQNKKWDLFVERSKAYSNCYPYDVPDYASLRSLVASSGTLEFNNESFNWTGVTQNGTSSACIRRSKNSFFSRLNWLTHLNFKYPALNVTMPNNEQFDKLYIWGVHHPGTDKDQIFLYAQASGRITVSTKRSQQTAIPNIGSRPRVRNIPSRISIYWTIVKPGDILLINSTGNLIAPRGYFKIRSGKSSIMRSDAPIGKCNSECITPNGSIPNDKPFQNVNRITYGACPRYVKQNTLKLATGMRNVPEKQTRGIFGAIAGFIENGWEGMVDGWYGFRHQNSEGRGQAADLKSTQAAIDQINGKLNRLIEKTNEKFHQIEKEFSEVEGRIQDLEKYVEDTKIDLWSYNAELLVALENQHTIDLTDSEMNKLFEKTKKQLRENAEDMGNGCFKIYHKCDNACIGSIRNGTYDHDVYRDEALNNRFQIKGVELKSGYKDWILWISFAISCFLLCVALLGFIMWACQKGNIRCNICI

SEQ ID NO: 3797 - protein, 566 aa, synthetic construct
  REGION 1..566: note = hemagglutinin__InfluenzaA__ACZ81559
MKTIIALSYILCLVFAQKLPGNDNSTATLCLGHHAVPNGTIVKTITNDQIEVTNATELVQSSSTGEICDSPHQILDGKNCTLIDALLGDPHCDGFQNKKWDLFVERSKAYSNCYPYDVPDYASLRSLVASSGTLEFNNESFNWTGVTQNGTSSACIRRSKNSFFSRLNWLTHLNFKYPALNVTMPNNEQFDKLYIWGVHHPGTDKDQIFLYAQASGRITVSTKRSQQTAIPNIGSRPRVRNIPSRISIYWTIVKPGDILLINSTGNLIAPRGYFKIRSGKSSIMRSDAPIGKCNSECITPNGSIPNDKPFQNVNRITYGACPRYVKQNTLKLATGMRNVPEKQTRGIFGAIAGFIENGWEGMVDGWYGFRHQNSEGRGQAADLKSTQAAIDQINGKLNRLIGKTNEKFHQIEKEFSEVEGRIQDLEKYVEDTKIDLWSYNAELLVALENQHTIDLTDSEMNKLFEKTKKQLRENAEDMGNGCFKIYHKCDNACIGSIRNGTYDHDVYRDEALNNRFQIKGVELKSGYKDWILWISFAISCFLLCVALLGFIMWACQKGNIRCNICI

SEQ ID NO: 3798 - protein, 566 aa, synthetic construct; identical to SEQ ID NO: 2669
  REGION 1..566: note = hemagglutinin__InfluenzaA__ACZ81632

SEQ ID NO: 3799 - protein, 566 aa, synthetic construct; identical to SEQ ID NO: 2669
  REGION 1..566: note = hemagglutinin__InfluenzaA__ACZ81642

SEQ ID NO: 3800 - protein, 566 aa, synthetic construct
  REGION 1..566: note = hemagglutinin__InfluenzaA__ACZ81652
MKAILVVLLYTFATANADTLCIGYHANNSTDTVDTVLERNVTVTHSVNLLEDKHNGKLCKLRGVAPLHLGKCNIAGWILGNPECESLSTASSWSYIVETSSSDNGTCYPGDFIDYEELREQLSSVSSFERFEIFPKTSSWPNHDSNKGVTAACPHAEAKSFYKNLIWLVKKGNSYPKLSKSYINDKGKEVLVLWGIHHPSTSADQQSLYQNADAYVFVGTSRYSKKFKPEIAIRPKVRGQEGRMNYYWTLVEPGDKITFEATGNLVVPRYAFAMERNAGSGIIISDTPVHDCNTTCQTPKGAINTSLPFQNIHPITIGKCPKYVKSTKLRLATGLRNVPSIQSRGLFGAIAGFIEGGWTGMVDGWYGYHHQNEQGSGYAADLKSTQNAIDEITNKVNSVIEKMNTQFTAVGKEFNHLEKRIENLNKKVDDGFLDIWTYNAELLVLLENERTLDYHDSNVKNLYEKVRSQLKNNAKEIGNGCFEFYHKCDNTCMESVKNGTYDYPKYSEEAKLNREEIDGVKLESTRIYQILAIYSTVASSLVLVVSLGAISFWMCSNGSLQCRICI

SEQ ID NO: 3801 - protein, 566 aa, synthetic construct
  REGION 1..566: note = hemagglutinin__InfluenzaA__ACZ92130
MEAILVVLLYTFATANADTLCIGYHANNSTDTVDTVLEKNVTVTHSVNLLEDKHNGKLCKLRGVAPLHLGKCNIAGWILGNPECESLSTASSWSYIVETSSSDNGTCYPGDFIDYEELREQLSSVSSFERFEIFPKTSSWPNHDSNKGVTAACPHAGAKSFYKNLIWLVKKGNSYPKLSKSYINDKGKEVLVLWGIHHPSTSADQQSLYQNADAYVFVGSSRYSKKFKPEIAIRPKVRDQEGRMNYYWTLVEPGDKITFEATGNLVVPRYAFAMERNAGSGIIISDTPVHDCNTTCQTPKGAINTSLPFHNIHPITIGKCPKYVKSTKLRLATGLRNVPSIQSRGLFGAIAGFIEGGWTGMVDGWYGYHHQNEQGSGYAADLKSTQNAIDEITNKVNSVIEKMNTQFTAVGKEFNHLEKRIENLNKKVDDGFLDIWTYNAELLVLLENERTLDYHDSNVKNLYEKVRSQLKNNAKEIGNGCFEFYHKCDNTCIESVKNGTYDYPKYSEEAKLNREEIDGVKLESTRIYQILAIYSTVASSLVLVVSLGAISFWMCSNGSLQCRICI

SEQ ID NO: 3802 - protein, 566 aa, synthetic construct; identical to SEQ ID NO: 2911
  REGION 1..566: note = hemagglutinin__InfluenzaA__ACZ92131

SEQ ID NO: 3803 - protein, 566 aa, synthetic construct; identical to SEQ ID NO: 2911
  REGION 1..566: note = hemagglutinin__InfluenzaA__ACZ92132

SEQ ID NO: 3804 - protein, 566 aa, synthetic construct; identical to SEQ ID NO: 2911
  REGION 1..566: note = hemagglutinin__InfluenzaA__ACZ92133

SEQ ID NO: 3805 - protein, 566 aa, synthetic construct; identical to SEQ ID NO: 2669
  REGION 1..566: note = hemagglutinin__InfluenzaA__ACZ92134

SEQ ID NO: 3806 - protein, 566 aa, synthetic construct; identical to SEQ ID NO: 2669
  REGION 1..566: note = hemagglutinin__InfluenzaA__ACZ95465

SEQ ID NO: 3807 - protein, 566 aa, synthetic construct; identical to SEQ ID NO: 2656
  REGION 1..566: note = hemagglutinin__InfluenzaA__ACZ95837

SEQ ID NO: 3808 - protein, 566 aa, synthetic construct; identical to SEQ ID NO: 2669
  REGION 1..566: note = hemagglutinin__InfluenzaA__ACZ95847

SEQ ID NO: 3809 - protein, 566 aa, synthetic construct
  REGION 1..566: note = hemagglutinin__InfluenzaA__ACZ95857
MKAILVVLLYTFATANADTLCIGYHANNSTDTVDTVLEKNVTVTHSVNLLEDKHNGKLCKLRGVAPLHLGKCNIAGWILGNPECESLSTASSWSYIVETSSSDNGTCYPGDFIDYEELREQLSSVSSFERFEIFPKTSSWPNHDSNKGVTAACPHAGAKSFYKNLIWLVKKGNSYPKLSKSYINDKGKEVLVLWGIHHPSTSADQQSLYQNADAYVFVGTSRYSKKFKPEIAIRPKVRDQEGRMNYYWTLVEPGDKITFEATGNLVVPRYAFAMERNAGSGIIISDTPVHDCNTTCQTSKGAINTSLPFQNIHPITIGKCPKYVKSTKLRLATGLRNVPSIQSRGLFGAIAGFIEGGWTGMVDGWYGYHHQNEQGSGYAADLKSTQNAIDEITNKVNSVIEKMNTQFTAVGKEFNHLEKRIENLNKKVDDGFLDIWTYNAELLVLLENERTLDYHDSNVKNLYEKVRSQLKNNAKEIGNGCFEFYHKCDNTCMESVKNGTYDYPKYSEEAKLNREEIDGVKLESTRIYQILAIYSTVASSLVLVVSLGAISFWMCSNGSLQCRICI

SEQ ID NO: 3810 - protein, 566 aa, synthetic construct; identical to SEQ ID NO: 2669
  REGION 1..566: note = hemagglutinin__InfluenzaA__ACZ95867

SEQ ID NO: 3811 - protein, 566 aa, synthetic construct
  REGION 1..566: note = hemagglutinin__InfluenzaA__ACZ95887
MEAILVVLLYTFATANADTLCIGYHANNSTDTVDTVLEKNVTVTHSVNLLEDKHNGKLCKLRGVAPLHLGKCNIAGWILGNPECESLSTASSWSYIVETSSSDNGTCYPGDFIDYEELREQLSSVSSFERFEIFPKTSSWPNHDSNKGVTAACPHAGAKSFYKNLIWLVKKGNSYPKLSKSYINDKGKEVLVLWGIHHPSTSADQQSLYQNADAYVFVGSSRYSKKFKPEIAIRPKVRNQEGRMNYYWTLVEPGDKITFEATGNLVVPRYAFAMERNAGSGIIISDTPVHDCNTTCQTPKGAINTSLPFHNIHPITIGKCPKYVKSTKLRLATGLRNVPSIQSRGLFGAIAGFIEGGWTGMVDGWYGYHHQNEQGSGYAADLKSTQNAIDEITNKVNSVIEKMNTQFTAVGKEFNHLEKRIENLNKKVDDGFLDIWTYNAELLVLLENERTLDYHDSNVKNLYEKVRSQLKNNAKEIGNGCFEFYHKCDNTCMESVKNGTYDYPKYSEEAKLNREEIDGVKLESTRIYQILAIYSTVASSLVLVVSLGAISFWMCSNGSLQCRICI

SEQ ID NO: 3812 - protein, 566 aa, synthetic construct; identical to SEQ ID NO: 2669
  REGION 1..566: note = hemagglutinin__InfluenzaA__ACZ95897

SEQ ID NO: 3813 - protein, 566 aa, synthetic construct
  REGION 1..566: note = hemagglutinin__InfluenzaA__ACZ95907
MKAILVVLLYTFATANADTLCIGYHANNSTDTVDTVLEKNVTVTHSVNLLEDKHNGKLCKLRGVAPLHLGKCNIAGWILGNPECESLSTASSWSYIVETSSSDNGTCYPGDFIDYEELREQLSSVSSFERFEIFPKTSSWPNHDSNKGVTAACPHAGAKSFYKNLIWLVKKGNSYPKLSKSYINDKGKEVLVLWGIHHPSTSADQQSLYQNADAYVFVGTSRYSKKFKPEIAIRPKVRDQEGRMNYYWTLVEPGDKITFEATGNLVVPRYAFAMERNAGSGIIISDTPVYDCNTTCQTPKGAINTSLPFQNIHPITIGKCPKYVKSTKLRLATGLRNVPSIQSRGLFGAIAGFIEGGWTGMVDGWYGYHHQNEQGSGYAADLKSTQNAIDEITNKVNSVIEKMNTQFTAVGKEFNHLEKRIENLNKKVDDGFLDIWTYNAELLVLLENERTLDYHDSNVKNLYEKVRSQLKNNAKEIGNGCFEFYHKCDNTCMESVKNGTYDYPKYSEEAKLNREEIDGVKLESTRIYQILAIYSTVASSLVLVVSLGAISFWMCSNGSLQCRICI

SEQ ID NO: 3814 - protein, 566 aa, synthetic construct; identical to SEQ ID NO: 2669
  REGION 1..566: note = hemagglutinin__InfluenzaA__ACZ95927

SEQ ID NO: 3815 - protein, 566 aa, synthetic construct
  REGION 1..566: note = hemagglutinin__InfluenzaA__ACZ95937
MEAILVVLLYTFATANADTLCIGYHANNSTDTVDTVLEKNVTVTHSVNLLEDKHNGKLCKLRGVAPLHLGKCNIAGWILGNPECESLSTASSWSYIVETSSSDNGTCYPGDFIDYEELREQLSSVSSFERFEIFPKTSSWPNHDSNKGVTAACPHAGAKSFYKNLIWLVKKGNSYPKLSKSYINDKGKEVLVLWGIHHPSTNADQQSLYQNADAYVFVGSSRYSKKFKPEIAIRPKVRDQEGRMNYYWTLVEPGDKITFEATGNLVVPRYAFAMERNAGSGIIISDTPVHDCNTTCQTPKGAINTSLPFHNIHPITIGKCPKYVKSTKLRLATGLRNVPSIQSRGLFGAIAGFIEGGWTGMVDGWYGYHHQNEQGSGYAADLKSTQNAIDEITNKVNSVIEKMNTQFTAVGKEFNHLEKRIENLNKKVDDGFLDIWTYNAELLVLLENERTLDYHDSNVKNLYEKVRSQLKNNAKEIGNGCFEFYHKCDNTCMESVKNGTYDYPKYSEEAKLNREEIDGVKLESTRIYQILAIYSTVASSLVLVVSLGAISFWMCSNGSLQCRICI

SEQ ID NO: 3816 - protein, 566 aa, synthetic construct; identical to SEQ ID NO: 2911
  REGION 1..566: note = hemagglutinin__InfluenzaA__ACZ95947

SEQ ID NO: 3817 - protein, 566 aa, synthetic construct; identical to SEQ ID NO: 2669
  REGION 1..566: note = hemagglutinin__InfluenzaA__ACZ95957

SEQ ID NO: 3818 - protein, 566 aa, synthetic construct; identical to SEQ ID NO: 2911
  REGION 1..566: note = hemagglutinin__InfluenzaA__ACZ95967

SEQ ID NO: 3819 - protein, 566 aa, synthetic construct; identical to SEQ ID NO: 3815
  REGION 1..566: note = hemagglutinin__InfluenzaA__ACZ95977

SEQ ID NO: 3820 - protein, 566 aa, synthetic construct
  REGION 1..566: note = hemagglutinin__InfluenzaA__ACZ95987
MKAILVVLLYTFATANADTLCIGYHANNSTDTVDTVLEKNVTVTHSVNLLEDKHNGKLCKLRGVAPLHLGKCNIAGWILGNPECESLSTASSWSYIVETSSSDNGTCYPGDFIDYEELREQLSSVSSFERFEIFPKTSSWPNHDSNKGVTAACPHAGAKSFYKNLIWLVKKGNSYPKLSKSYINDKGKEVLVLWGIHHPSTSADQQSLYQNADAYVFVGTSRYSKKFKPEIAIRPKVRDQEGRMNYYWTLVEPGDKITFEATGNLVVPRYAFAMERNAGSGIIISDTPVHDCNTTCQTPKGAINTSLPFQNIHPITIGKCPKYVKSTKLRLATGLRNIPSIQSRGLFGAIAGFIEGGWTGMIDGWYGYHHQNEQGSGYAADLKSTQNAIDEITNKVNSVIEKMNTQFTAVGKEFNHLEKRIENLNKKVDDGFLDIWTYNAELLVLLENERTLDYHDSNVKNLYEKVRSQLKNNAKEIGNGCFEFYHKCDNTCMESVKNGTYDYPKYSEEAKLNREEIDGVKLESTRIYQILAIYSTVASSLVLVVSLGAISFWMCSNGSLQCRICI

SEQ ID NO: 3821 - protein, 566 aa, synthetic construct; identical to SEQ ID NO: 2669
  REGION 1..566: note = hemagglutinin__InfluenzaA__ACZ95997

SEQ ID NO: 3822 - protein, 566 aa, synthetic construct; identical to SEQ ID NO: 2669
  REGION 1..566: note = hemagglutinin__InfluenzaA__ACZ96007

SEQ ID NO: 3823 - protein, 566 aa, synthetic construct; identical to SEQ ID NO: 2656
  REGION 1..566: note = hemagglutinin__InfluenzaA__ACZ96017

SEQ ID NO: 3824 - protein, 566 aa, synthetic construct; identical to SEQ ID NO: 2669
  REGION 1..566: note = hemagglutinin__InfluenzaA__ACZ96027

SEQ ID NO: 3825 - protein, 566 aa, synthetic construct; identical to SEQ ID NO: 3815
  REGION 1..566: note = hemagglutinin__InfluenzaA__ACZ96047

SEQ ID NO: 3826 - protein, 566 aa, synthetic construct
  REGION 1..566: note = hemagglutinin__InfluenzaA__ACZ96057
MKAILVVLLYTFATANADTLCIGYHANNSTDTVDTVLEKNVTVTHSVNLLEDKHNGKLCKLRGVAPLHLGKCNIAGWILGNPECESLSTASSWSYIVETSSSDNGTCYPGDFIDYEELREQLSSVSSFERFEIFPKTSSWPNHDSNKGVTAACLHAGAKSFYKNLIWLVKKGNSYPKLSKSYINDKGKEVLVLWGIHHPSTSADQQSLYQNADAYVFVGTSRYSKKFKPEIAIRPKVRDQEGRMNYYWTLVEPGDKITFEATGNLVVPRYAFAMERNAGSGIIISDTPVHDCNTTCQTPKGAINTSLPFQNIHPITIGKCPKYVKSTKLRLATGLRNIPSIQSRGLFGAIAGFIEGGWTGMVDGWYGYHHQNEQGSGYAADLKSTQNAIDEITNKVNSVIEKMNTQFTAVGKEFNHLEKRIENLNKKVDDGFLDIWTYNAELLVLLENERTLDYHDSNVKNLYEKVRSQLKNNAKEIGNGCFEFYHKCDNTCMESVKNGTYDYPKYSEEAKLNREEIDGVKLESTRIYQILAIYSTVASSLVLVVSLGAISFWMCSNGSLQCRICI

SEQ ID NO: 3827 - protein, 566 aa, synthetic construct
  REGION 1..566: note = hemagglutinin__InfluenzaA__ACZ96069
MKAILVVLLYTFATANADTLCIGYHANNSTDTVDTVLEKNVTVTHSVNLLEDKHNGKLCKLRGVAPLHLGKCNIAGWILGNPECESLSTASSWSYIVETSSSDNGTCYPGDFIDYEELREQLSSVSSFERFEIFPKTSSWPNHDSNKGVTAACPHAGAKSFYKNLIWLVKKGNSYPKLSKSYINDKGKEVLVLWGIHHPSTSADQQSLYQNADAYVFVGTSRYSKKFKPEIAIRPKVRDQEGRMNYYWTLVEPGNKITFEATGNLVVPRYAFAMERNAGSGIIISDTPVHDCNTTCQTPKGAINTSLPFQNIHPITIGKCPKYVKSTKLRLATGLRNVPSIQSRGLFGAIAGFIEGGWTGMVDGWYGYHHQNEQGSGYAADLKSTQNAIDEITNKVNSVIEKMNTQFTAVGKEFNHLEKRIENLNKKVDDGFLDIWTYNAELLVLLENERTLDYHDSNVKNLYEKVRSQLKNNAKEIGNGCFEFYHKCDNTCMESVKNGTYDYPKYSEEAKLNREEIDGVKLESTRIYQILAIYSTVASSLVLVVSLGAISFWMCSNGSLQCRICI

SEQ ID NO: 3828 - protein, 566 aa, synthetic construct; identical to SEQ ID NO: 3815
  REGION 1..566: note = hemagglutinin__InfluenzaA__ACZ96089

SEQ ID NO: 3829 - protein, 566 aa, synthetic construct
  REGION 1..566: note = hemagglutinin__InfluenzaA__ACZ96119
MKAILVVLLYTFATANADTLCIGYHANNSTDTVDTVLEKNVTVTHSVNLLEDKHNGKLCKLRGVAPLHLGKCNIAGWILGNPECESLSTASSWSYIVETSSSDNGTCYPGDFIDYEELREQLSSVSSFERFEMFPKTSSWPNHDSNKGVTAACPHAGAKSFYKNLIWLVKKGNSYPKLSKSYINDKGKEVLVLWGIHHPSTSADQQSLYQNADAYVFVGTSRYSKKFKPEIAIRPKVRDQEGRMNYYWTLVEPGDKITFEATGNLVVPRYAFAMERNAGSGIIISDTPVHDCNTTCQTPKGAINTSLPFQNIHPITIGKCPKYVKSTKLRLATGLRNVPSIQSRGLFGAIAGFIEGGWTGMVDGWYGYHHQNEQGSGYAADLKSTQNAIDEITNKVNSVIEKMNTQFTAVGKEFNHLEKRIENLNKKVDDGFLDIWTYNAELLVLLENERTLDYHDSNVKNLYEKVRSQLKNNAKEIGNGCFEFYHKCDNTCMESVKNGTYDYPKYSEEAKLNREEIDGVKLESTRIYQILAIYSTVASSLVLVVSLGAISFWMCSNGSLQCRICI

SEQ ID NO: 3830 - protein, 566 aa, synthetic construct
  REGION 1..566: note = hemagglutinin__InfluenzaA__ACZ96129
MKAILVVLLYTFATANADTLCIGYHANNSTDTVDTVLEKNVTVTHSVNLLEDKHNGKLCKLRGVAPLHLGKCNIAGWILGNPECESLSTASSWSYIVETSSSDNGTCYPGEFIDYEELREQLSSVSSFERFEIFPKTSSWPNHDSNKGVTAACPHAGAKSFYKNLIWLVKKGNSYPKLSKSYINDKGKEVLVLWGIHHPSTSADQQSLYQNADAYVFVGTSRYSKKFKPEIAIRPKVRDQEGRMNYYWTLVEPGDKITFEATGNLVVPRYAFAMERNAGSGIIISDTPVHDCNTTCQTPKGAINTSLPFQNIHPITIGKCPKYVKSTKLRLATGLRNVPSIQSRGLFGAIAGFIEGGWTGMVDGWYGYHHQNEQGSGYAADLKSTQNAIDEITNKVNSVIEKMNTQFTAVGKEFNHLEKRIENLNKKVDDGFLDIWTYNAELLVLLENERTLDYHDSNVKNLYEKVRSQLKNNAKEIGNGCFEFYHKCDNTCMESVKNGTYDYPKYSEEAKLNREEIDGVKLESTRIYQILAIYSTVASSLVLVVSLGAISFWMCSNGSLQCRICI

SEQ ID NO: 3831 - protein, 566 aa, synthetic construct; identical to SEQ ID NO: 2669
  REGION 1..566: note = hemagglutinin__InfluenzaA__ACZ96149

SEQ ID NO: 3832 - protein, 566 aa, synthetic construct; identical to SEQ ID NO: 2669
  REGION 1..566: note = hemagglutinin__InfluenzaA__ACZ96159

SEQ ID NO: 3833 - protein, 566 aa, synthetic construct
  REGION 1..566: note = hemagglutinin__InfluenzaA__ACZ96179
MKAILVVLLYTFATANADTLCIGYHANNSTDTVDTVLEKNVTVTHSVNLLEDKHNGKLCKLRGVAPLHLGKCNIAGWILGNPECESLSTASSWSYIVETSSSDNGTCYPGDFIDYEELREQLSSVSSFERFEIFPKTSSWPNHDSNKGVTAACPHAGAKSFYKNLIWLVKKGNSYPKLSKSYINDKGKEVLVLWGIHHPSTSADQQSLYQNADAYVFVGTSRYSKKFKPEIAIRPKVRDQEGRMNYYWTLVEPGDKITFEATGNLVVPRYAFAMERNAGSGIIISDTPVHDCNTTCQTPKGAINTSLPFQNIHPITIGKCPKYVKSTKLRLATGLRNVPSIQSRGLFGAIAGFIEGGWTGMVDGWYGYHHQNEQGSGYAADLKSTQNAIDKITNKVNSVIEKMNTQFTAVGKEFNHLEKRIENLNKKVDDGFLDIWTYNAELLVLLENERTLDYHDSNVKNLYEKVRSQLKNNAKEIGNGCFEFYHKCDNTCMESVKNGTYDYPKYSEEAKLNREEIDGVKLESTRIYQILAIYSTVASSLVLVVSLGAISFWMCSNGSLQCRICI

SEQ ID NO: 3834 - protein, 566 aa, synthetic construct; identical to SEQ ID NO: 3826
  REGION 1..566: note = hemagglutinin__InfluenzaA__ACZ96189

SEQ ID NO: 3835 - protein, 566 aa, synthetic construct; identical to SEQ ID NO: 3833
  REGION 1..566: note = hemagglutinin__InfluenzaA__ACZ96199

SEQ ID NO: 3836 - protein, 566 aa, synthetic construct; identical to SEQ ID NO: 2669
  REGION 1..566: note = hemagglutinin__InfluenzaA__ACZ96209

SEQ ID NO: 3837 - protein, 566 aa, synthetic construct
  REGION 1..566: note = hemagglutinin__InfluenzaA__ACZ96219
MKAILVVLLYTFATANADTLCIGYHANNSTDTVDTVLEKNVTVTHSVNLLEDKHNGKLCKLRGVAPLHLGKCNIAGWILGNPECESLSTASSWSYIVETSSSDNGTCYPGDFIDYEELREQLSSVSSFERFEIFPKTSSWPNHDSNKGVTAACPHAGAKSFYKNLIWLVKKGNSYPKLSKSYINDKGKEVLVLWGIHHPSTSADQQSLYQNADAYVFVGTSRYSKKFKPEIAIRPKVRDQEGRMNYYWTLVEPGDKIKFEATGNLVVPRYAFAMERNAGSGIIISDTPVHDCNTTCQTSKGAINTSLPFQNIHPITIGKCPKYVKSTKLRLATGLRNVPSIQSRGLFGAIAGFIEGGWTGMVDGWYGYHHQNEQGSGYAADLKSTQNAIDEITNKVNSVIEKMNTQFTAVGKEFNHLEKRIENLNKKVDDGFLDIWTYNAELLVLLENERTLDYHDSNVKNLYEKVRSQLKNNAKEIGNGCFEFYHKCDNTCMESVKNGTYDYPKYSEEAKLNREEIAGVKLESTRIYQILAIYSTVASSLVLVVSLGAISFWMCSNGSLQCRICI

SEQ ID NO: 3838 - protein, 566 aa, synthetic construct; identical to SEQ ID NO: 2669
  REGION 1..566: note = hemagglutinin__InfluenzaA__ACZ96229

SEQ ID NO: 3839 - protein, 566 aa, synthetic construct; identical to SEQ ID NO: 3833
  REGION 1..566: note = hemagglutinin__InfluenzaA__ACZ96239

SEQ ID NO: 3840 - protein, 566 aa, synthetic construct; identical to SEQ ID NO: 2669
  REGION 1..566: note = hemagglutinin__InfluenzaA__ACZ96249

SEQ ID NO: 3841 - protein, 566 aa, synthetic construct
  REGION 1..566: note = hemagglutinin__InfluenzaA__ACZ96269
MKAILVVLLYTFATANADTLCIGYHANNSTDTVDTVLERNVTVTHSVNLLEDKHNGKLCKLRGVAPLHLGKCNIAGWILGNPECESLSTASSWSYIVETSSSDNGTCYPGDFIDYEELREQLSSVSSFERFEIFPKTSSWPNHDSNKGVTAACPHAGAKSFYKNLIWLVKKGNSYPKLSKSYINDKGKEVLVLWGIHHPSTSADQQSLYQNADAYVFVGTSRYSKKFKPEIAIRPKVRDQEGRMNYYWTLVEPGDKITFEATGNLVVPRYAFAMERNAGSGIIISDTPVHDCNTTCQTPKGAINTSLPFQNIHPITIGKCPKYVKSTKLRLATGLRNVPSIQSRGLFGAIAGFIEGGWTGMVDGWYGYHHQNEQGSGYAADLKSTQNAIDEITNKVNSVIEKMNTQFTAVGKEFNHLEKRIENLNKKVDDGFLDIWTYNAELLVLLENERTLDYHDSNVKNLYEKVRSQLKNNAKEIGNGCFEFYHKCDNTCMESVKNGTYDYPKYSEEAKLNREEIDGVKLESTRIYQILAIYSTVASSLVLVVSLGAISFWMCSNGSLQCRICI

SEQ ID NO: 3842 - protein, 566 aa, synthetic construct; identical to SEQ ID NO: 2669
  REGION 1..566: note = hemagglutinin__InfluenzaA__ACZ96299

SEQ ID NO: 3843 - protein, 566 aa, synthetic construct; identical to SEQ ID NO: 2669
  REGION 1..566: note = hemagglutinin__InfluenzaA__ACZ96309

SEQ ID NO: 3844 - protein, 566 aa, synthetic construct
  REGION 1..566: note = hemagglutinin__InfluenzaA__ACZ96319
MKAILVVLLYTFATANADTLCIGYHANNSTDTVDTVLEKNVTVTHSVNLLEDKHNGKLCKLRGVAPLHLGICNIAGWILGNPECESLSTASSWSYIVETSSSDNGTCYPGDFIDYEELREQLSSVSSFERFEIFPKTSSWPNHDSNKGVTAACPHAGAKSFYKNLIWLVKKGNSYPKLSKSYINDKGKEVLVLWGIHHPSTSADQQSLYQNADAYVFVGTSRYSKKFKPEIAIRPKVRDQEGRMNYYWTLVEPGDKITFEATGNLVVPRYAFAMERNAGSGIIISDTPVHDCNTTCQTPKGAINTSLPFQNIHPITIGKCPKYVKSTKLRLATGLRNVPSIQSRGLFGAIAGFIEGGWTGMVDGWYGYHHQNEQGSGYAADLKSTQNAIDEITNKVNSVIEKMNTQFTAVGKEFNHLEKRIENLNKKVDDGFLDIWTYNAELLVLLENERTLDYHDSNVKNLYEKVRSQLKNNAKEIGNGCFEFYHKCDNTCMESVKNGTYDYPKYSEEAKLNREEIDGVKLESTRIYQILAIYSTVASSLVLVVSLGAISFWMCSNGSLQCRICI

SEQ ID NO: 3845 - protein, 566 aa, synthetic construct; identical to SEQ ID NO: 3844
  REGION 1..566: note = hemagglutinin__InfluenzaA__ACZ96329

SEQ ID NO: 3846 - protein, 566 aa, synthetic construct
  REGION 1..566: note = hemagglutinin__InfluenzaA__ACZ96339
MKAILVVLLYTFATANADTLCIGYHANNSTDTVDTVLEKNVTVTHSVNLLEDKHNGKLCKLRGVAPLHLGKCNIAGWILGNPECESLSTASSWSYIVETSSSDNGTCYPGDFIDYEELREQLSSVSSFERFEIFPKTSSWPNHDSNKGVTAACPHAGAKSFYKNLIWLVKKGNSYPKLSKSYINDKGKEVLVLWGIHHPSTSADQQSLYQNADSYVFVGTSRYSKKFKPEIAIRPKVRDQEGRMNYYWTLVEPGDKITFEATGNLVVPRYAFAMERNAGSGIIISDTPVHDCNTTCQTPEGAINTSLPFQNIHPITIGKCPKYVKSTKLRLATGLRNVPSIQSRGLFGAIAGFIEGGWTGMVDGWYGYHHQNEQGSGYAADLKSTQNAIDEITNKVNSVIKKMNTQFTAVGKEFNHLEKRIENLNKKVDDGFLDIWTYNAELLVLLENERTLDYHDSNVKNLYEKVRSQLKNNAKEIGNGCFEFYHKCDNTCMESVKNGTYDYPKYSEEAKLNREEIDGVKLESTRIYQILAIYSTVASSLVLVVSLGAISFWMCSNGSLQCRICI

SEQ ID NO: 3847 - protein, 566 aa, synthetic construct; identical to SEQ ID NO: 2669
  REGION 1..566: note = hemagglutinin__InfluenzaA__ACZ96349

SEQ ID NO: 3848 - protein, 566 aa, synthetic construct; identical to SEQ ID NO: 3844
  REGION 1..566: note = hemagglutinin__InfluenzaA__ACZ96359

SEQ ID NO: 3849 - protein, 566 aa, synthetic construct; identical to SEQ ID NO: 2669
  REGION 1..566: note = hemagglutinin__InfluenzaA__ACZ96372

SEQ ID NO: 3850 - protein, 566 aa, synthetic construct; identical to SEQ ID NO: 3844
  REGION 1..566: note = hemagglutinin__InfluenzaA__ACZ96382

SEQ ID NO: 3851 - protein, 566 aa, synthetic construct; identical to SEQ ID NO: 2656
  REGION 1..566: note = hemagglutinin__InfluenzaA__ACZ96392

SEQ ID NO: 3852 - protein, 566 aa, synthetic construct; identical to SEQ ID NO: 2911
  REGION 1..566: note = hemagglutinin__InfluenzaA__ACZ96405

SEQ ID NO: 3853 - protein, 566 aa, synthetic construct; identical to SEQ ID NO: 2669
  REGION 1..566: note = hemagglutinin__InfluenzaA__ACZ96415

SEQ ID NO: 3854 - protein, 566 aa, synthetic construct; identical to SEQ ID NO: 2669
  REGION 1..566: note = hemagglutinin__InfluenzaA__ACZ96425

SEQ ID NO: 3855 - protein, 566 aa, synthetic construct
  REGION 1..566: note = hemagglutinin__InfluenzaA__ACZ96435
MKAILVVLLYTFATANADTLCIGYHANNSTDTVDTVLEKNVTVTHSVNLLEDKHNGKLCKLRGVAQLHLGKCNIAGWILGNPECESLSTASSWSYIVETSSSDNGTCYPGDFIDYEELREQLSSVSSFERFEIFPKTSSWPNHDSNKGVTAACPHAGAKSFYKNLIWLVKKGNSYPKLSKSYINDKGKEVLVLWGIHHPSTSADQQSLYQNADAYVFVGTSRYSKKFKPEIAIRPKVRDQEGRMNYYWTLVEPGDKITFEATGNLMVPRYAFAMERNAGSGIIISDTPVHDCNTTCQTPKGAINTSLPFQNIHPITIGKCPKYVKSTKLRLATGLRNVPSIQSRGLFGAIAGFIEGGWTGMVDGWYGYHHQNEQGSGYAADLKSTQNAIDEITNKVNSVIEKMNTQFTAVGKEFNHLEKRIENLNKKVDDGFLDIWTYNAELLVLLENERTLDYHDSNVKNLYEKVRSQLKNNAKEIGNGCFEFYHKCDNTCMESVKNGTYDYPKYSEEAKLNREEIDGVKLESTRIYQILAIYSTVASSLVLVVSLGAISFWMCSNGSLQCRICI

SEQ ID NO: 3856 - protein, 566 aa, synthetic construct; identical to SEQ ID NO: 2669
  REGION 1..566: note = hemagglutinin__InfluenzaA__ACZ96445

SEQ ID NO: 3857 - protein, 566 aa, synthetic construct
  REGION 1..566: note = hemagglutinin__InfluenzaA__ACZ96476
MKAILVVLLYTFATAYADTLCIGYHANNSTDTVDTVLEKNVTVTHSVNLLEDKHNGKLCKLRGVAPLHLGKCNIAGWILGNPECESLSTASSWSYIVETSSSDNGTCYPGDFIDYEELREQLSSVSSFERFEIFPKTSSWPNHDSNKGVTAACPHAGAKSFYKNLIWLVKKGNSYPKLSKSYINDKGKEVLVLWGIHHPSTSADQQSLYQNADAYVFVGTSRYSKKFKPEIAIRPKVRDQEGRMNYYWTLVEPGDKITFEATGNLVVPRYAFAMERNAGSGIIISDTPVHDCNTTCQTPKGAINTSLPFQNIHPITIGKCPKYVKSTKLRLATGLRNVPSIQSRGLFGAIAGFIEGGWTGMVDGWYGYHHQNEQGSGYAADLKSTQNAIDEITNKVNSVIEKMNTQFTAVGKEFNHLEKRIENLNKKVDDGFLDIWTYNAELLVLLENERTLDYHDSNVKNLYEKVRSQLKNNAKEIGNGCFEFYHKCDNTCMESVKNGTYDYPKYSEEAKLNREEIDGVKLESTRIYQILAIYSTVASSLVLVVSLGAISFWMCSNGSLQCRICI

SEQ ID NO: 3858 - protein, 566 aa, synthetic construct; identical to SEQ ID NO: 2669
  REGION 1..566: note = hemagglutinin__InfluenzaA__ACZ96496

SEQ ID NO: 3859 - protein, 566 aa, synthetic construct; identical to SEQ ID NO: 2669
  REGION 1..566: note = hemagglutinin__InfluenzaA__ACZ96506

SEQ ID NO: 3860 - protein, 566 aa, synthetic construct; identical to SEQ ID NO: 2669
  REGION 1..566: note = hemagglutinin__InfluenzaA__ACZ96526

SEQ ID NO: 3861 - protein, 566 aa, synthetic construct
  REGION 1..566: note = hemagglutinin__InfluenzaA__ACZ96536
MKAILVVLLYTFATANADTLCIGYHANNSTDTVDTVLEKNVTVTHSVNILEDKHNGKLCKLKGVAPLHLGKCNIAGWILGNPECESLSTASSWSYIVETSSSDNGTCYPGDFIDYEELREQLSSVSSFERFEIFPKTSSWPNHDSNKGVTAACPHAGAKSFYKNLIWLVKKGNSYPKLSKSYINDKGKEVLVLWGIHHPSTSADQQSLYQNADTYVFVGSSKYSKKFKPEIAIRPKVRDQEGRMNYYWTLVEPGDKITFEATGNLVVPRYAFAMERNAGSGIIISDTPVHDCNTTCQTPKGAINTSLPFQNIHPITIGKCPKHVKSTKLRLATGLRNVPSIQSRGLFGAIAGFIEGGWTGMVDGWYGYHHQNEQGSGYAADLKSTQNAIDEITNKVNSVIEKMNTQFTAVGKEFNHLEKRIENLNKKVDDGFLDIWTYNAELLVLLENERTLDYHDSNVKNLYEKVRSQLKNNAKEIGNGCFEFYHKCDNTCMESVKNGTYDYPKYSEEAKLNREEIDGVKLESTRIYQILAIYSTVASSLVLVVSLGAISFWMCSNGSLQCRICI

SEQ ID NO: 3862 - protein, 566 aa, synthetic construct; identical to SEQ ID NO: 2669
  REGION 1..566: note = hemagglutinin__InfluenzaA__ACZ96549

SEQ ID NO: 3863 - protein, 566 aa, synthetic construct
  REGION 1..566: note = hemagglutinin__InfluenzaA__ACZ96559
MKAILVVLLYTFATANADTLCIGYHANNSTDTVDTVLEKNVTVTHSVNLLEDKHNGKLCKLRGVAPLHLGKCNIAGWILGNPECESLSTASSWSYIVETSSSDNGTCYPGDFINYEELREQLSSVSSFERFEIFPKTSSWPNHDSNKGVTAACPHAGAKSFYKNLIWLVKKGNSYPKLSKSYINDKGKEVLVLWGIHHPSTSADQQSLYQNADAYVFVGTSRYSKKFKPEIAIRPKVRDQEGRMNYYWTLVEPGDKITFEATGNLVVPRYAFAMERNAGSGIIISDTPVHDCNTTCQTPKGAINTSLPFQNIHPITIGKCPKYVKSTKLRLATGLRNVPSIQSRGLFGAIAGFIEGGWTGMVDGWYGYHHQNEQGSGYAADLKSTQNAIDEITNKVNSVIEKMNTQFTAVGKEFNHLEKRIENLNKKVDDGFLDIWTYNAELLVLLENERTLDYHDSNVKNLYEKVRSQLKNNAKEIGNGCFEFYHKCDNTCMESVKNGTYDYPKYSEEAKLNREEIDGVKLESTRIYQILAIYSTVASSLVLVVSLGAISFWMCSNGSLQCRICI

SEQ ID NO: 3864 - protein, 566 aa, synthetic construct
  REGION 1..566: note = hemagglutinin__InfluenzaA__ACZ96569
MEAILVVLLYTFATANADTLCIGYHANNSTDTVDTVLEKNVTVTHSVNLLEDKHNGKLCKLRGVAPLHLGKCNIAGWILGNPECESLSTASSWSYIVETSSSDNGTCYPGDFINYEELREQLSSVSSFERFEIFPKTSSWPNHDSNKGVTAACPHAGAKSFYKNLIWLVKKGNSYPKLSKSYINDKGKEVLVLWGIHHPSTSADQQSLYQNADAYVFVGSSRYSKKFKPEIAIRPKVRDQEGRMNYYWTLVEPGDKITFEATGNLVVPRYAFAMERNAGSGIIISDTPVHDCNTTCQTPKGAINTSLPFHNIHPITIGKCPKYVKSTKLRLATGLRNVPSIQSRGLFGAIAGFIEGGWTGMVDGWYGYHHQNEQGSGYAADLKSTQNAIDEITNKVNSVIEKMNTQFTAVGKEFNHLEKRIENLNKKVDDGFLDIWTYNAELLVLLENERTLDYHDSNVKNLYEKVRSQLKNNAKEIGNGCFEFYHKCDNTCMESVKNGTYDYPKYSEEAKLNREEIDGVKLESTRIYQILAIYSTVASSLVLVVSLGAISFWMCSNGSLQCRICI

SEQ ID NO: 3865 - protein, 566 aa, synthetic construct
  REGION 1..566: note = hemagglutinin__InfluenzaA__ACZ96579
MEAILVVLLYTFATANADTLCIGYHANNSTDTVDTVLEKNVTVTHSVNLLEDKHNGKLCKLRGVAPLHLGKCNIAGWILGNPECESLSTASSWSYIVETSSSDNGTCYPGDFIDYEELREQLSSVSSFERFEIFPKTSSWPNHDSNKGVTAACPHAGAKSFYKNLIWLVKKGNSYPKLSKSYINDKGKEVLVLWGIHHPSSSADQQSLYQNADAYVFVGSSRYSKKFKPEIAIRPKVRDQEGRMNYYWTLVEPGDKITFEATGNLVVPRYAFAMERNAGSGIIISDTPVHDCNTTCQTPKGAINTSLPFHNIHPITIGKCPKYVKSTKLRLATGLRNVPSIQSRGLFGAIAGFIEGGWTGMVDGWYGYHHQNEQGSGYAADLKSTQNAIDEITNKVNSVIEKMNTQFTAVGKEFNHLEKRIENLNKKVDDGFLDIWTYNAELLVLLENERTLDYHDSNVKNLYEKVRSQLKNNAKEIGNGCFEFYHKCDNTCMESVKNGTYDYPKYSEEAKLNREEIDGVKLESTRIYQILAIYSTVASSLVLVVSLGAISFWMCSNGSLQCRICI

SEQ ID NO: 3866 - protein, 566 aa, synthetic construct; identical to SEQ ID NO: 2669
  REGION 1..566: note = hemagglutinin__InfluenzaA__ACZ96589

SEQ ID NO: 3867 - protein, 566 aa, synthetic construct
  REGION 1..566: note = hemagglutinin__InfluenzaA__ACZ96599
MKAILVVLLYTFATANADTLCIGYHANNSTDTVDTVLEKNVTVTHSVNLLEDKHNGKLCKLRGVAPLHLGKCNIAGWILGNPECESLSTASSWSYIVETSSSDNGTCYPGDFIDYEELREQLSSVSSFERFEIFPKTSSWPNHDSNKGVTAACPHAGAKSFYKNLIWLVKKGNSYPKLSKSYINDKGKEVLVLWGIHHPSTSADQQSLYQNADAYVFVGTSRYSKKFKPEIAIRPKVREQEGRMNYYWTLVEPGDKITFEATGNLVVPRYAFAMERNTGSGIIISDTPVHDCNTTCQTPKGAINTSLPFQNIHSITIGKCPKYVKSTKLRLATGLRNVPSIQSRGLFGAIAGFIEGGWTGMVDGWYGYHHQNEQGSGYAADLKSTQNAIDEITNKVNSVIEKMNTQFTAVGKEFNHLEKRIENLNKKVDDGFLDIWTYNAELLVLLENERTLDYHDSNVKNLYEKVRSQLKNNAKEIGNGCFEFYHKCDNTCMESVKNGTYDYPKYSEEAKLNREEIDGVKLESTRIYQILAIYSTVASSLVLVVSLGAISFWMCSNGSLQCRICI

SEQ ID NO: 3868 - protein, 566 aa, synthetic construct
  REGION 1..566: note = hemagglutinin__InfluenzaA__ACZ96609
MKAILVVLLYTFATANADTLCIGYHANNSTDTVDTVLEKNVTVTHSVNLLEDKHNGKLCKLRGVAPLHLGKCNIAGWILGNPECESLSTASSWSYIVETSSSDNGTCYPGDFINYEELREQLSSVSSFERFEIFPKTSSWPNHDSNKGVTAACPHAGAKSFYKNLIWLVKKGNSYPKLSKSYINDKGKEVLVLWGIHHPSTSADQQSLYQNADAYVFVGSSRYSKKFKPEIAIRPKVRDQEGRMNYYWTLVEPGDKITFEATGNLVVPRYAFAMERNAGSGIIISDTPVHDCNTTCQTPKGAINTSLPFQNIHPITIGTCPKYVKSTKLRLATGLRNVPSIQSRGLFGAIAGFIEGGWTGMVDGWYGYHHQNEQGSGYAADLKSTQNAIDEITNKVNSVIEKMNTQFTAVGKEFNHLEKRIENLNKKVDDGFLDIWTYNAELLVLLENERTLDYHDSNVKNLYEKVRSQLKNNAKEIGNGCFEFYHKCDNTCMESVKNGTYDYPKYSEEAKLNREEIDGVKLESTRIYQILAIYSTVASSLVLVVSLGAISFWMCSNGSLQCRICI

SEQ ID NO: 3869 - protein, 566 aa, synthetic construct; identical to SEQ ID NO: 2849
  REGION 1..566: note = hemagglutinin__InfluenzaA__ACZ96619

SEQ ID NO: 3870 - protein, 566 aa, synthetic construct; identical to SEQ ID NO: 2849
  REGION 1..566: note = hemagglutinin__InfluenzaA__ACZ96629

SEQ ID NO: 3871 - protein, 566 aa, synthetic construct; identical to SEQ ID NO: 2849
  REGION 1..566: note = hemagglutinin__InfluenzaA__ACZ96639

SEQ ID NO: 3872 - protein, 566 aa, synthetic construct; identical to SEQ ID NO: 2849
  REGION 1..566: note = hemagglutinin__InfluenzaA__ACZ96649

SEQ ID NO: 3873 - protein, 566 aa, synthetic construct; identical to SEQ ID NO: 2849
  REGION 1..566: note = hemagglutinin__InfluenzaA__ACZ96659

SEQ ID NO: 3874 - protein, 566 aa, synthetic construct; identical to SEQ ID NO: 2849
  REGION 1..566: note = hemagglutinin__InfluenzaA__ACZ96669

SEQ ID NO: 3875 - protein, 566 aa, synthetic construct; identical to SEQ ID NO: 2849
  REGION 1..566: note = hemagglutinin__InfluenzaA__ACZ96679

SEQ ID NO: 3876 - protein, 566 aa, synthetic construct; identical to SEQ ID NO: 2849
  REGION 1..566: note = hemagglutinin__InfluenzaA__ACZ96689

SEQ ID NO: 3877 - protein, 566 aa, synthetic construct; identical to SEQ ID NO: 2849
  REGION 1..566: note = hemagglutinin__InfluenzaA__ACZ96699

SEQ ID NO: 3878 - protein, 566 aa, synthetic construct; identical to SEQ ID NO: 2849
  REGION 1..566: note = hemagglutinin__InfluenzaA__ACZ96719

SEQ ID NO: 3879 - protein, 566 aa, synthetic construct; identical to SEQ ID NO: 2849
  REGION 1..566: note = hemagglutinin__InfluenzaA__ACZ96729

SEQ ID NO: 3880 - protein, 566 aa, synthetic construct; identical to SEQ ID NO: 2849
  REGION 1..566: note = hemagglutinin__InfluenzaA__ACZ96739

SEQ ID NO: 3881 - protein, 566 aa, synthetic construct
  REGION 1..566: note = hemagglutinin__InfluenzaA__ACZ96749
MKTILVVLLYTFATANADTLCIGYHANNSTDTVDTVLEKNVTVTHSVNLLEDKHNGKLCKLRGVAPLHLGKCNIAGWILGNPECESLSTASSWSYIVETSSSDNGTCYPGDFIDYEELREQLSSVSSFERFEIFPKTSSWPNHDSNKGVTAACPHAGAKSFYKNLIWLVKKGNSYPKLSKSYINDKGKEVLVLWGIHHPSTSADQQSLYQNADAYVFVGSSRYSKKFKPEIAIRPKVRDQEGRMNYYWTLVEPGDKITFEATGNLVVPRYAFAMERNAGSGIIISDTPVHDCNTTCQTPKGAINTSLPFQNIHPITIGKCPKYVKSTKLRLATGLRNVPSIQSRGLFGAIAGFIEGGWTGMVDGWYGYHHQNEQGSGYAADLKSTQNAIDEITNKVNSVIEKMNTQFTAVGKEFNHLEKRIENLNKKVDDGFLDIWTYNAELLVLLENERTLDYHDSNVKNLYEKVRSQLKNNAKEIGNGCFEFYHKCDNTCMESVKNGTYDYPKYSEEAKLNREEIDGVKLESTRIYQILAIYSTVASSLVLVVSLGAISFWMCSNGSLQCRICI

SEQ ID NO: 3882 - protein, 566 aa, synthetic construct; identical to SEQ ID NO: 2656
  REGION 1..566: note = hemagglutinin__InfluenzaA__ACZ96759

SEQ ID NO: 3883 - protein, 566 aa, synthetic construct; identical to SEQ ID NO: 2656
  REGION 1..566: note = hemagglutinin__InfluenzaA__ACZ96769

SEQ ID NO: 3884 - protein, 566 aa, synthetic construct; identical to SEQ ID NO: 2656
  REGION 1..566: note = hemagglutinin__InfluenzaA__ACZ96779

SEQ ID NO: 3885 - protein, 566 aa, synthetic construct; identical to SEQ ID NO: 2656
  REGION 1..566: note = hemagglutinin__InfluenzaA__ACZ96789

SEQ ID NO: 3886 - protein, 566 aa, synthetic construct
  REGION 1..566: note = hemagglutinin__InfluenzaA__ACZ96809
MKAILVVLLYTFATANADTLCIGYHANNSTDTVDTVLEKNVTVTHSVNLLEDKHNGKLCKLRGVAPLHLGKCNIAGWILGNPECESLSTASSWSYIVETSSSDNGTCYPGDFIDYEELREQLSSVSSFERFEIFPKTSSWPNHDSNKGVTAACPHAGAKSFYKNLIWLVKKGNSYPKLSKSYINDKGKEVLVLWGIHHPSTNADQQSLYQNADAYVFVGTSRYSKKFKPEIAIRPKVRDQEGRMNYYWTLVEPGDKITFEATGNLVVPRYAFAMERNAGSGIIISDTPVHDCNTTCQTPKGAINTSLPFQNIHPITIGKCPKYVKSTKLRLATGLRNVPSIQSRGLFGAIAGFIEGGWTGMVDGWYGYHHQNEQGSGYAADLKSTQNAIDEITNKVNSVIEKMNTQFAAVGKEFNHLEKRIENLNKKVDDGFLDIWTYNAELLVLLENERTLDYHDSNVKNLYEKVRSQLKNNAKEIGNGCFEFYHKCDNTCMESVKNGTYDYPKYSEEAKLNREEIDGVKLESTRIYQILAIYSTVASSLVLVVSLGAISFWMCSNGSLQCRICI

SEQ ID NO: 3887 - protein, 566 aa, synthetic construct; identical to SEQ ID NO: 2656
  REGION 1..566: note = hemagglutinin__InfluenzaA__ACZ96819

SEQ ID NO: 3888 - protein, 566 aa, synthetic construct; identical to SEQ ID NO: 2656
  REGION 1..566: note = hemagglutinin__InfluenzaA__ACZ96829

SEQ ID NO: 3889 - protein, 566 aa, synthetic construct; identical to SEQ ID NO: 2656
  REGION 1..566: note = hemagglutinin__InfluenzaA__ACZ96839

SEQ ID NO: 3890 - protein, 566 aa, synthetic construct; identical to SEQ ID NO: 3809
  REGION 1..566: note = hemagglutinin__InfluenzaA__ACZ96849

SEQ ID NO: 3891 - protein, 566 aa, synthetic construct; identical to SEQ ID NO: 2669
  REGION 1..566: note = hemagglutinin__InfluenzaA__ACZ96859

SEQ ID NO: 3892 - protein, 566 aa, synthetic construct; identical to SEQ ID NO: 2656
  REGION 1..566: note = hemagglutinin__InfluenzaA__ACZ96869

SEQ ID NO: 3893 - protein, 566 aa, synthetic construct; identical to SEQ ID NO: 2656
  REGION 1..566: note = hemagglutinin__InfluenzaA__ACZ96879

SEQ ID NO: 3894 - protein, 566 aa, synthetic construct
  REGION 1..566: note = hemagglutinin__InfluenzaA__ACZ96899
MKAILVVLLYTFATANADTLCIGYHANNSTDTVDTVLEKNVTVTHSVNLLEDKHNGKLCKLRGVAPLHLGKCNIAGWILGNPECESLSTASSWSYIVETSSSDNGTCYPGDFIDYEELREQLSSVSSFERFEIFPKTSSWPNHDSNKGVTAACPHAGAKSFYKNLIWLVKKGNSYPKLSKSYINDKGKEVLVLWGIHHSSTSADQQSLYQNADAYVFVGSSRYSKKFKPEIAIRPKVRDQEGRMNYYWTLVEPGDKITFEATGNLVVPRYAFAMERNAGSGIIISDTPVHDCNTTCQTPKGAINTSLPFQNIHPITIGKCPKYVKSTKLRLATGLRNVPSIQSRGLFGAIAGFIEGGWTGMVDGWYGYHHQNEQGSGYAADLKSTQNAIDEITNKVNSVIEKMNTQFTAVGKEFNHLEKRIENLNKKVDDGFLDIWTYNAELLVLLENERTLDYHDSNVKNLYEKVRSQLKNNAKEIGNGCFEFYHKCDNTCMESVKNGTYDYPKYSEEAKLNREEIDGVKLESTRIYQILAIYSTVASSLVLVVSLGAISFWMCSNGSLQCRICI

SEQ ID NO: 3895 - protein, 566 aa, synthetic construct; identical to SEQ ID NO: 2656
  REGION 1..566: note = hemagglutinin__InfluenzaA__ACZ96909

SEQ ID NO: 3896 - protein, 566 aa, synthetic construct; identical to SEQ ID NO: 2656
  REGION 1..566: note = hemagglutinin__InfluenzaA__ACZ96919

SEQ ID NO: 3897 - protein, 566 aa, synthetic construct; identical to SEQ ID NO: 2656
  REGION 1..566: note = hemagglutinin__InfluenzaA__ACZ96929

SEQ ID NO: 3898 - protein, 566 aa, synthetic construct; identical to SEQ ID NO: 2656
  REGION 1..566: note = hemagglutinin__InfluenzaA__ACZ96939

SEQ ID NO: 3899 - protein, 566 aa, synthetic construct
  REGION 1..566: note = hemagglutinin__InfluenzaA__ACZ96949
MKAILVVLLYTFATANADTLCIGYHANNSTDTVDTVLEKNVTVTHSVNLLEDKHNGKLCKLRGVAPLHLGKCNIAGWILGNPECESLSTASSWSYIVETSSSDNGTCYPGDFIDYEELREQLSSVSSFERFEIFPKTSSWPNHDSNKGVTAACPHAGAKSFYKNLIWLVKKGNSYPKLSKSYINDKGKEVLVLWGIHHPSTSADQQSLYQNADAYVFVGSSRYSKKFKPEIAIRPKVRDQEGRMNYYWTLVEPGDKITFEATGNLVVPRYAFAMERNAGSGIIISDTPVHDCNTTCQTPKGAINTSLPFQNIHPITIGKCPKYVKSTKLRLATGLRNVPSIQSRGLFGAIAGFIEGGWTGMVDGWYGYHHQNEQGSGYAADLKSTQNAIDEITNKVNSVIEKMNTQFTAVGKEFNHLEKRIENLNKKVDDGFLDIWTYNAEMLVLLENERTLDYHDSNVKNLYEKVRSQLKNNAKEIGNGCFEFYHKCDNTCMESVKNGTYDYPKYSEEAKLNREEIDGVKLESTRIYQILAIYSTVASSLVLVVSLGAISFWMCSNGSLQCRICI

SEQ ID NO: 3900 - protein, 566 aa, synthetic construct; identical to SEQ ID NO: 2656
  REGION 1..566: note = hemagglutinin__InfluenzaA__ACZ97021

SEQ ID NO: 3901 - protein, 566 aa, synthetic construct; identical to SEQ ID NO: 3023
  REGION 1..566: note = hemagglutinin__InfluenzaA__ACZ97343

SEQ ID NO: 3902 - protein, 566 aa, synthetic construct; identical to SEQ ID NO: 3023
  REGION 1..566: note = hemagglutinin__InfluenzaA__ACZ97353

SEQ ID NO: 3903 - protein, 566 aa, synthetic construct; identical to SEQ ID NO: 2656
  REGION 1..566: note = hemagglutinin__InfluenzaA__ACZ97363

SEQ ID NO: 3904 - protein, 566 aa, synthetic construct
  REGION 1..566: note = hemagglutinin__InfluenzaA__ACZ97383
MKAILVVLLYTFATANADTLCIGYHANNSTDTVDTVLEKNVTVTHSVNLLEDKHNGKLCKLRGVAPLHLGKCNIAGWILGNPECESLSTASSWSYIVETSTSDNGTCYPGDFIDYEELREQLSSVSSFERFEIFPKTSSWPNHDSNKGVTAACPHAGAKSFYKNLIWLVKKGNSYPKLSKSYINDKGKEVLVLWGIHHPSTSADQQSLYQNADAYVFVGSSRYSKKFKPEIAIRPKVRDQEGRMNYYWTLVEPGDKITFEATGNLVVPRYAFAMERNAGSGIIISDTPVHDCNTTCQTPKGAINTSLPFQNIHPITIGKCPKYVKSTKLRLATGLRNVPSIQSRGLFGAIAGFIEGGWTGMVDGWYGYHHQNEQGSGYAADLKSTQNAIDEITNKVNSVIEKMNTQFTAVGKEFNHLEKRIENLNKKVDDGFLDIWTYNAELLVLLENERTLDYHDSNVKNLYEKVRSQLKNNAKEIGNGCFEFYHKCDNTCMESVKNGTYDYPKYSEEAKLNREEIDGVKLESTRIYQILAIYSTVASSLVLVVSLGAISFWMCSNGSLQCRICI

SEQ ID NO: 3905 - protein, 566 aa, synthetic construct; identical to SEQ ID NO: 2656
  REGION 1..566: note = hemagglutinin__InfluenzaA__ACZ97393

SEQ ID NO: 3906 - protein, 566 aa, synthetic construct
  REGION 1..566: note = hemagglutinin__InfluenzaA__ACZ98178
MKAILVVLLYTFATANADTLCIGYHANNSTDTVDTVLEKNVTVTHSVNLLEDKHYGKLCKLRGVAPLHLGKCNIAGWILGNPECESLSTASSWSYIVETSSSDNGTCYPGDFIDYEELREQLSSVSSFERFEIFPKTSSWPNHDSNKGVTTACPHAGAKSFYKNLIWLVKKGNSYPKLSKSYINDKGKEVLVLWGIHHPSTSADQQSLYQNADAYVFVGTSRYSKKFKPEIAIRPKVRDQEGRMNYYWTLVEPGDKITFEATGNLVVPRYAFAMERNAGSGIIISDTPVHDCNTTCQTPKGAINTSLPFQNIHPITIGKCPKYVKSTKLRLATGLRNVPSIQSRGLFGAIAGFIEGGWTGMVDGWYGYHHQNEQGSGYAADLKSTQNAIDEITNKVNSVIEKMNTQFTAVGKEFNHLEKRIENLNKKVDDGFLDIWTYNAELLVLLENERTLDYHDSNVKNLYEKVRSQLKNNAKEIGNGCFEFYHKCDNTCMESVKNGTYDYPKYSEEAKLNREEIDGVKLESTRIYQILAIYSTVASSLVLVVSLGAISFWMCSNGSLQCRICI

SEQ ID NO: 3907 - protein, 566 aa, synthetic construct; identical to SEQ ID NO: 2656
  REGION 1..566: note = hemagglutinin__InfluenzaA__ACZ98188

SEQ ID NO: 3908 - protein, 566 aa, synthetic construct; identical to SEQ ID NO: 2849
  REGION 1..566: note = hemagglutinin__InfluenzaA__ACZ98198

SEQ ID NO: 3909 - protein, 566 aa, synthetic construct; identical to SEQ ID NO: 2669
  REGION 1..566: note = hemagglutinin__InfluenzaA__ACZ98208

SEQ ID NO: 3910 - protein, 566 aa, synthetic construct; identical to SEQ ID NO: 2669
  REGION 1..566: note = hemagglutinin__InfluenzaA__ACZ98218

SEQ ID NO: 3911 - protein, 566 aa, synthetic construct; identical to SEQ ID NO: 2669
  REGION 1..566: note = hemagglutinin__InfluenzaA__ACZ98228

SEQ ID NO: 3912 - protein, 566 aa, synthetic construct; identical to SEQ ID NO: 2669
  REGION 1..566: note = hemagglutinin__InfluenzaA__ACZ98238

SEQ ID NO: 3913 - protein, 566 aa, synthetic construct; identical to SEQ ID NO: 3298
  REGION 1..566: note = hemagglutinin__InfluenzaA__ACZ98248

SEQ ID NO: 3914 - protein, 566 aa, synthetic construct; identical to SEQ ID NO: 2669
  REGION 1..566: note = hemagglutinin__InfluenzaA__ACZ98258

SEQ ID NO: 3915 - protein, 566 aa, synthetic construct; identical to SEQ ID NO: 2669
  REGION 1..566: note = hemagglutinin__InfluenzaA__ACZ98268

SEQ ID NO: 3916 - protein, 566 aa, synthetic construct; identical to SEQ ID NO: 3809
  REGION 1..566: note = hemagglutinin__InfluenzaA__ACZ98278

SEQ ID NO: 3917 - protein, 566 aa, synthetic construct; identical to SEQ ID NO: 3809
  REGION 1..566: note = hemagglutinin__InfluenzaA__ACZ98288

SEQ ID NO: 3918 - protein, 566 aa, synthetic construct
  REGION 1..566: note = hemagglutinin__InfluenzaA__ACZ98298
MKAILVVLLYTFATANADTLCIGYHANNSTDTVDTVLEKNVTVTHSVNLLEDKHNGKLCKLRGVAPLHLGKCNIAGWILGNPECESLSTASSWSYIVETSSSDNGTCYPGDFIDYEELREQLSSVSSFEKFEIFPKTSSWPNHDSNKGVTAACPHAGAKSFYKNLIWLVKKGNSYPKLSKSYINDKGKEVLVLWGIHHPSTSADQQSLYQNADAYVFVGSSRYSKKFKPEIAIRPKVRDQEGRMNYYWTLVEPGDKITFEATGNLVVPRYAFAMERNAGSGIIISDTPVHDCNTTCQTPKGAINTSLPFQNIHPITIGKCPKYVKSTKLRLATGLRNVPSIQSRGLFGAIAGFIEGGWTGMVDGWYGYHHQNEQGSGYAADLKSTQNAIDGITNKVNSVIEKMNTQFTAVGKEFNHLEKRIENLNKKVDDGFLDIWTYNAELLVLLENERTLDYHDSNVKNLYEKVRSQLKNNAKEIGNGCFEFYHKCDNTCMESVKNGTYDYPKYSEEAKLNREEIDGVKLESTRIYQILAIYSTVASSLVLVVSLGAISFWMCSNGSLQCRICI

SEQ ID NO: 3919 - protein, 566 aa, synthetic construct
  REGION 1..566: note = hemagglutinin__InfluenzaA__ACZ98318
MKAILVVLLYTFATANADTLCIGYHANNSTDTVDTVLEKNVTVTHSVNLLEDKHNGKLCKLRGVAPLHLGKCNIAGWILGNPECESLSTASSWSYIVETSSSDNGTCYPGDFIDYEELREQLSSVSSFERFEIFPKTSSWPNHDSNKGVTAACPHAGAKSFYKNLIWLVKKGNSYPKLSKSYINDKGKEVLVLWGIHHPSTSADQQSLYQNADAYVFVGTSRYSKKFKPEIAIRPKVRDQEGRMNYYWTLVEPGDKITFEATGNLVVPRYAFAMERNAGSGIIISDTPVHDCNTTCQTPKGAINTSLPFQNIHPITIGKCPKYVKSTKLRLATGLRNVPSIQSRGLFGAIAGFIEGGWTGMVDGWYGYHHQNEQGSGYAADLKSTQNAIDEITNKVNSVIEKMNTQFTAVGKEFNHLEKRIENLNKKVDDGFLDIWTYNAELLVLLENERTLDYHDSNVKNLYEKVRSQLKNNAKEIGNGCFEFYHKCDNTCMESVKNGTYDYPKYSEEAKLNREEIDGVKLESTRIYHILAIYSTVASSLVLVVSLGAISFWMCSNGSLQCRICI

SEQ ID NO: 3920 - protein, 566 aa, synthetic construct; identical to SEQ ID NO: 2911
  REGION 1..566: note = hemagglutinin__InfluenzaA__ACZ98328

SEQ ID NO: 3921 - protein, 566 aa, synthetic construct; identical to SEQ ID NO: 2669
  REGION 1..566: note = hemagglutinin__InfluenzaA__ACZ98338

SEQ ID NO: 3922 - protein, 566 aa, synthetic construct; identical to SEQ ID NO: 3809
  REGION 1..566: note = hemagglutinin__InfluenzaA__ACZ98348

SEQ ID NO: 3923 - protein, 566 aa, synthetic construct; identical to SEQ ID NO: 2669
  REGION 1..566: note = hemagglutinin__InfluenzaA__ACZ98358

SEQ ID NO: 3924 - protein, 566 aa, synthetic construct; identical to SEQ ID NO: 2669
  REGION 1..566: note = hemagglutinin__InfluenzaA__ACZ98368

SEQ ID NO: 3925 - protein, 566 aa, synthetic construct; identical to SEQ ID NO: 2911
  REGION 1..566: note = hemagglutinin__InfluenzaA__ACZ98388

SEQ ID NO: 3926 - protein, 566 aa, synthetic construct; identical to SEQ ID NO: 2669
  REGION 1..566: note = hemagglutinin__InfluenzaA__ACZ98398

SEQ ID NO: 3927 - protein, 566 aa, synthetic construct; identical to SEQ ID NO: 2669
  REGION 1..566: note = hemagglutinin__InfluenzaA__ACZ98408

SEQ ID NO: 3928 - protein, 566 aa, synthetic construct; identical to SEQ ID NO: 2849
  REGION 1..566: note = hemagglutinin__InfluenzaA__ACZ98418

SEQ ID NO: 3929 - protein, 566 aa, synthetic construct; identical to SEQ ID NO: 2669
  REGION 1..566: note = hemagglutinin__InfluenzaA__ACZ98428

SEQ ID NO: 3930 - protein, 566 aa, synthetic construct; identical to SEQ ID NO: 2669
  REGION 1..566: note = hemagglutinin__InfluenzaA__ACZ98438

SEQ ID NO: 3931 - protein, 566 aa, synthetic construct; identical to SEQ ID NO: 2669
  REGION 1..566: note = hemagglutinin__InfluenzaA__ACZ98448

SEQ ID NO: 3932 - protein, 566 aa, synthetic construct; identical to SEQ ID NO: 3809
  REGION 1..566: note = hemagglutinin__InfluenzaA__ACZ98458

SEQ ID NO: 3933 - protein, 566 aa, synthetic construct
  REGION 1..566: note = hemagglutinin__InfluenzaA__ACZ98546
MKAILVVLLYTFATANADTLCIGYHANNSTDTVDTVLEKNVTVTHSVNLLEDKHNGKLCKLRGVAPLHLGKCNIAGWILGNPECESLSTASSWSYIVETSSSDNGTCYPGDFIDYEELREQLSSVSSFERFEIFPKTSSWPNHDPNKGVTAACPHAGAKSFYKNLIWLVKKGNSYPKLSKSYINDKGKEVLVLWGIHHPSTSADQQSLYQNADAYVFVGTSRYSKKFKPEIAIRPKVRDQEGRMNYYWTLVEPGDKITFEATGNLVVPRYAFAMERNAGSGIIISDTPVHDCNTTCQTPKGAINTSLPFQNIHPITIGKCPKYVKSTKLRLTTGLRNVPSIQYRGLFGAITGFIEGGWTGMVDGWYGYHHQNEQGSGYAADLKSTQNAIDEITNKVNSVIEKMNTQFTAVGKEFNHLEKRIENLNKKVDDGFLDIWTYNAELLVLLENERTLDYHDSNVKNLYEKVRSQLKNNAKEIGNGCFEFYHKCDNTCMESVKNGTYDYPKYSEEAKLNREEIDGVKLESTRIYQILAIYSTVASSLVLVVSLGAISFWMCSNGSLQCRICI

SEQ ID NO: 3934 - protein, 566 aa, synthetic construct
  REGION 1..566: note = hemagglutinin__InfluenzaA__ACZ98560
MKAIRVVLLYTFATANADTLCIGYHANNSTDTVDTVLEKNVTVTHSVNLLEDKHNGKLCKLRGVAPLHLGKCNIAGWILGNPECESLSTASSWSYIVETSSSDNGTCYPGDFIDYEELREQLSSVSSFERFEIFPKTSSWPNHDPNKGVTAACPHAGAKSFYKNLIWLVKKGNSYPKLSKSYINDKGKEVLVLWGIHHPSTSADQQSLYQNADAYVFVGTSRYSKKFKPEIAIRPKVRDQEGRMNYYWTLVEPGDKITFEATGNLVVPRYAFAMERNAGSGIIISDTPVHDCNTTCQTPKGAINTSLPFQNIHPITIGKCPKYVKSPKLRLATGMRNVPFIQYRGLFGAITGFIEGGWTGMVDGWYGYHHQNEQGSGYAADLKSTQNAIDEITNKVNSVIEKMNTQFTAVGKEFNHLEKRIENLNKKVDDGFLDIWTYNAELLVLLENERTLDYHDSNVKNLYEKVRSQLKNNAKEIGNGCFEFYHKCDNTCMESVKNGTYDYPKYSEEAKLNREEIDGVKLESTRIYQILAIYSTVASSLVLVVSLGAISFWMCSNGSLQCRICI

SEQ ID NO: 3935 - protein, 566 aa, synthetic construct
  REGION 1..566: note = hemagglutinin__InfluenzaA__ACZ98567
MKAILVVLLYTFATANADTLCIGYHANNSTDTVDTVLEKNVTVTHSVNLLEDKHNGKLCKLRGVAPLHLGKCNIAGWILGNPECESLSTASSWSYIVETSSSDNGTCYPGDFIDYEELREQLSSVSSFERFEIFPKTSSWPNHDPNKGVTAACPHAGAKSFYKNLIWLVKKGNSYPKLSKSYINDKGKEVLVLWGIHHPSTSADQQSLYQNADAYVFVGTSRYSKKFKPEIAIRPKVRDQEGRMNYYWTLVEPGDKITFEATGNLVVPRYAFAMERNAGSGIIISDTPVHDCNTTCQTPKGAINTSLPFQNIHPITIGKCPKYVKSPKLRLASGMRNVPFIQSRGLFGAITGFIEEGWTGMVDGWYGFHHQNEQGSGYAADLKSTQNAIDEITNKVNSVIEKMNTQFTAVGKEFNHLEKRIENLNKKVDDGFLDIWTYNAELLVLLENERTLDYHDSNVKNLYEKVRSQLKNNAKEIGNGCFEFYHKCDNTCMESVKNGTYDYPKYSEEAKLNREEIDGVKLESTRIYQILAIYSTVASSLVLVVSLGAISFWMCSNGSLQCRICI

SEQ ID NO: 3936 - protein, 566 aa, synthetic construct; identical to SEQ ID NO: 2656
  REGION 1..566: note = hemagglutinin__InfluenzaA__ACZ98671

SEQ ID NO: 3937 - protein, 566 aa, synthetic construct; identical to SEQ ID NO: 2656
  REGION 1..566: note = hemagglutinin__InfluenzaA__ACZ98681

SEQ ID NO: 3938 - protein, 566 aa, synthetic construct; identical to SEQ ID NO: 2669
  REGION 1..566: note = hemagglutinin__InfluenzaA__ACZ98691

SEQ ID NO: 3939 - protein, 566 aa, synthetic construct
  REGION 1..566: note = hemagglutinin__InfluenzaA__ADA60799
MKAILVVLLYTFATANADTLCIGYHANNSTDTVDTVLERNVTVTHSVNLLEDKHNGKLCKLRGVAPLHLGKCNIAGWILGNPECESLSTASSWSYIVETSSSDNGTCYPGDFIDYEELREQLSSVSSFERFEIFPKTSSWPNHDSNKGVTAACPHAGAKSFYKNLIWLVKKGNSYPKLSKSYINDKGKEVLVLWGIHHPSTSADQQSLYQNADAYVFVGTSRYSKKFKPEIAIRPKVRDQEGRMNYYWTLVEPGDKITFEATGNLVVPRYAFAMERNAGSGIIISDTPVHDCNTTCQTPKGAINTSLPFQNIHPITIGKCPKYVKSTKLRLATGLRNIPSIQSRGLFGAIAGFIEGGWTGMVDGWYGYHHQNEQGSGYAADLKSTQNAIDEITNKVNSVIEKMNTQFTAVGKEFNHLEKRIENLNKKVDDGFLDIWTYNAELLVLLENERTLDYHDSNVKNLYEKVRSQLKNNAKEIGNGCFEFYHKCDNTCMESVKNGTYDYPKYSEEAKLNREEIDGVKLESTRIYQILAIYSTVASSLVLVVSLGAISFWMCSNGSLQCRICI

SEQ ID NO: 3940 - protein, 566 aa, synthetic construct; identical to SEQ ID NO: 3833
  REGION 1..566: note = hemagglutinin__InfluenzaA__ADA69302

SEQ ID NO: 3941 - protein, 566 aa, synthetic construct; identical to SEQ ID NO: 3833
  REGION 1..566: note = hemagglutinin__InfluenzaA__ADA69312

SEQ ID NO: 3942 - protein, 566 aa, synthetic construct; identical to SEQ ID NO: 3833
  REGION 1..566: note = hemagglutinin__InfluenzaA__ADA69322

SEQ ID NO: 3943 - protein, 566 aa, synthetic construct; identical to SEQ ID NO: 3833
  REGION 1..566: note = hemagglutinin__InfluenzaA__ADA69332

SEQ ID NO: 3944 - protein, 566 aa, synthetic construct; identical to SEQ ID NO: 3770
  REGION 1..566: note = hemagglutinin__InfluenzaA__ADA70329

SEQ ID NO: 3945 - protein, 565 aa, synthetic construct
  REGION 1..565: note = hemagglutinin__InfluenzaA__ADA71150
MKVKLLVLLCTFTATYADTICIGYHANNSTDTVDTVLEKNVTVTHSVNLVENSHNGKLCLLKGIAPLQLGNCSVAGWILGNPECELLISKESWSYIVEKPNPENGTCYPGHFADYEELREQLSSVSSFERFEIFPKESSWPNHTVTGVSASCSHNGESSFYRNLLWLTGKNGLYPNLSKSYANNKEKEVLVLWGVHHPPSISNQKTLYHTENAYVSVVSSHYSRKFTPEIAKRPKVRDQEGRINYYWTLLEPGDTIIFEANGNLIAPRYAFALSRGFGSGIINSNAPMDKCDAKCQTPQGAINSSLPFQNVHPVTIGECPKYVRSAKLRMVTGLRNIPSIQSRGLFGAIAGFIEGGWTGMVDGWYGYHHQNEQGSGYAADQKSTQNAINGITKKVNSVIEKMNTQFTAVGKEFNKLERRMENLNKKVDDGFIDIWTYNAELLVLLENERTLDFHDSNVKNLYEKVKSQLKNNAKEIGNGCFEFYHKCNDECMESVKNGTYDYPKYSEESKLNREKIDGVKLESMGVYQILAIYSTVASSLVLLVSLGAISFWMCSNGSLQCRICI

SEQ ID NO: 3946 - protein, 566 aa, synthetic construct
  REGION 1..566: note = hemagglutinin__InfluenzaA__ADA71152
MKTIIALSYILCLVFAQKLPGNDNSTATLCLGHHAVPNGTIVKTITNDQIEVTNATELVQSSSTGEICDSPHQILDGGNCTLIDALLGDPQCDGFQNKKWDLFVERSKAYSNCYPYDVPDYASLRSLVASSGTLEFNNESFNWTGVTQNGTSSACIRRSNNSFFSRLNWLTHLKFKYPALNVTMPNNEQFDKLYIWGVHHPGTDNDQIFLYAQASGRITVSTKRSQQTVIPNIGSRPRVRNIPSRISIYWTIVKPGDILLINSTGNLIAPRGYFKIRSGKSSIMRSDAPIGKCNSECITPNGSIPNDKPFQNVNRITYGACPRYVKQNTLKLATGMRNVPEKQTRGIFGAIAGFIENGWEGMVDGWYGFRHQNSEGRGQAADLKSTQAAIDQINGKLNRLIGKTNEKFHQIEKEFSEVEGRIQDLEKYVEDTKIDLWSYNAELLVALENQHTIDLTDSEMNKLFEKTKKQLRENAEDMGNGCFKIYHKCDNACIGSIRNGTYDHDVYRDEALNNRFQIKGVELKSGYKDWILWISFAISCFLLCVALLGFIMWACQKGNIRCNICI

SEQ ID NO: 3947 - protein, 565 aa, synthetic construct
  REGION 1..565: note = hemagglutinin__InfluenzaA__ADA71154
MKVKLLVLLCTFTATYADTICIGYHANNSTDTVDTVLEKNVTVTHSVNLLENSHNGKLCLLKGIAPLQLGNCSVAGWILGNSECELLISKESWSYIVEKPNPENGTCYFGHFADYEELREQFGSVSSFERFEIFPKESSWPNHTVTGVSASCSHNGESSFYRNLLWLTGKNGLYPNLSKSYANNKEKEVLVLWGVHHPPSINDQKTLYHTENAYVSVVSSHYSRKFTPEIAKRPKVRDQEGRINYYWTLLEPRDTIIFEANGNLIAPRYAFALSRGFGSGIINSNAPMDKCDAKCQTPQGAINSSLPFQNVHPVTIGECPKYVRSAKLRMVTGLRNIPSIQSRGLFGAIAGFIEGGWTGMVDGWYGYHHQNEQGSGYAADQKSTQNAINGITNKVNSVIEKMNTQFTAVGKEFNKLERRMENLNKKVDDGFIDIWTYNAELLVLLENERTLDFHDSNVKNLYEKVKSQLKNNAKEIGNGCFEFYHKCNDECMESVKNGTYDYPKYSEESKLNREKIDGVKLESMGVYQILAIYSTVASSLVLLVSLGAISFWMCSNGSLQCRICI

SEQ ID NO: 3948 - protein, 565 aa, synthetic construct
  REGION 1..565: note = hemagglutinin__InfluenzaA__ADA71158
MKVKLLVLLCTFTATYADTICIGYHANNSTDTVDTVLEKNVTVTHSVNLLENSHNGKLCLLKGIAPLQLGNCSVAGWILGNPECELLISKETWSYIVEKPNPENGTCYPGHFADYEELREQLSSVSSFERFEIFPKESSWPNHTVTGVSASCSHNGESSFYRNLLWLTGKNGLYPNLSKSYANNKEKEVLVLWGVHHPPSINDQRTLYHTENAYVSVVSSHYSRKFTPEIAKRPKVRDQEGRINYYWTLLEPRDTIIFEANGNLIAPRYAFALSRGFGSGIINSNAPMDKCDAKCQTPQGAINSSLPFQNVHPVTIGECPKYVRSAKLRMVTGLRNTPSIQSRGLFGAIAGFIEGGWTGMVDGWYGYHHQNEQGSGYAADQKSTQNAINGITNKVNSVIEKMNTQFTAVGKEFNKLESLMDILNKKVDDGFIDIWTYNAELLVLLENERTLDFHDSNVKNLYEKVKSQLKNNAKEIGNGCFEFYHKCNDECMESVKNGTYDYPKYSEESKLNREKIDGVKLESMGVYQILAIYSTVASSLVLLVSLGAISFWMCSNGSLQCRICI

SEQ ID NO: 3949 - protein, 566 aa, synthetic construct; identical to SEQ ID NO: 2434
  REGION 1..566: note = hemagglutinin__InfluenzaA__ADA71162

SEQ ID NO: 3950 - protein, 565 aa, synthetic construct
  REGION 1..565: note = hemagglutinin__InfluenzaA__ADA71164
MKVKLLVLLCTFTATYADTICIGYHANNSTDTVDTVLEKNVTVTHSVNLLENSHNGKLCLLKGIAPLQLGNCSVAGWILGNPECELLVSKESWSYIVEKPNPENGTCYPGHFADYEELREQLSSVSSFERFEIFPKESSWPNHTVTGASASCSHNGENSFYRNLLWLTGKNGLYPNLSKSYANNKEKEVLVLWGVHHPPSIADQKTLYHTENAYVSVVSSHYSRKFTPEIAKRPKVRDQEGRIHYYWTLLEPGDTIIFEANGNLIAPRYAFALSRGFGSGIINSNAPMDKCDATCQTPQGAINSSLPFQNVHPVTIGECPKYVRSAKLRMVTGLRNIPSIQSRGLFGAIAGFIEGGWTGMVDGWYGYHHQNEQGSGYAADQKSTQNAINGITNKVNSVIEKMNTQFTAVGKEFNKLERRMENLNKKVDDGFIDIWTYNAELLVLLENERTLDFHDSNVKNLYEKVISQLKINAKDLGYGCFEFYHKCNDECMESVKNGTYDYPKYSEESKLNREKIDGVKLESMGVYQILAIYSTVASSLVLLVSLGAISFWMCSNGSLQCRICI

SEQ ID NO: 3951 - protein, 565 aa, synthetic construct
  REGION 1..565: note = hemagglutinin__InfluenzaA__ADA71168
MKVKLLVLLCTFTATYADTICIGYHANNSTDTVDTVLEKNVTVTHSVNLLEDNHNGKLCLLKGKAPLQLGNCSVAGWILGNPECGLLISKESWSYIVERPNPENGTCYPGHFADYEELREQLSSVSSFERFEIFPKESSWPNHTVTGVSASCSHNGESSFYKNLLWLTGKNGLYPNLSKSYANNKEKEVLVLWGVHHPPNIGVQMTLYHKENAYVSVVSSHYSRKFTPEIVKRPKVRDQEGRINYYWTLLEPGDTIIFEANGNLIAPRYAFALSRGFGSGIINSNAPMDECDAKCQTPQGAINSSLPFQNVHPVTIGECPKYVRSAKLRMVTGLRNIPSIQSRGLFGAIAGFIEGGWTGMVDGWYGYHHQNEQGSGYAADQKSTQNAINGITNKVNSVIEKMNTQFTAVGKEFNKLERRMENLNKKVDDGFIDIWTYNAELLVLLENERTLDFHDSNVKNLYEKVKSQLKNNAKEIGNGCFEFYHKCNDECMESVKNGTYDYPKYSEESKLNREKIDGVKLESMGVYQILAIYSTVASSLVLLVSLGAISFWMCSNGSLQCRICI

SEQ ID NO: 3952 - protein, 565 aa, synthetic construct
  REGION 1..565: note = hemagglutinin__InfluenzaA__ADA71170
MKVKLLVLLCTFTATYADTICIGYHANNSTDTVDTVLEKNGTVTPSGNLVENSPNGKLCLLKGITPLQLGKCSVAGWILGNPKWELLVSKESWSYIGKKPNPENGTCYPGHFPYYEELREQLSSVSSFERFEIFPKESSWPNHTVTGASASCSHNGENSFYRNLLWLTGKNGLYPNLSKSYANNKEKEVLVLWGVHHPPNIADQKTLYHTENAYVSVVSSHYSRKFTPEIAKRPKVRDQEGRINYYWTLLEPGDTIIFEANGNLIAPRYAFALSRGFGSGIINSNAPMDKCDAKCQTPQGAINSSLPFQNVHPVTIGECPKYVRSAKLRMVTGLRNIPSIQSRGLFGAIAGFIEGGWTGMVDGWYGYHHQNEQGSGYAADQKSTQNAINGITNKVNSVIEKMNTQFTAVGKEFNKLERRMENLNKKVDDGFIDIWTYNAELLVLLENERTLDFHDSNVKNLYEKVKSQLKNNAKEIGNGCFEFYHKCNDECMESVKNGTYDYPKYSEESKLNREKIDGVKLESMGVYQILAIYSTVASSLVLLVSLGAISFWMCSNGSLQCRICI

SEQ ID NO: 3953 - protein, 566 aa, synthetic construct
  REGION 1..566: note = hemagglutinin__InfluenzaA__ADA71172
MKTIIALSYILCLVFTQKLPGNDNSTATLCLGHHAVPNGTIVKTITNDQIEVTNATELVQSSSTGEICDSPHQILDGENCTLIDALLGDPQCDGFQNKKWDLFVERSKAYSNCYPYDVPDYASLRSLVASSGTLEFNNESFNWTGVTQNGTSSACIRRSNNSFFSRLNWLTHLKFKYPALNVTMPNNEQFDKLYIWGVHHPGTDNDQIFLYAQASGRITVSTKRSQQTVIPNIGSRPRVRNIPSRISIYWTIVKPGDILLINSTGNLIAPRGYFKIRSGKSSIMRSDAPIGKCNSECITPNGSIPNDKPFQNVNRITYGACPRYVKQNTLKLATGMRNVPEKQTRGIFGAIAGFIENGWEGMVDGWYGFRHQNSEGRGQAADLKSTQAAIDQINGKLNRLIGKTNEKFHQIEKEFSEVEGRIQDLEKYVEDTKIDLWSYNAELLVALENQHTIDLTDSEMNKLFEKTKKQLRENAEDMGNGCFKIYHKCDNACIGSIRNGTYDHDVYRDEALNNRFQIKGVELKSGYKDWILWISFAISCFLLCVALLGFIMWACQKGNIRCNICI

SEQ ID NO: 3954 - protein, 565 aa, synthetic construct
  REGION 1..565: note = hemagglutinin__InfluenzaA__ADA71176
MKVKLLVLLCTFTATYADTICIGYHANNSTDTVDTVLEKNVTVTHSVNLLENSHNGKLCLLKGIAPLQLGNCSVAGWILGNPECELLISKESWSYIVEKPNPENGTCYPGHFADYEELREQLSSVSSFERFEIFPKESSWPNHTVTGASASCSHNGENSFYRNLLWLTGKNGLYPNLSKSYANNKEKEVLVLWGVHHPPNIANQKTLYHTENAYVSVVSSHYSRKFTPEIAKRPKVRDQEGRINYYWTLLEPGDTIIFEANGNLIAPRYAFALSRGFGSGIINSNAPMDKCDATCQTPQGAINSSLPFQNVHPVTIGECPKYVRSAKLRMVTGLRNIPSIQSRGLFGAIAGFIEGGWTGMVDGWYGYHHQNEQGSGYAADQKSTQNAINGITNKVNSVIEKMNTQFTAVGKEFNKLERRMENLNKKVDDGFIDIWTYNAELLVLLENERTLDFHDSNVKNLYEKVKSQLKNNAKEIGNGCFEFYHKCNDECMESVKNGTYDYPKYSEESKLNREKIDGVKLESMGVYQILAIYSTVASSLVLLVSLGAISFWMCSNGSLQCRICI

SEQ ID NO: 3955 - protein, 566 aa, synthetic construct; identical to SEQ ID NO: 3770
  REGION 1..566: note = hemagglutinin__InfluenzaA__ADA71181

SEQ ID NO: 3956 - protein, 566 aa, synthetic construct; identical to SEQ ID NO: 3770
  REGION 1..566: note = hemagglutinin__InfluenzaA__ADA71191

SEQ ID NO: 3957 - protein, 566 aa, synthetic construct
  REGION 1..566: note = hemagglutinin__InfluenzaA__ADA79587
MKAILVVLLYTFATANADTLCIGYHANNSTDTVDTVLEKNVTVTHSVNLLEDKHNGKLCKLRGVAPLHLGKCNIAGWILGNPECESLSTANSWSYIVETSSSDNGTCYPGDFIDYEELREQLSSVSSFERFEIFPKTSSWPNHDSNKGVTAACPHAGAKSFYKNLIWLVKKGNSYPKLSKSYINDKGKEVLVLWGIHHPSTSADQQSLYQNADAYVFVGTSRYSKKFKPEIAIRPKVRDQEGRMNYYWTLVEPGDKITFEATGNLVVPRYAFAMERNAGSGIIISDTPVHDCNTTCQTPKGAINTSLPFQNIHPITIGKCPKYVKSTKLRLATGLRNIPSIQSRGLFGAIAGFIEGGWTGMVDGWYGYHHQNEQGSGYAADLKSTQNAIDEITNKVNSVIEKMNTQFTAVGKEFNHLEKRIENLNKKVDDGFLDIWTYNAELLVLLENERTLDYHDSNVKNLYEKVRSQLKNNAKEIGNGCFEFYHKCDNTCMESVKNGTYDYPKYSEEAKLNREEIDGVKLESTRIYQILAIYSTVASSLVLVVSLGAISFWMCSNGSLQCRICI

SEQ ID NO: 3958 - protein, 566 aa, synthetic construct
  REGION 1..566: note = hemagglutinin__InfluenzaA__ADA79607
MKAILVVLLYTFATANADTLCIGYHANNSTDTVDTVLEKNVTVTHSVNLLEDKHNGKLCKLRGVAPLHLGKCNIAGWILGNPECESLSTASSWSYIVETSSSDNGTCYPGDFIDYEELREQLSSVSSFERFEIFPKTSSWPNHDSNKGVTAACPHAGAKGFYKNLIWLVKKGNSYPKLSKSYINDKGKEVLVLWGIHHPSTSADQQSLYQNADAYVFVGTSRYSKKFKPEIAIRPKVRDQEGRMNYYWTLVEPGDKITFEATGNLVVPRYAFAMERNAGSGIIISDTPVHDCNTTCQTPKGAINTSLPFQNIHPITIGKCPKYVKSTKLRLATGLRNVPSIQSRGLFGAIAGFIEGGWTGMVDGWYGYHHQNEQGSGYAADLKSTQNAIDEITNKVNSVIEKMNTQFTAVGKEFNHLEKRIENLNKKVDDGFLDIWTYNAELLVLLENERTLDYHDSNVKNLYEKVRSQLKNNAKEIGNGCFEFYHKCDNTCMESVKNGTYDYPKYSEEAKLNREEIDGVKLESTRIYQILAIYSTVASSLVLVVSLGAISFWMCSNGSLQCRICI

SEQ ID NO: 3959 - protein, 566 aa, synthetic construct
  REGION 1..566: note = hemagglutinin__InfluenzaA__ADA83043
MKAILVVLLYTFATANADTLCIGYHANNSTDTVDTVLEKNVTVTHSVNLLEDKHNGKLCKLRGVAPLHLGKCNIAGWILGNPECESLSTASSWSYIVETSSSDNGTCYPGDFIDYEELREQLSSVSSFERFEIFPKTSSWPNHDSNKGVTAACPHAGAKSFYKNLIWLVKKGNSYPKLSKSYINDKGKEVLVLWGIHHPSTSADQQSLYQNADAYVFVGTSRYSKKFKPEIAIRPKVREREGRMNYYWTLVEPGDKITFEATGNLVVPRYAFAMERNAGSGIIISDTPVHDCNTTCQTPKGAINTSLPFQNIHPITIGKCPKYVKSTKLRLATGLRNVPSIQSRGLFGAIAGFIEGGWTGMVDGWYGYHHQNEQGSGYAADLKSTQNAIDEITNKVNSVIEKMNTQFTAVGKEFNHLEKRIENLNKKVDDGFLDIWTYNAELLVLLENERTLDYHDSNVKNLYEKVRSQLKNNAKEIGNGCFEFYHKCDNTCMESVKNGTYDYPKYSEEAKLNREEIDGVKLESTRIYQILAIYSTVASSLVLVVSLGAISFWMCSNGSLQCRICI

SEQ ID NO: 3960 - protein, 566 aa, synthetic construct
  REGION 1..566: note = hemagglutinin__InfluenzaA__ADA83044
MKAILVVLLYTFATANADTLCIGYHANNSTDTVDTVLEKNVTVTHSVNLLEDKHNGKLCKLRGVAPLHLGKCNIAGWILGNPECESLSTASSWSYIVETSSSNNGTCYPGDFIDYEELREQLSSVSSFERFEIFPKTSSWPNHDSNKGVTAACPHAGAKSFYKNLIWLVKKENSYPKLNKSYINDKGKEVLVLWGIHHPSTSADQQSLYQNADAYVFVGTSRYSKKFKPEIAIRPKVRGQEGRMNYYWTLVEPGDKITFEATGNLVVPRYAFAMERNAGSGIIISDTPVHDCNTTCQTPKGAINTSLPFQNIHPITIGKCPKYVKSTKLRLATGLRNVPSIQSRGLFGAIAGFIEGGWTGMVDGWYGYHHQNEQGSGYAADLKSTQNAIDEITNKVNSVIEKMNTQFTAVGKEFNHLEKRIENLNKKVDDGFLDIWTYNAELLVLLENERTLDYHDSDVKNLYEKVRSQLKNNAKEIGNGCFEFYHKCDNTCMESVKNGTYDYPKYSEEAKLNREEIDGVKLESTRIYQILAIYSTVASSLVLVVSLGAISFWMCSNGSLQCRICI

SEQ ID NO: 3961 - protein, 566 aa, synthetic construct; identical to SEQ ID NO: 2669
  REGION 1..566: note = hemagglutinin__InfluenzaA__ADA83580

SEQ ID NO: 3962 - protein, 566 aa, synthetic construct; identical to SEQ ID NO: 2669
  REGION 1..566: note = hemagglutinin__InfluenzaA__ADA83587

SEQ ID NO: 3963 - protein, 566 aa, synthetic construct
  REGION 1..566: note = hemagglutinin__InfluenzaA__ADA83591
MKAILVVLLYTFATANADTLCIGYHANNSTDTVDTVLEKNVTVTHSVNLLEDKHNGKLCKLRGVAPLHLGKCNIAGWILGNPECESLSTASSWSYIVETSSSDNGTCYPGDFIDYEELREQLSSVSSFERFEIFPKTSSWPNHDSNKGVTAACPHAGAKSFYKNLIWLVKKGNSYPKLSKSYINDKGKEVLVLWGIHHPSTSADQQSLYQNADAYVFVGTSRYSKKFKPEISIRPKVRDQEGRMNYYWTLVEPGDKITFEATGNLVVPRYAFAMERNAGSGIIISDTPVHDCNTTCQTPKGAINTSLPFQNIHPITIGKCPKYVKSTKLRLATGLRNVPSIQSRGLFGAIAGFIEGGWTGMVDGWYGYHHQNEQGSGYAADLKSTQNAIDEITNKVNSVIEKMNTQFTAVGKEFNHLEKRIENLNKKVDDGFLDIWTYNAELLVLLENERTLDYHDSNVKNLYEKVRSQLKNNAKEIGNGCFEFYHKCDNTCMESVKNGTYDYPKYSEEAKLNREEIDGVKLESTRIYQILAIYSTVASSLVLVVSLGAISFWMCSNGSLQCRICI

SEQ ID NO: 3964 - protein, 566 aa, synthetic construct; identical to SEQ ID NO: 3414
  REGION 1..566: note = hemagglutinin__InfluenzaA__ADA83595

SEQ ID NO: 3965 - protein, 566 aa, synthetic construct; identical to SEQ ID NO: 2669
  REGION 1..566: note = hemagglutinin__InfluenzaA__ADA83599

SEQ ID NO: 3966 - protein, 566 aa, synthetic construct; identical to SEQ ID NO: 2669
  REGION 1..566: note = hemagglutinin__InfluenzaA__ADA83603

SEQ ID NO: 3967 - protein, 566 aa, synthetic construct; identical to SEQ ID NO: 2669
  REGION 1..566: note = hemagglutinin__InfluenzaA__ADA83611

SEQ ID NO: 3968 - protein, 566 aa, synthetic construct
  REGION 1..566: note = hemagglutinin__InfluenzaA__ADA83615
MKAILVVLLYTFATANADTLCIGYHANNSTDTVDTVLEKNVTVTHSVNLLEDKHNGKLCKLRGVAPLHLGKCNIAGWILGNPECESLSTASSWSYIVETSSSDNGTCYPGDFIDYEELREQLSSVSSFERFEIFPKTSSWPNHDSNKGVTAACPHAGAKSFYKNLIWLVKKGNSYPKLSKSYINDKGKEVLVLWGIHHPSTSADQQSLYQNADAYVFVGTSRYSKKFKPEIAIRPKVRDQEGRMNYYWTLVEPGDKITFEATGNLVVPRYAFAMERNAGSGIIISDTPVHDCNTTCQTPKGAINTSLPFQNIHPITIGKCPKYVKSTKLRLATGLRNVPSIQSRGLFGAIAGFIEGGWTGMVDGWYGYHHQNEQGSGYAADLKSTQNAIDEITNKVNSVIEKMNTQFTAVGKEFNHLEKRIENLNKKVDDGFLDIWTYNAELLVLLENERTLDYHDLNVKNLYEKVRSQLKNNAKEIGNGCFEFYHKCDNTCMESVKNGTYDYPKYSEEAKLNREEIDGVKLESTRIYQILAIYSTVASSLVLVVSLGAISFWMCSNGSLQCRICI

SEQ ID NO: 3969 - protein, 566 aa, synthetic construct
  REGION 1..566: note = hemagglutinin__InfluenzaA__ADA83622
MKAILVVLLYTFATANADTLCIGYHANNSTDTVDTVLEKNVTVTHSVNLLEDKHNGKLCKLRGVAPLHLGKCNIAGWILGNPECESLSTASSWSYIVETSSSDNGTCYPGDFIDYEELREQLSSVSSFERFEIFPKTSSWPNHDSNKGVTAACPHAGAKSFYKNLIWLVKKGNSYPKLSKSYINDKGKEVLVLWGIHHPSTSADQQRLYQNADAYVFVGTSRYSKKLKPEIAIRPKVRDQEGRMNYYWTLVEPGDKITFEATGNLVVPRYAFAMERNAGSGIIISDTPVHDCNTTCQTPKGAINTSLPFQNIHPITIGKCPKYVKSTKLRLATGLRNVPSIQSRGLFGAIAGFIEGGWTGMVDGWYGYHHQNEQGSGYAADLKSTQNAIDEITNKVNSVIEKMNTQFTAVGKEFNHLEKRIENLNKKVDDGFLDIWTYNAELLVLLENERTLDYHDSNVKNLYEKVRSQLKNNAKEIGNGCFEFYHKCDNTCMESVKNGTYDYPKYSEEAKLNREEIDGVKLESTRIYQILAIYSTVASSLVLVVSLGAISFWMCSNGSLQCRICI

SEQ ID NO: 3970 - protein, 566 aa, synthetic construct; identical to SEQ ID NO: 2669
  REGION 1..566: note = hemagglutinin__InfluenzaA__ADA83633

SEQ ID NO: 3971 - protein, 566 aa, synthetic construct; identical to SEQ ID NO: 2669
  REGION 1..566: note = hemagglutinin__InfluenzaA__ADA83637

SEQ ID NO: 3972 - protein, 566 aa, synthetic construct; identical to SEQ ID NO: 2669
  REGION 1..566: note = hemagglutinin__InfluenzaA__ADA83641

SEQ ID NO: 3973 - protein, 566 aa, synthetic construct; identical to SEQ ID NO: 2669
  REGION 1..566: note = hemagglutinin__InfluenzaA__ADA83645

SEQ ID NO: 3974 - protein, 566 aa, synthetic construct; identical to SEQ ID NO: 2669
  REGION 1..566: note = hemagglutinin__InfluenzaA__ADA83648

SEQ ID NO: 3975 - protein, 566 aa, synthetic construct; identical to SEQ ID NO: 2669
  REGION 1..566: note = hemagglutinin__InfluenzaA__ADA83656

SEQ ID NO: 3976 - protein, 566 aa, synthetic construct; identical to SEQ ID NO: 2669
  REGION 1..566: note = hemagglutinin__InfluenzaA__ADA83660

SEQ ID NO: 3977 - protein, 566 aa, synthetic construct
  REGION 1..566: note = hemagglutinin__InfluenzaA__ADA83664
MKAILVVLLYTFATANADTLCIGYHANNSTDTVDTVLEKNVTVTHSVNLLEDKHNGKLCKLRGVAPLHLGKCNIAGWILGNPECESLSTASSWSYIVETSSSDNGTCYPGDFIDYEELREQLSSVSSFERFEIFPKTSSWPNHDSNKGVTAACPHAGAKSFYKNLIWLVKKGNSYPKLSKSYINDKGKEVLVLWGIHHPSTSADQQSLYQNADAYVFVGTSRYSKKFKPETAIRPKVRDQEGRMNYYWTLVEPGDKITFEATGNLVVPRYAFAMERNAGSGIIISDTPVHDCNTTCQTPKGAINTSLPFQNIHPITIGKCPKYVKSTKLRLATGLRNVPSIQSRGLFGAIAGFIEGGWTGMVDGWYGYHHQNEQGSGYAADLKSTQNAIDEITNKVNSVIEKMNTQFTAVGKEFNHLEKRIENLNKKVDDGFLDIWTYNAELLVLLENERTLDYHDSNVKNLYEKVRSQLKNNAKEIGNGCFEFYHKCDNTCMESVKNGTYDYPKYSEEAKLNREEIDGVKLESTRIYQILAIYSTVASSLVLVVSLGAISFWMCSNGSLQCRICI

SEQ ID NO: 3978 - protein, 566 aa, synthetic construct
  REGION 1..566: note = hemagglutinin__InfluenzaA__ADA83668
MKAILVVLLYTFATANADTLCIGYHANNSTDTVDTVLEKNVTVTHSVNLLEDKHNGKLCKLRGVAPLHLGKCNIAGWILGNPECGSLSTASSWSYIVETSSSDNGTCYPGDFIDYEELREQLSSVSSFERFEIFPKTSSWPNHDSNKGVTAACPHAGAKSFYKNLIWLVKKGNSYPKLSKSYINDKGKEVLVLWGIHHPSTSADQQSLYQNADAYVFVGTSRYSKKFKPEIAIRPKVRDQEGRMNYYWTLVEPGDKITFEATGNLVVPRYAFAMERNAGSGIIISDTPVHDCNTTCQTPKGAINTSLPFQNIHPITIGKCPKYVKSTKLRLATGLRNVPSIQSRGLFGAIAGFIEGGWTGMVDGWYGYHHQNEQGSGYAADLKSTQNAIDEITNKVNSVIEKMNTQFTAVGKEFNHLEKRIENLNKKVDDGFLDIWTYNAELLVLLENERTLDYHDSNVKNLYEKVRSQLKNNAKEIGNGCFEFYHKCDNTCMESVKNGTYDYPKYSEEAKLNREEIDGVKLESTRIYQILAIYSTVASSLVLVVSLGAISFWMCSNGSLQCRICI

SEQ ID NO: 3979 - protein, 566 aa, synthetic construct; identical to SEQ ID NO: 2669
  REGION 1..566: note = hemagglutinin__InfluenzaA__ADA83672

SEQ ID NO: 3980 - protein, 566 aa, synthetic construct; identical to SEQ ID NO: 2669
  REGION 1..566: note = hemagglutinin__InfluenzaA__ADA83676

SEQ ID NO: 3981 - protein, 566 aa, synthetic construct; identical to SEQ ID NO: 2669
  REGION 1..566: note = hemagglutinin__InfluenzaA__ADA83680

SEQ ID NO: 3982 - protein, 566 aa, synthetic construct
  REGION 1..566: note = hemagglutinin__InfluenzaA__ADA86068
MKAILVVLLYTFATANADTLCIGYHANNSTDTVDTVLEKNVTVTHSVDLLEDKHNGKLCKLRGVAPLHLGKCNIAGWILGNPECESLSTASSWSYIVETSSSDNGTCYPGDFIDYEELREQLSSVSSFERFEIFPKTSSWPNHDSNKGVTAACPHAGAKSFYKNLIWLVKKGNSYPKLSKSYINDKGKEVLVLWGIHHPSTSADQQSLYQNADAYVFVGTSRYSKKFKPEIAIRPKVRNQEGRMNYYWTLVEPGDKITFEATGNLVVPRYAFAMERNAGSGIIISDTPVHDCNTTCQTPKGAINTSLPFQNIHPITIGKCPKYVKSIKLRLATGLRNVPSIQSRGLFGAIAGFIEGGWTGMVDGWYGYHHQNEQGSGYAADLKSTQNAIDEITNKVNSVIEKMNTQFTAVGKEFNHLEKRIENLNKKVDDGFLDIWTYNAELLVLLENERTLDYHDSNVKNLYEKVRSQLKNNAKEIGNGCFEFYHKCDNTCMESVKNGTYDYPKYSEEAKLNREEIDGVKLESTRIYQILAIYSTVASSLVLVVSLGAISFWMCSNGSLQCRICI

SEQ ID NO: 3983 - protein, 566 aa, synthetic construct
  REGION 1..566: note = hemagglutinin__InfluenzaA__ADA86086
MKAILVVLLYTFATANADTLCIGYHANNSTDTVDTVLEKNVTVTHSVNLLEDKHNGKLCKLRGVAPLHLGKCNIAGWILGNPECESLSTASSWSYIVETSSSDNGTCYPGDFIDYEELREQLSSVSSFERFEIFPKTSSWPNHDSNKGVTAACPHAGAKSFYKNLIWLVKKGNSYPKLSKSYINDKGKEVLVLWGIHHPSTNADQQSLYQNADAYVFVGTSRYSKKFKPEIAIRPKVRDQEGRMNYYWTLVEPGDKITFEATGNLVVPRYAFAMERNAGSGIIISDTPVHDCNTTCQTPKGAINTSLPFQNIHPITIGKCPKYVKSTKLRLATGLRNVPSIQSRGLFGAIAGFIEGGWTGMVDGWYGYHHQNEQGSGYAADLKSTQNAIDEITNKVNSVIEKMNTQFTAVGKEFNHLEKRIENLNKKVDDGFLDIWTYNAELLVLLENERTLDYHDSNVKNLYEKVRSQLKNNAKEIGNGCFEFYHKCDNTCMESVKNGTYDYPKYSEEAKLNREEIDGVKLESTRIYQILAIYSTVASSLVLVVSLGAISFWMCSNGSLQCRICI

SEQ ID NO: 3984 - protein, 566 aa, synthetic construct
  REGION 1..566: note = hemagglutinin__InfluenzaA__ADA86087
MKAILVVLLYTFATANADTLCIGYHANNSTDTVDTVLEKNVTVTHSVNLLEDKHNGKLCKLRGVAPLHLGKCNIAGWILGNPECESLSTASSWSYIVETFSSDNGTCYPGDFIDYEELREQLSSVSSFERFEIFPKTSSWPNHDSNKGVTAACPHAGAKSFYKNLIWLVKKGNSYPKLSKSYINDKGKEVLVLWGIHHPSTSADQQSLYQNADAYVFVGTSRYSKKFKPEIAIRPKVRDQEGRMNYYWTLVEPGDKITFEATGNLVVPRYAFAMERNAGSGIIISDTPVHDCNTTCQTPKGALNTSLPFQNIHPITIGKCPKYVKSTKLRLATGLRNVPSIQSRGLFGAIAGFIEGGWTGMVDGWYGYHHQNEQGSGYAADLKSTQNAIDEITNKVNSVIEKMNTQFTAVGKEFNHLEKRIENLNKKVDDGFLDIWTYNAELLVLLENERTLDYHDSNVKNLYEKVRNQLKNNAKEIGNGCFEFYHKCDNTCMESVKNGTYDYPKYSEEAKLNREEIDGVKLESTRIYQILAIYSTVASSLVLVVSLGAISFWMCSNGSLQCRICI

SEQ ID NO: 3985 - protein, 566 aa, synthetic construct; identical to SEQ ID NO: 3467
  REGION 1..566: note = hemagglutinin__InfluenzaA__ADA86088

SEQ ID NO: 3986 - protein, 566 aa, synthetic construct
  REGION 1..566: note = hemagglutinin__InfluenzaA__ADB03603
MKAILIVLLYTFATAHADTLCIGYHANNSTDTVDTVLEKNVTVTHSVNLLEDKHNGKLCKLRGVAPLHLGKCNIAGWILGNPECESLSTASSWSYIVETSSSDNGTCYPGDFIDYEELREQLSSVSSFERFEIFPKTSSWPNHDSNKGVTAACPHAGAKSFYKNLIWLVKKGNSYPKLSKSYINDKGKEVLVLWGIHHPSTSADQQSLYQNADAYVFVGTSRYSKKFKPEIAIRPKVRDQEGRMDYYWTLVEPGDKITFEATGNLVVPRYAFAMERNAGSGIIISDTPVHDCNTTCQTPKGAINTSLPFQNIHPITIGKCPKYVKSTKLRLATGLRNVPSIQSRGLFGAIAGFIEGGWTGMVDGWYGYHHQNEQGSGYAADLKSTQNAIDEITNKVNSVIEKMNTQFTAVGKEFNHLEKRIENLNKKVDDGFLDIWTYNAELLVLLENERTLDYHDSNVKNLYEKVRSQLKNNAKEIGNGCFEFYHKCDNTCMESVKNGTYDYPKYSEEAKLNREEIDGVKLESTRIYQILAIYSTVASSLVLVVSLGAISFWMCSNGSLQCRICI

SEQ ID NO: 3987 - protein, 566 aa, synthetic construct; identical to SEQ ID NO: 2656
  REGION 1..566: note = hemagglutinin__InfluenzaA__ADB03604

SEQ ID NO: 3988 - protein, 566 aa, synthetic construct
  REGION 1..566: note = hemagglutinin__InfluenzaA__ADB03605
MKAILVVLLYTFATANADTLCIGYHANNSTDTVDTVLEKNVTVTHSVNLLEDKHNGKLCKLRGVAPLHLGKCNIAGWILGNPECESLSTASSWSYIVETSSSDNGTCYPGDFIDYEELREQLSSVSSFERFEIFPKTSSWPNHDSNKGVTAACPHAGAKSFYKNLIWLVKKGNSYPKLSKSYINDKGKEVLVLWGIHHPSTSADQQSLYQNADAYVFVGTSRYSKKFKPEIAIRPKVREQEGRMDYYWTLVEPGDKITFEATGNLVVPRYAFAMERNAGSGIIISDTPVHDCNTTCQTPKGAINTSLPFQNIHPITIGKCPKYVKSTKLRLATGLRNVPSIQSRGLFGAIAGFIEGGWTGMVDGWYGYHHQNEQGSGYAADLKSTQNAIDEITNKVNSVIEKMNTQFTAVGKEFNHLEKRIENLNKKVDDGFLDIWTYNAELLVLLENERTLDYHDSNVKNLYEKVRSQLKNNAKEIGNGCFEFYHKCDNTCMESVKNGTYDYPKYSEEAKLNREEIDGVKLESTRIYQILAIYSTVASSLVLVVSLGAISFWMCSNGSLQCRICI

SEQ ID NO: 3989 - protein, 566 aa, synthetic construct; identical to SEQ ID NO: 2669
  REGION 1..566: note = hemagglutinin__InfluenzaA__ADB03607

SEQ ID NO: 3990 - protein, 566 aa, synthetic construct; identical to SEQ ID NO: 3022
  REGION 1..566: note = hemagglutinin__InfluenzaA__ADB03609

SEQ ID NO: 3991 - protein, 566 aa, synthetic construct; identical to SEQ ID NO: 2669
  REGION 1..566: note = hemagglutinin__InfluenzaA__ADB03611

SEQ ID NO: 3992 - protein, 566 aa, synthetic construct
  REGION 1..566: note = hemagglutinin__InfluenzaA__ADB03612
MKAILVVLLYTFATANADTLCIGYHANNSTDTVDTVLEKNVTVTHSVNLLEDKHNGKLCKLRGVAPLHLGKCNIAGWILGNPECESLSTASSWSYIVETSSSDNGTCYPGDFIDYEELREQLSSVSSFERFEIFPKTSSWPNHDSNKGVTAACPHAGAKSFYKNLIWLVKKGNSYPKLSKSYINDKGKEVLVLWGIHHPSTSADQQSLYQNADAYVFVGTSRYSKKFKPEIAIRPKVRDQEGRMNYYWTLVEPGDKITFEATGNLVVPRYAFAMERNAGSGIIISDTPVHDCNTTCQTPKGAINTSLPFQNIHPITIGKCPKYVKSTKLRLATGLRNVPFIQSRGLFGAIAGFIEGGWTGMVDGWYGYHHQNEQGSGYAADLKSTQNAIDEITNKVNSVIEKMNTQFTAVGKEFNHLEKRIENLNKKVDDGFLDIWTYNAELLVLLENERTLDYHDSNVKNLYEKVRSQLKNNAKEIGNGCFEFYHKCDNTCMESVKNGTYDYPKYSEEAKLNREEIDGVKLESTRIYQILAIYSTVASSLVLVVSLGAISFWMCSNGSLQCRICI

SEQ ID NO: 3993 - protein, 566 aa, synthetic construct; identical to SEQ ID NO: 2669
  REGION 1..566: note = hemagglutinin__InfluenzaA__ADB03614

SEQ ID NO: 3994 - protein, 566 aa, synthetic construct
  REGION 1..566: note = hemagglutinin__InfluenzaA__ADB03617
MKAILVVLLYTFATANADTLCIGYHANNSTDTVDTVLEKNVTVTHSVNLLEDKHNGKLCKLRGVAPLHLGKCNIAGWILGNPECESLSTASSWSYIVETSSSDNGTCYPGDFIDYEELREQLSSVSSFERFEIFPKTSSWPNHDSNKGVTAACPHAGAKSFYKNLIWLVKKGNSYPKLSKSYINDKGKEVLVLWGIHHPSTSADQQSLYQNADAYVFVGTSRYSKKFKPEIAIRPKVREQEGRMNYYWTLVEPGDKITFEATGNLVVPRYAFAMERNAGSGIIISDTPVHDCNTTCQTPKGAINTSLPFQNIHPITIGKCPKYVKSTKLRLATGLRNVPSIQSRGLFGAIAGFIEGGWTGMVDGWYGYHHQNEQGSGYAADLKSTQNAIDEITNKVNSVIEKMNTQFTAVGKEFNHLEKRIENLNKKVDDGFLDIWTYNAELLVLLENERTLDYHDSNVKNLYEKVRSQLKNNAKEIGNGCFEFYHKCDNTCMESVKNGTYDYPKYSKEAKLNREEIDGVKLESTRIYQILAIYSTVASSLVLVVSLGAISFWMCSNGSLQCRICI

SEQ ID NO: 3995 - protein, 566 aa, synthetic construct; identical to SEQ ID NO: 3022
  REGION 1..566: note = hemagglutinin__InfluenzaA__ADB03619

SEQ ID NO: 3996 - protein, 566 aa, synthetic construct
  REGION 1..566: note = hemagglutinin__InfluenzaA__ADB03620
MKAILVVLLYTFATANADTLCIGYHANNSTDTVDTVLEKNVTVTHSVNLLEGKHNGKLCKLRGVAPLHLGKCNIAGWILGNPECESLSTASSWSYIVETSSSDNGTCYPGDFIDYEELREQLSSVSSFERFEIVPKTSSWPNHDSNKGVTAACPHAGAKSFYKNLIWLVKKGNSYPKLSKSYINDKGKEVLVLWGIHHPSTSADQQSLYQNADAYVFVGTSRYSKKFKPEIAIRPKVRDQEGRMNYYWTLVEPGDKITFEATGNLVVPRYAFAMERNAGSGIIISDTPVHDCNTTCQTPKGAINTSLPFQNIHPITIGKCPKYVKSTKLRLATGLRNVPSIQSRGLFGAIAGFIEGGWTGMVDGWYGYHHQNEQGSGYAADLKSTQNAIDEITNKVNSVIEKMNTQFTAVGKEFNHLEKRIENLNKKVDDGFLDIWTYNAELLVLLENERTLDYHDSNVKNLYEKVRSQLKNNAKEIGNGCFEFYHKCDNTCMESVKNGTYDYPKYSEEAKLNREEIDGVKLESTRIYQILAIYSTVASSLVLVVSLGAISFWMCSNGSLQCRICI

SEQ ID NO: 3997 - protein, 566 aa, synthetic construct
  REGION 1..566: note = hemagglutinin__InfluenzaA__ADB03622
MKAILVVLLYTFATANADTLCIGYHANNSTDTVDTVLEKNVTVTHSVNLLEDKHNGKLCKLRGVAPLHLGKCNIAGWILGNPECESLSTASSWSYIVETSSSDNGTCYPGDFINYEELREQLSSVSSFERFEIFPKTSSWPNHDSNKGVTAACPHAGAKSFYKNLIWLVKKGNSYPKLSKSYINDKGKEVLVLWGIHHPSTSADQQSLYQNADAYVFVGTSRYSKKFKPEIAIRPKVRDQEGRMNYYWTLVEPGDKITFEATGNLVVPRYAFAMERNAGSGIIISDTPVHDCNTTCQTPNGAINTSLPFQNIHPITIGKCPKYVKSTKLRLATGLRNVPSIQSRGLFGAIAGFIEGGWTGMVDGWYGYHHQNEQGSGYAADLKSTQNAIDKITNKVNSVIEKMNTQFTAVGKEFNHLEKRIENLNKKVDDGFLDIWTYNAELLVLLENERTLDYHDSNVKNLYEKVRSQLKNNAKEIGNGCFEFYHKCDNTCMESVKNGTYDYPKYSEEAKLNREEIDGVKLESTRIYQILAIYSTVASSLVLVVSLGAISFWMCSNGSLQCRICI

SEQ ID NO: 3998 - protein, 566 aa, synthetic construct; identical to SEQ ID NO: 3997
  REGION 1..566: note = hemagglutinin__InfluenzaA__ADB03623

SEQ ID NO: 3999 - protein, 566 aa, synthetic construct
  REGION 1..566: note = hemagglutinin__InfluenzaA__ADB03628
MEAILVVLLYTFATANADTLCIGYHANNSTDTVDTVLEKNVTVTHSVNLLEDKHNGKLCKLRGVAPLHLGKCNIAGWILGNPECESLSTASSWSYIVETSSSDNGTCYPGDFIDYEELREQLSSVSSFERFEIFPKTSSWPNHDSNKGVTAACPHAGAKSFYKNLIWLVKKGNSYPKLSKSYINDKGKEVLVLWGIHHPSTSADQQSLYQNADAYVFVGTSRYSKKFKPEIAIRPKVRDQEGRMNYYWTLVEPGDKITFEATGNLVVPRYAFAMERNAGSGIIISDTPVHDCNTTCQTPKGAINTSLPFHNIHPITIGKCPKYVKSTKLRLATGLRNVPSIQSRGLFGAIAGFIEGGWTGMVDGWYGYHHQNEQGSGYAADLKSTQNAIDEITNKVNSVIEKMNTQFTAVGKEFNHLEKRIENLNKKVDDGFLDIWTYNAELLVLLENERTLDYHDSNVKNLYEKVRSQLKNNAKEIGNGCFEFYHKCDNTCMESVKNGTYDYPKYSEEAKLNREEIDGVKLESTRIYQILAIYSTVASSLVLVVSLGAISFWMCSNGSLQCRICI

SEQ ID NO: 4000 - protein, 566 aa, synthetic construct
  REGION 1..566: note = hemagglutinin__InfluenzaA__ADB03629
MKAILVVLLYTFTTANADTLCIGYHANNSTDTVDTVLEKNVTVTHSVNLLEDKHNGKLCKLRGVAPLHLGKCNIAGWILGNPECESLSTASSWSYIVETSSSDNGTCYPGDFIDYEELREQLSSVSSFERFEIFPKTSSWPNHDSNKGVTAACPHAGAKSFYKNLIWLVKKGNSYPKLSKSYINDKGKEVLVLWGIHHPSTSADQQSLYQNADAYVFVGTSRYSKKFKPEIAIRPKVREQEGRMNYYWTLVEPGDKITFEATGNLVVPRYAFAMERNAGSGIIISDTPVHDCNTTCQTPKGAINTSLPFQNIHSITIGKCPKYVKSTKLRLATGLRNVPSIQSRGLFGAIAGFIEGGWTGMVDGWYGFHHQNEQGSGYAADLKSTQNAIDEITNKVNSVIEKMNTQFTAVGKEFNHLEKRIENLNKKVDDGFLDIWTYNAELLVLLENERTLDYHDSNVKNLYEKVRSQLKNNAKEIGNGCFEFYHKCDNTCMESVKNGTYDYPKYSEEAKLNREEIDGVKLESTRIYQILAIYSTVASSLVLVVSLGAISFWMCSNGSLQCRICI

SEQ ID NO: 4001 - protein, 566 aa, synthetic construct
  REGION 1..566: note = hemagglutinin__InfluenzaA__ADB03630
MKAILVVLLYTFATANADTLCIGYHANNSTDTVDTVLEKNVTVTHSVNLLEDKHNGKLCKLRGVAPLHLGKCNIAGWILGNPECESLSTASSWSYIVETSSSDNGTCYPGDFIDYEELREQLSSVSSFERFEIFPKTSSWPNHDSNKGVTAACPHAGAKSFYKNLIWLVKKGNSYPKLSKSYINDKGKEVLVLWGIHHPSTSADQQSLYQNADAYVFVGTSRYSKKFKPEIAIRPKVRDQEGRMNYHWTLVEPGDKITFEATGNLVVPRYAFAMERNAGSGIIISDTPVHDCNTTCQTPKGAINTSLPFQNIHPITIGKCPKYVKSTKLRLATGLRNVPSIQSRGLFGAIAGFIEGGWTGMVDGWYGYHHQNEQGSGYAADLKSTQNAIDEITNKVNSVIEKMNTQFTAVGKEFNHLEKRIENLNKKVDDGFLDIWTYNAELLVLLENERTLDYHDSNVKNLYEKVRSQLKNNAKEIGNGCFEFYHKCDNTCMESVKNGTYDYPKYSKEAKLNREEIDGVKLESTRIYQILAIYSTVASSLVLVVSLGAISFWMCSNGSLQCRICI

SEQ ID NO: 4002 - protein, 566 aa, synthetic construct; identical to SEQ ID NO: 3414
  REGION 1..566: note = hemagglutinin__InfluenzaA__ADB25319

SEQ ID NO: 4003 - protein, 566 aa, synthetic construct; identical to SEQ ID NO: 2669
  REGION 1..566: note = hemagglutinin__InfluenzaA__ADB25321

SEQ ID NO: 4004 - protein, 566 aa, synthetic construct
  REGION 1..566: note = hemagglutinin__InfluenzaA__ADB27970
MKAILVVLLYTFATANADTLCIGYHANNSTDTVDTVLEKNVTVTHSVNLLEDKHNGKLCKLRGVAPLHLGKCNIAGWILGNPECESLSTASSWSYIVETSSSDNGTCYPGDFIDYEELREQLSSVSSFERFEIFPKTSSWPNHDSNKGVTAACPHAGAKSFYKNLIWLVKKGNSYPKLSKSYINDKGKEVLVLWGIHHPSTSADQQSLYQNADAYVFVGTSRYSKKFKPEIAIRPKVRDQEGRMNYYWTLVEPGDKITFEATGNLVVPRYAFAMERDAGSGIIISDTPVHDCNTTCQTPKGAINTSLPFQNIHPITIGKCPKYVKSTKLRLATGLRNVPSIQSRGLFGAIAGFIEGGWTGMVDGWYGYHHQNEQGSGYAADLKSTQNAIDEITNKVNSVIEKMNTQFTAVGKEFNHLEKRIENLNKKVDDGFLDIWTYNAELLVLLENERTLDYHDSNVKNLYEKVRSQLKNNAKEIGNGCFEFYHKCDNTCMESVKNGTYDYPKYSEEAKLNREEIDGVKLESTRIYQILAIYSTVASSLVLVVSLGAISFWMCSNGSLQCRICI

SEQ ID NO: 4005 - protein, 566 aa, synthetic construct; identical to SEQ ID NO: 2669
  REGION 1..566: note = hemagglutinin__InfluenzaA__ADB27980

SEQ ID NO: 4006 - protein, 566 aa, synthetic construct; identical to SEQ ID NO: 2669
  REGION 1..566: note = hemagglutinin__InfluenzaA__ADB54352

SEQ ID NO: 4007 - protein, 566 aa, synthetic construct; identical to SEQ ID NO: 2669
  REGION 1..566: note = hemagglutinin__InfluenzaA__ADB54355

SEQ ID NO: 4008 - protein, 565 aa, synthetic construct
  REGION 1..565: note = hemagglutinin__InfluenzaA__ADB65926
MKVKLLVLLCTFTATYADTICIGYHANNSTDTVDTVLEKNVTVTHSVNLLEDKHNGKLCLLKGKAPLQLGNCSVAGWILGNPECGLLISKESWSYIVERPNPENGTCYPGHFADYEELREQLSSVSSFERFEIFPKGSSWPNHTVTGVSASCSHNGESSFYKNLLWLTGKNGLYPNLSKSYANNKEKEVLVLWGVHHPPNIGDQMTLYHKENAYVSVVSSHYSRKFTPEIAKRPKVRDQEGRINYYWTLLEPGDTIIFEANGNLIAPRYAFALSRGFGSGIINSNAPMDECDAKCQTPQGAINSSLPFQNVHPVTIGECPKYVRSAKLRMVTGLRNIPSIQSRGLFGAIAGFIEGGWTGMVDGWYGYHHQNEQGSGYAADQKSTQNAINGITNKVNSVIEKMNTQFTAVGKEFNKLERRMENLNKKVDDGFIDVWTYNAELLVLLENERTLDFHDSNVKNLYEKVKNQLKNNAKEMGNGCFEFYHKCNDECMESVKNGTYDYPKYSEESKLSREKIDGVKLESMGVYQILAIYSTVASSLVLLVSLGAIGFWMCSNGSLQCRICI

SEQ ID NO: 4009 - protein, 565 aa, synthetic construct
  REGION 1..565: note = hemagglutinin__InfluenzaA__ADB80153
MKVKLLALLCTFTATYADTICIGYHANNSTDTVDTVLEKNVTVTHSVNLLEDNHNGKLCLLKGIAPLQLGNCSVAGWILGNPECELLISKESWSYIVEKPNPENGTCYPGHFADYEELREQLSSVSSFERFEIFPKESSWPNHTVTGVSASCSHNGESSFYKNLLWLTGKNGLYPNLSKSFANNKEKEVLVLWGVHHPPNIGDQMTLYHKENAYVSVVSSHYSRKFTPEIAKRPKVRDQEGRINYYWTLLEPGDTIIFEANGNLIAPRYAFALSRGFGSGIINSNAPMDECDAKCQTPQGAINSSLPFQNVHPVTIGECPKYVRSTKLRMVTGLRNIPSIQSRGLFGAIAGFIEGGWTGMVDGWYGYHHQNEQGSGYAADQKSTQNAINGITNKVNSVIEKMNTQFTAVGKEFNKLERRMENLNKKVDDGFIDVWTYNAELLVLLENERTLDFHDSNVKNLYEKVKNQLKNNAKEIGNGCFEFYHKCNDECMESVKNGTYDYPKYSEESKLSREKIDGVKLESMGVYQILAIYSTVASSLVLLVSLGAISFWMCSNGSLQCRICI

SEQ ID NO: 4010 - protein, 566 aa, synthetic construct; identical to SEQ ID NO: 3770
  REGION 1..566: note = hemagglutinin__InfluenzaA__ADB81399

SEQ ID NO: 4011 - protein, 566 aa, synthetic construct; identical to SEQ ID NO: 3770
  REGION 1..566: note = hemagglutinin__InfluenzaA__ADB81409

SEQ ID NO: 4012 - protein, 566 aa, synthetic construct
  REGION 1..566: note = hemagglutinin__InfluenzaA__ADB81419
MKAILVVLLYTFATANADTLCIGYHANNSTDTVDTVLEKNVTVTHSVNLLEDKHNGKLCKLRGVAPLHLGKCNIAGWILGNPECESLSTASSWSYIVETSSSDNGTCYPGDFIDYEELREQLSSVSSFERFEIFPKTSSWPNHDSNKGVTAACPHAGAKSFYKNLIWLVKKGNSYPKLSKSYINDKGKEVLVLWGIHHPSTSADQQSLYQNADAYVFVGTSRYSKKFKPEIAIRPKVRDQEGRMNYYWTLVEPGDKITFEATGNLVVPRYAFAMERNAGSGIIISDTPVHDCNTTCQTPKGAINTSLPFQNIHPITIGKCPKYVKSTKLRLATGLRNIPSIQSRGLFGAIAGFIEGGWTGMVDGWYGYHHQNEQGSGYAADLKSTQNAIDEITNKVNSVIEKMNTQFTAVGKEFNHLEKRIENLNKKVDDGFLDIWTYNAELLVLLENERTLDYHDSNVKNLYEKVRSQLKNNAKEIGNGCFEFYHKCDNTCMESVKNGTYDYPEYSEEAKLNREEIDGVKLESTRIYQILAIYSTVASSLVLVVSLGAISFWMCSNGSLQCRICI

SEQ ID NO: 4013 - protein, 566 aa, synthetic construct; identical to SEQ ID NO: 3829
  REGION 1..566: note = hemagglutinin__InfluenzaA__ADB81429

SEQ ID NO: 4014 - protein, 566 aa, synthetic construct
  REGION 1..566: note = hemagglutinin__InfluenzaA__ADB81439
MKAILVVLLYTFATANADTLCIGYHANNSTDTVDTVLEKNVTVTHSVNLLEDKHNGKLCKLRGVAPLHLGKCNIAGWILGNPECESLSTASSWSYIVETSSSDNGTCYPGDFIDYEELREQLSSVSSFERFEIFPKTSSWPNHDPNKGVTAACPHAGAKSFYKNLIWLVKKGNSYPKLSKSYINDKGKEVLVLWGIHHPSTSADQQSLYQNADAYVFVGTSRYSKKFKPEIAIRPKVRNQEGRMNYYWTLVEPGDKITFEATGNLVVPRYAFAMERNAGSGIIISDTPVHDCNTTCQTPKGAINTSLPFQNIHPITIGKCPKYVKSTKLRLATGLRNVPSIQSRGLFGAIAGFIEGGWTGMVDGWYGYHHQNEQGSGYAADLKSTQNAIDEITNKVNSVIEKMNTQFTAVGKEFNHLEKRIENLNKKVDDGFLDIWTYNAELLVLLENERTLDYHDSNVKNLYEKVRSQLKNNAKEIGNGCFEFYHKCDNTCMESVKNGTYDYPKYSEEAKLNREEIDGVKLESTRIYQILAIYSTVASSLVLVVSLGAISFWMCSNGSLQCRICI

SEQ ID NO: 4015 - protein, 566 aa, synthetic construct
  REGION 1..566: note = hemagglutinin__InfluenzaA__ADB81449
MKAILVVLLYTFATANADTLCIGYHANNSTDTVDTVLEKNVTVTHSVNLLEDKHNGKLCKLRGVAPLHLGKCNIAGWILGNPECESLSTASSWSYIVETSSSDNGTCYPGDFIDYEELREQLSSVSSFERFEIFPKTSSWPNHDSNKGVTAACPHAGAKSFYKNLIWLVKKGNSYPKLNKSYINDKGKEVLVLWGIHHPSTSADQQSLYQNADAYVFVGTSRYSKKFKPEIAIRPKVRDQEGRMNYYWTLVEPGDKITFEATGNLVVPRYAFAMERNAGSGIIISDTPVHDCNTTCQTPKGAINTSLPFQNIHPITIGKCPKYVKSTKLRLATGLRNVPSIQSRGLFGAIAGFIEGGWTGMVDGWYGYHHQNEQGSGYAADLKSTQNAIDEITNKVNSVIEKMNTQFTAVGKEFNHLEKRIENLNKKVDDGFLDIWTYNAELLVLLENERTLDYHDSNVKNLYEKVRSQLKNNAKEIGNGCFEFYHKCDNTCMESVKNGTYDYPKYSEEAKLNREEIDGVKLESTRIYQILAIYSTVASSLVLVVSLGAISFWMCSNGSLQCRICI

SEQ ID NO: 4016 - protein, 566 aa, synthetic construct
  REGION 1..566: note = hemagglutinin__InfluenzaA__ADB81459
MKAILVVLLYTFATANADTLCIGYHANNSTDTVDTVLEKNVTVTHSVNLLEDKHNGKLCKLRGVAPLHLGKCNIAGWILGNPECESLSTASSWSYIVETSSSDNGTCYPGDFIDYEELREQLSSVSSFERFEIFPKTSSWPNHDSNKGVTAACPHAGAKSFYKNLIWLVKKGNSYPKLNKSYINDKGKEVLVLWGIHHPSTSADQQSLYQNADAYVFVGTSRYSKKFKPEIAIRPKVRDQEGRMNYYWTLVEPGDKITFEATGNLVVPRYAFAMERNGGSGIIISDTPVHDCNTTCQTPKGAINTSLPFQNIHPITIGKCPKYVKSTKLRLATGLRNVPSIQSRGLFGAIAGFIEGGWTGMVDGWYGYHHQNEQGSGYAADLKSTQNAIDEITNKVNSVIEKMNTQFTAVGKEFNHLEKRIENLNKKVDDGFLDIWTYNAELLVLLENERTLDYHDSNVKNLYEKVRSQLKNNAKEIGNGCFEFYHKCDNTCMESVKNGTYDYPKYSEEAKLNREEIDGVKLESTRIYQILAIYSTVASSLVLVVSLGAISFWMCSNGSLQCRICI

SEQ ID NO: 4017 - protein, 566 aa, synthetic construct
  REGION 1..566: note = hemagglutinin__InfluenzaA__ADB82655
MKAILLVLLCTLAAANADTLCIGYHANNSTDTVDTVLEKNVTVTHSVNLLEDRHNGKLCNLRGKAPLHLGKCNIAGWLLGNPECELLFAVNSWSYIVETSNSDNGTCYPGDFTSYEELREQLSSVSSFERFEIFPKASSWPNHETNRGVTAACPYAGTNGFYRNLIWLVKKENSYPKLRKSYVNNKKKEVLVLWGIHHPPTNTDQQSLYQNADAYVFVGSSKYSRKFKPEIAERPKVRGQAGRMNYYWTLIEPGDTITFEATGNLVAPRYAFAMNRGPVSGIITSDAPVHDCNATCQTPKGAINTSLPFQNIHPITIGECPKYVKSTRLRMATGLRNIPSIQSRGLFGAIAGFIEGGWTGMIDGWYGYHHQNGQGSGYAADQKSTQNAIDRITNKVNSVIEKMNIQFTAVGKEFNHLERRIENLNKKVDDGFLDVWTYNAELLVLLENERTLDFHDSNVKTLYEKVKTQLRNNAKEIGNGCFEFYHKCDDTCMESIKNGTYNYPKYSEESKLNREEIDGVKLESTRIYQILAIYSTAASSLVLLVSLGAIGFWMCSNGSLQCRICI

SEQ ID NO: 4018 - protein, 566 aa, synthetic construct
  REGION 1..566: note = hemagglutinin__InfluenzaA__ADB82656
MKAILLVLQCILTAANADTLCIGYHANNSTDTVDTVLEKNVTVTHSVNLLEDRHNGKLCKLKGIAPLHLGKCNIAGWLLGNPECELLFKANSWSYIVETSYSDNGTCYPGDFTNYEELREQLSSVSSFERFEMFPKANSWPNHETNKGVTAACPYAGANSFYRNLIWLVKKGNSYPRLSKSYVNNKKKEVLVLWGIHHPSTSTDQQSLYQNADAYVFVSSSTYNKRFKPEIGTRPKVRDQSGRMNYYWTIVEPGDTITFEATGNLVAPRYAFAMKRDSGSGIIMSDTPVHDCNTTCQTPKGAINTSLPFQNVHPVTIGECPKYVKSTKLRMATGLRNIPSIQSRGLFGAIAGFIEGGWTGMIDGWYGYHHQNEQGSGYAADRKSTQNAIDGITNKVNSIIEKMNIQFTAVGKEFSHLEKRVENLNKKVDDGFLDVWTYNAELLVLLENERTLDYHDSNVKNLYEKVRSQLKNNAKEIGNGCFEFYHKCDDSCMESIKNETYDYSKYSEESRLNREKIDGVKLESTQIYQILAIYSTVASSLVLLVSLGAISFWMCSNGSLQCRICI

SEQ ID NO: 4019 - protein, 566 aa, synthetic construct
  REGION 1..566: note = hemagglutinin__InfluenzaA__ADB82944
MKAILVVLLYTFATANADTLCIGYHANNSTDTVDTVLEKNVTVTHSVNLLEDKHNGKLCKLRGVAPLHLGKCNIAGWILGNPECESLSTASSWSYIVETSSSDNGTCYPGDFIDYEELREQLSSVSSFERFEIFPKTSSWPNHDPNKGVTAACPHAGAKSFYKNLIWLVKKGNSYPKLSKSYINDKGKEVLVLWGIHHPSTSADQQSLYQNADAYVFVGTSRYSKKFKPEIAIRPKVRDQEGRMNYYWTLVEPGDKITFEATGNLVVPRYAFAMERNAGSGIIISDTPVHDCNTTCQTPKGAINTSLPFQNIHPITIGKCPKYVKSTKLRLATGLRNIPSIQSRGLFGAIAGFIEGGWTGMVDGWYGYHHQNEQGSGYAADLKSTQNAIDEITNKVNSVIEKMNTQFTAVGKEFNHLEKRIENLNKKVDDGFLDIWTYNAELLVLLENERTLDYHDSNVKNLYEKVRSQLKNNAKEIGNGCFEFYHKCDNTCMESVKNGTYDYPKYSEEAKLNREEIDGVKLESTRIYQILAIYSTVASSLVLVVSLGAISFWMCSNGSLQCRICI

SEQ ID NO: 4020 - protein, 566 aa, synthetic construct
  REGION 1..566: note = hemagglutinin__InfluenzaA__ADB82950
MKAILVVLLYTFATANADTLCIGYHANNSTDTVDTVLEKNVTVTHSVNLLEDKHNGKLCKLRGVAPLHLGKCNIAGWILGNPECESLSTASSWSYIVETSSSDNGTCYPGDFIDYEELREQLSSVSSFERFEIFPKTSSWPNHDSNKGVTAACPHAGAKSFYKNLIWLVKKGNSYPKLSKSYINDKGKEVLVLWGIHHPSTSADQQSLYQNADAYVFVGTSRYSKKFEPEIAIRPKVRDQEGRMNYYWTLVEPGDKITFEATGNLVVPRYAFAMERNAGSGIIISDTPVHDCNTTCQTPKGAINTSLPFQNIHPITIGKCPKYVKSTKLRLATGLRNVPSIQSRGLFGAIAGFIEGGWTGMVDGWYGYHHQNEQGSGYAADLKSTQNAIDEITNKVNSVIEKMNTQFTAVGKEFNHLEKRIENLNKKVDDGFLDIWTYNAELLVLLENERTLDYHDSNVKNLYEKVRSQLKNNAKEIGNGCFEFYHKCDNTCMESVKNGTYDYPKYSEEAKLNREEIDGVKLESTRIYQILAIYSTVASSLVLVVSLGAISFWMCSNGSLQCRICI

SEQ ID NO: 4021 - protein, 566 aa, synthetic construct; identical to SEQ ID NO: 3467
  REGION 1..566: note = hemagglutinin__InfluenzaA__ADB89129

SEQ ID NO: 4022 - protein, 566 aa, synthetic construct; identical to SEQ ID NO: 2669
  REGION 1..566: note = hemagglutinin__InfluenzaA__ADB89139

SEQ ID NO: 4023 - protein, 566 aa, synthetic construct
  REGION 1..566: note = hemagglutinin__InfluenzaA__ADB89149
MKAILVVLLYTFATANAYTLCIGYHANNSTDTVDTVLEKNVTVTHSVNLLEDKHNGKLCKLRGVAPLHLGKCNIAGWILGNPECESLSTASSWSYIVETSSSDNGTCYPGDFIDYEELREQLSSVSSFERFEIFPKTSSWPNHDSNKGVTAACPHVGAKSFYKNLIWLVKKGNSYPKLSKSYINDKGKEVLVLWGIHHPSTSADQQSLYQNADAYVFVGTSRYSKKFKPEIAIRPKVRGQEGRMNYYWTLVEPGDKITFEATGNLVVPRYAFAMERNAGSGIIISDTPVHDCNTTCQTPKGAINTSLPFQNIHPITIGKCPKYVKSTKLRLATGLRNIPSIQSRGLFGAIAGFIEGGWTGMVDGWYGYHHQNEQGSGYAADLKSTQNAIDEITNKVNSVIEKMNTQFTAVGKEFNHLEKRIENLNKKVDDGFLDIWTYNAELLVLLENERTLDYHDSNVKNLYEKVRSQLKNNAKEIGNGCFEFYHKCDNTCMESVKNGTYDYPKYSEEAKLNREEIDGVKLESTRIYQILAIYSTVASSLVLVVSLGAISFWMCSNGSLQCRICI

SEQ ID NO: 4024 - protein, 566 aa, synthetic construct; identical to SEQ ID NO: 3022
  REGION 1..566: note = hemagglutinin__InfluenzaA__ADB89150

SEQ ID NO: 4025 - protein, 566 aa, synthetic construct
  REGION 1..566: note = hemagglutinin__InfluenzaA__ADB89221
MKAILVVLLYTFATANADTLCIGYHANNSTDTVDTVLEKNVTVTHSVNLLEDKHNGKLCKLRGVAPLHLGKCNIAGWILGNPECESLSTASSWSYIVETSSSDNGTCYPGDFIDYEELREQLSSVSSFERFEIFPKTSSWPNHDSNKGVTAACPHAGAKSFYKNLIWLVKKGNSYPKLSKSYINDKGKEVLVLWGIHHPSTSADQQNLYQNADAYVFVGSSRYSKKFKPEIAIRPKVRDQEGRMNYYWTLVEPGDKITFEATGNLVVPRYAFAMERNAGSGIIISDTPVHDCNTTCQTPKGAINTSLPFQNIHPITIGKCPKYVKSTKLRLATGLRNVPSIQSRGLFGAIAGFIEGGWTGMVDGWYGYHHQNEQGSGYAADLKSTQNAIDEITNKVNSVIEKMNTQFTAVGKEFNHLEKRIENLNKKVDDGFLDIWTYNAELLVLLENERTLDYHDSNVKNLYEKVRSQLKNNAKEIGNGCFEFYHKCDNTCMESVKNGTYDYPKYSEEAKLNREEIDGVKLESTRIYQILAIYSTVASSLVLVVSLGAISFWMCSNGSLQCRICI

SEQ ID NO: 4026 - protein, 566 aa, synthetic construct; identical to SEQ ID NO: 2722
  REGION 1..566: note = hemagglutinin__InfluenzaA__ADB89241

SEQ ID NO: 4027 - protein, 566 aa, synthetic construct; identical to SEQ ID NO: 2669
  REGION 1..566: note = hemagglutinin__InfluenzaA__ADB89251

SEQ ID NO: 4028 - protein, 566 aa, synthetic construct; identical to SEQ ID NO: 3116
  REGION 1..566: note = hemagglutinin__InfluenzaA__ADB89261

SEQ ID NO: 4029 - protein, 566 aa, synthetic construct
  REGION 1..566: note = hemagglutinin__InfluenzaA__ADB89271
MKAILVVLLYTFATANADTLCIGYHANNSTDTVDTVLEKNVTVTHSVNLLEDKHNGKLCKLRGVAPLHLGKCNIAGWILGNPECESLSTASSWSYIVETSSSDNGTCYPGDFIDYEELREQLSSVSSFERFEIFPKTSSWPNHDSNKGVTAACPHAGAKSFYKNLIWLVKKGNSYPKLSKSYINDKGKEVLVLWGIHHPSTSADQQSLYQNADAYVFVGSSRYSKKFKPEIAIRPKVRDQEGRMNYYWTLVEPGDKITFEATGNLVVPRYAFAMERNAGSGIIISDTPVHDCNTTCQTPKGAINTSLPFQNIHPITIGKCPKYVKSTKLRLATGLRNVPSIQSRGLFGAIAGFIEGGWTGMVDGWYGYHHQNEQGSGYAADLKSTQNAIDEITNKVNSVIEKMNTQFTAVGKEFNHLEKRIENLNKKVDDGFLDIWTYNAELLVLLENERTLDYHDSNVKNLYEKVRSQLKNNAKEIGNGCFEFYHKCDNTCMGSVKNGTYDYPKYSEEAKLNREEIDGVKLESTRIYQILAIYSTVASSLVLVVSLGAISFWMCSNGSLQCRICI

SEQ ID NO: 4030 - protein, 566 aa, synthetic construct
  REGION 1..566: note = hemagglutinin__InfluenzaA__ADB89281
MKAILVVLLYTFATANADTLCIGYHANNSTDTVDTVLEKNVTVTHSVNLLEDKHNGKLCKLRGVAPLHLGKCNIAGWILGNPECESLSTASSWSYIVETSSSDNGTCYPGDFIDYEELREQLSSVSSFERFEIFPKTSSWPNHDSNKGVTAACPHAGAKSFYKNLIWLVKKGNSYPKLSKSYINDKGKEVLVLWGIHHPPTSADQQSLYQNADAYVFVGTSRYSKKFKPEIAIRPKVRGQEGRMNYYWTLVEPGDKITFEATGNLVVPRYAFAMERNAGSGIIISDTPVHDCNTTCQTPKGAINTSLPFQNIHPITIGKCPKYVKSTKLRLATGLRNVPSIQSRGLFGAIAGFIEGGWTGMVDGWYGYHHQNEQGSGYAADLKSTQNAIDEITNKVNSVIEKMNTQFTAVGKEFNHLEKRIENLNKKVDDGFLDIWTYNAELLVLLENERTLDYHDSNVKNLYEKVRSQLKNNAKEIGNGCFEFYHKCDNTCMESVKNGTYDYPKYSEEAKLNREEIDGVKLESTRIYQILAIYSTVASSLVLVVSLGAISFWMCSNGSLQCRICI

SEQ ID NO: 4031 - protein, 566 aa, synthetic construct; identical to SEQ ID NO: 2669
  REGION 1..566: note = hemagglutinin__InfluenzaA__ADB89291

SEQ ID NO: 4032 - protein, 566 aa, synthetic construct; identical to SEQ ID NO: 2669
  REGION 1..566: note = hemagglutinin__InfluenzaA__ADB89301

SEQ ID NO: 4033 - protein, 566 aa, synthetic construct; identical to SEQ ID NO: 2669
  REGION 1..566: note = hemagglutinin__InfluenzaA__ADB89311

SEQ ID NO: 4034 - protein, 566 aa, synthetic construct
  REGION 1..566: note = hemagglutinin__InfluenzaA__ADB89321
MKAILVVLLYTFATANADTLCIGYHANNSTDTVDTVLEKNVTVTHSVNLLEDKHNGKLCKLRGVAPLHLGKCNIAGWILGNPECESLSTASSWSYIVETSSSDNGTCYPGDFIDYEELREQLSSVSSFERFEIFPKTSSWPNHDSNKGVTAACPHAGAKSFYKNLIWLVKKGNSYPKLSESYINDKGKEVLVLWGIHHPSTSADQQSLYQNADAYVFVGTSKYSKKFKPEIAIRPKVRDQEGRMNYYWTLVEPGDKITFEATGNLVVPRYAFAMERNAGSGIIISDTPVHDCNTTCQTPKGAINTSLPFQNIHPITIGKCPKYVKSTKLRLATGLRNVPSIQSRGLFGAIAGFIEGGWTGMVDGWYGYHHQNEQGSGYAADLKSTQNAIDEITNKVNSVIEKMNTQFTAVGKEFNHLEKRIENLNKKVDDGFLDIWTYNAELLVLLENERTLDYHDSNVKNLYEKVRSQLKNNAKEIGNGCFEFYHKCDNTCMESVKNGTYDYPKYSEEAKLNREEIDGVKLESTRIYQILAIYSTVASSLVLVVSLGAISFWMCSNGSLQCRICI

SEQ ID NO: 4035 - protein, 566 aa, synthetic construct
  REGION 1..566: note = hemagglutinin__InfluenzaA__ADB89331
MKAILVVLLYTFATANADTLCIGYHANNSTDTVDTVLEKNVTVTHSVNLLEDKHNGKLCKLRGVAPLHLGKCNIAGWILGNPECESLSTASSWSYIVETSSSDNGTCYPGDFIDYEELREQLSSVSSFERFEIFPKTSSWPNHDSNKGVTAACPHAGAKSFYKNLIWLVKKGNSYPKLSKSYINDKGKEVLVLWGIHHPSTSADQQSLYQNADAYVFVGSSKYSKKFKPEIAIRPKVRDQEGRMNYYWTLVEPGDKITFEATGNLVVPRYAFAMERNAGSGIIISDTPVHDCNTTCQTPKGAINTSLPFQNIHPITIGKCPKYVKSTKLRLATGLRNVPSIQSRGLFGAIAGFIEGGWTGMVDGWYGYHHQNEQGSGYAADLKSTQNAIDEITNKVNSVIEKMNTQFTAVGKEFNHLEKRIENLNKKVDDGFLDIWTYNAELLVLLENERTLDYHDSNVKNLYEKVRSQLKNNAKEIGNGCFEFYHKCDNTCMESVKNGTYDYPKYSEEAKLNREEIDGVKLESTRVYQILAIYSTVASSLVLVVSLGAISFWMCSNGSLQCRICI

SEQ ID NO: 4036 - protein, 566 aa, synthetic construct; identical to SEQ ID NO: 2669
  REGION 1..566: note = hemagglutinin__InfluenzaA__ADB89341

SEQ ID NO: 4037 - protein, 566 aa, synthetic construct; identical to SEQ ID NO: 2669
  REGION 1..566: note = hemagglutinin__InfluenzaA__ADB89351

SEQ ID NO: 4038 - protein, 566 aa, synthetic construct; identical to SEQ ID NO: 2669
  REGION 1..566: note = hemagglutinin__InfluenzaA__ADB89361

SEQ ID NO: 4039 - protein, 566 aa, synthetic construct; identical to SEQ ID NO: 2669
  REGION 1..566: note = hemagglutinin__InfluenzaA__ADB89371

SEQ ID NO: 4040 - protein, 566 aa, synthetic construct; identical to SEQ ID NO: 3414
  REGION 1..566: note = hemagglutinin__InfluenzaA__ADB89381

SEQ ID NO: 4041 - protein, 566 aa, synthetic construct
  REGION 1..566: note = hemagglutinin__InfluenzaA__ADB89391
MKAILVVLLYTFATANADTLCIGYHANNSTDTVDTVLEKNVTVTHSVNLLEDKHNGKLCKLRGVAPLHLGKCNIAGWILGNPECESLSTASSWSYIVETSSSDNGTCYPGDFIDYEELREQLSSVSSFERFEIFPKTSSWPNHDSNKGVTAACLHAGAKSFYKNLIWLVKKGNSYPKLSKSYINDKGKEVLVLWGIHHPSTSADQQSLYQNADAYVFVGTSRYSKKFKPEIAIRPKVRDQEGRMNYYWTLVEPGDKITFEATGNLVVPRYAFAMERNAGSGIIISDTPVHDCNTTCQTPKGAINTSLPFQNIHPITIGKCPKYVKSTKLRLATGLRNVPSIQSRGLFGAIAGFIEGGWTGMIDGWYGYHHQNEQGSGYAADLKSTQNAIDEITNKVNSVIEKMNTQFTAVGKEFNHLEKRIENLNKKVDDGFLDIWTYNAELLVLLENERTLDYHDSNVKNLYEKVRSQLKNNAKEIGNGCFEFYHKCDNTCMESVKNGTYDYPKYSEEAKLNREEIDGVKLESTRIYQILAIYSTVASSLVLVVSLGAISFWMCSNGSLQCRICI

SEQ ID NO: 4042 - protein, 566 aa, synthetic construct; identical to SEQ ID NO: 2656
  REGION 1..566: note = hemagglutinin__InfluenzaA__ADB89401

SEQ ID NO: 4043 - protein, 566 aa, synthetic construct; identical to SEQ ID NO: 2669
  REGION 1..566: note = hemagglutinin__InfluenzaA__ADB89411

SEQ ID NO: 4044 - protein, 566 aa, synthetic construct; identical to SEQ ID NO: 3116
  REGION 1..566: note = hemagglutinin__InfluenzaA__ADB89431

SEQ ID NO: 4045 - protein, 566 aa, synthetic construct; identical to SEQ ID NO: 3022
  REGION 1..566: note = hemagglutinin__InfluenzaA__ADB89441

SEQ ID NO: 4046 - protein, 566 aa, synthetic construct; identical to SEQ ID NO: 2669
  REGION 1..566: note = hemagglutinin__InfluenzaA__ADB89461

SEQ ID NO: 4047 - protein, 566 aa, synthetic construct; identical to SEQ ID NO: 3116
  REGION 1..566: note = hemagglutinin__InfluenzaA__ADB89481

SEQ ID NO: 4048 - protein, 566 aa, synthetic construct; identical to SEQ ID NO: 3116
  REGION 1..566: note = hemagglutinin__InfluenzaA__ADB89491

SEQ ID NO: 4049 - protein, 566 aa, synthetic construct
  REGION 1..566: note = hemagglutinin__InfluenzaA__ADB89501
MKAILVVLLYTFATANADTLCIGYHANNSTDTVDTVLEKNVTVTHSVNLLEDKHNGKLCKLRGVAPLHLGKCNIAGWILGNPECESLSTASSWSYIVETSSSDNGTCYPGDFIDYEELREQLSSVSSFERFEIFPKTSSWPNHDSNKGVTAACPHAGAKSFYKNLIWLVKKGNSYPKLSKSYINDKGKEVLVLWGIHHPSTSADQQSLYQNADAYVFVGSSRYSKKFKPEIAIRPKVRDQEGRMNYYWTLVEPGDKITFEATGNLVVPRYAFAMERNAGSGIIISDTPVHDCNTTCQTPKGAINTSLPFQNIHPITIGKCPKYVKSTKLRLATGLRNVPSIQSRGLFGAIAGFIEGGWTGLVDGWYGYHHQNEQGSGYAADLKSTQNAIDEITNKVNSVIEKMNTQFTAVGKEFNHLEKRIENLNKKVDDGFLDIWTYNAELLVLLENERTLDYHDSNVKNLYEKVRSQLKNNAKEIGNGCFEFYHKCDNTCMESVKNGTYDYPKYSEEAKLNREEIDGVKLESTRIYQILAIYSTVASSLVLVVSLGAISFWMCSNGSLQCRICI

SEQ ID NO: 4050 - protein, 566 aa, synthetic construct; identical to SEQ ID NO: 2669
  REGION 1..566: note = hemagglutinin__InfluenzaA__ADB89511

SEQ ID NO: 4051 - protein, 566 aa, synthetic construct; identical to SEQ ID NO: 3116
  REGION 1..566: note = hemagglutinin__InfluenzaA__ADB89531

SEQ ID NO: 4052 - protein, 566 aa, synthetic construct; identical to SEQ ID NO: 3116
  REGION 1..566: note = hemagglutinin__InfluenzaA__ADB89541

SEQ ID NO: 4053 - protein, 566 aa, synthetic construct; identical to SEQ ID NO: 3829
  REGION 1..566: note = hemagglutinin__InfluenzaA__ADB89551

SEQ ID NO: 4054 - protein, 566 aa, synthetic construct; identical to SEQ ID NO: 2669
  REGION 1..566: note = hemagglutinin__InfluenzaA__ADB89561

SEQ ID NO: 4055 - protein, 566 aa, synthetic construct; identical to SEQ ID NO: 2669
  REGION 1..566: note = hemagglutinin__InfluenzaA__ADB89571

SEQ ID NO: 4056 - protein, 566 aa, synthetic construct; identical to SEQ ID NO: 2669
  REGION 1..566: note = hemagglutinin__InfluenzaA__ADB89581

SEQ ID NO: 4057 - protein, 566 aa, synthetic construct
  REGION 1..566: note = hemagglutinin__InfluenzaA__ADB89591
MKAILVVLLYTFATANADTLCIGYHANNSTDTVDTVLEKNVTVTHSVNLLEDKHNGKLCKLRGVAPLHLGKCNIAGWILGNPECESLSTASSWSYIVETSSSDNGTCYPGDFIDYEELREQLSSVSSFERFEIFPKTSSWPNHDSNKGVTAACPHAGAKSFYKNLIWLVKKGNSYPKLSKSYINDKGKEVLVLWGIHHPSTSADQQSLYQNADAYVFVGTSRYSKKFKPEIAIRPKVREQEGRMNYYWALVEPGDKITFEATGNLVVPRYAFAMERNAGSGIIISDTPVHDCNTTCQTPKGAINTSLPFQNIHSITIGKCPKYVKSTKLRLATGLRNVPSIQSRGLFGAIAGFIEGGWTGMVDGWYGYHHQNEQGSGYAADLKSTQNAIDEITNKVNSVIEKMNTQFTAVGKEFNHLEKRIENLNKKVDDGFLDIWTYNAELLVLLENERTLDYHDSNVKNLYEKVRSQLKNNAKEIGNGCFEFYHKCDNTCMESVKNGTYDYPKYSEEAKLNREEIDGVKLESTRIYQILAIYSTVASSLVLVVSLGAISFWMCSNGSLQCRICI

SEQ ID NO: 4058 - protein, 566 aa, synthetic construct
  REGION 1..566: note = hemagglutinin__InfluenzaA__ADB89601
MKAIIVVLLYTFATANADTLCIGYHANNSTDTVDTVLEKNVTVTHSVNLLEDKHNGKLCKLRGVAPLHLGKCNIAGWILGNPECESLSTASSWSYIVETSSSDNGTCYPGDFIDYEELREQLSSVSSFERFEIFPKTSSWPNHDSNKGVTAACPHAGAKSFYKNLIWLVKKGNSYPKLSKSYINDKGKEVLVLWGIHHPSTSADQQSLYQNADAYVFVGTSRYSKKFKPEIAIRPKVRDQEGRMNYYWTLVEPGDKITFEATGNLVVPRYAFAMERNAGSGIIISDTPVHDCNTTCQTPKGAINTSLPFQNIHPITIGKCPKYVKSTKLRLATGLRNVPSIQSRGLFGAIAGFIEGGWTGMVDGWYGYHHQNEQGSGYAADLKSTQNAIDKITNKVNSVIEKMNTQFTAVGKEFNHLEKRIENLNKKVDDGFLDIWTYNAELLVLLENERTLDYHDSNVKNLYEKVRSQLKNNAKEIGNGCFEFYHKCDNTCMESVKNGTYDYPKYSEEAKLNREEIDGVKLESTRIYQILTIYSTVASSLVLVVSLGAISFWMCSNGSLQCRICI

SEQ ID NO: 4059 - protein, 566 aa, synthetic construct; identical to SEQ ID NO: 3833
  REGION 1..566: note = hemagglutinin__InfluenzaA__ADB89611

SEQ ID NO: 4060 - protein, 566 aa, synthetic construct; identical to SEQ ID NO: 3833
  REGION 1..566: note = hemagglutinin__InfluenzaA__ADB89621

SEQ ID NO: 4061 - protein, 566 aa, synthetic construct
  REGION 1..566: note = hemagglutinin__InfluenzaA__ADB89631
MKAILIVLLYTFATANADTLCIGYHANNSTDTVDTVLEKNVTVTHSVNLLEDKHNGKLCKLRGVAPLHLGKCNIAGWILGNPECESLSTASSWSYIVETSSSDNGTCYPGDFIDYEELREQLSSVSSFERFEIFPKTSSWPNHDSNKGVTAACPHAGAKSFYKNLIWLVKKGNSYPKLSKSYINDKGKEVLVLWGIHHPSTSADQQSLYQNADAYVFVGTSRYSKKFKPEIAIRPKVRDQEGRMNYYWTLVEPGDKITFEATGNLVVPRYAFAMERNAGSGIIISDTPVHDCNTTCQTPKGAINTSLPFQNIHPITIGKCPKYVKSTKLRLATGLRNIPSIQSRGLFGAIAGFIEGGWTGMVDGWYGYHHQNEQGSGYAADLKSTQNAIDEITNKVNSVIEKMNTQFTAVGKEFNHLEKRIENLNKKVDDGFLDIWTYNAELLVLLENERTLDYHDSNVKNLYEKVRSQLKNNAKEIGNGCFEFYHKCDNTCMESVKNGTYDYPKYSEEAKLNREEIDGVKLESTRIYQILAIYSTVASSLVLVVSLGAISFWMCSNGSLQCRICI

SEQ ID NO: 4062 - protein, 566 aa, synthetic construct; identical to SEQ ID NO: 3833
  REGION 1..566: note = hemagglutinin__InfluenzaA__ADB89641

SEQ ID NO: 4063 - protein, 566 aa, synthetic construct; identical to SEQ ID NO: 2669
  REGION 1..566: note = hemagglutinin__InfluenzaA__ADB89651

SEQ ID NO: 4064 - protein, 566 aa, synthetic construct; identical to SEQ ID NO: 2669
  REGION 1..566: note = hemagglutinin__InfluenzaA__ADB89661

SEQ ID NO: 4065 - protein, 566 aa, synthetic construct; identical to SEQ ID NO: 3833
  REGION 1..566: note = hemagglutinin__InfluenzaA__ADB89671

SEQ ID NO: 4066 - protein, 566 aa, synthetic construct; identical to SEQ ID NO: 2669
  REGION 1..566: note = hemagglutinin__InfluenzaA__ADB89681

SEQ ID NO: 4067 - protein, 566 aa, synthetic construct; identical to SEQ ID NO: 2669
  REGION 1..566: note = hemagglutinin__InfluenzaA__ADB89691

SEQ ID NO: 4068 - protein, 566 aa, synthetic construct; identical to SEQ ID NO: 3771
  REGION 1..566: note = hemagglutinin__InfluenzaA__ADB89701

SEQ ID NO: 4069 - protein, 566 aa, synthetic construct
  REGION 1..566: note = hemagglutinin__InfluenzaA__ADB89711
MKAILVVLLYTFATANADTLCIGYHANNSTDTVDTVLEKNVTVTHSVNLLEDKHNGKLCKLRGVAPLHLGKCNIAGWILGNPECESLSTASSWSYIVETSSSGNGTCYPGDFIDYEELREQLSSVSSFERFEIFPKTSSWPNHDSNKGVTAACPHAGAKSFYKNLIWLVKKGNSYPKLSKSYINDKGKEVLVLWGIHHPSTSADQQSLYQNADAYVFVGTSRYSKKFKPEIAIRPKVRDQEGRMNYHWTLVEPGDKITFEATGNLVVPRYAFAMERNAGSGIIISDTPVHDCNTTCQTPKGAINTSLPFQNIHPITIGKCPKYVKSTKLRLATGLRNVPSIQSRGLFGAIAGFIEGGWTGMVDGWYGYHHQNEQGSGYAADLKSTQNAIDEITNKVNSVIEKMNTQFTAVGKEFNHLEKRIENLNKKVDDGFLDIWTYNAELLVLLENERTLDYHDSNVKNLYEKVRSQLKNNAKEIGNGCFEFYHKCDNTCMESVKNGTYDYPKYSEEAKLNREEIDGVKLESTRIYQILAIYSTVASSLVLVVSLGAISFWMCSNGSLQCRICI

SEQ ID NO: 4070 - protein, 566 aa, synthetic construct
  REGION 1..566: note = hemagglutinin__InfluenzaA__ADB89721
MKTIIALSYILCLVFAQKLPGNDNSTATLCLGHHAVPNGTIVKTITNDQIEVTNATELVQSSSTGEICDSPHQILDGKNCTLIDALLGDPQCDGFQNKKWDLFVERSKAYSNCYPYDVPDYASLRSLVASSGTLEFDNESFNWTGVTQNGTSSACIRRSKNSFFSRLNWLTHLNFKYPALNVTMPNNEQFDKLYLWGVHHPGTDKDQIFLYAQASGRITVSTKRSQQTVIPNIGSRPRVRNIPSRISIYWTIVKPGDILLINSTGNLIAPRGYFKIQSGKSSIMRSDAPIGKCNSECITPNGSIPNDKPFQNVNRITYGACPRYVKQNTLKLATGMRNVPEKQTRGIFGAIAGFIENGWEGMVDGWYGFRHQNSEGRGQAADLKSTQAAIDQINGKLNRLIGKTNEKFHQIEKEFSEVEGRIQDLEKYVEDTKIDLWSYNAELLVALENQHTIDLTDSEMNKLFEKTKKQLRENAEDMGNGCFKIYHKCDNACIGSIRNGTYDHDVYRDEALNNRFQIKGVELKSGYKDWILWISFAISCFLLCVALLGFIMWACQKGNIRCNICI

SEQ ID NO: 4071 - protein, 566 aa, synthetic construct
  REGION 1..566: note = hemagglutinin__InfluenzaA__ADB90360
MKAILVVLLYTFATANADTLCIGYHANNSTDTVDTVLEKNVTVTHSVNLLEDKHNGKLCKLRGVAPLHLGKCNIAGWILGNPECESLSTASSWSYIVETSSSNNGTCYPGDFIDYEELREQLSSVSSFERFEIFPKTSSWPNHDPNKGVTAACPHAGAKSFYKNLIWLVKKGNSYPKLSKSYINDKGKEVLVLWGIHHPSTSADQQSLYQNADAYVFVGTSRYSKKFKPEIAIRPKVRGQEGRMNYYWTLVEPGDKITFEATGNLVVPRYAFAMERNAGSGIIISDTPVHDCNTTCQTPKGAINTSLPFQNIHPITIGKCPKYVKSTKLRLATGLRNIPSIQSRGLFGAIAGFIEGGWTGMVDGWYGYHHQNEQGSGYAADLKSTQNAIDEITNKVNSVIEKMNTQFTAVGKEFNHLEKRIENLNKKVDDGFLDIWTYNAELLVLLENERTLDYHDSNVKNLYEKVRSQLKNNAKEIGNGCFEFYHKCDNTCMESVKNGTYDYPKYSEEAKLNREEIDGVKLESTRIYQILAIYSTVASSLVLVVSLGAISFWMCSNGSLQCRICI

SEQ ID NO: 4072 - protein, 566 aa, synthetic construct
  REGION 1..566: note = hemagglutinin__InfluenzaA__ADB90370
MKAILVVLLYTFATANADTLCIGYHANNSTDTVDTVLEKNVTVTHSVNLLEDKHNGKLCKLRGVAPLHLGKCNIAGWILGNPECESLSTASSWSYIVETSSSDNGTCYPGDFIDYEELREQLSSVSSFERFEIFPKTSSWPNHDPNKGVTAACPHAGAKSFYKNLIWLVKKGNSYPKLSKSYINDKGKEVLVLWGIHHPSTSADQQSLYQNADAYVFVGTSRYSKKFKPEIAIRPKVRGQEGRMNYYWTLVEPGDKITFEATGNLVVPRYAFAMERNAGSGIIISDTPVHDCNTTCQTPKGAINTSLPFQNIHPITIGKCPKYVKSTKLRLATGLRNVPSIQSRGLFGAIAGFIEGGWTGMVDGWYGYHHQNEQGSGYAADLKSTQNAIDEITNKVNSVIEKMNTQFTAVGKEFNHLEKRIENLNKKVDDGFLDIWTYNAELLVLLENERTLDYHDSNVKNLYEKVRSQLKNNAKEIGNGCFEFYHKCDNTCMESVKNGTYDYPKYSEEAKLNREEIDGVKLESTRIYQILAIYSTVASSLVLVVSLGAISFWMCSNGSLQCRICI

SEQ ID NO: 4073 - protein, 566 aa, synthetic construct; identical to SEQ ID NO: 3588
  REGION 1..566: note = hemagglutinin__InfluenzaA__ADB90414

SEQ ID NO: 4074 - protein, 566 aa, synthetic construct; identical to SEQ ID NO: 3116
  REGION 1..566: note = hemagglutinin__InfluenzaA__ADC32409

SEQ ID NO: 4075 - protein, 566 aa, synthetic construct
  REGION 1..566: note = hemagglutinin__InfluenzaA__ADC32410
MKAILVVLLYTFATANADTLCIGYHANNSTDTVDTVLEKNVTVTHSVNLLEDKHNGKLCKLRGVAPLHLGKCNIAGWILGNPECESLSTASSWSYIVETSSSDNGTCYPGDFIDYEELREQLSSVSSFERFEIFPKTSSWPNHDSNKGVTAACPHAGAKSFYKNLIWLVKKGNSYPKLSKSYINDKGKEVLVLWGIHHPSTSADQQSLYQNADAYVFVGTSRYSKKFKPEIAIRPKVRDQEGRMNYYWTLVEPGDKITFEATGNLVVPRYAFAMERNAGSGIIISDTPVHDCNTTCQTPKGAINTSLPFQNIHPITIGKCPKYVKSTKLRLATGLRNVPSIQSRGLFGAIAGFIEGGWTGMVDGWYGYHHQNEQGSGYAADLKSTQNAIDEITNKVNSVIEKMNTQFTAVGKEFNHLEKRIENLNKKVDDGFLDIWTYNAELLVLLENEKTLDYHDSNVKNLYEKVRSQLKNNAKEIGNGCFEFYHKCDNTCMESVKNGTYDYPKYSEEAKLNREEIDGVKLESTRIYQILAIYSTVASSLVLVVSLGAISFWMCSNGSLQCRICI

SEQ ID NO: 4076 - protein, 566 aa, synthetic construct
  REGION 1..566: note = hemagglutinin__InfluenzaA__ADC32411
MKAILVVLLYTFATANADTLCIGYHANNSTDTVDTVLEKNVTVTHSVNLLEDKHNGKLCKLRGVAPLHLGKCNIAGWILGNPECESLSTASSWSYIVETSSSDNGTCYPGDFIDYEELREQLSSVSSFERFEIFPKTSSWPNHDSNKGVTAACPHAGAKSFYKNLIWLVKKGNSYPKLSKSYINDKGKEVLVLWGIHHPSTSADQQSLYQNADAYVFVGTSRYSKKFKPEIAIRPKVREQEGRMNYYWTLVEPGDKITFEATGNLVVPRYAFAMERNAGSGIIISDTPVHDCNTTCQTPKGAINTSLPFQNIHSITIGKCPKYVKSTKLRLATGLRNVPSIQSRGLFGAIAGFIEGGWTGMVDGWYGYHHQNEQGSGYAADLKSTQNAIDEITNKVNSVIEKMNTQFTAVGKEFNHLAKRIENLNKKVDDGFLDIWTYNAELLVLLENERTLDYHDSNVKNLYEKVRSQLKNNAKEIGNGCFEFYHKCDNTCMESVKNGTYDYPKYSEEAKLNREEIDGVKLESTRIYQILAIYSTVASSLVLVVSLGAISFWMCSNGSLQCRICI

SEQ ID NO: 4077 - protein, 566 aa, synthetic construct; identical to SEQ ID NO: 3022
  REGION 1..566: note = hemagglutinin__InfluenzaA__ADC32412

SEQ ID NO: 4078 - protein, 566 aa, synthetic construct; identical to SEQ ID NO: 2669
  REGION 1..566: note = hemagglutinin__InfluenzaA__ADC32413

SEQ ID NO: 4079 - protein, 566 aa, synthetic construct; identical to SEQ ID NO: 3116
  REGION 1..566: note = hemagglutinin__InfluenzaA__ADC32414

SEQ ID NO: 4080 - protein, 566 aa, synthetic construct; identical to SEQ ID NO: 3116
  REGION 1..566: note = hemagglutinin__InfluenzaA__ADC32415

SEQ ID NO: 4081 - protein, 566 aa, synthetic construct; identical to SEQ ID NO: 3116
  REGION 1..566: note = hemagglutinin__InfluenzaA__ADC32416

SEQ ID NO: 4082 - protein, 566 aa, synthetic construct
  REGION 1..566: note = hemagglutinin__InfluenzaA__ADC32417
MKAILVVLLYTFATANADTLCIGYHANNSTDTVDTVLEKNVTVTHSVNLLEYKHNGKLCKLRGVAPLHLGKCNIAGWILGNPECESLSTASSWSYIVETSSSDNGTCYPGDFIDYEELREQLSSVSSFERFEIFPKTSSWPNHDSNKGVTAACPHAGAKSFYKNLIWLVKKGNSYPKLSKSYINDKGKEVLVLWGIHHPSTSADQQSLYQNADAYVFVGTSRYSKKFKPEIAIRPKVREQEGRMNYYWTLVEPGDKITFEATGNLVVPRYAFAMERNAGSGIIISDTPVHDCNTTCQTPKGAINTSLPFQNIHPITIGKCPKYVKSTKLRLATGLRNVPSIQSRGLFGAIAGFIEGGWTGMVDGWYGYHHQNEQGSGYAADLKSTQNAIDEITNKVNSVIEKMNTQFTAVGKEFNHLEKRIENLNKKVDDGFLDIWTYNAELLVLLENERTLDYHDSNVKNLYEKVRSQLKNNAKEIGNGCFEFYHKCNNTCMESVKNGTYDYPKYSEEAKLNREEIDGVKLESTRIYQILAIYSTVASSLVLVVSLGAISFWMCSNGSLQCRICI

SEQ ID NO: 4083 - protein, 566 aa, synthetic construct; identical to SEQ ID NO: 3116
  REGION 1..566: note = hemagglutinin__InfluenzaA__ADC32418

SEQ ID NO: 4084 - protein, 566 aa, synthetic construct
  REGION 1..566: note = hemagglutinin__InfluenzaA__ADC32419
MKAILVVLLYTFATANADTLCIGYHANNSTDTVDTVLEKNVTVTHSVNLLEDKHNGKLCKLRGVAPLHLGKCNIAGWILGNPECESLSTASSWSYIVETSSSDNGTCYPGDFIDYEELREQLSSVSSFERFEIFPKTSSWPNHDSNKGVTAACPHAGAKSFYKNLIWLVKKGNSYPKLSKSYINDKGKEVLVLWGIHHPSTSADQQSLYQNADAYVFVGTSRYSKKFKPEIAIRPKVREQEGRMNYYWTLVEPGDKITFEATGNLVVPRYAFAMERNAGSGIIISDTPVHDCNTTCQTPKGAINTSLPFQNIHSITIGKCPKYVKSTKLRLATGLRNVPSIQSRGLFGAIAGFIEGGWTGMVDGWFGYHHQNDQGSAYAADLKSTQNAIDEITNKVNSVIEKMNTQFTAVGKEFNHLEKRIENLNKKVDDGFLDIWTYNAELLVLLENERTLDYHDSNVKNLYEKVRSQLKNNAKEIGNGCFEFYHKCDNTCMESVKNGTYDYPKYSEEAKLNREEIDGVKLESTRIYQILAIYSTVASSLVLVVSLGAISFWMCSNGSLQCRICI

SEQ ID NO: 4085 - protein, 566 aa, synthetic construct; identical to SEQ ID NO: 3116
  REGION 1..566: note = hemagglutinin__InfluenzaA__ADC32420

SEQ ID NO: 4086 - protein, 566 aa, synthetic construct; identical to SEQ ID NO: 3116
  REGION 1..566: note = hemagglutinin__InfluenzaA__ADC32421

SEQ ID NO: 4087 - protein, 566 aa, synthetic construct
  REGION 1..566: note = hemagglutinin__InfluenzaA__ADC32422
MKAILVVLLYTFATANADTLCIGYHANNSTDTVDTVLEKNVTVTHSVNLLEDKHNGKLCKLRGVAPLHLGKCNIAGWILGNPECESLSTASSWSYIVETSSSDNGTCYPGDFIDYEELREQLSSVSSFERFEIFPKTSSWPNHDSNKGVTAACPHAGAKSFYKNLIWLVKKGNSYPKLSKSYINDKGKEVLVLWGIHHPSTSADQQSLYQNADAYVFVGTSRYSKKFKPEIAIRPKVREQEGRMNYYWTLVEPGDKITFEATGNLMVPRYAFAMERNAGSGIIISDTPVHDCNTTCQTPKGAINTSLPFQNIHSITIGKCPKYVKSTKLRLATGLRNVPSIQSRGLFGAIAGFIEGGWTGMVDGWYGYHHQNEQGSGYAADLKSTQNAIDEITNKVNSVIEKMNTQFTAVGKEFNHLEKRIENLNKKVDDGFLDIWTYNAELLVLLENERTLDYHDSNVKNLYEKVRSQLKNNAKEIGNGCFEFYHKCDNTCMESVKNGTYDYPKYSEEAKLNREEIDGVKLESTRIYQILAIYSTVASSLVLVVSLGAISFWMCSNGSLQCRICI

SEQ ID NO: 4088 - protein, 566 aa, synthetic construct
  REGION 1..566: note = hemagglutinin__InfluenzaA__ADC32423
MKAILVVLLYTFATANADTLCIGYHANNSTDTVDTVLEKNVTVTHSVNLLEDKHNGKLCKLRGVAPLHLGKCNIAGWILGNPECESLSTASSWSYIVETSSSDNGTCYPGDFIDYEELREQLSSVSSFERFEIFPKTSSWPNHDSNKGVTAACPHAGAKSFYKNLIWLVKKGNSYPKLSKSYINDKGKEVLVLWGIHHPSTSADQQSLYQNADAYVFVGTSRYSKKFKPEIAIRPKVREQEGRMNYYWTLVEPGDKITFEATGNLVVPRYAFAMERNAGSGIIISDTPVHDCNTTCQTPKGAINTSLPFQNIHSITIGKCPKYVKSTKLRLATGLRNVPSIQSRGLFGAIAGFIEGGWTGMVDGWYGYHHQNEQGSGYAADLKSTQNAIDEITNKVNSVIEKMNTQFTAVGKEFNHLEKRIENLNKKVNDGFLDIWTYNAELLVLLENERTLDYHDSNVKNLYEKVRSQLKNNAKEIGNGCFEFYHKCDNTCMESVKNGTYDYPKYSEEAKLNREEIDGVKLESTRIYQILAIYSTVASSLVLVVSLGAISFWMCSNGSLQCRICI

SEQ ID NO: 4089 - protein, 566 aa, synthetic construct
  REGION 1..566: note = hemagglutinin__InfluenzaA__ADC32434
MKAILVVLLYTFATANADTLCIGYHANNSTDTVDTVLEKNVTVTHSVNLLEDKHNGKLCKLRGVAPLHLGKCNIAGWILGNPECESLSTASSWSYIVETSSSDNGTCYPGDFIDYEELREQLSSVSSFERFEIFPKTSSWPNHDSNKGVTAACPHAGAKSFYKNLIWLVKKGNSYPKLSKSYINDKGKEVLVLWGIHHPSTSADQQSLYQNADAYVFVGTSRYSKKFKPEIAIRPKVRDQEGRMNYYWTLVEPGDKITFEATGNLVVPRYAFAMERNAGSGIIISDTPVHDCNTTCQTPKGAINTSLPFQNIHPITIGKCPKYVKSTKLRLATGLRNVPSIQSRGLFGAIAGFIEGGWTGMVDGWYGYHHQNEQGSGYAADLKSTQHAIDEITNKVNSVIEKMNTQFTAVGKEFNHLEKRIENLNKKVDDGFLDIWTYNAELLVLLENERTLDYHDSNVKNLYEKVRSQLKNNAKEIGNGCFEFYHKCDNTCMESVKNGTYDYPKYSEEAKLNREEIDGVKLESTRIYQILAIYSTVASSLVLVVSLGAISFWMCSNGSLQCRICI

SEQ ID NO: 4090 - protein, 566 aa, synthetic construct; identical to SEQ ID NO: 4089
  REGION 1..566: note = hemagglutinin__InfluenzaA__ADC32435

SEQ ID NO: 4091 - protein, 566 aa, synthetic construct
  REGION 1..566: note = hemagglutinin__InfluenzaA__ADC34940
MKTIIALSYILCLVFAQKLPGNDNSTATLCLGHHAVPNGTIVKTITNDQIEVTNATELVQSSSTGGICDSPHQILDGENCTLIDALLGDPQCDGFQNKKWDLFVERSKAYSNCYPYDVPDYASLRSLVASSGTLEFNNERFNWTGVTQNGTSSACKRGSDNSFFSRLNWLTHLKFKYPALNVTMPNNEKFDKLYIWGVHHPGTDNDQIFLHAQASGRITVSTKRSQQTVIPNIGSRPRVRNIPSRISIYWTIVKPGDILLINSTGNLIAPRGYFKIRSGKSSIMKSDAPIGKCNSECITPNGSIPNDKPFQNVNRITYGACPRYVKQNTLKLATGMRNVPEKQTRGIFGAIAGFIENGWEGMVDGWYGFRHQNSEGIGQAADLKSTQAAINQINGKLNRLIGKTNEKFHQIEKEFSEVEGRIQDLEKYVEDTKIDLWSYNAELLVALENQHTIDLTDSEMNKLFERTKKQLRENAEDMGNGCFKIYHKCDNACIGSIRNGTYDHDVYRDEALNNRFQIKGVELKSGYKDWILWISFAISCFLLCVALLGFIMWACQKGNIRCNICI

SEQ ID NO: 4092 - protein, 566 aa, synthetic construct; identical to SEQ ID NO: 4004
  REGION 1..566: note = hemagglutinin__InfluenzaA__ADC38987

SEQ ID NO: 4093 - protein, 566 aa, synthetic construct
  REGION 1..566: note = hemagglutinin__InfluenzaA__ADC38997
MKAILVVLLYTFATANADTLCIGYHANNSTDTVDTVLEKNVTVTHSVNLLEDKHNGKLCKLRGVAPLHLGKCNIAGWILGNPECESLSTASSWSYIVETSSSDNGTCYPGDFIDYEELREQLSSVSSFERFEIFPKTSSWPNHDSNKGVTAACPHAGAKSFYKNLIWLVKKGNSYPKLSKSYINDKGKDVLVLWGIHHPSTSADQQSLYQNADAYVFVGTSRYSKKFKPEIAIRPKVRDQEGRMNYYWTLVEPGDKITFEATGNLVVPRYAFAMERNAGSGIIISDTPVHDCNTTCQTPKGAINTSLPFQNIHPITIGKCPKYVKSTKLRLATGLRNVPSIQSRGLFGAIAGFIEGGWTGMVDGWYGYHHQNEQGSGYAADLKSTQNAIDEITNKVNSVIEKMNTQFTAVGKEFNHLEKRIENLNKKVDDGFLDIWTYNAELLVLLENERTLDYHDSNVKNLYEKVRSQLKNNAKEIGNGCFEFYHKCDNTCMESVKNGTYDYPKYSEEAKLNREEIDGVKLESTRIYQILAIYSTVASSLVLVVSLGAISFWMCSNGSLQCRICI

SEQ ID NO: 4094 - protein, 566 aa, synthetic construct; identical to SEQ ID NO: 3770
  REGION 1..566: note = hemagglutinin__InfluenzaA__ADC39007

SEQ ID NO: 4095 - protein, 565 aa, synthetic construct
  REGION 1..565: note = hemagglutinin__InfluenzaA__ADC45604
MKAKLLVLLCTFTATYADTICIGYHANNSTDTVDTVLEKNVTVTHSVNLLENSHNGKLCLLKGIAPLQLGNCSVAGWILGNPECELLISKESWSYIVEKPNPENGTCYPGHFADYEELREQLSSVSSFERFEIFPKESSWPNHTVTGVSASCSHNGESSFYRNLLWLTGKNGLYPNLSKSYANNKEKEVLVLWGVHHPPNIGDQKALYHTENAYVSVVSSHYSRKFTPEIAKRPKVRDQEGRINYYWTLLEPGDTIIFEANGNLIAPRYAFALSRGLGSGIINSNAPMDKCDAKCQTPQGAINSSLPFQNVHPVTIGECPKYVRSAKLRMVTGLRNIPSIQSRGLFGAIAGFIEGGWTGMVDGWYGYHHQNEQGSGYAADQKSTQNAINGITNKVNSVIEKMNTQFTAVGKEFNKLERRMENLNKKVDDGFIDIWTYNAELLVLLENERTLDFHDSNVKNLYEKVKSQLKNNAKEIGNGCFEFYHKCNDECMESVKNGTYDYPKYSEESKLNREKIDGVKLESMGVYQILAIYSTVASSLVLLVSLGAISFWMCSNGSLQCRICI

SEQ ID NO: 4096 - protein, 565 aa, synthetic construct
  REGION 1..565: note = hemagglutinin__InfluenzaA__ADC45626
MKVKLLVLLCTFTATYADTICIGYHANNSTDTVDTVLEKNVTVTHSVNLLEDNHNGKLCLLKGIAPLQLGNCSVAGWILGNPECELLISKESWSYIVEKPNPENGTCYPGHFADYEELREQLSSVSSFERFEIFPKESSWPNHTVTGVSASCSHNGESSFYKNLLWLTGKNGLYPNLSKSYANNKEKEVLVLWGVHHPPNIGNQMTLYHKENAYVSVVSSHYSRKFTPEIAKRPKVRDQEGRINYYWTLLEPGDTIIFEASGNLIAPRYAFALSRGFGSGIINSNAPMDECDAKCQTPQGAINSSLPFQNVHPVTIGECPKYVRSAKLRMVTGLRNIPSIQSRGLFGAIAGFIEGGWTGMVDGWYGYHHQNEQGSGYAADQKSTQNAINGITNKVNSVIEKMNTQFTAVGKEFNKLERRMENLNKKVDDGFIDVWTYNAELLVLLENERTLDFHDSNVKNLYEKVKNQLKNNAKEIGNGCFEFYHKCNDECMESVKNGTYDYPKYSEESKLSREKIDGVKLESMGVYQILAIYSTVASSLVLLVSLGAISFWMCSNGSLQCRICI

SEQ ID NO: 4097 - protein, 565 aa, synthetic construct
  REGION 1..565: note = hemagglutinin__InfluenzaA__ADC45637
MKVKLLVLLCTFTATYADTICIGYHANNSTDTVDTVLEKNVTVTHSVNLLEDNHNGKLCLLKGIAPLQLGNCSVAGWILGNPECELLISKESWSYIVEKPNPENGTCYPGHFADYEELREQLSSVSSFERFEIFPKESSWPNHTVTGVSASCSHNGESSFYKNLLWLTGKNGLYPNLSKSYANNKEKEVLVLWGVHHPPNIGDQMTLYHKENAYVSVVSSHYSRKFTPEIAKRPKVRDQEGRINYYWTLLEPGDTIIFEASGNLIAPRYAFALSRGFGSGIINSNAPMDECDAKCQTPQGAINSSLPFQNVHPVTIGECPKYVRSAKLRMVTGLRNIPSIQSRGLFGAIAGFIEGGWTGMVDGWYGYHHQNEQGSGYAADQKSTQNAINGITNKVNSVIEKMNTQFTAVGKEFNKLERRMENLNKKVDDGFIDVWTYNAELLVLLENERTLDFHDSNVKNLYEKVKNQLKNNAKEIGNGCFEFYHKCNDECMESVKNGTYDYPKYSEESKLSREKIDGVKLESMGVYQILAIYSTVASSLVLLVSLGAISFWMCSNGSLQCRICI

SEQ ID NO: 4098 - protein, 565 aa, synthetic construct
  REGION 1..565: note = hemagglutinin__InfluenzaA__ADC45648
MKVKLLVLLCTFAATYADTICIGYHANNSTDTVDTVLEKNVTVTHSVNLLENSHNGKLCLLKGIAPLQLGNCSIAGWVLGNPECELLISKESWSYIVEKPNPENGTCYPGHFADYEELREQLSSVSSFERFEIFPKESSWPNHTVTGVSASCSHNGESSFYRNLLWLTGKNGLYPNLSKSYANNKEKEVLVLWGVHHPPNIGDQKALYHTENAYVSVVSSHYSRKFTPEIAKRPKVRDQEGRINYYWTLLEPGDTIIFEANGNLIAPRYAFALSRGFGSGIINSNAPMDKCDAKCQTPQGAINSSLPFQNVHPVTIGECPKYVRSAKLRMVTGLRNIPSIQSRGLFGAIAGFIEGGWTGMVDGWYGYHHQNEQGSGYAADQKSTQNAINGITNKVNSVIEKMNTQFTAVGKEFNKLERRMENLNKKVDDGFIDIWTYNAELLVLLENERTLDFHDSNVKNLYEKVKSQLKNNAKEIGNGCFEFYHKCNDECMESVKNGTYDYPKYSEESKLNREKIDGVKLESMGVYQILAIYSTVASSLVLLVSLGAISFWMCSNGSLQCRICI

SEQ ID NO: 4099 - protein, 565 aa, synthetic construct
  REGION 1..565: note = hemagglutinin__InfluenzaA__ADC45659
MKVKLLVLLCTFTATYADTICIGYHANNSTDTVDTVLEKNVTVTHSVNLLENSHNGKLCLLKGIAPLQLGNCSVAGWILGNPECELLISKESWSYIVEKPNPENGTCYPGHFADYEELREQLSSVSSFERFEIFPKKSSWPNHTVTGVSASCSHNGESSFYRNLLWLTEKNGLYPNLSKSYANNKEKEVLVLWGVHHPPNIGDQKALYHTENAYVSVVSSHYSRKFTPEIAKRPKVRDQEGRINYYWTLLEPGDTIIFEANGNLIAPRYAFALSRGFGSGIINSNAPMDKCDAKCQTPQGAINSSLPFQNVHPVTIGECPKYVRSAKLRMVTGLRNIPSIQSRGLFGAIAGFIEGGWTGMVDGWYGYHHQNEQGSGYAADQKSTQNAINGITNKVNSVIEKMNTQFTAVGKEFNKLERRMENLNKKVDDGFIDIWTYNAELLVLLENERTLDFHDSNVKNLYEKVKSQLKNNAKEIGNGCFEFYHKCNDECMESVKNGTYDYPKYSEESKLNREKIDGVKLESMGVYQILAIYSTVASSLVLLVSLGAISFWMCSNGSLQCRICI

SEQ ID NO: 4100 - protein, 565 aa, synthetic construct
  REGION 1..565: note = hemagglutinin__InfluenzaA__ADC45670
MKVKLLVLLCTFTATYADTICIGYHANNSTDTVDTVLEKNVTVTHSVNLLENSHNGKLCLLKGIAPLQLGNCSVAGWILGNPECELLISKESWSYIVEKPNPENGTCYPGHFADYEELREQLSSVSSFERFEIFPKESSWPNHTVTGGSASCSHNGESSFYRNLLWLTGKNGLYPNLSKSYANNKEKEVLVLWGVHHPPNIGDQKALYHTENAYVSVVSSHYSRKFTPEIAKRPKVRDQEGRINYYWTLLEPGDTIIFEANGNLIAPRYAFALSRGFGSGIINSNAPMDKCDAKCQTPQGAINSSLPFQNVHPVTIGECPKYVRSAKLRMVTGLRNIPSIQSRGLFGAIAGFIEGGWTGMVDGWYGYHHQNEQGSGYAADQKSTQNAINGITNKVNSVIEKMNTQFTAVGKEFNKLERRMENLNKKVDDGFIDIWTYNAELLVLLENERTLDFHDSNVKNLYEKVKSQLKNNAKEIGNGCFEFYHKCNDECMESVKNGTYDYPKYSEESKLNREKIDGVKLESMGVYQILAIYSTVASSLVLLVSLGAISFWMCSNGSLQCRICI

SEQ ID NO: 4101 - protein, 565 aa, synthetic construct
  REGION 1..565: note = hemagglutinin__InfluenzaA__ADC45681
MKVKLLVLLCTFTATYADTICIGYHANNSTDTVDTVLEKNVTVTHSVNLLEDNHNGKLCLLKGIAPLQLGNCSVAGWILGNPECELLISKESWSYIVEKPNPENGTCYPGHFADYEELREQLSSASSFERFEIFPKESSWPNHTVTGVSASCSHNGESSFYKNLLWLTGKNGLYPNLRKSYANNKEKEVLVLWGVHHPPNIGDQMTLYHKENAYVSVVSSHYSRKFTPEIAKRPKVRDQEGRINYYWTLLEPGDTIIFEASGNLIAPRYAFALSRGFGSGIINSNAPMDECDAKCQTPQGAINSSLPFQNVHPVTIGECPKYVRSAKLRMVTGLRNIPSIQSRGLFGAIAGFIEGGWTGMVDGWYGYHHQNEQGSGYAADQKSTQNAINGITNKVNSVIEKMNTQFTAVGKEFNKLERRMENLNKKVDDGFIDVWTYNAELLVLLENERTLDFHDSNVKNLYEKVKNQLKNNAKEIGNGCFEFYHKCNDECMESVKNGTYDYPKYSEESKLSREKIDGVKLESMGVYQILAIYSTVASSLVLLVSLGAISFWMCSNGSLQCRICI

SEQ ID NO: 4102 - protein, 565 aa, synthetic construct
  REGION 1..565: note = hemagglutinin__InfluenzaA__ADC45692
MKVKLLVLLCTFTATYADTICIGYHANNSTDTVDTVLEKNVTVTHSVNLLENSHNGKLCLLKGIAPLQLGNCSVAGWILGNPECELLISKKSWSYIVEKPNPENGTCYPGHFADYEELREQLSSVSSFERFEIFPKESSWPNHTVTGVSASCSHNGESSFYRNLLWLTGKNGLYPNLSKSYANNKEKEVLVLWGVHHPPNIGDQKALYHTENAYVSVVSSHYSRKFTPEIAKRPKVRDQEGRINYYWTLLEPGDTIIFEANGNLIAPRYAFALSRGFGSGIINSNAPMDKCDAKCQTPQGAINSSLPFQNVHPVTIGECPKYVRSAKLRMVTGLRNIPSIQSRGLFGAIAGFIEGGWTGMVDGWYGYHHQNEQGSGYAADQKSTQNAINGITNKVNSVIEKMNTQFTAVGKEFNKLERRMENLNKKVDDGFIDIWTYNAELLVLLENERTLDFHDSNVKNLYEKVKSQLKNNAKEIGNGCFEFYHKCNDECMESVKNGTYDYPKYSEESKLNREKIDGVKLESMGVYQILAIYSTVASSLVLLVSLGAISFWMCSNGSLQCRICI

SEQ ID NO: 4103 - protein, 565 aa, synthetic construct; identical to SEQ ID NO: 3170
  REGION 1..565: note = hemagglutinin__InfluenzaA__ADC45703

SEQ ID NO: 4104 - protein, 565 aa, synthetic construct
  REGION 1..565: note = hemagglutinin__InfluenzaA__ADC45714
MKVKLLVLLCTFTATYADTICIGYHANNSTDTVDTVLEKNVTVTHSVNLLEDNHNGKLCLLKGIAPLQLGNCSVAGWILGNPECELLISKESWSYIVEKPNPENGTCYPGHFADYEELREQLSSVSSFERFEIFPKESSWPNHTVTGVSASCSHNGESSFYKNLLWLTGKNGLYPNLSKSYANNKEKEVLVLWGVHHPPNIGDQTTLYHKENAYVSVVSSHYSRKFTPEIAKRPKVRDQEGRINYYWTLLEPGDTIIFEASGNLIAPRYAFALSRGFGSGIINSNAPMDECDAKCQTPQGAINSSLPFQNVHPVTIGECPKYVRSAKLRMVTGLRNIPSIQSRGLFGAIAGFIEGGWTGMVDGWYGYHHQNEQGSGYAADQKSTQNAINGITNKVNSVIEKMNTQFTAVGKEFNKLERRMENLNKKVDDGFIDVWTYNAELLVLLENERTLDFHDSNVKNLYEKVKNQLKNNAKEIGNGCFEFYHKCNDECMESVKNGTYDYPKYSEESKLSREKIDGVKLESMGVYQILAIYSTVASSLVLLVSLGAISFWMCSNGSLQCRICI

SEQ ID NO: 4105 - protein, 565 aa, synthetic construct; identical to SEQ ID NO: 3170
  REGION 1..565: note = hemagglutinin__InfluenzaA__ADC45725

SEQ ID NO: 4106 - protein, 565 aa, synthetic construct
  REGION 1..565: note = hemagglutinin__InfluenzaA__ADC45736
MKVKLLVLLCTFTATYADTICIGYHANNSTDTVDTVLEKNVTVTHSVNLLENSHNGKLCLLKGIAPLQLGNCSVAGWILGNPECELLISKESWSYIVEKPNPENGTCYPGHFADYEELREQLSSVSSFERFEIFPKESSWPNHTVTGVSASCSHNGESSFYRNLLWLTGKNGLYPNLSKSYANNKEKEVLVLWGVHHPPNIGDQKALYHTENTYVSVVSSHYSRKFTPEIAKRPKVRDQEGRINYYWTLLEPGDTIIFEANGNLIAPRYAFALSRGFGSGIINSNAPMDKCDAKCQTPQGAINSSLPFQNVHPVTIGECPKYVRSAKLRMVTGLRNIPSIQSRGLFGAIAGFIEGGWTGMVDGWYGYHHQNEQGSGYAADQKSTQNAINGITNKVNSVIEKMNTQFTAVGKEFNKLERRMENLNKKVDDGFIDIWTYNAELLVLLENERTLDFHDSNVKNLYEKVKSQLKNNAKEIGNGCFEFYHKCNDECMESVKNGTYDYPKYSEESKLNREKIDGVKLESMGVYQILAIYSTVASSLVLLVSLGAISFWMCSNGSLQCRICI

SEQ ID NO: 4107 - protein, 565 aa, synthetic construct; identical to SEQ ID NO: 2488
  REGION 1..565: note = hemagglutinin__InfluenzaA__ADC45747

SEQ ID NO: 4108 - protein, 565 aa, synthetic construct
  REGION 1..565: note = hemagglutinin__InfluenzaA__ADC45758
MKVKLLVLLCTFTATYADTICIGYHANNSTDTVDTVLEKNVTVTHSVNLLENSHNGKLCLLKGIAPLQLGNCSVAGWILGNPECELLISKESWSYIVEKPNPENGTCYPGHFADYEELREQLSSVSSFERFEIFPKESSWPNHTVTGVSASCSHNGENSFYRNLLWLTGKNGLYPNLSKSYANNKEKEVLVLWGVHHPPNIADQKTLYHTENAYVSVVSSHYSRKFTPEIAKRPKVRDQEGRINYYWTLLEPGDTIIFEANGNLIAPRYAFALSRGFGSGIINSNAPMDKCDAKCQTPQGAINSSLPFQNVHPVTIGECPKYVRSAKLRMVTGLRNIPSIQSRGLFGAIAGFIEGGWTGMVDGWYGYHHQNEQGSGYAADQKSTQNAINGITNKVNSVIEKMNTQFTAVGKEFNKLERRMENLNKKVDDGFIDIWTYNAELLVLLENERTLNFHDSNVKNLYEKVKSQLKNNAKEIGNGCFEFYHKCNDECMESVKNGTYDYPKYSEESKLNREKIDGVKLESMGVYQILAIYSTVASSLVLLVSLGAISFWMCSNGSLQCRICI

SEQ ID NO: 4109 - protein, 565 aa, synthetic construct; identical to SEQ ID NO: 3626
  REGION 1..565: note = hemagglutinin__InfluenzaA__ADC45780

SEQ ID NO: 4110 - protein, 565 aa, synthetic construct; identical to SEQ ID NO: 3131
  REGION 1..565: note = hemagglutinin__InfluenzaA__ADC45791

SEQ ID NO: 4111 - protein, 565 aa, synthetic construct
  REGION 1..565: note = hemagglutinin__InfluenzaA__ADC45813
MKVKLLILLCTFTATYADTICIGYHANNSTDTVDTVLEKNVTVTHSVNLLENSHNGKLCLLKGIAPLQLGNCSVAGWILGNPECELLISKESWSYIVEKPNPENGTCYPGHFADYEELREQLSSVSSFERFEIFPKESSWPNHTVTGVSASCSHNGESSFYRNLLWLTMKNGLYPNLSKSYANNKEKEVLVLWGVHHPPNIGDQKTLYNTENAYVSVVSSHYSRKFTPEIAKRPKVRDQEGRINYYWTLLEPGDTIIFEANGNLIAPRYAFALSRGFGSGIINSNAPMDKCDAKCQTPQGAINSSLPFQNVHPVTIGECPKYVRSAKLRMVTGLRNIPSIQSRGLFGAIAGFIEGGWTGMVDGWYGYHHQNEQGSGYAADQKSTQNAINGITNKVNSVIEKMNTQFTAVGKEFNKLERRMENLNKKVDDGFIDIWTYNAELLVLLENERTLDFHDSNVKNLYEKVKSQLKNNAKEIGNGCFEFYHKCNDECMESVKNGTYDYPKYSEESKLNREKIDGVKLESMGVYQILAIYSTVASSLVLLVSLGAISFWMCSNGSLQCRICI

SEQ ID NO: 4112 - protein, 565 aa, synthetic construct; identical to SEQ ID NO: 3131
  REGION 1..565: note = hemagglutinin__InfluenzaA__ADC45824

SEQ ID NO: 4113 - protein, 565 aa, synthetic construct
  REGION 1..565: note = hemagglutinin__InfluenzaA__ADC45835
MKVKLLVLLCTFTATYADTICIGYHANNSTDTVDTVLEKNVTVTHSVNLLENSHNGKLCLLKGIAPLQLGNCSVAGWILGNPECELLISKESWSYIVEKPNPENGTCYPGHFADYEELREQLSSVSSFERFEIFPKESSWPNHTVTGVSASCSHNGENSFYRNLLWLTGKNGLYPNLSKSYANNKEKEVLVLWGVHHPPNIADQKTLYHTENAYVSVVSSHYSRKFTPEIAKRPKVRDQEGRINYYWTLLEPGDTIIFEANGNLIAPRYAFALSRGFGSGIINSNAPMDKCDAKCQTPQGAINSSLPFQNVHPVTIGECPKYVRSAKLRMVTGLRNIPSIQSRGLFGAIAGFIEGGWTGMVDGWYGYHHQNEQGSGYAADQKSTQNAINGITNKVNSVIEKMNTQFTAVGKEFNKLERRMENLNKKVDDGFIDIWTYNAELLVLLENERTLDFHDSNVKNLYEKVKSQLKNNAKEIGNGCFEFYHKCNDECMESVKNGTYDYPKYSEESKLNREKIDGVTLESMGVYQILAIYSTVASSLVLLVSLGAISFWMCSNGSLQCRICI

SEQ ID NO: 4114 - protein, 565 aa, synthetic construct; identical to SEQ ID NO: 2488
  REGION 1..565: note = hemagglutinin__InfluenzaA__ADC45846

SEQ ID NO: 4115 - protein, 566 aa, synthetic construct; identical to SEQ ID NO: 2669
  REGION 1..566: note = hemagglutinin__InfluenzaA__ADC53558

SEQ ID NO: 4116 - protein, 566 aa, synthetic construct; identical to SEQ ID NO: 2760
  REGION 1..566: note = hemagglutinin__InfluenzaA__ADD14087

SEQ ID NO: 4117 - protein, 566 aa, synthetic construct; identical to SEQ ID NO: 2669
  REGION 1..566: note = hemagglutinin__InfluenzaA__ADD14089

SEQ ID NO: 4118 - protein, 566 aa, synthetic construct; identical to SEQ ID NO: 2669
  REGION 1..566: note = hemagglutinin__InfluenzaA__ADD14093

SEQ ID NO: 4119 - protein, 566 aa, synthetic construct
  REGION 1..566: note = hemagglutinin__InfluenzaA__ADD14095
MKAILVVLLYTFATANADTLCIGYHANNSTDTVDTVLEKNVTVTHSVNLLEDKHNGKLCKLRGVAPLHLGKCNIAGWILGNPECESLSTASSWSYIVETSSSDNGTCYPGDFIDYEELREQLSSVSSFERFEIFPKTSSWPNHDSNKGVTAACPHAGAKSFYKNLIWLVKKGNSYPKLSKSYINDKGKEVLVLWGIHHPSTSADQQSLYQNADAYVFVGTSRYSKKFKPEIAIRPKVRDQEGRMNYYWTLVEPGDKITFEATGNLVLPRYAFAMERNAGSGIIISDTPVHDCNTTCQTPKGAINTSLPFQNIHPITIGKCPKYVKSTKLRLATGLRNVPSIQSRGLFGAIAGFIEGGWTGMVDGWYGYHHQNEQGSGYAADLKSTQNAIDEITNKVNSVIEKMNTQFTAVGKEFNHLEKRIENLNKKVDDGFLDIWTYNAELLVLLENERTLDYHDSNVKNLYEKVRSQLKNNAKEIGNGCFEFYHKCDNTCMESVKNGTYDYPKYSEEAKLNREEIDGVKLESTRIYQILAIYSTVASSLVLVVSLGAISFWMCSNGSLQCRICI

SEQ ID NO: 4120 - protein, 566 aa, synthetic construct; identical to SEQ ID NO: 2669
  REGION 1..566: note = hemagglutinin__InfluenzaA__ADD14097

SEQ ID NO: 4121 - protein, 566 aa, synthetic construct; identical to SEQ ID NO: 2669
  REGION 1..566: note = hemagglutinin__InfluenzaA__ADD14099

SEQ ID NO: 4122 - protein, 566 aa, synthetic construct; identical to SEQ ID NO: 2669
  REGION 1..566: note = hemagglutinin__InfluenzaA__ADD14101

SEQ ID NO: 4123 - protein, 566 aa, synthetic construct
  REGION 1..566: note = hemagglutinin__InfluenzaA__ADD14103
MKAILVVLLCTFATANADTLCIGYHANNSTDTVDTVLEKNVTVTHSVNLLEDKHNGKLCKLRGVAPLHLGKCNIAGWILGNPECESLSTASSWSYIVETSSSDNGTCYPGDFIDYEELREQLSSVSSFERFEIFPKTSSWPNHDSNKGVTAACPHAGAKSFYKNLIWLVKKGNSYPKLSKSYINDKGKEVLVLWGIHHPSTSADQQSLYQNADAYVFVGTSRYSKKFKPEIAIRPKVRDQEGRMNYYWTLVEPGDKITFEATGNLVVPRYAFAMERNAGSGIIISDTPVHDCNTTCQTPKGAINTSLPFQNIHPITIGKCPKYVKSTKLRLATGLRNVPSIQSRGLFGAIAGFIEGGWTGMVDGWYGYHHQNEQGSGYAADLKSTQNAIDEITNKVNSVIEKMNTQFTAVGKEFNHLDKRIENLNKKIDDGFLDIWTYNAELLVLLENERTLDYHDSNVKNLYEKVRSQLKNNAKEIGNGCFEFYHKCDNTCMESVKNGTYDYPKYSEEAKLNREEIDGVKLESTRIYQILAIYSTVASSLVLVVSLGAISFWMCSNGSLQCRICI

SEQ ID NO: 4124 - protein, 566 aa, synthetic construct
  REGION 1..566: note = hemagglutinin__InfluenzaA__ADD14111
MKAILVVLLYTFATANADTLCIGYHANNSTDTVDTVLEKNVTVTHSVNLLEDKHNGKLCKLRGVAPLHLGKCNIAGWILGNPECESLSTASSWSYIVEISSSDNGTCYPGDFIDYEELREQLSSVSSFERFEIFPKTSSWPNHDSNKGVTAACPHAGAKSFYKNLIWLVKKGNSYPKLSKSYINDKGKEVLVLWGIHHPSTSADQQSLYQNADAYVFVGTSRYSKKFKPEIAIRPKVRDQEGRMNYYWTLVEPGDKITFEATGNLVVPRYAFAMERNAGSGIIISDTPVHDCNTTCQTPKGAINTSLPFQNIHPITIGKCPKYVKSTKLRLATGLRNVPSIQSRGLFGAIAGFIEGGWTGMVDGWYGYHHQNEQGSGYAADLKSTQNAIDEITNKVNSVIEKMNTQFTAVGKEFNHLEKRIENLNKKVDDGFLDIWTYNAELLVLLENERTLDYHDSNVKNLYEKVRSQLKNNAKEIGNGCFEFYHKCDNTCMESVKNGTYDYPKYSEEAKLNREEIDGVKLESTRIYQILAIYSTVASSLVLVVSLGAISFWMCSNGSLQCRICI

SEQ ID NO: 4125 - protein, 566 aa, synthetic construct; identical to SEQ ID NO: 2669
  REGION 1..566: note = hemagglutinin__InfluenzaA__ADD14115

SEQ ID NO: 4126 - protein, 566 aa, synthetic construct; identical to SEQ ID NO: 2669
  REGION 1..566: note = hemagglutinin__InfluenzaA__ADD14117

SEQ ID NO: 4127 - protein, 566 aa, synthetic construct; identical to SEQ ID NO: 2669
  REGION 1..566: note = hemagglutinin__InfluenzaA__ADD14119

SEQ ID NO: 4128 - protein, 566 aa, synthetic construct; identical to SEQ ID NO: 2669
  REGION 1..566: note = hemagglutinin__InfluenzaA__ADD14121

SEQ ID NO: 4129 - protein, 566 aa, synthetic construct; identical to SEQ ID NO: 2669
  REGION 1..566: note = hemagglutinin__InfluenzaA__ADD14123

SEQ ID NO: 4130 - protein, 566 aa, synthetic construct; identical to SEQ ID NO: 2669
  REGION 1..566: note = hemagglutinin__InfluenzaA__ADD14127

SEQ ID NO: 4131 - protein, 566 aa, synthetic construct
  REGION 1..566: note = hemagglutinin__InfluenzaA__ADD14129
MKAILVVLLYTFATANADTLCIGYHANNSTDTVDTVLEKNVTVTHSVNLLEDKHNGKLCKLRGVASLHLGKCNIAGWILGNPECESLSTASSWSYIVETSSSDNGTCYPGDFIDYEELREQLSSVSSFERFEIFPKTSSWPNHDSNKGVTAACPHAGAKSFYKNLIWLVKKGNSYPKLSKSYINDKGKEVLVLWGIHHPSTSADQQSLYQNADAYVFVGTSRYSKKFKPEIAIRPKVRDQEGRMNYYWTLVEPGDKITFEATGNLVVPRYAFAMERNAGSGIIISDTPVHDCNTTCQTPKGAINTSLPFQNIHPITIGKCPKYVKSTKLRLATGLRNVPSIQSRGLFGAIAGFIEGGWTGMVDGWYGYHHQNEQGSGYAADLKSTQNAIDEITNKVNSVIEKMNTQFTAVGKEFNHLEKRIENLNKKVDDGFLDIWTYNAELLVLLENERTLDYHDSNVKNLYEKVRSQLKNNAKEIGNGCFEFYHKCDNTCMESVKNGTYDYPKYSEEAKLNREEIDGVKLESTRIYQILAIYSTVASSLVLVVSLGAISFWMCSNGSLQCRICI

SEQ ID NO: 4132 - protein, 566 aa, synthetic construct
  REGION 1..566: note = hemagglutinin__InfluenzaA__ADD14133
MKAILVVLLYTFATANADTLCIGYHANNSTDTVDTVLEKNVTVTHSVNLLEDKHNGKLCKLRGVAPLHLGKCNIAGWILGNPECESLSTASSWSYIVETSSSDNGTCYPGDFIDYEELREQLSSVSSFERFEIFPKTSSWPNHDSNKGVTAACPHAGAKSFYKNLIWLVKKGNSYPKLSKSYINDKGKEVLVLWGIHHPSTSADQQSLYQNVDAYVFVGTSRYSKKFKPEIAIRPKVRDQEGRMNYYWTLVEPGDKITFEATGNLVVPRYAFAMERNAGFGIIISDTPVHDCNTTCQTPKGAINTSLPFQNIHPITIGKCPKYVKSTKLRLATGLRNVPSIQSRGLFGAIAGFIEGGWTGMVDGWYGYHHQNEQGSGYAADLKSTQNAIDEITNKVNSVIEKMNTQFTAVGKEFNHLEKRIENLNKKVDDGFLDIWTYNAELLVLLENERTLDYHDSNVKNLYEKVRSQLKNNAKEIGNGCFEFYHKCDNTCMESVKNGTYDYPKYSEEAKLNREEIDGVKLESTRIYQILAIYSTVASSLVLVVSLGAISFWMCSNGSLQCRICI

SEQ ID NO: 4133 - protein, 566 aa, synthetic construct; identical to SEQ ID NO: 2760
  REGION 1..566: note = hemagglutinin__InfluenzaA__ADD14135

SEQ ID NO: 4134 - protein, 566 aa, synthetic construct; identical to SEQ ID NO: 2669
  REGION 1..566: note = hemagglutinin__InfluenzaA__ADD14137

SEQ ID NO: 4135 - protein, 566 aa, synthetic construct; identical to SEQ ID NO: 3417
  REGION 1..566: note = hemagglutinin__InfluenzaA__ADD14139

SEQ ID NO: 4136 - protein, 566 aa, synthetic construct; identical to SEQ ID NO: 2669
  REGION 1..566: note = hemagglutinin__InfluenzaA__ADD14143

SEQ ID NO: 4137 - protein, 566 aa, synthetic construct; identical to SEQ ID NO: 2669
  REGION 1..566: note = hemagglutinin__InfluenzaA__ADD14145

SEQ ID NO: 4138 - protein, 566 aa, synthetic construct; identical to SEQ ID NO: 2669
  REGION 1..566: note = hemagglutinin__InfluenzaA__ADD14147

SEQ ID NO: 4139 - protein, 566 aa, synthetic construct
  REGION 1..566: note = hemagglutinin__InfluenzaA__ADD14151
MKAILVVLLYTFATANADTLCIGYHANNSTDTVDTVLEKNVTVTHSVNLLEDKHNGKLCKLRGVAPLHLGKCNIAGWILGNPECESLSTASSWSYIVETSSSDNGTCYPGDFIDYEELREQLSSVSSFERFEIFPKTSSWPNHDSNKGVTAACPRAGAKSFYKNLIWLVKKGNSYPKLSKSYINDKGKEVLVLWGIHHPSTSADQQSLYQNADAYVFVGTSRYSKKFKPEIAIRPKVRDQEGRMNYYWTLVEPGDKITFEATGNLVVPRYAFAMERNAGSGIIISDTPVHDCNTTCQTPKGAINTSLPFQNIHPITIGKCPKYVKSTKLRLATGLRNVPSIQSRGLFGAIAGFIEGGWTGMVDGWYGYHHQNEQGSGYAADLKSTQNAIDKITNKVNSVIEKMNTQFTAVGKEFNHLEKRIENLNKKVDDGFLDIWTYNAELLVLLENERTLDYHDSNVKNLYEKVRSQLKNNAKEIGNGCFEFYHKCDNTCMESVKNGTYDYPKYSEEAKLNREEIDGVKLESTRIYQILAIYSTVASSLVLVVSLGAISFWMCSNGSLQCRICI

SEQ ID NO: 4140 - protein, 566 aa, synthetic construct; identical to SEQ ID NO: 2669
  REGION 1..566: note = hemagglutinin__InfluenzaA__ADD14153

SEQ ID NO: 4141 - protein, 566 aa, synthetic construct; identical to SEQ ID NO: 2669
  REGION 1..566: note = hemagglutinin__InfluenzaA__ADD14155

SEQ ID NO: 4142 - protein, 566 aa, synthetic construct; identical to SEQ ID NO: 2669
  REGION 1..566: note = hemagglutinin__InfluenzaA__ADD14157

SEQ ID NO: 4143 - protein, 566 aa, synthetic construct; identical to SEQ ID NO: 2669
  REGION 1..566: note = hemagglutinin__InfluenzaA__ADD14162

SEQ ID NO: 4144 - protein, 566 aa, synthetic construct; identical to SEQ ID NO: 2669
  REGION 1..566: note = hemagglutinin__InfluenzaA__ADD14172

SEQ ID NO: 4145 - protein, 566 aa, synthetic construct; identical to SEQ ID NO: 2669
  REGION 1..566: note = hemagglutinin__InfluenzaA__ADD14182

SEQ ID NO: 4146 - protein, 566 aa, synthetic construct; identical to SEQ ID NO: 2669
  REGION 1..566: note = hemagglutinin__InfluenzaA__ADD14192

SEQ ID NO: 4147 - protein, 566 aa, synthetic construct; identical to SEQ ID NO: 2669
  REGION 1..566: note = hemagglutinin__InfluenzaA__ADD14202

SEQ ID NO: 4148 - protein, 566 aa, synthetic construct
  REGION 1..566: note = hemagglutinin__InfluenzaA__ADD21447
MKAILVFLLYTFATANADTLCIGYHANNSTDTVDTVLEKNVTVTHSVNLLEDRHNGKLCKLRGVAPLHLGKCNIAGWLLGNPECELLFTASSWSYIVETSNSDNGTCYPGDFINYEELREQLSSVSSFERFEMFPKSSSWPNHETNRGVTAACPYAGANSFYRNLIWLVKKENSYPKLSKSYINNKEKEVLVLWGIHHPPTSADQQSLYQNADAYVFVGSSKYNKKFRPEIAARPKVRGQTGRMNYYWTLVEPGDTITFEATENLVVPRYAFAMKRGSGSGIIISDTPVHDCNTTCQTPKGAINTSLPFQNIHPVTIGECPKYVKSTNLRMATGLRNIPSIQSRGLFGAIAGFIEGGWTGMIDGWYGYHHQNEQGSGYAADRKSTQNAIDGITNKVNSVIEKMNTQFTAVGKEFNHLEKRIENLNKKVDDGLLDVWTYNAELLVLLENERTLDYHDSNVKNLYEKVRSQLKNNAKEIGNGCFEFYHKCDDTCMESVRNGAYDYPKYSEEAKLNREEIDGVKLESTRIYQILAIYSTVASSLVLLVSLGAISFWMCSNGSLQCRICI

SEQ ID NO: 4149 - protein, 566 aa, synthetic construct
  REGION 1..566: note = hemagglutinin__InfluenzaA__ADD21457
MKAILVFLLYTFATANADTLCIGYHANNSTDTVDTVLEKNVTVTHSVNLLEDRHNGKLCKLRGVAPLHLGKCNIAGWLLGNPECELLFTASSWSYIVETSNSDNGTCYPGDFINYEELREQLSSVSSFERFEMFPKSSSWPNHETNRGVTAACPYAGANSFYRNLIWLVKKENSYPKLSKSYINNKEKEVLVLWGIHHPPTSADQQSLYQNADAYVFVGSSKYNKKFRPEIAARPKVRGQTGRMNYYWTLVEPGDTITFEATGNLVVPRYAFAMKRGSGSGIIISDTPVHDCNTTCQTPKGAVNTSLPFQNIHPVTIGECPKYVKSTNLRMATGLRNIPSIQSRGLFGAIAGFIEGGWTGMIDGWYGYHHQNEQGSGYAADRKSTQNAIDGITNKVNSVIEKMNTQFTAVGKEFNHLEKRIENLNKKVDDGLLDVWTYNAELLVLLENERTLDYHDSNVKNLYEKVRSQLKNNAKEIGNGCFEFYHKCDDTCMESVRNGTYDYPKYSEEAKLNREEIDGVKLESTRIYQILAIYSTVASSLVLLVSLGAISFWMCSNGSLQCRICI

SEQ ID NO: 4150 - protein, 565 aa, synthetic construct
  REGION 1..565: note = hemagglutinin__InfluenzaA__ADD21467
MKAKLLVLLCTFTATYADTICIGYHANNSTDTVDTVLEKNVTVTHSVNLLEDSHNGKLCLLKGIAPLQLGNCSVAGWILGNPECELLISKESWSYIVETPNPENGTCYPGYFADYEELREQLSSVSSFERFEIFPKESSWPNHTVTGVSASCSHNGKSSFYRNLLWLTGKNGLYPNLSKSYANNKEKEVLVLWGVHHPPNIRDQRALYHTENAYVSVVSSHYSRRFTPEIAKRPKVRGQEGRINYYWTLLEPGDTIIFEANGNLIAPWYAFALSRGFGSGIITSNAPMDECDAKCQTPQGAINSSLPFQNVHPVTIGECPKYARSAKLRMVTGLRNIPSIQSRGLFGAIAGFIEGGWTGMVDGWYGYHHQNEQGSGYAADQKSTQNAINGITNKVNSVIEKMNTQFTAVGKEFNKLERRMENLNKKVDDGFLDIWTYNAELLVLLENERTLDFHDSNVKNLYEKVKSQLKNNAKEIGNGCFEFYHKCNNECMESVKNGTYDYPKYSEESKLNREKIDGVKLESMGVYQILAIYSTVASSLVLLVSLGAISFWMCSNGSLQCRICI

SEQ ID NO: 4151 - protein, 566 aa, synthetic construct
  REGION 1..566: note = hemagglutinin__InfluenzaA__ADD21560
MKTIIAFSHILCLIYAQKLPGSDNSMATLCLGHHAVPNGTLVKTITDDQIEVTNATELVQSSSTGRICNSPHHILDGKNCTLIDALLGDPHCDDFQNKEWDLFVERSTAYSNCYPYYVPDYASLRSLVASSGTLEFTQESFNWTGVTQDGSSYTCRRKSVNSFFSRLNWLHNLDYKYPALNVTMPNNDKFDKLYIWGVHHPGTDRDQTNLYVQASGRVTVSTKRSQQTVIPNIGSRPWVRGVSSIISIYWTIVKPGDILLINSTGNLIAPRGYFKIQSGKSSIMRSDAPIGNCNSECITPNGSIPNDKPFQNVNRITYGACPRYVKQNTLKLATGMRNVPEKQTRGIFGAIAGFIENGWEGMVDGWYGFRHQNSEGTGQAADLKSTQAAINQITGKLNRVIKKTNEKFHQIEKEFSEVEGRIQDLEKYVEDTKIDLWSYNAELLVALENQHTIDLTDSEMNKLFERTRKQLRENAEDMGNGCFKIYHKCDNACIGSIRNGTYDHDVYRDEALNNRFQIKSVQLKSGYKDWILWISFAMSCFLLCVVLLGFIMWTCQKGNIKCNICI

SEQ ID NO: 4152 - protein, 566 aa, synthetic construct; identical to SEQ ID NO: 2656
  REGION 1..566: note = hemagglutinin__InfluenzaA__ADD21734

SEQ ID NO: 4153 - protein, 566 aa, synthetic construct; identical to SEQ ID NO: 2669
  REGION 1..566: note = hemagglutinin__InfluenzaA__ADD21744

SEQ ID NO: 4154 - protein, 566 aa, synthetic construct
  REGION 1..566: note = hemagglutinin__InfluenzaA__ADD21764
MKAILVVLLYTFATANADTLCIGYHANNSTDTVDTVLEKNVTVTHSVNLLEDKHNGKLCKLRGVAPLHLGKCNIAGWILGNPECESLSTASSWSYIVETSSSDNGTCYPGDFIDYEELREQLSSVSSFERFEIFPKTSSWPNHDSNKGVTAACPHAGAKSFYKNLIWLVKKGNSYPKLSKSYINDKGKEVLVLWGIHHPSTSADQQSLYQNADAYVFVGTSRYSKKFKPEIAIRPKVRDQEGRMNYYWTLVEPGDKITFEATGNLVVPRYAFAMERNAESGIIISDTPVHDCNTTCQTPKGAINTSLPFQNIHPITIGKCPKYVKSTKLRLATGLRNVPSIQSRGLFGAIAGFIEGGWTGMVDGWYGYHHQNEQGSGYAADLKSTQNAIDEITNKVNSVIEKMNTQFTAVGKEFNHLEKRIENLNKKVDDGFLDIWTYNAELLVLLENERTLDYHDSNVKNLYEKVRSQLKNNAKEIGNGCFEFYHKCDNTCMESVKNGTYDYPKYSEEAKLNREEIDGVKLESTRIYQILAIYSTVASSLVLVVSLGAISFWMCSNGSLQCRICI

SEQ ID NO: 4155 - protein, 566 aa, synthetic construct
  REGION 1..566: note = hemagglutinin__InfluenzaA__ADD21774
MKAILVVLLYTFATANADTLCIGYHANNSTDTVDTVLEKNVTVTHSVNLLEDKHNGKLCKLRGVAPLHLGKCNIAGWILGNPECESLSTASSWSYIVETSSSDNGTCYPGDFIDYEELREQLSSVSSFERFEIFPKTSSWPNHDSNKGVTAACPHAGAKSFYKNLIWLVKKGNSYPKLSKSYINDKGKEVLVLWGIHHPSTSADQQSLYQNADAYVFVGSSRYSKKFKPEIAIRPKVRDQEGRMNYYWTLVEPGDKITFEATGNLVVPRYAFAMERNAGSGIIISDTPVHDCNTTCQTPKGAINTSLPFQNIHPITIGKCPKYVKSTKLRLATGLRNVPSVQSRGLFGAIAGFIEGGWTGMVDGWYGYHHQNEQGSGYAADLKSTQNAIDEITNKVNSVIEKMNTQFTAVGKEFNHLEKRIENLNKKVDDGFLDIWTYNAELLVLLENERTLDYHDSNVKNLYEKVRSQLKNNAKEIGNGCFEFYHKCDNTCMESVKNGTYDYPKYSEEAKLNREEIDGVKLESTRIYQILAIYSTVASSLVLVVSLGAISFWMCSNGSLQCRICI

SEQ ID NO: 4156 - protein, 566 aa, synthetic construct; identical to SEQ ID NO: 2669
  REGION 1..566: note = hemagglutinin__InfluenzaA__ADD21784

SEQ ID NO: 4157 - protein, 566 aa, synthetic construct; identical to SEQ ID NO: 3829
  REGION 1..566: note = hemagglutinin__InfluenzaA__ADD21794

SEQ ID NO: 4158 - protein, 566 aa, synthetic construct; identical to SEQ ID NO: 2669
  REGION 1..566: note = hemagglutinin__InfluenzaA__ADD21804

SEQ ID NO: 4159 - protein, 566 aa, synthetic construct
  REGION 1..566: note = hemagglutinin__InfluenzaA__ADD21814
MKAILVVLLYTFATANADTLCIGYHANNSTDTVDTVLEKNVTVTHSVNLLEDKHNGKLCKLRGVAPLHLGKCNIASWILGNPECESLSTASSWSYIVETSSSDNGTCYPGDFIDYEELREQLSSVSSFERFEIFPKTSSWPNHDSNKGVTAACPHAGAKSFYKNLIWLVKKGNSYPKLSKSYINDKGKEVLVLWGIHHPSTSADQQSLYQNADAYVFVGTSRYSKKFKPEIAIRPKVRDQEGRMNYYWTLVEPGDKITFEATGNLVVPRYAFAMERNAGSGIIISDTPVHDCNTTCQTPKGAINTSLPFQNIHPITIGKCPKYVKSTKLRLATGLRNVPSIQSRGLFGAIAGFIEGGWTGMVDGWYGYHHQNEQGSGYAADLKSTQNAIDEITNKVNSVIEKMNTQFTAVGKEFNHLEKRIENLNKKVDDGFLDIWTYNAELLVLLENERTLDYHDSNVKNLYEKVRSQLKNNAKEIGNGCFEFYHKCDNTCMESVKNGTYDYPKYSEEAKLNREEIDGVKLESTRIYQILAIYSTVASSLVLVVSLGAISFWMCSNGSLQCRICI

SEQ ID NO: 4160 - protein, 566 aa, synthetic construct; identical to SEQ ID NO: 3829
  REGION 1..566: note = hemagglutinin__InfluenzaA__ADD21824

SEQ ID NO: 4161 - protein, 566 aa, synthetic construct; identical to SEQ ID NO: 3829
  REGION 1..566: note = hemagglutinin__InfluenzaA__ADD21834

SEQ ID NO: 4162 - protein, 566 aa, synthetic construct; identical to SEQ ID NO: 3833
  REGION 1..566: note = hemagglutinin__InfluenzaA__ADD21844

SEQ ID NO: 4163 - protein, 566 aa, synthetic construct; identical to SEQ ID NO: 3833
  REGION 1..566: note = hemagglutinin__InfluenzaA__ADD21854

SEQ ID NO: 4164 - protein, 566 aa, synthetic construct; identical to SEQ ID NO: 3771
  REGION 1..566: note = hemagglutinin__InfluenzaA__ADD21864

SEQ ID NO: 4165 - protein, 566 aa, synthetic construct
  REGION 1..566: note = hemagglutinin__InfluenzaA__ADD21884
MKAILVVLLYTFATANADTLCIGYHANNSTDTVDTVLEKNVTVTHSVNLLEDKHNGKLCKLRGVAPLHLGKCNIAGWILGNPECESLSTASSWSYIVETSSSGNGTCYPGDFIDYEELREQLSSVSSFERFEIFPKTSSWPNHDSNKGVTAACPHAGAKSFYKNLIWLVKKGNSYPKLSKSYINDKGKEVLVLWGIHHPSTSADQQSLYQNADAYVFVGTSRYSKKFKPEIAIRPKVRDQEGRMNYYWTLVEPGDKITFEATGNLVVPRYAFAMERNAGSGIIISDTPVHDCNTTCQTPKGAINTSLPFQNIHPITIGKCPKYVKSTKLRLATGLRNVPSIQSRGLFGAIAGFIEGGWTGMVDGWYGYHHQNEQGSGYAADLKSTQNAIDEITNKVNSVIEKMNTQFTAVGKEFNHLEKRIENLNKKVDDGFLDIWTYNAELLVLLENERTLDYHDSNVKNLYEKVRSQLKNNAKEIGNGCFEFYHKCDNTCMGSVKNGTYDYPKYSEEAKLNREEIDGVKLESTRIYQILAIYSTVASSLVLVVSLGAISFWMCSNGSLQCRICI

SEQ ID NO: 4166 - protein, 566 aa, synthetic construct; identical to SEQ ID NO: 3771
  REGION 1..566: note = hemagglutinin__InfluenzaA__ADD21894

SEQ ID NO: 4167 - protein, 566 aa, synthetic construct
  REGION 1..566: note = hemagglutinin__InfluenzaA__ADD22501
MKAILVVLLYTFATANADTLCIGYHANNSTDTVDTVLEKNVTVTHSVNLLEDKHNGKLCKLRGVAPLHLGKCNIAGWILGNPECESLSTASSWSYIVETSSSDNGTCYPGDFIDYEELREQLSSVSSFERFEIFPKTSSWPNHDSNKGVTAACPHAGAKSFYKNLIWLVKKGNSYPKLSKSYINDKGKEVLVLWGIHHPSTSADQQSLYQNADAYVFVGTSKYSKKFKPEIAIRPKVRDQEGRMNYYWTLVEPGDKITFEATGNLVVPRYAFAMERNAGSGIIISDTPVHDCNTTCQTPKGAINTSLPFQNIHPITIGKCPKYVKSTKLRLATGLRNVPSIQSRGLFGAIAGFIEGGWTGMVDGWYGYHHQNEQGSGYAADLKSTQNAIDEITNKVNSVIEKMNTQFTAVGKEFNHLEKRIENLNKKIDDGFLDIWTYNAELLVLLENERTLDYHDSNVKNLYEKVRIQLKNNAKEIGNGCFEFYHKCDNTCMESVKNGTYDYPKYSEEAKLNREEIDGVKLESTRIYQILAIYSTVASSLVLVVSLGAISFWMCSNGSLQCRICI

SEQ ID NO: 4168 - protein, 566 aa, synthetic construct; identical to SEQ ID NO: 3771
  REGION 1..566: note = hemagglutinin__InfluenzaA__ADD22511

SEQ ID NO: 4169 - protein, 566 aa, synthetic construct
  REGION 1..566: note = hemagglutinin__InfluenzaA__ADD22521
MKAILVVLLYTFATANADTLCIGYHANNSTDTVDTVLEKNVTVTHSVNLLEDKHNGKLCKLRGVAPLHLGKCNIAGWILGNPECESLSTASSWSYIVETSSSDNGTCYPGDFIDYEELREQLSSVSSFERFEIFPKTSSWPNHDSNKGVTAACPHAGAKSFYKNLIWLVKKGNSYPKLSKSYINDKGKEVLVLWGIHHPSTSADQQSLYQNADTYVFVGTSRYSKKFKPEIAIRPKVRDQEGRMNYYWTLVEPGDKITFEATGNLVVPRYAFAMERNAGSGIIISDTPVHDCNTTCQTPKGAINTSLPFQNIHPITIGKCPKYVKSTKLRLATGLRNVPSIQSRGLFGAIAGFIEGGWTGMVDGWYGYHHQNEQGSGYAADLKSTQNAIDEITNKVNSVIEKMNTQFTAVGKEFNHLEKRIENLNKKIDDGFLDIWTYNAELLVLLENERTLDYHDSNVKNLYEKVRSQLKNNAKEIGNGCFEFYHKCDNTCMESVKNGTYDYPKYSEEAKLNREEIDGVKLESTRIYQILAIYSTVASSLVLVVSLGAISFWMCSNGSLQCRICI

SEQ ID NO: 4170 - protein, 566 aa, synthetic construct; identical to SEQ ID NO: 2669
  REGION 1..566: note = hemagglutinin__InfluenzaA__ADD22531

SEQ ID NO: 4171 - protein, 566 aa, synthetic construct
  REGION 1..566: note = hemagglutinin__InfluenzaA__ADD22541
MKAILVVLLYTFATANADTLCIGYHANNSTDTVDTVLEKNVTVTHSVNLLEDKHNGKLCKLRGVAPLHLGKCNIAGWILGNPECESLSTASSWSYIVETSSSGNGTCYPGDFIDYEELREQLSSVSSFERFEIFPKTSSWPNHDSNKGVTAACPHAGAKSFYKNLIWLVKKGNSYPKLSKSYINDKGKEVLVLWGIHHPSTSADQQSLYQNADAYVFVGTSKYSKKFKPEIAIRPKVRDQEGRMNYYWTLVEPGDKITFEATGNLVVPRYAFAMERNAGSGIIISDTPVHDCNTTCQTPKGAINTSLPFQNIHPITIGKCPKYVKSTKLRLATGLRNVPSIQSRGLFGAIAGFIEGGWTGMVDGWYGYHHQNEQGSGYAADLKSTQNAIDEITNKVNSVIEKMNTQFTAVGKEFNHLEKRIENLNKKVDDGFLDIWTYNAELLVLLENERTLDYHDSNVKNLYEKVRSQLKNNAKEIGNGCFEFYHKCDNTCMESVKNGTYDYPKYSEEAKLNREEIDGVKLESTRIYQILAIYSTVASSLVLVVSLGAISFWMCSNGSLQCRICI

SEQ ID NO: 4172 - protein, 566 aa, synthetic construct; identical to SEQ ID NO: 3771
  REGION 1..566: note = hemagglutinin__InfluenzaA__ADD22554

SEQ ID NO: 4173 - protein, 566 aa, synthetic construct; identical to SEQ ID NO: 3771
  REGION 1..566: note = hemagglutinin__InfluenzaA__ADD22564

SEQ ID NO: 4174 - protein, 566 aa, synthetic construct
  REGION 1..566: note = hemagglutinin__InfluenzaA__ADD22574
MKAILVVLLYTFATANADTLCIGYHANNSTDTVDTVLEKNVTVTHSVNLLEDKHNGKLCKLRGVAPLHLGKCNIAGWILGNPECESLSTASSWSYIVETSSSDNGTCYPGDFIDYEELREQLSSVSSFERFEIFPKTSSWPNHDSNKGVTAACPHAGAKSFYKNLIWLVKKGNSYPKLSKSYINDKGKEVLVLWGIHHPSTSADQQSLYQNADTYVFVGTSRYSKKFKPEIAIRPKVRDQEGRMNYYWTLVEPGDKITFEATGNLVVPRYAFAMERNAGSGIIISDTPVHDCNTTCQTLKGAINTSLPFQNIHPITIGKCPKYVKSTKLRLATGLRNVPSIQSRGLFGAIAGFIEGGWTGMVDGWYGYHHQNEQGSGYAADLKSTQNAIDEITNKVNSVIEKMNTQFTAVGKEFNHLEKRIENLNKKIDDGFLDIWTYNAELLVLLENERTLDYHDSNVKNLYEKVRSQLKNNAKEIGNGCFEFYHKCDNTCMESVKNGTYDYPKYSEEAKLNREEIDGVKLESTRIYQILAIYSTVASSLVLVVSLGAISFWMCSNGSLQCRICI

SEQ ID NO: 4175 - protein, 566 aa, synthetic construct; identical to SEQ ID NO: 3771
  REGION 1..566: note = hemagglutinin__InfluenzaA__ADD22584

SEQ ID NO: 4176 - protein, 566 aa, synthetic construct; identical to SEQ ID NO: 2669
  REGION 1..566: note = hemagglutinin__InfluenzaA__ADD22594

SEQ ID NO: 4177 - protein, 566 aa, synthetic construct; identical to SEQ ID NO: 3771
  REGION 1..566: note = hemagglutinin__InfluenzaA__ADD22604

SEQ ID NO: 4178 - protein, 566 aa, synthetic construct; identical to SEQ ID NO: 3771
  REGION 1..566: note = hemagglutinin__InfluenzaA__ADD22614

SEQ ID NO: 4179 - protein, 566 aa, synthetic construct; identical to SEQ ID NO: 3771
  REGION 1..566: note = hemagglutinin__InfluenzaA__ADD22624

SEQ ID NO: 4180 - protein, 566 aa, synthetic construct
  REGION 1..566: note = hemagglutinin__InfluenzaA__ADD22634
MKAILVVLLCTFATANADTLCIGYHANNSTDTVDTVLEKNVTVTHSVNLLEDKHNGKLCKLRGVAPLHLGKCNIAGWILGNPECESLSTASSWSYIVETSSSDNGTCYPGDFIDYEELREQLSSVSSFERFEIFPKTSSWPNHDSNKGVTAACPHAGAKSFYKNLIWLVKKGNSYPKLSKSYINDKGKEVLVLWGIHHPSTSADQQSLYQNADAYVFVGTSRYSKKFKPEIAIRPKVRDQEGRMNYYWTLVEPGDKITFEATGNLVVPRYAFAMERNAGSGIIISDTPVHDCNTTCQTPKGAINTSLPFQNIHPITIGKCPKYVKSTKLRLATGLRNVPSIQSRGLFGAIAGFIEGGWTGMVDGWYGYHHQNEQGSGYAADLKSTQNAIDEITNKVNSVIEKMNTQFTAVGKEFNHLEKRIENLNKKIDDGFLDIWTYNAELLVLLENERTLDYHDSNVKNLYEKVRSQLKNNAKEIGNGCFEFYHKCDNTCMESVKNGTYDYPKYSEEAKLNREEIDGVKLESTRIYQILAIYSTVASSLVLVVSLGAISFWMCSNGSLQCRICI

SEQ ID NO: 4181 - protein, 566 aa, synthetic construct
  REGION 1..566: note = hemagglutinin__InfluenzaA__ADD22645
MKAILVVLLYTFATANADTLCIGYHANNSTDTVDTVLEKNVTVTHSVNLLEDKHNGKLCKLRGVAPLHLGKCNIAGWILGNPECESLSTASSWSYIVETSSSGNGTCYPGDFIDYEELREQLSSVSSFERFEIFPKTSSWPNHDSNKGVTAACPHAGAKSFYKNLIWLVKKGNSYPKLSKSYINDKGKEVLVLWGIHHPSTSADQQSLYQNADAYVFVGTSRYSKKFKPEIAIRPKVRDQEGRMNYYWTLVEPGDKITFEATGNLVVPRYAFAMERNAGSGIIISDTPVHDCNTTCQTPKGAINTSLPFQNIHPITIGKCPKYVKSTKLRLATGLRNVPSIQSRGLFGAIAGFIEGGWTGMVDGWYGYHHQNEQGSGYAADLKSTQNAIDEITNKVNSVIEKMNTQFTAVGKEFNHLEKRIENLNKKVDDGFLDIWTYNAELLVLLENERTLDYHDSNVKNLYEKVRSQLKNNAKEIGNGCFEFYHKCDNTCMESVKNGTYDYPKYSEEAKLNREEIEGVKLESTRIYQILAIYSTVASSLVLVVSLGAISFWMCSNGSLQCRICI

SEQ ID NO: 4182 - protein, 566 aa, synthetic construct
  REGION 1..566: note = hemagglutinin__InfluenzaA__ADD22665
MKAILVVLLYTFATANADTLCIGYHANNSTDTVDTVLEKNVTVTHSVNLLEDKHNGKLCKLRGVAPLHLGKCNIAGWILGNPECESLSTASSWSYIVETSSSGNGTCYPGDFIDYEELREQLSSVSSFERFEIFPKTSSWPNHDSNKGVTAACPHAGAKSFYKNLIWLVKKGNSYPKLSKSYINDKRKEVLVLWGIHHPSTSADQQSLYQNADAYVFVGTSKYSKKFKPEIAIRPKVRDQEGRMNYYWTLVEPGDKITFEATGNLVVPRYAFAMERNAGSGIIISDTPVHDCNTTCQTPKGAINTSLPFQNIHPITIGKCPKYVKSTKLRLATGLRNVPSIQSRGLFGAIAGFIEGGWTGMVDGWYGYHHQNEQGSGYAADLKSTQNAIDEITNKVNSVIEKMNTQFTAVGKEFNHLEKRIENLNKKVDDGFLDIWTYNAELLVLLENERTLDYHDSNVKNLYEKVRSQLKNNAKEIGNGCFEFYHKCDNTCMESVKNGTYDYPKYSEEAKLNREEIDGVKLESTRIYQILAIYSTVASSLVLVVSLGAISFWMCSNGSLQCRICI

SEQ ID NO: 4183 - protein, 566 aa, synthetic construct; identical to SEQ ID NO: 3771
  REGION 1..566: note = hemagglutinin__InfluenzaA__ADD22675

SEQ ID NO: 4184 - protein, 566 aa, synthetic construct; identical to SEQ ID NO: 3771
  REGION 1..566: note = hemagglutinin__InfluenzaA__ADD22685

SEQ ID NO: 4185 - protein, 566 aa, synthetic construct; identical to SEQ ID NO: 3771
  REGION 1..566: note = hemagglutinin__InfluenzaA__ADD22695

SEQ ID NO: 4186 - protein, 566 aa, synthetic construct
  REGION 1..566: note = hemagglutinin__InfluenzaA__ADD22722
MKAILVVLLYTFATANADTLCIGYHANNSTDTVDTVLEKNVTVTHSVNLLEDRHNGKLCKLRGVAPLHLGKCNIAGWILGNPECESLSTASSWSYIVETSSSGNGTCYPGDFIDYEELREQLSSVSSFERFEIFPKTSSWPNHDSNKGVTAACPHAGAKSFYKNLIWLVKKGNSYPKLSKSYINDKGKEVLVLWGIHHPSTSADQQSLYQNADAYVFVGTSSYSKKFKPEIAIRPKVRDQEGRMNYYWTLVEPGDKITFEATGNLVVPRYAFAMERNAGSGIIISDTPVHDCNTTCQTPKGAINTSLPFQNIHPITIGKCPKYVKSTKLRLATGLRNVPSIQSRGLFGAIAGFIEGGWTGMVDGWYGYHHQNEQGSGYAADLKSTQNAIDEITNKVNSVIEKMNTQFTAVGKEFNHLEKRIENLNKKVDDGFLDIWTYNAELLVLLENERTLDYHDSNVKNLYEKVRSQLKNNAKEIGNGCFEFYHKCDNTCMESVKNGTYDYPKYSEEAKLNREEIDGVKLESTRIYQILAIYSTVASSLVLVVSLGAISFWMCSNGSLQCRICI

SEQ ID NO: 4187 - protein, 566 aa, synthetic construct; identical to SEQ ID NO: 4169
  REGION 1..566: note = hemagglutinin__InfluenzaA__ADD22732

SEQ ID NO: 4188 - protein, 566 aa, synthetic construct
  REGION 1..566: note = hemagglutinin__InfluenzaA__ADD22742
MKAILVVLLYTFATANADTLCIGYHANNSTDTVDTVLEKNVTVTHSVNLLEDKHNGKLCKLRGVAPLHLGKCNIAGWILGNPECESLSTASSWSYIVETSSSGNGTCYPGDFIDYEELREQLSSVSSFERFEIFPKTSSWPNHDSNKGVTAACPHAGAKSFYKNLIWLVKKGNSYPKLSKSYINDKGKEVLVLWGIHHPSTSADQQSLYQNADAYVFVGTSSYSKKFKPEIAIRPKVRDQEGRMNYYWTLVEPGDKITFEATGNLVVPRYAFAMERNAGSGIIISDTPVHDCNTTCQTPKGAINTSLPFQNIHPITIGKCPKYVKSTKLRLATGLRNVPSIQSRGLFGAIAGFIEGGWTGMVDGWYGYHHQNEQGSGYAADLKSTQNAIDEITNKVNSVIEKMNTQFTAVGKEFNHLEKRIENLNKKVDDGFLDIWTYNAELLVLLENERTLDYHDSNVKNLYEKVRSQLKNNAKEIGNGCFEFYHKCDNTCMESVKNGTYDYPKYSEEAKLNREEIDGVKLESTRIYQILAIYSTVASSLVLVVSLGAISFWMCSNGSLQCRICI

SEQ ID NO: 4189 - protein, 566 aa, synthetic construct; identical to SEQ ID NO: 2669
  REGION 1..566: note = hemagglutinin__InfluenzaA__ADD22752

SEQ ID NO: 4190 - protein, 566 aa, synthetic construct; identical to SEQ ID NO: 2760
  REGION 1..566: note = hemagglutinin__InfluenzaA__ADD22762

SEQ ID NO: 4191 - protein, 566 aa, synthetic construct; identical to SEQ ID NO: 3771
  REGION 1..566: note = hemagglutinin__InfluenzaA__ADD22772

SEQ ID NO: 4192 - protein, 566 aa, synthetic construct; identical to SEQ ID NO: 3771
  REGION 1..566: note = hemagglutinin__InfluenzaA__ADD22782

SEQ ID NO: 4193 - protein, 566 aa, synthetic construct
  REGION 1..566: note = hemagglutinin__InfluenzaA__ADD22792
MKAILVVLLYTFATANADTLCIGYHANNSTDTVDTVLEKNVTVTHSVNLLEDKHNGKLCKLRGVAPLHLGKCNIAGWILGNPECESLSTASSWSYIVETSSSGNGTCYPGDFINYEELREQLSSVSSFERFEIFPKTSSWPNHDSNKGVTAACPHAGAKSFYKNLIWLVKKGNSYPKLSKSYINDKGKEVLVLWGIHHPSTSADQQSLYQNADAYVFVGTSRYSKKFKPEIAIRPKVRDQEGRMNYYWTLVEPGDKITFEATGNLVVPRYAFAMERNAGSGIIISDTPVHDCNTTCQTPKGAINTSLPFQNIHPITIGKCPKYVKSTKLRLATGLRNVPSIQSRGLFGAIAGFIEGGWTGMVDGWYGYHHQNEQGSGYAADLKSTQNAIDEITNKVNSVIEKMNTQFTAVGKEFNHLEKRIENLNKKVDDGFLDIWTYNAELLVLLENERTLDYHDSNVKNLYEKVRSQLKNNAKEIGNGCFEFYHKCDNTCMESVKNGTYDYPKYSEEAKLNREEIDGVKLESTRIYQILAIYSTVASSLVLVVSLGAISFWMCSNGSLQCRICI

SEQ ID NO: 4194 - protein, 566 aa, synthetic construct; identical to SEQ ID NO: 4169
  REGION 1..566: note = hemagglutinin__InfluenzaA__ADD22802

SEQ ID NO: 4195 - protein, 566 aa, synthetic construct; identical to SEQ ID NO: 3771
  REGION 1..566: note = hemagglutinin__InfluenzaA__ADD22812

SEQ ID NO: 4196 - protein, 566 aa, synthetic construct
  REGION 1..566: note = hemagglutinin__InfluenzaA__ADD22822
MKAILVVLLYTFATANADTLCIGYHANNSTDTVDTVLEKNVTVTHSVNLLEDKHNGKLCKLRGVAPLHLGKCNIAGWILGNPECESLSTASSWSYIVETSSADNGTCYPGDFIDYEELREQLSSVSSFERFEIFPKTSSWPNHDSNKGVTAACPHAGAKSFYKNLIWLVKKGNSYPKLSKSYINDKGKEVLVLWGIHHPSTSADQQSLYQNADAYVFVGTSKYSKKFKPEIAIRPKVRDQEGRMNYYWTLVEPGDKITFEATGNLVVPRYAFAMERNAGSGIIISDTPVHDCNTTCQTPKGAINTSLPFQNIHPITIGKCPKYVKSTKLRLATGLRNVPSIQSRGLFGAIAGFIEGGWTGMVDGWYGYHHQNEQGSGYAADLKSTQNAIDEITNKVNSVIEKMNTQFTAVGKEFNHLEKRIENLNKKIDDGFLDIWTYNAELLVLLENERTLDYHDSNVKNLYEKVRSQLKNNAKEIGNGCFEFYHKCDNMCMESVKNGTYDYPKYSEEAKLNREEIDGVKLESTRIYQILAIYSTVASSLVLVVSLGAISFWMCSNGSLQCRICI

SEQ ID NO: 4197 - protein, 566 aa, synthetic construct; identical to SEQ ID NO: 3771
  REGION 1..566: note = hemagglutinin__InfluenzaA__ADD22832

SEQ ID NO: 4198 - protein, 566 aa, synthetic construct; identical to SEQ ID NO: 3771
  REGION 1..566: note = hemagglutinin__InfluenzaA__ADD22842

SEQ ID NO: 4199 - protein, 566 aa, synthetic construct
  REGION 1..566: note = hemagglutinin__InfluenzaA__ADD22852
MKAILVVLLYTFATANADTLCIGYHANNSTDTVDTVLEKNVTVTHSVNLLEDKHNGKLCKLRGVAPLHLGKCNIAGWILGNPECESLSTASSWSYIVETSSSDNGTCYPGDFIDYEELREQLSSVSSFERFEIFPKTSSWPNHDSNKGVTAACPHAGAKSFYKNLIWLVKKGNSYPKLSKSYINDKGKEVLVLWGIHHPSTSADQQSLYQNADAYVFVGTSRYSKKFKPEIAIRPKVRDQEGRMNYYWTLVEPGDKITFEATGNLVVPRYAFAMERNAGSGIVISDTPVHDCNTTCQTPKGAINTSLPFQNIHPITIGKCPKYVKSTKLRLATGLRNVPSIQSRGLFGAIAGFIEGGWTGMVDGWYGYHHQNEQGSGYAADLKSTQNAIDEITNKVNSVIEKMNTQFTAVGKEFNHLEKRIENLNKKVDDGFLDIWTYNAELLVLLENERTLDYHDSNVKNLYEKVRSQLKNNAKEIGNGCFEFYHKCDNTCMESVKNGTYDYPKYSEEAKLNREEIDGVKLESTRIYQILAIYSTVASSLVLVVSLGAISFWMCSNGSLQCRICI

SEQ ID NO: 4200 - protein, 566 aa, synthetic construct
  REGION 1..566: note = hemagglutinin__InfluenzaA__ADD22941
MKAILVVLLYTFATANADTLCIGYHANNSTDTVDTVLEKNVTVTHSVNLLEDKHNGKLCKLRGVAPLHLGKCNIAGWILGNPECESLSTAISWSYIVETSSSGNGTCYPGDFIDYEELREQLSSVSSFERFEIFPKTSSWPNHDSNKGVTAACPHAGAKSFYKNLIWLVKKGNSYPKLSKSYINDKGKEVLVLWGIHHPSTSADQQSLYQNADAYVFVGTSRYSKKFKPEIAIRPKVRDQEGRMNYYWTLVEPGDKITFEATGNLVVPRYAFAMERNAGSGIIISDTPVHDCNTTCQTPKGAINTSLPFQNIHPITIGKCPKYVKSTKLRLATGLRNVPSIQSRGLFGAIAGFIEGGWTGMVDGWYGYHHQNEQGSGYAADLKSTQNAIDEITNKVNSVIEKMNTQFTAVGKEFNHLEKRIENLNKKVDDGFLDIWTYNAELLVLLENERTLDYHDSNVKNLYEKVRSQLKNNAKEIGNGCFEFYHKCDNTCMESVKNGTYDYPKYSEEAKLNREEIDGVKLESTRIYQILAIYSTVASSLVLVVSLGAISFWMCSNGSLQCRICI

SEQ ID NO: 4201 - protein, 566 aa, synthetic construct; identical to SEQ ID NO: 3771
  REGION 1..566: note = hemagglutinin__InfluenzaA__ADD22951

SEQ ID NO: 4202 - protein, 566 aa, synthetic construct; identical to SEQ ID NO: 3771
  REGION 1..566: note = hemagglutinin__InfluenzaA__ADD22961

SEQ ID NO: 4203 - protein, 566 aa, synthetic construct; identical to SEQ ID NO: 3771
  REGION 1..566: note = hemagglutinin__InfluenzaA__ADD22971

SEQ ID NO: 4204 - protein, 566 aa, synthetic construct; identical to SEQ ID NO: 3771
  REGION 1..566: note = hemagglutinin__InfluenzaA__ADD23072

SEQ ID NO: 4205 - protein, 566 aa, synthetic construct
  REGION 1..566: note = hemagglutinin__InfluenzaA__ADD23082
MKAILVVLLYTFATANADTLCIGYHANNSTDTVDTVLEKNVTVTHSVNLLEDKHNGKLCKLRGVAPLHLGKCNIAGWILGNPECESLSTASSWSYIVETSSSGNGTCYPGDFIDYEELREQLSSVSSFERFEIFPKTSSWPNHDSNKGVTAACPHAGAKSFYKNLIWLVKKGNSYPKLSKSYINDKGKEVLVLWGIHHPSTSADQQSLYQNADTYVFVGTSRYSKKFKPEIAIRPKVRDQEGRMNYYWTLVEPGDKITFEATGNLVVPRYAFAMERNAGSGIIISDTPVHDCNTTCQTPKGAINTSLPFQNIHPITIGKCPKYVKSTKLRLATGLRNVPSIQSRGLFGAIAGFIEGGWTGMVDGWYGYHHQNEQGSGYAADLKSTQNAIDEITNKVNSVIEKMNTQFTAVGKEFNHLEKRIENLNKKVDDGFLDIWTYNAELLVLLENERTLDYHDSNVKNLYEKVRSQLKNNAKEIGNGCFEFYHKCDNTCMESVKNGTYDYPKYSEEAKLNREEIDGVKLESTRIYQILAIYSTVASSLVLVVSLGAISFWMCSNGSLQCRICI

SEQ ID NO: 4206 - protein, 566 aa, synthetic construct
  REGION 1..566: note = hemagglutinin__InfluenzaA__ADD23102
MKAILVVLLYTFATANADTLCIGYHANNSTDTVDTVLEKNVTVTHSVNLLEDKHNGKLCKLRGVAPLHLGKCNIAGWILGNPECESLSTASSWSYIVETSSSGNGTCYPGDFIDYEELREQLSSVSSFEKFEIFPKTSSWPNHDSNKGVTAACPHAGAKSFYKNLIWLVKKGNSYPKLSKSYINDKGKEVLVLWGIHHPSTSADQQSLYQNADAYVFVGTSRYSKKFKPEIAIRPKVRDQEGRMNYYWTLVEPGDKITFEATGNLVVPRYAFAMERNAGSGIIISDTPVHDCNTTCQTPKGAINTSLPFQNIHPITIGKCPKYVKSTKLRLATGLRNVPSIQSRGLFGAIAGFIEGGWTGMVDGWYGYHHQNEQGSGYAADLKSTQNAIDEITNKVNSVIEKMNTQFTAVGKEFNHLEKRIENLNKKVDDGFLDIWTYNAELLVLLENERTLDYHDSNVKNLYEKVRSQLKNNAKEIGNGCFEFYHKCDNTCMESVKNGTYDYPKYSEEAKLNREEIDGVKLESTRIYQILAIYSTVASSLVLVVSLGAISFWMCSNGSLQCRICI

SEQ ID NO: 4207 - protein, 566 aa, synthetic construct; identical to SEQ ID NO: 3771
  REGION 1..566: note = hemagglutinin__InfluenzaA__ADD23112

SEQ ID NO: 4208 - protein, 566 aa, synthetic construct; identical to SEQ ID NO: 3771
  REGION 1..566: note = hemagglutinin__InfluenzaA__ADD23122

SEQ ID NO: 4209 - protein, 566 aa, synthetic construct; identical to SEQ ID NO: 2669
  REGION 1..566: note = hemagglutinin__InfluenzaA__ADD23132

SEQ ID NO: 4210 - protein, 566 aa, synthetic construct; identical to SEQ ID NO: 3833
  REGION 1..566: note = hemagglutinin__InfluenzaA__ADD23142

SEQ ID NO: 4211 - protein, 566 aa, synthetic construct
  REGION 1..566: note = hemagglutinin__InfluenzaA__ADD23162
MKAILVVLLYTFATANADTLCIGYHANNSTDTVDTVLEKNVTVTHSVNLLEDKHNGKLCKLRGVAPLHLGKCNIAGWILGNPECESLSTASSWSYIVETSSSDNGTCYPGDFIDYEELREQLSSVSSFERFEIFPKTSSWPNHDSNKGVTAACPHAGAKSFYKNLIWLVKKGNSYPKLSKSYINDKGKEVLVLWGIHHPSTSADQQGLYQNADAYVFVGTSRYSKKFKPEIAIRPKVRDQEGRMNYYWTLVEPGDKITFEATGNLVVPRYAFAMERNAGSGIIISDTPVHDCNTTCQTPKGAINTSLPFQNIHPITIGKCPKYVKSTKLRLATGLRNVPSIQSRGLFGAIAGFIEGGWTGMVDGWYGYHHQNEQGSGYAADLKSTQNAIDKITNKVNSVIEKMNTQFTAVGKEFNHLEKRIENLNKKVDDGFLDIWTYNAELLVLLENERTLDYHDSNVKNLYEKVRSQLKNNAKEIGNGCFEFYHKCDNTCMESVKNGTYDYPKYSEEAKLNREEIDGVKLESTRIYQILAIYSTVASSLVLVVSLGAISFWMCSNGSLQCRICI

SEQ ID NO: 4212 - protein, 566 aa, synthetic construct; identical to SEQ ID NO: 3833
  REGION 1..566: note = hemagglutinin__InfluenzaA__ADD23172

SEQ ID NO: 4213 - protein, 566 aa, synthetic construct; identical to SEQ ID NO: 3833
  REGION 1..566: note = hemagglutinin__InfluenzaA__ADD23182

SEQ ID NO: 4214 - protein, 566 aa, synthetic construct; identical to SEQ ID NO: 3833
  REGION 1..566: note = hemagglutinin__InfluenzaA__ADD23192

SEQ ID NO: 4215 - protein, 566 aa, synthetic construct; identical to SEQ ID NO: 3833
  REGION 1..566: note = hemagglutinin__InfluenzaA__ADD23202

SEQ ID NO: 4216 - protein, 566 aa, synthetic construct; identical to SEQ ID NO: 3833
  REGION 1..566: note = hemagglutinin__InfluenzaA__ADD23220

SEQ ID NO: 4217 - protein, 566 aa, synthetic construct; identical to SEQ ID NO: 3829
  REGION 1..566: note = hemagglutinin__InfluenzaA__ADD23230

SEQ ID NO: 4218 - protein, 566 aa, synthetic construct; identical to SEQ ID NO: 3833
  REGION 1..566: note = hemagglutinin__InfluenzaA__ADD23240

SEQ ID NO: 4219 - protein, 566 aa, synthetic construct
  REGION 1..566: note = hemagglutinin__InfluenzaA__ADD23260
MKAILVVLLYTFATANADTLCIGYHANNSTDTVDTVLEKNVTVTHSVNLLEDKHNGKLCKLRGVAPLHLGKCNIAGWILGNPECESLSTASSWSYIVETSSSDNGTCYPGDFIDYEELREQLSSVSSFERFEIFPKTSSWPNHDSNKGVTAACPHAGAKSFYKNLIWLVKKGNSYPKLSKSYINDKGKEVLVLWGIHHPSTSADQQSLYQNADAYVFVGTSRYSKKFKPEIAIRPKVRDQEGRMNYYWTLVEPGDKITFEATGNLVVPRYAFAMERNAGSGIIISDTPVHDCNTTCQTPEGAINTSLPFQNIHPITIGKCPKYVKSTKLRLATGLRNVPSIQSRGLFGAIAGFIEGGWTGMVDGWYGYHHQNEQGSGYAADLKSTQNAIDKITNKVNSVIEKMNTQFTAVGKEFNHLEKRIENLNKKVDDGFLDIWTYNAELLVLLENERTLDYHDSNVKNLYEKVRSQLKNNAKEIGNGCFEFYHKCDNTCMESVKNGTYDYPKYSEEAKLNREEIDGVKLESTRIYQILAIYSTVASSLVLVVSLGAISFWMCSNGSLQCRICI

SEQ ID NO: 4220 - protein, 566 aa, synthetic construct; identical to SEQ ID NO: 3022
  REGION 1..566: note = hemagglutinin__InfluenzaA__ADD23280

SEQ ID NO: 4221 - protein, 566 aa, synthetic construct
  REGION 1..566: note = hemagglutinin__InfluenzaA__ADD23290
MKAILVVLLYTFATANADTLCIGYHANNSTDTVDTVLEKNVTVTHSVNLLEDKHNGKLCKLRGVAPLHLGKCNIAGWILGNPECESLSTASSWSYIVETSSSDNGTCYPGDFINYEELREQLSSVSSFERFEIFPKTSSWPNHDSNKGVTAACPHAGAKSFYKNLIWLVKKGNSYPKLSKSYINDKGKEVLVLWGIHHPSTSADQQSLYQNADAYVFVGTSRYSKKFKPEIAIRPKVRDQEGRMNYYWTLVEPGDKITFEATGNLVVPRYAFAMERNAGSGIIISDTPVHDCNTTCQTPKGAINTSLPFQNIHPITIGKCPKYVKSTKLRLATGLRNVPSIQSRGLFGAIAGFIEGGWTGMVDGWYGYHHQNEQGSGYAADLKSTQNAIDKITNKVNSVIEKMNTQFTAVGKEFNHLEKRIENLNKKVDDGFLDIWTYNAELLVLLENERTLDYHDSNVKNLYEKVRSQLKNNAKEIGNGCFEFYHKCDNTCMESVKNGTYDYPKYSEEAKLNREEIDGVKLESTRIYQILAIYSTVASSLVLVVSLGAISFWMCSNGSLQCRICI

SEQ ID NO: 4222 - protein, 566 aa, synthetic construct; identical to SEQ ID NO: 3833
  REGION 1..566: note = hemagglutinin__InfluenzaA__ADD23300

SEQ ID NO: 4223 - protein, 566 aa, synthetic construct; identical to SEQ ID NO: 4221
  REGION 1..566: note = hemagglutinin__InfluenzaA__ADD23310

SEQ ID NO: 4224 - protein, 566 aa, synthetic construct; identical to SEQ ID NO: 3833
  REGION 1..566: note = hemagglutinin__InfluenzaA__ADD23320

SEQ ID NO: 4225 - protein, 566 aa, synthetic construct
  REGION 1..566: note = hemagglutinin__InfluenzaA__ADD23330
MKAILVVLLYTFATANADTLCIGYHANNSTDTVDTVLEKNVTVTHSVNLLEDKHNGKLCKLRGVAPLHLGKCNIAGWILGNPECESLSTASSWSYIVETSSSDNGTCYPGDFINYEELREQLSSVSSFERFEIFPKTSSWPNHDSNKGVTAACPHAGAKSFYKNLIWLVKKGNSYPKLSKSYINDKGKEVLVLWGIHHPSTSADQQSLYQNADAYVFVGTSRYSKKFKPEIAIRPKVRDQEGRMNYYWTLVEPGDKITFEATGNLVVPRYAFAMERNAGSGIIISDTPVHDCNTTCQTPKGAINTSLPFQNIHPITIGKCPKYVKSTKLRLATGLRNVPSIQSRGLFGAIAGFIEGGWTGMVDGWYGYHHQNEQGSGYAADLKSTQNAIDKITNKVNSVIEKMNTQFTAVGKEFNHLEKRIENLNKKVDDGFLDIWTYNAELLVLLENERTLDYHDSNVKNLYEKVRSQLKTNAKEIGNGCFEFYHKCDNTCMESVKNGTYDYPKYSEEAKLNREEIDGVKLESTRIYQILAIYSTVASSLVLVVSLGAISFWMCSNGSLQCRICI

SEQ ID NO: 4226 - protein, 566 aa, synthetic construct
  REGION 1..566: note = hemagglutinin__InfluenzaA__ADD23355
MKAILVVLLYTFATANADTLCIGYHANNSTDTVDTVLEKNVTVTHSVNLLEDKHNGKLCKLRGVAPLHLGKCNIAGWILGNPECESLSTASSWSYIVETSSSDNGTCYPGDFINYEELREQLSSVSSFEMFEIFPKTSSWPNHDSNKGVTAACPHAGAKSFYKNLIWLVKKGNSYPKLSKSYINDKGKEVLVLWGIHHPSTSADQQSLYQNADAYVFVGTSRYSKKFKPEIAIRPKVRDQEGRMNYYWTLVEPGDKITFEATGNLVVPRYAFAMERNAGSGIIISDTPVHDCNTTCQTPKGAINTSLPFQNIHPITIGKCPKYVKSTKLRLATGLRNVPSIQSRGLFGAIAGFIEGGWTGMVDGWYGYHHQNEQGSGYAADLKSTQNAIDKITNKVNSVIEKMNTQFTAVGKEFNHLEKRIENLNKKVDDGFLDIWTYNAELLVLLENERTLDYHDSNVKNLYEKVRSQLKNNAKEIGNGCFEFYHKCDNTCMESVKNGTYDYPKYSEEAKLNREEIDGVKLESTRIYQILAIYSTVASSLVLVVSLGAISFWMCSNGSLQCRICI

SEQ ID NO: 4227 - protein, 566 aa, synthetic construct; identical to SEQ ID NO: 4221
  REGION 1..566: note = hemagglutinin__InfluenzaA__ADD23375

SEQ ID NO: 4228 - protein, 566 aa, synthetic construct; identical to SEQ ID NO: 3833
  REGION 1..566: note = hemagglutinin__InfluenzaA__ADD23385

SEQ ID NO: 4229 - protein, 566 aa, synthetic construct
  REGION 1..566: note = hemagglutinin__InfluenzaA__ADD23405
MKAILVVLLYTFATANADTLCIGYHANNSTDTVDTVLEKNVTVTHSVNLLEDKHNGKLCKLRGVAPLHLGKCNIAGWILGNPECESLSTASSWSYIVETSSSDNGTCYPGDFINYEELREQLSSVSSFERFEIFPKTSSWPNHDSNKGVTAACPHAGAKSFYKNLIWLVKKGNSYPKLSKSYINDKGKEVLVLWGIHHPSTSADQQSLYQNADAYVFVGTSRYSKKFKPEIAIRPKVRDQEGRMNYYWTLVEPGDKITFEATGNLVVPRYAFAMERNAGSGIIISDTPVHDCNTTCQTPKGAINTSLPFQNIHPITVGKCPKYVKSTKLRLATGLRNVPSIQSRGLFGAIAGFIEGGWTGMVDGWYGYHHQNEQGSGYAADLKSTQNAIDKITNKVNSVIEKMNTQFTAVGKEFNHLEKRIENLNKKVDDGFLDIWTYNAELLVLLENERTLDYHDSNVKNLYEKVRSQLKNNAKEIGNGCFEFYHKCDNTCMESVKNGTYDYPKYSEEAKLNREEIDGVKLESTRIYQILAIYSTVASSLVLVVSLGAISFWMCSNGSLQCRICI

SEQ ID NO: 4230 - protein, 566 aa, synthetic construct
  REGION 1..566: note = hemagglutinin__InfluenzaA__ADD23415
MKAILVVLLYTFATANADTLCIGYHANNSTDTVDTVLEKNVTVTHSVNLLEDKHNGKLCKLRGVAPLHLGKCNIAGWILGNPECESLSTASSWSYIVETSSSDNGTCYPGDFINYEELREQLSSVSSFERFEIFPKTSSWPNHDSNKGVTAACPHAGAKSFYKNLIWLVKKGNSYPKLSKSYINDKGKEVLVLWGIHHPSTSADQQSLYQNADAYVFVGTSRYSKKFKPEIAIRPKVRDQEGRMNYYWTLVEPGDKITFEATGNLVVPRYAFAMERNAESGIIISDTPVHDCNTTCQTPKGAINTSLPFQNIHPITIGKCPKYVKSTKLRLATGLRNVPSIQSRGLFGAIAGFIEGGWTGMVDGWYGYHHQNEQGSGYAADLKSTQNAIDKITNKVNSVIEKMNTQFTAVGKEFNHLEKRIENLNKKVDDGFLDIWTYNAELLVLLENERTLDYHDSNVKNLYEKVRSQLKNNAKEIGNGCFEFYHKCDNTCMESVKNGTYDYPKYSEEAKLNREEIDGVKLESTRIYQILAIYSTVASSLVLVVSLGAISFWMCSNGSLQCRICI

SEQ ID NO: 4231 - protein, 566 aa, synthetic construct; identical to SEQ ID NO: 3833
  REGION 1..566: note = hemagglutinin__InfluenzaA__ADD23435

SEQ ID NO: 4232 - protein, 566 aa, synthetic construct
  REGION 1..566: note = hemagglutinin__InfluenzaA__ADD23465
MKAILAVLLYTFATANADTLCIGYHANNSTDTVDTVLEKNVTVTHSVNLLEDKHNGKLCKLRGVAPLHLGKCNIAGWILGNPECESLSTASSWSYIVETSSSDNGTCYPGDFIDYEELREQLSSVSSFERFEIFPKTSSWPNHDSNKGVTAACPHAGAKSFYKNLIWLVKKGNSYPKLSKSYINDKGKEVLVLWGIHHPSTSADQQSLYQNADAYVFVGTSRYSKKFKPEIAIRPKVRDQEGRMNYYWTLVEPGDKITFEATGNLVVPRYAFAMERNAGSGIIISDTPVHDCNTTCQTPKGAINTSLPFQNIHPITIGKCPKYVKSTKLRLATGLRNVPSIQSRGLFGAIAGFIEGGWTGMVDGWYGYHHQNEQGSGYAADLKSTQNAIDKITNKVNSVIEKMNTQFTAVGKEFNHLEKRIENLNKKVDDGFLDIWTYNAELLVLLENERTLDYHDSNVKNLYEKVRSQLKNNAKEIGNGCFEFYHKCDNTCMESVKNGTYDYPKYSEEAKLNREEIDGVKLESTRIYQILAIYSTVASSLVLVVSLGAISFWMCSNGSLQCRICI

SEQ ID NO: 4233 - protein, 566 aa, synthetic construct; identical to SEQ ID NO: 3833
  REGION 1..566: note = hemagglutinin__InfluenzaA__ADD23475

SEQ ID NO: 4234 - protein, 566 aa, synthetic construct; identical to SEQ ID NO: 3833
  REGION 1..566: note = hemagglutinin__InfluenzaA__ADD23485

SEQ ID NO: 4235 - protein, 566 aa, synthetic construct
  REGION 1..566: note = hemagglutinin__InfluenzaA__ADD23495
MKAILVVLLYTFATANADTLCIGYHANNSTDTVDTVLEKNVTVTHSVNLLEDKHNGKLCKLRGVAPLHLGKCNIAGWILGNPECESLSTASSWSYIVETSSSDNGTCYPGDFIDYEELREQLSSVSSFERFEIFPKTSSWPNHDSNKGVTAACPHAGARSFYKNLIWLVKKGNSYPKLSKSYINDKGKEVLVLWGIHHPSTSADQQSLYQNADAYVFVGTSRYSKKFKPEIAIRPKVRDQEGRMNYYWTLVEPGDKITFEATGNLVVPRYAFAMERNAGSGIIISDTPVHDCNTTCQTPKGAINTSLPFQNIHPITIGKCPKYVKSTKLRLATGLRNVPSIQSRGLFGAIAGFIEGGWTGMVDGWYGYHHQNEQGSGYAADLKSTQNAIDEITNKVNSVIEKMNTQFTAVGKEFNHLEKRIENLNKKVDDGFLDIWTYNAELLVLLENERTLDYHDSNVKNLYEKVRSQLKNNAKEIGNGCFEFYHKCDNTCMESVKNGTYDYPKYSEEAKLNREEIDGVKLESTRIYQILAIYSTVASSLVLVVSLGAISFWMCSNGSLQCRICI

SEQ ID NO: 4236 - protein, 566 aa, synthetic construct
  REGION 1..566: note = hemagglutinin__InfluenzaA__ADD23505
MKAILVVLLYTFATANADTLCIGYHANNSTDTVDTVLEKNVTVTHSVNLLEDKHNGKLCKLRGVAPLHLGKCNIAGWILGNPECESLSTASSWSYIVETSSSDNGTCYPGDFIDYEELREQLSSVSSFERFEIFPKTSSWPNHDSNKGVTAACPHAGAKSFYKNLIWLVKKGNSYPKLSKSYINDKGKEVLVLWGIHHPSTSADQQSLYQNADAYVFVGTSRYSKKFKPEIAIRPKVRDQEGRMNYYWTLIEPGDKITFEATGNLVVPRYAFAMERNAGSGIIISDTPAHDCNTTCQTPKGAINTSLPFQNIHPITIGKCPKYVKSTKLRLATGLRNVPSIQSRGLFGAIAGFIEGGWTGMVDGWYGYHHQNEQGSGYAADLKSTQNAIDKITNKVNSVIEKMNTQFTAVGKEFNHLEKRIENLNKKVDDGFLDIWTYNAELLVLLENERTLDYHDSNVKNLYEKVRSQLKNNAKEIGNGCFEFYHKCDNTCMESVKNGTYDYPKYSEEAKLNREEIDGVKLESTRIYQILAIYSTVASSLVLVVSLGAISFWMCSNGSLQCRICI

SEQ ID NO: 4237 - protein, 566 aa, synthetic construct; identical to SEQ ID NO: 3833
  REGION 1..566: note = hemagglutinin__InfluenzaA__ADD23515

SEQ ID NO: 4238 - protein, 566 aa, synthetic construct; identical to SEQ ID NO: 3833
  REGION 1..566: note = hemagglutinin__InfluenzaA__ADD23994

SEQ ID NO: 4239 - protein, 566 aa, synthetic construct
  REGION 1..566: note = hemagglutinin__InfluenzaA__ADD24004
MKAILVVLLYTFATANADTLCIGYHANNSTDTVDTVLEKNVTVTHSVNLLEDKHNGKLCKLRGVAPLHLGKCNIAGWILGNPECESLSTASSWSYIVETSSSDNGTCYPGDFIDYEELREQLSSVSSFERFEIFPKTSSWPNHDSNKGVTAACPHAGAKSFYKNLIWLVKKGNSYPKLSKSYINDKGKEVLVLWGIHHPSTSADQQSLYQNADAYVFVGTSRYSKKFKPEIAIRPKVRDQEGRMNYYWTLVEPGDKITFEATGNLVVPRYAFAMERNAGSGIIISDTPVHDCNTTCQTPNGAINTSLPFQNIHPITIGKCPKYVKSTKLRLATGLRNVPSIQSRGLFGAIAGFIEGGWTGMVDGWYGYHHQNEQGSGYAADLKSTQNAIDEITNKVNSVIEKMNTQFTAVGKEFNHLEKRIENLNKKIDDGFLDIWTYNAELLVLLENERTLDYHDSNVKNLYEKVRSQLKNNAKEIGNGCFEFYHKCDNTCMESVKNGTYDYPKYSEEAKLNREEIDGVKLESTRIYQILAIYSTVASSLVLVVSLGAISFWMCSNGSLQCRICI

SEQ ID NO: 4240 - protein, 566 aa, synthetic construct; identical to SEQ ID NO: 3771
  REGION 1..566: note = hemagglutinin__InfluenzaA__ADD24014

SEQ ID NO: 4241 - protein, 566 aa, synthetic construct
  REGION 1..566: note = hemagglutinin__InfluenzaA__ADD52537
MKAILVVLLYTFATANADTLCIGYHANNSTDTVDTVLEKNVTVTHSVNLLEDKHNGKLCKLRGVAPLHLGKCNIAGWILGNPECESLSTASSWSYIVETSSSDNGTCYPGDFIDYEELREQLSSVSSFERFEIFPKTSSWPNHDSNKGVTAACPHAGAKSFYKNLIWLVKKGNSYPKLSKSYINDKGKEVLVLWGIHHPSTSADQQSLYQNADAYVFVGSSRYSKKFKPEIAIRPKVRDQEGRMNYYWTLVEPGDKITFEATGNLVVPRYAFAMERNAGSGIIISDTPVHDCNTTCQTPKGAINTSLPFQNIHPITIGKCPKYVKSTKLRLATGLRNVPSIQSRGLFGAIAGFIEGGWTGMVDGWYGYHHQNEQGSGYAADLKSTQNAIDGITNKVNSVIEKMNTQFTAVGKEFNHLEKRIENLNKKVDDGFLDIWTYNAELLVLLENERTLDYHDSNVKNLYEKVRSQLKNNAKEIGNGCFEFYHKCDNTCMESVKNGTYDYPKYSEEAKLNREEIDGVKLESTRIYQILAIYSTVASSLVLVVSLGAISFWMCSNGSLQCRICI

SEQ ID NO: 4242 - protein, 566 aa, synthetic construct; identical to SEQ ID NO: 3833
  REGION 1..566: note = hemagglutinin__InfluenzaA__ADD64203

SEQ ID NO: 4243 - protein, 566 aa, synthetic construct
  REGION 1..566: note = hemagglutinin__InfluenzaA__ADD64204
MKAILVVLLYTFATANADTLCIGYHANNSTDTVDTVLEKNVTVTHSVNLLEDKHNGKLCKLRGVAPLHLGKCNIAGWILGNPECESLSTASSWSYIVETSSSDNGTCYPGDFIDYEELREQLSSVSSFERFEIFPKTSSWPNHDPNKGVTAACPHAGAKSFYKNLIWLVKKGNSYPKLSKSYINDKGKEVLVLWGIHHPSTSADQQSLYQNADAYVFVGTSRYSKKFKPEIAIRPKVRDQEGRMNYYWTLIEPGEKITFEATGNLVVPRYAFAMERNAGSGIIISDTPVHDCNTTCQTPKGAINTSLPFQNIHPITIGKCPKYVKSTKLRLATGLRNVPSIQSRGLFGAIAGFIEGGWTGMVDGWYGYHHQNEQGSGYAADLKSTQNAIDEITNKVNSVIEKMNTQFTAVGKEFNHLEKRIENLNKKVDDGFLDIWTYNAELLVLLENERTLDYHDSNVKNLYEKVRSQLKNNAREIGNGCFEFYHKCDNTCMESVKNGTYDYPKYSEEAKLNREEIDGVKLESTRIYQILAIYSTVASSLVLVVSLGAISFWMCSNGSLQCRICI

SEQ ID NO: 4244 - protein, 566 aa, synthetic construct; identical to SEQ ID NO: 2669
  REGION 1..566: note = hemagglutinin__InfluenzaA__ADD64205

SEQ ID NO: 4245 - protein, 566 aa, synthetic construct; identical to SEQ ID NO: 2669
  REGION 1..566: note = hemagglutinin__InfluenzaA__ADD64206

SEQ ID NO: 4246 - protein, 566 aa, synthetic construct; identical to SEQ ID NO: 3467
  REGION 1..566: note = hemagglutinin__InfluenzaA__ADD64207

SEQ ID NO: 4247 - protein, 566 aa, synthetic construct
  REGION 1..566: note = hemagglutinin__InfluenzaA__ADD64208
MKAILVVLLYTFATANADTLCIGYHANNSTDTVDTVLEKNVTVTHSVNLLEDKHNGKLCKLRGVAPLHLGKCNIAGWILGNPECESLSTASSWSYIVETSSSDNGTCYPGDFIDYEELREQLSSVSSFERFEIFPKTSSWPNHDPNKGVTAACPHAGAKSFYKNLIWLVKKGNSYPKLSKSYINDKGKEVLVLWGIHHPSTSADQQSLYQNADAYVFVGTSRYSKKFKPEIAIRPKVRDQEGRMNYYWTLVEPGDKITFEATGNLVVPRYAFAMERNAGSGIIISDTPVHDCNTTCQTPKGAINTSLPFQNIHPITIGKCPKYVKSTKLRLATGLRNVPSIQSRGLFGAIAGFIEGGWTGMVDGWYGYHHQNEQGSGYAADLKSTQNAIDEITNKVNSVIEKMNTQFTAVGKEFNHLEKRIENLNKKVDDGFLDIWTYNAELLVLLENERTLDYHDPNVKNLYEKVRSQLKNNAKEIGNGCFEFYHKCDNTCMESVKNGTYDYPKYSEEAKLNREEIDGVKLESTRIYQILAIYSTVASSLVLVVSLGAISFWMCSNGSLQCRICI

SEQ ID NO: 4248 - protein, 566 aa, synthetic construct; identical to SEQ ID NO: 3467
  REGION 1..566: note = hemagglutinin__InfluenzaA__ADD64209

SEQ ID NO: 4249 - protein, 566 aa, synthetic construct; identical to SEQ ID NO: 2669
  REGION 1..566: note = hemagglutinin__InfluenzaA__ADD64210

SEQ ID NO: 4250 - protein, 566 aa, synthetic construct; identical to SEQ ID NO: 3467
  REGION 1..566: note = hemagglutinin__InfluenzaA__ADD64211

SEQ ID NO: 4251 - protein, 566 aa, synthetic construct; identical to SEQ ID NO: 2669
  REGION 1..566: note = hemagglutinin__InfluenzaA__ADD64212

SEQ ID NO: 4252 - protein, 566 aa, synthetic construct; identical to SEQ ID NO: 3467
  REGION 1..566: note = hemagglutinin__InfluenzaA__ADD64213

SEQ ID NO: 4253 - protein, 566 aa, synthetic construct
  REGION 1..566: note = hemagglutinin__InfluenzaA__ADD64214
MKAILVVLLYTFATANADTLCIGYHANNSTDTVDTVLEKNVTVTHSVNLLENKHNGKLCKLRGVAPLHLGKCNIAGWILGNPECESFSTSSSWSYIVETSSSDNGTCYPGDFIDYEELREQLSSVSSFERFEIFPKTSSWPNHDSNKGVTAACPHAGAKSFYKNLIWLVKKGNSYPKLNKSYINDKGKEVLVLWGIHHPSTSADQQSLYQNADAYVFVGTSRYSKKFKPEIAIRPKVRDQEGRMNYYWTLVEPGDKITFEATGNLVVPRYAFAMERNAGSGIIISDTPVHDCNTTCQTPKGAINTSLPFQNIHPITIGKCPKYVKSTKLRLATGLRNVPSIQSRGLFGAIAGFIEGGWTGMVDGWYGYHHQNEQGSGYAADLKSTQNAIDGITNKVNSVIEKMNTQFTAVGKEFNHLEKRIENLNKKVDDGFLDIWTYNAELLVLLENERTLDYHDSNVKNLYEKVRSQLKNNAKEIGNGCFEFYHKCDNTCMESVKNGTYDYPKYSEEAKLNREEIDGVKLESTRIYQILAIYSTVASSLVLVVSLGAISFWMCSNGSLQCRICI

SEQ ID NO: 4254 - protein, 566 aa, synthetic construct; identical to SEQ ID NO: 2669
  REGION 1..566: note = hemagglutinin__InfluenzaA__ADD64215

SEQ ID NO: 4255 - protein, 566 aa, synthetic construct; identical to SEQ ID NO: 3467
  REGION 1..566: note = hemagglutinin__InfluenzaA__ADD64216

SEQ ID NO: 4256 - protein, 566 aa, synthetic construct; identical to SEQ ID NO: 3467
  REGION 1..566: note = hemagglutinin__InfluenzaA__ADD64217

SEQ ID NO: 4257 - protein, 566 aa, synthetic construct
  REGION 1..566: note = hemagglutinin__InfluenzaA__ADD74350
MKAILVVLLYTFATANADTLCIGYHANNSTDTVDTVLEKNVTVTHSVNILEDKHNGKLCKLRGVAPLHLGKCNIAGWILGNPECESLSTASSWSYIVETSSSDNGTCYPGDFIDYEELREQLSSVSSFERFEIFPKTSSWPNHDSNKGVTAACSHAGAKSFYKNLIWLVKKGNSYPKLSKSYINDKGKEVLVLWGIHHPSTSADQQSLYQNADAYVFVGSSRYSKKFKPEIAIRPKVRDQEGRMNYYWTLVEPGDKITFEATGNLVVPRYAFAMERNAGSGIIISDTPVHDCNTTCQTPKGAINTSLPFQNIHPITIGKCPKYVKSTKLRLATGLRNVPSIQSRGLFGAIAGFIEGGWTGMVDGWYGYHHQNEQGSGYAADLKSTQNAIDEITNKVNSVIEKMNTQFTAVGKEFNHLEKRIENLNKKVDDGFLDIWTYNAELLVLLENERTLDYHDSNVKNLYEKVRSQLKNNAKEIGNGCFEFYHKCDNTCMESVKNGTYDYPKYSEEAKLNREEIDGVKLESTRIYQILAIYSTVASSLVLVVSLGAISFWMCSNGSLQCRICI

SEQ ID NO: 4258 - protein, 566 aa, synthetic construct
  REGION 1..566: note = hemagglutinin__InfluenzaA__ADD74360
MKAILVVLLYTFATANADTLCIGYHANNSTDTVDTVLEKNVTVTHSVNLLEDKHNGKLCKLRGVAPLHLGKCNIAGWILGNPECESLSTASSWSYIVETSSSDNGTCYPGDFIDYEELREQLSSVSSFERFEIFPKTSSWPNHDSNKGVTAACPHAGAKSFYKNLIWLVKKGNSYPKLSKSYINDKRKEVLVLWGIHHPSTSADQQSLYQNADAYVFVGTSRYSKKFKPEIAIRPKVRDQEGRMNYYWTLVEPGDKITFEATGNLVVPRYAFAMERNAGSGIIISDTPVHDCNTTCQTPKGAINTSLPFQNIHPITIGKCPKYVKSTKLRLATGLRNVPSIQSRGLFGAIAGFIEGGWTGMVDGWYGYHHQNEQGSGYAADLKSTQNAIDEITNKVNSVIEKMNTQFTAVGKEFNHLEKRIENLNKKVDDGFLDIWTYNAELLVLLENERTLDYHDSNVKNLYEKVRSQLKNNAKEIGNGCFEFYHKCDNTCMESVKNGTYDYPKYSEEAKLNREEIDGVKLESTRIYQILAIYSTVASSLVLVVSLGAISFWMCSNGSLQCRICI

SEQ ID NO: 4259 - protein, 566 aa, synthetic construct; identical to SEQ ID NO: 2669
  REGION 1..566: note = hemagglutinin__InfluenzaA__ADD74370

SEQ ID NO: 4260 - protein, 566 aa, synthetic construct; identical to SEQ ID NO: 2669
  REGION 1..566: note = hemagglutinin__InfluenzaA__ADD74398

SEQ ID NO: 4261 - protein, 566 aa, synthetic construct
  REGION 1..566: note = hemagglutinin__InfluenzaA__ADD74428
MKAILVVLLYTFATANADTLCIGYHANNSTDTVDTVLEKNVTVTHSVNLLEDKHNGKLCKLRGVAPLHLGKCNIAGWILGNPECESLSTASSWSYIVETSSSDNGTCYPGDFINYEELREQLSSVSSFERFEIFPKTSSWPNHDSNKGVTAACPHAGAKSFYKNLIWLVKKGNSYPKLSKSYINDKGKEVLVLWGIHHPSTSADQQSLYQNADAYVFVGTSRYSKKFKPEIAIRPKVRDQEGRMNYYWTLVKPGDKITFEATGNLVVPRYAFAMERNAGSGIIISDTPVHDCNTTCQTPKGAINTSLPFQNIHPITIGKCPKYVKSTKLRLATGLRNVPSIQSRGLFGAIAGFIEGGWTGMVDGWYGYHHQNEQGSGYAADLKSTQNAIDKITNKVNSVIEKMNTQFTAVGKEFNHLEKRIENLNKKVDDGFLDIWTYNAELLVLLENERTLDYHDSNVKNLYEKVRSQLKNNAKEIGNGCFEFYHKCDNTCMESVKNGTYDYPKYSEEAKLNREEIDGVKLESTRIYQILAIYSTVASSLVLVVSLGAISFWMCSNGSLQCRICI

SEQ ID NO: 4262 - protein, 566 aa, synthetic construct
  REGION 1..566: note = hemagglutinin__InfluenzaA__ADD74438
MKAILVVLLYTFATANADTLCIGYHANNSTDTVDTVLEKNVTVTHSVNLLEDKHNGKLCKLRGVAPLHLGKCNIAGWILGNPECESLSTASSWSYIVETSSSDNGTCYPGDFIDYEELREQLSSVSSFERFEIFPKTSSWPNHDSNKGVTAACPHAGAKSFYKNLIWLVKKGNSYPKLSKSYINDKGKEVLVLWGIHHPSTSADQQSLYQNADAYVFVGTSRYSKKFKPEIAIRPKVRDQEGRMNYYWTLVEPGDKITFEATGNLVVPRYAFAMERNAGSGIIISDTPVHDCNTTCQTPKGAINTSLPFQNIHPITIGKCPKYVKSTKLRLATGLRNVPSIQSRGLFGAIAGFIEGGWTGMVDGWYGYHHQNEQGSGYAADLKSTQNAIDEITNKVNSVIEKMNTQFTAVGKEFNHLEKRIENLNKKVDDGFLDIWTYNAELLVLLENERTLDYHDSNVKNLYEKVRSQLKNNAKEIGNGCFEFYHKCDNTCMESVKNGTYDYPKYSEEAKLNREEIDGVKLEPTRIYQILAIYSTVASSLVLVVSLGAISFWMCSNGSLQCRICI

SEQ ID NO: 4263 - protein, 566 aa, synthetic construct; identical to SEQ ID NO: 2669
  REGION 1..566: note = hemagglutinin__InfluenzaA__ADD74448

SEQ ID NO: 4264 - protein, 566 aa, synthetic construct; identical to SEQ ID NO: 2669
  REGION 1..566: note = hemagglutinin__InfluenzaA__ADD74458

SEQ ID NO: 4265 - protein, 566 aa, synthetic construct
  REGION 1..566: note = hemagglutinin__InfluenzaA__ADD74468
MKAILVVLLYTFATANADTLCIGYHANNSTDTVDTVLEKNVTVTHSVDLLEDKHNGKLCKLRGVAPLHLGKCNIAGWILGNPECESLSTASSWSYIVETSSSDNGTCYPGDFIDYEELREQLSSVSSFERFEIFPKTSSWPNHDSNKGVTAACPHAGAKSFYKNLIWLVKKGNSYPKLSKSYINDKGKEVLVLWGIHHPSTSADQQSLYQNADAYVFVGTSRYSKKFKPEITIRPKVRDQEGRMNYYWTLVEPGDKITFEATGNLVVPRYAFAMERNAGSGIIISDTPVHDCNTTCQTPKGAINTSLPFQNIHPITIGKCPKYVKSTKLRLATGLRNVPSIQSRGLFGAIAGFIEGGWTGMVDGWYGYHHQNEQGSGYAADLKSTQNAIDEITNKVNSVIEKMNTQFTAVGKEFNHLEKRIENLNKKVDDGFLDIWTYNAELLVLLENERTLDYHDSNVKNLYEKVRSQLKNNAKEIGNGCFEFYHKCDNTCMESVKNGTYDYPKYSEEAKLNREEIDGVKLESTRIYQILAIYSTVASSLVLVVSLGAISFWMCSNGSLQCRICI

SEQ ID NO: 4266 - protein, 566 aa, synthetic construct
  REGION 1..566: note = hemagglutinin__InfluenzaA__ADD74488
MKAILVVLLYTFATANADTLCIGYHANNSTDTVDTVLEKNVTVTHSVNILEDKHNGKLCKLRGVAPLHLGKCNIAGWILGNPECESLSTASSWSYIVETSSSDNGTCYPGDFIDYEELREQLSSVSSFERFEIFPKTSSWPNHDSNKGVTAACPHAGAKSFYKNLIWLVKKGNSYPKLSKSYINDKGKEVLVLWGIHHPSTSADQQSLYQNADAYVFVGTSRYSKKFKPEIAIRPKVRDQEGRMNYYWTLVEPGDKITFEATGNLVVPRYAFAMERNAGSGIIISDTPVHDCNTTCQTPKGAINTSLPFQNIHPITIGKCPKYVKSTKLRLATGLRNVPSIQSRGLFGAIAGFIEGGWTGMVDGWYGYHHQNEQGSGYAADLKSTQNAIDEITNKVNSVIEKMNTQFTAVGKEFNHLEKRIENLNKKVDDGFLDIWTYNAELLVLLENERTLDYHDSNVKNLYEKVRSQLKNNAKEIGNGCFEFYHKCDNTCMESVKNGTYDYPKYSEEAKLNREEIDGVKLESTRIYQILAIYSTVASSLVLVVSLGAISFWMCSNGSLQCRICI

SEQ ID NO: 4267 - protein, 566 aa, synthetic construct; identical to SEQ ID NO: 2669
  REGION 1..566: note = hemagglutinin__InfluenzaA__ADD74498

SEQ ID NO: 4268 - protein, 566 aa, synthetic construct
  REGION 1..566: note = hemagglutinin__InfluenzaA__ADD74508
MKAILVVLLYTFATANADTLCIGYHANNSTDTVDTVLEKNVTVTHSVDLLEDKHNGKLCKLRGVAPLHLGKCNIAGWILGNPECESLSTASSWSYIVETSSSDNGTCYPGDFIDYEELREQLSSVSSFERFEIFPKTSSWPNHDSNKGVTAACPHAEAKSFYKNLIWLVKKGNSYPKLSKSYINDKGKEVLVLWGIHHPSTSADQQSLYQNADAYVFVGTSRYSKKFKPEIAIRPKVRDQEGRMNYYWTLVEPGDKITFEATGNLVVPRYAFAMERNAGSGIIISDTPVHDCNTTCQTPKGAINTSLPFQNIHPITIGKCPKYVKSTKLRLATGLRNVPSIQSRGLFGAIAGFIEGGWTGMVDGWYGYHHQNEQGSGYAADLKSTQNAIDEITNKVNSVIEKMNTQFTAVGKEFNHLEKRIENLNKKVDDGFLDIWTYNAELLVLLENERTLDYHDSNVKNLYEKVRSQLKNNAKEIGNGCFEFYHKCDNTCMESVKNGTYDYPKYSEEAKLNREEIDGVKLESTRIYQILAIYSTVASSLVLVVSLGAISFWMCSNGSLQCRICI

SEQ ID NO: 4269 - protein, 566 aa, synthetic construct
  REGION 1..566: note = hemagglutinin__InfluenzaA__ADD74518
MKAILVVLLYTFATANADTLCIGYHANNSTDTVDTILEKNVTVTHSVNLLEDKHNGKLCKLRGVAPLHLGKCNIAGWILGNPECESLSTASSWSYIVETSSSDNGTCYPGDFIDYEELREQLSSVSSFERFEIFPKTSSWPNHDSNKGVTAACPHAGAKSFYKNLIWLVKKGNSYPKLSKSYINDKGKEILVLWGIHHPSTSADQQSLYQNADAYVFVGTSRYSKKFKPEIAIRPKVRDQEGRMNYYWTLVEPGDKITFEATGNLVVPRYAFAMERNTGSGIIISDTPVHDCNTTCQTPKGAINTSLPFQNIHPITIGKCPKYVKSTKLRLATGLRNVPSIQSRGLFGAIAGFIEGGWTGMVDGWYGYHHQNEQGSGYAADLKSTQNAIDEITNKVNSVIEKMNTQFTAVGKEFNHLEKRIENLNKKVDDGFLDIWTYNAELLVLLENERTLDYHDSNVKNLYEKVRSQLKNNAKEIGNGCFEFYHKCDNTCMESVKNGTYDYPKYSEEAKLNREEIDGVKLESTRIYQILAIYSTVASSLVLVVSLGAISFWMCSNGSLQCRICI

SEQ ID NO: 4270 - protein, 566 aa, synthetic construct
  REGION 1..566: note = hemagglutinin__InfluenzaA__ADD74528
MKAILVVLLYTFATANADTLCIGYHANNSTDTVDTVLEKNVTVTHSVNLLEDKHNGKLCKLRGVAPLHLGKCNIAGWILGNPECESLSTASSWSYIVETSSSDNGTCYPGDFINYEELREQLSSVSSFERFEIFPKTSSWPNHDSNKGVTAACPHAGAKSFYKNLIWLVKKGNSYPKLSKSYINDKGKEVLVLWGIHHPSTSADQQSLYQNADAYVFVGTSRYSKKFQPEIAIRPKVRDQEGRMNYYWTLVEPGDKITFEATGNLVVPRYAFAMERNAGSGIIISDTPVHDCNTTCQTPKGAINTSLPFQNIHPITIGKCPKYVKSTKLRLATGLRNVPSIQSRGLFGAIAGFIEGGWTGMVDGWYGYHHQNEQGSGYAADLKSTQNAIDKITNKVNSVIEKMNTQFTAVGKEFNHLEKRIENLNKKVDDGFLDIWTYNAELLVLLENERTLDYHDSNVKNLYEKVRSQLKNNAKEIGNGCFEFYHKCDNTCMESVKNGTYDYPKYSEEAKLNREEIDGVKLESTRIYQILAIYSTVASSLVLVVSLGAISFWMCSNGSLQCRICI

SEQ ID NO: 4271 - protein, 566 aa, synthetic construct
  REGION 1..566: note = hemagglutinin__InfluenzaA__ADD74538
MKAILVVLLYTFATANADTLCIGYHANNSTDTVDTVLEKNVTVTHSVNLLEDKHNGKLCRLRGVAPLHLGKCNIAGWILGNPECESLSTASSWSYIVETSSSDNGTCYPGDFIDYEELREQLSSVSSFERFEIFPKTSSWPNHDSNKGVTAACPHAGAKSFYKNLIWLVKKGNSYPKLSKSYINDKGKEVLVLWGIHHPSTSADQQSLYQNADAYVFVGTSRYSKKFKPEIAIRPKVRDQEGRMNYYWTLVEPGDKITFEATGNLVVPRYAFAMERNAGSGIIISDTPVYDCNTTCQTPKGAINTSLPFQNIHPITIGKCPKYVKSTKLRLATGLRNVPSIQSRGLFGAIAGFIEGGWTGMVDGWYGYHHQNEQGSGYAADLKSTQNAIDEITNKVNSVIEKMNTQFTAVGKEFNHLEKRIENLNKKVDDGFLDIWTYNAELLVLLENERTLDYHDSNVKNLYEKVRSQLKNNAKEIGNGCFEFYHKCDNTCMESVKNGTYDYPKYSEEAKLNREEIDGVKLESTRIYQILAIYSTVASSLVLVVSLGAISFWMCSNGSLQCRICI

SEQ ID NO: 4272 - protein, 566 aa, synthetic construct; identical to SEQ ID NO: 4266
  REGION 1..566: note = hemagglutinin__InfluenzaA__ADD74548

SEQ ID NO: 4273 - protein, 566 aa, synthetic construct; identical to SEQ ID NO: 3833
  REGION 1..566: note = hemagglutinin__InfluenzaA__ADD74558

SEQ ID NO: 4274 - protein, 566 aa, synthetic construct; identical to SEQ ID NO: 4221
  REGION 1..566: note = hemagglutinin__InfluenzaA__ADD74568

SEQ ID NO: 4275 - protein, 566 aa, synthetic construct
  REGION 1..566: note = hemagglutinin__InfluenzaA__ADD74578
MKAILVVLLYTFATANADTLCIGYHANNSTDTVDTVLEKNVTVTHSVNLLEDKHNGKLCKLRGVAPLHLGKCNIAGWILGNPECESLSTSSSWSYIVETSSSDNGTCYPGDFIDYEELREQLSSVSSFERFEIFPKTSSWPNHDSNKGVTAACPHAGAKSFYKNLIWLVKKGNSYPKLSKSYINDKGKEVLVLWGIHHPSTSTDQQSLYQNADAYVFVGTSRYSKKFKPEIAIRPKVRDQEGRMNYYWTLVEPGDKITFEATGNLVVPRYAFAMERNAGSGIIISDTPVHDCNTTCQTPKGAINTSLPFQNIHPITIGKCPKYVKSTKLRLATGLRNVPSIQSRGLFGAIAGFIEGGWTGMVDGWYGYHHQNEQGSGYAADLKSTQNAIDEITNKVNSVIEKMNTQFTAVGKEFNHLEKRIENLNKKVDDGFLDIWTYNAELLVLLENERTLDYHDSNVKNLYEKVRSQLKNNAKEIGNGCFEFYHKCDNTCMESVKNGTYDYPKYSEEAKLNREEIDGVKLESTRIYQILAIYSTVASSLVLVVSLGAISFWMCSNGSLQCRICI

SEQ ID NO: 4276 - protein, 566 aa, synthetic construct
  REGION 1..566: note = hemagglutinin__InfluenzaA__ADD74588
MKAILVVLLYTFATANADTLCIGYHANNSTDTVDTVLEKNVTVTHSVNLLEDKHNGKLCKLRGVAPLHLGKCNIAGWILGNPECESLSTASSWSYIVETSSSDNGTCYPGDFIDYEELREQLSSVSSFERFEIFPKTSSWPNHDSNKGVTAACPHAGAKSFYKNLIWLVKKGNSYPKLSKSYINDKGKEVLVLWGIHHPSTSDGQQSLYQNADAYVFVGTSRYSKKFKPEIAIRPKVRDQEGRMNYYWTLVEPGDKITFEATGNLVVPRYAFAMERNAGSGIIISDTPVHDCNTTCQTPKGAINTSLPFQNIHPITIGKCPKYVKSTKLRLATGLRNVPSIQSRGLFGAIAGFIEGGWTGMVDGWYGYHHQNEQGSGYAADLKSTQNAIDEITNKVNSVIEKMNTQFTAVGKEFNHLEKRIENLNKKVDDGFLDIWTYNAELLVLLENERTLDYHDSNVKNLYEKVRSQLKNNAKEIGNGCFEFYHKCDNTCMESVKNGTYDYPKYSKEAKLNREEIDGVKLESTRIYQILAIYSTVASSLVLVVSLGAISFWMCSNGSLQCRICI

SEQ ID NO: 4277 - protein, 566 aa, synthetic construct; identical to SEQ ID NO: 4221
  REGION 1..566: note = hemagglutinin__InfluenzaA__ADD74598

SEQ ID NO: 4278 - protein, 566 aa, synthetic construct; identical to SEQ ID NO: 4221
  REGION 1..566: note = hemagglutinin__InfluenzaA__ADD74608

SEQ ID NO: 4279 - protein, 566 aa, synthetic construct; identical to SEQ ID NO: 3833
  REGION 1..566: note = hemagglutinin__InfluenzaA__ADD74618

SEQ ID NO: 4280 - protein, 566 aa, synthetic construct
  REGION 1..566: note = hemagglutinin__InfluenzaA__ADD74628
MKAILVVLLYTFATANADTLCIGYHANNSTDTVDTILEKNVTVTHSVNLLEDKHNGKLCKLRGVAPLHLGKCNIAGWILGNPECESLSTASSWSYIVETSSSDNGTCYPGDFIDYEELREQLSSVSSFERFEIFPKTSSWPNHDSNKGVTAACPHAGAKSFYKNLIWLVKKGNSYPKLSKSYINDKGKEILVLWGIHHPSTSADQQSLYQNADAYVFVGTSRYSKKFKPEIAIRPKVRDQEGRMNYYWTLVEPGDKITFEATGNLVVPRYAFAMEKNAGSGIIISDTPVHDCNTTCQTPKGAINTSLPFQNIHPITIGKCPKYVKSTKLRLATGLRNVPSIQSRGLFGAIAGFIEGGWTGMVDGWYGYHHQNEQGSGYAADLKSTQNAIDEITNKVNSVIEKMNTQFTAVGKEFNHLEKRIENLNKKVDDGFLDIWTYNAELLVLLENERTLDYHDSNVKNLYEKVRSQLKNNAKEIGNGCFEFYHKCDNTCMESVKNGTYDYPKYSEEAKLNREEIDGVKLESTRIYQILAIYSTVASSLVLVVSLGAISFWMCSNGSLQCRICI

SEQ ID NO: 4281 - protein, 566 aa, synthetic construct; identical to SEQ ID NO: 3770
  REGION 1..566: note = hemagglutinin__InfluenzaA__ADD74648

SEQ ID NO: 4282 - protein, 566 aa, synthetic construct
  REGION 1..566: note = hemagglutinin__InfluenzaA__ADD74658
MKAILVVLLYTFATANADTLCIGYHANNSTDTVDTVLEKNVTVTHSVNLLEDKHNGKLCKLRGVAPLHLGKCNIAGWILGNPECESLSTASSWSYIVETSSSDNGTCYPGDFIDYEELREQLSSVSSFERFEIFPKTSSWPNHDSNKGVTAACPHAGAKSFYKNLIWLVKKGNSYPKLSKSYINDKGKEVLVLWGIHHPSTSADQQSLYQNADSYVFVGTSRYSKKFKPEIAIRPKVRDQEGRMNYYWTLVEPGDKITFEATGNLVVPRYAFAMERNAGSGIIISDTPVHDCNTTCQTPEGAINTSLPFQNIHPITIGKCPKYVKSTKLRLATGLRNVPSIQSRGLFGAIAGFIEGGWTGMVDGWYGYHHQNEQGSGYAADLKSTQNAIDEITNKVNSVIEKMNTQFTAVGKEFNHLEKRIENLNKKVDDGFLDIWTYNAELLVLLENERTLDYHDSNVKNLYEKVRSQLKNNAKEIGNGCFEFYHKCDNTCMESVKNGTYDYPKYSEEAKLNREEIDGVKLESTRIYQILAIYSTVASSLVLVVSLGAISFWMCSNGSLQCRICI

SEQ ID NO: 4283 - protein, 566 aa, synthetic construct; identical to SEQ ID NO: 4221
  REGION 1..566: note = hemagglutinin__InfluenzaA__ADD74668

SEQ ID NO: 4284 - protein, 566 aa, synthetic construct; identical to SEQ ID NO: 4261
  REGION 1..566: note = hemagglutinin__InfluenzaA__ADD74678

SEQ ID NO: 4285 - protein, 566 aa, synthetic construct; identical to SEQ ID NO: 4221
  REGION 1..566: note = hemagglutinin__InfluenzaA__ADD74688

SEQ ID NO: 4286 - protein, 566 aa, synthetic construct
  REGION 1..566: note = hemagglutinin__InfluenzaA__ADD74698
MKAILVVLLYTFATANADTLCIGYHANNSTDTVDTVLEKNVTVTHSVNLLEDKHNGKLCKLRGVAPLHLGKCNIAGWILGNPECESLSTASSWSYIVETSSSDNGTCYPGDFINYEELREQLSSVSSFERFEIFPKTSSWPNHDSNKGVTAACPHAGAKSFYKNLIWLVKKGNSYPKLSKSYINDKGKEVLVLWGIHHPSTSADQQSLYQNADAYVFVGTSRYSKKFKPEIAIRPKVRDQEGRMNYYWTLVEPGDKITFEATGNLVVPRYAFAMERNAGSGIIISDTPVHDCNTTCQTPKGAINTSLPFQNIHPITIGKCPKYVKSTKLRLATGLRNVPSIQSRGLFGAIAGFIEGGWTGMVDGWYGYHHQNEQGSGYAADLKSTQNAIDKITNKVNSVIEKMNTQFTAVGKEFNHLEKRIENLNKKVDDGFLDIWTYNAELLVLLENERTLDYHDSNVKNLYEKVRNQLKNNAKEIGNGCFEFYHKCDNTCMESVKNGTYDYPKYSEEAKLNREEIDGVKLESTRIYQILAIYSTVASSLVLVVSLGAISFWMCSNGSLQCRICI

SEQ ID NO: 4287 - protein, 566 aa, synthetic construct; identical to SEQ ID NO: 4221
  REGION 1..566: note = hemagglutinin__InfluenzaA__ADD74708

SEQ ID NO: 4288 - protein, 566 aa, synthetic construct
  REGION 1..566: note = hemagglutinin__InfluenzaA__ADD74728
MKAILVVLLYTFATANADTLCIGYHANNSTDTVDTVLEKNVTVTHSVNLLEDKHNGKLCKLRGVAPLHLGKCNIAGWILGNPECESLSTASSWSYIVETSSSDNGTCYPGDFIDYEELREQLSSVSSFERFEIFPKTSSWPDHDSNKGVTAACPHAGAKSFYKNLIWLVKKGNSYPKLSKSYINDKGKEVLVLWGIHHPSTSADQQSLYQNADAYVFVGTSRYSKKFKPEIAIRPKVRDQEGRMNYYWTLVEPGDKITFEATGNLVVPRYAFAMERNAGSGIIISDTPVHDCNTTCQTPKGAINTSLPFQNIHPITIGKCPKYVKSTKLRLATGLRNVPSIQSRGLFGAIAGFIEGGWTGMVDGWYGYHHQNEQGSGYAADLKSTQNAIDKITNKVNSVIEKMNTQFTAVGKEFNHLEKRIENLNKKVDDGFLDIWTYNAELLVLLENERTLDYHDSNVKNLYEKVRSQLKNNAKEIGNGCFEFYHKCDNTCMESVKNGTYDYPKYSEEAKLNREEIDGVKLESTRIYQILAIYSTVASSVVLVVSLGAISFWMCSNGSLQCRICI

SEQ ID NO: 4289 - protein, 566 aa, synthetic construct
  REGION 1..566: note = hemagglutinin__InfluenzaA__ADD74738
MKAILVVLLYTFATANADTLCIGYHANNSTDTVDTVLEKNVTVTHSVNLLEDKHNGKLCKLRGVAPLHLGKCNIAGWILGNPECESLSTARSWSYIVETSSSDNGTCYPGDFIDYEELREQLSSVSSFERFEIFPKTSSWPNHDSNKGVTAACPHAGAKSFYKNLIWLVKKGNSYPKLSKSYINDKGKEVLVLWGIHHPSTSADQQSLYQNADAYVFVGTSGYSKKFKPEIAIRPKVRDQEGRMNYYWTLVEPGDKITFEATGNLVVPRYAFAMERNAGSGIIISDTPVHDCNTTCQTPKGAINTSLPFQNIHPITIGKCPKYVKSTKLRLATGLRNVPSIQSRGLFGAIAGFIEGGWTGMVDGWYGYHHQNEQGSGYAADLKSTQNAIDKITNKVNSVIEKMNTQFTAVGKEFNHLEKRIENLNKKVDDGFLDIWTYNAELLVLLENERTLDYHDSNVKNLYEKVRSQLKNNAKEIGNGCFEFYHKCDNTCMESVKNGTYDYPKYSEEAKLNREEIDGVKLESTRIYQILAIYSTVASSLVLVVSLGAISFWMCSNGSLQCRICI

SEQ ID NO: 4290 - protein, 566 aa, synthetic construct; identical to SEQ ID NO: 3833
  REGION 1..566: note = hemagglutinin__InfluenzaA__ADD74748

SEQ ID NO: 4291 - protein, 566 aa, synthetic construct; identical to SEQ ID NO: 3833
  REGION 1..566: note = hemagglutinin__InfluenzaA__ADD74758

SEQ ID NO: 4292 - protein, 566 aa, synthetic construct
  REGION 1..566: note = hemagglutinin__InfluenzaA__ADD74768
MKAILVVLLYTFATANADTLCIGYHANNSTDTVDTVLEKNVTVTHSVNLLEDKHNGKLCKLRGVAPLHLGKCNIAGWILGNPECESLSTASSWSYIVETSSSDNGTCYPGDFIDYEELREQLSSVSSFERFEIFPKTSSWPNHDSNKGVTAACPHAGAKSFYKNLIWLVKKGNSYPKLSKSYINDKGKEVLVLWGIHHPSTSADQQSLYQNADAYVFVGTSRYSKKFKPEIAIRPKVRDQEGRMSYYWTLVEPGDKITFEATGNLVVPRYAFAMERNAGSGIIISDTPVHDCNTTCQTPKGAINTSLPFQNIHPITIGKCPKYVKSTKLRLATGLRNVPSIQSRGLFGAIAGFIEGGWTGMVDGWYGYHHQNEQGSGYAADLKSTQNAIDKITNKVNSVIEKMNTQFTAVGKEFNHLEKRIENLNKKVDDGFLDIWTYNAELLVLLENERTLDYHDSNVKNLYEKVRSQLKNNAKEIGNGCFEFYHKCDNTCMESVKNGTYDYPKYSEEAKLNREEIDGVKLESTRIYQILAIYSTVASSLVLVVSLGAISFWMCSNGSLQCRICI

SEQ ID NO: 4293 - protein, 566 aa, synthetic construct; identical to SEQ ID NO: 3833
  REGION 1..566: note = hemagglutinin__InfluenzaA__ADD74778

SEQ ID NO: 4294 - protein, 566 aa, synthetic construct; identical to SEQ ID NO: 4221
  REGION 1..566: note = hemagglutinin__InfluenzaA__ADD74788

SEQ ID NO: 4295 - protein, 566 aa, synthetic construct; identical to SEQ ID NO: 4221
  REGION 1..566: note = hemagglutinin__InfluenzaA__ADD74798

SEQ ID NO: 4296 - protein, 566 aa, synthetic construct
  REGION 1..566: note = hemagglutinin__InfluenzaA__ADD74808
MKAILVVLLYTFATANADTLCIGYHANNSTDTVDTVLEKNVTVTHSVNILEDKHNGKLCKLRGVAPLHLGKCNIAGWILGNPECESLSTASSWSYIVETSSSDNGTCYPGDFIDYEELREQLSSVSSFERFEIFPKTSSWPNHDSNKGVTAACPHAGAKSFYKNLIWLVKKGNSYPKLSKSYINDKGKEVLVLWGIHHPSTSADQQSLYQNADAYVFVGSSRYSKKFKPEIAIRPKVRDQEGRMNYYWTLVEPGDKITFEATGNLVVPRYAFAMERNAGSGIIISDTPVHDCNTTCQTPKGAINTSLPFQNIHPITIGKCPKYVKSTKLRLATGLRNVPSIQSRGLFGAIAGFIEGGWTGMVDGWYGYHHQNEQGSGYAADLKSTQNAIDEITNKVNSVIEKMNTQFTAVGKEFNHLEKRIENLNKKVDDGFLDIWTYNAELLVLLENERTLDYHDSNVKNLYEKVRSQLKNNAKEVGNGCFEFYHKCDNTCMESVKNGTYDYPKYSEEAKLNREEIDGVKLESTRIYQILAIYSTAASSLVLVVSLGAISFWMCSNGSLQCRICI

SEQ ID NO: 4297 - protein, 566 aa, synthetic construct
  REGION 1..566: note = hemagglutinin__InfluenzaA__ADD74818
MKAILVVLLYTFATANADTLCIGYHANNSTDTVDTVLEKNVTVTHSVNILEDKHNGKLCKLRGVAPLHLGKCNIAGWILGNPECESLSTASSWSYIVETSSSDNGTCYPGDFIDYEELREQLSSVSSFERFEIFPKTSSWPNHDSNKGVTAACPHAGAKSFYKNLIWLVKKGNSYPKLSKSYINDKGKEVLVLWGIHHPSTSADQQSLYQNADAYVFVGTSRYSKKFKPEIAIRPKVRDQEGRMNYHWTLVEPGDKITFEATGNLVVPRYAFAMERNAGSGIIISDTPVHDCNTTCQTPKGAINTSLPFQNIHPITIGKCPKYVKSTKLRLATGLRNVPSIQSRGLFGAIAGFIEGGWTGMVDGWYGYHHQNEQGSGYAADLKSTQNAIDEITNKVNSVIEKMNTQFTAVGKEFNHLEKRIENLNKKVDDGFLDIWTYNAELLVLLENERTLDYHDSNVKNLYEKVRSQLKNNAKEIGNGCFEFYHKCDNTCMESVKNGTYDYPKYSEEAKLNREEIDGVKLESTRIYQILAIYSTVASSLVLVVSLGAISFWMCSNGSLQCRICI

SEQ ID NO: 4298 - protein, 566 aa, synthetic construct
  REGION 1..566: note = hemagglutinin__InfluenzaA__ADD74838
MKAILVVLLYTFATANADTLCIGYHANNSTDTVDTVLEKNVTVTHSVNLLEDKHNGKLCKLRGVAPLHLGKCNIAGWILGNPECESLSTASSWSYIVETSSSDNGTCYPGDFINYEELREQLSSVSSFERFEIFPKTSSWPNHDSNKGVTAACPHAGAKSFYKNLIWLVKKGNSYPKLSKSYINDKGKEVLVLWGIHHPSTSADQQSLYQNADAYVFVGTSRYSKKFKPEIAIRPKVRDQEGRMNYYWTLVEPGDKITFEATGNLVVPRYAFAMERNAGSGIIISDTPVHDCNTTCQTPKGAINTSLPFQNVHPITIGKCPKYVKSTKLRLATGLRNVPSIQSRGLFGAIAGFIEGGWTGMVDGWYGYHHQNEQGSGYAADLKSTQNAIDKITNKVNSVIEKMNTQFTAVGKEFNHLEKRIENLNKKVDDGFLDIWTYNAELLVLLENERTLDYHDSNVKNLYEKVRSQLKNNAKEIGNGCFEFYHKCDNTCMESVKNGTYDYPKYSEEAKLNREEIDGVKLESTRIYQILAIYSTVASSLVLVVSLGAISFWMCSNGSLQCRICI

SEQ ID NO: 4299 - protein, 566 aa, synthetic construct
  REGION 1..566: note = hemagglutinin__InfluenzaA__ADD74848
MKAILVVLLYTFATANADTLCIGYHANNSTDTVDTVLEKNVTVTHSVNLLEDKHNGKLCKLRGVAPLHLGKCNIAGWILGNPECESLSTASSWSYIVETSSSDNGTCYPGDFIDYEELREQLSSVSSFERFEIFPKTSSWPNHDSNKGVTAACPHAGAKSFYKNLIWLVKKGNSYPKLSKSYINDKGKEVLVLWGIHHPSTSADQQSLYQNADAYVFVGTSRYSKKFKPEIAIRPKVRDQEGRMNYYWTLVEPGDKITFEATGNLVVPRYAFAMERNAGSGIIISDTPVHDCNTTCQTPKGAINTSLPFQNIHPITIGKCPKYVKSTKLRLATGLRNVPSIQSRGLFGAIAGFIEGGWTGMVDGWYGYHHQNEQGSGYAADLKSTQNAIDKITNKVNSVIEKMNTQFTAVGKEFNHLEKRIENLNKKVDDGFLDIWTYNAELLVLLENERTLDYHDSNVKNLYEKVRSQLKNNAKEIGNGCFEFYHKCDNTCMESVKNGTYDYPKYSEEAKLNREEIDGVKLESTRIYQILAIYSTVASSLVLIVSLGAISFWMCSNGSLQCRICI

SEQ ID NO: 4300 - protein, 566 aa, synthetic construct
  REGION 1..566: note = hemagglutinin__InfluenzaA__ADD74858
MKAILVVLLYTFATANADTLCIGYHANNSTDTVDTVLEKNVTVTHSVNLLEDKHNGKLCKLRGVAPLHLGKCNIAGWILGNPECESLSTASSWSYIVETSSSDNGTCYPGDFINYEELREQLSSVSSFERFEIFPKTSSWPNHDSNKGVTAACPHAGTKSFYKNLIWLVKKGNSYPKLSKSYINDKGKEVLVLWGIHHPSTSADQQSLYQNADAYVFVGTSRYSKKFKPEIAIRPKVRDQEGRMNYYWTLVEPGDKITFEATGNLVVPRYAFAMERNAGSGIIISDTPVHDCNTTCQTPKGAINTSLPFQNIHPITIGKCPKYVKSTKLRLATGLRNVPSIQSRGLFGAIAGFIEGGWTGMVDGWYGYHHQNEQGSGYAADLKSTQNAIDKITNKVNSVIEKMNTQFTAVGKEFNHLEKRIENLNKKVDDGFLDIWTYNAELLVLLENERTLDYHDSNVKNLYEKVRSQLKNNAKEIGNGCFEFYHKCDNTCMESVKNGTYDYPKYSEEAKLNREEIDGVKLESTRIYQILAIYSTVASSLVLVVSLGAISFWMCSNGSLQCRICI

SEQ ID NO: 4301 - protein, 566 aa, synthetic construct; identical to SEQ ID NO: 4221
  REGION 1..566: note = hemagglutinin__InfluenzaA__ADD74868

SEQ ID NO: 4302 - protein, 566 aa, synthetic construct; identical to SEQ ID NO: 4221
  REGION 1..566: note = hemagglutinin__InfluenzaA__ADD74878

SEQ ID NO: 4303 - protein, 566 aa, synthetic construct
  REGION 1..566: note = hemagglutinin__InfluenzaA__ADD74888
MKAILVVLLYTFATANADTLCIGYHANNSTDTVDTVLEKNVTVTHSVDLLEDKHNGKLCKLRGVAPLHLGKCNIAGWILGNPECESLSTASSWSYIVETSSSDNGTCYPGDFIDYEELREQLSSVSSFERFEIFPKTNSWPNHDSNKGVTAACPHAGAKSFYKNLIWLVKKGNSYPKLSKSYINDKGKEVLVLWGIHHPSTSADQQSLYQNADAYVFVGTSRYSKKFKPEIAIRPKVRDQEGRMNYYWTLVEPGDKITFEATGNLVVPRYAFAMERNAGSGIIISDTPVHDCNTTCQTPKGAINTSLPFQNIHPITIGKCPKYVKSTKLRLATGLRNVPSIQSRGLFGAIAGFIEGGWTGMVDGWYGYHHQNEQGSGYAADLKSTQNAIDEITNKVNSVIEKMNTQFTAVGKEFNHLEKRIENLNKKVDDGFLDIWTYNAELLVLLENERTLDYHDSNVKNLYEKVRSQLKNNAKEIGNGCFEFYHKCDNTCMESVKNGTYDYPKYSEEAKLNREEIDGVKLESTRIYQILAIYSTVASSLVLVVSLGAISFWMCSNGSLQCRICI

SEQ ID NO: 4304 - protein, 566 aa, synthetic construct
  REGION 1..566: note = hemagglutinin__InfluenzaA__ADD74898
MKAILVVLLYTFTTANADTLCIGYHANNSTDTVDTVLEKNVTVTHSVNLLEDKHNGKLCKLRGVAPLHLGKCNIAGWILGNPECESLSTASSWSYIVETSSSDNGTCYPGDFINYEELREQLSSVSSFERFEIFPKTSSWPNHDSNKGVTAACPHAGAKSFYKNLIWLVKKGNSYPKLSKSYINDKGKEVLVLWGIHHPSTSADQQSLYQNADAYVFVGTSRYSKKFKPEIAIRPKVRDQEGRMNYYWTLVEPGDKITFEATGNLVVPRYAFAMERNAGSGIIISDTPVHDCNTTCQTPKGAINTSLPFQNIHPITIGKCPKYVKSTKLRLATGLRNVPSIQSRGLFGAIAGFIEGGWTGMVDGWYGYHHQNEQGSGYAADLKSTQNAIDKITNKVNSVIEKMNTQFTAVGKEFNHLEKRIENLNKKVDDGFLDIWTYNAELLVLLENERTLDYHDSNVKNLYEKVRSQLKNNAKEIGNGCFEFYHKCDNTCMESVKNGTYDYPKYSEEAKLNREEIDGVKLESTRIYQILAIYSTVASSLVLVVSLGAISFWMCSNGSLQCRICI

SEQ ID NO: 4305 - protein, 566 aa, synthetic construct
  REGION 1..566: note = hemagglutinin__InfluenzaA__ADD74908
MKAILVVLLYTFATANADTLCIGYHANNSTDTVDTVLEKNVTVTHSVNLLEDKHNGKLCKLRGVAPLHLGKCNIAGWILGNPECESLSTASSWSYIVETSSSDNGTCYPGDFIDYEELREQLSSVSSFERFEIFPKTSSWPNHDSNKGVTAACPHAGAKSFYKNLIWLVKKGNSYPKLSKSYINDKGKEVLVLWGIHHPSTSADQQSLYQNADAYVFVGTSRYSKKFKPEIAIRPKVRDQEGRMNYYWTLVEPGDKITFEATGNLVVPRYAFTMERNAGSGIIISDTPVHDCNTTCQTPKGAINTSLPFQNIHPITIGKCPKYVKSTKLRLATGLRNVPSIQSRGLFGAIAGFIEGGWTGMVDGWYGYHHQNEQGSGYAADLKSTQNAIDEITNKVNSVIEKMNTQFTAVGKEFNHLEKRIENLNKKVDDGFLDIWTYNAELLVLLENERTLDYHDSNVKNLYEKVRSQLKNNAKEIGNGCFEFYHKCDNTCMESVKNGTYDYPKYSEEAKLNREEIDGVKLESTRIYQILAIYSTVASSLVLVVSLGAISFWMCSNGSLQCRICI

SEQ ID NO: 4306 - protein, 566 aa, synthetic construct; identical to SEQ ID NO: 4299
  REGION 1..566: note = hemagglutinin__InfluenzaA__ADD74918

SEQ ID NO: 4307 - protein, 566 aa, synthetic construct; identical to SEQ ID NO: 4221
  REGION 1..566: note = hemagglutinin__InfluenzaA__ADD74928

SEQ ID NO: 4308 - protein, 566 aa, synthetic construct; identical to SEQ ID NO: 4299
  REGION 1..566: note = hemagglutinin__InfluenzaA__ADD74938

SEQ ID NO: 4309 - protein, 566 aa, synthetic construct
  REGION 1..566: note = hemagglutinin__InfluenzaA__ADD74958
MKAILVVLLYTFATANADTLCIGYHANNSTDTVDTVLEKNVTVTHSVNLLENKHNGKLCKLRGVAPLHLGKCNIAGWILGNPECESLSTASSWSYIVETSSSDNGTCYPGDFINYEELREQLSSVSSFERFEIFPKTSSWPNHDSNKGVTAACPHAGAKSFYKNLIWLVKKGNSYPKLSKSYINDKGKEVLVLWGIHHPSTSADQQSLYQNADAYVFVGTSRYSKKFKPEIAIRPKVRDQEGRMNYYWTLVEPGDKITFEATGNLVVPRYAFAMERNAGSGIIISDTPVHDCNTTCQTPKGAINTSLPFQNIHPITIGKCPKYVKSTKLRLATGLRNVPSIQSRGLFGAIAGFIEGGWTGMVDGWYGYHHQNEQGSGYAADLKSTQNAIDKITNKVNSVIEKMNTQFTAVGKEFNHLEKRIENLNKKVDDGFLDIWTYNAELLVLLENERTLDYHDSNVKNLYEKVRSQLKNNAKEIGNGCFEFYHKCDNTCMESVKNGTYDYPKYSEEAKLNREEIDGVKLESTRIYQILAIYSTVASSLVLVVSLGAISFWMCSNGSLQCRICI

SEQ ID NO: 4310 - protein, 566 aa, synthetic construct; identical to SEQ ID NO: 3833
  REGION 1..566: note = hemagglutinin__InfluenzaA__ADD74968

SEQ ID NO: 4311 - protein, 566 aa, synthetic construct
  REGION 1..566: note = hemagglutinin__InfluenzaA__ADD74998
MKAILVVLLYTFATANADTLCIGYHANNSTDTVDTVLEKNVTVTHSVNLLEDKHNGKLCKLRGVAPLHLGKCNIAGWILGNPECESLSTASSWSYIVETSSSDNGTCYPGDFIDYEELREQLSSVSSFERFEIFPKTSSWPNHDSNKGVTAACPHAGAKSFYKNLIWLVKKGNSYPKLSKSYINDKGKEVLVLWGIHHPSTSADQQSLYQNADAYVFVGTSRYSKKFKPEIAIRPKVRDQEGRMNYYWTLVEPGDKITFEATGNLVVPRYAFAMERNAGSGIIISDTPVHDCNTTCQTPKGAINTSLPFQNIHPITIGKCPKYVKSTKLRLATGLRNVPSIQSRGLFGAIAGFIEGGWTGMVDGWYGYHHQNERGSGYAADLKSTQNAIDKITNKVNSVIEKMNTQFTAVGKEFNHLEKRIENLNKKVDDGFLDIWTYNAELLVLLENERTLDYHDSNVKNLYEKVRSQLKNNAKEIGNGCFEFYHKCDNTCMESVKNGTYDYPKYSEEAKLNREEIDGVKLESTRIYQILAIYSTVASSLVLVVSLGAISFWMCSNGSLQCRICI

SEQ ID NO: 4312 - protein, 566 aa, synthetic construct; identical to SEQ ID NO: 3833
  REGION 1..566: note = hemagglutinin__InfluenzaA__ADD75008

SEQ ID NO: 4313 - protein, 566 aa, synthetic construct; identical to SEQ ID NO: 3833
  REGION 1..566: note = hemagglutinin__InfluenzaA__ADD75018

SEQ ID NO: 4314 - protein, 566 aa, synthetic construct; identical to SEQ ID NO: 3833
  REGION 1..566: note = hemagglutinin__InfluenzaA__ADD75028

SEQ ID NO: 4315 - protein, 566 aa, synthetic construct; identical to SEQ ID NO: 3770
  REGION 1..566: note = hemagglutinin__InfluenzaA__ADD75058

SEQ ID NO: 4316 - protein, 566 aa, synthetic construct; identical to SEQ ID NO: 4089
  REGION 1..566: note = hemagglutinin__InfluenzaA__ADD75088

SEQ ID NO: 4317 - protein, 566 aa, synthetic construct; identical to SEQ ID NO: 2669
  REGION 1..566: note = hemagglutinin__InfluenzaA__ADD75098

SEQ ID NO: 4318 - protein, 566 aa, synthetic construct
  REGION 1..566: note = hemagglutinin__InfluenzaA__ADD75108
MKAILVVLLYTFATANADTLCIGYHANNSTDTVDTVLEKNVTVTHSVNLLEDKHNGKLCKLRGVAPLHLGKCNIAGWILGNPECESLSTASSWSYIVETSSSDNGTCYPGDFIDYEELREQLSSVSSFERFEIFPKTSSWPNHDSNKGVTAACPHAGAKSFYKNLIWLVKKGNSYPKLSKSYINDKGKEVLVLWGIHHPSTSADQQSLYQNADAYVFVGTSRYSKKFKPEIAIRPKVRDQEGRMNYYWTLVEPGDKITFEATGNLVVPRYAFAMERNAGSGIIISDTPVHDCNTTCQTPKGAINTSLPFQNIHPITIGKCPKYVKSTKLRLATGLRNIPSIQSRGLFGAIAGFIEGGWTGMVDGWYGYHHQNEQGSGYAADLKSTQNAIDKITNKVNSVIEKMNTQFTAVGKEFNHLEKRIENLNKKVDDGFLDIWTYNAELLVLLENERTLDYHDSNVKNLYEKVRSQLKNNAKEIGNGCFEFYHKCDNTCMESVKNGTYDYPKYSEEAKLNREEIDGVKLESTRIYQILAIYSTVASSLVLVVSLGAISFWMCSNGSLQCRICI

SEQ ID NO: 4319 - protein, 566 aa, synthetic construct; identical to SEQ ID NO: 2669
  REGION 1..566: note = hemagglutinin__InfluenzaA__ADD75118

SEQ ID NO: 4320 - protein, 566 aa, synthetic construct; identical to SEQ ID NO: 3116
  REGION 1..566: note = hemagglutinin__InfluenzaA__ADD75128

SEQ ID NO: 4321 - protein, 566 aa, synthetic construct; identical to SEQ ID NO: 2669
  REGION 1..566: note = hemagglutinin__InfluenzaA__ADD75138

SEQ ID NO: 4322 - protein, 566 aa, synthetic construct; identical to SEQ ID NO: 3833
  REGION 1..566: note = hemagglutinin__InfluenzaA__ADD75148

SEQ ID NO: 4323 - protein, 566 aa, synthetic construct; identical to SEQ ID NO: 2669
  REGION 1..566: note = hemagglutinin__InfluenzaA__ADD75158

SEQ ID NO: 4324 - protein, 566 aa, synthetic construct
  REGION 1..566: note = hemagglutinin__InfluenzaA__ADD84494
MKAILVVLLYTFATANADTLCIGYHANNSTDTVDTVLEKNVTVTHSVNLLEDKHNGKLCKLRGVAPLHLGKCNIAGWILGNPECESLSTASSWSYIVETSSSDNGTCYPGDFIDYEELREQLSSVSSFERFEIFPKISSWPNHDPNKGVTAACPHAGAKSFYKNLIWLVKKGNSYPKLSKSYINDKGKEVLVLWGIHHPSTSADQQSLYQNADAYVFVGTSRYSKKFKPEIAIRPKVRDQEGRMNYYWTLVEPGDKITFEATGNLVVPRYAFAMERNAGSGIIISDTPVHGCNTTCQTPKGAINTSLPFQNIHPITIGKCPKYVKSTKLRLATGLRNVPSIQSRGLFGAIAGFIEGGWTGMVDGWYGYHHQNEQGSGYAADLKSTQNAIDEITNKVNSVIEKMNTQFTAVGKEFNHLEKRIENLNKKVDDGFLDIWTYNAELLVLLENERTLDYHDSNVKNLYEKVRSQLKNNAKEIGNGCFEFYHKCDNTCMESVKNGTYDYPKYSEEAKLNREEIDGVKLESTRIYQILAIYSTVASSLVLVVSLGAISFWMCSNGSLQCRICI

SEQ ID NO: 4325 - protein, 566 aa, synthetic construct
  REGION 1..566: note = hemagglutinin__InfluenzaA__ADD84495
MKAILVVLLYTFATANADTLCIGYHANNSTDTVDTVLEKNVTVTHSVNLLEDKHNGKLCKLRGVAPLHLGKCNIAGWILGNPECESLSTASSWSYIVETSSSDNGTCYPGDFIDYEELREQLSSVSSFERFEIFPKISSWPNHDPNKGVTAACPHAGAKSFYKNLIWLVKKGNSYPKLSKSYINDKGKEVLVLWGIHHPSTSADQQSLYQNADAYVFVGTSRYSKKFKPEIAIRPKVRDQEGRMNYYWTLVEPGDKITFEATGNLVVPRYAFAMERNAGSGIIISDTPVHDCNTTCQTPKGAINTSLPFQNIHPITIGKCPKYVKSTKLRLATGLRNVPSIQSRGLFGAIAGFIEGGWTGMVDGWYGYHHQNEQGSGYAADLKSTQNAIDEITNKVNSVIEKMNTQFTAVGKEFNHLEKRIENLNKKVDDGFLDIWTYNAELLVLLENERTLDYHDSNVKNLYEKVRSQLKNNAKEIGNGCFEFYHKCDNTCMESVKNGTYDYPKYSEEAKLNREEIDGVKLESTRIYQILAIYSTVASSLVLVVSLGAISFWMCSNGSLQCRICI

SEQ ID NO: 4326 - protein, 566 aa, synthetic construct
  REGION 1..566: note = hemagglutinin__InfluenzaA__ADD84496
MKAILVVLLYTFATANADTLCIGYHANNSTDTVDTVLEKNVTVTHSVNLLEDKHNGKLCKLRGVAPLHLGKCNIAGWILGNPECESLSTASSWSYIVETSSSDNGTCYPGDFIDYEELREQLSSVSSFERFEIFPKISSWPNHDPNKGVTAACPHAGAKSFYKNLIWLVKKGNSYPKLSKSYINDKGKEVLVLWGIHHPSTSADQQSLYQNADAYVFVGSSRYSKKFKPEIAIRPKVRDQEGRMNYYWTLVEPGDKITFEATGNLVVPRYAFAMERNAGSGIIISDTPVHDCNTTCQTPKGAINTSLPFQNIHPITIGKCPKYVKSTKLRLATGLRNVPSIQSRGLFGAIAGFIEGGWTGMVDGWYGYHHQNEQGSGYAADLKSTQNAIDEITNKVNSVIEKMNTQFTAVGKEFNHLEKRIENLNKKVDDGFLDIWTYNAELLVLLENERTLDYHDSNVKNLYEKVRSQLKNNAKEIGNGCFEFYHKCDNTCMESVKNGTYDYPKYSEEAKLNREEIDGVKLESTRIYQILAIYSTVASSLVLVVSLGAISFWMCSNGSLQCRICI

SEQ ID NO: 4327 - protein, 566 aa, synthetic construct; identical to SEQ ID NO: 4325
  REGION 1..566: note = hemagglutinin__InfluenzaA__ADD84497

SEQ ID NO: 4328 - protein, 566 aa, synthetic construct
  REGION 1..566: note = hemagglutinin__InfluenzaA__ADD84498
MKAILVVLLYTFATANADTLCIGYHANNSTDTVVTVLEKNVTVTHSVNLLEDKHNGKLCKLRGVAPLHLGKCNIAGWILGNPECESLSTASSWSYIVETSSSDNGTCYPGDFIDYEELREQLSSVSSFERFEIFPKISSWPNHDPNKGVTAACPHAGAKSFYKNLIWLVKKGNSYPKLSKSYINDKGKEVLVLWGIHHPSTSADQQSLYQNADAYVFVGSSRYSKKFKPEIAIRPKVRDQEGRMNYYWTLVEPGDKITFEATGNLVVPRYAFAMERNAGSGIIISDTPVHDCNTTCQTPKGAINTSLPFQNIHPITIGKCPKYVKSTKLRLATGLRNVPSIQSRGLFGAIAGFIEGGWTGMVDGWYGYHHQNEQGSGYAADLKSTQNAIDEITNKVNSVIEKMNTQFTAVGKEFNHLEKRIENLNKKVDDGFLDIWTYNAELLVLLENERTLDYHDSNVKNLYEKVRSQLKNNAKEIGNGCFEFYHKCDNTCMESVKNGTYDYPKYSEEAKLNREEIDGVKLESTRIYQILAIYSTVASSLVLVVSLGAISFWMCSNGSLQCRICI

SEQ ID NO: 4329 - protein, 566 aa, synthetic construct; identical to SEQ ID NO: 4325
  REGION 1..566: note = hemagglutinin__InfluenzaA__ADD84499

SEQ ID NO: 4330 - protein, 566 aa, synthetic construct
  REGION 1..566: note = hemagglutinin__InfluenzaA__ADD92535
MKAILVVLLYTFATANADTLCIGYHANNSTDTVDTVLEKNVTVTHSVNLLEDKHNGKLCKLRGVAPLHLGKCNIAGWILGNPECESLSTASSWSYIVETSSSDNGTCYPGDFIDYEELREQLSSVSSFERFEIFPKTSSWPNHDSNKGVTAACPHAGAKSFYKNLIWLVKKGNSYPKLSKSYINDKGKEVLVLWGIHHPSTSADQQSLYQNADAYVFVGTSRYSKKFKPEIAIRPKVRDREGRMNYYWTLVEPGDKITFEATGNLVVPRYAFAMERNAGSGIIISDTPVHDCNTTCQTPKGAINTSLPFQNIHPITIGKCPKYVKSTKLRLATGLRNVPSIQSRGLFGAIAGFIEGGWTGMVDGWYGYHHQNEQGSGYAADLKSTQNAIDEITNRVNSVIEKMNTQFTAVGKEFNHLEKRIENLNKKVDGGFLDIWTYNAELLVLLENERTLDYHDSNVKNLYEKVRSQLKNNAKEIGNGCFEFYHKCDNTCMESVKNGTYDYPKYSEEAKLNREEIDGVKLESTRIYQILAIYSTVASSLVLVVSLGAISFWMCSNGSLQCRICI

SEQ ID NO: 4331 - protein, 566 aa, synthetic construct; identical to SEQ ID NO: 4257
  REGION 1..566: note = hemagglutinin__InfluenzaA__ADD96766

SEQ ID NO: 4332 - protein, 566 aa, synthetic construct; identical to SEQ ID NO: 2849
  REGION 1..566: note = hemagglutinin__InfluenzaA__ADD96776

SEQ ID NO: 4333 - protein, 566 aa, synthetic construct; identical to SEQ ID NO: 2849
  REGION 1..566: note = hemagglutinin__InfluenzaA__ADD96786

SEQ ID NO: 4334 - protein, 566 aa, synthetic construct; identical to SEQ ID NO: 4154
  REGION 1..566: note = hemagglutinin__InfluenzaA__ADD96796

SEQ ID NO: 4335 - protein, 566 aa, synthetic construct
  REGION 1..566: note = hemagglutinin__InfluenzaA__ADD96806
MKAILVVLLYTLATANADTLCIGYHANNSTDTVDTVLEKNVTVTHSVNLLEDKHNGKLCKLRGVAPLHLGKCNIAGWILGNPECESLSTASSWSYIVETSSSDNGTCYPGDFIDYEELREQLSSVSSFERFEIFPKTSSWPNHDSNKGVTAACPHAGAKSFYKNLIWLVKKGNSYPKLSKSYINDKGKEVLVLWGIHHPSTSADQQSLYQNADAYVFVGTSRYSKKFKPEIAIRPKVRDQEGRMNYYWTLVEPGDKITFEATGNLVVPRYAFAMERNAGSGIIISDTPVHDCNTTCQTPKGAINTSLPFQNIHPITIGKCPKYVKSTKLRLATGLRNVPSIQSRGLFGAIAGFIEGGWTGMVDGWYGYHHQNEQGSGYAADLKSTQNAIDEITNKVNSVIEKMNTQFTAVGKEFNHLEKRIENLNKKVDDGFLDIWTYNAELLVLLENERTLDYHDSNVKNLYEKVRSQLKNNAKEIGNGCFEFYHKCDNTCMESVKNGTYDYPKYSEEAKLNREEIDGVKLESTRIYQILAIYSTVASSLVLVVSLGAISFWMCSNGSLQCRICI

SEQ ID NO: 4336 - protein, 566 aa, synthetic construct; identical to SEQ ID NO: 3833
  REGION 1..566: note = hemagglutinin__InfluenzaA__ADD96816

SEQ ID NO: 4337 - protein, 566 aa, synthetic construct
  REGION 1..566: note = hemagglutinin__InfluenzaA__ADD96826
MKAILVVLLYTFATANADTLCIGYHANNSTDTVDTVLEKNVTVTHSVNLLEDKHNGKLCKLRGVAPLHLGKCNIAGWILGNPECESLSTASSWSYIVETSSSDNGTCYPGDFIDYEELREQLSSVSSFERFEIFPKTSSWPNHDSNKGVTAACPHAGAKSFYKNLIWLVKKGNSYPKLSKSYINDKGKEVLVLWGIHHPSTSADQQSLYQNADAYVFVGTSRYSKKFKPEIAIRPKVMDQEGRMNYYWTLVEPGDKITFEATGNLVVPRYAFAMERNAGSGIIISDTPVHDCNTTCQTPKGAINTSLPFQNIHPITIGKCPKYVKSTKLRLATGLRNVPSIQSRGLFGAIAGFIEGGWTGMVDGWYGYHHQNEQGSGYAADLKSTQNAIDEITNKVNSVIEKMNTQFAAVGKEFNHLEKRIENLNKKVDDGFLDIWTYNAELLVLLENERTLDYHDSNVKNLYEKVRSQLKNNAKEIGNGCFEFYHKCDNTCMESVKNGTYDYPKYSEEAKLNREEIDGVKLESTRIYQILAIYSTVASSLVLVVSLGAISFWMCSNGSLQCRICI

SEQ ID NO: 4338 - protein, 566 aa, synthetic construct; identical to SEQ ID NO: 2669
  REGION 1..566: note = hemagglutinin__InfluenzaA__ADD96836

SEQ ID NO: 4339 - protein, 566 aa, synthetic construct; identical to SEQ ID NO: 2669
  REGION 1..566: note = hemagglutinin__InfluenzaA__ADD96846

SEQ ID NO: 4340 - protein, 566 aa, synthetic construct; identical to SEQ ID NO: 4221
  REGION 1..566: note = hemagglutinin__InfluenzaA__ADD96856

SEQ ID NO: 4341 - protein, 566 aa, synthetic construct; identical to SEQ ID NO: 3022
  REGION 1..566: note = hemagglutinin__InfluenzaA__ADD96886

SEQ ID NO: 4342 - protein, 566 aa, synthetic construct; identical to SEQ ID NO: 4296
  REGION 1..566: note = hemagglutinin__InfluenzaA__ADD96896

SEQ ID NO: 4343 - protein, 566 aa, synthetic construct; identical to SEQ ID NO: 3833
  REGION 1..566: note = hemagglutinin__InfluenzaA__ADD96906

SEQ ID NO: 4344 - protein, 566 aa, synthetic construct; identical to SEQ ID NO: 3833
  REGION 1..566: note = hemagglutinin__InfluenzaA__ADD96916

SEQ ID NO: 4345 - protein, 566 aa, synthetic construct; identical to SEQ ID NO: 3833
  REGION 1..566: note = hemagglutinin__InfluenzaA__ADD96926

SEQ ID NO: 4346 - protein, 566 aa, synthetic construct
  REGION 1..566: note = hemagglutinin__InfluenzaA__ADD96936
MKAILVVLLYTFATANADTLCIGYHANNSTDTVDTVLEKNVTVTHSVNILEDKHNGKLCKLRGVAPLHLGKCNIAGWILGNPECESLSTASSWSYIVETSSSDNGTCYPGDFIDYEELREQLSSVSSFERFEIFPKTSSWPNHDSNKGVTAACPHAGAKSFYKNLIWLIKKGNSYPKLSKSYINDKGKEVLVLWGIHHPSTSADQQSLYQNADAYVFVGTSRYSKKFKPEIAIRPKVRDQEGRMNYYWTLVEPGDKITFEATGNLVVPRYAFAMERNAGSGIIISDTPVHDCNTTCQTPKGAINTSLPFQNIHPITIGKCPKYVKSTKLRLATGLRNVPSIQSRGLFGAIAGFIEGGWTGMVDGWYGYHHQNEQGSGYAADLKSTQNAIDEITNKVNSVIEKMNTQFTAVGKEFNHLEKRIENLNKKVDDGFLDIWTYNAELLVLLENERTLDYHDSNVKNLYEKVRSQLKNNAKEIGNGCFEFYHKCDNTCMESVKNGTYDYPKYSEEAKLNREEIDGVKLESTRIYQILAIYSTVASSLVLVVSLGAISFWMCSNGSLQCRICI

SEQ ID NO: 4347 - protein, 566 aa, synthetic construct
  REGION 1..566: note = hemagglutinin__InfluenzaA__ADD96946
MKAILVVLLYTFATANADTLCIGYHANNSTDTVDTVLEKNVTVTHSVNLLEDKHNGKLCKLRGVAPLHLGKCNIAGWILGNPECESLSTASSWSYIVETSSSDNGTCYPGDFIDYEELREQLSSVSSFKRFEIFPKTSSWPNHDSNKGVTAACPHAGAKSFYKNLIWLVKKGNSYPKLSKSYINDKGKEVLVLWGIHHPSTSADQQSLYQNADAYVFVGTSRYSKKFKPEIAIRPKVRDQEGRMNYYWTLVEPGDKITFEATGNLVVPRYAFAMERNAGSGIIISDTPVHDCNTTCQTPKGAINTSLPFQNIHPITIGECPKYVKSTKLRLATGLRNVPSIQSRGLFGAIAGFIEGGWTGMVDGWYGYHHQNEQGSGYAADLKSTQNAIDKITNKVNSVIEKMNTQFTAVGKEFNHLEKRIENLNKKVDDGFLDIWTYNAELLVLLENERTLDYHDSNVKNLYEKVRSQLKNNAKEIGNGCFEFYHKCDNTCMESVKNGTYDYPKYSEEAKLNREEIDGVKLESTRIYQILAIYSTVASSLVLVVSLGAISFWMCSNGSLQCRICI

SEQ ID NO: 4348 - protein, 566 aa, synthetic construct
  REGION 1..566: note = hemagglutinin__InfluenzaA__ADD96956
MKAILVVLLYTFATANADTLCIGYHANNSTDTVDTVLEKNVTVTHSVNLLEDKHNGKLCKLRGVAPLHLGKCNIAGWILGNPECESLSTASSWSYIVETSSSDNGTCYPGDFIDYEELREQLSSVSSFERFEIFPKTSSWPNHDSNKGVTAACPHAGAKSFYKNLIWLVKKGNSYPKLSKSYINDKGKEVLVLWGIHHPSTSADQQSLYQNADAYVFVGTSRYSKKFKPEIAIRPKVREQEGRMNYYWTLVKPGDKITFEATGNLVVPRYAFAMERNAGSGIIISDTPVHDCNTTCQTPKGAINTSLPFQNIHSITIGKCPKYVKSTKLRLATGLRNVPSIQSRGLFGAIAGFIEGGWTGMVDGWYGYHHQNEQGSGYAADLKSTQNAIDEITNKVNSVIEKMNTQFTAVGKEFNHLEKRIENLNKKVDDGFLDIWTYNAELLVLLENERTLDYHDSNVKNLYEKVRSQLKNNAKEIGNGCFEFYHKCDNTCMESVKNGTYDYPKYSEEAKLNREEIDGVKLESTRIYQILAIYSTVASSLVLVVSLGAISFWMCSNGSLQCRICI

SEQ ID NO: 4349 - protein, 566 aa, synthetic construct; identical to SEQ ID NO: 2669
  REGION 1..566: note = hemagglutinin__InfluenzaA__ADD96976

SEQ ID NO: 4350 - protein, 566 aa, synthetic construct; identical to SEQ ID NO: 2669
  REGION 1..566: note = hemagglutinin__InfluenzaA__ADD96986

SEQ ID NO: 4351 - protein, 566 aa, synthetic construct
  REGION 1..566: note = hemagglutinin__InfluenzaA__ADD97035
MKAILVVLLYTFATANADTLCIGYHANNSTDTVDTVLEKNVTVTHSVNLLEDKHNGKLCKLRGVAPLHLGKCNIAGWILGNPECESLSTASSWSYIVETSSSDNGTCYPGDFIDYEELREQLSSVSSFERFEIFPKTSSWPNHDSNKGVTAACPHAGAKSFYKNLIWLVKKGNSYPKLSKSYINDKGKEVLVLWGIHHPSTSADQQSLYQNADAYVFVGTSRYSKKFKPEIAIRPKVRDQEGRMNYYWTLVEPGDKITFEATGNLVVPRYAFAMERNAGSGIIISDTPVHDCNTTCQTPKGAINTSLPFQNIHPITIGKCPKYVKSTKLRMATGLRNVPSIQSRGLFGAIAGFIEGGWTGMVDGWYGYHHQNEQGSGYAADLKSTQNAIDEITNKVNSVIEKMNTQFTAVGKEFNHLEKRIENLNKKVDDGFLDIWTYNAELLVLLENERTLDYHDSNVKNLYEKVRSQLKNNAKEIGNGCFEFYHKCDNTCMESVKNGTYDYPKYSEEAKLNREEIDGVKLESTRIYQILAIYSTVASSLVLVVSLGAISFWMCSNGSLQCRICI

SEQ ID NO: 4352 - protein, 566 aa, synthetic construct
  REGION 1..566: note = hemagglutinin__InfluenzaA__ADD97045
MKAILVVLLYTFATANADTLCIGYHANNSTDTVDTVLEKNVTVTHSVNLLEDKHNGKLCKLRGVAPLHLGKCNIAGWILGNPECESLSTASSWSYIVETSSSDNGTCYPGDFTDYEELREQLSSVSSFERFEIFPKTSSWPNHDSNKGVTAACPHAGAKSFYKNLIWLVKKGNSYPKLSKSYINDKGKEVLVLWGIHHPSTSADQQSLYQNADAYVFVGTSRYSKKFKPEIAIRPKVRDQEGRMNYYWTLVEPGDKITFEATGNLVVPRYAFAMERNAGSGIIISDTPVHDCNTTCQTPKGAINTSLPFQNIHPITIGKCPKYVKSTKLRLATGLRNVPSIQSRGLFGAIAGFIEGGWTGMVDGWYGYHHQNEQGSGYAADLKSTQNAIDEITNKVNSVIEKMNTQFTAVGKEFNHLEKRIENLNKKVDDGFLDIWTYNAELLVLLENERTLDYHDSNVKNLYEKVRSQLKNNAKEIGNGCFEFYHKCDNTCMESVKNGTYDYPKYSEEAKLNREEIDGVKLESTRIYQILAIYSTVASSLVLVVSLGAISFWMCSNGSLQCRICI

SEQ ID NO: 4353 - protein, 566 aa, synthetic construct; identical to SEQ ID NO: 4352
  REGION 1..566: note = hemagglutinin__InfluenzaA__ADD97055

SEQ ID NO: 4354 - protein, 566 aa, synthetic construct; identical to SEQ ID NO: 4352
  REGION 1..566: note = hemagglutinin__InfluenzaA__ADD97123

SEQ ID NO: 4355 - protein, 566 aa, synthetic construct
  REGION 1..566: note = hemagglutinin__InfluenzaA__ADD97161
MKAILVVLLYTFATANADTLCIGYHANNSTDTVDTVLEKNVTVTHSVNLLEDKHNGKLCKLRGVAPLHLGKCNIAGWILGNPECESLSTASSWSYIVETSSSDNGTCYPGDFIDYEELREQLSSVSSFERFEIFPKTSSWPNHDSNKGVTAACPHAGAKSFYKNLIWLVKKGKSYPKLSKSYINDKGKKVLVLWGIHHPSTSADQQSLYQNADAYVFVGTSRYSKKFKPEIAIRPKVRDQEGRMNYYWTLVEPGDKITFEATGNLVVPRYAFAMERNAGSGIIISDTPVHDCNTTCQTPKGAINTSLPFQNIHPITIGKCPKYVKSTKLRLATGLRNVPSIQSRGLFGAIAGFIEGGWTGMVDGWYGYHHQNEQGSGYAADLKSTQNAIDEITNKVNSVIEKMNTQFTAVGKEFNHLEKRIENLNKKVDDGFLDIWTYNAELLVLLENERTLDYHDSNVKNLYEKVRSQLKNNAKEIGNGCFEFYHKCDNTCMESVKNGTYDYPKYSEEAKLNREEIDGVKLESTRIYQILAIYSTVASSLVLVVSLGAISFWMCSNGSLQCRICI

SEQ ID NO: 4356 - protein, 566 aa, synthetic construct
  REGION 1..566: note = hemagglutinin__InfluenzaA__ADD97171
MKAILVVLLYTFATANADTLCIGYHANNSTDTVDTVLEKNVTVTHSVNLLEDKHNGKLCKLRGVAPLHLGKCNIAGWILGNPECESLSTASSWSYIVETSSSDNGTCYPGDFIDYEELREQLSSVSSFERFEIFPKTSSWPNHDSNKGVTAACPHAGAKSFYKNLIWLVKKGNSYPKLSKSYINDKGKEVLVLWGIHHPSTSADQQSLYQNADAYVFVGTSRYSKKFKPEIAIRPKVRDQEGRMNYYWTLVEPGDKITFEATGNLVVPRYAFAMERNAGSGIIISDTPVHDCNTTCQTPKGAINTSLPFQNIHPITIGKCPKYVKSTKLRLATGLRNVPSIQSRGLFGAIAGFIEGGWTGMVDGWYGYHHQNEQGSGYAADLKSTQNAIDEITNKVNSVIEKMNTQFTAVGKEFNHLEKRIENLNKKVDDGFLDIWTYNAELLVLLENERTLDYHDSNVKNLYEKVRSQLKNNAKEIGNGCFEFYHKCDNTCMESVKNGTYDYPKYSEEAKLNREEIDGVKLESTRIYQILAIYSTVASSLVLVVSLGAVSFWMCSNGSLQCRICI

SEQ ID NO: 4357 - protein, 566 aa, synthetic construct; identical to SEQ ID NO: 2669
  REGION 1..566: note = hemagglutinin__InfluenzaA__ADD97181

SEQ ID NO: 4358 - protein, 566 aa, synthetic construct; identical to SEQ ID NO: 2669
  REGION 1..566: note = hemagglutinin__InfluenzaA__ADD97201

SEQ ID NO: 4359 - protein, 566 aa, synthetic construct; identical to SEQ ID NO: 4352
  REGION 1..566: note = hemagglutinin__InfluenzaA__ADD97211

SEQ ID NO: 4360 - protein, 566 aa, synthetic construct; identical to SEQ ID NO: 2669
  REGION 1..566: note = hemagglutinin__InfluenzaA__ADD97231

SEQ ID NO: 4361 - protein, 566 aa, synthetic construct
  REGION 1..566: note = hemagglutinin__InfluenzaA__ADD97241
MKAILVVLLYTFATANADTLCIGYHANNSTDTVDTVLEKNVTVTHSVNLLEDKHNGKLCKLRGVAPLHLGKCNIAGWILGNPECESLSTASSWSYIVETSSSDNGTCYPGDFTDYEELREQLSSVSSFERFEIFPKTSSWPNHDSNKGVTAACPHAGAKSFYKNLIWLVKKGNSYPKLSKSYINDKGKEVLVLWGIHHPSTSADQQSLYQNADAYVFVGTSRYSKKFKPEIAIRPKVRDQEGRMNYYWTLVEPGDKITFEATGNLVVPRYAFAMERNAGSGIIISDTPVHNCNTTCQTPKGAINTSLPFQNIHPITIGKCPKYVKSTKLRLATGLRNVPSIQSRGLFGAIAGFIEGGWTGMVDGWYGYHHQNEQGSGYAADLKSTQNAIDEITNKVNSVIEKMNTQFTAVGKEFNHLEKRIENLNKKVDDGFLDIWTYNAELLVLLENERTLDYHDSNVKNLYEKVRSQLKNNAKEIGNGCFEFYHKCDNTCMESVKNGTYDYPKYSEEAKLNREEIDGVKLESTRIYQILAIYSTVASSLVLVVSLGAISFWMCSNGSLQCRICI

SEQ ID NO: 4362 - protein, 566 aa, synthetic construct; identical to SEQ ID NO: 4352
  REGION 1..566: note = hemagglutinin__InfluenzaA__ADD97251

SEQ ID NO: 4363 - protein, 566 aa, synthetic construct; identical to SEQ ID NO: 2669
  REGION 1..566: note = hemagglutinin__InfluenzaA__ADD97261

SEQ ID NO: 4364 - protein, 566 aa, synthetic construct
  REGION 1..566: note = hemagglutinin__InfluenzaA__ADD97271
MKAILVVLLYTFATANADTLCIGYHANNSTDTVDTVLEKNVTVTHSVNLLEDKHNGKLCKLRGVTPLHLGKCNIAGWILGNPECESLSTASSWSYIVETSSSDNGTCYPGDFIDYEELREQLSSVSSFERFEIFPKTSSWPNHDSNKGVTAACPHAGAKSFYKNLIWLVKKGNSYPKLSKSYINDKGKEVLVLWGIHHPSTSADQQSLYQNADAYVFVGTSRYSKKFKPEIAIRPKVRDQEGRMNYYWTLVEPGDKITFEATGNLVVPRYAFAMERNAGSGIIISDTPVHDCNTTCQTPKGAINTSLPFQNIHPITIGKCPKYVKSTKLRLATGLRNIPSIQSRGLFGAIAGFIEGGWTGMVDGWYGYHHQNEQGSGYAADLKSTQNAIDEITNKVNSVIEKMNTQFTAVGKEFNHLEKRIENLNKKVDDGFLDIWTYNAELLVLLENERTLDYHDSNVKNLYEKVRSQLKNNAKEIGNGCFEFYHKCDNTCMESVKNGTYDYPKYSEEAKLNREEIDGVKLESTRIYQILAIYSTVASSLVLVVSLGAISFWMCSNGSLQCRICI

SEQ ID NO: 4365 - protein, 566 aa, synthetic construct; identical to SEQ ID NO: 4356
  REGION 1..566: note = hemagglutinin__InfluenzaA__ADD97281

SEQ ID NO: 4366 - protein, 566 aa, synthetic construct; identical to SEQ ID NO: 2669
  REGION 1..566: note = hemagglutinin__InfluenzaA__ADD97291

SEQ ID NO: 4367 - protein, 566 aa, synthetic construct
  REGION 1..566: note = hemagglutinin__InfluenzaA__ADD97311
MKAILVVLLYTFATANADTLCIGYHANNSTDTVDTILEKNVTVTHSVNLLEDKHNGKLCKLRGVAPLHLGKCNIAGWILGNPECESLSTASSWSYIVETSSSDNGTCYPGDFIDYEELREQLSSVSSFERFEIFPKTSSWPNHDSNKGVTAACPHAGAKSFYKNLIWLVKKGNSYPKLSKSYINDKGKEILVLWGIHHPSTIADQQSLYQNADAYVFVGTSRYSKKFKPEIAIRPKVRDQEGRMKYYWTLVEPGDKITFEATGNLVVPRYAFAMERNAGSGIIISDTPVHNCNTTCQTSKGAINTSLPFQNIHPITIGKCPKYVKSTKLRLATGLRNVPSIQSRGLFGAIAGFIEGGWTGMVDGWYGYHHQNEQGSGYAADLKSTQNAIDEITNKVNSVIEKMNTQFTAVGKEFNHLEKRIENLNKKVDDGFLDIWTYNAELLVLLENERTLDYHDSNVKNLYEKVRSQLKNNAKEIGNGCFEFYHKCDNTCMESVKNGTYDYPKYSEEAKLNREEIDGVKLESTRIYQILAIYSTVASSLVLVVSLGAISFWMCSNGSLQCRICI

SEQ ID NO: 4368 - protein, 566 aa, synthetic construct; identical to SEQ ID NO: 4352
  REGION 1..566: note = hemagglutinin__InfluenzaA__ADD97321

SEQ ID NO: 4369 - protein, 566 aa, synthetic construct; identical to SEQ ID NO: 3833
  REGION 1..566: note = hemagglutinin__InfluenzaA__ADD97331

SEQ ID NO: 4370 - protein, 566 aa, synthetic construct
  REGION 1..566: note = hemagglutinin__InfluenzaA__ADD97341
MKAILVVLLYTFATVNADTLCIGYHANNSTDTVDTVLEKNVTVTHSVNLLEDKHNGKLCKLRGVAPLHLGKCNIAGWILGNPECESLSTASSWSYIVETSSSDNGTCYPGDFIDYEELREQLSSVSSFERFEIFPKTSSWPNHDSNKGVTAACPHAGAKSFYKNLIWLVKKGNSYPKLSKSYINDKGKEVLVLWGIHHPSTSTDQQSLYQNADAYVFVGTSRYSKKFKPEIAIRPKVRDQEGRMNYYWTLVEPGDKITFEATGNLVVPRYAFAMERNAGSGIIISDTPVHDCNTTCQTPKGAINTSLPFQNIHPITIGKCPKYVKSTKLRLATGLRNIPSIQSRGLFGAIAGFIEGGWTGMVDGWYGYHHQNEQGSGYAADLKSTQNAIDEITNKVNSVIEKMNTQFTAVGKEFNHLEKRIENLNKKVDDGFLDIWTYNAELLVLLENERTLDYHDSNVKNLYEKVRSQLKNNAKEIGNGCFEFYHKCDNTCMESVKNGTYDYPKYSEEAKLNREEIDGVKLESTRIYQILAIYSTVASSLVLVVSLGAISFWMCSNGSLQCRICI

SEQ ID NO: 4371 - protein, 566 aa, synthetic construct; identical to SEQ ID NO: 3833
  REGION 1..566: note = hemagglutinin__InfluenzaA__ADD97351

SEQ ID NO: 4372 - protein, 566 aa, synthetic construct; identical to SEQ ID NO: 3833
  REGION 1..566: note = hemagglutinin__InfluenzaA__ADD97361

SEQ ID NO: 4373 - protein, 566 aa, synthetic construct
  REGION 1..566: note = hemagglutinin__InfluenzaA__ADD97371
MKAILVVLLYTFATANADTLCIGYHANNSTDTVDTVLEKNVTVTHSVNLLEDKHNGKLCKLRGVAPLHLGKCNIAGWILGNPECESLSTASSWSYIVETSSSDNGTCYPGDFIDYEELREQLSSVSSFERFEIFPKTSSWPNHDSNKGVTAACPHAGAKSFYKNLIWLVKKGNSYPKLSKSYINDKGKEVLVLWGIHHPSTSADQQSLYQNADAYVFVGTSRYSKKFKPEIAIRPKVREQEGRMNYYWTLVEPGDKITFEATGNLVVPRYAFAMERNAGSGIIISDTPVHDCNTTCQTPKGAINTSLPFQNIHPITIGKCPKYVKSTKLRLATGLRNVPSIQSRGLFGAIAGFIEGGWTGMVDGWYGYHHQNEQGSGYAADLKSTQNAIDEITNKVNSVIEKMNTQFTAVGKEFNHLEKRIENLNKKVDDGFLDIWTYNAELLVLLENERTLDYHDSNVKNLYEKVRSQLKNNAKEIGNGCFEFYHKCDNTCMESVKNGTYDYPKYSEEAKLNREEIDGVKLESTRIYQILAIYSTVASSLVLVVSLGAISFWMCSNGSLQCRVCI

SEQ ID NO: 4374 - protein, 566 aa, synthetic construct; identical to SEQ ID NO: 3833
  REGION 1..566: note = hemagglutinin__InfluenzaA__ADD97381

SEQ ID NO: 4375 - protein, 566 aa, synthetic construct; identical to SEQ ID NO: 2669
  REGION 1..566: note = hemagglutinin__InfluenzaA__ADD97391

SEQ ID NO: 4376 - protein, 566 aa, synthetic construct; identical to SEQ ID NO: 3833
  REGION 1..566: note = hemagglutinin__InfluenzaA__ADD97411

SEQ ID NO: 4377 - protein, 566 aa, synthetic construct; identical to SEQ ID NO: 3833
  REGION 1..566: note = hemagglutinin__InfluenzaA__ADD97421

SEQ ID NO: 4378 - protein, 566 aa, synthetic construct; identical to SEQ ID NO: 2669
  REGION 1..566: note = hemagglutinin__InfluenzaA__ADD97431

SEQ ID NO: 4379 - protein, 566 aa, synthetic construct
  REGION 1..566: note = hemagglutinin__InfluenzaA__ADD97441
MKAILVVLLYTFATANADTLCIGYHANNSTDTVDTILEKNVTVTHSVNLLEDKHNGKLCKLRGVAPLHLGKCNIAGWILGNPECESLSTASSWSYIVETSSSDNGTCYPGDFIDYEELREQLSSVSSFERFEIFPKTSSWPNHDSNKGVTAACPHAGAKSFYKNLIWLVKKGNSYPKLSKSYINDKGKEILVLWGIHHPSTSADQQSLYQNADAYVFVGTSRYSKKFKPEIAIRPKVRDQEGRMNYYWTLVEPGDKITFEATGNLVVPRYAFAMERNAGSGIIISDTPVHDCNTTCQTPKGAINTSLPFQNIHPITIGKCPKYVKSTKLRLATGLRNVPSIQSRGLFGAIAGFIEGGWTGMVDGWYGYHHQNEQGSGYAADLKSTQNAIDEITNKVNSVIEKMNTQFTAVGKEFNHLEKRIENLNKKVDDGFLDIWTYNAELLVLLENERTLDYHDSNVKNLYEKVRSQLKNNAKEIGNGCFEFYHKCDNTCMESVKNGTYDYPKYSEEAKLNREEIDGVKLESTRIYQILAIYSTVASSLVLVVSLGAISFWMCSNGSLQCRICI

SEQ ID NO: 4380 - protein, 566 aa, synthetic construct; identical to SEQ ID NO: 4373
  REGION 1..566: note = hemagglutinin__InfluenzaA__ADD97451

SEQ ID NO: 4381 - protein, 566 aa, synthetic construct; identical to SEQ ID NO: 4373
  REGION 1..566: note = hemagglutinin__InfluenzaA__ADD97461

SEQ ID NO: 4382 - protein, 566 aa, synthetic construct; identical to SEQ ID NO: 4221
  REGION 1..566: note = hemagglutinin__InfluenzaA__ADD97471

SEQ ID NO: 4383 - protein, 566 aa, synthetic construct; identical to SEQ ID NO: 4221
  REGION 1..566: note = hemagglutinin__InfluenzaA__ADD97481

SEQ ID NO: 4384 - protein, 566 aa, synthetic construct
  REGION 1..566: note = hemagglutinin__InfluenzaA__ADD97491
MKAILVVLLYTFATANADTLCIGYHANNSTDTVDTVLEKNVTVTHSVNLLEDKHNGKLCKLRGEAPLHLGKCNIAGWILGNPECESLSTASSWSYIVETSSSDNGTCYPGDFINYEELREQLSSVSSFERFEIFPKTSSWPNHDSNKGVTAACPHAGAKSFYKNLIWLVKKGNSYPKLSKSYINDKGKEVLVLWGIHHPSTSADQQSLYQNADAYVFVGTSRYSKKFKPEIAIRPKVRDQEGRMNYYWTLVEPGDKITFEATGNLVVPRYAFAMERNAGSGIIISDTPVHDCNTTCQTPKGAINTSLPFQNIHPITIGKCPKYVKSTKLRLATGLRNVPSIQSRGLFGAIAGFIEGGWTGMVDGWYGYHHQNEQGSGYAADLKSTQNAIDKITNKVNSVIEKMNTQFTAVGKEFNHLEKRIENLNKKVDDGFLDIWTYNAELLVLLENERTLDYHDSNVKNLYEKVRSQLKNNAKEIGNGCFEFYHKCDNTCMESVKNGTYDYPKYSEEAKLNREEIDGVKLESTRIYQILAIYSTVASSLVLVVSLGAISFWMCSNGSLQCRICI

SEQ ID NO: 4385 - protein, 566 aa, synthetic construct; identical to SEQ ID NO: 4384
  REGION 1..566: note = hemagglutinin__InfluenzaA__ADD97501

SEQ ID NO: 4386 - protein, 566 aa, synthetic construct; identical to SEQ ID NO: 3022
  REGION 1..566: note = hemagglutinin__InfluenzaA__ADD97511

SEQ ID NO: 4387 - protein, 566 aa, synthetic construct
  REGION 1..566: note = hemagglutinin__InfluenzaA__ADD97531
MKAILVVLLYTFATANADTLCIGYHANNSTDTVDTILEKNVTVTHSVNLLEDKHNGKLCKLRGVAPLHLGKCNIAGWILGNPECESLSTASSWSYIVETSSSDNGTCYPGDFIDYEELREQLSSVSSFERFEIFPKTSSWPNHDSNKGVTAACPHAGAKSFYKNLIWLVKKGNSYPKLSKSYINDKGKEILVLWGIHHPSTIADQQSLYQNADAYVFVGTSRYSKKFKPEIAIRPKVRDQEGRMKYYWTLVEPGDKITFEATGNLVVPRYAFAMERNAGSGIIISDTPVHNCNTTCQTPKGAINTSLPFQNIHPITIGKCPKYVKSTKLRLATGLRNVPSIQSRGLFGAIAGFIEGGWTGMVDGWYGYHHQNEQGSGYAADLKSTQNAIDEITNKVNSVIEKMNTQFTAVGKEFNHLEKRIENLNKKVDDGFLDIWTYNAELLVLLENERTLDYHDSNVKNLYEKVRSQLKNNAKEIGNGCFEFYHKCDNTCMESVKNGTYDYPKYSEEAKLNREEIDGVKLESTRIYQILAIYSTVASSLVLVVSLGAISFWMCSNGSLQCRICI

SEQ ID NO: 4388 - protein, 566 aa, synthetic construct
  REGION 1..566: note = hemagglutinin__InfluenzaA__ADD97541
MKAILVVLLYTFATANADTLCIGYHANNSTDTVDTVLEKNVTVTHSVNLLEDKHNGKLCKLRGVAPLHLGKCNIAGWILGNPECESLSTASSWSYIVETSSSDNGTCYPGDFIDYEELREQLSSVSSFERFEIFPKTSSWPNHDSNKGVTAACPHTGAKSFYKNLIWLVKKGNSYPKLSKSYINDKGKEVLVLWGIHHPSTSTDQQSLYQNADAHVFVGTSRYSKKFKPEIAIRPKVRDQEGRMNYYWTLVEPGDKITFEATGNLVVPRYAFAMERNAGSGIIISDTPVHDCNTTCQTPKGAINTSLPFQNIHPITIGKCPKYVKSTKLRLATGLRNIPSIQSRGLFGAIAGFIEGGWTGMVDGWYGYHHQNEQGSGYAADLKSTQNAIDEITNKVNSVIEKMNTQFTAVGKEFNHLEKRIENLNKKVDDGFLDIWTYNAELLVLLENERTLDYHDSNVKNLYEKVRSQLKNNAKEIGNGCFEFYHKCDNTCMESVKNGTYDYPKYSEEAKLNREEIDGVKLESTRIYQILAIYSTVASSLVLVVSLGAISFWMCSNGSLQCRICI

SEQ ID NO: 4389 - protein, 566 aa, synthetic construct; identical to SEQ ID NO: 4221
  REGION 1..566: note = hemagglutinin__InfluenzaA__ADD97551

SEQ ID NO: 4390 - protein, 566 aa, synthetic construct; identical to SEQ ID NO: 3833
  REGION 1..566: note = hemagglutinin__InfluenzaA__ADD97561

SEQ ID NO: 4391 - protein, 566 aa, synthetic construct
  REGION 1..566: note = hemagglutinin__InfluenzaA__ADD97571
MKAILVVLLYTFATANADTLCIGYHANNSTDTVDTVLEKNVTVTHSVNLLEDKHNGKLCKLRGVAPLHLGKCNIAGWILGNPECESLSTASSWSYIVETSSSDNGTCYPGDFINYEELREQLSSVSLFERFEIFPKTSSWPNHDSNKGVTAACPHAGAKSFYKNLIWLVKKGNSYPKLSKSYINDKGKEVLVLWGIHHPSTSADQQSLYQNADAYVFVGTSRYSKKFKPEIAIRPKVRDQEGRMNYYWTLVEPGDKITFEATGNLVVPRYAFAMERNAGSGIIISDTPVHDCNTTCQTPKGAINTSLPFQNIHPITIGKCPKYVKSTKLRLATGLRNVPSIQSRGLFGAIAGFIEGGWTGMVDGWYGYHHQNEQGSGYAADLKSTQNAIDKITNKVNSVIEKMNTQFTAVGKEFNHLEKRIENLNKKVDDGFLDIWTYNAELLVLLENERTLDYHDSNVKNLYEKVRSQLKNNAKEIGNGCFEFYHKCDNTCMESVKNGTYDYPKYSEEAKLNREEIDGVKLESTRIYQILAIYSTVASSLVLVVSLGAISFWMCSNGSLQCRICI

SEQ ID NO: 4392 - protein, 566 aa, synthetic construct; identical to SEQ ID NO: 2669
  REGION 1..566: note = hemagglutinin__InfluenzaA__ADD97581

SEQ ID NO: 4393 - protein, 566 aa, synthetic construct; identical to SEQ ID NO: 2669
  REGION 1..566: note = hemagglutinin__InfluenzaA__ADD97591

SEQ ID NO: 4394 - protein, 566 aa, synthetic construct; identical to SEQ ID NO: 2669
  REGION 1..566: note = hemagglutinin__InfluenzaA__ADD97688

SEQ ID NO: 4395 - protein, 566 aa, synthetic construct; identical to SEQ ID NO: 4221
  REGION 1..566: note = hemagglutinin__InfluenzaA__ADD97698

SEQ ID NO: 4396 - protein, 566 aa, synthetic construct; identical to SEQ ID NO: 4221
  REGION 1..566: note = hemagglutinin__InfluenzaA__ADD97888

SEQ ID NO: 4397 - protein, 566 aa, synthetic construct
  REGION 1..566: note = hemagglutinin__InfluenzaA__ADD97898
MKAILVVLLYTFATANADTLCIGYHANNSTDTVDTVLEKNVTVTHSVNLLEDKHNGKLCKLRGVAPLHLGKCNIAGWILGNPECESLSTASSWSYIVETSSSDNGTCYPGDFIDYEELREQLSSVSSFERFEIFPKTSSWPNHDSNKGVTAACPHAGAKSFYKNLIWLVKKGNSYPKLSKSYINDKGKEVLVLWGIHHPSTSTDQQSLYQNADAYVFVGTSRYSKKFKPEIAIRPKVRDQEGRMNYYWTLVEPGDKITFEATGNLVVPRYAFAMERNAGSGIIISDTPVHDCNTTCQTPKGAINTSLPFQNIHPITIGKCPKYVKSTKLRLATGLRNIPSIQSRGLFGAIAGFIEGGWTGMVDGWYGYHHQNEQGSGYAADLKSTQNAIDEITNKVNSVIEKMNTQFTAVGKEFNHLEKRIENLNKKVDDGFLDIWTYNAELLVLLENERTLDYHDSNVKNLYEKVRSQLKNNAKEIGNGCFEFYHKCDNTCMESVKNGTYDYPKYSEEAKLNREEIDGVKLESTRIYQILAIYSTVASSLVLVVSLGAISFWMCSNGSLQCRICI

SEQ ID NO: 4398 - protein, 566 aa, synthetic construct; identical to SEQ ID NO: 3022
  REGION 1..566: note = hemagglutinin__InfluenzaA__ADD97908

SEQ ID NO: 4399 - protein, 566 aa, synthetic construct; identical to SEQ ID NO: 3833
  REGION 1..566: note = hemagglutinin__InfluenzaA__ADD97918

SEQ ID NO: 4400 - protein, 566 aa, synthetic construct
  REGION 1..566: note = hemagglutinin__InfluenzaA__ADD97928
MKAILVVLLYTFATANADTLCIGYHANNSTDTVDTVLEKNVTVTHSVNLLEDKHNGKLCKLRGVAPLHLGKCNIAGWILGNPECESLSTASSWSYIVETSSSGNGTCYPGDFIDYEELREQLSSVSSFERFEIFPKTSSWPNHDSNKGVTAACPHAGAKSFYKNLIWLVKKGNSYPKLSKSYINDKGKEVLVLWGIHHPSTSADQQSLYQNADAYVFVGTSRYSKKFKPEIAIRPKVRDQEGRMNYYWTLVEPGDKITFEATGNLVVPRYAFAMERNAGSGIIISDTPVHDCNTTCQTPKGAINTSLPFQNIHPITIGKCPKYVKSTKLRLATGLRNVPSIQSRGLFGAIAGFIEGGWTGMVDGWYGYHHQNEQGSGYAADLKSTQNAIDGITNKVNSVIEKMNTQFTAVGKEFNHLEKRIENLNKKVDDGFLDIWTYNAELLVLLENERTLDYHDSNVKNLYEKVRSQLKNNAKEIGNGCFEFHHKCDNTCMESVKNGTYDYPKYSEEAKLNREEIDGVKLESTRIYQILAIYSTVASSLVLVVSLGAISFWMCSNGSLQCRICI

SEQ ID NO: 4401 - protein, 566 aa, synthetic construct
  REGION 1..566: note = hemagglutinin__InfluenzaA__ADD97938
MKAILVVLLYTFATANADTLCIGYHANNSTDTVDTILEKNVTVTHSVNLLEDKHNGKLCKLRGVAPLHLGKCNIAGWILGNPECESLSTASSWSYIVETSSSDNGTCYPGDFIDYEELREQLSSVSSFERFEIFPMTSSWPNHDSNKGVTAACPHAGAKSFYKNLIWLVKKGNSYPKLSKSYINDKGKEILVLWGIHHPSTSADQQSLYQNADAYVFVGTSRYSKKFKPEIAIRPKVRDQEGRMNYYWTLVEPGDKITFEATGNLVVPRYAFAMERNAGSGIIISDTPVHDCNTTCQTPKGAINTSLPFQNIHPITIGKCPKYVKSTKLRLATGLRNVPSIQSRGLFGAIAGFIEGGWTGMVDGWYGYHHQNEQGSGYAADLKSTQNAIDEITNKVNSVIEKMNTQFTAVGKEFNHLEKRIENLNKKVDDGFLDIWTYNAELLVLLENERTLDYHDSNVKNLYEKVRSQLKNNAKEIGNGCFEFYHKCDNTCMESVKNGTYDYPKYSEEAKLNREEIDGVKLESTRIYQILAIYSTVASSLVLVVSLGAISFWMCSNGSLQCRICI

SEQ ID NO: 4402 - protein, 566 aa, synthetic construct
  REGION 1..566: note = hemagglutinin__InfluenzaA__ADD97948
MKAILLVLLYTFATANADTLCIGYHANNSTDTVDTVLEKNVTVTHSVNLLEDKHNGKLCKLRGVAPLHLGKCNIAGWILGNPECESLSTASSWSYIVETSSSDNGTCYPGDFIDYEELREQLSSVSSFERFEMFPKTSSWPNHDSNKGVTAACPHAGAKSFYKNLIWLVKKGNSYPKLSKSYINDKGKEVLVLWGIHHPSTSADQQSLYQNADAYVFVGTSRYSKKFKPEIAIRPKVRDQEGRMNYYWTLVEPGDKITFEATGNLVVPRYAFAMERNAGSGIIISDTPVHDCNTTCQTPKGAINTSLPFQNIHPITIGKCPKYVKSTKLRLATGLRNVPSIQSRGLFGAIAGFIEGGWTGMVDGWYGYHHQNEQGSGYAADLKSTQNAIDEITNKVNSVIEKMNTQFTAVGKEFNHLEKRIENLNKKVDDGFLDIWTYNAELLVLLENERTLDYHDSNVKNLYEKVRSQLKNNAKEIGNGCFEFYHKCDNTCMESVKNGTYDYPKYSEEAKLNREEIDGVKLESTRIYQILAIYSTVASSLVLVVSLGAISFWMCSNGSLQCRICI

SEQ ID NO: 4403 - protein, 566 aa, synthetic construct
  REGION 1..566: note = hemagglutinin__InfluenzaA__ADD97958
MKAILVVLLYTFATANADTLCIGYHANNSTDTVDTVLEKNVTVTHSVNLLEDKHNGKLCKLRGVAPLHLGKCNIAGWILGNPECESLSTASSWSYIVETSSSDNGTCYPGDFIDYEELREQLSSVSSFERFEIFPKTSSWPNHDSNKGVTAACPHAGAKSFYKNLIWLVKKGNSYPKLSKSYINDKGKEVLVLWGIHHPSTSADQQSLYQNADAYVFVGTSRYSKKFQPEIAIRPKVRDQEGRMNYYWTLLEPGDKITFEATGNLVVPRYAFAMERNAGSGIIISDTPVHDCNTTCQTPKGAINTSLPFQNIHPITIGKCPKYVKSTKLRLATGLRNVPSIQSRGLFGAIAGFIEGGWTGMVDGWYGYHHQNEQGSGYAADLKSTQNAIDEITNKVNSVIEKMNTQFTAVGKEFNHLEKRIENLNKKVDDGFLDIWTYNAELLVLLENERTLDYHDSNVKNLYEKVRSQLKNNAKEIGNGCFEFYHKCDNTCMESVKNGTYDYPKYSEEAKLNREEIDGVKLESTRIYQILAIYSTVASSLVLVVSLGAISFWMCSNGSLQCRICI

SEQ ID NO: 4404 - protein, 566 aa, synthetic construct; identical to SEQ ID NO: 2669
  REGION 1..566: note = hemagglutinin__InfluenzaA__ADD97968

SEQ ID NO: 4405 - protein, 566 aa, synthetic construct; identical to SEQ ID NO: 4397
  REGION 1..566: note = hemagglutinin__InfluenzaA__ADD97978

SEQ ID NO: 4406 - protein, 566 aa, synthetic construct; identical to SEQ ID NO: 4351
  REGION 1..566: note = hemagglutinin__InfluenzaA__ADD97988

SEQ ID NO: 4407 - protein, 566 aa, synthetic construct
  REGION 1..566: note = hemagglutinin__InfluenzaA__ADD97998
MKAILVVLLYTFATANADTLCIGYHANNSTDTVDTVLEKNVTVTHSVNLLEDKHNGKLCKLRGVAPLHLGKCNIAGWILGNPECESLSTASSWSYIVETSSSDNGTCYPGDFIDYEELREQLSSVSSFERFEIFPKASSWPNHDSNKGVTAACPHAGAKSFYKNLIWLVKKGNSYPKLSKSYINDKGKEVLVLWGIHHPSTSADQQSLYQNADAYVFVGTSRYSKKFKPEIAIRPKVRDQEGRMNYYWTLVEPGDKITFEATGNLVVPRYAFEMERNAGSGIIISDTPVHDCNTTCQTPKGAINTSLPFQNIHPITIGKCPKYVKSTKLRLATGLRNVPSIQSRGLFGAIAGFIEGGWTGMVDGWYGYHHQNEQGSGYAADLKSTQNAIDEITNKVNSVIEKMNTQFTAVGKEFNHLEKRIENLNKKVDDGFLDIWTYNAELLVLLENERTLDYHDSNVKNLYEKVRSQLKNNAKEIGNGCFEFYHKCDNTCMESVKNGTYDYPKYSEEAKLNREEIDGVKLESTRIYQILAIYSTVASSLVLVVSLGAISFWMCSNGSLQCRICI

SEQ ID NO: 4408 - protein, 566 aa, synthetic construct; identical to SEQ ID NO: 4221
  REGION 1..566: note = hemagglutinin__InfluenzaA__ADD98008

SEQ ID NO: 4409 - protein, 566 aa, synthetic construct
  REGION 1..566: note = hemagglutinin__InfluenzaA__ADD98018
MKAILVVLLYTFATANADTLCIGYHANNSTDTVDTVLEKNVTVTHSVNLLEDKHNGKLCKLRGVAPLHLGKCNIAGWILGNPECESLSTASSWSYIVETSSSDNGTCYPGDFIDYEELREQLSSVSSFERFEIFPKTSSWPNHDSNKGVTAACPHAGAKSFYKNLIWLVKKGNSYPKLSKSYINDKGKEILVLWGIHHPSTSADQQSLYQNADAYVFVGTSRYSKKFKPEIATRPKVREQEGRMNYYWTLVEPGDKITFEATGNLVVPRYAFAMERNAGSGIIISDTPVHDCNTTCQTPKGAINTSLPFQNIHSITIGKCPKYVKSTKLRLATGLRNVPSIQSRGLFGAIAGFIEGGWTGMVDGWYGYHHQNEQGSGYAADLKSTQNAIDEITNKVNSVIEKMNTQFTAVGKEFNHLEKRIENLNKKVDDGFLDIWTYNAELLVLLENERTLDYHDSNVKNLYEKVRSQLKNNAKEIGNGCFEFYHKCDNTCMESVKNGTYDYPKYSEEAKLNREEIDGVKLESTRIYQILAIYSTVASSLVLVVSLGAISFWMCSNGSLQCRICI

SEQ ID NO: 4410 - protein, 566 aa, synthetic construct; identical to SEQ ID NO: 4373
  REGION 1..566: note = hemagglutinin__InfluenzaA__ADD98028

SEQ ID NO: 4411 - protein, 566 aa, synthetic construct
  REGION 1..566: note = hemagglutinin__InfluenzaA__ADD98038
MKAILVVLLYTFATANADTLCIGYHANNSTDTVDTVLEKNVTVTHSVNLLEDKHNGKLCKLRGVAPLHLGKCNIAGWILGNPECESISTASSWSYIVETSSSDNGTCYPGDFIDYEELREQLSSVSSFERFEIFPKASSWPNHDSNKGVTAACPHAGAKSFYKNLIWLVKKGNSYPKLSKSYINDKGKEVLVLWGIHHPSTSADQQSLYQNADAYVFVGTSRYSKKFKPEIAIRPKVRDQEGRMNYYWTLVEPGDKITFEATGNLVVPRYAFEMERNAGSGIIISDTPVHDCNTTCQTPKGAINTSLPFQNIHPITIGKCPKYVKSTKLRLATGLRNVPSIQSRGLFGAIAGFIEGGWTGMVDGWYGYHHQNEQGSGYAADLKSTQNAIDEITNKVNSVIEKMNTQFTAVGKEFNHLEKRIENLNKKVDDGFLDIWTYNAELLVLLENERTLDYHDSNVKNLYEKVRSQLKNNAKEIGNGCFEFYHKCDNTCMESVKNGTYDYPKYSEEAKLNREEIDGVKLESTRIYQILAIYSTVASSLVLVVSLGAISFWMCSNGSLQCRICI

SEQ ID NO: 4412 - protein, 566 aa, synthetic construct; identical to SEQ ID NO: 4397
  REGION 1..566: note = hemagglutinin__InfluenzaA__ADD98048

SEQ ID NO: 4413 - protein, 566 aa, synthetic construct; identical to SEQ ID NO: 2669
  REGION 1..566: note = hemagglutinin__InfluenzaA__ADD98058

SEQ ID NO: 4414 - protein, 566 aa, synthetic construct; identical to SEQ ID NO: 2669
  REGION 1..566: note = hemagglutinin__InfluenzaA__ADD98068

SEQ ID NO: 4415 - protein, 566 aa, synthetic construct; identical to SEQ ID NO: 2911
  REGION 1..566: note = hemagglutinin__InfluenzaA__ADD98078

SEQ ID NO: 4416 - protein, 566 aa, synthetic construct
  REGION 1..566: note = hemagglutinin__InfluenzaA__ADD98098
MKAILVVLLYTFATANADTLCIGYHANNSTDTVDTILEKNVTVTHSVNLLEDKHNGKLCKLRGVAPLHLGKCNIAGWILGNPECESLSTASSWSYIVETSSSDNGTCYPGDFIDYEELREQLSSVSSFERFEIFPKTSSWPNHDSNKGVTAACPHAGAKSFYKNLIWLVKKGNSYPKLSKSYINDKGKEVLVLWGIHHPSTSSDQQSLYQNADAYVFVGTSRYSKKFKPEIAIRPKVRDQEGRMNYYWTLVEPGDKITFEATGNLVVPRYAFAVERNAGSGIIISDTPVHDCNTTCQTPKGAINTSLPFQNIHPITIGKCPKYVKSTKLRLATGLRNVPSIQSRGLFGAIAGFIEGGWTGMVDGWYGYHHQNEQGSGYAADLKSTQNAIDEITNKVNSVIEKMNTQFTAVGKEFNHLEKRIENLNKKVDDGFLDIWTYNAELLVLLENERTLDYHDSNVKNLYEKVRSQLKNNAKEIGNGCFEFYHKCDNTCMESVKNGTYDYPKYSEEAKLNREEIDGVKLESTRIYQILAIYSTVASSLVLVVSLGAISFWMCSNGSLQCRICI

SEQ ID NO: 4417 - protein, 566 aa, synthetic construct; identical to SEQ ID NO: 4384
  REGION 1..566: note = hemagglutinin__InfluenzaA__ADD98118

SEQ ID NO: 4418 - protein, 566 aa, synthetic construct; identical to SEQ ID NO: 4384
  REGION 1..566: note = hemagglutinin__InfluenzaA__ADD98128

SEQ ID NO: 4419 - protein, 566 aa, synthetic construct
  REGION 1..566: note = hemagglutinin__InfluenzaA__ADD98138
MKAILVVLLYTFATANADTLCIGYHANNSTDTVDTVLEKNVTVTHSVNLLEDKHNGKLCKLRGVAPLHLGKCNIAGWILGNPECESLSTASSWSYIVETSSSDNGTCYPGDFINYEELREQLSSVSSFERFEIFPKTSSWPNHDSNKGVTAACPHAGAKSFYKNLIWLVKKGNSYPKLSKSYINDKGKEVLVLWGIHHPSTSTDQQSLYQNADAYVFVGTSRYSKKFKPEIAIRPKVRDQEGRMNYYWTLVEPGDKITFEATGNLVVPRYAFAMERNTGSGIIISDTPVHDCNTTCQTPNGAINTSLPFQNIHPITIGKCPKYVKSTKLRLATGLRNVPSIQSRGLFGAIAGFIEGGWTGMVDGWYGYHHQNEQGSGYAADLKSTQNAIDKITNKVNSVIEKMNTQFTAVGKEFNHLEKRIENLNKKVDDGFLDIWTYNAELLVLLENERTLDYHDSNVKNLYEKVRSQLKNNAKEIGNGCFEFYHKCDNTCMESVKNGTYDYPKYSEEAKLNREEIDGVKLESTRIYQILAIYSTVASSLVLVVSLGAISFWMCSNGSLQCRICI

SEQ ID NO: 4420 - protein, 566 aa, synthetic construct
  REGION 1..566: note = hemagglutinin__InfluenzaA__ADD98148
MKAILVVLLYTFATANADTLCIGYHANNSTDTVDTVLEKNVTVTHSVNLLEDKHNGKLCKLRGVAPLHLGKCNIAGWILGNPECESLSTASSWSYIVETSSSDNGTCYPGDFIDYEELREQLSSVSSFERFEIFPKTSSWPNHDSNKGVTAACPHAGAKSFYKNLIWLVKKGNSYPKLSKSYINDKGKEVLVLWGIHHPSTSADQQSLYQNADAYVFVGTSRYSKKFKPEIAIRPKVRDQEGRMNYYWTLVEPGDKITFEATGNLVVPRYAFAMERNAGSGIFISDTPVHDCNTTCQTPKGAINTSLPFQNIHPITIGKCPKYVKSTKLRLATGLRNVPSIQSRGLFGAIAGFIEGGWTGMVDGWYGYHHQNEQGSGYAADLKSTQNAIDKITNKVNSVIEKMNTQFTAVGKEFNHLEKRIENLNKKVDDGFLDIWTYNAELLVLLENERTLDYHDSNVKNLYEKVRSQLKNNAKEIGNGCFEFYHKCDNTCMESVKNGTYDYPKYSEEAKLNREEIDGVKLESTRIYQILAIYSTVASSLVLVVSLGAISFWMCSNGSLQCRICI

SEQ ID NO: 4421 - protein, 566 aa, synthetic construct
  REGION 1..566: note = hemagglutinin__InfluenzaA__ADD98158
MKAILVVLLYTFATANADTLCIGYHANNSTDTVDTVLEKNVTVTHSVNLLEDKHNGKLCELRGVAPLHLGKCNIAGWILGNPECESLSTASSWSYIVETSSSDNGTCYPGDFIDYEELREQLSSVSSFERFEIFPKTSSWPNHDSNKGVTAACPHAGAKSFYKNLIWLVKKGNSYPKLSKSYINDKGKEVLVLWGIHHPSTSADQQSLYQNADAYVFVGTSRYSKKFKPEIAIRPKVRDQEGRMNYYWTLVEPGDKITFEATGNLVIPRYAFAMERNAGSGIIISDTPVHDCNTTCQTPKGAINTSLPFQNIHPITIGKCPKYVKSTKLRLATGLRNVPSIQSRGLFGAIAGFIEGGWTGMVDGWYGYHHQNEQGSGYAADLKSTQNAIDKITNKVNSVIEKMNTQFTAVGKEFNHLEKRIENLNKKVDDGFLDIWTYNAELLVLLENERTLDYHDSNVKNLYEKVRSQLKNNAKEIGNGCFEFYHKCDNTCMESVKNGTYDYPKYSEEAKLNREEIDGVKLESTRIYQILAIYSTVASSLVLVVSLGAISFWMCSNGSLQCRICI

SEQ ID NO: 4422 - protein, 566 aa, synthetic construct
  REGION 1..566: note = hemagglutinin__InfluenzaA__ADD98168
MKAILVVLLYTFATANADTLCIGYHANNSTDTVDTVLEKNVTVTHSINILEDKHNGKLCKLRGVAPLHLGKCNIAGWILGNPECESLSTASSWSYIVETSSSDNGTCYPGDFIDYEELREQLSSVSSFERFEIFPKTSSWPNHDSNKGVTAACPHAGAKSFYKNLIWLVKKGNSYPKLSKSYINDKGKEVLVLWGIHHPSTSADQQSLYQNADAYVFVGTSRYSKKFKPEIAIRPKVRDQEGRMNYYWTLVEPGDKITFEATGNLVVPKYAFAMERNAGSGIIISDTPVHDCNTTCQTPKGAINTSLPFQNIHPITIGKCPKYVKSTKLRLATGLRNVPSIQSRGLFGAIAGFIEGGWTGMVDGWYGYHHQNEQGSGYAADLKSTQNAIDEITNKVNSVIEKMNTQFTAVGKEFNHLEKRIENLNKKVDDGFLDIWTYNAELLVLLENERTLDYHDSNVKNLYEKVRSQLKNNAKEIGNGCFEFYHKCDNTCMESVKNGTYDYPKYSEEAKLNREEIDGVKLESTRIYQILAIYSTVASSLVLVVSLGAISFWMCSNGSLQCRICI

SEQ ID NO: 4423 - protein, 566 aa, synthetic construct; identical to SEQ ID NO: 3841
  REGION 1..566: note = hemagglutinin__InfluenzaA__ADD98188

SEQ ID NO: 4424 - protein, 566 aa, synthetic construct
  REGION 1..566: note = hemagglutinin__InfluenzaA__ADD98198
MKAILVVLLYTFATANADTLCIGYHANNSTDTVDTVLEKNVTVTHSVNLLEDKHNGKLCKLRGVAPLHLGKCNIAGWILGNPECESLSTASSWSYIVETSSSDNGTCYPGDFIDYEELREQLSSVSSFERFEIFPKTSSWPNHDSNKGVTAACPHAGAKSFYKNLIWLVKKGNSYPKLSKSYINDKGKEVLVLWGIHHPSTSADQQSLYQNADAYVFVGTSRYSKKFKPEIAIRPKVRDQEGRMNYYWTLVEPGDKITFEATGNLVVPRYAFAMERNAGSGIIISDTPVHDCNTTCQTPKGAINTSLPFQNIHPITIGKCPKYVKSTKMRLATGLRNVPSIQSRGLFGAIAGFIEGGWTGMVDGWYGYHHQNEQGSGYAADLKSTQNAIDEITNKVNSVIEKMNTQFTAVGKEFNHLEKRIENLNKKVDDGFLDIWTYNAELLVLLENERTLDYHDSNVKNLYEKVRSQLKNNAKEIGNGCFEFYHKCDNTCMESVKNGTYDYPKYSEEAKLNREEIDGVKLESTRIYQILAIYSTVASSLVLVVSLGAISFWMCSNGSLQCRICI

SEQ ID NO: 4425 - protein, 566 aa, synthetic construct; identical to SEQ ID NO: 2669
  REGION 1..566: note = hemagglutinin__InfluenzaA__ADD98208

SEQ ID NO: 4426 - protein, 566 aa, synthetic construct; identical to SEQ ID NO: 2849
  REGION 1..566: note = hemagglutinin__InfluenzaA__ADE20321

SEQ ID NO: 4427 - protein, 566 aa, synthetic construct; identical to SEQ ID NO: 2849
  REGION 1..566: note = hemagglutinin__InfluenzaA__ADE20331

SEQ ID NO: 4428 - protein, 566 aa, synthetic construct; identical to SEQ ID NO: 2849
  REGION 1..566: note = hemagglutinin__InfluenzaA__ADE20341

SEQ ID NO: 4429 - protein, 566 aa, synthetic construct; identical to SEQ ID NO: 4257
  REGION 1..566: note = hemagglutinin__InfluenzaA__ADE20351

SEQ ID NO: 4430 - protein, 566 aa, synthetic construct; identical to SEQ ID NO: 2849
  REGION 1..566: note = hemagglutinin__InfluenzaA__ADE20375

SEQ ID NO: 4431 - protein, 566 aa, synthetic construct; identical to SEQ ID NO: 4257
  REGION 1..566: note = hemagglutinin__InfluenzaA__ADE20388

SEQ ID NO: 4432 - protein, 566 aa, synthetic construct; identical to SEQ ID NO: 2849
  REGION 1..566: note = hemagglutinin__InfluenzaA__ADE20628

SEQ ID NO: 4433 - protein, 566 aa, synthetic construct; identical to SEQ ID NO: 4257
  REGION 1..566: note = hemagglutinin__InfluenzaA__ADE20638

SEQ ID NO: 4434 - protein, 566 aa, synthetic construct; identical to SEQ ID NO: 2849
  REGION 1..566: note = hemagglutinin__InfluenzaA__ADE20648

SEQ ID NO: 4435 - protein, 566 aa, synthetic construct; identical to SEQ ID NO: 2849
  REGION 1..566: note = hemagglutinin__InfluenzaA__ADE20658

SEQ ID NO: 4436 - protein, 566 aa, synthetic construct; identical to SEQ ID NO: 4257
  REGION 1..566: note = hemagglutinin__InfluenzaA__ADE20668

SEQ ID NO: 4437 - protein, 566 aa, synthetic construct; identical to SEQ ID NO: 4257
  REGION 1..566: note = hemagglutinin__InfluenzaA__ADE20678

SEQ ID NO: 4438 - protein, 566 aa, synthetic construct; identical to SEQ ID NO: 2849
  REGION 1..566: note = hemagglutinin__InfluenzaA__ADE20688

SEQ ID NO: 4439 - protein, 566 aa, synthetic construct; identical to SEQ ID NO: 2849
  REGION 1..566: note = hemagglutinin__InfluenzaA__ADE20708

SEQ ID NO: 4440 - protein, 566 aa, synthetic construct; identical to SEQ ID NO: 2849
  REGION 1..566: note = hemagglutinin__InfluenzaA__ADE20718

SEQ ID NO: 4441 - protein, 566 aa, synthetic construct
  REGION 1..566: note = hemagglutinin__InfluenzaA__ADE20728
MKAILVVLLYTFATANADTLCIGYHANNSTDTVDTVLEKNVTVTHSVNILEDKHNGKLCKLKGVAPLHLGKCNIAGWILGNPECESLSTASSWSYIVETSSSDNGTCYPGDFIDYEELREQLSSVSSFERFEIFPKTSSWPNHDSNKGVTAACPHAGAKSFYKNLIWLVKKGNSYPKLSKSYINDKGKEVLVLWGIHHPSTSADQQSLYQNADAYVFVGSSKYSKKFKPEIAIRPKVRDQEGRMNYYWTLVEPGDKITFEATGNLVVPRYAFAMERNAGSGIIISDTPVHDCNTTCQTPKGAINTSLPFQNIHPITIGKCPKYVKSTKLRLATGLRNVPSIQSRGLFGAIAGFIEGGWTGMVDGWYGYHHQNEQGSGYAADLKSTQNAIDEITNKVNSVIEKMNTQFTAVGKEFNHLEKRIENLNKKVDDGFLDIWTYNAELLVLLENERTLDYHDSNVKNLYEKVRSQLKNNAKEIGNGCFEFYHKCDNTCMESVKNGTYDYPKYSEEAKLNREEIDGVKLESTRIYQILAIYSTVASSLVLVVSLGAISFWMCSNGSLQCRICI

SEQ ID NO: 4442 - protein, 566 aa, synthetic construct; identical to SEQ ID NO: 2849
  REGION 1..566: note = hemagglutinin__InfluenzaA__ADE20738

SEQ ID NO: 4443 - protein, 566 aa, synthetic construct; identical to SEQ ID NO: 2849
  REGION 1..566: note = hemagglutinin__InfluenzaA__ADE20748

SEQ ID NO: 4444 - protein, 566 aa, synthetic construct; identical to SEQ ID NO: 4441
  REGION 1..566: note = hemagglutinin__InfluenzaA__ADE20758

SEQ ID NO: 4445 - protein, 566 aa, synthetic construct; identical to SEQ ID NO: 2849
  REGION 1..566: note = hemagglutinin__InfluenzaA__ADE20768

SEQ ID NO: 4446 - protein, 566 aa, synthetic construct
  REGION 1..566: note = hemagglutinin__InfluenzaA__ADE20778
MKAILVVLLYTFATANADTLCIGYHANNSTDTVDTVLEKNVTVTHSVNILEDKHNGKLCKLKGVAPLHLGKCNIAGWILGNPECESLSTASSWSYIVETSSSDNGTCYPGDFIDYEELREQLSSVSSFERFEIFPKTSSWPNHDSNKGVTAACPHAGAKSFYKNLIWLVKKGNSYPKLSKSYINDKGKKVLVLWGIHHPSTSADQQSLYQNADAYVFVGSSKYSKKFKPEIAIRPKVRDQEGRMNYYWTLVEPGDKITFEATGNLVVPRYAFAMERNAGSGIIISDTPVHDCNTTCQTPKGAINTSLPFQNIHPITIGKCPKYVKSTKLRLATGLRNVPSIQSRGLFGAIAGFIEGGWTGMVDGWYGYHHQNEQGSGYAADLKSTQNAIDEITNKVNSVIEKMNTQFTAVGKEFNHLEKRIENLNKKVDDGFLDIWTYNAELLVLLENERTLDYHDSNVKNLYEKVRSQLKNNAKEIGNGCFEFYHKCDNTCMESVKNGTYDYPKYSEEAKLNREEIDGVKLESTRIYQILAIYSTVASSLVLVVSLGAISFWMCSNGSLQCRICI

SEQ ID NO: 4447 - protein, 566 aa, synthetic construct; identical to SEQ ID NO: 3833
  REGION 1..566: note = hemagglutinin__InfluenzaA__ADE20788

SEQ ID NO: 4448 - protein, 566 aa, synthetic construct
  REGION 1..566: note = hemagglutinin__InfluenzaA__ADE20808
MKAILVVLLYTFATANADTLCIGYHANNSTDTVDTVLEKNVTVTHSVNLLEDKHNGKLCKLRGVAPLHLGKCNIAGWILGNPECESLSTASSWSYIVETSSSDNGTCYPGDFIDYEELREQLSSVSSFERFEIFPKTSSWPNHDSNKGVTAACPHAGAKSFYKNLIWLVKKGNSYPKLSKSYINDKEKEVLVLWGIHHPSTSADQQSLYQNADAYVFVGTSRYSKKFKPEIAIRPKVRDQEGRMNYYWTLVEPGDKITFEATGNLVVPRYAFAMERNAGSGIIISDTPVHDCNTTCQTPKGAINTSLPFQNIHPITIGKCPKYVKSTKLRLATGLRNVPSIQSRGLFGAIAGFIEGGWTGMVDGWYGYHHQNEQGSGYAADLKSTQNAIDKITNKVNSVIEKMNTQFTAVGKEFNHLEKRIENLNKKVDDGFLDIWTYNAELLVLLENERTLDYHDSNVKNLYEKVRSQLKNNAKEIGNGCFEFYHKCDNTCMESVKNGTYDYPKYSEEAKLNREEIDGVKLESTRIYQILAIYSTVASSLVLVVSLGAISFWMCSNGSLQCRICI

SEQ ID NO: 4449 - protein, 566 aa, synthetic construct; identical to SEQ ID NO: 3833
  REGION 1..566: note = hemagglutinin__InfluenzaA__ADE20818

SEQ ID NO: 4450 - protein, 566 aa, synthetic construct; identical to SEQ ID NO: 4391
  REGION 1..566: note = hemagglutinin__InfluenzaA__ADE20828

SEQ ID NO: 4451 - protein, 566 aa, synthetic construct
  REGION 1..566: note = hemagglutinin__InfluenzaA__ADE20848
MKAILVVLLYTFATANADTLCIGYHANNSTDTVDTVLEKNVTVTHSVNLLEDKHNGKLCKLRGVAPLHLGKCNIAGWILGNPECESLSTASSWSYIVETSSSDNGTCYPGDFINYEELREQLSSVSSFERFEIFPKTSSWPNHDSNKGVTAACPHAGAKSFYKNLIWLVKKGNSYPKLSKSYINDKGKEVLVLWGIHHPSTSADQQSLYQNADAYVFVGTSRYSKKFKPEIAIRPKVRDQEGRMNYYWTLVEPGDKITFEATGNLVVPRYAFAMERNAGSGIIISDTPVHDCNTTCQTPKGAINTSLPFQNIHPITIGKCPKYVKSTKLRLATGLRNVPSIQSRGLFGAIAGFIEGGWTGMIDGWYGYHHQNEQGSGYAADLKSTQNAIDKITNKVNSVIEKMNTQFTAVGKEFNHLEKRIENLNKKVDDGFLDIWTYNAELLVLLENERTLDYHDSNVKNLYEKVRSQLKNNAKEIGNGCFEFYHKCDNTCMESVKNGTYDYPKYSEEAKLNREEIDGVKLESTRIYQILAIYSTVASSLVLVVSLGAISFWMCSNGSLQCRICI

SEQ ID NO: 4452 - protein, 566 aa, synthetic construct; identical to SEQ ID NO: 3833
  REGION 1..566: note = hemagglutinin__InfluenzaA__ADE20858

SEQ ID NO: 4453 - protein, 566 aa, synthetic construct
  REGION 1..566: note = hemagglutinin__InfluenzaA__ADE20868
MKAILVVLLYTFATANADTLCIGYHANNSTDTVDTVLEKNVTVTHSVNLLEGKHNGKLCKLRGVAPLHLGKCNIAGWILGNPECESLTTASSWSYIVETSSSDNGTCYPGDFIDYEELREQLSSVSSFERFEMFPKTSSWPNHDSNKGVTAACPHAGAKSFYKNLIWLVKKGNSYPKLSKSYINDKGKEVLVLWGIHHPSTSADQQSLYQNADAYVFVGTSRYSKKFKPEIAIRPKVRDQEGRMNYYWTLVEPGDKITFEATGNLVVPRYAFAMERNAGSGIIISDTPVHDCNTTCQTPKGAINTSLPFQNIHPITIGKCPKYVKSTKLRLATGLRNVPSIQSRGLFGAIAGFIEGGWTGMVDGWYGYHHQNEQGSGYAADLKSTQNAIDEITNKVNSVIEKMNTQFTAVGKEFNHLEKRIENLNKKVDDGFLDIWTYNAELLVLLENERTLDYHDSNVKNLYEKVRSQLKNNAKEIGNGCFEFYHKCDNTCMESVKNGTYDYPKYSEEAKLNREEIDGVKLESTRIYQILAIYSTVASSLVLVVSLGAISFWMCSNGSLQCRICI

SEQ ID NO: 4454 - protein, 566 aa, synthetic construct; identical to SEQ ID NO: 4387
  REGION 1..566: note = hemagglutinin__InfluenzaA__ADE20878

SEQ ID NO: 4455 - protein, 566 aa, synthetic construct; identical to SEQ ID NO: 3771
  REGION 1..566: note = hemagglutinin__InfluenzaA__ADE20888

SEQ ID NO: 4456 - protein, 566 aa, synthetic construct
  REGION 1..566: note = hemagglutinin__InfluenzaA__ADE20898
MKAILVVLLYTFATANADTLCIGYHANNSTDTVDTILEKNVTVTHSVNLLEDKHNGKLCKLRGVAPLHLGKCNIAGWILGNPECESLSTASSWSYIVETSSSDNGTCYPGDFIDYEELREQLSSVSSFERFEIFPKTSSWPNHDSNKGVTAACPHAGAKSFYKNLIWLVKKGNSYPKLSKSYINDKGKEILVLWGIHHPSTSADQQSLYQNADAYVFVGTSRYSKKFKPEIAIRPKVRDQEGRMNYYWTLVEPGDKITFEATGNLVVPRYAFAMERNAGSGIIISDTPVHDCNTTCQTPKGAINTSLPFQNIHPITIGKCPKYVKSTKLRLATGLRNVPSIQSRGLFGAIAGFIEGGWTGMVDGWYGYHHQNEQGSGYAADLKSTQNAIDEITNKVNSVIEKMNTQFTAVGKEFNHLEKRIENLNKKVDDGFLDIWTYNAELLVLLENERTLDYHDSNVKNLYEKVRSQLKNNAKEIGNGCFEFYHKCDNTCMEGVKNGTYDYPKYSEEAKLNREEIDGVKLESTRIYQILAIYSTVASSLVLVVSLGAISFWMCSNGSLQCRICI

SEQ ID NO: 4457 - protein, 566 aa, synthetic construct; identical to SEQ ID NO: 4420
  REGION 1..566: note = hemagglutinin__InfluenzaA__ADE20908

SEQ ID NO: 4458 - protein, 566 aa, synthetic construct
  REGION 1..566: note = hemagglutinin__InfluenzaA__ADE20918
MKAILVVLLYTFATANADTLCIGYHANNSTDTVDTVLEKNVTVTHSVNILEDKHNGKLCKLRGVAPLHLGKCNIAGWILGNPECESLSTASSWSYIVETSSSDNGTCYPGDFIDYEELREQLSSVSSFERFEIFPKTSSWPNHDSNKGVTAACPHAGAKSFYKNLIWLVKKGNSYPKLSKSYINDKGKEVLVLWGIHHPSTSADQQSLYQNADAYVFVGTSRYSKKFKPEIAIRPKVRDQEGRMNYYWILVEPGDKITFEATGNLVVPRYAFAMERNAGSGIIISDTPVHDCNTTCQTPKGAINTSLPFQNIHPITIGKCPKYVKSTKLRLATGLRNVPSIQSRGLFGAIAGFIEGGWTGMVDGWYGYHHQNEQGSGYAADLKSTQNAIDEITNKVNSVIEKMNTQFTAVGKEFNHLEKRIENLNKKVDDGFLDIWTYNAELLVLLENERTLDYHDSNVKNLYEKVRSQLKNNAKEIGNGCFEFYHKCDNTCMESVKNGTYDYPKYSEEAKLNREEIDGVKLESTRIYQILAIYSTVASSLVLVVSLGAISFWMCSNGSLQCRICI

SEQ ID NO: 4459 - protein, 566 aa, synthetic construct; identical to SEQ ID NO: 3022
  REGION 1..566: note = hemagglutinin__InfluenzaA__ADE20928

SEQ ID NO: 4460 - protein, 566 aa, synthetic construct
  REGION 1..566: note = hemagglutinin__InfluenzaA__ADE20948
MKAILVVLLYTFATANADTLCIGYHANNSTDTVDTVLEKNVTVTHSVNLLEDKHNGKLCKLRGVAPLHLGKCNIAGWILGNPECESLSTASSWSYIVETSSSDNGTCYPGDFINYEELREQLSSVSSFERFEIFPKTSSWPNHDSNKGVTAACPHAGAKSFYKNLIWLVKKGNSYPKLSKSYINDKGKEVLVLWGIHHPSTSADQQSLYQNADSYVFVGTSRYSKKFKPEIAIRPKVRDQEGRMNYYWTLVEPGDKITFEATGNLVVPRYAFAMERNAGSGIIISDTPVHDCNTTCQTPKGAINTSLPFQNIHPITIGKCPKYVKSTKLRLATGLRNVPSIQSRGLFGAIAGFIEGGWTGMVDGWYGYHHQNEQGSGYAADLKSTQNAIDKITNKVNSVIEKMNTQFTAVGKEFNHLEKRIENLNKKVDDGFLDIWTYNAELLVLLENERTLDYHDSNVKNLYEKVRSQLKNNAKEIGNGCFEFYHKCDNTCMESVKNGTYDYPKYSEEAKLNREEIDGVKLESTRIYQILAIYSTVASSLVLVVSLGAISFWMCSNGSLQCRICI

SEQ ID NO: 4461 - protein, 566 aa, synthetic construct
  REGION 1..566: note = hemagglutinin__InfluenzaA__ADE20968
MKAILVVLLYTFATANADTLCIGYHANNSTDTVDTVLEKNVTVTHSVNLLEDKHNGKLCKLRGEAPLHLGKCNIAGWILGNPECESLSTASSWSYIVETSSSDNGTCYPGDFINYEELREQLSSVSSFERFEIFPKTSSWPNHDSNKGVTAACPHSGAKSFYKNLIWLVKKGNSYPKLSKSYINDKGKEVLVLWGIHHPSTSADQQSLYQNADAYVFVGTSRYSKKFKPEIAIRPKVRDQEGRMNYYWTLVEPGDKITFEATGNLVVPRYAFAMERNAGSGIIISDTPVHDCNTTCQTPKGAINTSLPFQNIHPITIGKCPKYVKSTKLRLATGLRNVPSIQSRGLFGAIAGFIEGGWTGMVDGWYGYHHQNEQGSGYAADLKSTQNAIDKITNKVNSVIEKMNTQFTAVGKEFNHLEKRIENLNKKVDDGFLDIWTYNAELLVLLENERTLDYHDSNVKNLYEKVRSQLKNNAKEIGNGCFEFYHKCDNTCMESVKNGTYDYPKYSEEAKLNREEIDGVKLESTRIYQILAIYSTVASSLVLVVSLGAISFWMCSNGSLQCRICI

SEQ ID NO: 4462 - protein, 566 aa, synthetic construct; identical to SEQ ID NO: 3833
  REGION 1..566: note = hemagglutinin__InfluenzaA__ADE20978

SEQ ID NO: 4463 - protein, 566 aa, synthetic construct
  REGION 1..566: note = hemagglutinin__InfluenzaA__ADE20988
MKAILVVLLYTFATANADTLCIGYHANNSTDTVDTVLEKNVTVTHSVNLLEDKHNGKLCKLRGVAPLHLGKCNIAGWILGNPECESLSTASSWSYIVETSSSDNGTCYPGDFIDYEELREQLSSVSSFERFEIFPKTSSWPNHDSNKGVTAACPHAGAKSFYKNLIWLVKKGNSYPKLSKSYINDKGKEVLVLWGIHHPSTSTDQQSLYQNADAYVFVGTSRYSKKFKPEIAIRPKVRDQEGRMNYYWTLVEPGDKITFEATGNLVVPRYAFAMERNAGSGIIISDTPVHDCNTTCQTPKGAINTSLPFQNIHPITIGKCPKYVKSTKLRLATGLRNIPSIQSRGLFGAIAGFIEGGWTGMVDGWYGYHHQNEQGSGYAADLKSTQNAIDEITNKVNSVIEKMNTQFTAVGKEFNHLEKRIENLNKKVDDGFLDIWTYNAELLVLLENERTLDYHDSNVKNLYEKVRSQLKNNAKEIGNGCFEFYHKCDNTCMESVKNGTYDYPKYSEEAKLKREEIDGVKLESTRIYQILAIYSTVASSLVLVVSLGAISFWMCSNGSLQCRICI

SEQ ID NO: 4464 - protein, 566 aa, synthetic construct; identical to SEQ ID NO: 3833
  REGION 1..566: note = hemagglutinin__InfluenzaA__ADE20998

SEQ ID NO: 4465 - protein, 566 aa, synthetic construct; identical to SEQ ID NO: 3997
  REGION 1..566: note = hemagglutinin__InfluenzaA__ADE21008

SEQ ID NO: 4466 - protein, 566 aa, synthetic construct
  REGION 1..566: note = hemagglutinin__InfluenzaA__ADE21018
MKAILVVLLYTFATANADTLCIGYHANNSTDTVDTVLEKNVTVTHSVNLLEDKHNGKLCKLRGVAPLHLGKCNIAGWILGNPECESLSTASSWSYIVETSSSDNGTCYPGDFIDYEELREQLSSVSSFERFEIFPKTSSWPNHDSNKGVTTACPHAGAKSFYKNLIWLVKKGNSYPKLSKSYINDKGKEVLVLWGIHHPSTSTDQQSLYQNADAYVFVGTSRYSKKFKPEIAIRPKVRDQEGRMNYYWTLVEPGDKITFEATGNLVVPRYAFAMERNAGSGIIISDTPVHDCNTTCQTPKGAINTSLPFQNIHPITIGKCPKYVKSTKLRLATGLRNIPSIQSRGLFGAIAGFIEGGWTGMVDGWYGYHHQNEQGSGYAADLKSTQNAIDEITNKVNSVIEKMNTQFTAVGKEFNHLEKRIENLNKKVDDGFLDIWTYNAELLVLLENERTLDYHDSNVKNLYEKVRSQLKNNAKEIGNGCFEFYHKCDNTCMESVKNGTYDYPKYSEEAKLNREEIDGVKLESTRIYQILAIYSTVASSLVLVVSLGAISFWMCSNGSLQCRICI

SEQ ID NO: 4467 - protein, 566 aa, synthetic construct; identical to SEQ ID NO: 4407
  REGION 1..566: note = hemagglutinin__InfluenzaA__ADE21028

SEQ ID NO: 4468 - protein, 566 aa, synthetic construct; identical to SEQ ID NO: 4397
  REGION 1..566: note = hemagglutinin__InfluenzaA__ADE21038

SEQ ID NO: 4469 - protein, 566 aa, synthetic construct; identical to SEQ ID NO: 4420
  REGION 1..566: note = hemagglutinin__InfluenzaA__ADE21048

SEQ ID NO: 4470 - protein, 566 aa, synthetic construct
  REGION 1..566: note = hemagglutinin__InfluenzaA__ADE21058
MKAILVVLLYTFATANADTLCIGYHANNSTDTVDTVLEKNVTVTHSVNLLEDKHNGKLCKLRGVAPLHLGKCNIAGWILGNPECESLSTASSWSYIVETSSSDNGTCYPGDFIDYEELREQLSSVSSFERFEIFPKTSSWPNHDSNKGVTAACPHAGAKSFYKNLIWLVKKGNSYPKLSKSYINDKGKEVLVLWGIHHPSTSADQQSLYQNADAYVFVGTSRYSKKFKPEIAIRPKVRDQEGRINYYWTLVEPGDKITFEATGNLVVPRYAFAMERNAGSGIIISDTPAHDCNTTCQTPKGAINTSLPFQNIHPITIGKCPKYVKSTKLRLATGLRNVPSIQSRGLFGAIAGFIEGGWTGMVDGWYGYHHQNEQGSGYAADLKSTQNAIDKITNKVNSVIEKMNTQFTAVGKEFNHLEKRIENLNKKVDDGFLDIWTYNAELLVLLENERTLDYHDSNVKNLYEKVRSQLKNNAKEIGNGCFEFYHKCDNTCMESVKNGTYDYPKYSEEAKLNREEIDGVKLESTRIYQILAIYSTVASSLVLVVSLGAISFWMCSNGSLQCRICI

SEQ ID NO: 4471 - protein, 566 aa, synthetic construct
  REGION 1..566: note = hemagglutinin__InfluenzaA__ADE21068
MKAILVVLLYTFATANADTLCIGYHANNSTDTVDTVLEKNVTVTHSVNLLEDKHNGKLCKLRGVAPLHLGKCNIAGWILGNPECESLSTASSWSYIVETSSSDNGTCYPGDFIDYEELREQLSSVSSFERFEIFPKTSSWPNHDSNKGVTAACPHAGAKSFYKNLIWLVKKGNSYPKLSKSYINDKGKEVLVLWGIHHPSTSADQQSLYQNADAYVFVGTSRYSKKFKPEIAIRPKVREQEGRMNYYWTLVEPGDKITFEATGNLVVPRYAFAMERNAGSGIIISDTPVHDCNTTCQTPKGAINTSLPFQNIHSITIGKCPKYVKSTKLRLATGLRNVPSIQSRGLFGAIAGFIEGGWTGMVDGWYGYHHQNEQGSGYAADLKSTQNAIDEITNKVNSVIEKMNTQFTAVGKEFNHLEKRIENLNKKVDDGFLDIWTYNAELLVLLENERTLDYHDSNVKNLYEKVRSQLKNNAKETGNGCFEFYHKCDNTCMESVKNGTYDYPKYSEEAKLNREEIDGVKLESTRIYQILAIYSTVASSLVLVVSLGAISFWMCSNGSLQCRICI

SEQ ID NO: 4472 - protein, 565 aa, synthetic construct
  REGION 1..565: note = hemagglutinin__InfluenzaA__ADE28761
MKVKLLVLLCTFTATYADTICIGYHANNSTDTVDTVLEKNVTVTHSVNLLENSHNGKLCLLKGIAPLQLGNCSVAGWILGNPECELLISKESWSYIVEKPNPENGTCYPGHFADYEELREQLSSVSSFERFEIFPKESSWPNHTVTGVSASCSHNGESSFYRNLLWLTGKNGLYPNLSKSYANNKEKEVLVLWGVHHPPNIGNQKTLYHTENAYVSVVSSHYSRKFTPEIAKRPKVRDQEGRINYYWTLLEPGDTIIFEANGNLIAPRYAFALSRGFGSGIINSNAPMDKCDAKCQTPQGAINSSLPFQNVHPVTIGECPKYVRSAKLRMVTGLRNIPSIQSRGLFGAIAGFIEGGWTGMVDGWYGYHHQNEQGSGYAADQKSTQNAINGITNKVNSVIEKMNTQFTAVGKEFNKLERRMENLNKKVDDGFIDIWTYNAELLVLLENERTLDFHESNVKNLYEKVKSQLKNNAKEIGNGCFEFYHKCNDECMESVKNGTYDYPKYSEESKLNREKIDGVKLESMEVYQILAIYSTVASSLVLLVSLGAISFWMCSNGSLQCRICI

SEQ ID NO: 4473 - protein, 566 aa, synthetic construct; identical to SEQ ID NO: 2849
  REGION 1..566: note = hemagglutinin__InfluenzaA__ADE28780

SEQ ID NO: 4474 - protein, 566 aa, synthetic construct; identical to SEQ ID NO: 4257
  REGION 1..566: note = hemagglutinin__InfluenzaA__ADE28790

SEQ ID NO: 4475 - protein, 566 aa, synthetic construct; identical to SEQ ID NO: 4441
  REGION 1..566: note = hemagglutinin__InfluenzaA__ADE28800

SEQ ID NO: 4476 - protein, 566 aa, synthetic construct; identical to SEQ ID NO: 3833
  REGION 1..566: note = hemagglutinin__InfluenzaA__ADE28810

SEQ ID NO: 4477 - protein, 566 aa, synthetic construct
  REGION 1..566: note = hemagglutinin__InfluenzaA__ADE28820
MKAILVVLLYTFATANADTLCIGYHANNSTDTVDTVLEKNVTVTHSVNLLEDKHNGKLCKLRGVAPLHLGKCNIAGWILGSPECESLSTASSWSYIVETSSSDNGTCYPGDFIDYEELREQLSSVSSFERFEIFPKTSSWPNHDSNKGVTAACPHAGAKSFYKNLIWLVKKGNSYPKLSKSYINDKGKEVLVLWGIHHPSTSADQQSLYQNADAYVFVGTSRYSKKFKPEIAIRPKVRDQEGRMNYYWTLVEPGDKITFEATGNLVVPRYAFAMERNAGSGIIISDTPVHDCNTTCQTPKGAINTSLPFQNIHPITIGKCPKYVKSTKLRLATGLRNVPSIQSRGLFGAIAGFIEGGWTGMVDGWYGYHHQNEQGSGYAADLKSTQNAIDKITNKVNSVIEKMNTQFTAVGKEFNHLEKRIENLNKKVDDGFLDIWTYNAELLVLLENERTLDYHDSNVKNLYEKVRSQLKNNAKEIGNGCFEFYHKCDNTCMESVKNGTYDYPKYSEEAKLNREEIDGVKLESTRIYQILAIYSTVASSLVLVVSLGAISFWMCSNGSLQCRICI

SEQ ID NO: 4478 - protein, 566 aa, synthetic construct; identical to SEQ ID NO: 2849
  REGION 1..566: note = hemagglutinin__InfluenzaA__ADE28830

SEQ ID NO: 4479 - protein, 566 aa, synthetic construct; identical to SEQ ID NO: 2849
  REGION 1..566: note = hemagglutinin__InfluenzaA__ADE28840

SEQ ID NO: 4480 - protein, 566 aa, synthetic construct; identical to SEQ ID NO: 2849
  REGION 1..566: note = hemagglutinin__InfluenzaA__ADE28850

SEQ ID NO: 4481 - protein, 566 aa, synthetic construct; identical to SEQ ID NO: 2849
  REGION 1..566: note = hemagglutinin__InfluenzaA__ADE28881

SEQ ID NO: 4482 - protein, 566 aa, synthetic construct; identical to SEQ ID NO: 2849
  REGION 1..566: note = hemagglutinin__InfluenzaA__ADE28891

SEQ ID NO: 4483 - protein, 566 aa, synthetic construct; identical to SEQ ID NO: 4352
  REGION 1..566: note = hemagglutinin__InfluenzaA__ADE28911

SEQ ID NO: 4484 - protein, 566 aa, synthetic construct; identical to SEQ ID NO: 3833
  REGION 1..566: note = hemagglutinin__InfluenzaA__ADE28921

SEQ ID NO: 4485 - protein, 566 aa, synthetic construct; identical to SEQ ID NO: 3833
  REGION 1..566: note = hemagglutinin__InfluenzaA__ADE28931

SEQ ID NO: 4486 - protein, 566 aa, synthetic construct; identical to SEQ ID NO: 3022
  REGION 1..566: note = hemagglutinin__InfluenzaA__ADE28951

SEQ ID NO: 4487 - protein, 566 aa, synthetic construct
  REGION 1..566: note = hemagglutinin__InfluenzaA__ADE28961
MKAILVVLLYTFATANADTLCIGYHANNSTDTVDTVLEKNVTVTHSVNLLEDKHNGKLCKLRGVAPLHLGKCNVAGWILGNPECESLSTASSWSYIVETSSSDNGTCYPGDFIDYEELREQLSSVSSFERFEIFPKTSSWPNHDSNKGVTAACPHAGAKSFYKNLIWLVKKGNSYPKLSKSYINDKGKEVLVLWGIHHPSTSADQQSLYQNADAYVFVGTSRYSKKFKPEIAIRPKVRDQEGRMNYYWTLVEPGDKITFEATGNLVVPRYAFAMERNAGSGIIISDTPVHDCNTTCQTPKGAINTSLPFQNIHPITIGKCPKYVKSTKLRLATGLRNVPSIQSRGLFGAIAGFIEGGWTGMVDGWYGYHHQNEQGSGYAADLKSTQNAIDEITNKVNSVIEKMNTQFTAVGKEFNHLEKRIENLNKKVDDGFLDIWTYNAELLVLLENERTLDYHDSNVKNLYEKVRSQLKNNAKEIGNGCFEFYHKCDNTCMESVKNGTYDYPKYSEEAKLNREEIDGVKLESTRIYQILAIYSTVASSLVLVVSLGAISFWMCSNGSLQCRICI

SEQ ID NO: 4488 - protein, 566 aa, synthetic construct; identical to SEQ ID NO: 4373
  REGION 1..566: note = hemagglutinin__InfluenzaA__ADE28971

SEQ ID NO: 4489 - protein, 566 aa, synthetic construct
  REGION 1..566: note = hemagglutinin__InfluenzaA__ADE28981
MKAILVVLLYTFATANADTLCIGYHANNSTETVDTVLEKNVTVTHSVNLLEDKHNGKLCKLRGVAPLHLGKCNIAGWILGNPECESLSTASSWSYIVETSSSDNGTCYPGDFIDYEELREQLSSVSSFERFEIFPKTSSWPNHDSNKGVTAACPHAGAKSFYKNLIWLVKKGNSYPKLSKSYINDKGKEVLVLWGIHHPSTSADQQSLYQNADAYVFVGTSRYSKKFKPEIAIRPKVRDQEGRMNYYWTLVEPGDKITFEATGNLVVPRYAFAMERNAGSGIIISDTPVHDCNTTCQTPKGAINTSLPFQNIHPITIGKCPKYVKSTKLRLATGLRNVPSIQSRGLFGAIAGFIEGGWTGMVDGWYGYHHQNEQGSGYAADLKSTQNAIDKITNKVNSVIEKMNTQFTAVGKEFNHLEKRIENLNKKVDDGFLDIWTYNAELLVLLENERTLDYHDSNVKNLYEKVRSQLKNNAKEIGNGCFEFYHKCDNTCMESVKNGTYDYPKYSEEAKLNREEIDGVKLESTRIYQILAIYSTVASSLVLVVSLGAISFWMCSNGSLQCRICI

SEQ ID NO: 4490 - protein, 566 aa, synthetic construct; identical to SEQ ID NO: 3833
  REGION 1..566: note = hemagglutinin__InfluenzaA__ADE28991

SEQ ID NO: 4491 - protein, 566 aa, synthetic construct
  REGION 1..566: note = hemagglutinin__InfluenzaA__ADE29001
MKAILVVLLYTFATANADTLCIGYHANNSTDTVDTVLERNVTVTHSVNLLEDKHNGKLCKLKGVAPLHLGKCNIAGWILGNPECESLSTASSWSYIVETSSSDNGTCYPGDFIDYEELREQLSSVSSFERFEIFPKTSSWPNHDSNKGVTAACPHAGAKSFYKNLIWLVKKGNSYPKLSKSYINDKGKEVLVLWGIHHPSTSADQQSLYQNADAYVFVGTSRYSKKFKPEIAIRPKVRDQEGRMNYYWTLVEPGDKITFEATGNLVVPRYAFAMERNAGSGIIISDTPVHDCNTTCQTPKGAINTSLPFQNIHPITIGKCPKYVKSTKLRLATGLRNVPSIQSRGLFGAIAGFIEGGWTGMVDGWYGYHHQNEQGSGYAADLKSTQNAIDEITNKVNSVIEKMNTQFTAVGKEFNHLEKRIENLNKKVDDGFLDIWTYNAELLVLLENERTLDYHDSNVKNLYEKVRSQLKNNAKEIGNGCFEFYHKCDNTCMESVKNGTYDYPKYSEEAKLNREEIDGVKLESTRIYQILAIYSTVASSLVLVVSLGAISFWMCSNGSLQCRICI

SEQ ID NO: 4492 - protein, 566 aa, synthetic construct; identical to SEQ ID NO: 2911
  REGION 1..566: note = hemagglutinin__InfluenzaA__ADE29011

SEQ ID NO: 4493 - protein, 566 aa, synthetic construct
  REGION 1..566: note = hemagglutinin__InfluenzaA__ADE29021
MKAILVVLLYTFATANADTLCIGYHANNSTDTVDTVLEKNVTVTHSVNLLEDKHNGKLCKLRGVAPLHLGKCNIAGWILGNPECESLSTASSWSYIVETSGSDNGTCYPGDFIDYEELREQLSSVSSFERFEIFPKTSSWPNHDSNKGVTAACPHAGAKSFYKNLIWLVKKGNSYPKLSKSYINDKGKEVLVLWGIHHPSTSTDQQSLYQNADAYVSVGTSRYSKKFKPEIAIRPKVRDQEGRMNYYWTLVEPGDKITFEATGNLVVPRYAFAMERNAGSGIIISDTPVHDCNTTCQTPKGAINTSLPFQNIHPITIGKCPKYVKSTKLRLATGLRNVPSIQSRGLFGAIAGFIEGGWTGMVDGWYGYHHQNEQGSGYAADLKSTQNAIDKITNKVNSVIEKMNTQFTAVGKEFNHLEKRIENLNKKVDDGFLDIWTYNAELLVLLENERTLDYHDSNVKNLYEKVRSQLKNNAKEIGNGCFEFYHKCDNTCMESVKNGTYDYPKYSEEAKLNREEIDGVKLESTRIYQILAIYSTVASSLVLVVSLGAISFWMCSNGSLQCRICI

SEQ ID NO: 4494 - protein, 566 aa, synthetic construct; identical to SEQ ID NO: 4318
  REGION 1..566: note = hemagglutinin__InfluenzaA__ADE29031

SEQ ID NO: 4495 - protein, 566 aa, synthetic construct
  REGION 1..566: note = hemagglutinin__InfluenzaA__ADE29041
MKAILVVLLYTFATANADTLCIGYHANNSTDTVDTVLEKNVTVTHSVNLLEDKHNGKLCKLRGVAPLHLGKCNIAGWILGNPECESLSTASSWSYIVETSSSDNGTCYPGDFIDYEELREQLSSVSSFERFEIFPKTSSWPNHDSNKGVTAACPHAGAKSFYKNLIWLVKKGNSYPKLSKSYINDKGKEVLVLWGIHHPSTSADQQSLYQNADAYVFVGTSRYSKKFKPEIAIRPKVRDQEGRMNYYWTLVEPGDKITFEATGNLVVPRYAFAMEKNAGSGIIISDTPVHDCNTTCQTPKGAINTSLPFQNIHPITIGKCPKYVKSTKLRLATGLRNVPSIQSRGLFGAIAGFIEGGWTGMVDGWYGYHHQNEQGSGYAADLKSTQNAIDEITNKVNSVIEKMNTQFTAVGKEFNHLEKRIENLNKKVDDGFLDIWTYNAELLVLLENERTLDYHDSNVKNLYEKVRSQLKNNAKEIGNGCFEFYHKCDNTCMESVKNGTYDYPKYSEEAKLNREEIDGVKLESTRIYQILAIYSTVASSLVLVVSLGAISFWMCSNGSLQCRICI

SEQ ID NO: 4496 - protein, 566 aa, synthetic construct; identical to SEQ ID NO: 4318
  REGION 1..566: note = hemagglutinin__InfluenzaA__ADE29051

SEQ ID NO: 4497 - protein, 566 aa, synthetic construct
  REGION 1..566: note = hemagglutinin__InfluenzaA__ADE29085
MKAILVVLLYTFATANADTLCIGYHANNSTDTVDTVLEKNVTVTHSVNLLEDKHNGKLCKLRGVAPLHLGKCNIAGWILGNPECESLSTASSWSYIVETPSSDNGTCYPGDFIDYEELREQLSSVSSFERFEIFPKTSSWPNHDSNKGVTAACPHAEAKSFYKNLIWLVKKGNSYPKLSKSYINDKGKEVLVLWGIHHPSTSADQQSLYQNADAYVFVGSSRYSKTFKPEIAIRPKVRDREGRMNYYWTLVEPGDKITFEATGNLVVPRYAFAMERNAGSGIIISDTPVHDCNTTCQTPKGAINTSLPFQNIHPITIGKCPKYVKSTKLRLATGLRNIPSIQSRGLFGAIAGFIEGGWTGMVDGWYGYHHQNEQGSGYAADLKSTQNAIDEITNKVNSVIEKMNTQFTAVGKEFNHLEKRIENLNKKVDDGFLDIWTYNAELLVLLENERTLDYHDSNVKNLYEKVRSQLKNNAKEIGNGCFEFYHKCDNTCMESVKNGTYDYPKYSEEAKLNREEIDGVKLESTRIYQILAIYSTVASSLVLVVSLGAISFWMCSNGSLQCRICI

SEQ ID NO: 4498 - protein, 566 aa, synthetic construct
  REGION 1..566: note = hemagglutinin__InfluenzaA__ADE29095
MKAILVVLLYTFATANADTLCIGYHANNSTDTVDTVLEKNVTVTHSVNLLEDKHNGKLCKLRGVAPLHLGKCNIAGWILGNPECESLSTASSWSYIVETPSSDNGTCYPGDFIDYEELREQLSSVSSFERFEIFPKTSSWPNHDSNKGVTAACPHAGAKSFYKNLIWLVKKGNSYPKLSKSYINDKGKEVLVLWGIHHPSTSADQQSLYQNADAYVFVGSSRYSKTFKPEIAIRPKVRDREGRMNYYWTLVEPGDKITFEATGNLVVPRYAFAMERNAGSGIIISDTPVHDCNTTCQTPKGAINTSLPFQNIHPITIGKCPKYVKSTKLRLATGLRNIPSIQSRGLFGAIAGFIEGGWTGMVDGWYGYHHQNEQGSGYAADLKSTQNAIDEITNKVNSVIEKMNTQFTAVGKEFNHLEKRIENLNKKVDDGFLDIWTYNAELLVLLENERTLDYHDSNVKNLYEKVRSQLKNNAKEIGNGCFEFYHKCDNTCMESVKNGTYDYPKYSEEAKLNREEIDGVKLESTRIYQILAIYSTVASSLVLVVSLGAISFWMCSNGSLQCRICI

SEQ ID NO: 4499 - protein, 566 aa, synthetic construct; identical to SEQ ID NO: 3588
  REGION 1..566: note = hemagglutinin__InfluenzaA__ADE34191

SEQ ID NO: 4500 - protein, 566 aa, synthetic construct; identical to SEQ ID NO: 3588
  REGION 1..566: note = hemagglutinin__InfluenzaA__ADE34202

SEQ ID NO: 4501 - protein, 566 aa, synthetic construct
  REGION 1..566: note = hemagglutinin__InfluenzaA__ADE34213
MKTIIALSYILCLVFAQKLPGNDNSTATLCLGHHAVPNGTIVKTITNDQIEVTNATELVQSSSTGEICDSPHQILDGENCTLIDALLGDPQCDGFQNKKWDLFVERRKAYSNCYPYDVPDYASLRSLVASSGTLEFNNESFNWTGVTQNGTSSACIRRSNNSFFSRLNWLTHLKFKYPALNVTMPNNEQFDKLYIWGVHHPGTDNDQIFLYAQASGRITVSTKRSQQTVIPNIGSRPRVRNIPSRISIYWTIVKPGDILLINSTGNLIAPRGYFKIRSGKSSIMRSDAPIGKCNSECITPNGSIPNDKPFQNVNRITYGACPRYVKQNTLKLATGMRNVPEKQTRGIFGAIAGFIENGWEGMVDGWYGFRHQNSEGRGQAADLKSTQAAIDQINGKLNRLIGKTNEKFHQIEKEFSEVEGRIQDLEKYVEDTKIDLWSYNAELLVALENQHTIDLTDSEMNKLFEKTKKQLRENAEDMGNGCFKIYHKCDNACIGSIRNGTYDHDVYRDEALNNRFQIKGVELKSGYKDWILWISFAISCFLLCVALLGFIMWACQKGNIRCNICI

SEQ ID NO: 4502 - protein, 566 aa, synthetic construct; identical to SEQ ID NO: 3588
  REGION 1..566: note = hemagglutinin__InfluenzaA__ADE34224

SEQ ID NO: 4503 - protein, 566 aa, synthetic construct
  REGION 1..566: note = hemagglutinin__InfluenzaA__ADE34235
MKTIIALSYILCLVFAQKLPGNDNSTATLCLGHHAVPNGTIVKTITNDQIEVTNATELVQSSSTGEICDSPHQILDGKNCTLIDALLGDPQCDGFQNKKWDLFVERSKAYSNCYPYDVPDYASLRSLVASSGTLEFNNESFNWTGVTQDGTSSACIRRSKNSFFSRLNWLTHLNFKYPALNVTMPNNEQFDKLYIWGVHHPGTDKDQIFLYAQASGRTTVSTKRSQQTAIPNIGSRPRVRNIPSRISIYWTIVKPGDILLINSTGNLIAPRGYFKIRSGKSSIMRSDAPIGKCNSECITPNGSIPNDKPFQNVNRITYGACPRYVKQNTLKLATGMRNVPEKQTRGIFGAIAGFIENGWEGMVDGWYGFRHQNSEGRGQAADLKSTQAAIDQINGKLNRLIGKTNEKFHQIEKEFSEVEGRIQDLEKYVEDTKIDLWSYNAELLVALENQHTIDLTDSEMNKLFEKTKKQLRENAEDMGNGCFKIYHKCDNACIGSIRNGTYDHDVYRDEALNNRFQIKGVELKSGYKDWILWISFAISCFLLCVALLGFIMWACQKGNIRCNICI

SEQ ID NO: 4504 - protein, 566 aa, synthetic construct; identical to SEQ ID NO: 3588
  REGION 1..566: note = hemagglutinin__InfluenzaA__ADE34246

SEQ ID NO: 4505 - protein, 566 aa, synthetic construct; identical to SEQ ID NO: 3613
  REGION 1..566: note = hemagglutinin__InfluenzaA__ADE34257

SEQ ID NO: 4506 - protein, 566 aa, synthetic construct
  REGION 1..566: note = hemagglutinin__InfluenzaA__ADE34268
MKTIIALSYILCLVFAQKLPGNDNSTATLCLGHHAVPNGTIVKTITNDQIEVTNATELVQSSSTGEICDSPHQILDGKNCTLIDALLGDPQCDGFQNKKWDLFVERSKAYSNCYPYEVPDYASLRSLVASSGTLEFNNESFNWTGVTQDGTSSACIRRSKNSFFSRLNWLTHLNFKYPALNVTMPNNEQFDKLYIWGVHHPGTDKDQIFLYAQASGRITVSTKRSQQTAIPNIGSRPRVRNIPSRISIYWTIVKPGDILLINSTGNLIAPRGYFKIRSGKSSIMRSDAPIGKCNSECITPNGSIPNDKPFQNVNRITYGACPRYVKQNTLKLATGMRNVPEKQTRGIFGAIAGFIENGWEGMVDGWYGFRHQNSEGRGQAADLKSTQAAIDQINGKLNRLIGKTNEKFHQIEKEFSEVEGRIQDLEKYVEDTKIDLWSYNAELLVALENQHTIDLTDSEMNKLFEKTKKQLRENAEDMGNGCFKIYHKCDNACIGSIRNGTYDHDVYRDEALNNRFQIKGVELKSGYKDWILWISFAISCFLLCVALLGFIMWACQKGNIRCNICI

SEQ ID NO: 4507 - protein, 566 aa, synthetic construct
  REGION 1..566: note = hemagglutinin__InfluenzaA__ADE45499
MKAILVVLLYTFATANADTLCIGYHANNSTDTVDTVLEKNVTVTHSVNLLEDKHNGKLCKLRGVAPLHLGKCNIAGWILGNPECESLSTASSWSYIVETSSSDNGTCYPGDFIDYEELREQLSSVSSFKRFEIFPKTSSWPNHDPNKGVTAACPHAGAKSFYKNLIWLVKKGNSYPKLSKSYINDKGKEVLVLWGIHHPSTSADQQSLYQNADAYVFVGTSRYSKKFKPEIAIRPKVRDQEGRMNYYWTLVEPGDKITFEATGNLVVPRYAFAMERNAGSGIIISDTPVHDCNTTCQTPKGAINTSLPFQNIHPITIGKCPKYVKSTKLRLATGLRNVPSIQSRGLFGAIAGFIEGGWTGMVDGWYGYHHQNEQGSGYAADLKSTQNAIDEITNKVNSVIEKMNTQFTAVGKEFNHLEKRIENLNKKVDDGFLDIWTYNAELLVLLENERTLDYHDSNVKNLYEKVRSQLKNNAKEIGNGCFEFYHKCDNTCMESVKNGTYDYPKYSEEAKLNREEIDGVKLESTRIYQILAIYSTVASSLVLVVSLGAISFWMCSNGSLQCRICI

SEQ ID NO: 4508 - protein, 566 aa, synthetic construct; identical to SEQ ID NO: 3467
  REGION 1..566: note = hemagglutinin__InfluenzaA__ADE45501

SEQ ID NO: 4509 - protein, 566 aa, synthetic construct
  REGION 1..566: note = hemagglutinin__InfluenzaA__ADE45503
MKAILVVLLYTFATANADTLCIGYHANNSTDTVDTVLEKNVTVTHSVNLLEDKHNGKLCKLRGVAPLHLGKCNIAGWILGNPECESLSTASSWSYIVETSSSDNGTCYPGDFIDYEELREQLSSVSSFERFEIFPKTSSWPNHDPNKGVTAACPHAGAKSFYKNLIWLVKKGNSYPKLSKSYINDKGKEVLVLWGIHHPSTSADQQSLYQNADAYVFVGTSRYSKKFKPEIAIRPKVRDQEGRMNYYWTLVEPGDKITFEATGNLVVPRYAFAMERNAGSGIIISDTPVHDCNTTCQTPKGAINTSLPFQNIHPITIGKCPKYVKSTKLRLATGLRNVPSIQSRGLFGAIAGFIEGGWTGMVDGWYGYHHQNEQGSGYAADLKSTQNAIDEITNKVNSVIEKMNTQFTAVGKEFNHLEKRIENLNKKVDDGFLDIWTYNAELLVLLENERTLDYHDSNVKNLYEKVRSQLKNNAKEIGNGCFEFYHKCDNTCMESVKNGTYDYPKYSEEAKLNREEIDGVKLESTRVYQILAIYSTVASSLVLVVSLGAISFWMCSNGSLQCRICI

SEQ ID NO: 4510 - protein, 566 aa, synthetic construct; identical to SEQ ID NO: 2669
  REGION 1..566: note = hemagglutinin__InfluenzaA__ADE45505

SEQ ID NO: 4511 - protein, 566 aa, synthetic construct; identical to SEQ ID NO: 3022
  REGION 1..566: note = hemagglutinin__InfluenzaA__ADE45507

SEQ ID NO: 4512 - protein, 566 aa, synthetic construct; identical to SEQ ID NO: 3022
  REGION 1..566: note = hemagglutinin__InfluenzaA__ADE45509

SEQ ID NO: 4513 - protein, 566 aa, synthetic construct; identical to SEQ ID NO: 3467
  REGION 1..566: note = hemagglutinin__InfluenzaA__ADE45511

SEQ ID NO: 4514 - protein, 566 aa, synthetic construct
  REGION 1..566: note = hemagglutinin__InfluenzaA__ADE45513
MKAILVVLLYTFATANADTLCIGYHANNSTDTVDTVLEKNVTVTHSVNLLEDKHNGKLCKLRGVAPLHLGKCNIAGWILGNPECESLSTASSWSYIVETSSSDNGTCYPGDFIDYEELREQLSSVSSFERFEIFPKTSSWPNHDPNKGVTAACPHAGAKSFYKNLIWLVKKGNSYPKLSKSYINDKGKEVLVLWGIHHPSTSADQQSLYQNADAYAFVGTSRYSKKFKPEIAIRPKVRDQEGRINYYWTLVEPGDKIIFEATGNLVVPRYAFAMERNAGSGIIISDTPAHDCNTTCQTPKGAINTSLPFQNIHPITIGKCPKYVKSTKLRLATGLRNVPSIQSRGLFGAIAGFIEGGWTGMVDGWYGYHHQNEQGSGYAADLKSTQNAIDEITNKVNSVIEKMNTQFTAVGKEFNHLEKRIENLNKKVDDGFLDIWTYNAELLVLLENERTLDYHDSNVKNLYEKVRSQLKNNAKEIGNGCFEFYHKCDNTCMESVKNGTYDYPKYSEEAKLNREEIDGVKLESTRIYQILAIYSTVASSLVLVVSLGAISFWMCSNGSLQCRICI

SEQ ID NO: 4515 - protein, 566 aa, synthetic construct
  REGION 1..566: note = hemagglutinin__InfluenzaA__ADE75388
MKAILVVLLYTFATANADTLCIGYHANNSTDTVDTVLEKNVTVTHSVNLLEDKHNGKLCKLRGVAPLHLGKCNIAGWILGNPECESLSTASSWSYIVETSSSENGTCYPGDFIDYEELREQLSSVSSFERFEIFPKTSSWPNHDSNKGVTAACPHAGAKSFYKNLIWLVKKGNSYPKLSKSYINDKGKEVLVLWGIHHPSTSADQQSLYQNADAYVFVGTSRYSKKFKPEIAIRPKVRDQEGRMNYYWTLVEPGDKITFEATGNLVVPRYAFAMERNAGSGIIISDTPVHDCNTTCQTPKGAINTSLPFQNIHPITIGKCPKYVKSTKLRLATGLRNVPSIQSRGLFGAIAGFIEGGWTGMVDGWYGYHHQNEQGSGYAADLKSTQNAIDEITNKVNSVIEKMNTQFTAVGKEFNHLEKRIENLNKKVDDGFLDIWTYNAELLVLLENERTLDYHDSNVKNLYEKVRSQLKNNAKEIGNGCFEFYHKCDNTCMESVKNGTYDYPKYSEEAKLNREEIDGVKLESTRIYQILAIYSTVASSLVLVVSLGAISFWMCSNGSLQCRICI

SEQ ID NO: 4516 - protein, 566 aa, synthetic construct; identical to SEQ ID NO: 2669
  REGION 1..566: note = hemagglutinin__InfluenzaA__ADE75390

SEQ ID NO: 4517 - protein, 566 aa, synthetic construct; identical to SEQ ID NO: 2669
  REGION 1..566: note = hemagglutinin__InfluenzaA__ADF10067

SEQ ID NO: 4518 - protein, 566 aa, synthetic construct; identical to SEQ ID NO: 2669
  REGION 1..566: note = hemagglutinin__InfluenzaA__ADF10077

SEQ ID NO: 4519 - protein, 566 aa, synthetic construct
  REGION 1..566: note = hemagglutinin__InfluenzaA__ADF10087
MKAILVVLLYTFATANADTLCIGYHANNSTDTVDTVLEKNVTVTHSVNLLEDKHNGKLCKLRGVAPLHLGKCNIAGWILGNPECESLSTASSWSYIVETSSSDNGTCYPGDFIDYEELREQLSSVSSFERFEIFPKTSSWPNHDSNKGVTAACPHAGAKSFYKNLIWLVKKGNSYPKLSKSYINDKGKEVLVLWGIHHPSTSADQQSLYQNADAYVFVGTSRYSKKFKPEIAIRPKVRDQEGRMNYYWTLVEPGDKITFEATGNLVVPRYAFAMKRNAGSGIIISDTPVHDCNTTCQTPKGAINTSLPFQNIHPITIGKCPKYVKSTKLRLATGLRNVPSIQSRGLFGAIAGFIEGGWTGMVDGWYGYHHQNEQGSGYAADLKSTQNAIDEITNKVNSVIEKMNTQFTAVGKEFNHLEKRIENLNKKVDDGFLDIWTYNAELLVLLENERTLDYHDSNVKNLYEKVRNQLKNNAKEIGNGCFEFYHKCDNTCMESVKNGTYDYPKYSEEAKLNREEIDGVKLESTRIYQILAIYSTVASSLVLVVSLGAISFWMCSNGSLQCRICI

SEQ ID NO: 4520 - protein, 566 aa, synthetic construct
  REGION 1..566: note = hemagglutinin__InfluenzaA__ADF10097
MEAILVVLLYTFATANADTLCIGYHANNSTDTVDTVLEKNVTVTHSVNLLEDKHNGKLCKLRGVAPLHLGKCNIAGWILGNPECESLSTASSWSYIVETSSSDNGTCYPGDFIDYEELREQLSSVSSFERFEIFPKTSSWPNHDSNKGVTAACPHAGAKSFYKNLIWLVKKGNSYPKLSKSYINDKGKEVLVLWGIHHPSTSADQQSLYQNADAYVFVGSSKYSKKFKPEIAIRPKVRDQEGRMNYYWTLVEPGDKITFEATGNLVVPRYAFAMERNAGSGIIISDTPVHDCNTTCQTPKGAINTSLPFHNIHPITIGKCPKYVKSTKLRLATGLRNVPSIQSRGLFGAIAGFIEGGWTGMVDGWYGYHHQNEQGSGYAADLKSTQNAIDEITNKVNSVIEKMNTQFTAVGKEFNHLEKRIENLNKKVDDGFLDIWTYNAELLVLLENERTLDYHDSNVKNLYEKVRSQLKNNAKEIGNGCFEFYHKCDNTCMESVKNGTYDYPKYSEEAKLNREEIDGVKLESTKIYQILAIYSTVASSLVLVVSLGAISFWMCSNGSLQCRICI

SEQ ID NO: 4521 - protein, 566 aa, synthetic construct
  REGION 1..566: note = hemagglutinin__InfluenzaA__ADF10107
MEAILVVLLYTFATANADTLCIGYHANNSTDTVDTVLEKNVTVTHSVNLLEDKHNGKLCKLRGVAPLHLGKCNIAGWILGNPECESLSTASSWSYIVETSSSDNGTCYPGDFIDYEELREQLSSVSSFERFEIFPKTSSWPNHDSNKGVTAACPHAGAKSFYKNLIWLVKKGNSYPKLSKSYINDKGKEVLVLWGIHHPPTSADQQSLYQNADAYVFVGSSKYSKKFKPEIAIRPKVRDQEGRMNYYWTLVEPGDKITFEATGNLVVPRYAFAMERNAGSGIIISDTPAHDCNTTCQTPKGAINTSLPFHNIHPITIGKCPKYVKSTKLRLATGLRNVPSIQSRGLFGAIAGFIEGGWTGMVDGWYGYHHQNEQGSGYAADLKSTQNAIDEITNKVNSVIEKMNTQFTAVGKEFNHLEKRIENLNKKVDDGFLDIWTYNAELLVLLENERTLDYHDSNVKNLYEKVRSQLKNNAKEIGNGCFEFYHKCDNTCMESVKNGTYDYPKYSEEAKLNREEIDGVKLESTKIYQILAIYSTVASSLVLVVSLGAISFWMCSNGSLQCRICI

SEQ ID NO: 4522 - protein, 566 aa, synthetic construct; identical to SEQ ID NO: 2669
  REGION 1..566: note = hemagglutinin__InfluenzaA__ADF10117

SEQ ID NO: 4523 - protein, 566 aa, synthetic construct; identical to SEQ ID NO: 4373
  REGION 1..566: note = hemagglutinin__InfluenzaA__ADF10127

SEQ ID NO: 4524 - protein, 566 aa, synthetic construct; identical to SEQ ID NO: 2669
  REGION 1..566: note = hemagglutinin__InfluenzaA__ADF10137

SEQ ID NO: 4525 - protein, 566 aa, synthetic construct
  REGION 1..566: note = hemagglutinin__InfluenzaA__ADF10154
MKAILVVLLYTFATANADTLCIGYHANNSTDTVDTVLEKNVTVTHSVNLLEDKHNGKLCKLRGVAPLHLGKCNIAGWILGNPECESLSTASSWSYIVETSSSDNGTCYPGDFIDYEELREQLSSVSSFERFEIFPKTSSWPDHDSNKGVTAACPHAGAKSFYKNLIWLVKKGNSYPKLSKSYINDKGKEVLVLWGIHHPSTSADQQSLYQNADAYVFVGTSRYSKKFKPEIAIRPKVREQEGRMNYYWTLVEPGDKITFEATGNLVVPRYAFAMERNAGSGIIISDTPVHDCNTTCQTPKGAINTSLPFQNIHPITIGKCPKYVKSTKLRLATGLRNVPSIQSRGLFGAIAGFIEGGWTGMVDGWYGYHHQNEQGSGYAADLKSTQNAIDEITNKVNSVIEKMNTQFTAVGKEFNHLEKRIENLNKKVDDGFLDIWTYNAELLVLLENERTLDYHDSNVKNLYERVRSQLKNNAKEIGNGCFEFYHKCDNTCMESVKNGTYDYPKYSEEAKLNREEIDGVKLESTRIYQILAIYSTVASSLVLVVSLGAISFWMCSNGSLQCRICI

SEQ ID NO: 4526 - protein, 566 aa, synthetic construct
  REGION 1..566: note = hemagglutinin__InfluenzaA__ADF10174
MKAILVVLLYTFATANADTLCIGYHANNSTDTVDTVLEKNVTVTHSVNLLEDKHNGKLCKLRGVAPLHLGKCNIAGWILGNPECESLSTASSWSYIVETSSSDNGTCYPGDFIDYEELREQLSSVSSFERFEIFPKTSSWPNHDSNKGVTAACPHAGAKSFYKNLIWLVKKGNSYPKLSKSYINDKGKEVLVLWGIHHPSTSADQQSLYQNADAYVFVGTSRYSKKFKPEIAIRPKVREQEGRMNYYWTLVEPGDKITFEATGNLVVPRYAFAMERNAGSGIIISDTPVHDCNTTCQTPKGAINTSLPFQNIHPITIGKCPKYVKSTKLRLATGLRNVPSIQSRGLFGAIAGFIEGGWTGMVDGWYGYHHQNEQGSGYAADLKSTQNAIDEITNKVNSVIEKMNTQFTAVGKEFNHLEKRIENLNKKVDDGFLDIWTYNAELLVLLENERTLDYHDSNVKNLYERVRSQLKNNAKEIGNGCFEFYHKCDNTCMESVKNGTYDYPKYSEEAKLNREEIDGVKLESTRIYQILAIYSTVASSLVLVVSLGAISFWMCSNGSLQCRICI

SEQ ID NO: 4527 - protein, 566 aa, synthetic construct; identical to SEQ ID NO: 4526
  REGION 1..566: note = hemagglutinin__InfluenzaA__ADF10190

SEQ ID NO: 4528 - protein, 566 aa, synthetic construct; identical to SEQ ID NO: 4373
  REGION 1..566: note = hemagglutinin__InfluenzaA__ADF10237

SEQ ID NO: 4529 - protein, 566 aa, synthetic construct; identical to SEQ ID NO: 4526
  REGION 1..566: note = hemagglutinin__InfluenzaA__ADF10262

SEQ ID NO: 4530 - protein, 566 aa, synthetic construct
  REGION 1..566: note = hemagglutinin__InfluenzaA__ADF10288
MKAILVVLLYTFATANADTLCIGYHANNSTDTVDTVLEKNVTVTHSVNLLEDKHNGKLCKLRGVAPLHLGKCNIAGWILGNPECESLSTASSWSYIVETSSSDNGTCYPGDFIDYEELREQLSSVSSFERFEIFPKTSSWPNHDSNKGVTAACPHAGAKSFYKNLIWLVKKGNSYPKLSKSYINDKGKEVLVLWGIHHPSTSADQQSLYQNADAYVFVGTSRYSKKFKPEIAIRPKVREQEGRMNYYWTLVEPGDKITFEATGNLVVPRYAFAMERNAGSGIIISDTPVHDCNTTCQTPKGAINTSLPFQNIHPITIGKCPKYVKSTKLRLATGLRNVPSIQSRGLFGAIAGFIEGGWTGMVDGWYGYHHQNEQGSGYAADLKSTQNAIDEITNKVNSVIEKMNTQFTAVGKEFNHLEKRIENLNKKVDDGFLDIWTYNAELLVLLENERTLDYHDSNVKNLYERVRSQLKNNAKEIGNGCFEFYHKCDNTCMESVKNGTYDYPKYSEEAKLNREEIDGVKLESTRIYQILAIYSTVASSLVLVVSLGAISFWMCSNGSLQCRVCI

SEQ ID NO: 4531 - protein, 566 aa, synthetic construct; identical to SEQ ID NO: 4373
  REGION 1..566: note = hemagglutinin__InfluenzaA__ADF10302

SEQ ID NO: 4532 - protein, 566 aa, synthetic construct; identical to SEQ ID NO: 4373
  REGION 1..566: note = hemagglutinin__InfluenzaA__ADF10335

SEQ ID NO: 4533 - protein, 566 aa, synthetic construct; identical to SEQ ID NO: 4373
  REGION 1..566: note = hemagglutinin__InfluenzaA__ADF10359

SEQ ID NO: 4534 - protein, 566 aa, synthetic construct; identical to SEQ ID NO: 4526
  REGION 1..566: note = hemagglutinin__InfluenzaA__ADF10369

SEQ ID NO: 4535 - protein, 566 aa, synthetic construct; identical to SEQ ID NO: 4526
  REGION 1..566: note = hemagglutinin__InfluenzaA__ADF10390

SEQ ID NO: 4536 - protein, 566 aa, synthetic construct; identical to SEQ ID NO: 4373
  REGION 1..566: note = hemagglutinin__InfluenzaA__ADF10528

SEQ ID NO: 4537 - protein, 566 aa, synthetic construct; identical to SEQ ID NO: 4526
  REGION 1..566: note = hemagglutinin__InfluenzaA__ADF10598

SEQ ID NO: 4538 - protein, 566 aa, synthetic construct; identical to SEQ ID NO: 4526
  REGION 1..566: note = hemagglutinin__InfluenzaA__ADF10670

SEQ ID NO: 4539 - protein, 566 aa, synthetic construct; identical to SEQ ID NO: 4526
  REGION 1..566: note = hemagglutinin__InfluenzaA__ADF10724

SEQ ID NO: 4540 - protein, 566 aa, synthetic construct; identical to SEQ ID NO: 4373
  REGION 1..566: note = hemagglutinin__InfluenzaA__ADF10757

SEQ ID NO: 4541 - protein, 566 aa, synthetic construct
  REGION 1..566: note = hemagglutinin__InfluenzaA__ADF10828
MKAILVVLLYTFATANADTLCIGYHANNSTDTVDTVLEKNVTVTHSVNLLEDKHNGKLCKLRGVAPLHLGKCNIAGWILGNPECESLSTASSWSYIVETSSSDNGTCYPGDFIDYEELREQLSSVSSFERFEIFPKTSSWPNHDSNKGVTAACPHAGAKSFYKNLIWLVKKGNSYPKLSKSYINDKGKEVLVLWGIHHPSTSTDQQSLYQNADAYVFVGTSRYSKKFKPEIAIRPKVRDQEGRMNYYWTLVEPGDKITFEATGNLVVPRYAFAMERNAGSGIIISDTPVHDCNTTCQTPKGAINTSLPFQNIHPITIGKCPKYVKSTKLRLATGLRNVPSIQSRGLFGAIAGFIEGGWTGMVDGWYGYHHQNEQGSGYAADLKSTQNAIDKITNKVNSVIEKMNTQFTAVGKEFNHLEKRIENLNKKVDDGFLDIWTYNAELLVLLENERTLDYHDSNVKNLYEKVRSQLKNNAKEIGNGCFEFYHKCDNTCMESVKNGTYDYPKYSEEAKLNREEIDGVKLESTRIYQILAIYSTVASSLVLVVSLGAISFWMCSNGSLQCRICI

SEQ ID NO: 4542 - protein, 566 aa, synthetic construct; identical to SEQ ID NO: 2669
  REGION 1..566: note = hemagglutinin__InfluenzaA__ADF10874

SEQ ID NO: 4543 - protein, 566 aa, synthetic construct; identical to SEQ ID NO: 3292
  REGION 1..566: note = hemagglutinin__InfluenzaA__ADF10929

SEQ ID NO: 4544 - protein, 566 aa, synthetic construct; identical to SEQ ID NO: 3292
  REGION 1..566: note = hemagglutinin__InfluenzaA__ADF10996

SEQ ID NO: 4545 - protein, 566 aa, synthetic construct; identical to SEQ ID NO: 2669
  REGION 1..566: note = hemagglutinin__InfluenzaA__ADF27367

SEQ ID NO: 4546 - protein, 566 aa, synthetic construct; identical to SEQ ID NO: 2669
  REGION 1..566: note = hemagglutinin__InfluenzaA__ADF27369

SEQ ID NO: 4547 - protein, 566 aa, synthetic construct
  REGION 1..566: note = hemagglutinin__InfluenzaA__ADF27370
MKAILVILLYTFATANADTLCIGYHANNSTDTVDTVLEKNVTVTHSVNLLEDKHNGKLCKLRGVAPLHLGKCNIAGWILGNPECESLSTASSWSYIVETSSSDNGTCYPGDFIDYEELREQLSSVSSFERFEIFPKTSSWPNHDSNKGVTAACPHAGAKSFYKNLIWLVKKGNSYPKLSKSYINDKGKEVLVLWGIHHPSTSADQQSLYQNADAYVLVGTSRYSKKFKPEIAIRPKVRDQEGRMNYYWTLVEPGDKITFEATGNLVVPRYAFAMERNAGSGIIISDTPVHDCNTTCQTPKGAINTSLPFQNIHPITIGKCPKYVKSTKLRLATGLRNVPSIQSRGLFGAIAGFIEGGWTGMVDGWYGYHHQNEQGSGYAADLKSTQNAIDKITNKVNSVIEKMNTQFTAVGKEFNHLEKRIENLNKKVDDGFLDIWTYNAELLVLLENERTLDYHDSNVKNLYEKVRSQLKNNAKEIGNGCFEFYHKCDNTCMESVKNGTYDYPKYSEEAKLNREEIDGVKLESTRIYQILAIYSTVASSLVLVVSLGAISFWMCSNGSLQCRICI

SEQ ID NO: 4548 - protein, 566 aa, synthetic construct; identical to SEQ ID NO: 3841
  REGION 1..566: note = hemagglutinin__InfluenzaA__ADF27371

SEQ ID NO: 4549 - protein, 566 aa, synthetic construct
  REGION 1..566: note = hemagglutinin__InfluenzaA__ADF27372
MKAILVVLLYTFATANADTLCIGYHTNNSTDTVDTVLEKNVTVTHSVNLLEDKHNGKLCKLRGVAPLHLGKCNIAGWILGNPECESLSTASSWSYIVETSSSDNGTCYPGDFIDYEELREQLSSVSSFERFEIFPKTSSWPNHDSNKGVTAACPHAGAKSFYKNLIWLVKKGNSYPKLSKSYINDKGKEVLVLWGIHHPSTSADQQSLYQNADAYVFVGTSRYSKKFKPEIAIRPKVRDQEGRMNYYWTLVEPGDKITFEATGNLVVPRYAFAMERNAGSGIIISDTPVHDCNTTCQTPKGAINTSLPFQNIHPITIGKCPKYVKSTKLRLATGLRNVPSIQSRGLFGAIAGFIEGGWTGMVDGWYGYHHQNEQGSGYAADLKSTQNAIDKITNKVNSVIEKMNTQFTAVGKEFNHLEKRIENLNKKVDDGFLDIWTYNAELLVLLENERTLDYHDSNVKNLYEKVRSQLKNNAKEIGNGCFEFYHKCDNTCMESVKNGTYDYPKYSEEAKLNREEIDGVKLESTRIYQILAIYSTVASSLVLVVSLGAISFWMCSNGSLQCRICI

SEQ ID NO: 4550 - protein, 566 aa, synthetic construct
  REGION 1..566: note = hemagglutinin__InfluenzaA__ADF27373
MEAILVVLLYTFATANADTLCIGYHANNSTDTVDTVLEKNVTVTHSVNLLEDKHNGKLCKLRGVAPLHLGKCNIAGWILGNPECESLSTASSWSYIVETSSSDNGTCYPGDFIDYEELIEQLSSVSSFERFEIFPKTSSWPNHDSNKGVTAACPHAGAKSFYKNLIWLVKKGNSYPKLSKSYINDKGKEVLVLWGIHHPSTSADQQSLYQNADAYVFVGSSRYSKKFKPEIAIRPKVRDQEGRMNYYWTLVEPGDKITFEATGNLVVPRYAFAMERNAGSGIIISDTPVHDCNTTCQTPKGAINTSLPFHNIHPITIGKCPKYVKSTKLRLATGLRNVPSIQTRGLFGAIAGFIEGGWTGMVDGWYGYHHQNEQGSGYAADLKSTQNAIDEITNKVNSVIEKMNTQFTAVGKEFNHLEKRIENLNKKVDDGFLDIWTYNAELLVLLENERTLDYHDSNVKNLYEKVRSQLKNNAKEIGNGCFEFYHKCDNTCMESVKNGTYDYPKYSEEAKLNREEIDGVKLESTRIYQILAIYSTVASSLVLVVSLGAISFWMCSNGSLQCRICI

SEQ ID NO: 4551 - protein, 566 aa, synthetic construct; identical to SEQ ID NO: 2911
  REGION 1..566: note = hemagglutinin__InfluenzaA__ADF27374

SEQ ID NO: 4552 - protein, 566 aa, synthetic construct
  REGION 1..566: note = hemagglutinin__InfluenzaA__ADF27375
MEAILVVLLYTFATANADTLCIGYHANNSTDTVDTVLEKNVTVTHSVNLLEDKHNGKLCKLRGVAPLHLGKCNIAGWILGNPECESLSTASSWSYIVETSSSDNGTCYPGDFIDYEELREQLSSVSSFERFEIFPKTSSWPNHDSNKGVTAACPHAGAKSFYKNLIWLVKKGNSYPKLSKSYINDKGKEVLVLWGIHHPSTSADQQSLYQNADAYVFVGSSRYSKKFKPEIAIRPKVRDQEGRMNYYWTLVEPGDKITFEATGNLVVPRYAFAMERNAGSGIIISDTPVHDCNTTCQTPKGAINTSLPFHNIHPITIGKCPKYVKSTKLRLATGLRNVPSIQSRGLFGAIAGFIEGGWTGMVDGWYGYHHQNEQGSGYAADQKSTQNAIDEITNKINSVIEKMNTQFTAVGKEFNHLEKRIENLNKKVDDGFLDIWTYNAELLVLLENERTLDYHDSNVKNLYEKVRSQLKNNAKEIGNGCFEFYHKCDNTCMESVKNGTYDYPKYSEEAKLNREEIDGVKLESTRIYQILAIYSTVASSLVLVVSLGAISFWMCSNGSLQCRICI

SEQ ID NO: 4553 - protein, 566 aa, synthetic construct
  REGION 1..566: note = hemagglutinin__InfluenzaA__ADF27376
MKAILVVLLYTFVTANADTLCIGYHANNSTDTVDTVLEKNVTVTHSVNLLEDKHNGKLCKLRGVAPLHLGKCNIAGWILGNPECESLSTASSWSYIVETSNSDNGTCYPGDFIDYEELREQLSSVSSFERFEIFPKTSSWPNHDSNKGVTAACPHAGAKSFYKNLIWLVKKGNSYPKLSKSYINDKGKEVLVLWGIHHPSTSADQQSLYQNADAYVFVGTSRYSKKFKPEIEIRPKVRDQEGRMNYYWTLVEPGDKITFEATGNLVVPRYAFAMERNAGSGIIISDTPVHDCNTTCQTPKGAINTSLPFQNIHPITIGKCPKYVKSTKLRLATGLRNVPSIQSRGLFGAIAGFIEGGWTGMVDGWYGYHHQNEQGSGYAADLKSTQNAIDKITNKVNSVIEKMNTQFTAVGKEFNHLEKRIENLNKKVDDGFLDIWTYNAELLVLLENERTLDYHDSNVKNLYEKVRSQLKNNAKEIGNGCFEFYHKCDNTCMESVKNGTYDYPKYSEEAKLNREEIDGVKLESTRIYQILAIYSTVASSLVLVVSLGAISFWMCSNGSLQCRICI

SEQ ID NO: 4554 - protein, 566 aa, synthetic construct
  REGION 1..566: note = hemagglutinin__InfluenzaA__ADF27378
MKAILVVLLYTFVTANADTLCIGYHANNSTDTVDTVLEKNVTVTHSVNLLEDKHNGKLCKLRGVAPLHLGKCNIAGWILGNPECESLSTASSWSYIVETSNSDNGTCYPGDFIDYEELREQLSSVSSFERFEIFPKTSSWPNHDSNKGVTAACPHAGAKSFYKNLIWLVKKGNSYPKLSKSYINDKGKEVLVLWGIHHPSTSADQQSLYQNADAYVFVGTSRYSKKFKPEIAIRPKVRDQEGRMNYYWTLVEPGDKITFEATGNLVVPRYAFAMERNAGSGIIISDTPVHDCNTTCQTPKGAINTSLPFQNIHPITIGKCPKYVKSTKLRLATGLRNVPSIQSRGLFGAIAGFIEGGWTGMVDGWYGYHHQNEQGSGYAADLKSTQNAIDKITNKVNSVIEKMNTQFTAVGKEFNHLEKRIENLNKKVDDGFLDIWTYNAELLVLLENERTLDYHDSNVKNLYEKVRSQLKNNAKEIGNGCFEFYHKCDNTCMESVKNGTYDYPKYSEEAKLNREEIDGVKLESTRIYQILAIYSTVASSLVLVVSLGAISFWMCSNGSLQCRICI

SEQ ID NO: 4555 - protein, 566 aa, synthetic construct
  REGION 1..566: note = hemagglutinin__InfluenzaA__ADF27389
MKAILVVLLYTFATANADTLCIGYHANNSTDTVDTVLEKNVTVTHSVNLLEDKHNGKLCKLRGVAPLHLGKCNIAGWILGNPECESLSTASSWSYIVETSSSDNGTCYPGDFIDYEELREQLSSVSSFERFEIFPKTSSWPNHDSNKGVTAACPHAGAKSFYKNLIWLVKKGNSYPKLSKSYINDKGKEVLVLWGIHHPSTSADQQSLYQNADAYVFVGTSRYSKKFKPEIAIRPKVRDQEGRMNYYWTLVEPGDKITFEATGNLVVPRYAFAMERNAGSGIITSDTPVHDCNTTCQTPKGAINTSLPFQNIHPITIGKCPKYVKSTKLRLATGLRNVPSIQSRGLFGAIAGFIEGGWTGMVDGWYGYHHQNEQGSGYAADLKSTQNAIDEITNKVNSVIEKMNTQFTAVGKEFNHLEKRIENLNKKVDDGFLDIWTYNAELLVLLENERTLDYHDSNVKNLYEKVRSQLKNNAKEIGNGCFEFYHKCDNTCMESVKNGTYDYPKYSEEAKLNREEIDGVKLESTRIYQILAIYSTVASSLVLVVSLGAISFWMCSNGSLQCRICI

SEQ ID NO: 4556 - protein, 566 aa, synthetic construct
  REGION 1..566: note = hemagglutinin__InfluenzaA__ADF27399
MKAILVVLLYTFATANADTLCIGYHANNSTDTVDTVLEKNVTVTHSVNLLEDKHNGKLCKLRGVAPLHLGKCNIAGWILGNPECESLSTASSWSYIVETSSSDNGTCYPGDFIDYEELREQLSSVSSFERFEIFPKTSSWPNHDSNKGVTAACPHAGAKSFYKNLIWLVKKGNSYPKLSKSYINDKGKEVLVLWGIHHPSTSADQQSLYQNADAYVFVGTSRYSKKFKPEIAIRPKVRDQEGRMNYYWTLVEPGDKITFEATGNLVVPRYAFAMERNAGSGIIISDTPVHDCNTTCQTPKGAINTSLPFQNIHPITIGECPKYVKSTKLRLATGLRNVPSIQSRGLFGAIAGFIEGGWTGMVDGWYGYHHQNEQGSGYAADLKSTQNAIDEITNKVNSVIEKMNTQFTAVGKEFNHLEKRIENLNKKVDDGFLDIWTYNAELLVLLENERTLDYHDSNVKNLYEKVRSQLKNNAKEIGNGCFEFYHKCDNTCMESVKNGTYDYPKYSEEAKLNREEIDGVKLESTRIYQILAIYSTVASSLVLVVSLGAISFWMCSNGSLQCRICI

SEQ ID NO: 4557 - protein, 566 aa, synthetic construct; identical to SEQ ID NO: 3833
  REGION 1..566: note = hemagglutinin__InfluenzaA__ADF27409

SEQ ID NO: 4558 - protein, 566 aa, synthetic construct; identical to SEQ ID NO: 4541
  REGION 1..566: note = hemagglutinin__InfluenzaA__ADF27419

SEQ ID NO: 4559 - protein, 566 aa, synthetic construct
  REGION 1..566: note = hemagglutinin__InfluenzaA__ADF27429
MKAILVVLLYTFATANADTLCIGYHANNSTDTVDTVLEKNVTVTHSVNLLEDKHNGKLCKLRGVAPLHLGKCNIAGWILGNPECESLSTASSWSYIVETSSSDNGTCYPGDFIDYEELREQLSSVSSFERFEIFPKTSSWPNHDSNKGVTAACPHAGAKSFYKNLIWLVKKGNSYPKLSKFYINDKGKEVLVLWGIHHPSTSADQQSLYQNADAYVFVGTSRYSKKFKPEIAIRPKVRDQEGRMNYYWTLVEPGDKITFEATGNLVVPRYAFAMERNAGSGIIISDTPVHDCNTTCQTPKGAINTSLPFQNIHPITIGKCPKYVKSTKLRLATGLRNVPSIQSRGLFGAIAGFIEGGWTGMVDGWYGYHHQNEQGSGYAADLKSTQNAIDKITNKVNSVIEKMNTQFTAVGKEFNHLEKRIENLNKKVDDGFLDIWTYNAELLVLLENERTLDYHDSNVKNLYEKVRSQLKNNAKEIGNGCFEFYHKCDNTCMKSVKNGTYDYPKYSEEAKLNREEIDGVKLESTRIYQILAIYSTVASSLVLVVSLGAISFWMCSNGSLQCRICI

SEQ ID NO: 4560 - protein, 566 aa, synthetic construct; identical to SEQ ID NO: 2669
  REGION 1..566: note = hemagglutinin__InfluenzaA__ADF27439

SEQ ID NO: 4561 - protein, 566 aa, synthetic construct
  REGION 1..566: note = hemagglutinin__InfluenzaA__ADF27449
MKAILVVLLYTFATVNADTLCIGYHANNSTDTVDTVLEKNVTVTHSVNLLEDKHNGKLCKLRGVAPLHLGKCNIAGWILGNPECESLSTASSWSYIVETSSSDNGTCYPGDFIDYEELREQLSSVSSFERFEIFPKTSSWPNHDSNKGVTAACPHAGAKSFYKNLIWLVKKGNSYPKLSKSYINDKGKEVLVLWGIHHPSTSADQQSLYQNADAYVFVGTSRYSKKFKPEIAIRPKVRDQEGRMNYYWTLVEPGDKITFEATGNLVVPRYAFAMERNAGSGIIISDTPVHDCNTTCQTPKGAINTSLPFQNIHPITIGKCPKYVKSTKLRLATGLRNIPSIQSRGLFGAIAGFIEGGWTGMVDGWYGYHHQNEQGSGYAADLKSTQNAIDEITNKVNSVIEKMNTQFTAVGKEFNHLEKRIENLNKKVDDGFLDIWTYNAELLVLLENERTLDYHDSNVKNLYEKVRSQLKNNAKEIGNGCFEFYHKCDNTCMESVKNGTYDYPKYSEEAKLNREEIDGVKLESTRIYQILAIYSTVASSLVLVVSLGAISFWMCSNGSLQCRICI

SEQ ID NO: 4562 - protein, 566 aa, synthetic construct; identical to SEQ ID NO: 3829
  REGION 1..566: note = hemagglutinin__InfluenzaA__ADF27459

SEQ ID NO: 4563 - protein, 566 aa, synthetic construct; identical to SEQ ID NO: 2669
  REGION 1..566: note = hemagglutinin__InfluenzaA__ADF27469

SEQ ID NO: 4564 - protein, 566 aa, synthetic construct
  REGION 1..566: note = hemagglutinin__InfluenzaA__ADF27479
MKAILVVLLYTFATANADTLCIGYHANNSTDTVDTVLEKNVTVTHSVNLLEDKHNGKLCKLRGVAPLHLGKCNIAGWILGNPECESLSTASSWSYIVETSSSDNGTCYPGDFIDYEELREQLSSVSSFERFEIFPKTSSWPNHDSNKGVTAACPHAGAKSFYKNLIWLVKKGNSYPKLSKSYINDKGKEVLVLWGIHHPSTSADQQSLYQNADAYVFVGTSRYSKKFKPEIAIRPKVRDQEGRMNYYWTLVEPGDKITFEATGNLVVPRYAFAMERNAGSGIIISDTPVHDCNTTCQTPKGAINTSLPFQNIHPITIGKCPKYVKSTKLRLATGLRNVPSIHSRGLFGAIAGFIEGGWTGMVDGWYGYHHQNEQGSGYAADLKSTQNAIDKITNKVNSVIEKMNTQFTAVGKEFNHLEKRIENLNKKVDDGFLDIWTYNAELLVLLENERTLDYHDSNVKNLYEKVRSQLKNNAKEIGNGCFEFYHKCDNTCMESVKNGTYDYPKYSEEAKLNREEIDGVKLESTRIYQILAIYSTVASSLVLVVSLGAISFWMCSNGSLQCRICI

SEQ ID NO: 4565 - protein, 566 aa, synthetic construct
  REGION 1..566: note = hemagglutinin__InfluenzaA__ADF27489
MKAILVVLLYTFATANADTLCIGYHANNSTDTVDTVLEKNVTVTHSVNLLEYKHNGKLCKLRGVAPLHLGKCNIAGWILGNPECESLSTASSWSYIVETSSSDNGTCYPGDFIDYEELREQLSSVSSFERFEIFPKTSSWPNHDSNKGVTAACPHAGAKSFYKNLIWLVKKGNSYPKLSKSYINDKGKEVLVLWGIHHPSTSADQQSLYQNADAYVFVGTSRYSKKFKPEIAIRPKVRDQEGRMNYYWTLVEPGDKITFEATGNLVVPRYAFAMERNAGSGIIISDTPVHDCNTTCQTPKGAINTSLPFQNIHPITIGECPKYVKSTKLRLATGLRNVPSIQSRGLFGAIAGFIEGGWTGMVDGWYGYHHQNEQGSGYAADLKSTQNAIDEITNKVNSVIEKMNTQFTAVGKEFNHLEKRIENLNKKVDDGFLDIWTYNAELLVLLENERTLDYHDSNVKNLYEKVRSQLKNNAKEIGNGCFEFYHKCDNTCMESVKNGTYDYPKYSEEAKLNREEIDGVKLESTRIYQILAIYSTVASSLVLVVSLGAISFWMCSNGSLQCRICI

SEQ ID NO: 4566 - protein, 566 aa, synthetic construct; identical to SEQ ID NO: 3833
  REGION 1..566: note = hemagglutinin__InfluenzaA__ADF27499

SEQ ID NO: 4567 - protein, 566 aa, synthetic construct; identical to SEQ ID NO: 2669
  REGION 1..566: note = hemagglutinin__InfluenzaA__ADF27509

SEQ ID NO: 4568 - protein, 566 aa, synthetic construct; identical to SEQ ID NO: 4266
  REGION 1..566: note = hemagglutinin__InfluenzaA__ADF27529

SEQ ID NO: 4569 - protein, 566 aa, synthetic construct; identical to SEQ ID NO: 3841
  REGION 1..566: note = hemagglutinin__InfluenzaA__ADF27539

SEQ ID NO: 4570 - protein, 566 aa, synthetic construct; identical to SEQ ID NO: 3841
  REGION 1..566: note = hemagglutinin__InfluenzaA__ADF27549

SEQ ID NO: 4571 - protein, 566 aa, synthetic construct; identical to SEQ ID NO: 2669
  REGION 1..566: note = hemagglutinin__InfluenzaA__ADF27559

SEQ ID NO: 4572 - protein, 566 aa, synthetic construct
  REGION 1..566: note = hemagglutinin__InfluenzaA__ADF27569
MKAILVVLLYTFATANADTLCIGYHANNSTDTVDTVLEKNVTVTHSVNLLEDKHNGKLCKLRGVAPLHLGKCNIAGWILGNPECESLSTASSWSYIVETSSSDNGTCYPGDFIDYEELREQLSSVSSFERFEIFPKTSSWPNHDSNKGVTAACPHAGAKSFYKNLIWLVKKGNSYPKLSKSYINDKGKEVLVLWGIHHPSTSADQQSLYQNADAYVFVGTSRYSKKFKPEIAIRPKVRDQEGRVNYYWTLVEPGDKITFEATGNLVVPRYAFAMERNAGSGIIISDTPVHDCNTTCQTPKGAINTSLPFQNIHPITIGKCPKYVKSTKLRLATGLRNVPSIQSRGLFGAIAGFIEGGWTGMVDGWYGYHHQNEQGSGYAADLKSTQNAIDKITNKVNSVIEKMNTQFTAVGKEFNHLEKRIENLNKKVDDGFLDIWTYNAELLVLLENERTLDYHDSNVKNLYEKVRSQLKNNAKEIGNGCFEFYHKCDNTCMESVKNGTYDYPKYSEEAKLNREEIDGVKLESTRIYQILAIYSTVASSLVLVVSLGAISFWMCSNGSLQCRICI

SEQ ID NO: 4573 - protein, 566 aa, synthetic construct; identical to SEQ ID NO: 3841
  REGION 1..566: note = hemagglutinin__InfluenzaA__ADF27579

SEQ ID NO: 4574 - protein, 566 aa, synthetic construct
  REGION 1..566: note = hemagglutinin__InfluenzaA__ADF27589
MKAILVVLLYTFATANADTLCIGYHANNSTDTVDTVLEKNVTVTHSVNLLEDKHNGKLCKLRGVAPLHLGKCNIAGWILGNPECESLSTASSWSYIVETSSSDNGTCYPGDFIDYEELREQLSSVSSFERFEIFPKTSSWPNHDSNKGVTAACPHAGAKSFYKNLIWLVKKGNSYPKLSKSYINDKGKEVLVLWGIHHPSTSADQQSLYQNADAYVFVGTSRYSKKFKPEIAIRPKVRDQEGRMNYYWTLVEPGDKITFEATGNLVVPRYAFAMERNAGSGIIISDTSVHDCNTTCQTPKGAINTSLPFQNIHPITIGKCPKYVKSTKLRLATGLRNVPSIQSRGLFGAIAGFIEGGWTGMVDGWYGYHHQNEQGSGYAADLKSTQNAIDEITNKVNSVIEKMNTQFTAVGKEFNHLEKRIENLNKKVDDGFLDIWTYNAELLVLLENERTLDYHDSNVKNLYEKVRSQLKNNAKEIGNGCFEFYHKCDNTCMESVKNGTYDYPKYSEEAKLNREEIDGVKLESTRIYQILAIYSTVASSLVLVVSLGAISFWMCSNGSLQCRICI

SEQ ID NO: 4575 - protein, 566 aa, synthetic construct
  REGION 1..566: note = hemagglutinin__InfluenzaA__ADF27599
MKAILVVLLYTFATANADTLCIGYHANNSTDTVDTVLEKNVTVTHSVNLLEDKHNGKLCKLRGVAPLHLGKCNIAGWILGNPECESLSTASSWSYIVETSSSDNGTCYPGDFIDYEELREQLSSVSSFERFEIFPKTSSWPNHDSNKGVTAACPHAGAKSFYKNLIWLVKKGNSYPKLSKSYINDKGKEVLVLWGIHHPSTSADQQSLYQNADAYVFVGTSRYSKKFKPEIAIRPKVRDQEGRMNYYWTLVEPGDKITFEATGNLVVPRYAFTMERNAGSGIIISDTPVHDCNTTCQTPKGAINTSLPFQNIHPITIGKCPKYVKSTKLRLATGLRNVPSIQSRGLFGAIAGFIEGGWTGMVDGWYGYHHQNEQGSGYAADLKSTQNAIDEITNKVNSVIEKMNTQFTAVGKEFNHLEKRIENLNKKVDDGFLDIWTYNAELLVLLENERTLDYHDSNVKNLYEKVRSQLKSNAKEIGNGCFEFYHKCDNTCMESVKNGTYDYPKYSEEAKLNREEIDGVKLESTRIYQILAIYSTVASSLVLVVSLGAISFWMCSNGSLQCRICI

SEQ ID NO: 4576 - protein, 566 aa, synthetic construct
  REGION 1..566: note = hemagglutinin__InfluenzaA__ADF27609
MKAILVVLLYTFATANADTLCIGYHANNSTDTVDTVLEKNVTVTHSVNLLEDKHNGKLCKLRGVAPLHLGKCNIAGWILGNPECESLSTASSWSYIVETSSSDNGTCYPGDFIDYEELREQLSSVSSFERFEIFPKTSSWPNHDSNKGVTAACPQAGAKSFYKNLIWLVKKGNSYPKLSKSYINDKGKEVLVLWGIHHPSTSADQQSLYQNADAYVFVGTSRYSKKFKPEIAIRPKVRDQEGRMNYYWTLVEPGDKITFEATGNLVVPRYAFAMERNAGSGIIISDTPVHDCNTTCQTPKGAINTSLPFQNIHPITIGKCPKYVKSTKLRLATGLRNVPSIQSRGLFGAIAGFIEGGWTGMVDGWYGYHHQNEQGSGYAADLKSTQNAIDEITNKVNSVIEKMNTQFTAVGKEFNHLEKRIENLNKKVDDGFLDIWTYNAELLVLLENERTLDYHDSNVKNLYEKVRSQLKNNAKEIGNGCFEFYHKCDNTCMESVKNGTYDYPKYSEEAKLNREEIDGVKLESTRIYQILAIYSTVASSLVLVVSLGAISFWMCSNGSLQCRICI

SEQ ID NO: 4577 - protein, 566 aa, synthetic construct
  REGION 1..566: note = hemagglutinin__InfluenzaA__ADF27619
MKAILVVLLYTFATANADTLCIGYHANNSTDTVDTVLEKNVTVTHSVNLLEDKHNGKLCKLRGVVPLHLGKCNIAGWILGNPECESLSTASSWSYIVETSSSDNGTCYPGDFIDYEELREQLSSVSSFERFEIFPKTSSWPNHDSNKGVTAACPHAGAKSFYKNLIWLVKKGNSYPKLSKSYINDKGKEVLVLWGIHHPSTSADQQSLYQNADAYVFVGTSRYSKKFKPEIAIRPKVRDQEGRMNYYWTLVEPGDKITFEATGNLVVPRYAFAMERNAGSGIIISDTPVHDCNTTCQTPKGAINTSLPFQNIHPITIGKCPKYVKSTKLRLATGLRNVPSIQSRGLFGAIAGFIEGGWTGMVDGWYGYHHQNEQGSGYAADLKSTQNAIDKITNKVNSVIEKMNTQFTAVGKEFNHLEKRIENLNKKVDDGFLDIWTYNAELLVLLENERTLDYHDSNVKNLYEKVRSQLKNNAKEIGNGCFEFYHKCDNTCMESVKNGTYDYPKYSEEAKLNREEIDGVKLESTRIYQILAIYSTVASSLVLVVSLGAISFWMCSNGSLQCRICI

SEQ ID NO: 4578 - protein, 566 aa, synthetic construct; identical to SEQ ID NO: 3841
  REGION 1..566: note = hemagglutinin__InfluenzaA__ADF27629

SEQ ID NO: 4579 - protein, 566 aa, synthetic construct
  REGION 1..566: note = hemagglutinin__InfluenzaA__ADF27649
MKAILVVLLYTFATANADTLCIGYHANNSTDTVDTVLEKNVTVTHSVNLLEDKHNGKLCKLRGVAPLHLGKCNIAGWILGNPECESLSTASSWSYIVETSSSDNGTCYPGDFIDYEELREQLSSVSSFERFEIFPKTSSWPNHDSNKGVTAACPHAGAKSFYKNLIWLVKKGNSYPKLSKSYINDKGKEVLVLWGIHHPSTSADQQSLYQNADAYVFVGTSRYSKKFKPEIAIRPKVRDQEGRMNYYWTLVEPGDKITFEATGNLVVPRYAFAMERNAGSGIIISDTPVHDCNTTCQTPKGAINTSLPFQNIHPITIGKCPKYVKSTKLRLATGLRNVPSIQPRGLFGAIAGFIEGGWTGMVDGWYGYHHQNEQGSGYAADLKSTQNAIDKITNKVNSVIEKMNTQFTAVGKEFNHLEKRIENLNKKVDDGFLDIWTYNAELLVLLENERTLDYHDSNVKNLYEKVRSQLKNNAKEIGNGCFEFYHKCDNTCMESVKNGTYDYPKYSEEAKLNREEIDGVKLESTRIYQILAIYSTVASSLVLVVSLGAISFWMCSNGSLQCRICI

SEQ ID NO: 4580 - protein, 566 aa, synthetic construct; identical to SEQ ID NO: 3841
  REGION 1..566: note = hemagglutinin__InfluenzaA__ADF27659

SEQ ID NO: 4581 - protein, 566 aa, synthetic construct; identical to SEQ ID NO: 4318
  REGION 1..566: note = hemagglutinin__InfluenzaA__ADF27669

SEQ ID NO: 4582 - protein, 566 aa, synthetic construct; identical to SEQ ID NO: 3770
  REGION 1..566: note = hemagglutinin__InfluenzaA__ADF27679

SEQ ID NO: 4583 - protein, 566 aa, synthetic construct; identical to SEQ ID NO: 4379
  REGION 1..566: note = hemagglutinin__InfluenzaA__ADF27689

SEQ ID NO: 4584 - protein, 566 aa, synthetic construct
  REGION 1..566: note = hemagglutinin__InfluenzaA__ADF27699
MKAILVVLLYTFATANADTLCIGYHANNSTDTVDTVLEKNVTVTHSVNLLEDKHNGKLCKLRGVAPLHLGKCNIAGWILGNPECESLSTASSWSYIVETSSSDNGTCYPGDFIDYEELREQLSSVSSFERFEMFPKTSSWPNHDSNKGVTAACPHAGAKSFYKNLIWLVKKGNSYPKLSKSYINDKGKEVLVLWGIHHPSTSADQQSLYQNADAYVFVGTSRYSKKFKPEIAIRPKVRDQEGRMNYYWTLVEPGDKITFEATGNLVVPRYAFAMERNAGSGIIISDTPVHNCNTTCQTPKGAINTSLPFQNIHPITIGKCPKYVKSTKLRLATGLRNVPSIQSRGLFGAIAGFIEGGWTGMVDGWYGYHHQNEQGSGYAADLKSTQNAIDEITNKVNSVIEKMNTQFTAVGKEFNHLEKRIENLNKKVDDGFLDIWTYNAELLVLLENERTLDYHDSNVKNLYEKVRSQLKNNAKEVGNGCFEFYHKCDNTCMESVKNGTYDYPKYSEEAKLNREEIDGVKLESTRIYQILAIYSTVASSLVLVVSLGAISFWMCSNGSLQCRICI

SEQ ID NO: 4585 - protein, 566 aa, synthetic construct
  REGION 1..566: note = hemagglutinin__InfluenzaA__ADF27709
MKAILVVLLYTFATANADTLCIGYHANNSTDTVDTVLEKNVTVTHSVNLLEDKHNGKLCKLRGVAPLHLGKCNIAGWILGNPECESLSTASSWSYIVEISSSDNGTCYPGDFINYEELREQLSSVSSFERFEIFPKTSSWPNHDSNKGVTAACPHAGAKSFYKNLIWLVKKGNSYPKLSKSYINDKGKEVLVLWGIHHPSTSADQQSLYQNADAYVFVGTSRYSKKFKPEIAIRPKVRDQEGRMNYYWTLVEPGDKITFEATGNLVVPRYAFAMERNAGSGIIISDTPVHDCNTTCQTPKGAINTSLPFQNIHPITIGKCPKYVKSTKLRLATGLRNVPSIQSRGLFGAIAGFIEGGWTGMVDGWYGYHHQNEQGSGYAADLKSTQNAIDKITNKVNSVIEKMNTQFTAVGKEFNHLEKRIENLNKKVDDGFLDIWTYNAELLVLLENERTLDYHDSNVKNLYEKVRSQLKNNAKEIGNGCFEFYHKCDNTCMESVKNGTYDYPKYSEEAKLNREEIDGVKLESTRIYQILAIYSTVASSLVLVVSLGAISFWMCSNGSLQCRICI

SEQ ID NO: 4586 - protein, 566 aa, synthetic construct; identical to SEQ ID NO: 3833
  REGION 1..566: note = hemagglutinin__InfluenzaA__ADF27785

SEQ ID NO: 4587 - protein, 566 aa, synthetic construct
  REGION 1..566: note = hemagglutinin__InfluenzaA__ADF27795
MKAILVVLLYTFATANADTLCIGYHANNSTDTVDTVLEKNVTVTHSVNLLEDKHNGKLCKLRGVAPLHLGKCNIAGWILGNPECESLSTASSWSYIVETSSSDNGTCYPGDFIDYEELREQLSSVSSFERFEIFPKTSSWPNHDSNKGVTAACPHAGAKSFYKNLIWLVKKGNSYPKLSKSYINDKGKEVLVLWGIHHPSTSADQQSLYQNADAYVFVGTSRYSKKFKPEIAIRPKVRDQEGRMNYYWTLVKPGDKITFEATGNLVVPRYAFAMERNAGSGIIISDTPVHDCNTTCQTPKGAINTSLPFQNIHPITIGKCPKYVKSTKLRLATGLRNVPSIQSRGLFGAIAGFIEGGWTGMVDGWYGYHHQNEQGSGYAADLKSTQNAIDEITNKVNSVIEKMNTQFTAVGKEFNHLEKRIENLNKKVDDGFLDIWTYNAELLVLLENERTLDYHDSNVKNLYEKVRSQLKNNAKEIGNGCFEFYHKCDNTCMESVKNGTYDYPKYSEEAKLNREEIDGVKLESTRIYQILAIYSTVASSLVLVVSLGAISFWMCSNGSLQCRICI

SEQ ID NO: 4588 - protein, 566 aa, synthetic construct; identical to SEQ ID NO: 3841
  REGION 1..566: note = hemagglutinin__InfluenzaA__ADF27805

SEQ ID NO: 4589 - protein, 566 aa, synthetic construct
  REGION 1..566: note = hemagglutinin__InfluenzaA__ADF27815
MKAILVVLLYTFATANADTLCIGYHANNSTDTVDTVLEKNVTVTHSVNLLEDKHNGKLCKLRGVAPLHLGKCNIAGWILGNPECESLSTASSWSYIVETSSSDNGTCYPGDFIDYEELREQLSSVSSFERFEIFPKTSSWPNHDSNKGVTAACPHDGAKSFYKNLIWLVKKGNSYPKLSKSYINDKGKEVLVLWGIHHPSTSADQQSLYQNADAYVFVGTSRYSKKFKPEIAIRPKVRDQEGRMNYYWTLVEPGDKITFEATGNLVVPRYAFAMERNAGSGIIISDTPVHDCNTTCQTPKGAINTSLPFQNIHPITIGKCPKYVKSTKLRLATGLRNVPSIQSRGLFGAIAGFIEGGWTGMVDGWYGYHHQNEQGSGYAADLKSTQNAIDKITNKVNSVIEKMNTQFTAVGKEFNHLEKRIENLNKKVDDGFLDIWTYNAELLVLLENERTLDYHDSNVKNLYEKVRSQLKNNAKEIGNGCFEFYHKCDNTCMESVKNGTYDYPKYSEEAKLNREEIDGVKLESTRIYQILAIYSTVASSLVLVVSLGAISFWMCSNGSLQCRICI

SEQ ID NO: 4590 - protein, 566 aa, synthetic construct
  REGION 1..566: note = hemagglutinin__InfluenzaA__ADF27825
MKAILVVLLYTFATANADTLCIGYHANNSTDTVDTVLERNVTVTHSVNLLEDKHNGKLCKLRGVAPLHLGKCNIAGWILGNPECESLSTASSWSYIVETSSSDNGTCYPGDFIDSEELREQLSSVSSFERFEIFPKTSSWPNHDSNKGVTAACPHAGAKSFYKNLIWLVKKGNSYPKLSKSYINDKGKEVLVLWGIHHPSTSADQQSLYQNADAYVFVGTSRYSKKFKPEIAIRPKVRDQEGRMNYYWTLVEPGDKITFEATGNLVVPRYAFAMERNAGSGIIISDTPVHDCNTTCQTPKGAINTSLPFQNIHPITIGKCPKYVKSTKLRLATGLRNVPSIQSRGLFGAIAGFIEGGWTGMVDGWYGYHHQNEQGSGYAADLKSTQNAIDEITNKVNSVIEKMNTQFTAVGKEFNHLEKRIENLNKKVDDGFLDIWTYNAELLVLLENERTLDYHDSNVKNLYEKVRSQLKNNAKEIGNGCFEFYHKCDNTCMESVKNGTYDYPKYSEEAKLNREEIDGVKLESTRIYQILAIYSTVASSLVLVVSLGAISFWMCSNGSLQCRICI

SEQ ID NO: 4591 - protein, 566 aa, synthetic construct
  REGION 1..566: note = hemagglutinin__InfluenzaA__ADF27845
MKAILVVLLYTFATANADTLCIGYHANNSTDTVDTVLEKNVTVTHSANLLEDKHNGKLCKLRGVAPLHLGKCNIAGWILGNPECESLSTASSWSYIVETSSSDNGTCYPGDFIDYEELREQLSSVSSFERFEIFPKTSSWPNHDSNKGVTAACPHAGAKSFYKNLIWLVKKGNSYPKLSKSYINDKGKEVLVLWGIHHPSTNADQQSLYQNADAYVFVGTSRYSKKFKPEIAIRPKVRDQEGRMNYYWTLVEPGDKITFEATGNLVVPRYAFAMERNAGSGIIISDTPVHDCNTTCQTPKGAINTSLPFQNIHPITIGKCPKYVKSTKLRLATGLRNVPSIQSRGLFGAIAGFIEGGWTGMVDGWYGYHHQNEQGSGYAADLKSTQNAIDEITNKVNSVIEKMNTQFTAVGKEFNHLEKRIENLNKKVDDGFLDIWTYNAELLVLLENERTLDYHDSNVKNLYEKVRSQLKNNAKEIGNGCFEFYHKCDNTCMESVKNGTYDYPKYSEEAKLNREEIDGVKLESTRIYQILAIYSTVASSLVLVVSLGAISFWMCSNGSLQCRICI

SEQ ID NO: 4592 - protein, 566 aa, synthetic construct; identical to SEQ ID NO: 3833
  REGION 1..566: note = hemagglutinin__InfluenzaA__ADF27855

SEQ ID NO: 4593 - protein, 566 aa, synthetic construct; identical to SEQ ID NO: 3833
  REGION 1..566: note = hemagglutinin__InfluenzaA__ADF27865

SEQ ID NO: 4594 - protein, 566 aa, synthetic construct; identical to SEQ ID NO: 3833
  REGION 1..566: note = hemagglutinin__InfluenzaA__ADF27875

SEQ ID NO: 4595 - protein, 566 aa, synthetic construct; identical to SEQ ID NO: 3833
  REGION 1..566: note = hemagglutinin__InfluenzaA__ADF27885

SEQ ID NO: 4596 - protein, 566 aa, synthetic construct; identical to SEQ ID NO: 2669
  REGION 1..566: note = hemagglutinin__InfluenzaA__ADF27895

SEQ ID NO: 4597 - protein, 566 aa, synthetic construct
  REGION 1..566: note = hemagglutinin__InfluenzaA__ADF27915
MKAILVVLLYTFATANADTLCIGYHANNSTDTVDTVLEKNVTVTHSVNLLEDKHNGKLCKLRGVAPLHLGKCNIAGWILGNPECESLSTASSWSYIVETSSSDNGTCYPGDFIDYEELREQLSSVSSFERFEIFPKTSSWPNHDSNKGVTAACPHAGAKSFYKNLIWLVKKGNSYPKLSKSYINDKGKEVLVLWGIHHPSASADQQSLYQNADAYVFVGTSRYSKKFKPEIAIRPKVRDQEGRMNYYWTLVEPGDKITFEATGNLVVPRYAFAMERNAGSGIIISDTPVHDCNTTCQTPKGAINTSLPFQNIHPITIGKCPKYVKSTKLRLATGLRNVPSIQSRGLFGAIAGFIEGGWTGMVDGWYGYHHQNEQGSGYAADLKSTQNAIDKITNKVNSVIEKMNTQFTAVGKEFNHLEKRIENLNKKVDDGFLDIWTYNAELLVLLENERTLDYHDSNVKNLYEKVRSQLKNNAKEIGNGCFEFYHKCDNTCMESVKNGTYDYPKYSEEAKLNREEIDGVKLESTRIYQILAIYSTVASSLVLVVSLGAISFWMCSNGSLQCRICI

SEQ ID NO: 4598 - protein, 566 aa, synthetic construct
  REGION 1..566: note = hemagglutinin__InfluenzaA__ADF27925
MKAILVVLLYTFATANADTLCIGYHANNSTDTVDTVLEKNVTVTHSVNLLEDKHNGKLCKLRGVAPLHLGKCNIAGWILGNPECESLSTASSWSYIVETSSSDNGTCYPGDFIDYEELREQLSSVSSFERFEIFPKTSSWPNHDSNKGVTAACPHAGAKSFYKNLIWLVKKGNSYPKLSNSYINDKGKEVLVLWGIHHPSTSADQQSLYQNADAYVFVGTSRYSKKFKPEIAIRPKVRDQEGRMNYYWTLVEPGDKITFEATGNLVVPRYAFAMERNAGSGIIISDTPAHDCNTTCQTPKGAINTSLPFQNIHPITIGKCPKYVKSTKLRMATGLRNVPSIQSRGLFGAIAGFIEGGWTGMVDGWYGYHHQNEQGSGYAADLKSTQNAIDEITNKVNSVIEKMNTQFTAVGKEFNHLEKRIENLNKKVDDGFLDIWTYNAELLVLLENERTLDYHDSNVKNLYEKVRSQLKNNAKEIGNGCFEFYHKCDNTCMESVKNGTYDYPKYSEEAKLNREEIDGVKLESTRIYQILAIYSTVASSLVLVVSLGAISFWMCSNGSLQCRICI

SEQ ID NO: 4599 - protein, 566 aa, synthetic construct
  REGION 1..566: note = hemagglutinin__InfluenzaA__ADF27935
MKAILVVLLYTFATANADTLCIGYHANNSTDTVDTVLEKNVTVTHSVNLLEDKHNGKLCKLRGVAPLHLGKCNIAGWILGNPKCESLSTESSWSYIVETSSSDNGTCYPGDFINYEELREQLSSVSSFERFEIFPKTSSWPNHDSNKGVTAACPHAGAKSFYKNLIWLVKKGNSYPKLSKSYINDKGKEVLVLWGIHHPSTSADQQSLYQNADAYVFVGTSRYSKKFKPEIAIRPKVRDQEGRMNYYWTLVEPGDKITFEATGNLVVPRYAFAMERNAGSGIIISDTPVHDCNTTCQTPKGAINTSLPFQNIHPITIGKCPKYVKSTKLRLATGLRNVPSIQSRGLFGAIAGFIEGGWTGMVDGWYGYHHQNEQGSGYAADLKSTQNAIDKITNKVNSVIEKMNTQFTAVGKEFNHLEKRIENLNKKVDDGFLDIWTYNAELLVLLENERTLDYHDSNVKNLYEKVRSQLKNNAKEIGNGCFEFYHKCDNTCMESVKNGTYDYPKYSEEAKLNREEIDGVKLESTRIYQILAIYSTVASSLVLVVSLGAISFWMCSNGSLQCRICI

SEQ ID NO: 4600 - protein, 566 aa, synthetic construct
  REGION 1..566: note = hemagglutinin__InfluenzaA__ADF27955
MKAILVVLLYTFATANADTLCIGYHANNSTDTVDTVLEKNVTVTHSVNLLEDKHNGKLCKLRGVAPLHLGKCNIAGWILGNPECESLSTASSWSYIVETSSSDNGTCYPGDFIDYEELREQLSSVSSFERFEIFPKTSSWPNHDSNKGVTAACPHAGAKSFYKNLIWLVKKGNSYPKLSNSYINDKGKEVLVLWGIHHPSTSADQQSLYQNADAYVFVGTSRYSKKFKPEIAIRPKVRDQEGRMNYYWTLVEPGDKITFEATGNLVVPRYAFAMERNAGSGIIISDTPVHDCNTTCQTPKGAINTSLPFQNIHPITIGKCPKYVKSTKLRLATGLRNVPSIQSRGLFGAIAGFIEGGWTGMVDGWYGYHHQNEQGSGYAADLKSTQNAIDKITNKVNSVIEKMNTQFTAVGKEFNHLEKRIENLNKKVDDGFLDIWTYNAELLVLLENERTLDYHDSNVKNLYEKVRSQLKNNAKEIGNGCFEFYHKCDNTCMESVKNGTYDYPKYSEEAKLNREEIDGVKLESTRIYQILAIYSTVASSLVLVVSLGAISFWMCSNGSLQCRICI

SEQ ID NO: 4601 - protein, 566 aa, synthetic construct
  REGION 1..566: note = hemagglutinin__InfluenzaA__ADF27965
MKAILVVLLYTFATANADTLCIGYHANNSTDTVDTVLEKNVTVTHSVNLLEDKHNGKLCKLRGVAPLHLGKCNIAGWILGNPECESLSTASSWSYIVETSSSDNGTCYPGDFIDYEELREQLSSVSSFERFEIFPKTSSWPNHDSNKGVTAACPHAGAKSFYKNLIWLVKKGNSYPKLSKSYINDKGKKVLVLWGIHHPSTSADQQSLYQNADAYVFVGTSRYSKKFKPEIAIRPKVRDQEGRMNYYWTLVEPGDKITFEATGNLVVPRYAFAMERNAGSGIIISDTPVNDCNTTCQTPKGAINTSLPFQNIHPITIGKCPKYVKSTKLRLATGLRNVPSIQSRGLFGAIAGFIEGGWTGMVDGWYGYHHQNEQGSGYAADLKSTQNAIDKITNKVNSVIEKMNTQFTAVGKEFNHLEKRIENLNKKVDDGFLDIWTYNAELLVLLENERTLDYHDSNVKNLYEKVRSQLKNNAKEIGNGCFEFYHKCDNTCMESVKNGTYDYPKYSEEAKLNREEIDGVKLESTRIYQILAIYSTVASSLVLVVSLGAISFWMCSNGSLQCRICI

SEQ ID NO: 4602 - protein, 566 aa, synthetic construct; identical to SEQ ID NO: 3833
  REGION 1..566: note = hemagglutinin__InfluenzaA__ADF27975

SEQ ID NO: 4603 - protein, 566 aa, synthetic construct; identical to SEQ ID NO: 3841
  REGION 1..566: note = hemagglutinin__InfluenzaA__ADF27985

SEQ ID NO: 4604 - protein, 566 aa, synthetic construct
  REGION 1..566: note = hemagglutinin__InfluenzaA__ADF27995
MKAILVVLLYTFATANADTLCIGYHANNSTDTVDTVLEKNVTVTHSANLLEDKHNGKLCKLRGVAPLHLGKCNIAGWILGNPECESLSTASSWSYIVETSSSDNGTCYPGDFIDYEELREQLSSVSSFERFEIFPKTSSWPNHDSNKGVTAACPHAGAKSFYKNLIWLVKKGNSYPKLSKSYINDKGKEVLVLWGIHHPSTNADQQSLYQNADAYVFVGTSRYSKKFKPEIAIRPKVRDQEGRMNYYWTLVEPGDKITFEATGNLVVPRYAFAMERNAGSGIIISDTPAHDCNTTCQTPKGAINTSLPFQNIHPITIGKCPKYVKSTKLRLATGLRNIPSIQSRGLFGAIAGFIEGGWTGMVDGWYGYHHQNEQGSGYAADLKSTQNAIDEITNKVNSVIEKMNTQFTAVGKEFNHLEKRIENLNKKVDDGFLDIWTYNAELLVLLENERTLDYHDSNVKNLYEKVRSQLKNNAKEIGNGCFEFYHKCDNTCMESVKNGTYDYPKYSEEAKLNREEIDGVKLESTRIYQILAIYSTVASSLVLVVSLGAISFWMCSNGSLQCRICI

SEQ ID NO: 4605 - protein, 566 aa, synthetic construct; identical to SEQ ID NO: 4221
  REGION 1..566: note = hemagglutinin__InfluenzaA__ADF28005

SEQ ID NO: 4606 - protein, 566 aa, synthetic construct; identical to SEQ ID NO: 4221
  REGION 1..566: note = hemagglutinin__InfluenzaA__ADF28015

SEQ ID NO: 4607 - protein, 566 aa, synthetic construct; identical to SEQ ID NO: 3833
  REGION 1..566: note = hemagglutinin__InfluenzaA__ADF28025

SEQ ID NO: 4608 - protein, 566 aa, synthetic construct; identical to SEQ ID NO: 3833
  REGION 1..566: note = hemagglutinin__InfluenzaA__ADF28045

SEQ ID NO: 4609 - protein, 566 aa, synthetic construct
  REGION 1..566: note = hemagglutinin__InfluenzaA__ADF28055
MKAILVVLLYTFATANADTLCIGYHANNSTDTVDTVLEKNVTVTHSVNLLEDKHNGKLCKLRGVAPLHLGKCNIAGWILGNPECESLSTASSWSYIVETSSSDNGTCYPGDFIDYEELREQLSSVSSFERFEIFPKTSSWPNYDSNKGVTAACPHAGAKSFYKNLIWLVKKGNSYPKLSKSYINDKGKEVLVLWGIHHPSTSADQQSLYQNADAYVFVGTSRYSKKFKPEIAIRPKVRDQEGRMNYYWTLVEPGDKITFEATGNLVVPRYAFAMERNAGSGIIISDTPVHDCNTTCQTPKGAINTSLPFQNIHPITIGKCPKYVKSTKLRLATGLRNVPSIQSRGLFGAIAGFIEGGWTGMVDGWYGYHHQNEQGSGYAADLKSTQNAIDKITNKVNSVIEKMNTQFTAVGKEFNHLEKRIENLNKKVDDGFLDIWTYNAELLVLLENERTLDYHDSNVKNLYEKVRSQLKNNAKEIGNGCFEFYHKCDNTCMESVKNGTYDYPKYSEEAKLNREEIDGVKLESTRIYQILAIYSTVASSLVLVVSLGAISFWMCSNGSLQCRICI

SEQ ID NO: 4610 - protein, 566 aa, synthetic construct; identical to SEQ ID NO: 3833
  REGION 1..566: note = hemagglutinin__InfluenzaA__ADF28065

SEQ ID NO: 4611 - protein, 566 aa, synthetic construct; identical to SEQ ID NO: 2851
  REGION 1..566: note = hemagglutinin__InfluenzaA__ADF28075

SEQ ID NO: 4612 - protein, 566 aa, synthetic construct; identical to SEQ ID NO: 3770
  REGION 1..566: note = hemagglutinin__InfluenzaA__ADF28085

SEQ ID NO: 4613 - protein, 566 aa, synthetic construct; identical to SEQ ID NO: 2849
  REGION 1..566: note = hemagglutinin__InfluenzaA__ADF28107

SEQ ID NO: 4614 - protein, 566 aa, synthetic construct; identical to SEQ ID NO: 4221
  REGION 1..566: note = hemagglutinin__InfluenzaA__ADF28117

SEQ ID NO: 4615 - protein, 566 aa, synthetic construct
  REGION 1..566: note = hemagglutinin__InfluenzaA__ADF29918
MKAILVVLLYTFATANADTLCIGYHANNSTDTVDTVLEKNVTVTHSVNLLEDKHNGKLCKLRGVAPLHLGKCNIAGWILGNPECESLSTASSWSYIVETSSSDNGTCYPGDFIDYEELREQLSSVSSFERFEIFPKTSSWPNHDSNKGVTAACPHAGAKSFYKNLIWLVKKGNSYPKLSRSYINDKGKEVLVLWGIHHPSTSADQQSLYQNADAYVFVGTSRYSKKFKPEIAIRPKVRNQEGRMNYYWTLVEPGDKITFEATGNLVVPRYAFAMERNAGSGIIISDTPVHDCNTTCQTPKGAINTSLPFQNIHPITIGKCPKYVKSTKLRLATGLRNVPSIQSRGLFGAIAGFIEGGWTGMVDGWYGYHHQNEQGSGYAADLKSTQNAIDEITNKVNSVIEKMNTQFTAVGKEFNHLEKRIENLNKKVDDGFLDIWTYNAELLVLLENERTLDYHDSNVKNLYEKVRSQLKNNAKEIGNGCFEFYHKCDNTCMESVKNGTYDYPKYSEEAKLNREEIDGVKLESTRIYQILAIYSTVASSLVLVVSLGAISFWMCSNGSLQCRICI

SEQ ID NO: 4616 - protein, 566 aa, synthetic construct
  REGION 1..566: note = hemagglutinin__InfluenzaA__ADF42689
MKAILVVLLYTFATANADTLCIGYHANNSTDTVDTVLEKNVTVTHSVNLLEDKHNGKLCKLRGVAPLHLGKCNIAGWILGNPECESLSTASSWSYIVETSSSDNGTCYPGDFIDYEELREQLSSVSSFERFEIFPKTSSWPNHDSNKGVTAACPHAGAKSFYKNLIWLVKKGNSYPKLSKSYINDKGKEVLVLWGIHHPSTSADQQSLYQNADAYVFVGTSRYSKKFKPEIAIRPKVRDQEGRMNYYWTLVEPGDKITFEATGNLVVPRYAFAMERNAGSGIIISDTPVHDCNTTCQTPKGAINTSLPFQNIHPITIGKCPKYVKSTKLRLATGLRNVPSIQSRGLFGAIAGFIEGGWTGMVDGWYGYHHQNEQGSGYAADLKSTQNAIDEITNKVNSVIEKMNTQFTAVGKEFNHLEKRIENLNKKVDDGFLDIWTYNAELLVLLENERTLDYHDSNVKNLYEKVRSQLKNNAKEIGNGCFEFYHKCDNTCMESVKNGTYDYPKYSEEAKLNREEIDGVKLESTRIYQILAIYSTVASSLVLAVSLGAIGFWMCSNGSLQCRICI

SEQ ID NO: 4617 - protein, 566 aa, synthetic construct
  REGION 1..566: note = hemagglutinin__InfluenzaA__ADF42699
MKAILVVLLYTFATANADTLCIGYHANNSTDTVDTVLEKNVTVTHSVNLLEDKHNGTLCKLRGVAPLHLGKCNIAGWILGNPECESLSTASSWSYIVETSSSDNGTCYPGDFIDYEELREQLSSVSSFERFEMFPKTSSWPNHDSNKGVTAACPHAGAKSFYKNLIWLVKKGNSYPKLSKSYINDKGKEVLVLWGIHHPSTSADQQSLYQNADAYVFVGTSRYSKKFKPEIAIRPKVRDQEGRMNYYWTLVEPGDKITFEATGNLVVPRYAFAMERNAGSGIIISDTPVHDCNTTCQTPKGAINTSLPFQNIHPITIGKCPKYVKSTKLRLATGLRNVPSIQSRGLFGAIAGFIEGGWTGMVDGWYGYHHQNEQGSGYAADLKSTQNAIDEITNKVNSVIEKMNTQFTAVGKEFNHLEKRIENLNKKVDDGFLDIWTYNAELLVLLENERTLDYHDSNVKNLYEKVRSQLKNNAKEIGNGCFEFYHKCDNTCMESVKNGTYDYPKYSEEAKLNREEIDGVKLESTRIYQILAIYSTVASSLVLVVSLGAISFWMCSNGSLQCRICI

SEQ ID NO: 4618 - protein, 566 aa, synthetic construct; identical to SEQ ID NO: 3833
  REGION 1..566: note = hemagglutinin__InfluenzaA__ADF42709

SEQ ID NO: 4619 - protein, 566 aa, synthetic construct; identical to SEQ ID NO: 3833
  REGION 1..566: note = hemagglutinin__InfluenzaA__ADF42719

SEQ ID NO: 4620 - protein, 566 aa, synthetic construct; identical to SEQ ID NO: 3833
  REGION 1..566: note = hemagglutinin__InfluenzaA__ADF42729

SEQ ID NO: 4621 - protein, 566 aa, synthetic construct; identical to SEQ ID NO: 3833
  REGION 1..566: note = hemagglutinin__InfluenzaA__ADF42739

SEQ ID NO: 4622 - protein, 566 aa, synthetic construct
  REGION 1..566: note = hemagglutinin__InfluenzaA__ADF58349
MKAILVVLLYTFATANADTLCIGYHANNSTDTVDTVLEKNVTVTHSVNLLEDKHNGKLCKLRGVAPLHLGKCNIAGWILGNPECESLSTASSWSYIVETSSSDNGTCYPGDFIDYEELREQLSSVSSFERFEIFPKTSSWPDHDSNKGVTAACPHAGAKSFYKNLIWLVKKGNSYPKLSKSYINDKGKEVLVLWGIHHPSTSADQQSLYQNADAYVFVGTSRYSKKFKPEIAIRPKVREREGRMNYYWTLVEPGDKITFEATGNLVVPRYAFAMERNAGSGIIISDTPVHDCNTTCQTPKGAINTSLPFQNIHPITIGKCPKYVKSTKLRLATGLRNVPSIQSRGLFGAIAGFIEGGWTGMVDGWYGYHHQNEQGSGYAADLKSTQNAIDEITNKVNSVIEKMNTQFTAVGKEFNHLEKRIENLNKKVDDGFLDIWTYNAELLVLLENERTLDYHDSNVKNLYEKVRSQLKNNAKEIGNGCFEFYHKCDNTCMESVKNGTYDYPKYSEEAKLNREEIDGVKLESTRIYQILAIYSTVASSLVLVVSLGAISFWMCSNGSLQCRICI

SEQ ID NO: 4623 - protein, 566 aa, synthetic construct; identical to SEQ ID NO: 4266
  REGION 1..566: note = hemagglutinin__InfluenzaA__ADF58351

SEQ ID NO: 4624 - protein, 566 aa, synthetic construct
  REGION 1..566: note = hemagglutinin__InfluenzaA__ADF80454
MKAILVVLLYTFATANADTLCIGYHANNSTDTVDTVLEKNVTVTHSVNLLEDKHNGKLCKLRGVAPLHLGKCNIAGWILGNPECESLSTASSWSYIVETSSSDNGTCYPGDFIDYEELREQLSSVSSFERFEIFPKTSSWPNHDSNKGVTAACPHAGAKSFYKNLIWLVKKGNSYPKLSKSYINDKGKEVLVLWGIHHPSTSADQQSLYQNADAYVFVGTSRYSKKFKPEIAIRPKVRDQEGRMNYYWTLVEPGDKITFEATGNLVVPRYAFAMERNAGSGIIISDTPVHDCNTTCQTPEGAINTSLPFQNIHPITIGKCPKYVKSTKLRLATGLRNVPSIQSRGLFGAIAGFIEGGWTGMVDGWYGYHHQNEQGSGYAADLKSTQNAIDEITNKVNSIIEKMNTQFTAVGKEFNHLEKRIENLNKKVDDGFLDIWTYNAELLVLLENERTLDYHDSNVKNLYEKVRSQLKNNAKEIGNGCFEFYHKCDDTCMESVKNGTYDYPKYSEEAKLNREEIDGVKLESTRIYQILAIYSTVASSLVLVVSLGAISFWMCSNGSLQCRICI

SEQ ID NO: 4625 - protein, 566 aa, synthetic construct
  REGION 1..566: note = hemagglutinin__InfluenzaA__ADF80462
MKAILVVLLYTFATANADTLCIGYHANNSTDTVDTVLEKNVTVTHSVNLLEDKHNGKLCKLRGVAPLHLGKCNIAGWILGNPECESLSTASSWSYIVETSNSDNGTCYPGDFIDYEELREQLSSVSSFERFEIFPKISSWPNHDSNKGVTAACPHAGAKSFYKNLIWLVKKGNSYPKLSKSYINDKGKEVLVLWGIHHPSTSADQQSLYQNADAYVFVGTSRYSKKFKPEIAIRPKVRDQEGRMNYYWTLVEPGDKITFEATGNLVVPRYAFAMERNAGSGIIISDTPVHDCNTTCQTPKGAINTSLPFQNIHPITIGKCPKYVKSTKLRLATGLRNVPSIQSRGLFGAIAGFIEGGWTGMVDGWYGYHHQNEQGSGYAADLKSTQNAIDEITNKVNSVIEKMNTQFTAVGKEFNHLEKRIENLNKKVDDGFLDIWTYNAELLVLLENERTLDYHDSNVKNLYEKVRSQLKNNAKEIGNGCFEFYHKCDNTCMESVKNGTYDYPKYSEEAKLNREEIDGVKLESTRIYQILAIYSTVASSLVLVVSLGAISFWMCSNGSLQCRICI

SEQ ID NO: 4626 - protein, 566 aa, synthetic construct; identical to SEQ ID NO: 2669
  REGION 1..566: note = hemagglutinin__InfluenzaA__ADF80470

SEQ ID NO: 4627 - protein, 566 aa, synthetic construct
  REGION 1..566: note = hemagglutinin__InfluenzaA__ADF80478
MKAILVVLLYTFATANADTLCIGYHANNSTDTVDTVLEKNVTVTHSVNLLEDKHNGKLCKLRGVAPLHLGKCNIAGWILGNPECESLSTASSWSYIVETSSSDNGTCYPGDFIDYEELREQLSSVSSFERFEIFPKTSSWPNHDPNKGVTAACPHAGAKSFYKNLIWLVKKGNSYPKLSKSYINDKGKEVLVLWGIHHPSTSADQQSLYQNADAYVFVGTSRYSKKFKPEIAIRPKVRDQEGRMNYYWTLVEPGDKITFEATGNLMVPRYAFAMERNAGSGIIISDTPVHDCNTTCQTPKGAINTSLPFQNIHPITIGKCPKYVKSTKLRLATGLRNVPSIQSRGLFGAIAGFIEGGWTGMVDGWYGYHHQNEQGSGYAADLKSTQNAIDEITNKVNSVIEKMNTQFTAVGKEFNHLEKRIENLNKKVDDGFLDIWTYNAELLVLLENERTLDYHDSNVKNLYEKVRSQLKNNAKEIGNGCFEFYHKCDNTCMESVKNGTYDYPKYSEEAKLNREEIDGVKLESTRIYQILAIYSTVASSLVLVVSLGAISFWMCSNGSLQCRICI

SEQ ID NO: 4628 - protein, 566 aa, synthetic construct
  REGION 1..566: note = hemagglutinin__InfluenzaA__ADF80494
MKAILVVLLYTFATANADTLCIGYHANNSTDTVDTVLEKNVTVTHSVNLLEDKHNGKLCKLRGVAPLHLGKCNIAGWILGNPECESLSTASSWSYIVETSSSDNGTCYPGDFIDYEELREQLSSVSSFERFEIFPKTSSWPNHDSNKGVTAACPHAGAKSFYKNLIWLVKKGNSYPKLSKSYINDKGKEVLVLWGIHHPSTSADQQSLYQNADAYVFVGTSRYSKKFKPEIAIRPKVRDQEGRMNYYWTLVEPGDKITFEATGNLLVPRYAFAMERNAGSGIIISDTPVHDCNTTCQTPKGAINTSLPFQNIHPITIGKCPKYVKSTKLRLATGLRNVPSIQSRGLFGAIAGFIEGGWTGMVDGWYGYHHQNEQGSGYAADLKSTQNAIDEITNKVNSVIEKMNTQFTAVGKEFNHLEKRIENLNKKVDDGFLDIWTYNAELLVLLENERTLDYHDSNVKNLYEKVRSQLKTNAKEIGNGCFEFYHKCDNTCMESVKNGTYDYPKYSEEAKLNREEIDGVKLESTRIYQILAIYSTVASSLVLVVSLGAISFWMCSNGSLQCRICI

SEQ ID NO: 4629 - protein, 566 aa, synthetic construct; identical to SEQ ID NO: 4628
  REGION 1..566: note = hemagglutinin__InfluenzaA__ADF80498

SEQ ID NO: 4630 - protein, 566 aa, synthetic construct; identical to SEQ ID NO: 3293
  REGION 1..566: note = hemagglutinin__InfluenzaA__ADF80502

SEQ ID NO: 4631 - protein, 566 aa, synthetic construct
  REGION 1..566: note = hemagglutinin__InfluenzaA__ADF80506
MKAILVVLLYTFATANADTLCIGYHANNSTDTVDTVLERNVTVTHSVNLLEDKHNGKLCKLRGVAPLHLGKCSIAGWILGNPECESLSTASSWSYIVETSSSDNGTCYPGDFIDYEELREQLSSVSSFERFEIFPKTSSWPNHDPNKGVTAACPHAGAKSFYKNLIWLVKKENSYPKLSKSYINDKGKEVLVLWGIHHPSTSADQQSLYQNADAYVFVGTSRYSKKFKPEIAIRPKVRDQEGRMNYYWTLVEPGDKITFEATGNLVVPRYAFAMERNAGSGIIISDTPVHDCNTTCQTPKGAINTSLPFQNIHPITIGKCPKYVKSTKLRLATGLRNVPSIQSRGLFGAIAGFIEGGWTGMVDGWYGYHHQNEQGSGYAADLKSTQNAIDEITNKVNSVIEKMNTQFTAVGKEFNHLEKRIENLNKKVDDGFLDIWTYNAELLVLLENERTLDYHDSNVKNLYEKVRSQLKNNAKEIGNGCFEFYHKCDNTCMESVKNGTYDYPKYSEEAKLNREEIDGVKLESTRIYQILAIYSTVASSLVLVVSLGAISFWMCSNGSLQCRICI

SEQ ID NO: 4632 - protein, 566 aa, synthetic construct
  REGION 1..566: note = hemagglutinin__InfluenzaA__ADF83741
MKTIIALSYILCLVFAQKLPGNDNSTATLCLGHHAVPNGTIVKTITNDQIEVTNATELVQSSSTGEICDSPHQILDGKNCTLIDALLGDPQCDGFQNKKWDLFVERSKAYSNCYPYDVPDYASLRSLVASSGTLEFNNESFNWTGVTQNGTSSACIRRSKNSFFSRLNWLTHLNFKYPALNVTMPNNEQFDKLYIWGVHHPGTDKDQIFLYAQASGRITVSTKRSQQTAIPNIGSRPRVRNIPSRISIYWTIVKPGDILLINSTGNLIAPRGYFKIRSGKSSVMRSDAPIGKCNSDCITPNGSIPNDKPFQNVNRITYGACPRYVKQNTLKLATGMRNVPEKQTRGIFGAIAGFIENGWEGMVDGWYGFRHQNSEGRGQAADLKSTQAAIDQINGKLNRLIGKTNEKFHQIEKEFSEVEGRIQDLEKYVEDTKIDLWSYNAELLVALENQHTIDLTDSEMNKLFEKTKKQLRENAEDMGNGCFKIYHKCDNACIGSIRNGTYDHDVYRDEALNNRFQIKGVELKSGYKDWILWISFAISCFLLCVALLGFIMWACQKGNIRCNICI

SEQ ID NO: 4633 - protein, 566 aa, synthetic construct; identical to SEQ ID NO: 3411
  REGION 1..566: note = hemagglutinin__InfluenzaA__ADF83752

SEQ ID NO: 4634 - protein, 566 aa, synthetic construct; identical to SEQ ID NO: 4221
  REGION 1..566: note = hemagglutinin__InfluenzaA__ADF83763

SEQ ID NO: 4635 - protein, 566 aa, synthetic construct; identical to SEQ ID NO: 4221
  REGION 1..566: note = hemagglutinin__InfluenzaA__ADF83773

SEQ ID NO: 4636 - protein, 566 aa, synthetic construct
  REGION 1..566: note = hemagglutinin__InfluenzaA__ADF83783
MKAILVVLLYTFATANADTLCIGYHANNSTDTVDTVLEKNVTVTHSVNLLEDKHNGKLCKLRGVAPLHLGKCNIAGWILGNPECESLSTASSWSYIVETSSSDNGTCYPGDFIDYEELREQLSSVSSFERFEIFPKTSSWPNHDSNKGVTAACPHAGAKSFYKNLIWLVKKGNSYPKLSKSYINDKGKEVLVLWGIHHPSTSADQQSLYQNADAYVFVGTSRYSKKFKPEIAIRPKVRDQEGRMNYYWTLVEPGDKITFEATGNLVVPRYAFAMERNAGSGIIISDTPVHDCNTTCQTPKGAINTSLPFQNIHPTTIGKCPKYVKSTKLRLATGLRNVPSIQSRGLFGAIAGFIEGGWTGMVDGWYGYHHQNEQGSGYAADLKSTQNAIDEITNKVNSVIEKMNTQFTAVGKEFNHLEKRIENLNKKVDDGFLDIWTYNAELLVLLENERTLDYHDSNVKNLYEKVRSQLKNNAKEIGNGCFEFYHKCDNTCMESVKNGTYDYPKYSEEAKLNREEIDGVKLESTRIYQILAIYSTVASSLVLVVSLGAISFWMCSNGSLQCRICI

SEQ ID NO: 4637 - protein, 566 aa, synthetic construct; identical to SEQ ID NO: 4296
  REGION 1..566: note = hemagglutinin__InfluenzaA__ADF83793

SEQ ID NO: 4638 - protein, 566 aa, synthetic construct
  REGION 1..566: note = hemagglutinin__InfluenzaA__ADF83803
MKAILVVLLYTFATANADTLCIGYHANNSTDTVDTVLEKNVTVTHSVNLLEDKHNGKLCKLRGVAPLHLGKCNIAGWILGNPECETLSTASSWSYIVETSSSDNGTCYPGDFIDYEELREQLSSVSSFERFEIFPKTSSWPNHDSNKGVTAACPHAGAKSFYKNLIWLVKKGNSYPKLSKSYINDKGKEVLVLWGIHHPSTSADQQSLYQNADAYVFVGTSRYSKKFKPEIAIRPKVRDQEGRMNYYWTLVEPGDKITFEATGNLVVPRYAFAMERNAGSGIIISDTPVHDCNTTCQTPKGAINTSLPFQNVHPITIGKCPKYVKSTKLRLATGLRNVPSIQSRGLFGAIAGFIEGGWTGMVDGWYGYHHQNEQGSGYAADLKSTQNAIDEITNKVNSVIEKMNTQFTAVGKEFNHLEKRIENLNKKVDDGFLDIWTYNAELLVLLENERTLDYHDSNVKNLYEKVRSQLKNNAKETGNGCFEFYHKCDNTCMESVKNGTYDYPKYSEEAKLNREEIDGVKLESTRIYQILAIYSTVASSLVLVVSLGAISFWMCSNGSLQCRICI

SEQ ID NO: 4639 - protein, 566 aa, synthetic construct
  REGION 1..566: note = hemagglutinin__InfluenzaA__ADF83813
MKAILVVLLYTFATANADTLCIGYHANNSTDTVDTVLEKNVTVTHSVNLLEDKHNGKLCKLRGVAPLHLGKCNIAGWILGNPECESLSTASSWSYIVETSSSDNGTCYPGDFIDYEELREQLSSVSSFERFEIFPKTSSWPNHDSNKGVTAACPHAGAKSFYKNLIWLVKKGNSYPKLSKSYINDKGKEVLVLWGIHHPSTSTDQQSLYQNADAYVFVGTSRYSKKFKPEIAIRPKVRDQEGRMNYYWTLVEPGDKITFEATGNLVVPRYAFAMERNAGSGIIISDTPVHDCNTTCQTPKGAINTSLPFQNIHPITIGKCPKYVKSTKLRLATGLRNVPSIQSRGLFGAIAGFIEGGWTGMVDGWYGYHHQNEQGSGYAADLKSTQNAIDEITNKVNSVIEKMNTQFTAVGKEFNHLEKRIENLNKKVDDGFLDIWTYNAELLVLLENERTLDYHDSNVKNLYEKVRSQLKNNAKEIGNGCFEFYHKCDNTCMESVKNGTYDYPKYSEEAKLNREEIDGVKLESTRIYQILAIYSTVASSLVLVVSLGAISFWMCSNGSLQCRICI

SEQ ID NO: 4640 - protein, 566 aa, synthetic construct
  REGION 1..566: note = hemagglutinin__InfluenzaA__ADF83823
MKAILVVLLYTFATANADTLCIGYHANNSTDTVDTVLEKNVTVTHSVNLLEDKHNGKLCKLRGVAPLHLGKCNIAGWILGNPECESLSTASSWSYIVETSSSDNGTCYPGDFIDYEELREQLSSVSSFERFEIFPKTSSWPNHDSNKGVTAACPHAGAKSFYKNLIWLVKKGNSYPKLSKSYINDKGKEVLVLWGIHHPSTSADQQSLYQNADSYVFVGTSRYSKKFKPEIAIRPKVRDQEGRMNYYWTLVEPGDKITFEATGNLVVPRYAFAMERNAGSGIIISDTPVHDCNTTCQTPKGAINTSLPFQNIHPITIGKCPKYVKSTKLRLATGLRNIPSIQSRGLFGAIAGFIEGGWTGMVDGWYGYHHQNEQGSGYAADLKSTQNAIDEITNKVNSVIEKMNTQFTAVGKEFNHLEKRIENLNKKVDDGFLDIWTYNAELLVLLENERTLDYHDSNVKNLYEKVRSQLKNNAKEIGNGCFEFYHKCDNTCMESVKNGTYDYPKYSEEAKLNREEIDGVKLESTRIYQILAIYSTVASSLVLVVSLGAISFWMCSNGSLQCRICI

SEQ ID NO: 4641 - protein, 566 aa, synthetic construct; identical to SEQ ID NO: 4221
  REGION 1..566: note = hemagglutinin__InfluenzaA__ADF83833

SEQ ID NO: 4642 - protein, 566 aa, synthetic construct; identical to SEQ ID NO: 4221
  REGION 1..566: note = hemagglutinin__InfluenzaA__ADF83843

SEQ ID NO: 4643 - protein, 566 aa, synthetic construct; identical to SEQ ID NO: 4221
  REGION 1..566: note = hemagglutinin__InfluenzaA__ADF83853

SEQ ID NO: 4644 - protein, 566 aa, synthetic construct
  REGION 1..566: note = hemagglutinin__InfluenzaA__ADF83873
MKAILVVLLYTFATANADTLCIGYHANNSTDTVDTVLEKNVTVTHSVNLLEDKHNGKLCKLRGVAPLHLGKCNIAGWILGNPECESLSTANSWSYIVETSSSDNGTCYPGDFIDYEELREQLSSVSSFERFEIFPKTSSWPNHDSNKGVTAACPHAGAKSFYKNLIWLVKKGNSYPKLSKSYINDKGKEVLVLWGIHHPSTSTDQQSLYQNADAYVFVGTSRYSKKFKPEIAIRPKVRDQEGRMNYYWTLVEPGDKITFEATGNLVVPRYAFAMERNAGSGIIISDTPVHDCNTTCQTPKGAINTSLPFQNIHPITIGKCPKYVKSTKLRLATGLRNVPSIQSRGLFGAIAGFIEGGWTGMVDGWYGYHHQNEQGSGYAADLKSTQNAIDKITNKVNSVIEKMNTQFTAVGKEFNHLEKRIENLNKKVDDGFLDIWTYNAELLVLLENERTLDYHDSNVKNLYEKVRSQLKNNAKEIGNGCFEFYHKCDNTCMESVKNGTYDYPKYSEEAKLNREEIDGVKLESTRIYQILAIYSTVASSLVLVVSLGAISFWMCSNGSLQCRICI

SEQ ID NO: 4645 - protein, 566 aa, synthetic construct; identical to SEQ ID NO: 3833
  REGION 1..566: note = hemagglutinin__InfluenzaA__ADF83885

SEQ ID NO: 4646 - protein, 566 aa, synthetic construct
  REGION 1..566: note = hemagglutinin__InfluenzaA__ADF83895
MKAILVVLLYTFATVNADTLCIGYHANNSTDTVDTVLEKNVTVTHSVNLLEDKHNGKLCKLRGVAPLHLGKCNIAGWILGNPECESLSTASSWSYIVETSSSDNGTCYPGDFIDYEELREQLSSVSSFERFEIFPKTSSWPNHDSNKGVTAACPHAGAKSFYKNLIWLVKKGNSYPKLSKSYINDKGKEVLVLWGIHHPSTSADQQSLYQNADAYVFVGTSRYSKKFKPEIAIRPKVRDQEGRMNYYWTLVEPGDKITFEATGNLVVPRYAFAMERNAGSGIIISDTPVHDCNTTCQTPKGAINTSLPFQNIHPITIGKCPKYVKSTKLRLATGLRNVPSIQSRGLFGAIAGFIEGGWTGMVDGWYGYHHQNEQGSGYAADLKSTQNAIDKITNKVNSVIEKMNTQFTAVGKEFNHLEKRIENLNKKVDDGFLDIWTYNAELLVLLENERTLDYHDSNVKNLYEKIRSQLKNNAKEIGNGCFEFYHKCDNTCMESVKNGTYDYPKYSEEAKLNREEIDGVKLESTRIYQILAIYSTVASSLVLVVSLGAISFWMCSNGSLQCRICI

SEQ ID NO: 4647 - protein, 566 aa, synthetic construct; identical to SEQ ID NO: 4221
  REGION 1..566: note = hemagglutinin__InfluenzaA__ADF83915

SEQ ID NO: 4648 - protein, 566 aa, synthetic construct
  REGION 1..566: note = hemagglutinin__InfluenzaA__ADF84441
MKAILVVLLYTFATANADTLCIGYHANNSTDTVDTVLEKNVTVTHSVNLLEDKHNGKLCKLRGVAPLHLGKCNIAGWILGNPECESLSTASSWSYIVETSSSDNGTCYPGDFINYEELREQLSSVSSFERFEIFPKTSSWPSHDSNKGVTAACPHAGAKSFYKNLIWLVKKGNSYPKLSKSYINDKGKEVLVLWGIHHPSTSADQQSLYQNADAYVFVGTSRYSKKFKPEIAIRPKVRDQEGRMNYYWTLVEPGDKITFEATGNLVVPRYAFAMERNAGSGIIISDTPVHDCNTTCQTPKGAINTSLPFQNIHPITIGKCPKYVKSTKLRLATGLRNVPSIQSRGLFGAIAGFIEGGWTGMVDGWYGYHHQNEQGSGYAADLKSTQNAIDKITNKVNSVIEKMNIQFTAVGKEFNHLEKRIENLNKKVDDGFLDIWTYNAELLVLLENERTLDYHDSNVKNLYEKVRSQLKNNAKEIGNGCFEFYHKCDNTCMESVKNGTYDYPKYSEEAKLNREEIDGVKLESTRIYQILAIYSTVASSLVLVVSLGAISFWMCSNGSLQCRICI

SEQ ID NO: 4649 - protein, 566 aa, synthetic construct; identical to SEQ ID NO: 3833
  REGION 1..566: note = hemagglutinin__InfluenzaA__ADF84459

SEQ ID NO: 4650 - protein, 566 aa, synthetic construct; identical to SEQ ID NO: 4221
  REGION 1..566: note = hemagglutinin__InfluenzaA__ADF84469

SEQ ID NO: 4651 - protein, 566 aa, synthetic construct; identical to SEQ ID NO: 4282
  REGION 1..566: note = hemagglutinin__InfluenzaA__ADF84479

SEQ ID NO: 4652 - protein, 566 aa, synthetic construct; identical to SEQ ID NO: 4221
  REGION 1..566: note = hemagglutinin__InfluenzaA__ADF84489

SEQ ID NO: 4653 - protein, 566 aa, synthetic construct; identical to SEQ ID NO: 4221
  REGION 1..566: note = hemagglutinin__InfluenzaA__ADF85017

SEQ ID NO: 4654 - protein, 566 aa, synthetic construct; identical to SEQ ID NO: 4221
  REGION 1..566: note = hemagglutinin__InfluenzaA__ADF87152

SEQ ID NO: 4655 - protein, 566 aa, synthetic construct
  REGION 1..566: note = hemagglutinin__InfluenzaA__ADF87162
MKAILVVLLYTFATANADTLCIGYHANNSTDTVDTVLEKNVTVTHSVNLLEDKHNGKLCKLRGVAPLHLGKCNIAGWILGNPECESLSTASSWSYIVETSSSDNGTCYPGDFIDYEELREQLSSVSSFERFEIFPKTSSWPNHDSNKGVTAACPHAGAKSFYKNLIWLVKKGNSYPKLSKSYINDKGKEVLVLWGIHHPSTSADQQSLYQNADSYVFVGTSKYSKKFKPEIAIRPKVRDQEGRMNYYWTLVEPGDKITFEATGNLVVPRYAFAMERNAGSGIIISDTPVHDCNTTCQTPEGAINTSLPFQNIHPITIGKCPKYVKSTKLRLATGLRNVPSIQSRGLFGAIAGFIEGGWTGMVDGWYGYHHQNEQGSGYAADLKSTQNAIDEITNKVNSVIEKMNTQFTAVGKEFNHLEKRIENLNKKVDDGFLDIWTYNAELLVLLENERTLDYHDSNVKNLYEKVRSQLKNNAKEIGNGCFEFYHKCDNTCMESVKNGTYDYPKYSEEAKLNREEIDGVKLESTRIYQILAIYSTVASSLVLVVSLGAISFWMCSNGSLQCRICI

SEQ ID NO: 4656 - protein, 566 aa, synthetic construct; identical to SEQ ID NO: 4221
  REGION 1..566: note = hemagglutinin__InfluenzaA__ADF87172

SEQ ID NO: 4657 - protein, 566 aa, synthetic construct
  REGION 1..566: note = hemagglutinin__InfluenzaA__ADF87182
MNAILVVLLYTFATANADTLCIGYHANNSTDTVDTLLEKNVTVTHSVNLLEDKHNGKLCKLRGVAPLHLGKCNIAGWILGNPECESLSTASSWSYIVETSSSDNGTCYPGDFIDYEELREQLSSVSSFERFEIFPKTSSWPNHDSNKGVTAACPHAGAKSFYKNLIWLVKKGNSYPKLSKSYINDKGKEVLVLWGIHHPSTSADQQSLYQNADAYVFVGTSRYSKKFKPEIAIRPKVRDQEGRMNYHWTLVEPGDKITFEATGNLVVPRYAFAMERNAGSGIIISDAPVHDCNTTCQTPKGAINTSLPFQNIHPITIGKCPKYVKSTKLRLATGLRNVPSIQSRGLFGAIAGFIEGGWTGMVDGWYGYHHQNEQGSGYAADLKSTQNAIDEITNKINSVIEKMNTQFTAVGKEFNHLEKRIENLNKKVDDGFLDIWTYNAELLVLLENERTLDYHDSNVKNLYEKVRSQLKNNAKEIGNGCFEFYHKCDNTCMESVKNGTYDYPKYSEEAKLNREEIDGVKLESTRIYQILAIYSTVASSLVLVVSLGAISFWMCSNGSLQCRICI

SEQ ID NO: 4658 - protein, 566 aa, synthetic construct; identical to SEQ ID NO: 4221
  REGION 1..566: note = hemagglutinin__InfluenzaA__ADF87192

SEQ ID NO: 4659 - protein, 566 aa, synthetic construct
  REGION 1..566: note = hemagglutinin__InfluenzaA__ADF87202
MKAILVVLLYTFATANADTLCIGYHANNSTDTVDTVLEKNVTVTHSVNLLEDKHNGKLCKLRGVAPLHLGKCNIAGWILGNPECESLSTASSWSYIVETSSSDNGTCYPGDFIDYEELREQLSSVSSFERFEIFPKTSSWPNHDSNKGVTAACPHAGAKSFYKNLIWLVKKGNSYPKLSKSYINDKGKEVLVLWGIHHPSTSADQQSLYQNADAYVFVGTSRYSKKFKPEIAIRPKVRDQEGRMNYYWTLVEPGDKITFEATGNLVVPRYAFAMERNAGSGIIISDTPVHDCNTTCQTPKGAINTSLPFQNIHPITIGKCPKYVKSTKLRLATGLRNVPSIQSRGLFGAIAGFIEGGWTGMVDGWYGYHHQNEQGSGFAADLKSTQNAIDKITNKVNSVIEKMNTQFTAVGKEFNHLEKRIENLNKKVDDGFLDIWTYNAELLVLLENERTLDYHDSNVKNLYEKVRSQLKNNAKEIGNGCFEFYHKCDNTCMESVKNGTYDYPKYSEEAKLNREEIDGVKLESTRIYQILAIYSTVASSLVLVVSLGAISFWMCSNGSLQCRICI

SEQ ID NO: 4660 - protein, 566 aa, synthetic construct; identical to SEQ ID NO: 4221
  REGION 1..566: note = hemagglutinin__InfluenzaA__ADF87212

SEQ ID NO: 4661 - protein, 566 aa, synthetic construct; identical to SEQ ID NO: 4384
  REGION 1..566: note = hemagglutinin__InfluenzaA__ADF87232

SEQ ID NO: 4662 - protein, 566 aa, synthetic construct; identical to SEQ ID NO: 4221
  REGION 1..566: note = hemagglutinin__InfluenzaA__ADF87242

SEQ ID NO: 4663 - protein, 566 aa, synthetic construct
  REGION 1..566: note = hemagglutinin__InfluenzaA__ADF87252
MKAILVVLLYTFATANADTLCIGYHANNSTDTVDTVLEKNVTVTHSVNLLEDKHNGKLCKLRGVAPLHLGKCNIAGWILGNPECESLSTASSWSYIVETSSSDNGTCYPGDFINYEELREQLSSVSSFERFEIFPKTSSWPNHDSNKGVTAACPHAGAKSFYKNLIWLVKKGKSYPKLSKSYINDKGKEVLVLWGIHHPSTSADQQSLYQNADAYVFVGTSRYSKKFKPEIAIRPKVRDQEGRMNYYWTLVEPGDKITFEATGNLVVPRYAFAMERNAGSGIIISDTPVHDCNTTCQTPKGAINTSLPFQNIHPITIGKCPKYVKSTKLRLATGLRNVPSIQSRGLFGAIAGFIEGGWTGMVDGWYGYHHQNEQGSGYAADLKSTQNAIDKITNKVNSVIEKMNTQFTAVGKEFNHLEKRIENLNKKVDDGFLDIWTYNAELLVLLENERTLDYHDSNVKNLYEKVRSQLKNNAKEIGNGCFEFYHKCDNTCMESVKNGTYDYPKYSEEAKLNREEIDGVKLESTRIYQILAIYSTVASSLVLVVSLGAISFWMCSNGSLQCRICI

SEQ ID NO: 4664 - protein, 566 aa, synthetic construct; identical to SEQ ID NO: 4221
  REGION 1..566: note = hemagglutinin__InfluenzaA__ADF87262

SEQ ID NO: 4665 - protein, 566 aa, synthetic construct; identical to SEQ ID NO: 3833
  REGION 1..566: note = hemagglutinin__InfluenzaA__ADF87272

SEQ ID NO: 4666 - protein, 566 aa, synthetic construct; identical to SEQ ID NO: 3833
  REGION 1..566: note = hemagglutinin__InfluenzaA__ADF87282

SEQ ID NO: 4667 - protein, 566 aa, synthetic construct
  REGION 1..566: note = hemagglutinin__InfluenzaA__ADF87292
MKAILVVLLYTFATANADTLCIGYHANNSTDTVDTVLKKNVTVTHSVNLLEDKHNGKLCKLRGVAPLHLGKCNIAGWILGNPECESLSTAGSWSYIVETSSSDNGTCYPGDFIDYEELREQLSSVSSFERFEIFPKTSSWPNHDSNKGVTAACPHAGAKSFYKNLIWLVKKGNSYPKLSKSYINDKGKEVLVLWGIHHPSTSADQQSLYQNADAYVFVGTSRYSKKFKPEIAIRPKVRDQEGRMNYYWTLVEPGDKITFEATGNLVVPRYAFAMERNAGSGIIISDTPVHDCNTTCQTPKGAINTSLPFQNIHPITIGKCPKYVKSTKLRLATGLRNVPSIQSRGLFGAIAGFIEGGWTGMVDGWYGYHHQNEQGSGYAADLKSTQNAIDEITNKVNSVIEKMNTQFTAVGKEFNHLEKRIENLNKKVDDGFLDIWTYNAELLVLLENERTLDYHDSNVKNLYEKVRSQLKNNAKEIGNGCFEFYHKCDNMCMESVKNGTYDYPKYSEEAKLNREEIDGVKLESTRIYQILAIYSTVASSLVLVVSLGAISFWMCSNGSLQCRICI

SEQ ID NO: 4668 - protein, 566 aa, synthetic construct; identical to SEQ ID NO: 3833
  REGION 1..566: note = hemagglutinin__InfluenzaA__ADF87302

SEQ ID NO: 4669 - protein, 566 aa, synthetic construct
  REGION 1..566: note = hemagglutinin__InfluenzaA__ADF87331
MKAILVVLLYTFATANADTLCIGYHANNSTDTVDTVLEKNVTVTHSVNLLEDKHNGKLCKLRGVAPLHLGKCNIAGWILGNPECESLSTASSWSYIVETSNSDNGTCYPGDFINYEELREQLSSVSSFERFEIFPKTSSWPNHDSNKGITAACPHAGAKSFYKNLIWLVKKGNSYPKLSKSYINDKGKEVLVLWGIHHPSTSADQQSLYQNADAYVFVGSSRYSKKFKPEIAIRPKVRDQEGRMNYYWTLVEPGDKITFEATGNLVVPRYAFAMERNAGSGIIISDTPVHDCNTTCQTPKGAINTSLPFQNIHPITIGKCPKYVKSTKLRLATGLRNVPSIQSRGLFGAIAGFIEGGWTGMVDGWYGYHHQNEQGSGYAADLKSTQNAIDKITNKVNSVIEKMNTQFTAVGKEFNHLEKRIENLNKKVDDGFLDIWTYNAELLVLLENERTLDYHDSNVKNLYEKVRSQLKNNAKEIGNGCFEFYHKCDNTCMESVKNGTYDYPKYSEEAKLNREEIDGVKLESTRIYQILAIYSTVASSLVLVVSLGAISFWMCSNGSLQCRICI

SEQ ID NO: 4670 - protein, 566 aa, synthetic construct; identical to SEQ ID NO: 2669
  REGION 1..566: note = hemagglutinin__InfluenzaA__ADF87341

SEQ ID NO: 4671 - protein, 566 aa, synthetic construct
  REGION 1..566: note = hemagglutinin__InfluenzaA__ADF87351
MKAILVVLLYTFATANADTLCIGYHANNSTDTVDTVLEKNVTVTHSVNLLEDKHNGKLCKLRGVAPLHLGKCNIAGWILGNPECDSLSTASSWSYIVETSSSDNGTCYPGDFIDYEELREQLSSVSSFERFEMFPKTSSWPNHDSNKGVTAACPHAGAKSFYKNLIWLVKKGNSYPKLSKSYINDKGKEVLVLWGIHHPSTSADQQSLYQNADAYVFVGTSRYSKKFKPEIAIRPKVRDQEGRMNYYWTLVEPGDKITFEATGNLVVPRYAFAMERNAGSGIIISDTPVHDCNTTCQTPKGAINTSLPFQNIHPITIGKCPKYVKSTKLRLATGLRNVPSIQSRGLFGAIAGFIEGGWTGMVDGWYGYHHQNEQGSGYAADLKSTQNAIDEITNKVNSVIEKMNTQFTAVGKEFNHLEKRIENLNKKVDDGFLDIWTYNAELLVLLENERTLDYHDSNVKNLYEKVRSQLKNNAKEIGNGCFEFYHKCDNTCMESVKNGTYDYPKYSEEAKLNREEIDGVKLESTRIYQILAIYSTVASSLVLVVSLGAISFWMCSNGSLQCRICI

SEQ ID NO: 4672 - protein, 566 aa, synthetic construct; identical to SEQ ID NO: 4296
  REGION 1..566: note = hemagglutinin__InfluenzaA__ADF87361

SEQ ID NO: 4673 - protein, 566 aa, synthetic construct; identical to SEQ ID NO: 3833
  REGION 1..566: note = hemagglutinin__InfluenzaA__ADF87371

SEQ ID NO: 4674 - protein, 566 aa, synthetic construct
  REGION 1..566: note = hemagglutinin__InfluenzaA__ADG08115
MKAILVVLLYTFATANADTLCIGYHANNSTDTVDTVLEKNVTVTHSVNLLEDKHNGKLCKLRGVAPLHLGKCNIAGWILGNPECESLSTASSWSYIVETSSSGNGTCYPGDFIDYEELREQLSSVSSFERFEIFPKTSSWPNHDSNKGVTAACPHAGAKSFYKNLIWLVKKGNSYPKLSKSYINDKGKEVLVLWGIHHPSTSADQQSLYQNADAYVFVGTSRYSKKFKPEIAIRPKVRGQEGRMNYYWTLVEPGDKITFEATGNLVVPRYAFAMERNAGSGIIISDTPVHDCNTTCQTPKGAINTSLPFQNIHPITIGKCPKYVKSTKLRLATGLRNVPSIQSRGLFGAIAGFIEGGWTGMVDGWYGYHHQNEQGSGYAADLKSTQNAIDEITNKVNSVIEKMNTQFTAVGKEFNHLEKRIENLNKKVDDGFLDIWTYNAELLVLLENERTLDYHDSNVKNLYEKVRSQLKNNAKEIGNGCFEFYHKCDNTCMESVKNGTYDYPKYSEEAKLNREEIDGVKLESTRIYQILAIYSTVASSLVLVVSLGAISFWMCSNGSLQCRICI

SEQ ID NO: 4675 - protein, 566 aa, synthetic construct; identical to SEQ ID NO: 3411
  REGION 1..566: note = hemagglutinin__InfluenzaA__ADG21004

SEQ ID NO: 4676 - protein, 566 aa, synthetic construct; identical to SEQ ID NO: 3411
  REGION 1..566: note = hemagglutinin__InfluenzaA__ADG21006

SEQ ID NO: 4677 - protein, 566 aa, synthetic construct
  REGION 1..566: note = hemagglutinin__InfluenzaA__ADG21008
MKTIIALSYILCLVFAQKIPGNDNSTATLCLGHHAVPNGTIVKTITNDQIEVTNATELVQSSSTGEICDSPHQILDGENCTLIDALLGDPQCDGFQNKKWDLFVERSKSYSNCYPYDVPDYASLRSLVASSGTLEFNNESFNWTGVTQNGTSSACIRKSNNSFFSRLNWLTHLKFKYPALNVTMPNNEQFDKLYIWGVHHPGTDNDQIFLYAQASGRITVSTKRSQQTVIPNIGSRPRVRNIPSRISIYWTIVKPGDILLINSTGNLIAPRGYFKIRSGKSSIMRSDAPIGKCNSECITPNGSIPNDKPFQNVNRITYGACPRYVKQNTLKLATGMRNVPEKQTRGIFGAIAGFIENGWEGMVDGWYGFRHQNSEGRGQAADLKSTQAAIDQINGKLNRLIGKTNEKFHQIEKEFSEVEGRIQDLEKYVEDTKIDLWSYNAELLVALENQHTIDLTDSEMNKLFEKTKKQLRENAEDMGNGCFKIYHKCDNACIGSIRNGTYDHDVYRDEALNNRFQIKGVELKSGYKDWILWISFAISCFLLCVALLGFIMWACQKGNIRCNICI

SEQ ID NO: 4678 - protein, 566 aa, synthetic construct
  REGION 1..566: note = hemagglutinin__InfluenzaA__ADG21009
MKTIIALSYILCLVFAQKLPGNDNSTATLCLGHHAVPNGTIVKTITNDQIEVTNATELVQSSSTGEICNSPHQILDGENCTLIDALLGDPQCDGFQNKKWDLFVERSKAYSNCYPYDVPDYASLRSLVASSGTLEFNNESFNWTGVTQNGTSSACIRRSNNSFFSRLNWLTHLRFKYPALNVTMPNNEQFDKLYIWGVHHPGTDNDQIFLYAQASGRITVSTKRSQQTVIPNIGSRPRVRNIPSRISIYWTIVKPGDILLINSTGNLIAPRGYFKIRSGKSSIMRSDAPIGKCNSECITPNGSIPNDKPFQNVNRITYGACPRYVKQNTLKLATGMRNVPEKQTRGIFGAIAGFIENGWEGMVDGWYGFRHQNSEGRGQAADLKSTQAAIDQINGKLNRLIGKTNEKFHQIEKEFSEVEGRIQDLEKYVEDTKIDLWSYNAELLVALENQHTIDLTDSEMNKLFEKTKKQLRENAEDMGNGCFKIYHKCDNACIGSIRNGTYDHDVYRDEALNNRFQIKGVELKSGYKDWILWISFAISCFLLCVALLGFIMWACQKGNIRCNICI

SEQ ID NO: 4679 - protein, 566 aa, synthetic construct; identical to SEQ ID NO: 3411
  REGION 1..566: note = hemagglutinin__InfluenzaA__ADG21010

SEQ ID NO: 4680 - protein, 566 aa, synthetic construct
  REGION 1..566: note = hemagglutinin__InfluenzaA__ADG21011
MKTIIALSYILCLVFAQKLPGNDNSTATLCLGHHAVPNGTIVKTITNDQIEVTNATELVQSSSTGEICDSPHQILDGENCTLIDALLGDPQCDGFQNKKWDLFVERSKAYSNCYPYDVPDYASLRSLVASSGTLEFNNESFNWTGVTQNGTSSACIRRSNNSFFSRLNWLTHLNFKYPALNVTMPNNEQFDKLYIWGVHHPGTDKDQIFLYAQASGRITVSTKRSQQAVIPNIGSRPRVRDIPSRISIYWTIVKPGDILLINSTGNLIAPRGYFKIRSGKSSIMRSDAPIGKCNSECITPNGSIPNDKPFQNVNRITYGACPRYVKQNTLKLATGMRNVPEKQTRGIFGAIAGFIENGWEGMVDGWYGFRHQNSEGRGQAADLKSTQAAIDQINGKLNRLIGKTNEKFHQIEKEFSEVEGRIQDLEKYVEDTKIDLWSYNAELLVALENQHTIDLTDSEMNKLFEKTKKQLRENAEDMGNGCFKIYHKCDNACIGSIRNGTYDHDVYRDEALNNRFQIKGVELKSGYKDWILWISFAISCFLLCVALLGFIMWACQKGNIRCNICI

SEQ ID NO: 4681 - protein, 566 aa, synthetic construct; identical to SEQ ID NO: 3411
  REGION 1..566: note = hemagglutinin__InfluenzaA__ADG21012

SEQ ID NO: 4682 - protein, 566 aa, synthetic construct; identical to SEQ ID NO: 3411
  REGION 1..566: note = hemagglutinin__InfluenzaA__ADG21013

SEQ ID NO: 4683 - protein, 566 aa, synthetic construct
  REGION 1..566: note = hemagglutinin__InfluenzaA__ADG21014
MKTIIALSYILCLVFAQKIPGNDNSTATLCLGHHAVPNGTIVKTITNDQIEVTNATELVQSSSTGEICDSPHQILDGENCTLIDALLGDPQCDGFQNKKWDLFVERSKAYSNCYPYDVPDYASLRSLVASSGTLEFNNESFNWTGVTQNGTSSACIRRSNNSFFSRLNWLTHLNFKYPALNVTMPNNEQFDKLYIWGVHHPGTDKDQIFLYAQASGRITVSTKRSQQAVIPNIGSRPRVRNIPSRISIYWTIVKPGDILLINSTGNLIAPRGYFKIRSGKSSIMRSDAPIGKCNSECITPNGSIPNDKPFQNVNRITYGACPRYVKQNTLKLATGMRNVPEKQTRGIFGAIAGFIENGWEGMVDGWYGFRHQNSEGRGQAADLKSTQAAIDQINGKLNRLIGKTNEKFHQIEKEFSEVEGRIQDLEKYVEDTKIDLWSYNAELLVALENQHTIDLTDSEMNKLFEKTKKQLRENAEDMGNGCFKIYHKCDNACIGSIRNGTYDHDVYRDEALNNRFQIKGVELKSGYKDWILWISFAISCFLLCVALLGFIMWACQKGNIRCNICI

SEQ ID NO: 4684 - protein, 566 aa, synthetic construct
  REGION 1..566: note = hemagglutinin__InfluenzaA__ADG21017
MKTIIALSYILYLVFAQKLPGNDNSTATLCLGHHAVPNGTIVKTITNDQIEVTNATELVQSSSTGEICDSPHQILDGENCTLIDALLGDPQCDGFQNKKWDLFIERSKAYSNCYPYDVPDYASLRSLVASSGTLEFNNESFNWTGVTQNGTSSACIRRSNNSFFSRLNWLTHLNFKYPALNVTMPNNEQFDKLYIWGVHHPGTDKDQIFLYAQASGRITVSTKRSQQAVIPNIGSRPRVRNIPSRISIYWTIVKPGDILLINSTGNLIAPRGYFKIRSGKSSIMRSDAPIGKCNSECITPNGSIPNDKPFQNVNRITYGACPRYVKQNTLKLATGMRNVPEKQTRGIFGAIAGFIENGWEGMVDGWYGFRHQNSEGRGQAADLKSTQAAIDQINGKLNRLIGKTNEKFHQIEKEFSEVEGRIQDLEKYVEDTKIDLWSYNAELLVALENQHTIDLTDSEMNKLFEKTKKQLRENAEDMGNGCFKIYHKCDNACIGSIRNGTYDHDVYRDEALNNRFQIKGVELKSGYKDWILWISFAISCFLLCVALLGFIMWACQKGNIRCNICI

SEQ ID NO: 4685 - protein, 566 aa, synthetic construct
  REGION 1..566: note = hemagglutinin__InfluenzaA__ADG21018
MKTIIALSYILCLVFAQKLPGNDNSTATLCLGHHAVPNGTIVKTITNDQIEVTNATELVQSSSTGEICDSPHQILDGENCTLIDALLGDPQCDGFQNKKWDLFVERSKAYSNCYPYDVPDYASLRSLVASSGTLEFNNESFNWTGVTQNGTSSACIRRSNNSFFSRLNWLTHSNFKYPALNVTMPNNEQFDKLYIWGVHHPGTDKDQIFLYAQASGRITVSTKRSQQAVIPNIGSRHRVRNIPSRISIYWTIVKPGDILLINSTGNLIAPRGYFKIRSGKSSIMRSDAPIGKCNSECITPNGSIPNDKPFQNVNRITYGACPRYVKQNTLKLATGMRNVPEKQTRGIFGAIAGFIENGWEGMVDGWYGFRHQNSEGRGQAADLKSTQAAIDQINGKLNRLIGKTNEKFHQIEKEFSEVEGRIQDLEKYVEDTKIDLWSYNAELLVALENQHTIDLTDSEMNKLFEKTKKQLRENAEDMGNGCFKIYHKCDNACIGSIRNGTYDHDVYRDEALNNRFQIKGVELKSGYKDWILWISFAISCFLLCVALLGFIMWACQKGNIRCNICI

SEQ ID NO: 4686 - protein, 566 aa, synthetic construct
  REGION 1..566: note = hemagglutinin__InfluenzaA__ADG21019
MKTIIALSYILCLVFAQKLPGNDNSTATLCLGHHAVPNGTIVKTITNDQIEVTNATELVQSSSTGEICDSPHQILDGKNCTLIDTLLGDPQCDGFQNKKWDLFVERSKAYSNCYPYDVPDYASLRSLVASSGTLEFNNESFNWTGVTQNGTSSACIRRSKNSFFSRLNWLTHLNFKYPALNVTMPNNEQFDKLYIWGVHHPGTDKDQIFLYAQASGKIIVSTKRSQQTVIPNIGSRPRVRNIPSIISIYWTIVKPGDILLINSTGNLIAPRGYFKIRSGKSSIMRSDAPIGKCNSECITPNGSIPNDKPFQNVNRITYGACPRYVKQNTLKLATGMRNVPEKQTRGIFGAIAGFIENGWEGMVDGWYGFRHQNSEGRGQAADLKSTQAAIDQINGKLNRLIGKTNEKFHQIEKEFSEVEGRIQDLEKYVEDTKIDLWSYNAELLVALENQHTIDLTDSEMNKLFEKTKKQLRENAEDIGNGCFKIYHKCDNACIGSIRNGTYDHDVYRDEALNNRFQIKGVELKSGYKDWILWISFAISCFLLCVALLGFIMWACQKGNIRCNICI

SEQ ID NO: 4687 - protein, 566 aa, synthetic construct
  REGION 1..566: note = hemagglutinin__InfluenzaA__ADG21020
MKTIIALSYILCLVFAQKLPGNDNSTATLCLGHHAVPNGTIVKTITNDQIEVTNATELVQSSSTGEICDSPHQILDGKNCTLIDALLGDPQCDGFQNKKWDLFVERSKAYSNCYPYDVPDYASLRSLVASSGTLEFNNESFNWTGVTQSGTSSACIRRSKNSFFSRLNWLTHLNFKYPALNVTMPNNEQFDKLYIWGVHHPGTDKDQIFLYAQASGRIIVSTKRSQQTVTPNIGSRPRVRNIPSRISIYWTIVKPGDILLINSTGNLIAPRGYFKIRSGKSSIMRSDAPIGKCNSECITPNGSIPNDKPFQNVNRITYGACPRYVKQNTLKLATGMRNVPEKQTRGIFGAIAGFIENGWEGMVDGWYGFRHQNSEGRGQAADLKSTQAAIDQINGKLNRLIGKTNEKFHQIEKEFSEVEGRIQDLEKYVEDTKIDLWSYNAELLVALENQHTIDLTDSEMNKLFEKTKKQLRENAEDMGNGCFKIYHKCDNACIGSIRNGTYDHDVYRDEALNNRFQIKGVELKSGYKDWILWISFAISCFLLCVALLGFIMWACQKGNIRCNICI

SEQ ID NO: 4688 - protein, 566 aa, synthetic construct; identical to SEQ ID NO: 2434
  REGION 1..566: note = hemagglutinin__InfluenzaA__ADG21022

SEQ ID NO: 4689 - protein, 566 aa, synthetic construct; identical to SEQ ID NO: 2434
  REGION 1..566: note = hemagglutinin__InfluenzaA__ADG21023

SEQ ID NO: 4690 - protein, 566 aa, synthetic construct
  REGION 1..566: note = hemagglutinin__InfluenzaA__ADG21024
MKTIIALSYILCLVFTQKLPGNDNSTATLCLGHHAVPNGTIVKTITNDQIEVTNATELVQSSSTGEICDSPHQILDGENCTLIDALLGDPQCDGFQNKKWDLFVERSKAYSNCYPYDVPDYASLRSLVASSGALEFNNESFNWTGVTQNGTSSACIRRSNNSFFSRLNWLTHLNFKYPALNVTMPNNEQFDKLYIWGVHHPGTDKDQIFLYAQASGRITVSTKRSQQAVIPNIGSRPRVRNIPSRISIYWTIVKPGDILLINSTGNLIAPRGYFKIQSGKSSIMRSDAPIGKCNSECITPNGSIPNDKPFQNVNRITYGACPRYVKQSTLKLATGMRNVPEKQTRGIFGAIAGFIENGWEGMVDGWYGFRHQNSEGRGQAADLKSTQAAIDQINGKLNRLIGKTNEKFHQIEKEFSEVEGRIQDLEKYVEDTKIDLWSYNAELLVALENQHTIDLTDSEMNKLFEKTKKQLRENAEDMGNGCFKIYHKCDNACIGSIRNGTYDHDVYRDEALNNRFQIKGVELKSGYKDWILWISFAISCFLLCVALLGFIMWACQKGNIRCNICI

SEQ ID NO: 4691 - protein, 566 aa, synthetic construct
  REGION 1..566: note = hemagglutinin__InfluenzaA__ADG21026
MKTIIALSYILCLVFAQKLPGNDNSTATLCLGHHAVPNGTIVKTITNDQIEVTNATELVQSSSTGEICDSPHQILDGENCTLIDALLGDPQCDGFQNKKWDLFVERSKAYSNCYPYDVPDYASLRSLVASSGTLEFNNESFNWTGVTQNGTSSACIRRSNNSFFSRLNWLTHLNFKYPALNVTMPNNEQFDKLYIWGVHHPGTDKDQIFLYAQASGRITVSTKRSQQAVIPNIGSRLRVRNIPSRISIYWTIVKPGDILLINSTGNLIAPRGYFKIRSGKSSIMRSDAPIGKCNSECITPNGSIPNDKPFQNVNRITYGACPRYVKQSTLKLATGMRNVPEKQTRGIFGAIAGFIENGWEGMVDGWYGFRHQNSEGRGQAADLKSTQAAIDQINGKLNRLIGKTNEKFHQIEKEFSEVEGRIQDLEKYVEDTKIDLWSYNAELLVALENQHTIDLTDSEMNKLFEKTKKQLRENAEDMGNGCFTIYHKCDNACIGSIRNGTYDHNVYRDEALNNRFQIKGVELKSGYKDWILWISFAISCFLLCVALLGFIMWACQKGNIRCNICI

SEQ ID NO: 4692 - protein, 566 aa, synthetic construct; identical to SEQ ID NO: 2669
  REGION 1..566: note = hemagglutinin__InfluenzaA__ADG21037

SEQ ID NO: 4693 - protein, 566 aa, synthetic construct
  REGION 1..566: note = hemagglutinin__InfluenzaA__ADG21038
MKAILVVLLYTFATADADTLCIGYHANNSTDTVDTVLEKNVTVTHSVNLLEDKHNGKLCKLRGVAPLHLGKCNIAGWILGNPECESLSTASSWSYIVETSSSDNGTCYPGDFIDYEELREQLSSVSSFERFEIFPKTSSWPNHDSNKGVTAACPHAGAKSFYKNLIWLVKKGNSYPKLSKSYINDKGKEVLVLWGIHHPSTSADQQSLYQNADAYVFVGTSRYSKKFKPEIAIRPKVRDQEGRMNYYWTLVEPGDKITFEATGNLVVPRYAFAMERNAGSGIIISDTPVHDCNTTCQTPKGAINTSLPFQNIHPITIGKCPKYVKSTKLRLATGLRNVPSIQSRGLFGAIAGFIEGGWTGMVDGWYGYHHQNEQGSGYAADLKSTQNAIDEITNKVNSVIEKMNTQFTAVGKEFNHLEKRIENLNKKVDDGFLDIWTYNAELLVLLENERTLDYHDSNVKNLYEKVRSQLKNNAKEIGNGCFEFYHKCDNTCMESVKNGTYDYPKYSEEAKLNREEIDGVKLESTRIYQILAIYSTVASSLVLVVSLGAISFWMCSNGSLQCRICI

SEQ ID NO: 4694 - protein, 566 aa, synthetic construct
  REGION 1..566: note = hemagglutinin__InfluenzaA__ADG21040
MKAILVVLLYTFATANADTLCIGYHANNSTDTVDTVLEKNVTVTHSVNLLEDKHNGKLCKLRGVAPLHLGKCNIAGWILGNPECESLSTASSWSYIVETSSSDNGTCYPGDFIDYEELREQLSSVSSFERFEIFPKTSSWPNHDSNKGVTAACPHAGAKSFYKNLIWLVKKGNSYPKLSKSYINDKGKEVLVLWGIHHPSTSADQQSLYQNADAYVFVGTSRYSKKFKPEIAIRPKVRDQEGRMNYYWTLVEPGDKITFEATGNLVVPRYAFAMERNAGSGIIISDTPVHDCNTTCQTPKGAINTSLPFQNVHPITIGKCPKYVKSTKLRLATGLRNVPSIQSRGLFGAIAGFIEGGWTGMVDGWYGYHHQNEQGSGYAADLKSTQNAIDEITNKVNSVIEKMNTQFTAVGKEFNHLEKRIENLNKKVDDGFLDIWTYNAELLVLLENERTLDYHDSNVKNLYEKVRSQLKNNAKEIGNGCFEFYHKCDNTCMESVKNGTYDYPKYSEEAKLNREEIDGVKLESTRVYQILAIYSTVASSLVLVVSLGAISFWMCSNGSLQCRICI

SEQ ID NO: 4695 - protein, 566 aa, synthetic construct
  REGION 1..566: note = hemagglutinin__InfluenzaA__ADG21041
MKAILVVLLYTFTTANADTLCIGYHANNSTDTVDTVLEKNVTVTHSVNLLEDKHNGKLCKLRGVAPLHLGKCNIAGWILGNPECESLSTASSWSYIVETSSSDNGTCYPGDFIDYEELREQLSSVSSFERFEIFPKTSSWPNHDSNKGVTAACPHAGAKSFYKNLIWLVKKGNSYPKLSKSYINDKGKEVLVLWGIHHPSTSADQQSLYQNADAYVFVGTSRYSKKFKPEIAIRPKVREQEGRMNYYWTLVEPGDKITFEATGNLVVPRYAFAMERNAGSGIIISDTPVHDCNTTCQTPKGAINTSLPFQNIHSITIGKCPKYVKSTKLRLATGLRNVPSIQSRGLFGAIAGFIEGGWTGMVDGWYGYHHQNEQGSGYAADLKSTQNAIDEITNKVNSVIEKMNTQFTAVGKEFNHLEKRIENLNKKVDDGFLDIWTYNAELLVLLENERTLDYHDSNVKNLYEKVRSQLKNNAKEIGNGCFEFYHKCDNTCMESVKNGTYDYPKYSEEAKLNREEIDGVKLESTRIYQILAIYSTVASSLVLVVSLGAVSFWMCSNGSLQCRICI

SEQ ID NO: 4696 - protein, 566 aa, synthetic construct; identical to SEQ ID NO: 3770
  REGION 1..566: note = hemagglutinin__InfluenzaA__ADG21042

SEQ ID NO: 4697 - protein, 566 aa, synthetic construct
  REGION 1..566: note = hemagglutinin__InfluenzaA__ADG21043
MKAILVVLLYTFTTANADTLCVGYHANNSTDTVDTVLEKNVTVTHSVNLLEDKHNGKLCKLRGVAPLHLGKCNIAGWILGNPECESLSTASSWSYIVETSSSDNGTCYPGDFIDYEELREQLSSVSSFERFEIFPKTSSWPNHDSNKGVTAACPHAGAKSFYKNLIWLVKKGNSYPKLSKSYINDKGKEVLVLWGIHHPSTSADQQSLYQNADAYVFVGTSRYSKKFKPEIAIRPKVREQEGRMNYYWTLVEPGDKITFEATGNLVVPRYAFAMERNAGSGIIISDTPVHDCNTTCQTPKGAINTSLPFQNIHSITIGKCPKYVKSTKLRLATGLRNVPSIQSRGLFGAIAGFIEGGWTGMVDGWYGYHHQNEQGSGYAADLKSTQNAIDEITNKVNSVIEKMNTQFTAVGKEFNHLEKRIENLNKKVDDGFLDIWTYNAELLVLLENERTLDYHDSNVKNLYEKVRSQLKNNAKEIGNGCFEFYHKCDNTCMESVKNGTYDYPKYSEEAKLNREEIDGVKLESTRIYQILAIYSTVASSLVLVVSLGAISFWMCSNGSLQCRICI

SEQ ID NO: 4698 - protein, 566 aa, synthetic construct
  REGION 1..566: note = hemagglutinin__InfluenzaA__ADG21045
MKAILVVLLYTFTTANADTLCIGYHANNSTDTVDTVLEKNVTVTHSVNLLEDKHNGKLCKLRGVAPLHLGKCNIAGWILGNPECESLSTASSWSYIVETSSSDNGTCYPGDFIDYEELREQLSSVSSFERFEIFPKTSSWPNHDSNKGVTAACPHAGAKSFYKNLIWLVKKGNSYPKLSKSYINDKGKEVLVLWGIHHPSTSADQQSLYQNADAYVFVGTSRYSKKFKPEIAIRPKVREQEGRMNYYWTLVEPGDKITFEATGNLVVPRYAFAMERNAGSGIIISDTPVHDCNTTCQTPKGAINTSLPFQNIHSITIGKCPKYVKSTKLRLATGLRNVPSIQSRGLFGAIAGFIEGGWTGMVDGWYGYHHQNEQGSGYAADLKSTQNAIDEITNKVNSVIEKMNTQFTAVGKEFNHLEKRIENLNKKVDDGFLDIWTYNAELLVLLENERTLDYHDSNVKNLYEKVRSQLKNNAKEIGNGCFEFYHKCDNTCMESVKNGTYDYPKYSEEAKLNREEIDGVKLESTRIYQILAIYSTVASSLVLVVSLGAISFWMCSNGSLQCRICI

SEQ ID NO: 4699 - protein, 566 aa, synthetic construct; identical to SEQ ID NO: 4698
  REGION 1..566: note = hemagglutinin__InfluenzaA__ADG21046

SEQ ID NO: 4700 - protein, 566 aa, synthetic construct; identical to SEQ ID NO: 3833
  REGION 1..566: note = hemagglutinin__InfluenzaA__ADG21048

SEQ ID NO: 4701 - protein, 566 aa, synthetic construct
  REGION 1..566: note = hemagglutinin__InfluenzaA__ADG21049
MKAILVVLLYTFATANADTLCIGYHANNSTDTVDTVLEKNVTVTHSVNLLEDKHNGKLCKLRGVAPLHLGKCNIAGWILGNPECESLSTASSWSYIVETSSSDNGTCYPGDFIDYEELREQLSSVSSFERFEIFPKTSSWPNHDSNKGVTAACPHAGAKSFYKNLIWLVKKGNSYPKLSKSYINDKGKEVLVLWGIHHPSTSADQQSLYQNADAYVFVGTSRYSKKFKPEIAIRPKVRNQEGRMNYYWTLVEPGDKITFEATGNLVVPRYAFAMERNAGSGIIISDTPVHDCNTTCQTSKGAINTSLPFQNIHPITIGKCPKYVKSTKLRLATGLRNIPSIQSRGLFGAIAGFIEGGWTGMVDGWYGYHHQNEQGSGYAADLKSTQNAIDEITNKVNSVIEKMNTQFTAVGKEFNHLEKRIENLNKKVDDGFLDIWTYNAELLVLLENERTLDYHDSNVKNLYEKVRSQLKNNAKEIGNGCFEFYHKCDNTCMESVKNGTYDYPKYSEEAKLNREEIDGVKLESTRIYQILAIYSTVASSLVLVVSLGAISFWMCSNGSLQCRICI

SEQ ID NO: 4702 - protein, 566 aa, synthetic construct; identical to SEQ ID NO: 3022
  REGION 1..566: note = hemagglutinin__InfluenzaA__ADG21122

SEQ ID NO: 4703 - protein, 566 aa, synthetic construct; identical to SEQ ID NO: 3833
  REGION 1..566: note = hemagglutinin__InfluenzaA__ADG21123

SEQ ID NO: 4704 - protein, 566 aa, synthetic construct; identical to SEQ ID NO: 2669
  REGION 1..566: note = hemagglutinin__InfluenzaA__ADG21124

SEQ ID NO: 4705 - protein, 566 aa, synthetic construct
  REGION 1..566: note = hemagglutinin__InfluenzaA__ADG21125
MKAILVVLLYTFATANADTLCIGYHANNSTDTVDTVLEKNVTVTHSVNLLEDKHNGKLCKLRGVAPLHLGKCNIAGWILGNPECESLSTASSWSYIVETSSSDNGTCYPGDFIDYEELREQLSSVSSFKRFEIFPKTSSWPNHDSNKGVTAACPHAGAKSFYKNLIWLVKKGNSYPKLSKSYINDKGKEVLVLWGIHHPSTSADQQSLYQNADAYVFVGTSRYSKKFKPEIAIRPKVRDQEGRMNYYWTLVEPGDKITFEATGNLVVPRYAFAMERNAGSGIIISDTPVHDCNTTCQTPKGAINTSLPFQNIHPITIGKCPKYVKSTKLRLATGLRNVPSIQSRGLFGAIAGFIEGGWTGMVDGWYGYHHQNEQGSGYAADLKSTQNAIDEITNKVNSVIEKMNTQFTAVGKEFNHLEKRIENLNKKVDDGFLDIWTYNAELLVLLENERTLDYHDSNVKNLYEKVRSQLKNNAKEIGNGCFEFYHKCDNTCMESVKNGTYDYPKYSEEAKLNREEIDGVKLESTRIYQILAIYSTVASSLVLVVSLGAISFWMCSNGSLQCRICI

SEQ ID NO: 4706 - protein, 566 aa, synthetic construct; identical to SEQ ID NO: 2656
  REGION 1..566: note = hemagglutinin__InfluenzaA__ADG21126

SEQ ID NO: 4707 - protein, 566 aa, synthetic construct; identical to SEQ ID NO: 2656
  REGION 1..566: note = hemagglutinin__InfluenzaA__ADG21127

SEQ ID NO: 4708 - protein, 566 aa, synthetic construct; identical to SEQ ID NO: 2656
  REGION 1..566: note = hemagglutinin__InfluenzaA__ADG21128

SEQ ID NO: 4709 - protein, 566 aa, synthetic construct; identical to SEQ ID NO: 2656
  REGION 1..566: note = hemagglutinin__InfluenzaA__ADG21129

SEQ ID NO: 4710 - protein, 566 aa, synthetic construct; identical to SEQ ID NO: 2669
  REGION 1..566: note = hemagglutinin__InfluenzaA__ADG21130

SEQ ID NO: 4711 - protein, 566 aa, synthetic construct; identical to SEQ ID NO: 2656
  REGION 1..566: note = hemagglutinin__InfluenzaA__ADG21131

SEQ ID NO: 4712 - protein, 566 aa, synthetic construct; identical to SEQ ID NO: 2656
  REGION 1..566: note = hemagglutinin__InfluenzaA__ADG21132

SEQ ID NO: 4713 - protein, 566 aa, synthetic construct; identical to SEQ ID NO: 2656
  REGION 1..566: note = hemagglutinin__InfluenzaA__ADG21133

SEQ ID NO: 4714 - protein, 566 aa, synthetic construct; identical to SEQ ID NO: 2656
  REGION 1..566: note = hemagglutinin__InfluenzaA__ADG21134

SEQ ID NO: 4715 - protein, 566 aa, synthetic construct; identical to SEQ ID NO: 2656
  REGION 1..566: note = hemagglutinin__InfluenzaA__ADG21135

SEQ ID NO: 4716 - protein, 566 aa, synthetic construct; identical to SEQ ID NO: 2656
  REGION 1..566: note = hemagglutinin__InfluenzaA__ADG21136

SEQ ID NO: 4717 - protein, 566 aa, synthetic construct; identical to SEQ ID NO: 2656
  REGION 1..566: note = hemagglutinin__InfluenzaA__ADG21137

SEQ ID NO: 4718 - protein, 566 aa, synthetic construct; identical to SEQ ID NO: 2656
  REGION 1..566: note = hemagglutinin__InfluenzaA__ADG21138

SEQ ID NO: 4719 - protein, 566 aa, synthetic construct; identical to SEQ ID NO: 2656
  REGION 1..566: note = hemagglutinin__InfluenzaA__ADG21139

SEQ ID NO: 4720 - protein, 566 aa, synthetic construct
  REGION 1..566: note = hemagglutinin__InfluenzaA__ADG21140
MKAILVVLLYTFATANADTLCIGYHANNSTDTVDTVLEKNVTVTHSVNLLEDKHNGKLCKLRGVAPLHLGKCNIAGWILGNPECESLSTASSWSYIVETSSSDNGTCYPGDFIDYEELREQLSSVSSFERFEIFPKTSSWPNHDSNKGVTAACPHAGAKSFYKNLIWLVKKGNSYPKLSKSYINDKGKEVLMLWGIHHPSTSADQQSLYQNADAYVFVGSSRYSKKFKPEIAIRPKVRDQEGRMNYYWTLVEPGDKITFEATGNLVVPRYAFAMERNAGSGIIISDTPVHDCNTTCQTPKGAINTSLPFQNIHPITIGKCPKYVKSTKLRLATGLRNVPSIQSRGLFGAIAGFIEGGWTGMVDGWYGYHHQNEQGSGYAADLKSTQNAIDEITNKVNSVIEKMNTQFTAVGKEFNHLEKRIENLNKKVDDGFLDIWTYNAELLVLLENERTLDYHDSNVKNLYEKVRSQLKNNAKEIGNGCFEFYHKCDNTCMESVKNGTYDYPKYSEEAKLNREEIDGVKLESTRIYQILAIYSTVASSLVLVVSLGAISFWMCSNGSLQCRICI

SEQ ID NO: 4721 - protein, 566 aa, synthetic construct; identical to SEQ ID NO: 2656
  REGION 1..566: note = hemagglutinin__InfluenzaA__ADG21141

SEQ ID NO: 4722 - protein, 566 aa, synthetic construct
  REGION 1..566: note = hemagglutinin__InfluenzaA__ADG21142
MKAILVVLLYTFATANADTLCIGYHANNSTDTVDTVLEKNVTVTHSVNLLEDKHNGKLCKLRGVAPLHLGKCNIAGWILGNPECESLSTASSWSYIVETSSSDNGTCYPGDFIDYEELREQLSSVSSFERFEIFPKTSSWPNHDSNKGVTAACPHAGEKSFYKNLIWLVKKGNSYPKLSKSYINDKGKEVLVLWGIHHPSTSADQQSLYQNADAYVFVGSSRYSKKFKPEIAIRPKVRDQEGRMNYYWTLVEPGDKITFEATGNLVVPRYAFAMERNAGSGIIISDTPVHDCNTTCQTPKGAINTSLPFQNIHPITIGKCPKYVKSTKLRLATGLRNVPSIQSRGLFGAIAGFIEGGWTGMVDGWYGYHHQNEQGSGYAADLKSTQNAIDEITNKVNSVIEKMNTQFTAVGKEFNHLEKRIENLNKKVDDGFLDIWTYNAELLVLLENERTLDYHDSNVKNLYEKVRSQLKNNAKEIGNGCFEFYHKCDNTCMESVKNGTYDYPKYSEEAKLNREEIDGVKLESTRIYQILAIYSTVASSLVLVVSLGAISFWMCSNGSLQCRICI

SEQ ID NO: 4723 - protein, 566 aa, synthetic construct; identical to SEQ ID NO: 2656
  REGION 1..566: note = hemagglutinin__InfluenzaA__ADG21143

SEQ ID NO: 4724 - protein, 566 aa, synthetic construct; identical to SEQ ID NO: 2656
  REGION 1..566: note = hemagglutinin__InfluenzaA__ADG21144

SEQ ID NO: 4725 - protein, 566 aa, synthetic construct
  REGION 1..566: note = hemagglutinin__InfluenzaA__ADG21145
MKAILVVLLYTFATANADTLCIGYHANNSTDTVDTVLEKNVTVTHSVNLLEDKHNGKLCKLRGVAPLHLGKCNIAGWILGNPECESLSTASSWSYIVETSSSDNGTCYPGDFIDYEELREQLSSVSSFERFEIFPKTSSWPNHDSNKGVTAACPHAGAKSFYKNLIWLVKKGNSYPKLSISYINDKGKEVLVLWGIHHPSTSADQQSLYQNADAYVFVGSSRYSKKFKPEIAIRPKVRDQEGRMNYYWTLVEPGDKITFEATGNLVVPRYAFAMERNAGSGIIISDTPVHDCNTTCQTPKGAINTSLPFQNIHPITIGKCPKYVKSTKLRLATGLRNVPSIQSRGLFGAIAGFIEGGWTGMVDGWYGYHHQNEQGSGYAADLKSTQNAIDEITNKVNSVIEKMNTQFTAVGKEFNHLEKRIENLNKKVDDGFLDIWTYNAELLVLLENERTLDYHDSNVKNLYEKVRSQLKNNAKEIGNGCFEFYHKCDNTCMESVKNGTYDYPKYSEEAKLNREEIDGVKLESTRIYQILAIYSTVASSLVLVVSLGAISFWMCSNGSLQCRICI

SEQ ID NO: 4726 - protein, 566 aa, synthetic construct; identical to SEQ ID NO: 2656
  REGION 1..566: note = hemagglutinin__InfluenzaA__ADG21146

SEQ ID NO: 4727 - protein, 566 aa, synthetic construct; identical to SEQ ID NO: 2656
  REGION 1..566: note = hemagglutinin__InfluenzaA__ADG21147

SEQ ID NO: 4728 - protein, 566 aa, synthetic construct; identical to SEQ ID NO: 2669
  REGION 1..566: note = hemagglutinin__InfluenzaA__ADG21148

SEQ ID NO: 4729 - protein, 566 aa, synthetic construct; identical to SEQ ID NO: 3770
  REGION 1..566: note = hemagglutinin__InfluenzaA__ADG21149

SEQ ID NO: 4730 - protein, 566 aa, synthetic construct; identical to SEQ ID NO: 3833
  REGION 1..566: note = hemagglutinin__InfluenzaA__ADG21150

SEQ ID NO: 4731 - protein, 566 aa, synthetic construct; identical to SEQ ID NO: 2656
  REGION 1..566: note = hemagglutinin__InfluenzaA__ADG21151

SEQ ID NO: 4732 - protein, 566 aa, synthetic construct; identical to SEQ ID NO: 2656
  REGION 1..566: note = hemagglutinin__InfluenzaA__ADG21152

SEQ ID NO: 4733 - protein, 566 aa, synthetic construct; identical to SEQ ID NO: 2669
  REGION 1..566: note = hemagglutinin__InfluenzaA__ADG21153

SEQ ID NO: 4734 - protein, 566 aa, synthetic construct; identical to SEQ ID NO: 2656
  REGION 1..566: note = hemagglutinin__InfluenzaA__ADG21154

SEQ ID NO: 4735 - protein, 566 aa, synthetic construct; identical to SEQ ID NO: 2656
  REGION 1..566: note = hemagglutinin__InfluenzaA__ADG21155

SEQ ID NO: 4736 - protein, 566 aa, synthetic construct; identical to SEQ ID NO: 3833
  REGION 1..566: note = hemagglutinin__InfluenzaA__ADG21156

SEQ ID NO: 4737 - protein, 566 aa, synthetic construct; identical to SEQ ID NO: 3841
  REGION 1..566: note = hemagglutinin__InfluenzaA__ADG21158

SEQ ID NO: 4738 - protein, 566 aa, synthetic construct
  REGION 1..566: note = hemagglutinin__InfluenzaA__ADG21159
MKAILVVLLYTFATANADTLCIGYHANNSTDTVDTVLEKNVTVTHSVNLLEDKHNGKLCKLRGVAPLHLGKCNIAGWILGNPECESLSTASSWSYIVETSSSDNGTCYPGDFIDYEELREQLSSVSSFERFEIFPKTSSWPNHDSNKGVTAACPHAGAKSFYKNLIWLVKKGNSYPKLSKSYINDKGKEVLVLWGIHHPSTSADQQSLYQNADAYVFVGTSRYSKKFKPEIAIRPKVRDQEGRMNYYWTLVEPGDKITFEATGNLVVPRYAFAMERNAGSGIIISDTPVHDCNTTCQTPKGAINTSLPFQNIHPITIGKCPKYVKSTKLRLATGLRNVPSIQSRGLFGAIAGFIEGGWTGMVDGWYGYHHQNEQGSGYAADLKSTQNAIDEITNKVNSVIEKMNTQFTAVGKEFNHLEKRIENLNKKVDDGFLDIWTYNAELLVLLENERTLDYHDSNVKNLYEKVRSQLKNNAKEIGNGCFEFYHKCDNTCMESVKNGTYDYPKYSEEAKLNREEIDGVKLESTRIYQILAIYSTVASSLVLLVSLGAISFWMCSNGSLQCRICI

SEQ ID NO: 4739 - protein, 566 aa, synthetic construct; identical to SEQ ID NO: 3841
  REGION 1..566: note = hemagglutinin__InfluenzaA__ADG21160

SEQ ID NO: 4740 - protein, 566 aa, synthetic construct
  REGION 1..566: note = hemagglutinin__InfluenzaA__ADG21161
MKAILVVLLYTFATANADTLCIGYHANNSTDTVDTVLEKNVTVTHSVNLLEDKHNGKLCKLRGVAPLHLGKCNIAGWILGNPECESLSTASSWSYIVETSSSDNGTCYPGDFIDYEELREQLSSVSSFERFEIFPKTSSWPNHDSNKGVTAACPHAGAKSFYKNLIWLVKKENSYPKLSKSYINDKGKEVLVLWGIHHPSTSADQQSLYQNADAYVFVGTSRYSKKFKPEIAIRPKVRDQEGRMNYYWTLVEPGDKITFEATGNLVVPRYAFAMERNAGSGIIISDTPVHDCNTTCQTPKGAINTSLPFQNIHPITIGKCPKYVKSTKLRLATGLRNVPSIQSRGLFGAIAGFIEGGWTGMVDGWYGYHHQNEQGSGYAADLKSTQNAIDEITNKVNSVIEKMNTQFTAVGKEFNHLEKRIENLNKKVDDGFLDIWTYNAELLVLLENERTLDYHNSNVKNLYEKVRSQLKNNAKEIGNGCFEFYHKCDNTCMESVKNGTYDYPKYSEEAKLNREEIDGVKLESTRIYQILAIYSTVASSLVLVVSLGAISFWMCSNGSLQCRICI

SEQ ID NO: 4741 - protein, 566 aa, synthetic construct
  REGION 1..566: note = hemagglutinin__InfluenzaA__ADG21163
MKAILVVLLYTFATANADTLCIGYHANNSTDTVDTVLEKNVTVTHSVNLLEDKHNGKLCKLRGVAPLHLGKCNIAGWILGNPECESLSTASSWSYIVETSSSDNGTCYPGDFIDYEELREQLSSVSSFERFEIFPKTSSWPNHDSNKGVTAACPHAGAKSFYKNLIWLVKKGNSYPKLSKSYINDKGKEVLVLWGIHHPSTSADQQSLYQNADAYVFVGTSRYSKKFKPEIAIRPKVRDQEGRMNYYWTLVEPGDKITFEATGNLVVPRYAFAMERNAGSGIIISDTPVHDCNTTCQTPKGAINTSLPFQNVHPITIGKCPKYVKSTKLRLATGLRNVPSIQSRGLFGAIAGFIEGGWTGMVDGWYGYHHQNEQGSGYAADLKSTQNAIDEITNKVNSVIEKMNTQFTAVGKEFNHLEKRIENLNKKVDDGFLDVWTYNAELLVLLENERTLDYHDSNVKNLYEKVRSQLKNNAKEIGNGCFEFYHKCDNTCMESVKNGTYDYPKYSEEAKLNREEIDGVKLESTRIYQILAIYSTVASSLVLVVSLGAISFWMCSNGSLQCRICI

SEQ ID NO: 4742 - protein, 566 aa, synthetic construct
  REGION 1..566: note = hemagglutinin__InfluenzaA__ADG21165
MKAILVVLLYTFATANADTLCIGYHANNSTDTVDTVLEKNVTVTHSVNLLEDKHNGKLCKLRGIAPLHLGKCNIAGWILGNPECESLSTASSWSYIVETSSSDNGTCYPGDFIDYEELREQLSSVSSFKRFEIFPKTNSWPNHDSNKGVTAACPHAGAKSFYKNLIWLVKKGNSYPKLSKSYINDKGKEVLVLWGIHHPSTSADQQSLYQNADAYVFVGTSKYSKKFKPEIAIRPKVRDQEGRMNYYWTLVEPGDKITFEATGNLVVPRYAFAMERNAGSGIIISDTPVHDCNTTCQTPKGAINTSLPFQNIHPITIGKCPKYVKSTKLRLATGLRNVPSIQSRGLFGAIAGFIEGGWTGMVDGWYGYHHQNEQGSGYAADLKSTQNAIDGITNKVNSVIEKMNTQFTAVGKEFNHLEKRIENLNKKVDDGFLDIWTYNAELLVLLENERTLDYHDSNVKNLYEKVRSQLKNNAKEIGNGCFEFYHKCDNTCMESVKNGTYDYPKYSEEAKLNREEIDGVKLESTRIYQILAIYSTVASSLVLVVSLGAISFWMCSNGSLQCRICI

SEQ ID NO: 4743 - protein, 566 aa, synthetic construct; identical to SEQ ID NO: 2656
  REGION 1..566: note = hemagglutinin__InfluenzaA__ADG21166

SEQ ID NO: 4744 - protein, 566 aa, synthetic construct
  REGION 1..566: note = hemagglutinin__InfluenzaA__ADG21168
MKAILVVLLYTFATANADTLCIGYHANNSTDTVDTVLEKNVTVTHSVNLLEDKHNGKLCKLRGVAPLHLGKCNIAGWILGNPECESLSTASSWSYIVETSSSDNGTCYPGDFIDYEELREQLSSVSSFERFEIFPKTSSWPNHDSNKGVTAACPHAGAKSFYKNLIWLVKKGNSYPKLSKFYINDKGKEVLVLWGIHHPSTSADQQSLYQNADAYVFVGSSRYSKKFKPEIAIRPKVRDQEGRMNYYWTLVEPGDKITFEATGNLVVPRYAFAMERNAGSGIIISDTPVHDCNTTCQTPKGAINTSLPFQNIHPITIGKCPKYVKSTKLRLATGLRNVPSIQSRGLFGAIAGFIEGGWTGMVDGWYGYHHQNEQGSGYAADLKSTQNAIDEITNKVNSVIEKMNTQFTAVGKEFNHLEKRIENLNKKVDDGFLDIWTYNAELLVLLENERTLDYHDSNVKNLYEKVRSQLKNNAKEIGNGCFEFYHKCDNTCMESVKNGTYDYPKYSEEAKLNREEIDGVKLESTRIYQILAIYSTVASSLVLVVSLGAISFWMCSNGSLQCRICI

SEQ ID NO: 4745 - protein, 566 aa, synthetic construct; identical to SEQ ID NO: 4698
  REGION 1..566: note = hemagglutinin__InfluenzaA__ADG21169

SEQ ID NO: 4746 - protein, 566 aa, synthetic construct; identical to SEQ ID NO: 2656
  REGION 1..566: note = hemagglutinin__InfluenzaA__ADG21170

SEQ ID NO: 4747 - protein, 566 aa, synthetic construct; identical to SEQ ID NO: 2656
  REGION 1..566: note = hemagglutinin__InfluenzaA__ADG21173

SEQ ID NO: 4748 - protein, 566 aa, synthetic construct; identical to SEQ ID NO: 2669
  REGION 1..566: note = hemagglutinin__InfluenzaA__ADG21174

SEQ ID NO: 4749 - protein, 566 aa, synthetic construct; identical to SEQ ID NO: 2669
  REGION 1..566: note = hemagglutinin__InfluenzaA__ADG21175

SEQ ID NO: 4750 - protein, 566 aa, synthetic construct; identical to SEQ ID NO: 2656
  REGION 1..566: note = hemagglutinin__InfluenzaA__ADG21176

SEQ ID NO: 4751 - protein, 566 aa, synthetic construct; identical to SEQ ID NO: 2656
  REGION 1..566: note = hemagglutinin__InfluenzaA__ADG21177

SEQ ID NO: 4752 - protein, 566 aa, synthetic construct; identical to SEQ ID NO: 2656
  REGION 1..566: note = hemagglutinin__InfluenzaA__ADG21178

SEQ ID NO: 4753 - protein, 566 aa, synthetic construct; identical to SEQ ID NO: 3022
  REGION 1..566: note = hemagglutinin__InfluenzaA__ADG21179

SEQ ID NO: 4754 - protein, 566 aa, synthetic construct; identical to SEQ ID NO: 2656
  REGION 1..566: note = hemagglutinin__InfluenzaA__ADG21180

SEQ ID NO: 4755 - protein, 566 aa, synthetic construct; identical to SEQ ID NO: 2656
  REGION 1..566: note = hemagglutinin__InfluenzaA__ADG21181

SEQ ID NO: 4756 - protein, 566 aa, synthetic construct; identical to SEQ ID NO: 2656
  REGION 1..566: note = hemagglutinin__InfluenzaA__ADG21182

SEQ ID NO: 4757 - protein, 566 aa, synthetic construct; identical to SEQ ID NO: 2656
  REGION 1..566: note = hemagglutinin__InfluenzaA__ADG21183

SEQ ID NO: 4758 - protein, 566 aa, synthetic construct; identical to SEQ ID NO: 3833
  REGION 1..566: note = hemagglutinin__InfluenzaA__ADG21184

SEQ ID NO: 4759 - protein, 566 aa, synthetic construct
  REGION 1..566: note = hemagglutinin__InfluenzaA__ADG21185
MKAILVVLLYTFATANADTLCIGYHANNSTDTVDTVLEKNVTVTHSVNLLEDKHNGKLCKLRGVAPLHLGKCNIAGWILGNPECESLSTASSWSYIVETSSSDNGTCYPGDFIDYEELREQLSSVSSFERFEIFPKTSSWPNHDSNKGVTAACPHAGAKSFYKNLIWLVKKGNSYPKLSKSYINDKGKEVLVLWGIHHPSTSADQQSLYQNADAYVFVGTSRYSKKFKPEIAIRPKVRDQEGRMNYYWTLVKPGDKITFEATGNLVVPRYAFAMERNAGSGIIISDTPVHDCNTTCQTPKGAINTSLPFQNIHPITIGRCPKYVKSTKLRLATGLRNVPSIQSRGLFGAIAGFIEGGWTGMVDGWYGYHHQNEQGSGYAADLKSTQNAIDEITNKVNSVIEKMNTQFTAVGKEFNHLEKRIENLNKKVDDGFLDIWTYNAELLVLLENERTLDYHDSNVKNLYEKVRSQLKNNAKEIGNGCFEFYHKCDNTCMESVKNGTYDYPKYSEEAKLNREEIDGVKLESTRIYQILAIYSTVASSLVLVVSLGAISFWMCSNGSLQCRICI

SEQ ID NO: 4760 - protein, 566 aa, synthetic construct; identical to SEQ ID NO: 4015
  REGION 1..566: note = hemagglutinin__InfluenzaA__ADG21188

SEQ ID NO: 4761 - protein, 568 aa, synthetic construct
  REGION 1..568: note = hemagglutinin__InfluenzaA__ADG21402
MEKIVLLLAIVSLVKSDQICIGYHANNSTEQVDTIMEKNVTVTHAQDILEKTHNGKLCDLDGVKPLILRDCSVAGWLLGNPMCDEFLNVPEWSYIVEKINPANDLCYPGNFNDYEELKHLLSRINHFEKIQIIPKSSWSDHEASSGVSSACPYQGRSSFFRNVVWLIKKDNAYPTIKRSYNNTNQEDLLVLWGIHHPNDAAEQTRLYQNPTTYISVGTSTLNQRLVPKIATRSKVNGQSGRMEFFWTILKSNDAINFESNGNFIAPENAYKIVKKGDSTIMKSELEYGNCNTKCQTPIGAINSSMPFHNIHPLTIGECPKYVKSNRLILATGLRNSPQGERRRKKRGLFGAIAGFIEGGWQGMVDGWYGYHHSNEQGSGYAADKESTQKAIDGVTNKVNSIIDKMNTQFEAVGREFNNLERRIENLNKKMEDGFLDVWTYNAELLVLMENERTLDFHDSNVKNLYDKVRLQLRDNAKELGNGCFEFYHRCDNECMESVRNGTYDYPQYSEEARLKREEISGVKLESIGTYQILSIYSTVASSLALAIMVAGLFLWMCSNGSLQCRICI

SEQ ID NO: 4762 - protein, 567 aa, synthetic construct
  REGION 1..567: note = hemagglutinin__InfluenzaA__ADG21414
MEKIVLLLAIVSIVKSDQICIGYHANNSTEHVDTIMEKNVTVTHAQDILEKTHNGKLCNLDGVKPLILRDCSVAGWLLGNPMCDEFLNVPEWSYIVEKINPANDLCYPGNFNDYEELKHLLSRINHFEKIQIIPKNSWSDHEASGVSSACPYQGRSSFFRNVVWLTKKNNAYPTIKKSYNNTNQEDLLVLWGIHHPNDGAEQTRLYQNPTTYISVGTSTLNQRLVPKIATRSKVNGQSGRMEFFWTILKSNDAINFESNGNFIAPENAYKIVKKGDSTIMKSELEYGNCNTKCQTPIGAINSSMPFHNIHPLTIGECPKYVKSNRLVLATGLRNSPQGERRRKKRGLFGAIAGFIEGGWQGMVDGWYGYHHSNEQGSGYAADKESTQKAIDGVTNKVNSIIDKMNTQFEAVGREFNNLERRIENLNKKMEDGFLDVWTYNAELLVLMENERTLDFHDSNVKNLYDKVRLQLRDNAKELGNGCFEFYHRCDNECMESVRNGTYDYPQYSEEARLKREEISGVKLESIGTYQILSIYSTVASSLALAIMVAGLFLWMCSNGSLQCRICI

SEQ ID NO: 4763 - protein, 567 aa, synthetic construct
  REGION 1..567: note = hemagglutinin__InfluenzaA__ADG21416
MEKIVLLLAIVSIVKSDQICIGYHANNSTEQVDTIMEKNVTVTHAQDILEKTHNGKLCNLDGVKPLILRDCSVAGWLLGNPMCDEFLNVPEWSYIVEKINPANDLCYPGNFNDYEELKHLLSRINHFEKIQIIPKNSWSDHEASGVSSACPYQGRSSFFRNVVWLTKKNNAYPTIKKSYNNTNQEDLLVLWGIHHPNDAAEQTGLYQNPTTYISVGTSTLNQRLVPKIATRSKVNGQSGRMEFFWTILKSNDVINFESNGNFIAPENAYKIVKKGDSTIMKSELEYGNCNTKCQTPIGAINSSMPFHNIHPLTIGECPKYVKSNRLVLATGLRNSPQGERRRKKRGLFGAIAGFIEGGWQGMVDGWYGYHHSNEQGSGYAADKESTQKAIDGVTNKVNSIIDKMNTQFEAVGREFNNLERRIENLNKKMEDGFLDVWTYNAELLVLMENERTLDFHDSNVKNLYDKVRLQLRDNAKELGNGCFEFYHRCDNECMESVRNGTYDYPQYSEEARLKREEISGVKLESIGTYQILSIYSTVASSLALAIMVAGLFLWMCSNGSLQCRICI

SEQ ID NO: 4764 - protein, 567 aa, synthetic construct
  REGION 1..567: note = hemagglutinin__InfluenzaA__ADG21420
MEKIVLLLAIVSIVKSDQICIGYHANNSTEQVDTIMEKNVTVTHAQDILEKTHNGKLCNLDGVKPLILRDCSVAGWLLGNPMCDEFLNVPEWSYIVEKINPANDLCYPGNFNDYEELKHLLSRINHFEKIQIIPKNSWSDHEASGVSSACPYQGRSSFFRNVVWLTKKNNAYPTIKKSYNNTNQEDLLVLWGIHHPNDAAEQTRLYQNPTTYISVGTSTLNQRLVPKIATRSKVNGQSGRMEFFWTILKSNDAINFESNGNFIAPENAYKIVKKGDSTIMKSELEYGNCNTKCQTPIGAINSSMPFHNIHPLTIGECPKYVKSNRLVLATGLRNSPQGERRRKKRGLFGAIAGFIEGGWQGMVDGWYGYHHSNEQGSGYAADKESTQKAIDGVTNKVNSIIDKMNTQFEAVGREFNNLERRIENLNKKMEDGFLDVWTYNAELLVLMENERTLDFHDSNVKNLYDKVRLQLRDNAKELGNGCFEFYHRCDNECMESVRNGTYDYPQYSEEARLKREEISGVKLESIGTYQILSIYSTVASSLALAIMVAGLFLWMCSNGSLQCRICI

SEQ ID NO: 4765 - protein, 567 aa, synthetic construct
  REGION 1..567: note = hemagglutinin__InfluenzaA__ADG21422
MEKIVLLLAIVSLVKSDQICIGYHANNSTEQVDTIMEKNVTVTHAQDILEKTHNGKLCNLDGVKPLILRDCSVAGWLLGNPMCDEFLNVPEWSYIVEKINPTNDLCYPGNFNDYEELKHLLSRINHFEKIQIIPKNSWSDHEASGVSSACPYQGRSSFFRNVVWLTKKNNAYPTIKRSYNNTNQEDLLVLWGIHHPNDAAEQTRLYQNPTTYISVGTSTLNQRLVPKIATRSKVNGQSGRMEFFWTILKSNDAINFESNGNFIAPENAYKIVKKGDSTIMKSELEYGNCNTKCQTPIGAINSSMPFHNIHPLTIGECPKYVKSNRLVLATGLRNSPQGERRRKKRGLFGAIAGFIEGGWQGMVDGWYGYHHSNEQGSGYAADKESTQKAIDGVTNKVNSIIDKMNTQFEAVGREFNNLERRIENLNKKMEDGFLDVWTYNAELLVLMENERTLDFHDSNVKNLYDKVRLQLRDNAKELGNGCFEFYHRCDNECMESVRNGTYDYPQYSEEARSKREEISGVKLESIGTYQILSIYSTVASSLALAIMVAGLFLWMCSNGSLQCRICI

SEQ ID NO: 4766 - protein, 567 aa, synthetic construct
  REGION 1..567: note = hemagglutinin__InfluenzaA__ADG21425
MEKIVLLLAIVSLVKSDQICIGYHANNSTEQVDTIMEKNVTVTHAQDILEKTHNGKLCNLDGVKPLILRDCSVAGWLLGNPMCDEFLNVPEWSYIVEKINPANDLCYPGNFNDYEELKHLLSRINHFEKIQIIPKNSWSDHGASGVSSACPYQGRSSFFRNVVWLTKKNNAYPTIKKSYNNTNQEDLLVLWGIHHPNDAEEQTRLYQNPTTYISVGTSTLNQRLVPKIATRSKVNGQSGRMEFFWTILKSNDAINFESNGNFIAPENAYKIVKKGDSTIMKSELEYDNCNTKCQTPIGAINSSMPFHNIHPLTIGECPKYVKSNKLVLATGLRNSPQGEKRRKKRGLFGAIAGFIEGGWQGMVDGWYGYHHSNEQGSGYAADKESTQKAIDGVTNKVNSIIDKMNTQFEAVGREFNALERRIENLNKKMEDGFLDVWTYNAELLVLMENERTLDFHDSNVKNLYDKVRLQLRDNAKELGNGCFEFYHRCDNECMESVRNGTYDYPQYSEEARLKREEISGVKLESIGTYQILSIYSTVASSLALAIMVAGLSLWMCSNGSLQCRICI

SEQ ID NO: 4767 - protein, 567 aa, synthetic construct
  REGION 1..567: note = hemagglutinin__InfluenzaA__ADG21429
MEKIVLLLAIVSIVKSDQICIGYHANNSTEQVDTIMEKNVTVTHAQDILEKTHNGKLCNLDGVEPLILRDCSVAGWLLGNPMCDEFLNVPEWSYIVEKINPANDLCYPGNFNDYEELKHLLSRINHFEKIQIIPKNSWSDHEASGVSSACPYQGRSSFFRNVVWLTKKNNAYPTIKKSYNNTNQEDLLVLWGIHHPNDAAEQTRLYQNPTTYISVGTSTLNQRLVPKIATRSKVNGQSGRMEFFWTILKSNDVINFESNGNFIAPENAYKIVKKGDSTIMKSELEYGNCNTKCQTPIGAINSSMPFHNIHPLTIGECPKYVKSDRLVLATGLRNSPQGERRRKKRGLFGAIAGFIEGGWQGMVDGWYGYHHSNEQGSGYAADKESTQKAIDGVTNKVNSIIDKMNTQFEAVGREFNNLERRIENLNKKMEDGFLDVWTYNAELLVLMENERTLDFHDSNVKNLYDKVRLQLRDNAKELGNGCFEFYHRCDNECMESVRNGTYDYPQYSEEARLKREEISGVKLESIGTYQILSIYSTVASSLALAIMVAGLLLWMCSNGSLQCRICI

SEQ ID NO: 4768 - protein, 567 aa, synthetic construct
  REGION 1..567: note = hemagglutinin__InfluenzaA__ADG21437
MEKIVLLLAIVSIVKSDQICIGYHANNSTEQVDTIMEKNVTVTHAQDILEKTHNGKLCNLDGVKPLILRDCSVAGWLLGNPMCDEFLNVPEWSYIVEKINPANDLCYPGNFNDYEELKHLLSRINHFEKIQIIPKNSWSDHEASGVSSACPYQGRSSFFRNVVWLTQKNNAYPTIKKSYNNTNQEDLLVLWGIHHPNDAAEQTRLYQNPTTYISVGTSTLNQRLVPKIATRSKVNGQSGRMEFFWTILKSNDVINFESNGNFIAPENAYKIVKKGDSTIMKSELEYGNCNTKCQTPIGAINSSMPFHNIHPLTIGECPKYVKSNRLVLATGLRNSPQGERRRKKRGLFGAIAGFIEGGWQGMVDGWYGYHHSNEQGSGYAADKESTQKAIDGVTNKVNSIIDKMNTQFEAVGREFNNLERRIENLNKKMEDGFLDVWTYNAELLVLMENERTLDFHDSNVKNLYDKVRLQLRDNAKELGNGCFEFYHRCDNECMESVRNGTYDYPQYSEEARLKREEISGVKLESIGTYQILSIYSTVASSLALAIMVAGLFLWMCSNGSLQCRICI

SEQ ID NO: 4769 - protein, 567 aa, synthetic construct
  REGION 1..567: note = hemagglutinin__InfluenzaA__ADG21439
MEKIVLLLAIVSIVKSDQICIGYHANNSTEQVDTIMEKNVTVTHAQDILEKTHNGKLCNLDGVKPLILRDCSVAGWLLGNPMCDEFLNVPEWSYIVEKINPANDLCYPGNFNDYEELKHLLSRINHFEKIQIIPKGSWSDHEASGVSSACPYQGRSSFFRNVVWLTKKNNAYPTIKKSYNNTNQEDLLVLWGIHHPNDAAEQTRLYQNPTTYISVGTSTLNQRLVPQIATRSKVNGQSGRMEFFWTILKSNDAINFESNGNFIAPENAYKIVKKGDSTIMKSELEYGNCNTKCQTPIGAINSSMPFHNIHPLTIGECPKYVKSNRLVLATGLRNSPQGERRRKKRGLFGAIAGFIEGGWQGMVDGWYGYHHSNEQGSGYAADKESTQKAIDGVTNKVNSIIDKMNTQFEAVGREFNNLERRIENLNKKMEDGFLDVWTYNAELLVLMENERTLDFHDSNVKNLYDKVRLQLRDNAKELGNGCFEFYHRCDNECMESVRNGTYDYPQYSEEARLKREEISGVKLESIGTYQILSIYSTVASSLALAIMVAGLFLWMCSNGSLQCRICI

SEQ ID NO: 4770 - protein, 567 aa, synthetic construct
  REGION 1..567: note = hemagglutinin__InfluenzaA__ADG21441
MEKIVLLLAIVSIVKSDQICIGYHANNSTEQVDTIMEKNVTVTHAQDILEKTHNGKLCNLDGVKPLILRDCSVAGWLLGNPMCDEFLNVPEWSYIVEKINPSNDLCYPGNFNDYEELKHLLSRINHFEKIQIIPKNSWSDHEASGVSSACPYQGRSSFFRNVVWLTKKNNAYPTIKKSYNNTNQEDLLVLWGIHHPNDEAEQTSLYQNPTTYISVGTSTLNQRLVPKIATRSKVNGQSGRMEFFWTILKSNDAINFESNGNFIAPENAYKIVKKGDSTIMKSELEYGNCNTKCQTPIGAINSSMPFHNIHPLTIGECPKYVKSNRLVLATGLRNSPQGERRRKKRGLFGAIAGFIEGGWQGMVDGWYGYHHSNEQGSGYAADKESTQKAIDGVTNKVNSIIDKMNTQFEAVGREFNNLERRIENLNKKMEDGFLDVWTYNAELLVLMENERTLDFHDSNVKNLYDKVRLQLRDNAKELGNGCFEFYHRCDNECMESVRNGTYDYPQYSEEARLKREEISGVKLESIGTYQILSIYSTVASSLALAIMVAGLFLWMCSNGSLQCRICI

SEQ ID NO: 4771 - protein, 567 aa, synthetic construct
  REGION 1..567: note = hemagglutinin__InfluenzaA__ADG21443
MEKIVLLLAIVSIVKSDQICIGYHANNSTEQVDTIMEKNVTVTHAQDILEKTHNGKLCNLDGVKPLILRDCSVAGWLLGNPMCDEFLNVPEWSYIVEKINPTNDLCYPGNFNDYEELKHLLSRINHFEKIQIIPKNSWSDHEASGVSSACPYQGRSSFFRNVVWLTKKNNAYPTIKKSYNNTNQEDLLVLWGIHHPNDAAEQTRLYQNPTTYISVGTSTLNQRLVPKIATRSKVNGQSGRMEFFWTILKSNDAINFESNGNFIAPENAYKIVKKGDSTIMKSELEYGNCNTKCQTPIGAINSSMPFHNIHPLTIGECPKYVKSNRLVLATGLRNSPQGERRRKKRGLFGAIAGFIEGGWQGMVDGWYGYHHSNEQGSGYAADKESTQKAIDGVTNKVNSIIDKMNTQFEAVGREFNNLERRIENLNKKMEDGFLDVWTYNAELLVLMENERTLDFHDSNVKNLYDKVRLQLRDNAKELGNGCFEFYHRCDNECMESVRNGTYDYPQYSEEARLKREEISGVKLESIGTYQILSIYSTVASSLALAIMVAGLFLWMCSNGSLQCRICI

SEQ ID NO: 4772 - protein, 567 aa, synthetic construct
  REGION 1..567: note = hemagglutinin__InfluenzaA__ADG21445
MEKIVLLLAIVSIVKSDQICIGYHANNSTEQVDTIMEKNVTVTHAQDILEKTHNGKLCNLDGVKPLILRDCSVAGWLLGNPMCDEFLNVPEWSYIVEKINPSNDLCYPGNFNDYEELKHLLSRINHFEKIQIIPKNSWSDHEASGVSSACPYQGRSSFFRNVVWLTKKNNAYPTIKKSYNNTNQEDLLVLWGIHHPNDEAEQTRLYQNPTTYISVGTSTLNQRLVPKIATRSKVNGQSGRMEFFWTILKSNDAINFESNGNFIAPENAYKIVKKGDSTIMKSELEYGNCNTKCQTPIGAINSSMPFHNIHPLTIGECPKYVKSNRLVLATGLRNSPQGERRRKKRGLFGAIAGFIEGGWQGMVDGWYGYHHSNEQGSGYAADKESTQKAIDGVTNKVNSIIDKMNTQFEAVGREFNNLERRIENLNKKMEDGFLDVWTYNAELLVLMENERTLDFHDSNVKNLYDKVRLQLRDNAKELGNGCFEFYHRCDNECMESVRNGTYDYPQYSEEARLKREEISGVKLESIGTYQILSIYSTVASSLALAIMVAGLFLWMCSNGSLQCRICI

SEQ ID NO: 4773 - protein, 566 aa, synthetic construct; identical to SEQ ID NO: 2911
  REGION 1..566: note = hemagglutinin__InfluenzaA__ADG21912

SEQ ID NO: 4774 - protein, 566 aa, synthetic construct; identical to SEQ ID NO: 2669
  REGION 1..566: note = hemagglutinin__InfluenzaA__ADG21913

SEQ ID NO: 4775 - protein, 566 aa, synthetic construct
  REGION 1..566: note = hemagglutinin__InfluenzaA__ADG21914
MKAIIVVLLYTFATANADTLCIGYHANNSTDTVDTVLEKNVTVTHSVNLLEDKHNGKLCKLRGVAPLHLGKCNIAGWILGNPECESLSTASSWSYIVETSSSDNGTCYPGDFIDYEELREQLSSVSSFERFEIFPKTSSWPNHDSNKGVTAACPHAGAKSFYKNLIWLVKKGNSYPKLSKSYINDKGKEVLVLWGIHHPSTSADQQSLYQNADAYVFVGTSRYSKKFKPEIAIRPKVRDQEGRMNYYWTLVEPGDKITFEATGNLVVPRYAFAMERNAGSGIIISDTPVHDCNTTCQTPKGAINTSLPFQNIHPITIGKCPKYVKSTKLRLATGLRNVPSIQSRGLFGAIAGFIEGGWTGMVDGWYGYHHQNEQGSGYAADLKSTQNAIDEITNKVNSVIEKMNTQFTAVGKEFNHLEKRIENLNKKVDDGFLDIWTYNAELLVLLENERTLDYHDSNVKNLYEKVRSQLKNNAKEIGNGCFEFYHKCDNTCMESVKNGTYDYPKYSEEAKLNREEIDGVKLESTRIYQILAIYSTVASSLVLVVSLGAISFWMCSNGSLQCRICI

SEQ ID NO: 4776 - protein, 566 aa, synthetic construct
  REGION 1..566: note = hemagglutinin__InfluenzaA__ADG21915
MEAILVVLLYTFATANADTLCIGYHANNSTDTVDTVLEKNVTVTHSVNILEDKHNGKLCKLRGVAPLHLGKCNIAGWILGNPECESLSTASSWSYIVETSSSDNGTCYPGDFIDYEELREQLSSVSSFERFEIFPKTSSWPNHDSNKGVTAACPHAGAKSFYKNLIWLVKKGNSYPKLSKSYINDKGKEVLVLWGIHHPSTSADQQSLYQNADAYVFVGSSRYSKKFKPEIAIRPKVRDQEGRMNYYWTLVEPGDKITFEATGNLVVPRYAFAIERNAGSGIIISDTPVHDCNTTCQTPKGAINTSLPFHNIHPITIGKCPKYVKSTKLRLATGLRNVPSIQSRGLFGAIAGFIEGGWTGMVDGWYGYHHQNEQGSGYAADLKSTQNAIDEITNKVNSVIEKMNTQFTAVGKEFNHLEKRIENLNKKVDDGFLDIWTYNAELLVLLENERTLDYHDSNVKNLYEKVRSQLKNNAKEIGNGCFEFYHKCDNTCMESVKNGTYDYPKYSEEAKLNREEIDGVKLESTRIYQILAIYSTVASSLVLVVSLGAISFWMCSNGSLQCRICI

SEQ ID NO: 4777 - protein, 566 aa, synthetic construct; identical to SEQ ID NO: 2911
  REGION 1..566: note = hemagglutinin__InfluenzaA__ADG21916

SEQ ID NO: 4778 - protein, 566 aa, synthetic construct; identical to SEQ ID NO: 2669
  REGION 1..566: note = hemagglutinin__InfluenzaA__ADG21917

SEQ ID NO: 4779 - protein, 566 aa, synthetic construct; identical to SEQ ID NO: 4169
  REGION 1..566: note = hemagglutinin__InfluenzaA__ADG21918

SEQ ID NO: 4780 - protein, 566 aa, synthetic construct
  REGION 1..566: note = hemagglutinin__InfluenzaA__ADG21919
MKAILVVLLYTFATANADTLCIGYHANNSTDTVDTVLEKNVTVTHSVNLLEDKHNGKLCKLRGVTPLHLGKCNIAGWILGNPECESLSTASSWSYIVETSSSDNGTCYPGDFIDYEELREQLSSVSSFERFEIFPKTSSWPNHDSNKGVTAACPHAGAKSFYKNLIWLVKKGNSYPKLSKSYINDKGKEVLVLWGIHHPSTSADQQSLYQNADAYVFVGTSRYSKKFKPEIAIRPKVRDQEGRMNYYWTLVEPGDKITFEATGNLVVPRYAFAMERNAGSGIIISDTPVHDCNTTCQTPKGAINTSLPFQNIHPITIGKCPKYVKSTKLRLATGLRNVPSIQSRGLFGAIAGFIEGGWTGMVDGWYGYHHQNEQGSGYAADLKSTQNAIDEITNKVNSVIEKMNTQFTAVGKEFNHLEKRIENLNKKIDDGFLDIWTYNAELLVLLENERTLDYHDSNVKNLYEKVRSQLKNNAKEIGNGCFEFYHKCDNTCMESVKNGTYDYPKYSEEAKLNREEIDGVKLESTRIYQILAIYSTVASSLVLVVSLGAISFWMCSNGSLQCRICI

SEQ ID NO: 4781 - protein, 566 aa, synthetic construct; identical to SEQ ID NO: 2911
  REGION 1..566: note = hemagglutinin__InfluenzaA__ADG21921

SEQ ID NO: 4782 - protein, 566 aa, synthetic construct; identical to SEQ ID NO: 2669
  REGION 1..566: note = hemagglutinin__InfluenzaA__ADG21922

SEQ ID NO: 4783 - protein, 566 aa, synthetic construct
  REGION 1..566: note = hemagglutinin__InfluenzaA__ADG21923
MKAILVVLLYTFATANADTLCIGYHANNSTDTVDTVLEKNVTVTHSANLLEDKHNGKLCKLRGVAPLHLGKCNIAGWILGNPECESLSTASSWSYIVETSSSDNGTCYPGDFIDYEELREQLSSVSSFERFEIFPKTSSWPNHDSNKGVTAACPHAGAKSFYKNLIWLVKKGNSYPKLSKSYINDKGKEVLVLWGIHHPSTSADQQSLYQNADAYVFVGSSKYSKKFKPEIAIRPKVRDQEGRMNYYWTLVEPGDKITFEATGNLVVPRYAFAMERNAGSGIIISDTPVHDCNTTCQTPKGAINTSLPFHNIHPITIGKCPKYVKSTKLRLATGLRNVPSIQSRGLFGAIAGFIEGGWTGMVDGWYGYHHQNEQGSGYAADLKSTQNAIDEITNKVNSVIEKMNTQFTAVGKEFNHLEKRIENLNKKVDDGFLDIWTYNAELLVLLENERTLDYHDSNVKNLYEKVRSQLKNNAKEIGNGCFEFYHKCDNTCMESVKNGTYDYPKYSEEAKLNREEIDGVKLESTRIYQILAIYSTVASSLVLVVSLGAISFWMCSNGSLQCRICI

SEQ ID NO: 4784 - protein, 566 aa, synthetic construct
  REGION 1..566: note = hemagglutinin__InfluenzaA__ADG21924
MEAILVVLLYTFATANADTLCIGYHANNSTDTVDTVLEKNVTVTHSVNLLENKHNGKLCKLRGVAPLHLGKCNIAGWILGNPECESLSTASSWSYIVETSSSDNGTCYPGDFIDYEELREQLSSVSSFERFEIFPKTSSWPNHDSNKGVTAACPHAGAKSFYKNLIWLVKKGNSYPKLSKSYINDKGKEVLVLWGIHHPSTSADQQSLYQNADAYVFVGSSRYSKKFKPEIAIRPKVRDQEGRMNYYWTLVEPGDKITFEATGNLVVPRYAFAMERNAGSGIIISDTPVHDCNTTCQTPKGAINTSLPFHNIHPITIGKCPKYVKSTKLRLATGLRNVPSIQSRGLFGAIAGFIEGGWTGMVDGWYGYHHQNEQGSGYAADLKSTQNAIDEITNKVNSVIEKMNTQFTAVGKEFNHLEKRIENLNKKVDDGFLDIWTYNAELLVLLENERTLDYHDSNVKNLYEKVRSQLKNNAKEIGNGCFEFYHKCDNTCMESVKNGTYDYPKYSEEAKLNREEIDGVKLESTRIYQILAIYSTVASSLVLVVSLGAISFWMCSNGSLQCRICI

SEQ ID NO: 4785 - protein, 566 aa, synthetic construct
  REGION 1..566: note = hemagglutinin__InfluenzaA__ADG21925
MKAILVVLLYTFATANADTLCIGYHANNSTDTVDTVLEKNVTVTHSVNLLEDKHNGKLCKLRGVAPLHLGKCNIAGWILGNPECESLSTASSWSYIVETSSSDNGTCYPGDFIDYEELREQLSSVSSFERFEIFPKTSSWPNHDSNKGVTAACPHAGAKSFYKNLIWLVKKGNSYPKLSKSYINDKGKEVLVLWGIHHPSTSADQQSLYQNADAYVFVGTSRYSKKFKPEIAIRPKVRDQEGRMNYYWTLVEPGDKITFEATGNLVVPRYAFAMERDAGSGIIISDTPVHDCNTTCQTPKGAINTSLPFQNIHPITIGKCPKYVKSTKLRLATGLRNVPSIQSRGLFGAIAGFIEGGWTGMVDGWYGYHHQNEQGSGYAADLKSTQNAIDEITNKVNSVIEKMNTQFTAVGKEFNHLEKRIENLNKKIDDGFLDIWTYNAELLVLLENERTLDYHDSNVKNLYEKVRSQLKNNAKEIGNGCFEFYHKCDNTCMESVKNGTYDYPKYSEEAKLNREEIDGVKLESTRIYQILAIYSTVASSLVLVVSLGAISFWMCSNGSLQCRICI

SEQ ID NO: 4786 - protein, 566 aa, synthetic construct
  REGION 1..566: note = hemagglutinin__InfluenzaA__ADG21926
MKAILVVLLYTFATANADTLCIGYHANNSTDTVDTILEKNVTVTHSVNLLEDKHNGKLCKLRGVAPLHLGKCNIAGWILGNPECESLSTASSWSYIVETSSSDNGTCYPGDFIDYEELREQLSSVSSFERFEIFPKTSSWPNHDSNKGVTAACPHAGAKSFYKNLIWLVKKGNSYPKLSKSYINDKGKEVLVLWGIHHPSTSADQQSLYQNADAYVFVGTSRYSKKFKPEIAIRPKVRDQEGRMNYYWTLVEPGDKITFEATGNLVVPRYAFAMERNAGSGIIISDTPVHDCNTTCQTPKGAINTSLPFQNIHPITIGKCPKYVKSTKLRLATGLRNVPSIQSRGLFGAIAGFIEGGWTGMVDGWYGYHHQNEQGSGYAADLKSTQNAIDEITNKVNSVIEKMNTQFTAVGKEFNHLEKRIENLNKKVDDGFLDIWTYNAELLVLLENERNLDYHDSNVKNLYEKVRSQLKNNAKEIGNGCFEFYHKCDNTCMESVKNGTYDYPKYSEEAKLNREEIDGVKLESTRIYQILAIYSTVASSLVLVVSLGAISFWMCSNGSLQCRICI

SEQ ID NO: 4787 - protein, 566 aa, synthetic construct; identical to SEQ ID NO: 2911
  REGION 1..566: note = hemagglutinin__InfluenzaA__ADG21927

SEQ ID NO: 4788 - protein, 566 aa, synthetic construct
  REGION 1..566: note = hemagglutinin__InfluenzaA__ADG21928
MKATLVVLLYTFATANADTLCIGYHANNSTDTVDTVLEKNVTVTHSVNLLEDKHNGKLCKLRGVAPLHLGKCNIAGWILGNPECESLSTASSWSYIVETSSSDNGTCYPGDFIDYEELREQLSSVSSFERFEIFPKTSSWPNHDSNKGVTAACPHAGAKSFYKNLIWLVKKGNSYPKLSKSYINDKGKEVLVLWGIHHPSTSADQQSLYQNADAYVFVGTSRYSKKFKPEIAIRPRVRDQEGRMNYYWTLVEPGDKITFEATGNLVVPRYAFAMERDAGSGIIISDTPVHDCNTTCQTPKGAINTSLPFQNIHPITIGKCPKYVKSTKLRLATGLRNVPSIQSRGLFGAIAGFIEGGWTGMVDGWYGYHHQNEQGSGYAADLKSTQNAIDEITNKVNSVIEKMNTQFTAVGKEFNHLEKRIENLNKKIDDGFLDIWTYNAELLVLLENERTLDYHDSNVKNLYEKVRSQLKNNAKEIGNGCFEFYHKCDNTCMESVKNGTYDYPKYSEEAKLNREEIDGVKLESTRIYQILAIYSTVASSLVLVVSLGAISFWMCSNGSLQCRICI

SEQ ID NO: 4789 - protein, 566 aa, synthetic construct; identical to SEQ ID NO: 4785
  REGION 1..566: note = hemagglutinin__InfluenzaA__ADG21930

SEQ ID NO: 4790 - protein, 566 aa, synthetic construct; identical to SEQ ID NO: 2911
  REGION 1..566: note = hemagglutinin__InfluenzaA__ADG21931

SEQ ID NO: 4791 - protein, 566 aa, synthetic construct; identical to SEQ ID NO: 2911
  REGION 1..566: note = hemagglutinin__InfluenzaA__ADG21932

SEQ ID NO: 4792 - protein, 566 aa, synthetic construct; identical to SEQ ID NO: 2911
  REGION 1..566: note = hemagglutinin__InfluenzaA__ADG21933

SEQ ID NO: 4793 - protein, 566 aa, synthetic construct; identical to SEQ ID NO: 4785
  REGION 1..566: note = hemagglutinin__InfluenzaA__ADG21934

SEQ ID NO: 4794 - protein, 566 aa, synthetic construct
  REGION 1..566: note = hemagglutinin__InfluenzaA__ADG21935
MEAILVVLLYTFATANADTLCIGYHANNSTDTVDTVLEKNVTVTHSVNLLEDKHNGKLCKLRGVAPLHLGKCNIAGWILGNPECESLSTASSWSYIVETSSSDNGTCYPGDFIDYEELREQLSSVSSFERFEIFPKTSSWPNHDSNKGVTAACPHAGAKSFYKNLIWLVKKGNSYPKLSKSYINDKGKEVLVLWGIHHPSTSADQQSLYQNADAYVFVGSSRYSKKFKPEIAIRPKVRDQEGRMNYYWTLVEPGDKITFEATGNLVVPRYAFAMERNAGSGIIISDTPVHDCNTNCQTPNGAINTSLPFHNIHPITIGKCPKYVKSTKLRLATGLRNVPSIQSRGLFGAIAGFIEGGWTGMVDGWYGYHHQNEQGSGYAADLKSTQNAIDEITNKVNSVIEKMNTQFTAVGKEFNHLEKRIENLNKKVDDGFLDIWTYNAELLVLLENERTLDYHDSNVKNLYEKVRSQLKNNAKEIGNGCFEFYHKCDNTCMESVKNGTYDYPKYSEEAKLNREEIDGVKLESTRIYQILAIYSTVASSLVLVVSLGAISFWMCSNGSLQCRICI

SEQ ID NO: 4795 - protein, 566 aa, synthetic construct; identical to SEQ ID NO: 2911
  REGION 1..566: note = hemagglutinin__InfluenzaA__ADG21936

SEQ ID NO: 4796 - protein, 566 aa, synthetic construct; identical to SEQ ID NO: 2911
  REGION 1..566: note = hemagglutinin__InfluenzaA__ADG21937

SEQ ID NO: 4797 - protein, 566 aa, synthetic construct
  REGION 1..566: note = hemagglutinin__InfluenzaA__ADG21938
MEAILVVLLYTFATANADTLCIGYHANNSTDTVDTVLEKNVTVTHSVNLLEDKHNGKLCKLRGVAPLHLGKCNIAGWILGNPECESLSTASSWSYIVETSSSDNGTCYPGDFIDYEELREQLSSVSSFERFEIFPKTSSWPNHDSNKGVTAACPHAGAKSFYKNLIWLVKKGNSYPKLSKSYINDKGKEVLVLWGIHHPSTSADQQSLYQNADAYVFVGSSRYSKKFKPEIAIRPKVRDQEGRMNYYWTLVEPGDKITFEATGNLVVPRYAFAMERNAGSGIIISDTPVHDCNTTCQTPKGAINTSLPFHNIHPITIGKCPKYVKSTKLRLATGLRNVPSIQSRGLFGAIAGFIEGGWTGMVDGWYGYHHQNEQGSGYAADLKSTQNAIDEITNKVNSVIEKMNTQFTAVGKEFNHLEKRIENLNKKVDDGFLDIWTYNAELLVLLENERNLDYHDSNVKNLYEKVRSQLKNNAKEIGNGCFEFYHKCDNTCMESVKNGTYDYPKYSEEAKLNREEIDGVKLESTRIYQILAIYSTVASSLVLVVSLGAISFWMCSNGSLQCRICI

SEQ ID NO: 4798 - protein, 566 aa, synthetic construct; identical to SEQ ID NO: 2911
  REGION 1..566: note = hemagglutinin__InfluenzaA__ADG21939

SEQ ID NO: 4799 - protein, 566 aa, synthetic construct; identical to SEQ ID NO: 2911
  REGION 1..566: note = hemagglutinin__InfluenzaA__ADG21940

SEQ ID NO: 4800 - protein, 566 aa, synthetic construct
  REGION 1..566: note = hemagglutinin__InfluenzaA__ADG21941
MEAILVVLLYTFATANADTLCIGYHANNSTDTVDTVLEKNVTVTHSVNLLEDKHNGKLCKLRGVAPLHLGKCNIAGWILGNPECESLSTASSWSYIVETSSSDNGTCYPGDFIDYEELREQLSSVSSFERFEIFPKTSSWPNHDSNKGVTAACPHAGAKSFYKNLIWLVKKGNSYPKLSKSYINDKGKEVLVLWGIHHPSTSADQQSLYQNADAYVFVGSSRYSKKFKPEIAIRPKVRDQEGRMNYYWTLVEPGDKITFEATGNLVVPRYAFAMERNAGSGIIISDTPVHDCNTTCQTPKGAINTSLPFHNIHPITIGKCPKYVKSTKLRLATGLRNVPSIQSRGLFGAIAGFIEGGWTGMVDGWYGYHHQNEQGSGYAADLKSTQNAIDEITNKVNSVIEKMNTQFTAVGKEFNHLEKRIENLNKKIDDGFLDIWTYNAELLVLLENERTLDYHDSNVKNLYEKVRSQLKNNAKEIGNGCFEFYHKCDNTCMESVKNGTYDYPKYSEEAKLNREEIDGVKLESTRIYQILAIYSTVASSLVLVVSLGAISFWMCSNGSLQCRICI

SEQ ID NO: 4801 - protein, 566 aa, synthetic construct
  REGION 1..566: note = hemagglutinin__InfluenzaA__ADG21943
MKAILVVLLYTFATANADTLCIGYHANNSTDTVDTVLEKNVTVTHSVNLLEDKHNGKLCKLRGVAPLHLGKCNIAGWILGNPECESLSTANSWSYIVETSSSDNGTCYPGDFIDYEELREQLSSVSSFERFEIFPKTSSWPNHDSNKGVTAACPHAGAKSFYKNLIWLVKKGNSYPKLSKSYINDKGKEVLVLWGIHHPSTSADQQSLYQNADAYVFVGTSRYSKKFKPEIAIRPKVRDQEGRMNYYWTLVEPGDKITFEATGNLVVPRYAFAMERDAGSGIIISDTPVHDCNTTCQTPKGAINTSLPFQNIHPITIGKCPKYVKSTKLRLATGLRNVPSIQSRGLFGAIAGFIEGGWTGMVDGWYGYHHQNEQGSGYAADLKSTQNAIDEITNKVNSVIEKMNTQFTAVGKEFNHLEKRIENLNKKIDDGFLDIWTYNAELLVLLENERTLDYHDSNVKNLYEKVRSQLKNNAKEIGNGCFEFYHKCDNTCMESVKNGTYDYPKYSEEAKLNREEIDGVKLESTRIYQILAIYSTVASSLVLVVSLGAISFWMCSNGSLQCRICI

SEQ ID NO: 4802 - protein, 566 aa, synthetic construct
  REGION 1..566: note = hemagglutinin__InfluenzaA__ADG21944
MEAILIVLLYTFATANADTLCIGYHANNSTDTVDTVLEKNVTVTHSVNLLEDKHNGKLCKLRGVAPLHLGKCNIAGWILGNPECESLSTASSWSYIVETSSSDNGTCYPGDFIDYEELREQLSSVSSFERFEIFPKTSSWPNHDSNKGVTAACPHAGAKSFYKNLIWLVKKGNSYPKLSKSYINDKGKEVLVLWGIHHPSTSADQQSLYQNADAYVFVGSSRYSKKFKPEIAIRPKVRDQEGRMNYYWTLVEPGDKITFEATGNLVVPRYAFAMERNAGSGIIISDTPVHDCNTTCQTPKGAINTSLPFHNIHPITIGKCPKYVKSTKLRLATGLRNVPSIQSRGLFGAIAGFIEGGWTGMVDGWYGYHHQNEQGSGYAADLKSTQNAIDEITNKVNSVIEKMNTQFTAVGKEFNHLEKRIENLNKKVDDGFLDIWTYNAELLVLLENERTLDYHDSNVKNLYEKVRSQLKNNAKEIGNGCFEFYHKCDNTCMESVKNGTYDYPKYSEEAKLNREEIDGVKLESTRIYQILAIYSTVASSLVLVVSLGAISFWMCSNGSLQCRICI

SEQ ID NO: 4803 - protein, 566 aa, synthetic construct; identical to SEQ ID NO: 2911
  REGION 1..566: note = hemagglutinin__InfluenzaA__ADG21945

SEQ ID NO: 4804 - protein, 566 aa, synthetic construct; identical to SEQ ID NO: 2911
  REGION 1..566: note = hemagglutinin__InfluenzaA__ADG21946

SEQ ID NO: 4805 - protein, 566 aa, synthetic construct; identical to SEQ ID NO: 2911
  REGION 1..566: note = hemagglutinin__InfluenzaA__ADG21947

SEQ ID NO: 4806 - protein, 566 aa, synthetic construct
  REGION 1..566: note = hemagglutinin__InfluenzaA__ADG21948
MEAILVVLLYTFATANADTLCIGYHANNSTDTVDTVLEKNVTVTHSVNLLEDKHNGKLCKLRGVAPLHLGKCNIAGWILGNPECESLSTASSWSYIVETSSSDNGTCYPGDFIDYEELREQLSSVSSFERFEIFPKTSSWPNHDSNKGVTAACPHAGAKSFYKNLIWLVKKGNSYPKLSKSYINDKGKEVLVLWGIHHPSTSADQQSLYQNADAYVFVGSSRYSKKFKPEIAIRPKVRDQEGRMNYYWTLVEPGDKITFEATGNLVVPRYAFAMERNAGSGIIISDTPVHDCNTTCQTPKGAINTSLPFHNIHPITIGKCPKYVKSTKLRLATGLRNVPSIQSRGLFGAIAGFIEGGWTGMVDGWYGYHHQNEQGSGYAADLKSTQNAIDEITNKVNSVIEKMNTQFTAVGKEFNHLEKRIENLNKKVDDGFLDIWTYNAELLVLLENERTLDHHDSNVKNLYEKVRSQLKNNAKEIGNGCFEFYHKCDNTCMESVKNGTYDYPKYSEEAKLNREEIDGVKLESTRIYQILAIYSTVASSLVLVVSLGAISFWMCSNGSLQCRICI

SEQ ID NO: 4807 - protein, 566 aa, synthetic construct
  REGION 1..566: note = hemagglutinin__InfluenzaA__ADG27794
MKAILVVLLYTFATANADTLCIGYHANNSTDTVDTVLEKNVTVTHSVNLLEDKHNGKLCKLRGVAPLHLGKCNIAGWILGNPECESLSTASSWSYIVETSSSDNGTCYPGDFIDYEELREQLSSVSSFERFEIFPKTSSWPNHDSNKGVTAACPHAGAKSFYKNLIWLVKKGNSYPKLSKSYINDKGKEVLVLWGIHHPSTSADQQSLYQNADAYVFVGTSRYSKKFKPEIAIRPKVRDQEGRMNYYWTLVEPGDKITFEATGNLVVPRYAFAMERNAGSGIIISDTPVHDCNTTCQTPKGAINTSLPFQNIHPITIGKCPKYVKSTKLRLATGLRNVPSIQSRGLFGAIAGFIEGGWTGMVDGWYGYHHQNEQGSGYAADLKSTQNAIDEITNKVNSVIEKMNTQFTAVGKEFNHLEKRIENLNKKVDDGFLDIWTYNAELLVLLENERTLDYHDSNVKNLYEKVRSQLKNNAKEIGNGCFEFYHKCDNTCMESVKNGTYDYPKYSEEAKLNREEIDGVKLESTRTYQILAIYSTVASSLVLVVSLGAISFWMCSNGSLQCRICI

SEQ ID NO: 4808 - protein, 566 aa, synthetic construct; identical to SEQ ID NO: 2656
  REGION 1..566: note = hemagglutinin__InfluenzaA__ADG27948

SEQ ID NO: 4809 - protein, 566 aa, synthetic construct; identical to SEQ ID NO: 2656
  REGION 1..566: note = hemagglutinin__InfluenzaA__ADG27966

SEQ ID NO: 4810 - protein, 566 aa, synthetic construct
  REGION 1..566: note = hemagglutinin__InfluenzaA__ADG27974
MKAILVVLLYTFATANADTLCIGYHANNSTDTVDTVLEKNVTVTHSVNLLEDKHNGKLCKLRGVAPLHLGKCNIAGWILGNPECESLSTASSWSYIVETSSSDNGTCYPGDFIDYEELREQLSSVSSFERFEIFPKTSSWPNHDSNKGVTAACPHAGAKSFYKNLIWLVKKGNSYPKLSKSYINDKGKEVLVLWGIHHPSTSADQQSLYQNADAYVFVGSSRYSKKFKPEIAIRPKVRDQEGRMNYYWTLVEPGDKITFEATGNLVVPRYAFAMERNAGSGIIISDTPVHDCNTTCQTPKGAINTSLPFQNIHPITIGKCPKYVKSTKLRLATGLRNVPSIQSRGLFGAIAGFIEGGWTGMVDGWYGYHHQNEQGSGYAADLKSTQNAIDEITNKVNSVIEKMNTQFTAVGKEFNHLEKRIENLNKKVDDGFLDIWTYNAELLVLLENERTLDYHDSNVKNLYEKVRSQLKNNAKEIGNGCFEFYHKCDNTCMESVKNGTYDYPKYSEEAKLNREEIDGVKLESTRIYQILAIYSTVASSLILVVSLGAISFWMCSNGSLQCRICI

SEQ ID NO: 4811 - protein, 566 aa, synthetic construct
  REGION 1..566: note = hemagglutinin__InfluenzaA__ADG27982
MKAILVVLLYTFATANADTLCIGYHANNSTDTVDTVLEKNVTVTHSVNLLEDKHNGKLCKLRGVAPLHLGKCNIAGWILGNPECESLSTASSWSYIVETSSSDNGTCYPGDFIDYEELREQLSSVSSFERFEIFPKTSSWPNHDSNKGVTAACPHAGAKSFYKNLIWLVKKGNSYPKLSKSYINDKGKEVLVLWGIHHPSTSADQQSLYQNADAYVFVGSSRYSKKFKPEIAIRPKVRDQEGRMNYYWTLVEPGDKITFEATGNLVVPRYAFAMERNAGSGIIISDTPVHDCNTTCQTPKGAINTSLPFQNIHPITIGKCPKYVKSTKLRLATGLRNVPSIQSRGLFGAIAGFIEGGWTGMVDGWYGYHHQNEQGSGYAADLKSTQNAIDEITNKVNSVIEKMNTQFTAVGKEFNHLEKRIENLNKKVDDGFLDIWTYNAELLVLLENERTLDYHDSNVKKLYEKVRSQLKNNAKEIGNGCFEFYHKCDNTCMESVKNGTYDYPKYSEEAKLNREEIDGVKLESTRIYQILAIYSTVASSLVLVVSLGAISFWMCSNGSLQCRICI

SEQ ID NO: 4812 - protein, 566 aa, synthetic construct; identical to SEQ ID NO: 2656
  REGION 1..566: note = hemagglutinin__InfluenzaA__ADG27988

SEQ ID NO: 4813 - protein, 566 aa, synthetic construct; identical to SEQ ID NO: 2656
  REGION 1..566: note = hemagglutinin__InfluenzaA__ADG27997

SEQ ID NO: 4814 - protein, 566 aa, synthetic construct; identical to SEQ ID NO: 2656
  REGION 1..566: note = hemagglutinin__InfluenzaA__ADG28011

SEQ ID NO: 4815 - protein, 566 aa, synthetic construct; identical to SEQ ID NO: 4221
  REGION 1..566: note = hemagglutinin__InfluenzaA__ADG42093

SEQ ID NO: 4816 - protein, 566 aa, synthetic construct; identical to SEQ ID NO: 3833
  REGION 1..566: note = hemagglutinin__InfluenzaA__ADG42103

SEQ ID NO: 4817 - protein, 566 aa, synthetic construct; identical to SEQ ID NO: 3022
  REGION 1..566: note = hemagglutinin__InfluenzaA__ADG42113

SEQ ID NO: 4818 - protein, 566 aa, synthetic construct; identical to SEQ ID NO: 4221
  REGION 1..566: note = hemagglutinin__InfluenzaA__ADG42123

SEQ ID NO: 4819 - protein, 566 aa, synthetic construct
  REGION 1..566: note = hemagglutinin__InfluenzaA__ADG42133
MKAILVVLLYTFATANADTLCIGYHANNSTDTVDTVLEKNVTVTHSVNLLEDKHNGKLCKLRGVAPLHLGKCNIAGWILGNPECESLSTASSWSYIVETSSSDNGTCYPGDFIDYEELREQLSSVSSFERFEIFPKTSSWPNHDSNKGVTAACPYAGAKSFYKNLIWLVKKGNSYPKLSKSYINDKGKEVLVLWGIHHPSTSADQQSLYQNADAYVFVGTSRYSKKFKPEIAIRPKVRDQEGRMNYYWTLVEPGDKITFEATGNLVVPRYAFAMERNAGSGIIISDTPVHDCNTTCQTPKGAINTSLPFQNIHPITIGKCPKYVKSTKLRLVTGLRNVPSIQSRGLFGAIAGFIEGGWTGMVDGWYGYHHQNEQGSGYAADLKSTQHAIDEITNKVNSVIEKMNTQFTAVGKEFNHLEKRIENLNKKVDDGFLDIWTYNAELLVLLENERTLDYHDSNVKNLYEKVRSQLKNNAKEIGNGCFEFYHKCDNTCMESVKNGTYDYPKYSEEAKLNREEIDGVKLESTRIYQILAIYSTVASSLVLVVSLGAISFWMCSNGSLQCRICI

SEQ ID NO: 4820 - protein, 566 aa, synthetic construct
  REGION 1..566: note = hemagglutinin__InfluenzaA__ADG42143
MKAILVVLLYTFATANADTLCIGYHANNSTDTVDTVLEKNVTVTHSVNILEDKHNGKLCKLRGVAPLHLGKCNIAGWILGNPECESLSTASSWSYIVETSSSDNGTCYPGDFIDYEELREQLSSVSSFERFEIFPKTSSWPNHDSNKGVTAACPHAGAKSFYKNLIWLVKKGNSYPKLSKSYINDKGKEVLVLWGIHHPSTSADQQSLYQNADAYVFVGSSRYSKKFKPEIAIRPKVRDQEGRMNYYWTLVEPGDKITFEATGNLVVPRYAFAMEKNAGSGIIISDTPVHDCNTTCQTPKGAINTSLPFQNIHPITIGKCPKYVKSTKLRLATGLRNVPSIQSRGLFGAIAGFIEGGWTGMVDGWYGYHHQNEQGSGYAADLKSTQNAIDEITNKVNSVIEKMNTQFTAVGKEFNHLEKRIENLNKKVDDGFLDIWTYNAELLVLLENERTLDYHDSNVKNLYEKVRSQLKNNAKEVGNGCFEFYHKCDNTCMESVKNGTYDYPKYSEEAKLNREEIDGVKLESTRIYQILAIYSTAASSLVLVVSLGAISFWMCSNGSLQCRICI

SEQ ID NO: 4821 - protein, 566 aa, synthetic construct
  REGION 1..566: note = hemagglutinin__InfluenzaA__ADG42153
MKAILVVLLYTFATANADTLCIGYHANNSTDTVDTVLEKNVTVTHSVNLLEDKHNGKLCKLRGVAPLHLGKCNIAGWILGNPECESLSTASSWSYIVETSSSDNGTCYPGDFIDYEELREQLSSVSSFERFEIFPKTSSWPNHDSNKGITAACPHAGAKSFYKNLIWLVKKGNSYPKLSKSYINDKGKEVLVLWGIHHPSTSADQQSLYQNADAYVFVGTSRYSKKFKPEIAIRPKVRDQEGRMNYYWTLVEPGDKITFEATGNLVVPRYAFAMERNAGSGIIISDTPVLDCNTTCQTPKGAINTSLPFQNIHPITIGKCPKYVKSTKLRLATGLRNVPSIQSRGLFGAIAGFIEGGWTGMVDGWYGYHHQNEQGSGYAADLKSTQNAIDEITNKVNSVIEKMNTQFTAVGKEFNHLEKRIENLNKKVDDGFLDIWTYNAELLVLLENERTLDYHDSNVKNLYEKVRSQLKNNAKEIGNGCFEFYHKCDNTCMESVKNGTYDYPKYSEEAKLNREEIDGVKLESTRIYQILAIYSTVASSLVLVVSLGAISFWMCSNGSLQCRICI

SEQ ID NO: 4822 - protein, 566 aa, synthetic construct; identical to SEQ ID NO: 2669
  REGION 1..566: note = hemagglutinin__InfluenzaA__ADG42193

SEQ ID NO: 4823 - protein, 566 aa, synthetic construct; identical to SEQ ID NO: 2669
  REGION 1..566: note = hemagglutinin__InfluenzaA__ADG42213

SEQ ID NO: 4824 - protein, 566 aa, synthetic construct; identical to SEQ ID NO: 2669
  REGION 1..566: note = hemagglutinin__InfluenzaA__ADG42233

SEQ ID NO: 4825 - protein, 566 aa, synthetic construct
  REGION 1..566: note = hemagglutinin__InfluenzaA__ADG42243
MKAILVVLLYTFATANADTLCIGYHANNSTDTVDTVLEKNVTVTHSVNLLEDKHNGKLCKLRGVAPLHLGKCNIAGWILGNPECESLSTASSWSYIVETSSSDNGTCYPGDFIDYEELREQLSSVSSFERFEIFPKTSSWPNHDSNKGVTAACPHAGAKSFYKNLIWLVKKGNSYPKLSKSYINDKGKEVLVLWGIHHPSTSADQQSLYQNADAYVFVGTSRYSKKFKPEIAIRPKVRDQEGRMNYYWTLVEPGDKITFEATGNLVVPRYAFAMERNAGSGIIISDTPVLDCNTTCQTPKGAINTSLPFQNIHPITIGKCPKYVKSTKLRLATGLRNVPSIQSRGLFGAIAGFIEGGWTGMVDGWYGYHHQNEQGSGYAADLKSTQHAIDEITNKVNSVIEKMNTQFTAVGKEFNHLEKRIENLNKKVDDGFLDIWTYNAELLVLLENERTLDYHDSNVKNLYEKVRSQLKNNAKEIGNGCFEFYHKCDNTCMESVKNGTYDYPKYSEEAKLNREEIDGVKLESTRIYQILAIYSTVASSLVLVVSLGAISFWMCSNGSLQCRICI

SEQ ID NO: 4826 - protein, 566 aa, synthetic construct; identical to SEQ ID NO: 4089
  REGION 1..566: note = hemagglutinin__InfluenzaA__ADG42253

SEQ ID NO: 4827 - protein, 566 aa, synthetic construct; identical to SEQ ID NO: 2669
  REGION 1..566: note = hemagglutinin__InfluenzaA__ADG42263

SEQ ID NO: 4828 - protein, 566 aa, synthetic construct; identical to SEQ ID NO: 3770
  REGION 1..566: note = hemagglutinin__InfluenzaA__ADG42273

SEQ ID NO: 4829 - protein, 566 aa, synthetic construct; identical to SEQ ID NO: 3770
  REGION 1..566: note = hemagglutinin__InfluenzaA__ADG42283

SEQ ID NO: 4830 - protein, 566 aa, synthetic construct; identical to SEQ ID NO: 4352
  REGION 1..566: note = hemagglutinin__InfluenzaA__ADG42293

SEQ ID NO: 4831 - protein, 566 aa, synthetic construct
  REGION 1..566: note = hemagglutinin__InfluenzaA__ADG42303
MKAILVVLLYTFATANADTLCIGYHANNSTDTVDTVLEKNVTVTHSVNLLEDKHNGKLCKLKGVAPLHLGKCNIAGWILGNPECESLSTASSWSYIVETSSSDNGTCYPGDFIDYEELREQLSSVSSFERFEIFPKTSSWPNHDSNKGVTAACPHAGAKSFYKNLIWLVKKGNSYPKLSKSYINDKGKEVLVLWGIHHPSTSADQQSLYQNADAYVFVGTSRYSKKFKPEIAIRPKVRDQEGRMNYYWTLVEPGDKITFEATGNLVVPRYAFAMERNAGSGIVISDTPVHDCNTTCQTPKGAINTSLPFQNIHPITIGKCPKYVKSTKLRLATGLRNVPSIQSRGLFGAIAGFIEGGWTGMVDGWYGYHHQNEQGSGYAADLKSTQNAIDEITNKVNSVIEKMNTQFTAVGKEFNHLEKRIENLNKKVDDGFLDIWTYNAELLVLLENERTLDYHDSNVKNLYEKVRSQLKNNAKEIGNGCFEFYHKCDNTCMESVKNGTYDYPKYSEEAKLNREEIDGVKLESTRIYQILAIYSTVASSLVLVVSLGAISFWMCSNGSLQCRICI

SEQ ID NO: 4832 - protein, 566 aa, synthetic construct; identical to SEQ ID NO: 4379
  REGION 1..566: note = hemagglutinin__InfluenzaA__ADG42313

SEQ ID NO: 4833 - protein, 566 aa, synthetic construct
  REGION 1..566: note = hemagglutinin__InfluenzaA__ADG42323
MKAILVVLLYTFATANADTLCIGYHANNSTDTVDTVLEKNVTVTHSVNLLEDKHNGKLCKLRGVAPLHLGKCNIAGWILGNPECESLSTASSWSYIVETSSSDNGTCYPGDFIDYEELREQLSSVSSFERFEMFPKTSSWPNHDSNKGVTAACPHAGAKSFYKNLIWLVKKGNSYPKLSKSYINDKGKEVLVLWGIHHPSTSADQQSLYQNADAYVFVGTSRYSKKFKPEIAIRPKVRDQEGRMNYYWTLVEPGDKITFEATGNLVVPRYAFAMERNAGSGIIISDTPVHDCNTTCQTPKGAINTSLPFQNIHPITIGKCPKYVKSTKLRLATGLRNVPSIQSRGLFGAIAGFIEGGWTGMVDGWYGYHHQNEQGSGYAADLKSTQNAIDEITNKVNSVIEKMNTQFTAVGKEFNHLEKRIENLNKKVDDGFLDIWTYNAELLVLLENERTLDYHDSNVKNLYEKVRSQLKNNAKEVGNGCFEFYHKCDNTCMESVKNGTYDYPKYSEEAKLNREEIDGVKLESTRIYQILAIYSTVASSLVLVVSLGAISFWMCSNGSLQCRICI

SEQ ID NO: 4834 - protein, 566 aa, synthetic construct
  REGION 1..566: note = hemagglutinin__InfluenzaA__ADG42333
MKAILVVLLYTLATANADTLCIGYHANNSTDTVDTVLEKNVTVTHSVNLLEDKHNGKLCKLRGIAPLHLGKCNIAGWILGNPECESLSTASSWSYIVETSSSDNGTCYPGDFIDYEELREQLSSVSSFERFEIFPKTSSWPNHDSNKGVTAACPHAGAKSFYKNLIWLVKKGNSYPKLSKSYINDKGKEVLVLWGIHHPSTSADQQSLYQNADAYVFVGTSRYSKKFKPEIAIRPKVRDQEGRMNYYWTLVEPGDKITFEATGNLVVPRYAFAMERNAGSGIIISDAPVHDCNTTCQTPKGAINTSLPFQNIHPITIGKCPKYVKSTKLRLATGLRNVPSIQSRGLFGAIAGFIEGGWTGMVDGWYGYHHQNEQGSGYAADLKSTQNAIDEITNKVNSVIEKMNTQFTAVGKEFNHLEKRIENLNKKVDDGFLDIWTYNAELLVLLENERTLDYHDSNVKNLYEKVRSQLKNNAKEIGNGCFEFYHKCDNTCMESVKNGTYDYPKYSEEAKLNREEIDGVKLESTRIYQILAIYSTVASSLVLVVSLGAISFWMCSNGSLQCRICI

SEQ ID NO: 4835 - protein, 566 aa, synthetic construct
  REGION 1..566: note = hemagglutinin__InfluenzaA__ADG42343
MKAILVVLLYTFATANADTLCIGYHANNSTDTVDTVLEKNVTVTHSVNLLEDKHNGKLCKLRGVAPLHLGKCNIAGWILGNPECESLSTASSWSYIVETSSSDNGTCYPGDFIDYEELREQLSSVSSFERFEIFPKTSSWPNHDSNKGVTAACPHAGAKSFYKNLIWLVKKGNSYPKLSKSYINDKGKEVLVLWGIHHPSTSADQQSLYQNADAYVFVGTSRYSKKFKPEIAIRPKVRDQEGRMNYYWTLVEPGDKITFEATGNLVVPRYAFAMESNAGSGIIISDTPVHDCNTTCQTPKGAINTSLPFQNIHPITIGKCPKYVKSTKLRLATGLRNVPSIQSRGLFGAIAGFIEGGWTGMVDGWYGYHHQNEQGSGYAADLKSTQHAIDEITNKVNSVIEKMNTQFTAVGKEFNHLEKRIENLNKKVDDGFLDIWTYNAELLVLLENERTLDYHDSNVKNLYEKVRSQLKNNAKEIGNGCFEFYHKCDNTCMESVKNGTYDYPKYSEEAKLNREEIDGVKLESTRIYQILAIYSTVASSLVLVVSLGAISFWMCSNGSLQCRICI

SEQ ID NO: 4836 - protein, 566 aa, synthetic construct
  REGION 1..566: note = hemagglutinin__InfluenzaA__ADG42363
MKAILVVLLYTFATANADTLCIGYHANNSTDTVDTVLEKNVTVTHSVNLLEDKHNGKLCKLRGIAPLHLGKCNIAGWILGNPECESLSTASSWSYIVETSSSDNGTCYPGDFIDYEELREQLSSVSSFERFEIFPKTSSWPNHDSNKGVTAACPHAGAKSFYKNLIWLVKKGNSYPKLSKSYINDKGKEVLVLWGIHHPSTSADQQSLYQNADAYVFVGTSRYSKKFKPEIAIRPKVRDQEGRMNYYWTLVEPGDKITFEATGNLVVPRYAFAMERNAGSGIIISDTPVHDCNTTCQTPKGAINTSLPFQNIHPITIGKCPKYVKSTKLRLATGLRNVPSIQSRGLFGAIAGFIEGGWTGMVDGWYGYHHQNEQGSGYAADLKSTQNAIDEITNKVNSVIEKMNTQFTAVGKEFNHLEKRIENLNKKVDDGFLDIWTYNAELLVLLENERTLDYHDSNVKNLYEKVRSQLKNNAKEIGNGCFEFYHKCDNTCMESVKNGTYDYPKYSEEAKLNREEIDGVKLESTRIYQILAIYSTVASSLVLVVSLGAISFWMCSNGSLQCRICI

SEQ ID NO: 4837 - protein, 566 aa, synthetic construct
  REGION 1..566: note = hemagglutinin__InfluenzaA__ADG42373
MKAILVVLLYTFATANADTLCIGYHANNSTDTVDTVLEKNVTVTHSVNLLEDKHNGKLCKLRGVAPLHLGKCNIAGWILGNPECESLSTASSWSYIVETSSSDNGTCYPGDFIDYEELREQLSSVSSFERFEIFPKTSSWPNHDSNKGVTAACPHAGAKSFYKNLIWLVKKGNSYPKLSKSYINDKGKEVLVLWGIHHPSTSADQQSLYQNADAYVFVGTSRYSKKFKPEIAIRPKVRDQEGRMNYYWTLVEPGDKITFEATGNLVVPRYAFAMERNAGSGIIISDTPVHDCNTTCQTPKGAINTSLPFQNIHPITIGKCPKYVKSTKLRLATGLRNVPSIQSRGLFGAIAGFIEGGWTGMVDGWYGYHHQNEQGSGYAADLKSTQNAIDEITNKVNSVIEKMNTQFTAVGKEFNHLEKRIENLNKKVDDGFLDIWTYNAELLVLLENERTLDYHDSNVKNLYEKVRNQLKNNAKEIGNGCFEFYHKCDNTCMESVKNGTYDYPKYSEEAKLNREEIDGVKLESTRIYQILAIYSTVASSLVLVVSLGAISFWMCSNGSLQCRICI

SEQ ID NO: 4838 - protein, 566 aa, synthetic construct
  REGION 1..566: note = hemagglutinin__InfluenzaA__ADG42393
MKAILVVLLYTFATANADTLCIGYHANNSTDTVDTVLEKNVTVTHSVNLLEDKHNEKLCKLRGVAPLHLGKCNIAGWILGNPECESLSTASSWSYIVETSSSDNGTCYPGDFIDYEELREQLSSVSSFERFEIFPKTSSWPNHDSNKGVTAACPHAGAKSFYKNLIWLVKKGNSYPKLSKSYINDKGKEVLVLWGIHHPSTSADQQSLYQNADAYVFVGTSRYSKKFKPEIAIRPKVREQEGRMNYYWTLVEPGDKITFEATGNLVVPRYAFAMERNAGSGIIISDTPVHDCNTTCQTPKGAINTSLPFQNIHPITIGKCPKYVKSTKLRLATGLRNVPSIQSRGLFGAIAGFIEGGWTGMVDGWYGYHHQNEQGSGYAADLKSTQNAIDEITNKVNSVIEKMNTQFTAVGKEFNHLEKRIENLNKKVDDGFLDIWTYNAELLVLLENERTLDYHDSNVKNLYEKVRSQLKNNAKEIGNGCFEFYHKCDNTCMESVKNGTYDYPKYSEEAKLNREEIDGVKLESTRIYQILAIYSTVASSLVLLVSLGAISFWMCSNGSLQCRICI

SEQ ID NO: 4839 - protein, 566 aa, synthetic construct; identical to SEQ ID NO: 3833
  REGION 1..566: note = hemagglutinin__InfluenzaA__ADG42403

SEQ ID NO: 4840 - protein, 566 aa, synthetic construct; identical to SEQ ID NO: 4089
  REGION 1..566: note = hemagglutinin__InfluenzaA__ADG42413

SEQ ID NO: 4841 - protein, 566 aa, synthetic construct; identical to SEQ ID NO: 4836
  REGION 1..566: note = hemagglutinin__InfluenzaA__ADG42423

SEQ ID NO: 4842 - protein, 566 aa, synthetic construct; identical to SEQ ID NO: 4089
  REGION 1..566: note = hemagglutinin__InfluenzaA__ADG42443

SEQ ID NO: 4843 - protein, 566 aa, synthetic construct
  REGION 1..566: note = hemagglutinin__InfluenzaA__ADG42453
MKAILVVLLYTFATANADTLCIGYHANNSTDTVDTVLEKNVTVTHSVNILEDKHNGKLCKLRGVAPLHLGKCNIAGWILGNPECESLSTASSWSYIVETSSSDNGTCYPGDFIDYEELREQLSSVSSFERFEIFPKTSSWPNHDSNKGVTAACPHAGAKSFYKNLIWLVKKGNSYPKLSKSYINDKGKEVLVLWGIHHPSTSADQQSLYQNADAYVFVGTSRYSKKFKPEIAIRPKVRDQEGRMNYYWTLVEPGDKITFEATGNLVVPRYAFAMERNAGSGIIISDTPVHDCNTTCQTPKGAINTSLPFQNIHPITIGKCPKYVKSTKLRLATGLRNVPSIQSRGLFGAIAGFIEGGWTGMVDGWYGYHHQNEQGSGYAADLKSTQNAIDEITNKVNSVIEKMNTQFTAVGKEFNHLEKRVENLNKKVDDGFLDIWTYNAELLVLLENERTLDYHDSNVKNLYEKVRSQLKNNAKEIGNGCFEFYHKCDNTCMESVKNGTYDYPKYSEEAKLNREEIDGVKLESTRIYQILAIYSTVASSLVLVVSLGAISFWMCSNGSLQCRICI

SEQ ID NO: 4844 - protein, 566 aa, synthetic construct; identical to SEQ ID NO: 3022
  REGION 1..566: note = hemagglutinin__InfluenzaA__ADG42463

SEQ ID NO: 4845 - protein, 566 aa, synthetic construct; identical to SEQ ID NO: 2669
  REGION 1..566: note = hemagglutinin__InfluenzaA__ADG42473

SEQ ID NO: 4846 - protein, 566 aa, synthetic construct; identical to SEQ ID NO: 4089
  REGION 1..566: note = hemagglutinin__InfluenzaA__ADG42483

SEQ ID NO: 4847 - protein, 566 aa, synthetic construct; identical to SEQ ID NO: 4221
  REGION 1..566: note = hemagglutinin__InfluenzaA__ADG42493

SEQ ID NO: 4848 - protein, 566 aa, synthetic construct; identical to SEQ ID NO: 4282
  REGION 1..566: note = hemagglutinin__InfluenzaA__ADG42503

SEQ ID NO: 4849 - protein, 566 aa, synthetic construct; identical to SEQ ID NO: 3770
  REGION 1..566: note = hemagglutinin__InfluenzaA__ADG42513

SEQ ID NO: 4850 - protein, 566 aa, synthetic construct
  REGION 1..566: note = hemagglutinin__InfluenzaA__ADG42533
MKAILVVLLYTFATAKADTLCIGYHANNSTDTVDTVLEKNVTVTHSVNLLEDKHNGKLCKLRGVAPLHLGKCNIAGWILGNPECESLSTASSWSYIVETSSSDNGTCYPGDFIDYEELREQLSSVSSFERFEIFPKTSSWPNHDSNKGVTAACPHAGAKSFYKNLIWLVKKGNSYPKLSKSYINDKGKEVLVLWGIHHPSTSADQQSLYQNADAYVFVGTSRYSKKFKPEIAIRPKVRDQEGRMNYYWTLVEPGDKITFEATGNLVVPRYAFAMERNAGSGIIISDTPVHDCNTTCQTPKGAINTSLPFQNIHPITIGKCPKYVKSTKLRLATGLRNIPSIQSRGLFGAIAGFIEGGWTGMVDGWYGYHHQNEQGSGYAADLKSTQNAIDEITNKVNSVIEKMNTQFTAVGKEFNHLEKRIENLNKKVDDGFLDIWTYNAELLVLLENERTLDYHDSNVKNLYEKVRSQLKNNAKEIGNGCFEFYHKCDNTCMESVKNGTYDYPKYSEEAKLNREEIDGVKLESTRIYQILAIYSTVASSLVLVVSLGAISFWMCSNGSLQCRICI

SEQ ID NO: 4851 - protein, 566 aa, synthetic construct
  REGION 1..566: note = hemagglutinin__InfluenzaA__ADG42553
MKAILVVLLYTFATANADTLCIGYHANNSTDTVDTVLEKNVTVTHSVNLLEDKHNGKLCKLRGVAPLHLGKCNIAGWILGNPECESLSTASSWSYIVETSSSDNGTCYPGDFIDYEELREQLSSVSSFERFEIFPKTSSWPNHDSNKGVTAACSHAGAKSFYKNLIWLVKKGNSYPKLNKSYINDKGKEVLVLWGIHHPSTSADQQSLYQNADAYVFVGTSRYSKKFKPEIAIRPKVREQEGRMNYYWTLVEPGDKITFEATGNLVVPRYAFAMERNAGSGIIISDTPVHDCNTTCQTPKGAINTSLPFQNIHPITIGKCPKYVKSTKLRLATGLRNVPSIQSRGLFGAIAGFIEGGWTGMVDGWYGYHHQNEQGSGYAADLKSTQNAIDEITNKVNSVIEKMNTQFTAVGKEFNHLEKRIENLNKKVDDGFLDIWTYNAELLVLLENERTLDYHDSNVKNLYEKVRSQLKNNAKEIGNGCFEFYHKCDNTCMESVKNGTYDYPKYSEEAKLNREEIDGVKLESTRIYQILAIYSTVASSLVLVVSLGAISFWMCSNGSLQCRICI

SEQ ID NO: 4852 - protein, 566 aa, synthetic construct
  REGION 1..566: note = hemagglutinin__InfluenzaA__ADG42573
MKAILVVLLYTFATANADTLCIGYHANNSTDTVDTVLEKNVTVTHSVNLLEDKHNGKLCKLRGVAPLHLGKCNIAGWILGNPECESLSTASSWSYIVETSSSDNGTCYPGDFIDYEELREQLSSVSSFERFEIFPKTSSWPNHDSNKGVTAACPHAGAKSFYKNLIWLVKKGNSYPKLSKSYINDKGKEVLVLWGIHHPSTSADQQSLYQNADAYVFVGTSRYSKKFKPEIAIRPKVRDQEGRMNYYWTLIEPGDKITFEATGNLVVPRYAFAMERNAGSGIIISDTPVHDCNTTCQTPKGAINTSLPFQNIHPITIGKCPKYVKSTKLRLATGLRNVPSIQSRGLFGAIAGFIEGGWTGMVDGWYGYHHQNEQGSGYAADLKSTQNAIDEITNKVNSVIEKMNTQFTAVGKEFNHLEKRIENLNKKVDDGFLDIWTYNAELLVLLENERTLDYHDSNVKKLYEKVRSQLKNNAKEIGNGCFEFYHKCDNTCMESVKNGTYDYPKYSEEAKLNREEIDGVKLESTRIYQILAIYSTVASSLVLVVSLGAISFWMCSNGSLQCRICI

SEQ ID NO: 4853 - protein, 566 aa, synthetic construct
  REGION 1..566: note = hemagglutinin__InfluenzaA__ADG42583
MKAILVVLLYTFATANADTLCIGYHANNSTDTVDTVLEKNVTVTHSVNLLEDKHNGKLCKLRGVAPLHLGKCNIAGWILGNPECESLSTASSWSYIVETSSSDNGTCYPGDFIDYEELREQLSSVSSFERFEIFPKTSSWPNHDSNKGVTAACPHAGAKSFYKNLIWLVKKGNSYPKLSKSYINDKGKEVLVLWGIHHPSTSADQQSLYQNADSYVFVGTSRYSKKFKPEIAIRPKVRDQEGRMNYYWTLVEPGDKITFEATGNLVVPRYAFAMERNAGSGIIISDTPVHDCNTTCQTPKGAINTSLPFQNIHPITIGKCPKYVKSTKLRLATGLRNVPSIQSRGLFGAIAGFIEGGWTGMVDGWYGYHHQNEQGSGYAADLKSTQHAIDEITNKVNSVIEKMNTQFTAVGKEFNHLEKRIENLNKKVDDGFLDIWTYNAELLVLLENERTLDYHDSNVKNLYEKVRSQLKNNAKEIGNGCFEFYHKCDNTCMESVKNGTYDYPKYSEEAKLNREEIDGVKLESTRIYQILAIYSTVASSLVLVVSLGAISFWMCSNGSLQCRICI

SEQ ID NO: 4854 - protein, 566 aa, synthetic construct; identical to SEQ ID NO: 4266
  REGION 1..566: note = hemagglutinin__InfluenzaA__ADG42593

SEQ ID NO: 4855 - protein, 566 aa, synthetic construct
  REGION 1..566: note = hemagglutinin__InfluenzaA__ADG42603
MKAILVVLLYTFATANADTLCIGYHANNSTDTVDTVLEKNVTVTHSVNLLEDKHNGKLCKLRGVAPLHLGKCNIAGWILGNPECESLSTASSWSYIVETSSSDNGTCYPGDFIDYEELREQLSSVSSFERFEIFPKTSSWPNHDSNKGVTAACPHAGAKSFYKNLIWLVKKGNSYPKLRKSYINDKGKEVLVLWGIHHPSTSADQQSLYQNADAYVFVGTSRYSKKFKPEIATRPKVRDQEGRMNYYWTLVEPGDKITFEATGNLVVPRYAFAMERNAGSGIIISDTPVHDCNTTCQTPKGSINTSLPFQNIHPITIGKCPKYVKSTKLRLATGLRNVPSIQSRGLFGAIAGFIEGGWTGMVDGWYGYHHQNEQGSGYAADLKSTQHAIDEITNKVNSVIEKMNTQFTAVGKEFNHLEKRIENLNKKVDDGFLDIWTYNAELLVLLENERTLDYHDSNVKNLYEKVRSQLKNNAKEIGNGCFEFYHKCDNTCMESVKNGTYDYPKYSEEAKLNREEIDGVKLESTRIYQILAIYSTVASSLVLVVSLGAISFWMCSNGSLQCRICI

SEQ ID NO: 4856 - protein, 566 aa, synthetic construct
  REGION 1..566: note = hemagglutinin__InfluenzaA__ADG42613
MKAILVVLLYTFATANADTLCIGYHANNSTDTVDTVLEKNVTVTHSVNILEDKHNGKLCKLRGVAPLHLGKCNIAGWILGNPECESLSTASSWSYIVETSSSDNGTCYPGDFIDYEELREQLSSVSSFERFEIFPKTSSWPNHDSNKGVTAACPHAGAKSFYKNLIWLVKKGNSYPKLSKSYINDKGKEVLVLWGIHHPSTSADQQSLYQNADAYVFVGTSRYSKKFKPEIAIRPKVRDQEGRMNYYWTLVEPGDKITFEATGNLVVPRYAFAMERNAGSGIIISDTPVHDCNTTCQTPKGAINTSLPFQNIHPITIGKCPKYVKSTKLRLATGLRNVPSIQSRGLFGAIAGFIEGGWTGMVDGWYGYHHQNEQGSGYAADLKSTQNAIDEITNKVNSVIEKMNTQFTAVGKEFNHLEKRIENLNKKVDDGFLDIWTYNAELLVLLENERTLDYHDSNVKNLYEKVRSQLKNNAKEIGNGCFEFYHKCDNTCMESVKNGTYDYPKYSEEAKLNREKIDGVKLESTRIYQILAIYSTVASSLVLVVSLGAISFWMCSNGSLQCRICI

SEQ ID NO: 4857 - protein, 566 aa, synthetic construct; identical to SEQ ID NO: 4296
  REGION 1..566: note = hemagglutinin__InfluenzaA__ADG42623

SEQ ID NO: 4858 - protein, 566 aa, synthetic construct; identical to SEQ ID NO: 2669
  REGION 1..566: note = hemagglutinin__InfluenzaA__ADG42633

SEQ ID NO: 4859 - protein, 566 aa, synthetic construct
  REGION 1..566: note = hemagglutinin__InfluenzaA__ADG42643
MKAILVVLLYTFATANADTLCIGYHANNSTDTVDTVLEKNVTVTHSANLLEDKHNGKLCKLRGAAPLHLGKCNIAGWILGNPECESLSTASSWSYIVETSSSDNGTCYPGDFIDYEELREQLSSVSSFERFEMFPKTSSWPNHDSNKGVTAACPHAGAKSFYKNLIWLVKKGNSYPKLSKSYVNDKGKEVLVLWGIHHPSTSADQQSLYQNADAYVFVGTSRYSKKFKPEIAIRPKVRDQEGRMNYYWTLVEPGDKITFEATGNLVVPRYAFAMERNAGSGIIISDTPVHDCNTTCQTPKGAINTSLPFQNIHPITIGKCPKYVKSTKLRLATGLRNVPSIQSRGLFGAIAGFIEGGWTGMVDGWYGYHHQNEQGSGYAADLKSTQNAIDEITNKVNSVIEKMNTQFTAVGKEFNHLEKRIENLNKKVDDGFLDIWTYNAELLVLLENERTLDYHDSNVKNLYEKVRSQLKNNAKEIGNGCFEFYHKCDNTCMESVKNGTYDYPKYSEEAKLNREEIDGVKLESTRIYQILAIYSTVASSLVLVVSLGAISFWMCSNGSLQCRICI

SEQ ID NO: 4860 - protein, 566 aa, synthetic construct
  REGION 1..566: note = hemagglutinin__InfluenzaA__ADG42653
MKAILVVLLYTSATANADTLCIGYHANNSTDTVDTVLEKNVTVTHSVNLLEDKHNGKLCKLRGVAPLHLGKCNIAGWILGNPECESLSTASSWSYIVETSSSDNGTCYPGDFIDYEELREQLSSVSSFERFEMFPKTSSWPNHDSNKGVTAACPHAGAKSFYKNLIWLVKKGNSYPKLSKSYINDKGKEVLVLWGIHHPSTSADQQSLYQNADAYVFVGTSRYSKKFKPEIAIRPKVRDQEGRMNYYWTLVEPGDKITFEATGNLVVPRYAFAMERNAGSGIIISDTPVHDCNTTCQTPKGAINTSLPFQNIHPITIGKCPKYVKSTKLRLATGLRNVPSIQSRGLFGAIAGFIEGGWTGMVDGWYGYHHQNEQGSGYAADLKSTQNAIDEITNKVNSVIEKMNTQFTAVGKEFNHLEKRIENLNKKVDDGFLDIWTYNAELLVLLENERTLDYHDSNVKNLYEKVRSQLKNNAKEIGNGCFEFYHKCDNTCMESVKNGTYDYPKYSEEAKLNREEIDGVKLESTRIYQILAIYSTVASSLVLVVSLGAISFWMCSNGSLQCRICI

SEQ ID NO: 4861 - protein, 566 aa, synthetic construct; identical to SEQ ID NO: 3833
  REGION 1..566: note = hemagglutinin__InfluenzaA__ADG42663

SEQ ID NO: 4862 - protein, 566 aa, synthetic construct
  REGION 1..566: note = hemagglutinin__InfluenzaA__ADG42673
MKAILVVLLYTFATANADTLCIGYHANNSTDTVDTVLEKNVTVTHSVNLLEDKHNGKLCKLKGVAPLHLGKCNIAGWILGNPECESLSTAGSWSYIVETSSSDNGTCYPGDFIDYEELREQLSSVSSFERFEIFPKTSSWPNHDSNKGVTAACPHAGAKSFYKNLIWLVKKGNSYPKLSKSYINDKGKEVLVLWGIHHPSTSADQQSLYQNADAYVFVGTSRYSKKFKPEIAIRPKVRDQEGRMNYYWTLVEPGDKITFEATGNLVVPRYAFAMERNAGSGIIISDTPVHDCNTTCQTPKGAINTSLPFQNIHPITIGKCPKYVKSTKLRLATGLRNVPSIQSRGLFGAIAGFIEGGWTGMVDGWYGYHHQNEQGSGYAADLKSTQNAIDGITNKVNSVIEKMNTQFTAVGKEFNHLEKRIENLNKKVDDGFLDIWTYNAELLVLLENERTLDYHDSNVKNLYEKVRSQLKNNAKEIGNGCFEFYHKCDNTCMESVKNGTYDYPKYSEEAKLNREEIDGVKLESTRIYQILAIYSTVASSLVLVVSLGAISFWMCSNGSLQCRICI

SEQ ID NO: 4863 - protein, 566 aa, synthetic construct
  REGION 1..566: note = hemagglutinin__InfluenzaA__ADG42683
MKAILVVLLYTFATANADTLCIGYHANNSTDTVDTVLEKNVTVTHSVNILEDKHNGKLCKLRGVAPLHLGKCNIAGWILGNPECESLSTASSWSYIVETSSSDNGTCYPGNFIDYEELREQLSSVSSFERFEIFPKTSSWPNHDSNKGVTAACPHAGAKSFYKNLIWLVKKGNSYPKLSKSYINDKGKEVLVLWGIHHPSTSADQQSLYQNADAYVFVGTSRYSKKFKPEIAIRPKVRDQEGRMNYYWTLVEPGDKITFEATGNLVVPRYAFAMERNAGSGIIISDTPVHDCNTTCQTPKGAINTSLPFQNIHPITIGKCPKYVKSTKLRLATGLRNVPSIQSRGLFGAIAGFIEGGWTGMVDGWYGYHHQNEQGSGYAADLKSTQNAIDEITNKVNSVIEKMNTQFTAVGKEFNHLEKRIENLNKKVDDGFLDIWTYNAELLVLLENERTLDYHDSNVKNLYEKVRSQLKNNAKEIGNGCFEFYHKCDNTCMESVKNGTYDYPKYSEEAKLNREEIDGVKLESTRIYQILAIYSTVASSLVLVVSLGAISFWMCSNGSLQCRICI

SEQ ID NO: 4864 - protein, 566 aa, synthetic construct; identical to SEQ ID NO: 3833
  REGION 1..566: note = hemagglutinin__InfluenzaA__ADG42693

SEQ ID NO: 4865 - protein, 566 aa, synthetic construct; identical to SEQ ID NO: 4541
  REGION 1..566: note = hemagglutinin__InfluenzaA__ADG42703

SEQ ID NO: 4866 - protein, 566 aa, synthetic construct
  REGION 1..566: note = hemagglutinin__InfluenzaA__ADG42723
MKAILVVLLYTFATANADTLCIGYHANNSTDTVDTVLEKNVTVTHSVNLLEDKHNGKLCKLRGVAPLHLGKCNIAGWILGNPECESLSTASSWSYIVETSSSDNGTCYPGDFIDYEELREQLSSVSSFERFEIFPKTSSWPNHDSNKGVTAACPHAGAKSFYKNLIWLVKKGNSYPKLSKSYINDKGKEVLVLWGIHHPSTSADQQSLYQNADAYVFVGTSRYSKKFKPEMAIRPKVRDQEGRMNYYWTLVEPGDKITFEATGNLVVPRYAFAMERNAGSGIIISDTPVHDCNTTCQTPKGAINTSLPFQNIHPITIGKCPKYVKSTKLRLATGLRNVPSIQSRGLFGAIAGFIEGGWTGMVDGWYGYHHQNEQGSGYAADLKSTQNAIDKITNKVNSVIEKMNTQFTAVGKEFNHLEKRIENLNKKVDDGFLDIWTYNAELLVLLENERTLDYHDSNVKNLYEKVRSQLKNNAKEIGNGCFEFYHKCDNTCMESVKNGTYDYPKYSEEAKLNREEIDGVKLESTRIYQILAIYSTVASSLVLVVSLGAISFWMCSNGSLQCRICI

SEQ ID NO: 4867 - protein, 566 aa, synthetic construct; identical to SEQ ID NO: 4296
  REGION 1..566: note = hemagglutinin__InfluenzaA__ADG42743

SEQ ID NO: 4868 - protein, 566 aa, synthetic construct
  REGION 1..566: note = hemagglutinin__InfluenzaA__ADG42753
MKAILVVLLYTFATANADTLCIGYHANNSTDTVDTVLEKNVTVTHSVNLLEDKHNGKLCKLRGVAPLHLGKCNIAGWILGNPECESLSTASSWSYIVETSSSDNGTCYPGDFIDYEELREQLSSVSSFERFEIFPKTSSWPNHDSNKGVTAACPHAGAKSFYKNLIWLVKKGNSYPKLSKSYINDKGKEVLVLWGIHHPSTSTDQQSLYQNADAYVFVGTSRYSKKFKPEIAIRPKVRDQEGRMNYYWTLVEPGDKITFEATGNLVVPRYAFAMERNSGSGIIISDTPVHDCNTTCQTPKGAINTSLPFQNIHPITIGKCPKYVKSTKLRLATGLRNVPSIQSRGLFGAIAGFIEGGWTGMVDGWYGYHHQNEQGSGYAADLKSTQNAIDEITNKVNSVIEKMNTQFTAVGKEFNHLEKRIENLNKKVDDGFLDIWTYNAELLVLLENERTLDYHDSNVKNLYEKVRSQLKNNAKEIGNGCFEFYHKCDNTCMESVKNGTYDYPKYSEEAKLNREEIDGVKLESTRIYQILAIYSTVASSLVLVVSLGAISFWMCSNGSLQCRICI

SEQ ID NO: 4869 - protein, 566 aa, synthetic construct; identical to SEQ ID NO: 3833
  REGION 1..566: note = hemagglutinin__InfluenzaA__ADG42763

SEQ ID NO: 4870 - protein, 566 aa, synthetic construct; identical to SEQ ID NO: 3833
  REGION 1..566: note = hemagglutinin__InfluenzaA__ADG42773

SEQ ID NO: 4871 - protein, 566 aa, synthetic construct
  REGION 1..566: note = hemagglutinin__InfluenzaA__ADG42783
MKAILVVLLYTFATANADTLCIGYHANNSTDTVDTVLEKNVTVTHSVNLLEDKHNGKLCKLRGVAPLHLGKCNIAGWILGNPECESLSTASSWSYIVETSSSDNGTCYPGDFIDYEELREQLSSVSSFERFEMFPKTSSWPNHDSNKGVTAACPHAGAKSFYKNLIWLVKKGNSYPKLSKSYINDKGKEVLVLWGIHHPSTSTDQQSLYQNADAYVFVGTSRYSKKFKPEIAIRPKVRDQEGRMNYYWTLVEPGDKITFEATGNLVVPRYAFAMERNAGSGIIISDTPVHDCNTTCQTPKGAINTSLPFQNIHPITIGKCPKYVKSTKLRLATGLRNVPSIQSRGLFGAIAGFIEGGWTGMVDGWYGYHHQNEQGSGYAADLKSTQNAIDKITNKVNSVIEKMNTQFTAVGKEFNHLEKRIENLNKKVDDGFLDIWTYNAELLVLLENERTLDYHDSNVKNLYEKVRSQLKNNAKEIGNGCFEFYHKCDNTCMESVKNGTYDYPKYSEEAKLNREEIDGVKLESTRIYQILAIYSTVASSLVLVVSLGAISFWMCSNGSLQCRICI

SEQ ID NO: 4872 - protein, 566 aa, synthetic construct; identical to SEQ ID NO: 3833
  REGION 1..566: note = hemagglutinin__InfluenzaA__ADG42793

SEQ ID NO: 4873 - protein, 566 aa, synthetic construct; identical to SEQ ID NO: 4871
  REGION 1..566: note = hemagglutinin__InfluenzaA__ADG42803

SEQ ID NO: 4874 - protein, 566 aa, synthetic construct; identical to SEQ ID NO: 4221
  REGION 1..566: note = hemagglutinin__InfluenzaA__ADG42813

SEQ ID NO: 4875 - protein, 566 aa, synthetic construct; identical to SEQ ID NO: 4364
  REGION 1..566: note = hemagglutinin__InfluenzaA__ADG42823

SEQ ID NO: 4876 - protein, 566 aa, synthetic construct; identical to SEQ ID NO: 4266
  REGION 1..566: note = hemagglutinin__InfluenzaA__ADG42833

SEQ ID NO: 4877 - protein, 566 aa, synthetic construct; identical to SEQ ID NO: 3833
  REGION 1..566: note = hemagglutinin__InfluenzaA__ADG42843

SEQ ID NO: 4878 - protein, 566 aa, synthetic construct; identical to SEQ ID NO: 3833
  REGION 1..566: note = hemagglutinin__InfluenzaA__ADG42853

SEQ ID NO: 4879 - protein, 566 aa, synthetic construct; identical to SEQ ID NO: 4387
  REGION 1..566: note = hemagglutinin__InfluenzaA__ADG42863

SEQ ID NO: 4880 - protein, 566 aa, synthetic construct; identical to SEQ ID NO: 4407
  REGION 1..566: note = hemagglutinin__InfluenzaA__ADG42883

SEQ ID NO: 4881 - protein, 566 aa, synthetic construct
  REGION 1..566: note = hemagglutinin__InfluenzaA__ADG42893
MKAILVVLLYTFATANADTLCIGYHANNSTDTVDTVLEKNVTVTHSVNLLEDKHNGKLCKLRGVAPLHLGKCNIAGWILGNPECESLSTASSWSYIVETSSSDNGTCYPGDFIDYEELREQLSSVSSFERFEIFPKTSSWPNHDSNKGVTAACPHAGAKSFYKNLIWLVKKGNSYPKLSKSYINDKGKEVLVLWGIHHPSTSADQQSLYQNADAYVFVGTSRYSKKFKPEIAIRPKVRDQEGRMNYYWTLVEPGDKITFEATGNLVVPRYAFAMERNAGSGIIISDTPVHDCNTTCQTPKGAINTSLPFQNIHPITIGKCPKYVKSTNLRLATGLRNVPSIQSRGLFGAIAGFIEGGWTGMVDGWYGYHHQNEQGSGYAADLKSTQNAIDEITNKVNSVIEKMNTQFTAVGKEFNHLEKRIENLNKKVDDGFLDIWTYNAELLVLLENERTLDYHDSNVKNLYEKVRSQLKNNAKEIGNGCFEFYHKCDNTCMESVKNGTYDYPKYSEEAKLNREEIDGVKLESTRIYQILAIYSTVASSLVLVVSLGAISFWMCSNGSLQCRICI

SEQ ID NO: 4882 - protein, 566 aa, synthetic construct; identical to SEQ ID NO: 2669
  REGION 1..566: note = hemagglutinin__InfluenzaA__ADG42903

SEQ ID NO: 4883 - protein, 566 aa, synthetic construct; identical to SEQ ID NO: 3833
  REGION 1..566: note = hemagglutinin__InfluenzaA__ADG42913

SEQ ID NO: 4884 - protein, 566 aa, synthetic construct; identical to SEQ ID NO: 4397
  REGION 1..566: note = hemagglutinin__InfluenzaA__ADG42923

SEQ ID NO: 4885 - protein, 566 aa, synthetic construct
  REGION 1..566: note = hemagglutinin__InfluenzaA__ADG57087
MKAILVVLLYTFATANADTLCIGYHANNSTDTVDTVLEKNVTVTHSVNLLEDKHNGKLCKLRGVAPLHLGKCNIAGWILGNPECESLSTASSWSYIVETSSSDNGTCYPGDFIDYEELREQLSSVSSFERFEIFPKTSSWPNHDSNKGVTAACPHAGAKSFYKNLIWLVKKGNSYPKLSKSYINDKGKEVLVLWGIHHPSTSADQQSLYQNADAYVFVGTSRYSKKFKPEIAIRPKVRDQEGRMNYYWTLVEPGDKITFEATGNLVVPRYAFAMERNAGSGIIISDTPVHDCNTTCQTPKGAINTSLPFQNIHPITIGKCPKYVKSTKLRLATGLRNVPSIQSRGLFGAIAGFIEGGWTGMVDGWYGYHHQNEQGSGYAADLKSTQNAIDEITNKVNSVIEKMNTQFTAVGKEFNHLEKRIENLNKKVDDGFLDIWTYNAELLVLLENERTLDYHDSNVKNLYEKVRSQLKNNAKEIGNGCFEFYHKCDNTCMESVKNGTYDYPKYSEEAKLNREEIDGVKLESTRIYQILAIYSTVAISLVLVVSLGAISFWMCSNGSLRCRICI

SEQ ID NO: 4886 - protein, 566 aa, synthetic construct; identical to SEQ ID NO: 2669
  REGION 1..566: note = hemagglutinin__InfluenzaA__ADG57088

SEQ ID NO: 4887 - protein, 566 aa, synthetic construct
  REGION 1..566: note = hemagglutinin__InfluenzaA__ADG57089
MEAILVVLLYTFATANADTLCIGYHANNSTDTVDTVLEKNVTVTHSVNLLEDKHNGKLCKLRGVAPLHLGKCNIAGWILGNPECESLSTASSWSYIVETSSSDNGTCYPGDFIQYEELREQLSSVSSFERFEIFPKTSSWPNHDSNKGVTAACPHAGAKSFYKNLIWLVKKGNSYPKLSKSYINDKGKEVLVLWGIHHPSTSADQQSLYQNADAYVFVGSSRYSKKFKPEIAIRPKVRDQEGRMNYYWTLVEPGDKITFEATGNLVVPRYAFAMERNAGSGIIISDTPVHDCNTTCQTPKGAINTSLPFHNIHPITIGKCPKYVKSTKLRLATGLRNVPSIQSRGLFGAIAGFIEGGWTGMVDGWYGYHHQNEQGSGYAADLKSTQNAIDEITNKVNSVIEKMNTQFTAVGKEFNHLEKRIENLNKKVDDGFLDIWTYNAELLVLLENERTLDYHDSNVKNLYEKVRSQLKNNAEEIGNGCFEFYHKCDNTCMESVKNGTYDYPKYSEEAKLNREEIDGVKLESTRIYQILAIYSTVASSLVLVVSLGAISFWMCSNGSLQCRICI

SEQ ID NO: 4888 - protein, 566 aa, synthetic construct
  REGION 1..566: note = hemagglutinin__InfluenzaA__ADG57090
MKAILVVLLYTFATANADTLCIGYHANNSTDTVDTVLEKNVTVTHSVNLLEDKHNGKLCKLRGVAPLHLGKCNIAGWILGNPECESLSTASSWSYIVETSSSDNGTCYPGDFIDYEELREQLSSVSSFERFEIFPKTSSWPNHDSNKGVTAACPHAGAKSFYKNLIWLVKKGNSYPKLSKSYINDKGKEVLVLWGIHHPSTSADQQSIYQNADAYVFVGTSRYSKKFKPEIAIRPKVRDQEGRMNYYWTLVEPGDKITFEATGNLVVPRYAFAMERNAGSGIIISDTPVHDCNTTCQTPKGAINTSLPFQNIHPITIGKCPKYVKSTKLRLATGLRNVPSIQSRGLFGAIAGFIEGGWTGMVDGWYGYHHQNEQGSGYAADLKSTQNAIDEITNKVNSVIEKMNTQFTAVGKEFNHLEKRIENLNKKVDDGFLDIWTYNAQLLVLLENERTLDYHDSNVKNLYEKVRSQLKNNAKEIGNGCFEFYHKCDNTCMESVKNGTYDYPKYSEEAKLNREEIDGVKLESTRIYQILAIYSTVASSLVLVVSLGAISFWMCSNGSLQCRICI

SEQ ID NO: 4889 - protein, 566 aa, synthetic construct
  REGION 1..566: note = hemagglutinin__InfluenzaA__ADG57091
MEAILVVLLYTFATANADTLCIGYHANNSTDTVDTVLEKNVTVTHSVNLLEDKHNGKLCKLRGVAPLHLGKCNIAGWILGNPECESLSTASSWSYIVETSSSDNGTCYPGDFIDYEELREQLSSVSSFERFEIFPKTSSWPNHDSNKGVTAACPHAGAKSFYKNLIWLVKKGNSYPKLSKSYINDKGKEVLVLWGIHHPSTSADQQSLYQNADAYVFVGSSRYSKKFKPEIAIRPKVRDQEGRMNYYWTLVEPGDKITFEATGNLVVPRYAFAMERNAGSGIIISDTPVHDCNTTCQTPKGAINTSLPFHNIHPITIGKCPKYVKSTKLRLATGLRNVPSIQSRGLFGAIAGFIERGWTGMVDGWYGYHHQNEQGSGYAADLKSTQNAIDEITNKVNSVIEKMNTQFTAVGKEFNHLEKRIENLNKKVDDGFLDIWTYNAELLVLLENERTLDYHDSNVKNLYEKVRSQLKNNAKEIGNGCFEFYHKCDNTCMESVKNGTYDYPKYSEEAKLNREEIDGVKLESTRIYQILAIYSTVASSLVLVVSLGAISFWMCSNGSLQCRICI

SEQ ID NO: 4890 - protein, 566 aa, synthetic construct
  REGION 1..566: note = hemagglutinin__InfluenzaA__ADG57092
MKAILVVLLYTFATANADTLCIGYHANNSTDTVDTVLEKNVTVTHSVNLLEDKHNGKLCKLRGVAPLHLGKCNIAGWILGNPECESLSTASSWSYIVETSSSDNGTCYPGDFIDYEELREQLSSVSSFERFEIFPKTSSWPNHDSNKGVTAACPHAGAKSFYKNLIWLVKKGNSYPKLIKSYINDKGKEVLVLWGIHHPSTSADQQSLYQNADAYVFVGTSRYSKKFKPEIAIRPKVRDQEGRMNYYWTLVEPGDKITFEATGNLVVPRYAFAMERNAGSGIIISDTPVHDCNTTCQTPKGAINTSLPFQNIHPITIGKCPKYVKSTKLRLATGLRNVPSIQSRGLFGAIAGFIEGGWTGMVDGWYGYHHQNEQGSGYAADLKSTQNAIDEITNKVNSVIEKMNTQFTAVGKEFNHLEKRIENLNKKVDDGFLDIWTYNAELLVLLENERTLDYHDSNVKNLYEKVRSQLKNNAKEIGNGCFEFYHKCDNTCMESVKNGTYDYPKYSEEAKLNREEIDGVKLESTRIYQILAIYSTVASSLVLVVSLGAISFWMCSNGSLQCRICI

SEQ ID NO: 4891 - protein, 566 aa, synthetic construct
  REGION 1..566: note = hemagglutinin__InfluenzaA__ADG57093
MEAILVVLLYTFATANADTLCIGYHANNSTDTVDTVLEKNVTVTHSVNLLEDKHNGKLCKLRGVAPLHLGKCNIAGWILGNPECESLSTASSWSYIVETSSSDNGTCYPGDFIDYEELREQLSSVSSFERFEIFPKTSSWPNHDSNKGVTAACPHAGAKSFYKNLIWLVKKGNSYPKLSKSYINDKGKEILVLWGIHHPSTSADQQSLYQNADAYVFVWSSRYSKKFKPEIAIRPKVRDQEGRMNYYWTLVEPGDKITFEATGNLLVPRYAFAMERNAGSGIIISDTPVHDCNTTCQTPKGAINTSLPFHNIHPITIGKCPKYVKSTKLRLATGLRNVPSIQSRGLFGAIAGFIEGGWTGMVDGWYGYHHQNEQGSGYAADLKSTQNAIDEITNKVNSVIEKMNTQFTAVGKEFNHLEKRIENLNKKVDDGFLDIWTYNAELLVLLENERTLDYHDSNVKNLYEKVRSQLKNNAKEIGNGCFEFYHKCDNTCMESVKNGTYDYPKYSEEAKLNREEIDGVKLESTRIYQILAIYSTVASSLVLVVSLGAISFWMCSNGSLQCRICI

SEQ ID NO: 4892 - protein, 566 aa, synthetic construct
  REGION 1..566: note = hemagglutinin__InfluenzaA__ADG57094
MKAILVVLLYTFATANADTLCVGYHANNSTDTVDTVLEKNVTVTHSVNLLEDKHNGKLCKLRGVAPLHLGKCNIAGWILGNPECESLSTASSWSYIVETSSSDNGTCYPGDFIDYEELREQLSSVSSFERFEIFPKTSSWPNHDSNKGVTAACPHAGAKSFYKNLIWLVKKGNSYPKLSKSYINDKGKEVLVLWGIHHPSTSADQQSLYQNADAYVFVGTSRYSKKFKPEIAIRPKVRDREGRMNYYWTLVEPGDKITFEATGNLVVPRYAFAMERNAGSGIIISDTPVHDCNTTCQTPKGAINTSLPFQNIHPITIGKCPKYVKSTKLRLATGLRNVPSIQSRGLFGAIAGFIEGGWTGMVDGWYGYHHQNEQGSGYAADLKSTQNAIDEITNKVNSVIEKMNTQFTAVGKEFNHLEKRIENLNKKVDDGFLDIWTYNAELLVLLENERTLDYHDSNVKNLYEKVRSQLKNNAKEIGNGCFEFYHKCDNTCMESVKNGTYDYPKYSEEAKLNREEIDGVKLESTRIYQILAIYSTVASSLVLVVSLGAISFWMCSNGSLQCRICI

SEQ ID NO: 4893 - protein, 566 aa, synthetic construct; identical to SEQ ID NO: 2669
  REGION 1..566: note = hemagglutinin__InfluenzaA__ADG57095

SEQ ID NO: 4894 - protein, 566 aa, synthetic construct
  REGION 1..566: note = hemagglutinin__InfluenzaA__ADG57097
MEAILVVLLYTFATANADTLCIGYHANNSTDTVDTVLEKNVTVTHSVNLLEDKHNGKLCKLRGVAPLHLGKCNIAGWILGNPECESLSTASSWSYIVETSSSDNGTCYPGDFIDYEELREQLSSVSSFERFEIFPKTSSWPNHDSNKGVTAACPHAGAKSFYKNLIWLVKKGNSYPKLSKSYINDKGKEVLVLWGIHHPSTSADQQSLYQNADAYVFVGSSRYSKKFKPEIAIRPKVRGQEGRMNYYWTLVEPGDKITFEATGNLVVPRYAFAMERNAGSGIIISDTPVHDCNTTCQTPKGAINTSLPFHNIHPITIGKCPKYVKSTKLRLATGLRNVPSIQSRGLFGAIAGFIEGGWTGMVDGWYGYHHQNEQGSGYAADLKSTQNAIDEITNKVNSVIEKMNTQFTAVGKEFNHLEKRIENLNKKVDDGFLDIWTYNAELLVLLENERTLDYHDSNVKNLYEKVRSQLKNNAKEIGNGCFEFYHKCDNTCMESVKNGTYDYPKYSEEAKLNREEIDGVKLESTRIYQILAIYSTVASSLVLVVSLGAISFWMCSNGSLQCRICI

SEQ ID NO: 4895 - protein, 566 aa, synthetic construct; identical to SEQ ID NO: 3833
  REGION 1..566: note = hemagglutinin__InfluenzaA__ADG57098

SEQ ID NO: 4896 - protein, 566 aa, synthetic construct
  REGION 1..566: note = hemagglutinin__InfluenzaA__ADG57099
MKAILVVLLYTFATANADTLCIGYHANNSTDTVDTVLEKNVTVTHSVNLLEDKHNGKLCKLRGVAPLHLGKCNIAGWILGNPECESLSTASSWSYIVETSSSDNGTCYPGDFIDYEELREQLSSVSSFERFEIFPKTSSWPNHDSNKGVTAACPHAGAKSFYKNLIWLVKKGNSYPKLSKSYINDKGKEVLVLWGIHHPSTSADQQSLYQNADAYVFVGTSRYSKKFKPEIAIRPKVRDQEGRMNYHWTLVEPGDKITFEATGNLVVPRYAFAMERNAGSGIIITDTPVHDCNTTCQTPKGAVNTSLPFQNIHPITIGKCPKYVKSTKLRLATGLRNVPSIQSRGLFGAIAGFIEGGWTGMVDGWYGYHHQNEQGSGYAADLKSTQNAIDKITNKVNSVIEKMNTQFTAVGKEFNHLEKRIENLNKKVDDGFLDIWTYNAELLVLLENERTLDYHDSNVKNLYEKVRSQLKNNAKEIGNGCFEFYHKCDNTCMESVKNGTYDYPKYSEEAKLNREEIDGVKLESTRIYQILAIYSTVASSLVLVVSLGAISFWMCSNGSLQCRICI

SEQ ID NO: 4897 - protein, 566 aa, synthetic construct
  REGION 1..566: note = hemagglutinin__InfluenzaA__ADG57100
MKAILVVLLYTFATANADTLCIGYHANNSTDTVDTVLEKNVTVTHSVNLLEDKHNGKLCKLRGVAPLHLGKCNIAGWILGNPECESLSTASSWSYIVETSSSDNGTCYPGDFIDYEELREQLSSVSSFERFEIFPKTSSWPNHDSNKGVTAACPHAGAKSFYKNLIWLVKKGNSYPKLSKSYINDKGKEVLVLWGIHHPSTSADQQSLYQNADAYVFVGTSRYSKKFKPEIAIRPKVRDQEGRMNYYWTLVEPGDKITFEATGNLVVPRYAFAMERNAGSGIIISDTPVHDCNTTCQTPKGAINTSLPFQNIHPITIGKCPKYVKSTKLRLATGLRNVPSIQSRGLFGAIAGFIEGGWTGMVDGWYGYHHQNEQGSGYAADLKSTQNAIDKITNKVNSVIEKMNTQFTAGGKEFNHLEKRIENLNKKVDDGFLDIWTYNAELLVLLENERTLDYHDSNVKNLYEKVRSQLKNNAKEIGNGCFEFYHKCDNTCMESVKNGTYDYPKYSEEAKLNREEIDGVKLESTRIYQILAIYSTVASSLVLVVSLGAISFWMCSNGSLQCRICI

SEQ ID NO: 4898 - protein, 566 aa, synthetic construct; identical to SEQ ID NO: 2669
  REGION 1..566: note = hemagglutinin__InfluenzaA__ADG58939

SEQ ID NO: 4899 - protein, 566 aa, synthetic construct; identical to SEQ ID NO: 2669
  REGION 1..566: note = hemagglutinin__InfluenzaA__ADG58940

SEQ ID NO: 4900 - protein, 566 aa, synthetic construct
  REGION 1..566: note = hemagglutinin__InfluenzaA__ADG58941
MKAILVVLLYTFATANADTLCIGYHANNSTDTVDTVLEKNVTVTHSVNLLEDKHNGKLCKLRGVAPLHLGKCNIAGWILGNPECESLSTASSWSYIVETSSSDNGTCYPGDFIDYEELREQLSSVSSFERFEIFPKTSSWPNHDSNKGVTAACPHAGAKSFYKNLIWLVKKGNSYPKLSKSYINDKGKEVLVLWGIHHPSTSADQQSLYQNADTYVFVGTSRYSKKFKPEIAIRPKVRDQEGRMNYYWTLVEPGDKITFEATGNLVVPRYAFAMERNAGSGIIISDTPVHDCNTTCQTPKGAINTSLPFQNIHPITIGKCPKYVKSTKLRLATGLRNVPSIQSRGLFGAIAGFIEGGWTGMVDGWYGYHHENEQGSGYAADLKSTQNAIDEITNKVNSVIEKMNTQFTAVGKEFNHLEKRIENLNKKIDDGFLDIWTYNAELLVLLENERTLDYHDSNVKNLYEKVRSQLKNNAKEIGNGCFEFYHKCDNTCMESVKNGTYDYPKYSEEAKLNREEIDGVKLESTRIYQILAIYSTVASSLVLVVSLGAISFWMCSNGSLQCRICI

SEQ ID NO: 4901 - protein, 566 aa, synthetic construct
  REGION 1..566: note = hemagglutinin__InfluenzaA__ADG58942
MKAILVVLLYTFATANADTLCIGYHANNSTDTVDTVLEKNVTVTHSVNLLEDKHNGKLCKLRGVAPLHLGKCNIAGWILGNPECESLSTASSWSYIVETSSSDNGTCYPGDFIDYEELREQLSSVSSFERFEIFPKTSSWPNHDSNKGVTAACPHAGAKSFYKNLIWLVKKGNSYPKLSKSYINDKGKEVLVLWGIHHPSTSADQQSLYQNADTYVFVGTSRYSKKFKPEIAIRPKVRDQEGRMNYYWTLVEPGDKITFEATGNLVVPRYAFAMERNAGSGIIISDTPVHDCNTTCQTPKGAINTSLPFQNIHPITIGKCPKYVKSTKLRLATGLRNVPSIQSRGLFGAIAGFIEGGWTGMVDGWYGYLHQNEQGSGYAADLKSTQNAIDEITNKVNSVIEKMNTQFTAVGKEFNHLEKRIENLNKKIDDGFLDIWTYNAELLVLLENERTLDYHDSNVKNLYEKVRSQLKNNAKEIGNGCFEFYHKCDNTCMESVKNGTYDYPKYSEEAKLNREEIDGVKLESTRIYQILAIYSTVASSLVLVVSLGAISFWMCSNGSLQCRICI

SEQ ID NO: 4902 - protein, 566 aa, synthetic construct; identical to SEQ ID NO: 2669
  REGION 1..566: note = hemagglutinin__InfluenzaA__ADG58943

SEQ ID NO: 4903 - protein, 566 aa, synthetic construct
  REGION 1..566: note = hemagglutinin__InfluenzaA__ADG58944
MKAILVVLLYTFATANADTLCIGYHANNSTDTVDTVLEKNVTVTHSVNLLEDKHNGKLCKLRGVAPLHLGKCNIAGWILGNPECESLSTASSWSYIVETSSSDNGTCYPGDFIDYEELREQLSSVSSFERFEIFPKTSSWPNHDSNKGVTAACPHAGAKSFYKNLIWLVKKGNSYPKLSKSYINDKGKEVLVLWGIHHPSTSADQQSLYQNADAYVFVGTSRYSKKFKPEIAIRPKVRDQEGRMNYYWTLVEPGDKITFEATGNLLVPRYAFAMERNAGSGIIISDTPVHDCNTTCQTPKGAINTSLPFQNIHPITIGKCPKYVKSTKLRLATGLRNVPSIQSRGLFGAIAGFIEGGWTGMVDGWYGYHHQNEQGSGYAADLKSTQNAIDEITNKVNSVIEKMNTQFTAVGKEFNHLEKRIENLNKKVDDGFLDIWTYNAELLVLLENERTLDYHDSNVKNLYEKVRSQLKNNAKEIGNGCFEFYHKCDNTCMESVKNGTYDYPKYSEEAKLNREEIDGVKLESTRIYQILAIYSTVASSLVLVVSLGAISFWMCSNGSLQCRICI

SEQ ID NO: 4904 - protein, 566 aa, synthetic construct; identical to SEQ ID NO: 3467
  REGION 1..566: note = hemagglutinin__InfluenzaA__ADG58946

SEQ ID NO: 4905 - protein, 566 aa, synthetic construct; identical to SEQ ID NO: 2669
  REGION 1..566: note = hemagglutinin__InfluenzaA__ADG58947

SEQ ID NO: 4906 - protein, 566 aa, synthetic construct
  REGION 1..566: note = hemagglutinin__InfluenzaA__ADG58948
MKAILIVLLYTFATANADTLCIGYHANNSTDTVDTVLEKNVTVTHSVNLLEDKHNGKLCKLRGVAPLHLGKCNIAGWILGNPECESLSTASSWSYIVETSSSDNGTCYPGDFIDYEELREQLSSVSSFERFEIFPKTSSWPNHDSNKGVTAACPHAGAKSFYKNLIWLVKKGNSYPKLSKSYINDKGKEVLVLWGIHHPSTSADQQSLYQNADTYVFVGTSRYSKKFKPEIAIRPKVRDQEGRMNYYWTLVEPGDKITFEATGNLVVPRYAFAMERNAGSGIIISDTPVHDCNTTCQTPKGAINTSLPFQNIHPITIGKCPKYVKSTKLRLATGLRNVPSIQSRGLFGAIAGFIEGGWTGMVDGWYGYHHQNEQGSGYAADLKSTQNAIDEITNKVNSVIEKMNTQFTAVGKEFNHLEKRIENLNKKIDDGFLDIWTYNAELLVLLENERTLDYHDSNVKNLYEKVRSQLKNNAKEIGNGCFEFYHKCDNTCMESVKNGTYDYPKYSEEAKLNREEIDGVKLESTRIYQILAIYSTVASSLVLVVSLGAISFWMCSNGSLQCRICI

SEQ ID NO: 4907 - protein, 566 aa, synthetic construct
  REGION 1..566: note = hemagglutinin__InfluenzaA__ADG58949
MKAILVVLLYTFATANADTLCIGYHANNSTDTVDTVLEKNVTVTHSVNLLEDKHNGKLCKLRGVAPLHLGKCNIAGWILGNPECESLSTASSWSYIVETSSSDNGTCYPGDFIDYEELREQLSSVSSFERFEIFPKTSSWPNHDSNKGVTAACPHAGAKSFYKNLIWLVKKGNSYPKLSKSYINDKGKEVLVLWGIHHPSTSADQQSLYQNADTYVFVGTSRYSKKFKPEIAIRPKVRDQEGRMNYYWTLVEPGDKITFEATGNLVVPRYAFAMERNAGSGIIISDTSVHDCNTTCQTPKGAINTSLPFQNIHPITIGKCPKYVKSTKLRLATGLRNVPSIQSRGLFGAIAGFIEGGWTGMVDGWYGYHHQNEQGSGYAADLKSTQNAIDEITNKVNSVIEKMNTQFTAVGKEFNHLEKRIENLNKKIDDGFLDIWTYNAELLVLLENERTLDYHDSNVKNLYEKVRSQLKNNAKEIGNGCFEFYHKCDNTCMESVKNGTYDYPKYSEEAKLNREEIDGVKLESTRIYQILAIYSTVASSLVLVVSLGAISFWMCSNGSLQCRICI

SEQ ID NO: 4908 - protein, 566 aa, synthetic construct
  REGION 1..566: note = hemagglutinin__InfluenzaA__ADG58951
MKAILVVLLHTFATANADTLCIGYHANNSTDTVDTVLEKNVTVTHSVNLLEDKHNGKLCKLRGVAPLHLGKCNIAGWILGNPECESLSTASSWSYIVETSNSGNGTCYPGEFIDYEELREQLSSVSSFERFEIFPKTSSWPNHDSNKGVTAACPHAGAKSFYKNLIWLVKKGNSYPKLSKSYINDKGKEVLVLWGIHHPSTSADQQSLYQNADAYVFVGTSRYSKKFKPEIAIRPKVRDQEGRMNYYWTLVEPGDKITFEATGNLVVPRYAFAMERNAGSGIIISDTPVHDCNTTCQTPKGAINTSLPFQNIHPITIGKCPKYVKSTKLRLATGLRNVPSIQSRGLFGAIAGFIEGGWTGMVDGWYGYHHQNEQGSGYAADLKSTQNAIDEITNKVNSVIEKMNTQFTAVGKEFNHLEKRIENLNKKVDDGFLDIWTYNAELLVLLENERTLDYHDSNVKNLYEKVRSQLKNNAKEIGNGCFEFYHKCDNTCIESVKNGTYDYPKYSEEAKLNREEIDGVKLESTRIYQILAIYSTVASSLVLVVSLGAISFWMCSNGSLQCRICI

SEQ ID NO: 4909 - protein, 566 aa, synthetic construct; identical to SEQ ID NO: 4908
  REGION 1..566: note = hemagglutinin__InfluenzaA__ADG58952

SEQ ID NO: 4910 - protein, 566 aa, synthetic construct; identical to SEQ ID NO: 4908
  REGION 1..566: note = hemagglutinin__InfluenzaA__ADG58953

SEQ ID NO: 4911 - protein, 566 aa, synthetic construct; identical to SEQ ID NO: 4908
  REGION 1..566: note = hemagglutinin__InfluenzaA__ADG58954

SEQ ID NO: 4912 - protein, 566 aa, synthetic construct; identical to SEQ ID NO: 4908
  REGION 1..566: note = hemagglutinin__InfluenzaA__ADG58955

SEQ ID NO: 4913 - protein, 566 aa, synthetic construct; identical to SEQ ID NO: 4908
  REGION 1..566: note = hemagglutinin__InfluenzaA__ADG58956

SEQ ID NO: 4914 - protein, 566 aa, synthetic construct
  REGION 1..566: note = hemagglutinin__InfluenzaA__ADG58957
MKAILVVLLHTFATANADTLCIGYHANNSTDTVDTVLEKNVTVTHSVNLLEDKHNGKLCKLRGVAPLHLGKCNIAGWILGNPECESLSTASSWSYIVETSNSGNGTCYPGEFIDYEELREQLSSVSSFERFEIFPKTSSWPNHDSNKGVTAACPHAGAKSFYKNLIWLVKKGNSYPKLSKSYINDKGKEVLVLWGIHHPSTSADQQSLYQNADAYVFVGTSRYSKKFKPEIAIRPKVRDQEGRMNYYWTLVEPGDKITFEATGNLVVPRYAFAMERNAGSGIIISDTPVHDCNTTCQTPKGAINTSLPFQNIHPITIGKCPKYVKSTKLRLATGLRNVPSIQSRGLFGAIAGFIEGGWTGMVDGWYGYHHQNEQGSGYAADLKSTQNAIDEITNKVNSVIEKMNTQFTAVGKEFNHLEKRIENLNKKVDDGFLDIWTYNAELLVLLENERTLDYHDSNVKNLYEKVRSQLKNNAKEIGNGCFEFYHKCDNTCMESVKNGTYDYPKYSEEAKLNREEIDGVKLESTRIYQILAIYSTVASSLVLVVSLGAISFWMCSNGSLQCRICI

SEQ ID NO: 4915 - protein, 566 aa, synthetic construct
  REGION 1..566: note = hemagglutinin__InfluenzaA__ADG58959
MKAILVVLLYTFATANADTLCIGYHANNSTDTVDTVLEKNVTVTHSVNLLEDKHNGKLCKLRGVAPLHLGKCNIAGWILGNPECESLSTANSWSYIVETSSSDNGTCYPGDFIDYEELREQLSSVSSFERFEIFPKTSSWPNHDSNKGVTAACPHAGAKSFYKNLIWLVKKGNSYPKLSKSYINDKGKEVLVLWGIHHPSTSADQQSLYQNADAYVFVGTSRYSKKFKPEIAIRPKVRDQEGRMNYYWTLVEPGDKITFEATGNLVVPRYAFAMERNAGSGIIISDTPVHDCNTTCQTPKGAINTSLPFQNIHPITIGKCPKYVKSTKLRLATGLRNVPSIQSRGLFGAIAGFIEGGWTGMVDGWYGYHHQNEQGSGYAADLKSTQNAIDEITNKVNSVIEKMNTQFTAVGKEFNHLEKRIENLNKKVDDGFLDIWTYNAELLVLLENERTLDYHDSNVKNLYEKVRSQLKNNAKEIGNGCFEFYHKCDNTCMESVKNGTYDYPKYSEEAKLNREEIDGVKLESTRIYQILAIYSTVASSLVLVVSLGAISFWMCSNGSLQCRICI

SEQ ID NO: 4916 - protein, 566 aa, synthetic construct; identical to SEQ ID NO: 4833
  REGION 1..566: note = hemagglutinin__InfluenzaA__ADG58960

SEQ ID NO: 4917 - protein, 566 aa, synthetic construct; identical to SEQ ID NO: 4833
  REGION 1..566: note = hemagglutinin__InfluenzaA__ADG58961

SEQ ID NO: 4918 - protein, 566 aa, synthetic construct; identical to SEQ ID NO: 4833
  REGION 1..566: note = hemagglutinin__InfluenzaA__ADG58962

SEQ ID NO: 4919 - protein, 566 aa, synthetic construct; identical to SEQ ID NO: 4833
  REGION 1..566: note = hemagglutinin__InfluenzaA__ADG58963

SEQ ID NO: 4920 - protein, 566 aa, synthetic construct; identical to SEQ ID NO: 4833
  REGION 1..566: note = hemagglutinin__InfluenzaA__ADG58964

SEQ ID NO: 4921 - protein, 566 aa, synthetic construct; identical to SEQ ID NO: 4833
  REGION 1..566: note = hemagglutinin__InfluenzaA__ADG58965

SEQ ID NO: 4922 - protein, 566 aa, synthetic construct; identical to SEQ ID NO: 4833
  REGION 1..566: note = hemagglutinin__InfluenzaA__ADG58966

SEQ ID NO: 4923 - protein, 566 aa, synthetic construct; identical to SEQ ID NO: 4833
  REGION 1..566: note = hemagglutinin__InfluenzaA__ADG58967

SEQ ID NO: 4924 - protein, 566 aa, synthetic construct; identical to SEQ ID NO: 4833
  REGION 1..566: note = hemagglutinin__InfluenzaA__ADG58968

SEQ ID NO: 4925 - protein, 566 aa, synthetic construct; identical to SEQ ID NO: 2669
  REGION 1..566: note = hemagglutinin__InfluenzaA__ADG59628

SEQ ID NO: 4926 - protein, 566 aa, synthetic construct; identical to SEQ ID NO: 2669
  REGION 1..566: note = hemagglutinin__InfluenzaA__ADG59629

SEQ ID NO: 4927 - protein, 566 aa, synthetic construct; identical to SEQ ID NO: 2669
  REGION 1..566: note = hemagglutinin__InfluenzaA__ADG59630

SEQ ID NO: 4928 - protein, 566 aa, synthetic construct; identical to SEQ ID NO: 2669
  REGION 1..566: note = hemagglutinin__InfluenzaA__ADG59631

SEQ ID NO: 4929 - protein, 566 aa, synthetic construct; identical to SEQ ID NO: 2669
  REGION 1..566: note = hemagglutinin__InfluenzaA__ADG59632

SEQ ID NO: 4930 - protein, 566 aa, synthetic construct; identical to SEQ ID NO: 3770
  REGION 1..566: note = hemagglutinin__InfluenzaA__ADG59633

SEQ ID NO: 4931 - protein, 566 aa, synthetic construct; identical to SEQ ID NO: 3770
  REGION 1..566: note = hemagglutinin__InfluenzaA__ADG59634

SEQ ID NO: 4932 - protein, 566 aa, synthetic construct; identical to SEQ ID NO: 2669
  REGION 1..566: note = hemagglutinin__InfluenzaA__ADG59635

SEQ ID NO: 4933 - protein, 566 aa, synthetic construct
  REGION 1..566: note = hemagglutinin__InfluenzaA__ADG59636
MKAILVVLLYTFATANADTLCIGYHANNSTDTVDTVLEKNVTVTHSVNLLEDKHNGKLCKLRGVAPLHLGKCNIAGWILGNPECESLSTASSWSYIVETSSSDNGTCYPGDFIDYEELREQLSSVSSFERFEIFPKTSSWPNHDSNKGVTAACPHAGAKSFYKNLIWLVKKGNSYPKLSKSYINDKGKEVLVLWGIHHPSTSADQQSLYQNADAYVFVGTSRYSKKFKPEIAIRPKVRGQEGRMNYYWTLVEPGDKITFEATGNLVVPRYAFAMERNAGSGIIISDTPVHDCNTTCQTPKGAINTSLPFQNIHPITIGKCPKYVKSTKLRLATGLRNIPSIQSRGLFGAIAGFIEGGWTGMVDGWYGYHHQNEQGSGYAADLKSTQNAIDEITNKVNSVIEKMNTQFTAVGKEFNHLEKRIENLNKKVDDGFLDIWTYNAELLVLLENERTLDYHDSNVKNLYEKVRSQLKNNAKEIGNGCFEFYHKCDNTCMESVKNGTYDYPKYSEEAKLNREEIDGVKLESTRIYQILAIYSTVASSLVLVVSLGAISFWMCSNGSLQCRICI

SEQ ID NO: 4934 - protein, 566 aa, synthetic construct; identical to SEQ ID NO: 3417
  REGION 1..566: note = hemagglutinin__InfluenzaA__ADG59638

SEQ ID NO: 4935 - protein, 566 aa, synthetic construct; identical to SEQ ID NO: 3770
  REGION 1..566: note = hemagglutinin__InfluenzaA__ADG59639

SEQ ID NO: 4936 - protein, 566 aa, synthetic construct; identical to SEQ ID NO: 3022
  REGION 1..566: note = hemagglutinin__InfluenzaA__ADG59641

SEQ ID NO: 4937 - protein, 566 aa, synthetic construct; identical to SEQ ID NO: 3512
  REGION 1..566: note = hemagglutinin__InfluenzaA__ADG59643

SEQ ID NO: 4938 - protein, 566 aa, synthetic construct; identical to SEQ ID NO: 2656
  REGION 1..566: note = hemagglutinin__InfluenzaA__ADG59644

SEQ ID NO: 4939 - protein, 566 aa, synthetic construct; identical to SEQ ID NO: 2669
  REGION 1..566: note = hemagglutinin__InfluenzaA__ADG59646

SEQ ID NO: 4940 - protein, 566 aa, synthetic construct; identical to SEQ ID NO: 3770
  REGION 1..566: note = hemagglutinin__InfluenzaA__ADG59647

SEQ ID NO: 4941 - protein, 566 aa, synthetic construct; identical to SEQ ID NO: 3833
  REGION 1..566: note = hemagglutinin__InfluenzaA__ADG59648

SEQ ID NO: 4942 - protein, 566 aa, synthetic construct; identical to SEQ ID NO: 3833
  REGION 1..566: note = hemagglutinin__InfluenzaA__ADG59649

SEQ ID NO: 4943 - protein, 566 aa, synthetic construct; identical to SEQ ID NO: 3833
  REGION 1..566: note = hemagglutinin__InfluenzaA__ADG59650

SEQ ID NO: 4944 - protein, 566 aa, synthetic construct; identical to SEQ ID NO: 3833
  REGION 1..566: note = hemagglutinin__InfluenzaA__ADG59651

SEQ ID NO: 4945 - protein, 566 aa, synthetic construct; identical to SEQ ID NO: 2669
  REGION 1..566: note = hemagglutinin__InfluenzaA__ADG59652

SEQ ID NO: 4946 - protein, 566 aa, synthetic construct; identical to SEQ ID NO: 2669
  REGION 1..566: note = hemagglutinin__InfluenzaA__ADG59653

SEQ ID NO: 4947 - protein, 566 aa, synthetic construct; identical to SEQ ID NO: 4933
  REGION 1..566: note = hemagglutinin__InfluenzaA__ADG59655

SEQ ID NO: 4948 - protein, 566 aa, synthetic construct; identical to SEQ ID NO: 3770
  REGION 1..566: note = hemagglutinin__InfluenzaA__ADG59656

SEQ ID NO: 4949 - protein, 566 aa, synthetic construct
  REGION 1..566: note = hemagglutinin__InfluenzaA__ADG59657
MKAILVVLLYTFATANADTLCIGYHANNSTDTVDTVLEKNVTVTHSVNLLEDKHNGKLCKLRGVAPLHLGKCNIAGWILGNPECESLSTASSWSYIVETSSSDNGTCYPGDFIDYEELREQLSSVSSFERFEIFPKTSSWPNHDSNKGVTAACPHAGAKSFYKNLIWLVKKGNSYPKLSKSYINDKGKEVLVLWGIHHPSTSADQQSLYQNADAYVFVGSSKYSKKFKPEIAIRPKVRDQEGRMNYYWTLVEPGDKITFEATGNLVVPRYAFAMERNAGSGIIISDTPVHDCNTTCQTPKGAINTSLPFQNIHPITIGKCPKYVKSTKLRLATGLRNVPSTQSRGLFGAIAGFIEGGWTGMVDGWYGYHHQNEQGSGYAADLKSTQNAIDEITNKVNSVIEKMNTQFTAVGKEFNHLEKRIENLNKKVDDGFLDIWTYNAELLVLLENERTLDYHDSNVKNLYEKVRSQLKNNAKEIGNGCFEFYHKCDNTCMESVKNGTYDYPKYSEEAKLNREEIDGVKLESTRIYQILAIYSTVASSLVLVVSLGAISFWMCSNGSLQCRICI

SEQ ID NO: 4950 - protein, 566 aa, synthetic construct
  REGION 1..566: note = hemagglutinin__InfluenzaA__ADG59658
MKAILVVLLYTFATANADTLCIGYHANNSTDTIDTVLEKNVTVTHSVNLLEDKHNGKLCKLRGVAPLHLGKCNIAGWILGNPECESLSTASSWSYIVETSSSDNGTCYPGDFIDYEELREQLSSVSSFERFEIFPKTSSWPNHDSNKGVTAACPHAGAKSFYKNLIWLVKKGNSYPKLSKSYINDKGKEVLVLWGIHHPSTSADQQSLYQNADAYVFVGTSRYSKKFKPEIAIRPKVRNQEGRMNYYWTLVEPGDKITFEATGNLVVPRYAFAMERNAGSGIIISDTPVHDCNTTCQTPKGAINTSLPFQNIHPITIGKCPKYVKSTKLRLATGLRNIPSIQSRGLFGAIAGFIEGGWTGMVDGWYGYHHQNEQGSGYAADLKSTQNAIDEITNKVNSVIEKMNTQFTAVGKEFNHLEKRIENLNKKVDDGFLDIWTYNAELLVLLENERTLDYHDSNVKNLYEKVRSQLKNNAKEIGNGCFEFYHKCDNTCMESVKNGTYDYPKYSEEAKLNREEIDGVKLESTRIYQILAIYSTVASSLVLVVSLGAISFWMCSNGSLQCRICI

SEQ ID NO: 4951 - protein, 566 aa, synthetic construct; identical to SEQ ID NO: 3116
  REGION 1..566: note = hemagglutinin__InfluenzaA__ADG59659

SEQ ID NO: 4952 - protein, 566 aa, synthetic construct; identical to SEQ ID NO: 3116
  REGION 1..566: note = hemagglutinin__InfluenzaA__ADG59660

SEQ ID NO: 4953 - protein, 566 aa, synthetic construct; identical to SEQ ID NO: 3022
  REGION 1..566: note = hemagglutinin__InfluenzaA__ADG59662

SEQ ID NO: 4954 - protein, 566 aa, synthetic construct
  REGION 1..566: note = hemagglutinin__InfluenzaA__ADG59663
MKAILVVLLYTFATANADTLCIGYHANNSTDTVDTVLEKNVTVTHSVNLLEDKHNGKLCKLRGVAPLHLGKCNIAGWILGNPECESLSTASSWSYIVETSSSDNGTCYPGDFIDYEELREQLSSVSSFERFEIFPKTSSWPNHDSNKGVTAACPHAGAKSFYKNLIWLVKKGNSYPKLSKSYINDKGKEVLVLWGIHHPSTSADQQSLYQNADAYVFVGTSRYSKKFKPEIAIRPKVRDQEGRMNYYWTLVEPGDKITFEATGNLVVPRYAFAMERNAGSGIIISDTPFHDCNTTCQTPKGAINTSLPFQNIHPITIGKCPKYVKSTKLRLATGLRNIPSIQSRGLFGAIAGFIEGGWTGMVDGWYGYHHQNEQGSGYAADLKSTQNAIDEITNKVNSVIEKMNTQFTAVGKEFNHLEKRIENLNKKVDDGFLDIWTYNAELLVLLENERTLDYHDSNVKNLYEKVRSQLKNNAKEIGNGCFEFYHKCDNTCMESVKNGTYDYPKYSEEAKLNREEIDGVKLESTRIYQILAIYSTVASSLVLVVSLGAISFWMCSNGSLQCRICI

SEQ ID NO: 4955 - protein, 566 aa, synthetic construct; identical to SEQ ID NO: 3022
  REGION 1..566: note = hemagglutinin__InfluenzaA__ADG59664

SEQ ID NO: 4956 - protein, 566 aa, synthetic construct
  REGION 1..566: note = hemagglutinin__InfluenzaA__ADG59666
MKAILVVLLYTFATANADTLCIGYHANNSTDTVDTVLEKNVTVTHSVNLLEDKHNGKLCKLRGVAPLHLGKCNIAGWILGNPECESLSTASSWSYIVETSSSDNGTCYPGDFIDYEELREQLSSVSSFERFEIFPKTSSWPNHDSNKGVTAACPHAGAKSFYKNLIWLVKKGNSYPKLSKSYINDKGKEVLVLWGIHHPSTSADQQSLYQNADAYVFVGTSRYSKKFKPEIAIRPKVRDQEGRMNYYWTLVEPGDKITFEATGNLVVPRYAFAMERDAGSGIIISDTPVHDCNTTCQTPKGAINTSLPFQNIHPITIGKCPKYVKSTKLRLATGLRNVPSIQSRGLFGAIAGFIEGGWTGMVDGWYGYHHQNEQGSGYAADLKSTQNAIDEITNKVNSVIEKMNTQFTAVGKEFNHLEKRIENLNKKIDDGFLDIWTYNAELLVLLENERTLDYHDSNVKNLYEKVRSQLKNNAKEIGNGCFEFYHKCDNTCMESVKNGTYDYPKYSEEAKLNREEIDGVKLESTRIYQILAIYSAVASSLVLVVSLGAISFWMCSNGSLQCRICI

SEQ ID NO: 4957 - protein, 566 aa, synthetic construct; identical to SEQ ID NO: 3771
  REGION 1..566: note = hemagglutinin__InfluenzaA__ADG59667

SEQ ID NO: 4958 - protein, 566 aa, synthetic construct
  REGION 1..566: note = hemagglutinin__InfluenzaA__ADG59669
MKAILVVLLYTFATANADTLCIGYHANNSTDTVDTVLEKNVTVTHSVNLLEDKHNGKLCKLRGVAPLHLGKCNIAGWILGNPECESLSTASSWSYIVETSSSDNGTCYPGDFIDYEELREQLSSVSSFERFEIFPKTSSWPNHDSNKGVTAACPHAGAKSFYKNLIWLVKKGNSYPKLSKSYINDKGKEVLVLWGIHHPSTSADQQSLYQNADAYVFVGTSRYSKKFKPEIAIRPKVREQEGRMNYYWTLVDPGDKITFEATGNLVVPRYAFAMERNAGSGIIISDTPVHDCNTTCQTPKGAINTSLPFQNIHSITIGKCPKYVKSTKLRLATGLRNVPSIQSRGLFGAIAGFIEGGWTGMVDGWYGYHHQNEQGSGYAADLKSTQNAIDEITNKVNSVIEKMNTQFTAVGKEFNHLEKRIENLNKKVDDGFLDIWTYNAELLVLLENERTLDYHDSNVKNLYEKVRSQLKNNAKEIGNGCFEFYHKCDNTCMESVKNGTYDYPKYSEEAKLNREEIDGVKLESTRIYQILAIYSTVASSLVLVVSLGAISFWMCSNGSLQCRICI

SEQ ID NO: 4959 - protein, 566 aa, synthetic construct; identical to SEQ ID NO: 4958
  REGION 1..566: note = hemagglutinin__InfluenzaA__ADG59670

SEQ ID NO: 4960 - protein, 566 aa, synthetic construct; identical to SEQ ID NO: 4958
  REGION 1..566: note = hemagglutinin__InfluenzaA__ADG59671

SEQ ID NO: 4961 - protein, 566 aa, synthetic construct; identical to SEQ ID NO: 4958
  REGION 1..566: note = hemagglutinin__InfluenzaA__ADG59672

SEQ ID NO: 4962 - protein, 566 aa, synthetic construct
  REGION 1..566: note = hemagglutinin__InfluenzaA__ADG59673
MKAILVVLLYTFATANADTLCIGYHANNSTDTVDTVLEKNVTVTHSVDLLEDKHNGKLCKLRGVAPLHLGECNIAGWILGNPECESLSTASSWSYIVETSSSDNGTCYPGDFIDYEELREQLSSVSSFERFEIFPKTSSWPNHDSNKGVTAACPHAGAKSFYKNLIWLVKKGNSYPKLSKSYINDKGKEVLVLWGIHHPSTSADQQSLYQNADAYVFVGTSRYSKKFKPEIAIRPKVRDQEGRMNYYWTLVEPGDKITFEATGNLVVPRYAFAMERNAGSGIIISDTPVHDCNTTCQTPKGAINTSLPFQNIHPITIGKCPKYVKSTKLRLATGLRNVPSIQSRGLFGAIAGFIEGGWTGMVDGWYGYHHQNEQGSGYAADLKSTQNAIDEITNKVNSVIEKMNTQFTAVGKEFNHLEKRIENLNKKVDDGFLDIWTYNAELLVLLENERTLDYHDSNVKNLYEKVRSQLKNNAKEIGNGCFEFYHKCDNTCMESVKNGTYDYPKYSEEAKLNREEIDGVKLESTRIYQILAIYSTVASSLVLVVSLGAISFWMCSNGSLQCRICI

SEQ ID NO: 4963 - protein, 566 aa, synthetic construct
  REGION 1..566: note = hemagglutinin__InfluenzaA__ADG59674
MKAILVVLLYTFATANADTLCVGYHANNSTDTVDTVLEKNVTVTHSVNLLEDKHNGKLCKLRGVAPLHLGKCNIAGWILGNPECESLSTASSWSYIVETSSSDNGTCYPGDFIDYEELREQLSSVSSFERFEIFPKTSSWPNHDSNKGVTAACPHAGAKSFYKNLIWLVKKGNSYPKLSKSYINDKGKEVLVLWGIHHPSTSADQQSLYQNADAYVFVGTSRYSKKFKPEIAIRPKVREQEGRMNYYWTLVEPGDKITFEATGNLVVPRYAFAMERNAGSGIIISDTPVHDCNTTCQTPKGAINTSLPFQNVHPITIGKCPKYVKSTKLRLATGLRNVPSIQSRGLFGAIAGFIEGGWTGMVDGWYGYHHQNEQGSGYAADLKSTQNAIDEITNKVNSVIEKMNTQFTAVGKEFNHLEKRIENLNKKVDDGFLDIWTYNAELLVLLENERTLDYHDSNVKNLYEKVRSQLKNNAKEIGNGCFEFYHKCDNTCMESVKNGTYDYPKYSEEAKLNREEIDGVKLESTKIYQILAIYSTVASSLVLVVSLGAISFWMCSNGSLQCRICI

SEQ ID NO: 4964 - protein, 566 aa, synthetic construct
  REGION 1..566: note = hemagglutinin__InfluenzaA__ADG59675
MKAILVVLLYTFATANADTLCIGYHANNSTDTVDTVLEKNVTVTHSVNLLEDKHNGKLCKLRGVAPLHLGKCNIAGWILGNPECESLSTASSWSYIVETSSSDNGTCYPGDFIDYEELREQLSSVSSFERFEIFPKTSSWPNHDSNKGVTAACPHAGAKSFYKNLIWLVKKGNSYPKLSKSYINDKGKEVLVLWGIHHPSTSADQQSLYQNADAYVFVGSSRYSKKFKPEIAIRPKVRDQEGRMNYYWTLVEPGDKITFEATGNLVVPRYAFAMERNAGSGIIISDTPVHDCNTTCQTPNGAINTSLPFHNIHPITIGKCPKYVKSTKLRLATGLRNVPSIQSRGLFGAIAGFIEGGWTGMVDGWYGYHHQNEQGSGYAADLKSTQNAIDEITNKVNSVIEKMNTQFTAVGKEFNHLEKRIENLNKKVDDGFLDIWTYNAELLVLLENERTLDYHDSNVKNLYEKVRSQLKNNAKEIGNGCFEFYHKCDNTCMESVKNGTYDYPKYSEEAKLNREEIDGVKLESTRIYQILAIYSTVASSLVLVVSLGAISFWMCSNGSLQCRICI

SEQ ID NO: 4965 - protein, 566 aa, synthetic construct
  REGION 1..566: note = hemagglutinin__InfluenzaA__ADG59676
MKAILVVLLYTFATANADTLCIGYHANNSTDTVDTVLEKNVTVTHSVNLLEDKHNGKLCKLRGVAPLHLGKCNIAGWILGNPECESLSTASSWSYIVETSSSDNGTCYPGDFIDYEELREQLSSVSSFERFEIFPKTSSWPNHDSNKGVTAACPHAGAKSFYKNLIWLVKKGNSYPKLSKSYINDKGKEVLVLWGIHHPSTSADQQSLYQNADAYVFVGTSRYSKKFKPEIAIRPKVRDQEGRMNYYWTLVEPGDKITFEATGNLVVPRYAFAMERNAGSGIIISDTPVHDCNATCQTPKGAINTSLPFQNIHPITIGKCPKYVKSTKLRLATGLRNIPSIQSRGLFGAIAGFIEGGWTGMVDGWYGYHHQNEQGSGYAADLKSTQNAIDEITNKVNSVIEKMNTQFTAVGKEFNHLEKRIENLNKKVDDGFLDIWTYNAELLVLLENERTLDYHDSNVKNLYEKVRSQLKNNAKEIGNGCFEFYHKCDNTCMESVKNGTYDYPKYSEEAKLNREEIDGVKLESTRIYQILAIYSTVASSLVLVVSLGAISFWMCSNGSLQCRICI

SEQ ID NO: 4966 - protein, 566 aa, synthetic construct; identical to SEQ ID NO: 3770
  REGION 1..566: note = hemagglutinin__InfluenzaA__ADG59678

SEQ ID NO: 4967 - protein, 566 aa, synthetic construct; identical to SEQ ID NO: 4933
  REGION 1..566: note = hemagglutinin__InfluenzaA__ADG59680

SEQ ID NO: 4968 - protein, 566 aa, synthetic construct; identical to SEQ ID NO: 4933
  REGION 1..566: note = hemagglutinin__InfluenzaA__ADG59681

SEQ ID NO: 4969 - protein, 566 aa, synthetic construct
  REGION 1..566: note = hemagglutinin__InfluenzaA__ADG59683
MKAILVVLLYTFAIANADTLCIGYHANNSTDTVDTVLKKNVTVTHSVNLLEDKHNGKLCKLRGVAPLHLGKCNIAGWILGNPECESLSTASSWSYIVETSSSDNGTCYPGDFIDYEELREQLSSVSSFERFEIFPKTSSWPNHDSNKGVTAACPHAGAKSFYKNLIWLVKKGNSYPKLSKSYINDKGKEVLVLWGIHHPSTSADQQSLYQNADAYVFVGTSRYSKKFKPEIAIRPKVRDQEGRMNYYWTLVEPGDKITFEATGNLVVPRYAFAMERNAGSGIVISDTPVHDCNTTCQTPKGAINTSLPFQNIHPITIGKCPKYVKSTKLRLATGLRNVPSIQSRGLFGAIAGFIEGGWTGMVDGWYGYHHQNEQGSGYAADLKSTQNAIDEITNKVNSVIEKMNTQFTAVGKEFNHLEKRIENLNKKVDDGFLDIWTYNAELLVLLENERTLDYHDSNVKNLYEKVRSQLKNNAKEIGNGCFEFYHKCDNTCMESVKNGTYDYPKYSEEAKLNREEIDGVKLESTRIYQILAIYSTVASSLVLVVSLGAISFWMCSNGSLQCRICI

SEQ ID NO: 4970 - protein, 566 aa, synthetic construct; identical to SEQ ID NO: 3770
  REGION 1..566: note = hemagglutinin__InfluenzaA__ADG59684

SEQ ID NO: 4971 - protein, 566 aa, synthetic construct
  REGION 1..566: note = hemagglutinin__InfluenzaA__ADG59685
MKAILVVLLYTFATANADTLCIGYHANNSTDTIDTVLEKNVTVTHSVNLLEDKHNGKLCKLRGVAPLHLGKCNIAGWILGNPECESLSTASSWSYIVETSSSDNGTCYPGDFIDYEELREQLSSVSSFERFEIFPKTSSWPNHDSNKGVTAACPHAGAKSFYKNLIWLVKKGNSYPKLSKSYINDKGKEVLVLWGIHHPSTSADQQSLYQNADAYVFVGTSRYSKKFKPEIAIRPKVRDQEGRMNYYWTLVEPGDKITFEATGNLVVPRYAFAMERNAGSGIIISDTPVHDCNTTCQTPKGAINTSLPFQNIHPITIGKCPKYVKSTKLRLATGLRNIPSIQSRGLFGAIAGFIEGGWTGMVDGWYGYHHQNEQGSGYAADLKSTQNAIDEITNKVNSVIEKMNTQFTAVGKEFNHLEKRIENLNKKVDDGFLDIWTYNAELLVLLENERTLDYHDSNVKNLYEKVRSQLKNNAKEIGNGCFEFYHKCDNTCMESVKNGTYDYPKYSEEAKLNREEIDGVKLESTRIYQILAIYSTVASSLVLVVSLGAISFWMCSNGSLQCRICI

SEQ ID NO: 4972 - protein, 566 aa, synthetic construct; identical to SEQ ID NO: 3770
  REGION 1..566: note = hemagglutinin__InfluenzaA__ADG59686

SEQ ID NO: 4973 - protein, 566 aa, synthetic construct; identical to SEQ ID NO: 4933
  REGION 1..566: note = hemagglutinin__InfluenzaA__ADG59687

SEQ ID NO: 4974 - protein, 566 aa, synthetic construct
  REGION 1..566: note = hemagglutinin__InfluenzaA__ADG59688
MKAILVVLLYTIATANADTLCIGYHANNSTDTIDTVLEKNVTVTHSVNLLEDKHNGKLCKLRGVAPLHLGKCNIAGWILGNPECESLSTASSWSYIVETSSSDNGTCYPGDFIDYEELREQLSSVSSFERFEIFPKTSSWPNHDSNKGVTAACPHAGAKSFYKNLIWLVKKGNSYPKLSKSYINDKGKEVLVLWGIHHPSTSADQQSLYQNADAYVFVGTSRYSKKFKPEIAIRPKVRGQEGRMNYYWTLVEPGDKITFEATGNLVVPRYAFAMERNAGSGIIISDTPVHDCNTTCQTPKGAINTSLPFQNIHPITIGKCPKYVKSTKLRLATGLRNIPSIQSRGLFGAIAGFIEGGWTGMVDGWYGYHHQNEQGSGYAADLKSTQNAIDEITNKVNSVIEKMNTQFTAVGKEFNHLEKRIENLNKKVDDGFLDIWTYNAELLVLLENERTLDYHDSNVKNLYEKVRSQLKNNAKEIGNGCFEFYHKCDNTCMESVKNGTYDYPKYSEEAKLNREEIDGVKLESTRIYQILAIYSTVASSLVLVVSLGAISFWMCSNGSLQCRICI

SEQ ID NO: 4975 - protein, 566 aa, synthetic construct; identical to SEQ ID NO: 2669
  REGION 1..566: note = hemagglutinin__InfluenzaA__ADG59689

SEQ ID NO: 4976 - protein, 566 aa, synthetic construct; identical to SEQ ID NO: 2669
  REGION 1..566: note = hemagglutinin__InfluenzaA__ADG59691

SEQ ID NO: 4977 - protein, 566 aa, synthetic construct
  REGION 1..566: note = hemagglutinin__InfluenzaA__ADG59693
MKAILVVLLYTFATANADTLCIGYHANNSTDTVDTVLEKNVTVTHSVNLLEDKHNGKLCKLRGVAPLHLGKCNIAGWILGNPECESLSTASSWSYIVETSSSDNGTCYPGDFIDYEELREQLSSVSSFERFEIFPKTSSWPNHDSNKGVTAACPHAGAKSFYKNLIWLVKKGNSYPKLSKSYINDKGKEVLVLWGIHHPSTSADQQSLYQNADAYVFVGTSRYSKKFKPEIAIRPKVRNQEGRMNYYWTLVEPGDKITFEATGNLVVPRYAFAMERNAGSGIIISDTPVHDCNTTCQTPKGAINTSLPFQNIHPITIGKCPKYVKSTKLRLATGLRNIPSIQSRGLFGAIAGFIEGGWTGMVDGWYGYHHQNEQGSGYAADLKSTQNAIDEITNKVNSVIEKMNTQFTAVGKEFNHLEKRIENLNKKVDDGFLDIWTYNAELLVLLENERTLDYHDSNVKNLYEKVRSQLKNNAKEIGNGCFEFYHKCDNTCMESVKNGTYDYPKYSEEAKLNREEIDGVKLESTRIYQILAIYSTVASSLVLVVSLGAISFWMCSNGSLQCRICI

SEQ ID NO: 4978 - protein, 566 aa, synthetic construct
  REGION 1..566: note = hemagglutinin__InfluenzaA__ADG59696
MKAILVVLLYTFATANADTLCIGYHANNSTDTVDTVLEKNVTVTHSVNLLEDKHNGKLCKLRGVAPLHLGKCNIAGWILGNPECESLSTASSWSYIVETSSSDNGTCYPGDFIDYEELREQLSSVSSFERFEIFPKTSSWPNHDSNKGVTAACPHAGAKSFYKNLIWLVKKGNSYPKLSKSYINDKGKEVLVLWGIHHPSTSADQQSLYQNADAYVFVGTSRYSKKFKPEIAIRPKVREQEGRMNYYWTLVEPGDKITFEATGNLVVPRYAFAMERDAGSGIIISDTPVHDCNTTCQTPKGAINTSLPFQNIHPITIGKCPKYVKSTKLRLATGLRNVPSIQSRGLFGAIAGFIEGGWTGMVDGWYGYHHQNEQGSGYAADLKSTQNAIDEITNKVNSVIEKMNTQFTAVGKEFNHLEKRIENLNKKVDDGFLDIWTYNAELLVLLENERTLDYHDSNVKNLYEKVRSQLKNNAKEIGNGCFEFYHKCDNTCMESVKNGTYDYPKYSEEAKLNREEIDGVKLESTRIYQILAIYSTVASSLVLVVSLGAISFWMCSNGSLQCRICI

SEQ ID NO: 4979 - protein, 566 aa, synthetic construct
  REGION 1..566: note = hemagglutinin__InfluenzaA__ADG59697
MKAILVVLLYTFATANADTLCIGYHANNSTDTVDTVLEKNVTVTHSVNLLEDKHNGKLCKLRGVAPLHLGKCNIAGWILGNPECESLSTASSWSYIVETSSSDNGTCYPGDFIDYEELREQLSSVSSFERFEIFPKTSSWPNHDSNKGVTAACPHAGAKNFYKNLIWLVKKGNSYPKLSKSYINDKGKEVLVLWGIHHPSTSADQQSLYQNADAYVFVGTSRYSKKFKPEIAIRPKVRGQEGRMNYYWTLVEPGDKITFEATGNLVVPRYAFAMERNAGSGIIISDTPVHDCNTTCQTPKGAINTSLPFQNIHPITIGKCPKYVKSTKLRLATGLRNVPSIQSRGLFGAIAGFIEGGWTGMVDGWYGYHHQNEQGSGYAADLKSTQNAIDEITNKVNSVIEKMNTQFTAVGKEFNHLEKRIENLNKKVDDGFLDIWTYNAELLVLLENERTLDYHDSNVKNLYEKVRSQLKNNAKEIGNGCFEFYHKCDNTCMESVKNGTYDYPKYSEEAKLNREEIDGVKLESTRIYQILAIYSTVASSLVLVVSLGAISFWMCSNGSLQCRICI

SEQ ID NO: 4980 - protein, 566 aa, synthetic construct
  REGION 1..566: note = hemagglutinin__InfluenzaA__ADG59700
MKAILVVLLYTFATANADTLCIGYHANNSTDTVDTVLEKNVTVTHSVNLLEDKHNGKLCKLRGVAPLHLGKCNIAGWILGNPECESLSTASSWSYIVETSSSDNGTCYPGDFIDYEELREQLSSVSSFERFEIFPKTSSWPNHDSNKGVTAACPHAGAKSFYKNLIWLVKKGNSYPKLSKSYINDKGKEVLVLWGIHHPSTSADQQSLYQNADAYVFVGTSRYSKKFKPEIAIRPKVRDQEGRMNYYWTLVEPGDKITFEATGNLVVPRYAFAMERNAGSGIIISDTPVHDCNTTCQTLKGAINTSLPFQNIHPITIGKCPKYVKSTKLRLATGLRNIPSIQSRGLFGAIAGFIEGGWTGMVDGWYGYHHQNEQGSGYAADLKSTQNAIDEITNKVNSVIEKMNTQFTAVGKEFNHLEKRIENLNKKVDDGFLDIWTYNAELLVLLENERTLDYHDSNVKNLYEKVRSQLKNNAKEIGNGCFEFYHKCDNTCMESVKNGTYDYPKYSEEAKLNREEIDGVKLESTRIYQILAIYSTVASSLVLVVSLGAISFWMCSNGSLQCRICI

SEQ ID NO: 4981 - protein, 566 aa, synthetic construct
  REGION 1..566: note = hemagglutinin__InfluenzaA__ADG59701
MKAILVVLLYTFAAANADTLCIGYHANNSTDTVDTVLEKNVTVTHSVNLLEDKHNGKLCKLRGVAPLHLGKCNIAGWILGNPECESLSTASSWSYIVETSSSDNGTCYPGDFIDYEELREQLSSVSSFERFEIFPKTSSWPNHDSNKGVTAACPHAGAKSFYKNLIWLVKKGNSYPKLSKSYINDKGKEVLVLWGIHHPSTSADQQSLYQNADAYVFVGTSRYSKKFKPEIAIRPKVRDQEGRMNYYWTLVEPGDKITFEATGNLVVPRYAFAMERNAGSGIIISDTPVHDCNTTCQTPKGAINTSLPFQNIHPITIGKCPKYVKSTKLRLATGLRNVPSIQSRGLFGAIAGFIEGGWTGMVDGWYGYHHQNEQGSGYAADLKSTQNAIDKITNKVNSVIEKMNTQFTAVGKEFNHLEKRIENLNKKVDDGFLDIWTYNAELLVLLENERTLDYHDSNVKNLYEKVRSQLKNNAKEIGNGCFEFYHKCDNTCMESVKNGTYDYPKYSEEAKLNREEIDGVKLESTRIYQILAIYSTVASSLVLVVSLGAISFWMCSNGSLQCRICI

SEQ ID NO: 4982 - protein, 566 aa, synthetic construct
  REGION 1..566: note = hemagglutinin__InfluenzaA__ADG59702
MKAILVVLLYTFATANADTLCIGYHANNSTDTVDTVLEKNVTVTHSVNLLEDKHNGKLCKLRGVAPLHLGKCNIAGWILGNPECESLSTASSWSYIVETSSSDNGTCYPGDFIDYEELREQLSSVSSFERFEIFPKTSSWPNHDSNKGVTAACPHAGAKSFYKNLIWLVKKGNSYPKLSKSYINDKGKEVLVLWGIHHPSTSADQQSLYQNADAYVFVGTSRYSKKFKPEIAIRPKVRDQEGRMNYYWTLVEPGDKITFEATGNLVVPRYAFAMERNAGSGIIISDTPVHDCNTTCQTPKGAINTSLPFQNIHPITIGKCPKYVKSTKLRLATGLRNIPSIQSRGLFGAIAGFIEGGWTGMVDGWYGYHHQNEQGSGYAADLKSTQNAIDEITNKVNSVIEKMNTQFTAVGKEFNHLEKRIENLNKKVDDGFLDIWTYNAELLVLLENERNLDYHDSNVKNLYEKVRSQLKNNAKEIGNGCFEFYHKCDNTCMESVKNGTYDYPKYSEEAKLNREEIDGVKLESTRIYQILAIYSTVASSLVLVVSLGAISFWMCSNGSLQCRICI

SEQ ID NO: 4983 - protein, 566 aa, synthetic construct
  REGION 1..566: note = hemagglutinin__InfluenzaA__ADG59703
MKAILVVLLYTFATANADTLCIGYHANNSTDTVDTVLEKNVTVTHSVNLLEDKHNGKLCKLRGVAPLHLGKCNIAGWILGNPECESLSTASSWSYIVETSSSDNGTCYPGDFIDYEELREQLSSVSSFERFEIFPKTSSWPNHDPNKGVTAACPHAGAKSFYKNLIWLVKKGNSYPKLSKSYINDKGKEVLVLWGIHHPSTSADQQSLYQNADAYVFVGTSRYSKKFKPEIAIRPKVRDQEGRMNYYWTLVEPGDKITFEATGNLVVPRYAFAMERNAGSGIVISDTPVHDCNTTCQTPKGAINTSLPFQNIHPITIGKCPKYVKSTKLRLATGLRNVPSIQSRGLFGAIAGFIEGGWTGMVDGWYGYHHQNEQGSGYAADLKSTQNAIDEITNKVNSVIEKMNTQFTAVGKEFNHLEKRIENLNKKVDDGFLDIWTYNAELLVLLENERTLDYHDSNVKNLYEKVRSQLKNNAKEIGNGCFEFYHKCDNTCMESVKNGTYDYPKYSEEAKLNREEIDGVKLESTRIYQILAIYSTVASSLVLVVSLGAISFWMCSNGSLQCRICI

SEQ ID NO: 4984 - protein, 566 aa, synthetic construct; identical to SEQ ID NO: 2684
  REGION 1..566: note = hemagglutinin__InfluenzaA__ADG76646

SEQ ID NO: 4985 - protein, 566 aa, synthetic construct
  REGION 1..566: note = hemagglutinin__InfluenzaA__ADG76652
MKAILVVLLYTFATANADTLCIGYHANNSTDTVDTVLEKNVTVTHSVNLLEDKHNGKLCKLRGVAPLHLGKCNIAGWILGNPECESFSTSSSWSYIVETPSSDNGTCYPGDFIDYEELREQLSSVSSFERFEIFPKTSSWPNHDSNKGVTAACPHAGAKSFYKNLIWLVKKGNSYPKLSKSYINDKGKEVLVLWGIHHPSTSADQQSLYQNADTYVFVGSSRYSKKFKPEIAIRPKVRDQEGRMNYYWTLVEPGDKITFEATGNLVVPRYAFAMERNAGSGIIISDTPVHDCNTTCQTPKGAINTSLPFQNIHPITIGKCPKYVKSTKLRLATGLRNIPSIQSRGLFGAIAGFIEGGWTGMVDGWYGYHHQNEQGSGYAADLKSTQNAIDEITNKVNSVIEKMNTQFTAVGKEFNHLEKRIENLNKKVDDGFLDIWTYNAELLVLLENERTLDYHDSNVKNLYEKVRSQLKNNAKEIGNGCFEFYHKCDNTCMESVKNGTYDYPKYSEEAKLNREEIDGVKLESTRIYQILAIYSTVASSLVLVVSLGAISFWMCSNGSLQCRICI

SEQ ID NO: 4986 - protein, 566 aa, synthetic construct; identical to SEQ ID NO: 2911
  REGION 1..566: note = hemagglutinin__InfluenzaA__ADH01808

SEQ ID NO: 4987 - protein, 566 aa, synthetic construct
  REGION 1..566: note = hemagglutinin__InfluenzaA__ADH01818
MKAILVVLLYTFATANADTLCIGYHANNSTDTVDTVLEKNVTVTHSVNLLEDKHNGKLCKLRGVAPLHLGKCNIAGWILGNPECESLSTASSWSYIVETSSSDNGTCYPGDFIDYEELREQLSSVSSFERFEIFPKTSSWPNHDSNKGVTAACPHAGAKSFYKNLIWLVKKGNSYPKLSKSYINDKGKEVLVLWGIHHPSTSADQQSLYQNADAYVFVGTSRYSKKFKPEIAIRPKVRDQEGRMNYYWTLVEPGDKITFEATGNLVVPRYAFAMERNAGSGIIISDTPVHDCNTTCQTPKGAINTSLPFQNIHPITIGKCPKYVKSTKLRLATGLRNVPSIQSRGLFGAIAGFIEGGWTGMVDGWYGYHHQNEQGSGYAADLKSTQNAIDEITNKVNSVIEKMNTQFTAVGKEFNHLEKRIENLNKKVDDGFLDIWTYNAELLVLLENERTLDYHDSNVKNLYEKVRSQLKNNAKEIGNGCFEFYHKCDNTCMESVKNGTYDYPKYSEEAKLNREEIDGVKLESTRIYQILAIYSTVASSLVLIVSLGAISFWMCSNGSLQCRICI

SEQ ID NO: 4988 - protein, 566 aa, synthetic construct; identical to SEQ ID NO: 2911
  REGION 1..566: note = hemagglutinin__InfluenzaA__ADH01828

SEQ ID NO: 4989 - protein, 566 aa, synthetic construct; identical to SEQ ID NO: 2669
  REGION 1..566: note = hemagglutinin__InfluenzaA__ADH01838

SEQ ID NO: 4990 - protein, 566 aa, synthetic construct; identical to SEQ ID NO: 2911
  REGION 1..566: note = hemagglutinin__InfluenzaA__ADH01848

SEQ ID NO: 4991 - protein, 566 aa, synthetic construct; identical to SEQ ID NO: 2911
  REGION 1..566: note = hemagglutinin__InfluenzaA__ADH01858

SEQ ID NO: 4992 - protein, 566 aa, synthetic construct; identical to SEQ ID NO: 2669
  REGION 1..566: note = hemagglutinin__InfluenzaA__ADH01868

SEQ ID NO: 4993 - protein, 566 aa, synthetic construct; identical to SEQ ID NO: 2669
  REGION 1..566: note = hemagglutinin__InfluenzaA__ADH01878

SEQ ID NO: 4994 - protein, 566 aa, synthetic construct; identical to SEQ ID NO: 2911
  REGION 1..566: note = hemagglutinin__InfluenzaA__ADH01888

SEQ ID NO: 4995 - protein, 566 aa, synthetic construct; identical to SEQ ID NO: 2669
  REGION 1..566: note = hemagglutinin__InfluenzaA__ADH01898

SEQ ID NO: 4996 - protein, 566 aa, synthetic construct; identical to SEQ ID NO: 2760
  REGION 1..566: note = hemagglutinin__InfluenzaA__ADH01908

SEQ ID NO: 4997 - protein, 566 aa, synthetic construct
  REGION 1..566: note = hemagglutinin__InfluenzaA__ADH01918
MKAILVVLLYTFATANADTLCIGYHANNSTDTVDTVLEKNVTVTHSVNLLEDKHNGKLCKLRGVAPLHLGKCNIAGWILGNPECESLSTESSWSYIVETSSSDNGTCYPGDFIDYEELREQLSSVSSFERFEIFPKTSSWPNHDSNKGVTAACPHAGAKSFYKNLIWLVKKGNSYPKLSKSYINDKEKEVLVLWGIHHPSTSADQQSLYQNADAYVFVGTSRYSKKFKPEIAIRPKVRDQEGRMNYYWTLVEPGDKITFEATGNLVVPRYAFAMERNAGSGIIISDTPVHDCNTTCQTPKGAINTSLPFQNIHPITIGKCPKYVKSTKLRLATGLRNVPSIQSRGLFGAIAGFIEGGWTGMVDGWYGYHHQNEQGSGYAADLKSTQNAIDKITNKVNSVIEKMNTQFTAVGKEFNHLEKRIENLNKKVDDGFLDIWTYNAELLVLLENERTLDYHDSNVKNLYEKVRSQLKNNAKEIGNGCFEFYHKCDNTCMESVKNGTYDYPKYSEEAKLNREEIDGVKLESTRIYQILAIYSTVASSLVLVVSLGAISFWMCSNGSLQCRICI

SEQ ID NO: 4998 - protein, 566 aa, synthetic construct
  REGION 1..566: note = hemagglutinin__InfluenzaA__ADH01928
MKAILVVLLYTFATANADTLCIGYHANNSTDTVDTVLEKNVTVTHSVNLLEDKHNGKLCKLRGVAPLHLGKCNIAGWILGNPECESLSTASSWSYIVETSSSDNGTCYPGDFIDYEELREQLSSASSFERFEIFPKTSSWPNHDSNKGVTAACPHAGAKSFYKNLIWLVKKGNSYPKLSKSYINDKGKEVLVLWGIHHPSTSADQQSLYQNADAYVFVGTSRYSKKFKPEIAIRPKVRDQEGRMNYYWTLVEPGDKITFEATGNLVVPRYAFAMERNAGSGIIISDTPVHDCNTTCQTPKGAINTSLPFQNIHPITIGKCPKYVKSTKLRLATGLRNIPSIQSRGLFGAIAGFIEGGWTGMVDGWYGYHHQNEQGSGYAADLKSTQNAIDEITNKVNSVIEKMNTQFTAVGKEFNHLEKRIENLNKKVDDGFLDIWTYNAELLVLLENERTLDYHDSNVKNLYEKVRSQLKNNAKEIGNGCFEFYHKCDNTCMESVKNGTYDYPKYSEEAKLNREEIDGVKLESTRIYQILAIYSTVASSLVLVVSLGAISFWMCSNGSLQCRICI

SEQ ID NO: 4999 - protein, 566 aa, synthetic construct
  REGION 1..566: note = hemagglutinin__InfluenzaA__ADH01938
MKAILVVLLYTFATANADTLCIGYHANNSTDTVDTVLEKNVTVTHSVNLLEDKHNGKLCKLRGVAPLHLGKCNIAGWILGNPECESLSTASSWSYIVETSSSDNGTCYPGDFIDYEELREQLSSVSSFERFEIFPKTSSWPNHDSNKGVTAACPHAGAKSFYKNLIWLVKKGNSYPKLSKSYINDKGKEVLVLWGIHHPSTSADQQSLYQNADAYVFVGTSRYSKKFKPEIAIRPKVRDQEGRMNYYWTLVEPGDKITFEATGNLVVPRYAFAMERNAGSGIIISDTPVHDCNTTCQTPKGAINTSLPFQNIHPITIGKCPKYVKSTKLRLATGLRNVPSIQSRGLFGAIAGFIEGGWTGMVDGWYGYHHQNEQGSGYAADLKSTQNAIDEITNKVNSVIEKMNTQFTAVGKEFNHLEKRIENLNKKVDDGFLDIWTYNAELLVLLENERTLDYHDSNVKNLYKKVRSQLKNNAKEIGNGCFEFYHKCDNTCMESVKNGTYDYPKYSEEAKLNREEIDGVKLESTRIYQILAIYSTVASSLVLVVSLGAISFWMCSNGSLQCRICI

SEQ ID NO: 5000 - protein, 566 aa, synthetic construct; identical to SEQ ID NO: 3833
  REGION 1..566: note = hemagglutinin__InfluenzaA__ADH01948

SEQ ID NO: 5001 - protein, 566 aa, synthetic construct
  REGION 1..566: note = hemagglutinin__InfluenzaA__ADH01958
MKAILVVLLYTFATANADTLCIGYHANNSTDTVDTVLEKNVTVTHSVNLLEDKHNGKLCKLRGVAPLHLGKCNIAGWILGNPECESLSTASSWSYIVETSSSDNGTCYPGDFIDYEELREQLSSVSSFERFEIFPKTSSWPNHDSNKGVTAACPHAGAKSFYKNLIWLVKKGNSYPKLSKSYINDKGKEVLVLWGIHHPSTSADQQSLYQNADAYVFVGTSRYSKKFKPEIAIRPKVRDQEGRMNYYWTLVEPGDKITFEATGNLVVPRYAFAMERNAGSGIIISDTPVHDCNTTCQTPKGAINTSLPFQNIHPITIGNCPKYVKSTKLRLATGLRNVPSIQSRGLFGAIAGFIEGGWTGMVDGWYGYHHQNEQGSGYAADLKSTQNAIDKITNKVNSVIEKMNTQFTAVGKEFNHLEKRIENLNKKVDDGFLDIWTYNAELLVLLENERTLDYHDSNVKNLYEKVRSQLKNNAKEIGNGCFEFYHKCDNTCMESVKNGTYDYPKYSEEAKLNREEIDGVKLESTRIYQILAIYSTVASSLVLIVSLGAISFWMCSNGSLQCRICI

SEQ ID NO: 5002 - protein, 566 aa, synthetic construct
  REGION 1..566: note = hemagglutinin__InfluenzaA__ADH01968
MKAILVVLLYTFATANADTLCIGYHANNSTDTVDTVLEKNVTVTHSVNLLEDKHNGKLCKLRGVAPLHLGKCNIAGWILGNPECESLSTASSWSYIVETSSSDNGTCYPGDFIDYEELREQLSSVSSFERFEIFPKTSSWPNHDSNKGVTAACPHAGAKSFYKNLIWLVKKGNSYPKLSKSYINDKGKEVLVLWGIHHPSTSADQQSLYQNADAYVFVGTSRYSKKFKPEIAIRPKVREQEGRMNYYWTLVEPGDKITFEATGNLVVPRYAFAMERNAGSGIIISDTPVHDCNTTCQTPKGAINTSLPFQNIHPITIGKCPKYVKSTKLRLATGLRNVPSIQSRGLFGAIAGFIEGGWTGMVDGWYGYHHQNEQGSGYAADLKSTQNAIDKITNKVNSVIEKMNTQFTAVGKEFNHLEKRIENLNKKVDDGFLDIWTYNAELLVLLENERTLDYHDSNVKNLYEKVRNQLKNNAKEIGNGCFEFYHKCDNTCMESVKNGTYDYPKYSEEAKLNREEIDGVKLESTRIYQILAIYSTVASSLVLVVSLGAISFWMCSNGSLQCRICI

SEQ ID NO: 5003 - protein, 566 aa, synthetic construct; identical to SEQ ID NO: 3833
  REGION 1..566: note = hemagglutinin__InfluenzaA__ADH01978

SEQ ID NO: 5004 - protein, 566 aa, synthetic construct; identical to SEQ ID NO: 3833
  REGION 1..566: note = hemagglutinin__InfluenzaA__ADH01988

SEQ ID NO: 5005 - protein, 566 aa, synthetic construct; identical to SEQ ID NO: 4836
  REGION 1..566: note = hemagglutinin__InfluenzaA__ADH01998

SEQ ID NO: 5006 - protein, 566 aa, synthetic construct
  REGION 1..566: note = hemagglutinin__InfluenzaA__ADH02008
MKAILVVLLYTFATANADTLCIGYHANNSTDTVDTVLEKNVTVTHSVNLLEGKHNGKLCKLRGVAPLHLGKCNIAGWILGNPECESLSTASSWSYIVETSSSDNGTCYPGDFIDYEELREQLSSVSSFERFEIFPKTSSWPNHDSNKGVTAACPHAGAKSFYKNLIWLIKKGNSYPKLSKSYINDKEKEVLVLWGIHHPSTSADQQSLYQNADAYVFVGTSRYSKKFKPEIAIRPKVRDQEGRMNYYWTLVEPGDKITFEATGNLVVPRYAFAMERNAGSGIIISDTPVHDCNTTCQTPKGAINTSLPFQNIHPITIGKCPKYVKSTKLRLATGLRNIPSIQSRGLFGAIAGFIEGGWTGMVDGWYGYHHQNEQGSGYAADLKSTQNAIDEITNKVNSVIEKMNTQFTAVGKEFNHLEKRIENLNKKVDDGFLDIWTYNAELLVLLENERTLDYHDSNVKNLYEKVRSQLKNNAKEIGNGCFEFYHKCDNTCMESVKNGTYDYPKYSEEAKLNREEIDGVKLESTRIYQILAIYSTVASSLVLVVSLGAISFWMCSNGSLQCRICI

SEQ ID NO: 5007 - protein, 566 aa, synthetic construct; identical to SEQ ID NO: 3833
  REGION 1..566: note = hemagglutinin__InfluenzaA__ADI24508

SEQ ID NO: 5008 - protein, 566 aa, synthetic construct
  REGION 1..566: note = hemagglutinin__InfluenzaA__ADI24515
MKAILVVLLYTFATANADTLCVGYHANNSTDTVDTVLEKNVTVTHSVNLLEDKHNGKLCKLRGVAPLHLGKCNIAGWILGNPECESLPTASSWSYIVETSSSDNGTCYPGDFIDYEELREQLSSVSSFERFEIFPKTSSWPNHDSNKGVTAACPHAGAKSFYKNLIWLVKKGNSYPKLSKSYINDKGKEVLVLWGIHHPSTSADQQSLYQNADAYVFVGTSRYSKKFKPEIAIRPKVRDQEGRMNYYWTLVEPGDKITFEATGNLVVPRYAFAMERNAGSGIIISDTPVHDCNTTCQTPKGAINTSLPFQNIHPITIGKCPKYVKSTKLRLATGLRNVPSIQSRGLFGAIAGFIEGGWTGMVDGWYGYHHQNEQGSGYAADLKSTQNAIDKSTNKVNSVIEKMNTQFTAVGKEFNHLEKRIENLNKKVDDGFLDIWTYNAELLVLLENERTLDYHDSNVKNLYEKVRSQLKNNAKEIGNGCFEFYHKCDNTCMESVKNGTYDYPKYSEEAKLNREEIDGVKLESTRIYQILAIYSTVASSLVLVVSLGAISFWMCSNGSLQCRICI

SEQ ID NO: 5009 - protein, 566 aa, synthetic construct; identical to SEQ ID NO: 3833
  REGION 1..566: note = hemagglutinin__InfluenzaA__ADI24517

SEQ ID NO: 5010 - protein, 566 aa, synthetic construct; identical to SEQ ID NO: 3833
  REGION 1..566: note = hemagglutinin__InfluenzaA__ADI24519

SEQ ID NO: 5011 - protein, 566 aa, synthetic construct; identical to SEQ ID NO: 3833
  REGION 1..566: note = hemagglutinin__InfluenzaA__ADI24521

SEQ ID NO: 5012 - protein, 566 aa, synthetic construct; identical to SEQ ID NO: 4221
  REGION 1..566: note = hemagglutinin__InfluenzaA__ADI24523

SEQ ID NO: 5013 - protein, 566 aa, synthetic construct
  REGION 1..566: note = hemagglutinin__InfluenzaA__ADI24525
MKAILVVLLYTFATANADTLCIGYHANNSTDTVDTVLEKNVTVTHSVNLLEDKHNGKLCELRGVAPLHLGKCNIAGWILGNPECESLSTARSWSYIVETSSSDNGTCYPGDFIDYEELREQLSSVSSFERFEIFPKTSSWPNHDSNKGVTAACPHAGAKSFYKNLIWLVKKGNSYPKLSKSYINDKGKEVLVLWGIHHPSTSADQQSLYQNADAYVFVGTSRYSKKFKPEIAIRPKVRDQEGRMNYYWTLVEPGDKITFEATGNLVVPRYAFAMERNAGSGIIISDTPVHDCNTTCQTPKGAINTSLPFQNIHPITIGKCPKYVKSTKLRLATGLRNVPSIQSRGLFGAIAGFIEGGWTGMVDGWYGYHHQNEQGSGYAADLKSTQNAIDKITNKVNSVIEKMNTQFTAVGKEFNHLEKRIENLNKKVDDGFLDIWTYNAELLVLLENERTLDYHDSNVKNLYEKVKSQLKNNAKEIGNGCFEFYHKCDNTCMESVKNGTYDYPKYSEEAKLNREEIDGVKLESTRIYQILAIYSTVASSLVLVVSLGAISFWMCSNGSLQCRICI

SEQ ID NO: 5014 - protein, 566 aa, synthetic construct; identical to SEQ ID NO: 3833
  REGION 1..566: note = hemagglutinin__InfluenzaA__ADI24527

SEQ ID NO: 5015 - protein, 566 aa, synthetic construct; identical to SEQ ID NO: 4221
  REGION 1..566: note = hemagglutinin__InfluenzaA__ADI24529

SEQ ID NO: 5016 - protein, 566 aa, synthetic construct
  REGION 1..566: note = hemagglutinin__InfluenzaA__ADI24531
MKAILVVLLYTFATANADTLCIGYHANNSTDTVDTVLEKNVTVTHSVNLLEDKHNGKLCKLRGVAPLHLGKCNIAGWILGNPECESLSTASSWSYIVETSSSDNGTCYPGDFINYEELREQLSSVSSFERFEIFPKTSSWPNHDSNKGVTAACPHAGAKSFYKNLIWLVKKGNSYPKLSKSYINDKGKEVLVLWGIHHPSTSADQQSLYQNADAYVFVGTSRYSKKFKPEIAIRPKVRDQEGRMNYYWTLVEPGDKITFEATGNLVVPRYAFAMERNAGSGIIISDTPVHDCNTTCQTPKGAINTSLPFQNIHPITIGKCPKYVKSTKLRLATGLRNVPSIQSRGLLGAIAGFIEGGWTGMVDGWYGYHHQNEQGSGYAADLKSTQNAIDKITNKVNSVIEKMNTQFTAVGKEFNHLEKRIENLNKKVDDGFLDIWTYNAELLVLLENERTLDYHDSNVKNLYEKVRSQLKNNAKEIGNGCFEFYHKCDNTCMESVKNGTYDYPKYSEEAKLNREEIDGVKLESTRIYQILAIYSTVASSLVLVVSLGAISFWMCSNGSLQCKICI

SEQ ID NO: 5017 - protein, 566 aa, synthetic construct
  REGION 1..566: note = hemagglutinin__InfluenzaA__ADI24536
MKAILVVLLYTFATANADTLCIGYHANNSTDTVDTVLEKNVTVTHSVNLLEDKHNGKLCKLRGVAPLHLGKCNIAGWILGNPECESLSTASSWSYIVETSSSDNGTCYPGDFIDYEELREQLSSVSSFERFEIFPKTSSWPNHDSNKGVTAACPHAGAKSFYKNLIWLVKKGNSYPKLSKSYINDKGKEVLVLWGIHHPSTSADQQSLYQNADAYVFVGTSRYSKKFKPEIAIRPKVRDQEGRMNYYWTLVEPGDKITFEATGNLVVPRYAFAMERDAGSGIIISDTPVHDCNTTCQTPKGAINTSLPFQNIHPITIGKCPKYVKSTKLRLATGLRNVPSIQSRGLFGAIAGFIEGGWTGMVDGWYGYHHQNEQGSGYAADLKSTQNAIDKITNKVNSVIEKMNTQFTAVGKEFNHLEKRIENLNKKIDDGFLDIWTYNAELLVLLENERTLDYHDSNVKNLYEKVRSQLKNNAKEIGNGCFEFYHKCDNTCMESVKNGTYDYPKYSEEAKLNREEIDGVKLESTRIYQILAIYSTVASSLVLVVSLGAISFWMCSNGSLQCRICI

SEQ ID NO: 5018 - protein, 566 aa, synthetic construct; identical to SEQ ID NO: 3833
  REGION 1..566: note = hemagglutinin__InfluenzaA__ADI24546

SEQ ID NO: 5019 - protein, 566 aa, synthetic construct; identical to SEQ ID NO: 3833
  REGION 1..566: note = hemagglutinin__InfluenzaA__ADI24553

SEQ ID NO: 5020 - protein, 566 aa, synthetic construct; identical to SEQ ID NO: 3833
  REGION 1..566: note = hemagglutinin__InfluenzaA__ADI24555

SEQ ID NO: 5021 - protein, 566 aa, synthetic construct
  REGION 1..566: note = hemagglutinin__InfluenzaA__ADI24557
MKAILVVLLYTFATANADTLCIGYHANNSTDTVDTVLEKNVTVTHSVNLLEDKHNGKLCKLRGVAPLHLGKCNIAGWILGNPECESLSTASSWSYIVETSSSDNGTCYPGDFIDYEELREQLSSVSSFERFEIFPKTSSWPNHDSNKGVTAACPHAGAKSFYKNLIWLVKKGNSYPKLSKSYINDKGKEILVLWGIHHPSTSADQQSLYQNADAYVFVGTSRYSKKFKPEIAIRPKVRDQEGRMNYYWTLVEPGDKITFEATGNLVVPRYAFAMERNAGSGIIISDTPVHDCNTTCQTPKGAINTSLPFQNIHPITIGKCPKYVKSTKLRLATGLRNVPSIQSRGLFGAIAGFIEGGWTGMVDGWYGYHHQNEQGSGYAADLKSTQNAIDKITNKVNSVIEKMNTQFTAVGKEFNHLEKRIENLNKKVDDGFLDIWTYNAELLVLLENERTLDYHDSNVKNLYEKVRSQLKNNAKEIGNGCFEFYHKCDNTCMESVKNGTYDYPKYSEEAKLNREEIDGVKLESTRIYQILAIYSTVASSLVLVVSLGAISFWMCSNGSLQCRICI

SEQ ID NO: 5022 - protein, 566 aa, synthetic construct; identical to SEQ ID NO: 3833
  REGION 1..566: note = hemagglutinin__InfluenzaA__ADI24559

SEQ ID NO: 5023 - protein, 566 aa, synthetic construct
  REGION 1..566: note = hemagglutinin__InfluenzaA__ADI24561
MKAILVILLYTFATANADTLCIGYHANNSTDTVDTVLEKNVTVTHSVNLLEDKHDGKLCKLRGVAPLHLGKCNIAGWILGNPECESLSTASSWSYIVETSSSDNGTCYPGDFIDYEELREQLSSVSSFERFEIFPKTSSWPNHDSNKGVTAACPHAGAKSFYKNLIWLVKKGNSYPKLSKSYINDKGKEVLVLWGIHHPSTSADQQSLYQNADAYVFVGTSRYSKKFKPEIAIRPKVRDQEGRMNYYWTLVEPGDKITFEATGNLVVPRYAFAMERNAGSGIIISDTPVHDCNTTCQTPKGAINTSLPFQNIHPITIGKCPKYVKSTKLRLATGLRNVPSIQSRGLFGAIAGFIEGGWTGMVDGWYGYHHQNEQGSGYAADLKSTQNAIDKITNKVNSVIEKMNTQFTAVGKEFNHLEKRIENLNKKVDDGFLDIWTYNAELLVLLENERTLDYHDSNVKNLYEKVRSQLKNNAKEIGNGCFEFYHKCDNTCMESVKNGTYDYPKYSEEAKLNREEIDGVKLESTRIYQILAIYSTVASSLVLVVSLGAISFWMCSNGSLQCRICI

SEQ ID NO: 5024 - protein, 566 aa, synthetic construct; identical to SEQ ID NO: 3833
  REGION 1..566: note = hemagglutinin__InfluenzaA__ADI24563

SEQ ID NO: 5025 - protein, 566 aa, synthetic construct
  REGION 1..566: note = hemagglutinin__InfluenzaA__ADI24565
MKAILVVLLYTFATANADTLCIGYHANNSTDTVDTVLEKNVTVTHSVNLLEDKHDGKLCKLRGVAPLHLGKCNIAGWILGNPECESLSTASSWSYIVETSSSDNGTCYPGDFIDYEELREQLSSVSSFERFEIFPKTSSWPNHDSNKGVTAACPHAGAKSFYKNLIWLVKKGNSYPKLSKSYINDKGKKVLVLWGIHHPSTSADQQSLYQNADAYVFVGTSRYSKKFKPEIAIRPKVRDQEGRMNYYWTLVEPGDKITFEATGNLVVPRYAFAMERNAGSGIIISDTPVHDCNTTCQTPKGAINTSLPFQNIHPITIGKCPKYVKSTKLRLATGLRNVPSIQSRGLFGAIAGFIEGGWTGMVDGWYGYHHQNEQGSGYAADLKSTQNAIDKITNKVNSVIEKMNTQFTAVGKEFNHLEKRIENLNKKVDDGFLDIWTYNAELLVLLENERTLDYHDSNVKNLYEKVRSQLKNNAKEIGNGCFEFYHKCDNTCMESVKNGTYDYPKYSEEAKLNREEIDGVKLESTRIYQILAIYSTVASSLVLVVSLGAISFWMCSNGSLQCRICI

SEQ ID NO: 5026 - protein, 566 aa, synthetic construct; identical to SEQ ID NO: 3833
  REGION 1..566: note = hemagglutinin__InfluenzaA__ADI24567

SEQ ID NO: 5027 - protein, 566 aa, synthetic construct
  REGION 1..566: note = hemagglutinin__InfluenzaA__ADI24569
MKAILVVLLYTFATANADTLCIGYHANNSTDTVDTVLEKNVTVTHSVNLLEDKHNGKLCKLRGVAPLHLGKCNIAGWILGNPECESLSTASSWSYIVETSSSDNGTCYPGDFIDYEELREQLSSVSSFERFEIFPKTSSWPNHDSNKGVTAACPHAGAKSFYKNLIWLVKKGNSYPKLSKSYINDKGKEVLVLWGIHHPSTSADQQSLYQNADAYVFVGTSRYSKKFKPEIAIRPKVRDQEGRMNYYWTLVEPGDKITFEATGNLVVPRYAFAIERNAGSGIIISDTPVHDCNTTCQTPKGAINTSLPFQNIHPITIGKCPKYVKSTKLRLATGLRNVPSIQSRGLFGAIAGFIEGGWTGMVDGWYGYHHQNEQGSGYAADLKSTQNAIDKITNKVNSVIEKMNTQFTAVGKEFNHLEKRIENLNKKVDDGFLDIWTYNAELLVLLENERTLDYHDSNVKNLYEKVRSQLKNNAKEIGNGCFEFYHKCDNTCMESVKNGTYDYPKYSEEAKLNREEIDGVKLESTRIYQILAIYSTVASSLVLVVSLGAISFWMCSNGSLQCRICI

SEQ ID NO: 5028 - protein, 566 aa, synthetic construct; identical to SEQ ID NO: 3833
  REGION 1..566: note = hemagglutinin__InfluenzaA__ADI24571

SEQ ID NO: 5029 - protein, 566 aa, synthetic construct; identical to SEQ ID NO: 4221
  REGION 1..566: note = hemagglutinin__InfluenzaA__ADI24573

SEQ ID NO: 5030 - protein, 566 aa, synthetic construct
  REGION 1..566: note = hemagglutinin__InfluenzaA__ADI24575
MKAILVVLLYTFATANADTLCIGYHANNSTDTVDTVLEKNVTVTHSVNLLEDKHNGKLCKLRGVAPLHLGKCNIAGWILGNPECESLSTASSWSYIVETSSSDNGTCYPGDFINYEELREQLSSVSSFERFEIFPKTSSWPNHDSNKGVTAACPHAGAKSFYKNLIWLVKKGNSYPKLSKSYINDKGKEVLVLWGIHHPSTSADQQSLYQNADAYVFVGTSRYSKKFKPEIAIRPKVRDQEGRMNYYWTLVEPGDKITFEATGNLVVPRYAFAMERNAGSGIIISDTPVHDCNTTCQTPKGAINTSLPFQNIHPITIGKCPKYVKSTKLRLATGLRNVPSIQSRGLFGAIAGFIEGGWTGMVDGWYGYHHQNEQGSGYAADLKSTQNAIDKITNKVNSVIEKMNTQFTAVGKEFNHLEKRIENLNKKVDDGFLDIWTYNAELLVLLENERTLDYHDSNVENLYEKVRSQLKNNAKEIGNGCFEFYHKCDNTCMESVKNGTYDYPKYSEEAKLNREEIDGVKLESTRIYQILAIYSTVASSLVLVVSLGAISFWMCSNGSLQCRICI

SEQ ID NO: 5031 - protein, 566 aa, synthetic construct; identical to SEQ ID NO: 3833
  REGION 1..566: note = hemagglutinin__InfluenzaA__ADI24577

SEQ ID NO: 5032 - protein, 566 aa, synthetic construct
  REGION 1..566: note = hemagglutinin__InfluenzaA__ADI24581
MKAILVVLLYTFATANADTLCIGYHANNSTDTVDTVLEKNVTVTHSVNLLEDKHNGKLCKLRGVAPLHLGKCNIAGWVLGNPECESLSTASSWSYIVETSSSDNGTCYPGDFIDYEELREQLSSVSSFERFEIFPKTSSWPNHDSNKGVTAACPHAGAKSFYKNLIWLVKKGNSYPKLSKSYINDKGKEVLVLWGIHHPSTSADQQSLYQNADAYVFVGTSRYSKKFKPEIAIRPKVRDQEGRMNYYWTLVEPGDKITFEATGNLVVPRYAFAMERNAGSGIIISDTPVHDCNTTCQTPKGAINTSLPFQNIHPITIGKCPKYVKSTKLRLATGLRNVPSIQSRGLFGAIAGFIEGGWTGMVDGWYGYHHQNEQGSGYAADLKSTQNAIDKITNKVNSVIEKMNTQFTAVGKEFNHLEKRIENLNKKVDDGFLDIWTYNAELLVLLENERTLDYHDSNVKNLYEKVRSQLKNNAKEIGNGCFEFYHKCDNTCMESVKNGTYDYPKYSEEAKLNREEIDGVKLESTRIYQILAIYSTVASSLVLVVSLGAISFWMCSNGSLQCRICI

SEQ ID NO: 5033 - protein, 566 aa, synthetic construct
  REGION 1..566: note = hemagglutinin__InfluenzaA__ADI24583
MKAILVVLLYTFATANADTLCIGYHANNSTDTVDTILEKNVTVTHSVNLLEDKHNGKLCKLRGVAPLHLGKCNIAGWILGNPECESLSTASSWSYIVETSSSDNGTCYPGDFIDYEELREQLSSVSSFERFEIFPKTSSWPNHDSNKGVTAACPHAGAKSFYKNLIWLVKKGNSYPKLSKSYINDKGKEVLVLWGIHHPSTSADQQSLYQNADAYVFVGTSRYSKKFKPEIAIRPKVRDQEGRMNYYWTLVEPGDKITFEATGNLVVPRYAFAMERNAGSGIIISDTPVHDCNTTCQTPKGAINTSLPFQNIHPITIGKCPKYVKSTKLRLATGLRNVPSIQSRGLFGAIAGFIEGGWTGMVDGWYGYHHQNEQGSGYAADLKSTQNAIDKITNKVNSVIEKMNTQFTAVGKEFNHLEKRIENLNKKVDDGFLDIWTYNAELLVLLENERTLDYHDSNVKNLYEKVRSQLKNNAKEIGNGCFEFYHKCDNTCMESVKNGTYDYPKYSEEAKLNREEIDGVKLESTRIYQILAIYSTVASSLVLVVSLGAISFWMCSNGSLQCRICI

SEQ ID NO: 5034 - protein, 566 aa, synthetic construct
  REGION 1..566: note = hemagglutinin__InfluenzaA__ADI24590
MKAILVVLLYTFATANADTLCIGYHANNSTDTVDTVLEKNVTVTHSANLLEDKHNGKLCKLRGVAPLHLGKCNIAGWILGNPECESLSTASSWSYIVETSSSDNGTCYPGDFIDYEELREQLSSVSSFERFEIFPKTSSWPNHDSNKGVTAACPHAGAKSFYKNLIWLVKKGNSYPKLSKSYINDKGKEVLVLWGIHHPSTSADQQSLYQNADAYVFVGTSRYSKKFKPEIAIRPKVRDQEGRMNYYWTLVEPGDKITFEATGNLVVPRYAFAMERNAGSGIIISDTPVHDCNTTCQTPKGAINTSLPFQNIHPITIGKCPKYVKSTKLRLATGLRNVPSIQSRGLFGAIAGFIEGGWTGMVDGWYGYHHQNEQGSGYAADLKSTQNAIDKITNKVNSVIEKMNTQFTAVGKEFNHLEKRIENLNKKVDDGFLDIWTYNAELLVLLENERTLDYHDSNVKNLYEKVRSQLKNNAKEIGNGCFEFYHKCDNTCMESVKNGTYDYPKYSEEAKLNREEIDGVKLESTRIYQILAIYSTVASSLVLVVSLGAISFWMCSNGSLQCRICI

SEQ ID NO: 5035 - protein, 566 aa, synthetic construct
  REGION 1..566: note = hemagglutinin__InfluenzaA__ADI24597
MKAILVVLLYTFATANADTLCIGYHANNSTDTVDTVLEKNVTVTHSANLLEDKHNGKLCKLRGVAPLHLGNCNIAGWILGNPECESLSTASSWSYIVETSSSDNGTCYPGDFIDYEELREQLSSVSSFERFEIFPKTSSWPNHDSNKGVTAACPHAGAKSFYKNLIWLVKKGNSYPKLSKSYINDKGKEVLVLWGIHHPSTSADQQSLYQNADAYVFVGTSRYSKKFKPEIAIRPKVRDQEGRMNYYWTLVEPGDKITFEATGNLVVPRYAFAMERNAGSGIIISDTPVHDCNTTCQTPKGAINTSLPFQNIHPITIGKCPKYVKSTKLRLATGLRNVPSIQSRGLFGAIAGFIEGGWTGMVDGWYGYHHQNEQGSGYAADLKSTQNAIDKITNKVNSVIEKMNTQFTAVGKEFNHLEKRIENLNKKVDDGFLDIWTYNAELLVLLENERTLDYHDSNVKNLYEKVRSQLKNNAKEIGNGCFEFYHKCDNTCMESVKNGTYDYPKYSEEAKLNREEIDGVKLESTRIYQILAIYSTVASSLVLVVSLGAISFWMCSNGSLQCRICI

SEQ ID NO: 5036 - protein, 566 aa, synthetic construct; identical to SEQ ID NO: 5034
  REGION 1..566: note = hemagglutinin__InfluenzaA__ADI24612

SEQ ID NO: 5037 - protein, 566 aa, synthetic construct
  REGION 1..566: note = hemagglutinin__InfluenzaA__ADI24619
MKAILVVLLYTFATANADTLCIGYHANNSTDTVDTVLEKNVTVTHSANLLEDKHNGKLCKLRGVAPLHLGKCNIAGWILGNPECESLSTASSWSYIVETSSSDNGTCYPGDFIDYEELREQLSSVSSFERFEIFPKTSSWPNHDSNKGVTAACPHAGAKSFYKNLIWLVKKGNSYPKLSKSYINDKGKEVLVLWGIHHPSTSVDQQSLYQNADAYVFVGTSRYSKKFKPEIAIRPKVRDQEGRMNYYWTLVEPGDKITFEATGNLVVPRYAFAMERNAGSGIIISDTPVHDCNTTCQTPKGAINTSLPFQNIHPITIGKCPKYVKSTKLRLATGLRNVPSIQSRGLFGAIAGFIEGGWTGMVDGWYGYHHQNEQGSGYAADLKSTQNAIDKITNKVNSVIEKMNTQFTAVGKEFNHLEKRIENLNKKVDDGFLDIWTYNAELLVLLENERTLDYHDSNVKNLYEKVRSQLKNNAKEIGNGCFEFYHKCDNTCMESVKNGTYDYPKYSEEAKLNREEIDGVKLESTRIYQILAIYSTVASSLVLVVSLGAISFWMCSNGSLQCRICI

SEQ ID NO: 5038 - protein, 566 aa, synthetic construct
  REGION 1..566: note = hemagglutinin__InfluenzaA__ADI24621
MKAILVVLLYTFATANADTLCIGYHANNSTDTVDTVLEKNVTVTHSVNLLEDKHNGKLCKLRGVAPLHLGKCNIAGWILGNPECESLSTASSWSYIVETSSSDNGTCYPGDFIDYEELREQLSSVSSFERFEIFPKTSSWPNHDSNKGVTAACPHAGAKSFYKNLIWLVKKGNSYPKLSKSYINDKGKEVLVLWGIHHPSTSADQQSLYQNADAYVFVGTSRYSKKFKPEIAIRPKVRDQEGRMNYYWTLVEPGDKITFEATGNLVVPRYAFAMERNAGSGIIISDTPVHDCNTTCQTPKGTINTSLPFQNIHPITIGKCPKYVKSTKLRLATGLRNVPSIQSRGLFGAIAGFIEGGWTGMVDGWYGYHHQNEQGSGYAADLKSTQNAIDKITNKVNSVIEKMNTQFTAVGKEFNHLEKRIENLNKKVDDGFLDIWTYNAELLVLLENERTLDYHDSNVKNLYEKVRSQLKNNAKEIGNGCFEFYHKCDNTCMESVKNGTYDYPKYSEEAKLNREEIDGVKLESTRIYQILAIYSTVASSLVLIVSLGAISFWMCSNGSLQCRICI

SEQ ID NO: 5039 - protein, 566 aa, synthetic construct
  REGION 1..566: note = hemagglutinin__InfluenzaA__ADI48184
MKAILVVLLYTFATANADTLCIGYHANNSTDTVDTVLEKNVTVTHSVNLLEDKHNGKLCKLRGVAPLHLGKCNIAGWILGNPECESLSTASSWSYIVETSSSDNGTCYPGDFIDYEELREQLSSVSSFERFEIFPKTSSWPNHDSNKGVTAACPHAGAKSFYKNLIWLVKKGNSYPKLSKSYINDKGKEVLVLWGIHHPSTSADQQSLYQNADAYVFVGTSRYSKKFKPEIAIRPKVRDQEGRMNYYWTLVEPGDKITFEATGNLVVPRYAFAMGRNAGSGIIISDTPVHDCNTTCQTPKGAINTSLPFQNIHPITIGKCPKYVKSTKLRLATGLRNVPSIQSRGLFGAIAGFIEGGWTGMVDGWYGYHHQNEQGSGYAADLKSTQNAIDKITNKVNSVIEKMNTQFTAVGKEFNHLEKRIENLNKKVDDGFLDIWTYNAELLVLLENERTLDYHDSNVKNLYERVRSQLKNNAKEIGNGCFEFYHKCDNTCMESVKNGTYDYPKYSEEAKLNREEIDGVKLESTRIYQILAIYSTVASSLVLVVSLGAISFWMCSNGSLQCRICI

SEQ ID NO: 5040 - protein, 566 aa, synthetic construct; identical to SEQ ID NO: 3833
  REGION 1..566: note = hemagglutinin__InfluenzaA__ADI48186

SEQ ID NO: 5041 - protein, 566 aa, synthetic construct
  REGION 1..566: note = hemagglutinin__InfluenzaA__ADI48188
MKAILVVLLYTFATANADTLCIGYHANNSTDTVDTVLEKNVTVTHSVNLLEDKHNGKLCKLRGVAPLHLGKCNIAGWILGNPECESLSTASSWSYIVETSSSDNGTCYPGDFIDYEELREQLSSVSSFERFEIFPKTSSWPNHDSNKGVTAACPHAGAKSFYKNLIWLVKKGNSYPKLSKSYINDKGKEVLVLWGIHHPSTSADQQSLYQNADAYVFVGTSRYSKKFKPEIAIRPKVRDQEGRMNYYWTLVEPGDKITFEATGNLVVPRYAFAMERNAGSDIIISDTPVHDCNTTCQTPKGAINTSLPFQNIHPITIGKCPKYVKSTKLRLATGLRNVPSIQSRGLFGAIAGFIEGGWTGMVDGWYGYHHQNEQGSGYAADLKSTQNAIDKITNKVNSVIEKMNTQFTAVGKEFNHLEKRIENLNKKVDDGFLDIWTYNAELLVLLENERTLDYHDSNVKNLYEKVRSQLKNNAKEIGNGCFEFYHKCDNTCMESVKNGTYDYPKYSEEAKLNREEIDGVKLESTRIYQILAIYSTVASSLVLVVSLGAISFWMCSNGSLQCRICI

SEQ ID NO: 5042 - protein, 566 aa, synthetic construct
  REGION 1..566: note = hemagglutinin__InfluenzaA__ADI48190
MKAILVVLLYTFATANADTLCIGYHANNSTDTVDTVLEKNVTVTHSVNLLEDKHNGKLCKLRGVAPLHLGKCNIAGWILGNPECESLSTASSWSYIVETSSSDNGTCYPGDFIDYEELREQLSSVSSFERFEIFPKTSSWPNHDSNKGVTAACPHAGAKSFYKNLIWLVKKGNSYPKLSKSYINDKGKEVLVLWGIHHPSTSADQQSLYQNADAYVFVGTSRYSKKFKPEIAIRPKVRDQEGRMNYYWTLVEPGDKITFEATGNLVVPRYAFAMERNAGSGIIISDTPVHDCNTTCQTPKGAINTSLPFQNIHPITIGKCPKYVKSTKLRLATGLRNVPSIQSRGLFGAIAGFIEGGWTGMVDGWYGYHHQNEQGSGYAADLKSTQNAIDKITNKVNSVIEKMNTQFTAVGKEFNHLEKRIENLNKKVDDGFLDIWTYNAELLVLLENERTLDYHDSNVKNLYEKVRSQLKNNAKEIGNGCFEFYHKCDNTCMESVKNGTYDYPKYSEEAKLNREEIDGVKLESTKIYQILAIYSTVASSLVLVVSLGAISFWMCSNGSLQCRICI

SEQ ID NO: 5043 - protein, 566 aa, synthetic construct
  REGION 1..566: note = hemagglutinin__InfluenzaA__ADI48192
MKAILVVLLYTFATANADTLCIGYHANNSTDTVDTVLEKNVTVTHSVNLLEDKHNGKLCKLRGVAPLHLGKCNIAGWILGNPECESLSTASSWSYIVETSSSDNGTCYPGDFIDYEELREQLSSVSSFERFEIFPKTSSWPNHDSNKGVTAACPHAGAKSFYKNLIWLVKKGNSYPKLSKSYINDKGKEVLVLWGIHHPSTSADQQSLYQNADAYVFVGTSRYSKKFKPEIAIRPKVRDQEGRMNYYWTLVEPGDKITFEATGNLVVPRYAFAMERNAGSGIIISDTPVHDCNTTCQTPKGAINTSLPFQNIHPITIGKCPKYVKSTKLRLATGLRNVPSIQSRGLFGAIAGFIEGGWTGMVDGWYGYHHQNEQGSGYAADLKSTQNAIDKITNKVNSVIEKMNTQFTAVGKEFNHLEKRIENLNKKVDDGFLDIWTYNAELLVLLENERTLDYHDSNVKNLYEKVRSQLKNNAKEIGNGCFEFYHKCDNTCMESVKNGTYDYPKYSEEAKLNREEIDGVKLESTRIYQILTIYSTVASSLVLVVSLGAISFWMCSNGSLQCRICI

SEQ ID NO: 5044 - protein, 566 aa, synthetic construct
  REGION 1..566: note = hemagglutinin__InfluenzaA__ADI48194
MKAILVVLLYTFATANADTLCIGYHANNSTDTVDTVLEKNVTVTHSVNLLEDKHNGKLCKLRGVAPLHLGKCNIAGWILGNPECESLSTASSWSYIVETSSSDNGTCYPGDFIDYEELREQLSLVSSFERFEIFPKTNSWPNHDSNKGVTAACPHAGAKSFYKNLIWLVKKGNSYPKLSKSYINDKGKEVLVLWGIHHPSTSADQQSLYQNADAYVFVGTSRYSKKFKPEIAIRPKVRDQEGRMNYYWTLVEPGDKITFEATGNLVVPRYAFAMERNAGSGIIISDTPVHDCNTTCQTPKGAINTSLPFQNIHPITIGKCPKYVKSTKLRLATGLRNVPSIQSRGLFGAIAGFIEGGWTGMVDGWYGYHHQNEQGSGYAADLKSTQNAIDKITNKVNSVIEKMNTQFTAVGKEFNHLEKRIENLNKKVDDGFLDIWTYNAELLVLLENERTLDYHDSNVKNLYEKVRSQLKNNAKEIGNGCFEFYHKCDNTCMESVKNGTYDYPKYSEEAKLNREEIDGVKLESTRIYQILAIYSTVASSLVLVVSLGAISFWMCSNGSLQCRICI

SEQ ID NO: 5045 - protein, 566 aa, synthetic construct
  REGION 1..566: note = hemagglutinin__InfluenzaA__ADI48196
MKAILVVLLYTFATANADTLCIGYHANNSTDTVDTVLEKNVTVTHSVNLLEDKHNGKLCKLRGVAPLHLGKCNIAGWILGNPECESLSTASSWSYIVETSSSDNGTCYPGDFIDYEELREQLSSVSSFERFEIFPKTSSWPNHDSNKGVTAACPHAGAKSFYKNLIWLVKKGNSYPKLSKSYINDKGKEVLVLWGIHHPSTSADQQSLYQNADAYVFVGTSRYSKKFKPEIAIRPKVRDQEGRMNYYWTLVEPGDKITFEATGNLVVPRYAFAMERNAGSGIIISDTPVHDCNTTCQTPKGAINTSLPFQNIHPITIGKCPKYVKSTKLRLATGLRNVPSIQSRGLFGAIAGFIEGGWTGMVDGWYGYHHQNEQGSGYAADLKSTQNAIDKITNKVNSVIEKMNTQFTAVGKEFNHLEKRIENLNKKVDDGFLDIWTYNAELLVLLENERTLDYHDSNVKNLYEKVRSQLKNNAKEIGNGCFEFYHKCDNTCMESVKNGTYDYPKYSEEAKLNREEIDGVKLDSTRIYQILAIYSTVASSLVLVVSLGAISFWMCSNGSLQCRICI

SEQ ID NO: 5046 - protein, 566 aa, synthetic construct; identical to SEQ ID NO: 3833
  REGION 1..566: note = hemagglutinin__InfluenzaA__ADI48198

SEQ ID NO: 5047 - protein, 566 aa, synthetic construct; identical to SEQ ID NO: 3833
  REGION 1..566: note = hemagglutinin__InfluenzaA__ADI48200

SEQ ID NO: 5048 - protein, 566 aa, synthetic construct
  REGION 1..566: note = hemagglutinin__InfluenzaA__ADI48202
MKAILVVLLYTFATANADTLCIGYHANNSTDTVDTVLEKNVTVTHSVNLLEDKHNGKLCKLRGVAPLHLGKCNIAGWILGNPECESLSTASSWSYIVETSSSDNGTCYPGDFIDYEELREQLSSVSSFERFEIFPKISSWPNHDSNKGVTAACPHAGAKSFYKNLIWLVKKGNSYPKLSKSYINDKGKEVLVLWGIHHPSTSADQQSLYQNADAYVFVGTSRYSKKFKPEIAIRPKVRDQEGRMNYYWTLVEPGDKITFEATGNLVVPRYAFAMERNAGSGIIISDTPVHDCNTTCQTPKGAINTSLPFQNIHPITIGKCPKYVKSTKLRLATGLRNVPSIQSRGLFGAIAGFIEGGWTGMVDGWYGYHHQNEQGSGYAADLKSTQNAIDKITNKVNSVIEKMNTQFTAVGKEFNHLEKRIENLNKKVDDGFLDIWTYNAELLVLLENERTLDYHDSNVKNLYEKVRSQLKNNAKEIGNGCFEFYHKCDNTCMESVKNGTYDYPKYSEEAKLNREEIDGVKLESTRIYQILAIYSTVASSLVLVVSLGAISFWMCSNGSLQCRICI

SEQ ID NO: 5049 - protein, 566 aa, synthetic construct
  REGION 1..566: note = hemagglutinin__InfluenzaA__ADI48204
MKAILVVLLYTFATANADTLCIGYHANNSTDTVDTVLEKNVTVTHSVNLLEDKHNGKLCKLRGVAPLHLGKCNIAGWILGNPECESLSTASSWSYIVETSSSDNGTCYPGDFIDYEELREQLSSVSSFERFEIFPKTSSWPNHDSNKGVTAACPHAGAKSFYKNLIWLVKKGNSYPKLSKSYINDKGKEVLVLWGIHHPSTSADQQSLYQNVDAYVFVGTSRYSKKFKPEIAIRPKVRDQEGRMNYYWTLVEPGDKITFEATGNLVVPRYAFAMERNAGSGIIISDTPVHDCNTTCQTPKGAINTSLPFQNIHPITIGKCPKYVKSTKLRLATGLRNVPSIQSRGLFGAIAGFIEGGWTGMVDGWYGYHHQNEQGSGYAADLKSTQNAIDKITKKVNSVIEKMNTQFTAVGKEFNHLEKRIENLNKKVDDGFLDIWTYNAELLVLLENERTLDYHDSNVKNLYEKVRSQLKNNAKEIGNGCFEFYHKCDNTCMESVKNGTYDYPKYSEEAKLNREEIDGVKLESTRIYQILAIYSTVASSLVLVVSLGAISFWMCSNGSLQCRICI

SEQ ID NO: 5050 - protein, 566 aa, synthetic construct; identical to SEQ ID NO: 3833
  REGION 1..566: note = hemagglutinin__InfluenzaA__ADI48208

SEQ ID NO: 5051 - protein, 566 aa, synthetic construct; identical to SEQ ID NO: 3833
  REGION 1..566: note = hemagglutinin__InfluenzaA__ADI48210

SEQ ID NO: 5052 - protein, 566 aa, synthetic construct
  REGION 1..566: note = hemagglutinin__InfluenzaA__ADI48212
MKAILVVLLYTFATANADTLCIGYHANNSTDTVDTVLEKNVTVTHSVNLLEDKHNGKLCKLRGVAPLHLGKCNIAGWILGNPECESLSTASSWSYIVETSSSDNGTCYPGDFIDYEELREQLSSVSSFERFEIFPKTSSWPNHDSNKGVTAACPHAGAKSFYKNLIWLVKKGNSYPKLSKSYINDKGKEVLVLWGIHHPSTSADQQSLYQNADAYVFVGTSRYSKKFKPEIAIRPKVRDQEGRMNYYWTLVEPGDKITFEATGNLVVPRYAFAMERNAGSGIIISDTPVHDCNTTCQTPKGAINTSLPFQNIHPITIGKCPKYVKSTKLRLATGLRNVPSIQSRGLFGAIAGFIEGGWTGMVDGWYGYHHQNEQGSGYAADLKSTQNAIDKITNKVNSVIEKMNTQFTAVGKEFNHLEKRIENLNKKVDDGFLDVWTYNAELLVLLENERTLDYHDSNVKNLYEKVRSQLKNNAKEIGNGCFEFYHKCDNTCMESVKNGTYDYPKYSEEAKLNREEIDGVKLESTRIYQILAIYSTVASSLVLVVSLGAISFWMCSNGSLQCRICI

SEQ ID NO: 5053 - protein, 566 aa, synthetic construct
  REGION 1..566: note = hemagglutinin__InfluenzaA__ADI48214
MKAILVVLLYTFAIANADTLCIGYHANNSTDTVDTVLEKNVTVTHSVNLLEDKHNGKLCKLRGVAPLHLGKCNIAGWILGNPECESLSTASSWSYIVETSSSDNGTCYPGDFIDYEELREQLSSVSSFERFEIFPKTSSWPNHDSNKGVTAACPHAGAKSFYKNLIWLVKKGNSYPKLSKSYINDKGKEVLVLWGIHHPSTSADQQSLYQNADAYVFVGTSRYSKKFKPEIAIRPKVRDQEGRMNYYWTLVEPGDKITFEATGNLVVPRYAFAMERNAGSGIIISDTPVHDCNTTCQTPKGAINTSLPFQNIHPITIGKCPKYVKSTKLRLATGLRNVPSIQSRGLFGAIAGFIEGGWTGMVDGWYGYHHQNEQGSGYAADLKSTQNAIDKITNKVNSVIEKMNTQFTAVGKEFNHLEKRIENLNKKVDDGFLDIWTYNAELLVLLENERTLDYHDSNVKNLYEKVRSQLKNNAKEIGNGCFEFYHKCDNTCMESVKNGTYDYPKYSEEAKLNREEIDGVKLESTRIYQILAIYSTVASSLVLAVSLGAISFWMCSNGSLQCRICI

SEQ ID NO: 5054 - protein, 566 aa, synthetic construct; identical to SEQ ID NO: 5052
  REGION 1..566: note = hemagglutinin__InfluenzaA__ADI48216

SEQ ID NO: 5055 - protein, 566 aa, synthetic construct
  REGION 1..566: note = hemagglutinin__InfluenzaA__ADI48218
MKAILVVLLYTFATANADTLCIGYHANNSTDTVDTVLEKNVTVTHSVNLLEDKHNGKLCKLRGVAPLHLGKCNIAGWILGNPECESLSTASSWSYIVETSSSDNGTCYPGDFIDYEELREQLSSVSSFERFEIFPKTSSWPNHDSNKGVTAACPHAGAKSFYKNLIWLVKKGNSYPKLSKSYINDKGKEVLVLWGIHHPSTSADQQSLYQNADAYVFVGTSRYSKKFKPEIAIRPKVRDQEGRMNYYWTLVEPGDKITFEATGNLVVPRYAFAMERNAGSGIIISDTPVHDCNTTCQTPKGAINTSLPFQNIHPITIGKCPKYVKSTKLRLATGLRNVPSIQSRGLFGAIAGFIEGGWTGMVDGWYGYHHQNEQGSGYAADLKSTQNAIDKITNKVNSVIEKMNTQFTAVGKEFNHLEKRIENLNKKVDDGFLDIWTYNAELLVLLENERTLDYQDSNVKNLYEKVRSQLKNNAKEIGNGCFEFYHKCDNTCMESVKNGTYDYPKYSEEAKLNREEIDGVKLESTRIYQILAIYSTVASSLVLVVSLGAISFWMCSNGSLQCRICI

SEQ ID NO: 5056 - protein, 566 aa, synthetic construct
  REGION 1..566: note = hemagglutinin__InfluenzaA__ADI48220
MKAILVVLLYTFATANADTLCIGYHANNSTDTVDTVLEKNVTVTHSVNLLEDKHNGKLCKLRGVAPLHLGKCNIAGWILGNPECESLSTASSWSYIVETSSSDNGTCYPGDFIDYEELREQLSSVSSFERFEIFPKTSSWPNHDSNKGVTAACPHAGAKSFYKNLIWLVKKGNSYPKLSKSYINDKGKEVLVLWGIHHPSTSADQQSLYQNADAYVFVGTSRYSKKFKPEIAIRPKVRDQEGRMNYYWTLVEPGDKITFETTGNLVVPRYAFAMERNAGSGIIISDTPVHDCNTTCQTPKGAINTSLPFQNIHPITIGKCPKYVKSTKLRLATGLRNVPSIQSRGLFGAIAGFIEGGWTGMVDGWYGYHHQNEQGSGYAADLKSTQNAIDKITNKVNSVIEKMNTQFTAVGKEFNHLEKRIENLNKKVDDGFLDIWTYNAELLVLLENERTLGYHDSNVKNLYEKVRSQLKNNAKEIGNGCFEFYHKCDNTCMESVKNGTYDYPKYSEEAKLNREEIDGVKLESTRIYQILAIYSTVASSLVLVVSLGAISFWMCSNGSLQCRICI

SEQ ID NO: 5057 - protein, 566 aa, synthetic construct
  REGION 1..566: note = hemagglutinin__InfluenzaA__ADI48622
MKAILVFLLYTFATANADTLCIGYHANNSTDTVDTVLEKNVTVTHSVNLLEDKHNGKLCKLRGVAPLHLGKCNIAGWILGNPECESLSTASSWSYIVETSSSDNGTCYPGDFIDYEELREQLSSVSSFERFEIFPKTSSWPNHDSNKGVTAACPHAGAKSFYKNLIWLVKKGNSYPKLSKSYINDKGKEVLVLWGIHHPSTSADQQSLYQNADAYVFVGTSRYSKKFKPEIAIRPKVRDQEGRMNYYWTLVEPGDKITFEATGNLVVPRYAFAMERNAGSGIIISDTPVHDCNTTCQTPKGAINTSLPFQNIHPITIGKCPKYVKSTKLRLATGLRNVPSIQSRGLFGAIAGFIEGGWTGMVDGWYGYHHQNEQGSGYAADLKSTQNAIDEITNKVNSVIEKMNTQFTAVGKEFNHLEKRIENLNKKVDDGFLDIWTYNAELLVLLENERTLDYHDSNVKNLYEKVRSQLKNNAKEIGNGCFEFYHKCDNTCMESVKNGTYDYPKYSEEAKLNREEIDGVKLESTRIYQILAIYSTVASSLVLVVSLGAISFWMCSNGSLQCRICI

SEQ ID NO: 5058 - protein, 566 aa, synthetic construct
  REGION 1..566: note = hemagglutinin__InfluenzaA__ADI48632
MEAILVVLLYTFATANADTLCIGYHANNSTDTVDTVLEKNVTVTHSVNLLEDKHNGKLCKLRGVAPLHLGKCNIAGWILGNPECESLSTASSWSYIVETSSSDNGTCYPGDFIDYEELREQLSSVSSFERFEIFPKTSSWPNHDSNKGVTAACPHAGAKSFYKNLIWLVKKGNSYPKLSKSYINDKGKEVLVLWGVHHPSTSADQQSLYQNADAYVFVGSSRYSKKFKPEIAIRPKVRDQEGRMNYYWTLVEPGDKITFEATGNLVVPRYAFAMERNAGSGIIISDTPVHDCNTTCQTPKGAINTSLPFHNIHPITIGKCPKYVKSTKLRLATGLRNVPSIQSRGLFGAIAGFIEGGWTGMVDGWYGYHHQNEQGSGYAADLKSTQNAIDEITNKVNSVIEKMNTQFTAVGKEFNHLEKRIENLNKKVDDGFLDIWTYNAELLVLLENERTLDYHDSNVKNLYEKVRSQLKNNAKEIGNGCFEFYHKCDNTCMESVKNGTYDYPKYSEEAKLNREEIDGVKLESTRIYQILAIYSTVASSLVLVVSLGAISFWMCSNGSLQCRICI

SEQ ID NO: 5059 - protein, 566 aa, synthetic construct; identical to SEQ ID NO: 2911
  REGION 1..566: note = hemagglutinin__InfluenzaA__ADI48642

SEQ ID NO: 5060 - protein, 566 aa, synthetic construct; identical to SEQ ID NO: 2911
  REGION 1..566: note = hemagglutinin__InfluenzaA__ADI48652

SEQ ID NO: 5061 - protein, 566 aa, synthetic construct
  REGION 1..566: note = hemagglutinin__InfluenzaA__ADI48672
MEAILVVLLYTFATANADTLCIGYHANNSTDTVDTVLEKNVTVTHSVNLLEDKHNGKLCKLRGVAPLHLGKCNIAGWILGNPECESLSTASSWSYIVETSSSDNGTCYPGDFIDYEELREQLSSVSSFERFEIFPKTSSWPNHDSNKGVTAACPHAGAKSFYNNLIWLVKKGNSYPKLSKSYINDKGKEVLVLWGIHHPSTSADQQSLYQNADAYVFVGSSRYSKKFKPEIAIRPKVRDQEGRMNYYWTLVEPGDKITFEATGNLVVPRYAFAMERNAGSGIIISDTPVHDCNTTCQTPKGAINTSLPFHNIHPITIGKCPKYVKSTKLRLATGLRNVPSIQSRGLFGAIAGFIEGGWTGMVDGWYGYHHQNEQGSGYAADLKSTQNAIDEITNKVNSVIEKMNTQFTAVGKEFNHLEKRIENLNKKVDDGFLDIWTYNAELLVLLENERTLDYHDSNVKNLYEKVRSQLKNNAKEIGNGCFEFYHKCDNTCMESVKNGTYDYPKYSEEAKLNREEIDGVKLESTRIYQILAIYSTVASSLVLVVSLGAISFWMCSNGSLQCRICI

SEQ ID NO: 5062 - protein, 566 aa, synthetic construct; identical to SEQ ID NO: 2669
  REGION 1..566: note = hemagglutinin__InfluenzaA__ADI48682

SEQ ID NO: 5063 - protein, 566 aa, synthetic construct; identical to SEQ ID NO: 2911
  REGION 1..566: note = hemagglutinin__InfluenzaA__ADI48692

SEQ ID NO: 5064 - protein, 566 aa, synthetic construct; identical to SEQ ID NO: 2849
  REGION 1..566: note = hemagglutinin__InfluenzaA__ADI48702

SEQ ID NO: 5065 - protein, 566 aa, synthetic construct; identical to SEQ ID NO: 2911
  REGION 1..566: note = hemagglutinin__InfluenzaA__ADI48712

SEQ ID NO: 5066 - protein, 566 aa, synthetic construct; identical to SEQ ID NO: 2911
  REGION 1..566: note = hemagglutinin__InfluenzaA__ADI48722

SEQ ID NO: 5067 - protein, 566 aa, synthetic construct; identical to SEQ ID NO: 2669
  REGION 1..566: note = hemagglutinin__InfluenzaA__ADI48732

SEQ ID NO: 5068 - protein, 566 aa, synthetic construct; identical to SEQ ID NO: 2669
  REGION 1..566: note = hemagglutinin__InfluenzaA__ADI48742

SEQ ID NO: 5069 - protein, 566 aa, synthetic construct
  REGION 1..566: note = hemagglutinin__InfluenzaA__ADI48752
MEAILVFLLYTFATANADTLCIGYHANNSTDTVDTVLEKNVTVTHSVNLLEDKHNGKLCKLRGVAPLHLGKCNIAGWILGNPECESLSTASSWSYIVETSSSDNGTCYPGDFIDYEELREQLSSVSSFERFEIFPKTSSWPNHDSNKGITAACPHAGAKSFYKNLIWLVKKGNSYPKLSKSYINDKGKEVLVLWGIHHPSTSADQQSLYQNADAYVFVGSSRYSKKFKPEIAIRPKVRDQEGRMNYYWTLVEPGDKITFEATGNLVVPRYAFAMERNAGSGIIISDTPVHDCNTTCQTPKGAINTSLPFHNIHPITIGKCPKYVKSTKLRLATGLRNVPSIQSRGLFGAIAGFIEGGWTGMVDGWYGYHHQNEQGSGYAADLKSTQNAIDEITNKVNSVIEKMNTQFTAVGKEFNHLEKRIENLNKKVDDGFLDIWTYNAELLVLLENERTLDYHDSNVKNLYEKVRSQLKNNAKEIGNGCFEFYHKCDNTCMESVKNGTYDYPKYSEEAKLNREEIDGVKLESTRIYQILAIYSTVASSLVLVVSLGAISFWMCSNGSLQCRICI

SEQ ID NO: 5070 - protein, 566 aa, synthetic construct; identical to SEQ ID NO: 2911
  REGION 1..566: note = hemagglutinin__InfluenzaA__ADI48762

SEQ ID NO: 5071 - protein, 566 aa, synthetic construct
  REGION 1..566: note = hemagglutinin__InfluenzaA__ADI48772
MEAILVVLLYTFATANADTLCIGYQANNSTDTVDTVLEKNVTVTHSVNLLEDKHNGKLCKLRGVAPLHLGKCNIAGWILGNPECESLSTASSWSYIVETSSSDNGTCYPGDFIDYEELREQLSSVSSFERFEIFPKTSSWPNHDSNKGVTAACPHAGAKSFYKNLIWLVKKGNSYPKLSKSYINDKGKEVLVLWGIHHPSTSADQQSLYQNADAYVFVGSSRYSKKFKPEIAIRPKVRDQEGRMNYYWTLVEPGDKITFEATGNLVVPRYAFAMERNAGSGIIISDTPVHDCNTTCQTPKGAINTSLPFHNIHPITIGKCPKYVKSTKLRLATGLRNVPSIQSRGLFGAIAGFIEGGWTGMVDGWYGYHHQNEQGSGYAADLKSTQNAIDEITNKVNSVIEKMNTQFTAVGKEFNHLEKRIENLNKKVDDGFLDIWTYNAELLVLLENERTLDYHDSNVKNLYEKVRSQLKNNAKEIGNGCFEFYHKCDNTCMESVKNGTYDYPKYSEEAKLNREEIDGVKLESTRIYQILAIYSTVASSLVLVVSLGAISFWMCSNGSLQCRICI

SEQ ID NO: 5072 - protein, 566 aa, synthetic construct
  REGION 1..566: note = hemagglutinin__InfluenzaA__ADI48782
MKAILVVLLYTFATANADTLCIGYHANNSTDTVDTVLEKNVTVTHSVNLLEDKHNGKLCKLRGVAPLHLGKCNIAGWILGNPECESLSTASSWSYIVETSSSDNGTCYPGDFIDYEELREQLSSVSSFERFEIFPKTSSWPNHDSNKGVTAACPHAGAKSFYKNLIWLVKKGNSYPKLSKSYINDKGKEVLVLWGIHHPSTSADQQSLYQNADAYVFVGTSRYSKKFKPEIAIRPKVRDQEGRMNYYWTLVEPGDKITFEATGNLVVPRYAFAMERNAGSGIIISDTPVHDCNTTCQTPKGAINTSLPFQNIHPITIGKCPKYVKSTKLRLATGLRNVPSIQSRGLFGAIAGFIEGGWTGMVDGWYGYHHQNEQGSGYAADLKSTQNAIDEITNKVNSVIEKMNTQFTAVGKEFNHLEKRIENLNKKVDDGFLDIWTYNAELLVLLENERTLDYHDSNVKNLYEKVRSQLKNNAKEIGNGCFEFYHKCDNTCMESVKNGTYDYPKYSEESKLNREEIDGVKLESTRIYQILAIYSTVASSLVLVVSLGAISFWMCSNGSLQCRICI

SEQ ID NO: 5073 - protein, 566 aa, synthetic construct
  REGION 1..566: note = hemagglutinin__InfluenzaA__ADI48792
MEAILVVLLYTFATANADTLCIGYHANNSTDTVDTVLEKNVTVTHSVNLLEDKHNGKLCKLRGVAPLHLGKCNIAGWILGNPECESLSTASSWSYIVETSSSDNGTCYPGDFIDYEELREQLSSVSSFERFEIFPKTSSWPNHDSNKGVTAACPHAGAKSFYKNLIWLVKKGNSYPKLSKSYINDKGKEVLVLWGIHHPSTSADQQSLYQNADAYIFVGSSRYSKKFKPEIAIRPKVRDQEGRMNYYWTLVEPGDKITFEATGNLVVPRYAFAMERNAGSGIIISDTPVHDCNTTCQTPKGAINTSLPFHNIHPITIGKCPKYVKSTKLRLATGLRNVPSIQSRGLFGAIAGFIEGGWTGMVDGWYGYHHQNEQGSGYAADLKSTQNAIDEITNKVNSVIEKMNTQFTAVGKEFNHLEKRIENLNKKVDDGFLDIWTYNAELLVLLENERTLDYHDSNVKNLYEKVRSQLKNNAKEIGNGCFEFYHKCDNTCMESVKNGTYDYPKYSEEAKLNREEIDGVKLESTRIYQILAIYSTVASSLVLVVSLGAISFWMCSNGSLQCRICI

SEQ ID NO: 5074 - protein, 566 aa, synthetic construct
  REGION 1..566: note = hemagglutinin__InfluenzaA__ADI49029
MEAILVVLLYTFATANADTLCIGYHANNSTDTVDTVLEKNVTVTHSVNLLEDKHNGKLCKLRGVAPLHLGKCNIAGWILGNPECESLSTASSWSYIVETSISDNGTCYPGDFIDYEELREQLSSVSSFERFEIFPKTSSWPNHDSNKGVTAACPHAGAKSFYKNLIWLVKKGNSYPKLSKSYINDKGKEVLVLWGIHHPSTSADQQSLYQNADAYVFVGSSRYSKKFKPEIAIRPKVRDQEGRMNYYWTLVEPGDKITFEATGNLVVPRYAFAMERNAGSGIIISDTPVHDCNTTCQTPKGAINTSLPFHNIHPITIGKCPKYVKSTKLRLATGLKNVPSIQSRGLFGAIAGFIEGGWTGMVDGWYGYHHQNEQGSGYAADLKSTQNAIDEITNKVNSVIEKMNTQFTAVGKEFNHLEKRIENLNKKVDDGFLDIWTYNAELLVLLENERTLDYHDSNVKNLYEKVRSQLKNNAKEIGNGCFEFYHKCDNTCMESVKNGTYDYPKYSEEAKLNREEIDGVKLESTRIYQILAIYSTVASSLVLVVSLGAISFWMCSNGSLQCRICI

SEQ ID NO: 5075 - protein, 566 aa, synthetic construct; identical to SEQ ID NO: 2911
  REGION 1..566: note = hemagglutinin__InfluenzaA__ADI49240

SEQ ID NO: 5076 - protein, 566 aa, synthetic construct; identical to SEQ ID NO: 2911
  REGION 1..566: note = hemagglutinin__InfluenzaA__ADI49260

SEQ ID NO: 5077 - protein, 566 aa, synthetic construct
  REGION 1..566: note = hemagglutinin__InfluenzaA__ADI49270
MKAILVVLLYTFATANADTLCIGYHANNSTDTVDTVLEKNVTVTHSVNLLEDKHNGKLCKLRGVAPLHLGKCNIAGWILGNPECESLSTASSWSYIVETSSSDNGTCYPGDFIDYEELREQLSSVSSFERFEIFPKTSSWPNHDSNKGVTAACPHAGAKSFYKNLIWLVKKGNSYPKLSKSYINDKGKEVLVLWGIHHPSTSADQQSLYQNADAYVFVGTSRYSKKFKPEIAIRPKVRDQEGRMNYYWTLVEPGDKITFEATGNLVVPRYAFAMERNAGSGIIISDTPVHDCNTTCQTPKGAINTSLPFQNIHPITIGKCPKYVKSTKLRLATGLRNVPSIQSRGLFGAIAGFIEGGWTGMVDGWYGYHHQNEQGSGYAADLKSTQNAIDEITNKVNSVIEKMNTQFTAVGKEFNHLEKRIENLNKKVDDGFLDIWTYNAELLVLLENERTLDYHDSNVKNLYEKVRSQLKNNAREIGNGCFEFYHKCDNTCMESVKNGTYDYPKYSEEAKLNREEIDGVKLESTRIYQILAIYSTVASSLVLVVSLGAISFWMCSNGSLQCRICI

SEQ ID NO: 5078 - protein, 566 aa, synthetic construct; identical to SEQ ID NO: 2911
  REGION 1..566: note = hemagglutinin__InfluenzaA__ADI49280

SEQ ID NO: 5079 - protein, 566 aa, synthetic construct; identical to SEQ ID NO: 2911
  REGION 1..566: note = hemagglutinin__InfluenzaA__ADI49312

SEQ ID NO: 5080 - protein, 566 aa, synthetic construct; identical to SEQ ID NO: 2911
  REGION 1..566: note = hemagglutinin__InfluenzaA__ADI49322

SEQ ID NO: 5081 - protein, 566 aa, synthetic construct; identical to SEQ ID NO: 2911
  REGION 1..566: note = hemagglutinin__InfluenzaA__ADI49332

SEQ ID NO: 5082 - protein, 566 aa, synthetic construct; identical to SEQ ID NO: 3238
  REGION 1..566: note = hemagglutinin__InfluenzaA__ADI49342

SEQ ID NO: 5083 - protein, 566 aa, synthetic construct; identical to SEQ ID NO: 2911
  REGION 1..566: note = hemagglutinin__InfluenzaA__ADI49352

SEQ ID NO: 5084 - protein, 566 aa, synthetic construct; identical to SEQ ID NO: 2669
  REGION 1..566: note = hemagglutinin__InfluenzaA__ADI49362

SEQ ID NO: 5085 - protein, 566 aa, synthetic construct; identical to SEQ ID NO: 4221
  REGION 1..566: note = hemagglutinin__InfluenzaA__ADI49382

SEQ ID NO: 5086 - protein, 566 aa, synthetic construct; identical to SEQ ID NO: 3022
  REGION 1..566: note = hemagglutinin__InfluenzaA__ADI49392

SEQ ID NO: 5087 - protein, 566 aa, synthetic construct; identical to SEQ ID NO: 2656
  REGION 1..566: note = hemagglutinin__InfluenzaA__ADI49717

SEQ ID NO: 5088 - protein, 566 aa, synthetic construct
  REGION 1..566: note = hemagglutinin__InfluenzaA__ADI49727
MKAILVVLLYTFATANADTLCIGYHANNSTDTVDTVLEKNVTVTHSVNLLEDKHNGKLCKLRGVAPLHLGKCNIAGWILGNPECESLSTASSWSYIVETSSSDNGTCYPGDFIDYEELREQLSSVSSFERFEIFPKTSSWPNHDSNKGVTAACPHAGAKSFYKNLIWLVKKGNSYPKLSKSYINDKGKEVLVLWGIHHPSTSADQQSLYQNADAYVFVGSSRYSKKFKPEIAIRPKVRDQEGRMNYYWTLVEPGDKITFEATGNLVVPRYAFAMERNAGSGIIISDTPVHDCNTTCQTPKGAINTSLPFQNIHPITIGKCPKYVKSTKLRLATGLRNVPSIQSRGLFGAIAGFIEGGWTGMVDGWYGYHHQNEQGSGYAADLKSTQNAIDEITNKVNSIIEKMNTQFTAVGKEFNHLEKRIENLNKKVDDGFLDIWTYNAELLVLLENERTLDYHDSNVKNLYEKVRSQLKNNAKEIGNGCFEFYHKCDNTCMESVKNGTYDYPKYSEEAKLNREEIDGVKLESTRIYQILAIYSTVASSLVLVVSLGAISFWMCSNGSLQCRICI

SEQ ID NO: 5089 - protein, 566 aa, synthetic construct; identical to SEQ ID NO: 2656
  REGION 1..566: note = hemagglutinin__InfluenzaA__ADI49737

SEQ ID NO: 5090 - protein, 566 aa, synthetic construct; identical to SEQ ID NO: 2656
  REGION 1..566: note = hemagglutinin__InfluenzaA__ADI49747

SEQ ID NO: 5091 - protein, 566 aa, synthetic construct; identical to SEQ ID NO: 2656
  REGION 1..566: note = hemagglutinin__InfluenzaA__ADI49757

SEQ ID NO: 5092 - protein, 566 aa, synthetic construct; identical to SEQ ID NO: 2656
  REGION 1..566: note = hemagglutinin__InfluenzaA__ADI49767

SEQ ID NO: 5093 - protein, 566 aa, synthetic construct
  REGION 1..566: note = hemagglutinin__InfluenzaA__ADI49777
MKAILVVLLYTFATANADTLCIGYHANNSTDTVDTVLEKNVTVTHSVNILEDKHNGKLCKLRGVAPLHLGKCNIAGWILGNPECESLSTASSWSYIVETSSSDNGTCYPGDFIDYEELREQLSSVSSFERFEIFPKTSSWPNHDSNKGVTAACPHAGAKSFYKNLIWLVKKGNSYPKLSKSYINDKGKEVLVLWGIHHPSTSTDQQSLYQNADAYVFVGSSRYSKKFKPEIAIRPKVRDQEGRMNYYWTLVEPGDKITFEATGNLVVPRYAFAMERNAGSGIIISDTPVHDCNTTCQTPKGAINTSLPFQNIHPITIGKCPKYVKSTKLRLATGLRNVPSIQSRGLFGAIAGFIEGGWTGMVDGWYGYHHQNEQGSGYAADLKSTQNAIDEITNKVNSVIEKMNTQFTAVGKEFNHLEKRIENLNKKVDDGFLDIWTYNAELLVLLENERTLDYHDSNVKNLYEKVRSQLKNNAKEIGNGCFEFYHKCDNTCMESVKNGTYDYPKYSEEAKLNREEIDGVKLESTRIYQILAIYSTVASSLVLVVSLGAISFWMCSNGSLQCRICI

SEQ ID NO: 5094 - protein, 566 aa, synthetic construct
  REGION 1..566: note = hemagglutinin__InfluenzaA__ADI49787
MKAILVVLLYTFATANADTLCIGYHANNSTDTVDTVLEKNVTVTHSVNLLEDKHNGKLCKLRGVAPLHLGKCNIAGWILGNPECESISTASSWSYIVETSSSDNGTCYPGDFIDYEELREQLSSVSSFERFEIFPKTSSWPNHDSNKGVTAACPHAGAKSFYKNLIWLVKKGNSYPKLSKSYINDKGKEVLVLWGIHHPSTSADQQSLYQNADAYVFVGSSRYSKKFKPEIAIRPKVRDQEGRMNYYWTLVEPGDKITFEATGNLVVPRYAFAMERNAGSGIIISDTPVHDCNTTCQTPKGAINTSLPFQNIHPITIGKCPKYVKSTKLRLATGLRNVPSIQSRGLFGAIAGFIEGGWTGMVDGWYGYHHQNEQGSGYAADLKSTQNAIDEITNKVNSVIEKMNTQFTAVGKEFNHLEKRIENLNKKVDDGFLDIWTYNAELLVLLENERTLDYHDSNVKNLYEKVRSQLKNNAKEIGNGCFEFYHKCDNTCMESVKNGTYDYPKYSEEAKLNREEIDGVKLESTRIYQILAIYSTVASSLVLVVSLGAISFWMCSNGSLQCRICI

SEQ ID NO: 5095 - protein, 566 aa, synthetic construct; identical to SEQ ID NO: 4004
  REGION 1..566: note = hemagglutinin__InfluenzaA__ADI49822

SEQ ID NO: 5096 - protein, 566 aa, synthetic construct
  REGION 1..566: note = hemagglutinin__InfluenzaA__ADI50027
MKAILVVLLYTFATANADTLCIGYHANNSTDTVDTVLEKNVTVTHSVNLLEDKHNGKLCKLRGVAPLHLGKCNIAGWILGNPECESLSTASSWSYIVETSSSDNGTCYPGDFIDYEELREQLSSVSSFERFEIFPKTSSWPNHDSNKGVTAACPHAGAKSFYKNLIWLVKKGNSYPKLSKSYINDKGKEVLVLWGIHHPSTSADQQSLYQNADAYVFVGSSRYSKKFKPEIAIRPKVRDQEGRMKYYWTLVEPGDKITFEATGNLVVPRYAFAMERNAGSGIIISDTPVHDCNTTCQTPKGAINTSLPFQNIHPITIGKCPKYVKSTKLRLATGLRNVPSIQSRGLFGAIAGFIEGGWTGMVDGWYGHHHQNEQGSGYAADLKSTQNAIDEITNKVNSVIEKMNTQFTAVGKEFNHLEKRIENLNKKVDDGFLDIWTYNAELLVLLENERTLDYHDSNVKNLYEKVRSQLKNNAKEIGNGCFEFYHKCDNTCMESVKNGTYDYPKYSEEAKLNREEIDGIKLESTRIYQILAIYSTVASSLVLVVSLGAISFWMCSNGSLQCRICI

SEQ ID NO: 5097 - protein, 566 aa, synthetic construct
  REGION 1..566: note = hemagglutinin__InfluenzaA__ADI52834
MKAILVVLLYTFATANADTLCIGYHANNSTDTVDTVLEKNVTVTHSVNILEDKHNGKLCKLRGVAPLHLGKCNIAGWILGNPECESLSTASSWSYIVETSSSDNGTCYPGDFIDYEELREQLSSVSSFERFEIFPKTSSWPNHDSNKGVTAACPHAGAKSFYKNLIWLVKKGNSYPKLSKSYINDKGKEVLVLWGIHHPPTSADQQSLYQNADAYVFVGSSRYSKKFKPEIAIRPKVRDQEGRMNYYWTLVEPGDKITFEATGNLVVPRYAFAMERNAGSGIIISDTPVHDCNTTCQTPKGAINTSLPFQNIHPITIGKCPKYVKSTKLRLATGLRNVPSIQSRGLFGAIAGFIEGGWTGMVDGWYGYHHQNEQGSGYAADLKSTQNAIDEITNKVNSVIEKMNTQFTAVGKEFNHLEKRIENLNKKVDDGFLDIWTYNAELLVLLENERTLDYHDSNVKNLYEKVRSQLKNNAKEVGNGCFEFYHKCDNTCMESVKNGTYDYPKYSEEAKLNREEIDGVKLESTRIYQILAIYSTAASSLVLVVSLGAISFWMCSNGSLQCRICI

SEQ ID NO: 5098 - protein, 566 aa, synthetic construct
  REGION 1..566: note = hemagglutinin__InfluenzaA__ADI52835
MEAILVVLLYTFATANADTLCIGYHANNSTDTVDTVLEKNVTVTHSVNLLEDKHNGKLCKLRGVAPLHLGKCNIAGWILGNPECESLSTASSWSYIVETSSSDNGTCYPGDFIDYEELREQLSSVSSFERFEIFPKTSSWPNHDSNKGVTAACPHAGAKSFYKNLIWLVKKGNSYPKLSKSYINDKGKEVLVLWGIHHPPTSADQQSLYQNADAYVFVGSSKYSKKFKPEIAIRPKVRDQEGRMNYYWTLVEPGDKITFEATGNLVVPRYAFAMERNAGSGIIISDTPVHDCNTTCQTPKGAINTSLPFHNIHPITIGKCPKYVKSTKLRLATGLRNVPSIQSRGLFGAIAGFIEGGWTGMVDGWYGYHHQNEQGSGYAADLKSTQNAIDEITNKVNSVIEKMNTQFTAVGKEFNHLEKRIENLNKKVDDGFLDIWTYNAELLVLLENERTLDYHDSNVKNLYEKVRSQLKNNAKEIGNGCFEFYHKCDNTCMESVKNGTYDYPKYSEEAKLNREEIDGVKLESTKIYQILAIYSTVASSLVLVVSLGAISFWMCSNGSLQCRICI

SEQ ID NO: 5099 - protein, 566 aa, synthetic construct
  REGION 1..566: note = hemagglutinin__InfluenzaA__ADI52836
MEAILVVLLYTFATANADTLCIGYHANNSTDTVDTVLEKNVTVTHSVNLLEDKHNGKLCKLRGVAPLHLGKCNIAGWILGNPECESLSTASSWSYIVETSSSDNGTCYPGDFIDYEELREQLSSVSSFERFEIFPKTSSWPNHDSNKGVTAACPHAGAKSFYKNLIWLVKKENSYPKLSKSYINDKGKEVLVLWGIHHPSTSADQQRLYQNADAYVFVGSSKYSKKFKPEIAIRPKVRDQEGRMNYYWTLVEPGDKITFEATGNLVVPRYAFAMERNAGSGIIISDTPVHDCNTTCQTPKGAINTSLPFHNIHPITIGKCPKYVKSTKLRLATGLRNVPSIQSRGLFGAIAGFIEGGWTGMVDGWYGYHHQNEQGSGYAADLKSTQNAIDEITNKVNSVIEKMNTQFTAVGKEFNHLEKRIENLNKKVDDGFLDIWTYNAELLVLLENERTLDYHDSNVKNLYEKVRSQLKNNAKEIGNGCFEFYHKCDNTCMESVKNGTYDYPKYSEEAKLNREEIDGVKLESTKIYQILAIYSTVASSLVLVVSLGAISFWMCSNGSLQCRICI

SEQ ID NO: 5100 - protein, 566 aa, synthetic construct
  REGION 1..566: note = hemagglutinin__InfluenzaA__ADI52837
MEAILVVLLYTFATANADTLCIGYHANNSTDTVDTVLEKNVTVTHSVNLLEVKHNGKLCKLRGVAPLHLGKCNIAGWILGNPECESLSTASSWSYIVETSSSDNGTCYPGDFIDYEELREQLSSVSSFERFEIFPKTSSWPNHDSNKGVTAACPHAGAKSFYKNLIWLVKKGNSYPKLSKSYINDKGKEVLVLWGIHHPSTSADQQSLYQNADAYVFVGSSKYSKKFKPEIAIRPKVRDQEGRMNYYWTLVEPGDKITFEANGNLVVPRYAFAMERNAGSGIIISDTPVHDCNTTCQTPKGAINTSLPFHNIHPITIGKCPKYVKSTKLRLATGLRNVPSIQSRGLFGAIAGFIEGGWTGMVDGWYGYHHQNEQGSGYAADLKSTQNAIDEITNKVNSVIEKMNTQFTAVGKEFNHLEKRIENLNKKVDDGFLDIWTYNAELLVLLENERTLDYHDSNVKNLYEKVRSQLKNNAKEIGNGCFEFYHKCDNTCMESVKNGTYDYPKYSEEAKLNREEIDGVKLESTKIYQILAIYSTVASSLVLVVSLGAISFWMCSNGSLQCRICI

SEQ ID NO: 5101 - protein, 566 aa, synthetic construct; identical to SEQ ID NO: 3467
  REGION 1..566: note = hemagglutinin__InfluenzaA__ADI72915

SEQ ID NO: 5102 - protein, 566 aa, synthetic construct; identical to SEQ ID NO: 3467
  REGION 1..566: note = hemagglutinin__InfluenzaA__ADI72916

SEQ ID NO: 5103 - protein, 566 aa, synthetic construct; identical to SEQ ID NO: 3467
  REGION 1..566: note = hemagglutinin__InfluenzaA__ADI72917

SEQ ID NO: 5104 - protein, 566 aa, synthetic construct
  REGION 1..566: note = hemagglutinin__InfluenzaA__ADI72918
MKAILVVLLYTFATANADTLCIGYHANNSTDTVDTVLEKNVTVTHSVNLLEDKHNGKLCKLRGVAPLHLGKCNIAGWILGNPECESLSTASSWSYIVETSSSDNGTCYPGDFIDYEELREQLSSVSSFERFEIFPKTSSWPNHDPNKGVTAACPHAGAKSFYKNLIWLVKKGNSYPKLSKSYINDRGKEVLVLWGIHHPSTSADQQSLYQNADAYVFVGTSRYSKKFKPEIAIRPKVRDQEGRMNYYWTLVEPGDKITFEATGNLVVPRYAFAMERNAGSGIIISDTPVHDCNTTCQTPKGAINTSLPFQNIHPITIGKCPKYVKSTKLRLATGLRNVPSIQSRGLFGAIAGFIEGGWTGMVDGWYGYHHQNEQGSGYAADLKSTQNAIDEITNKVNSVIEKMNTQFTAVGKEFNHLEKRIENLNKKVDDGFLDIWTYNAELLVLLENERTLDYHDSNVKKLYEKVRSQLKNNAKEIGNGCFEFYHKCDNTCMESVKNGTYDYPKYSEEAKLNREEIDGVKLESTRIYQILAIYSTVASSLVLVVSLGAISFWMCSNGSLQCRICI

SEQ ID NO: 5105 - protein, 566 aa, synthetic construct; identical to SEQ ID NO: 3467
  REGION 1..566: note = hemagglutinin__InfluenzaA__ADI72919

SEQ ID NO: 5106 - protein, 566 aa, synthetic construct; identical to SEQ ID NO: 3467
  REGION 1..566: note = hemagglutinin__InfluenzaA__ADI72920

SEQ ID NO: 5107 - protein, 566 aa, synthetic construct
  REGION 1..566: note = hemagglutinin__InfluenzaA__ADI72921
MKAILVVLLYTFATANADTLCIGYHANNSTDTVDTVLEKNVTVTHSVNLLEDKHNGKLCKLRGVAPLHLGKCNIAGWILGNPECESLSTASSWSYIVETSSSDNGTCYPGDFIDYEELREQLSSVSSFERFEIFPKTSSWPNHDPNKGVTAACPHAGAKSFYKNLIWLVKKGNSYPKLSKSYINDKGKEVLVLWGIHHPSTSADQQSLYQNADAYVFVGTSRYSKKFKPEIAIRPKVRDQEGRMNYYWTLVEPGDKITFEATGNLVVPRYAFAMERNAGSGIIISDTPVHDCNTTCQTPKGAINTSLPFQNIHPITIGKCPKYVKSTKLRLATGLRNVPSIQSRGLFGAIAGFIEGGWTGMVDGWYGYHHQNEQGSGYAADLKSTQNALDEITNKVNSVIEKMNTQFTAVGKEFNHLEKRIENLNKKVDDGFLDIWTYNAELLVLLENERTLDYHDSNVKNLYEKVRSQLKNNAKEIGNGCFEFYHKCDNTCMESVKNGTYDYPKYSEEAKLNREEIDGVKLESTRIYQILAIYSTVASSLVLVVSLGAISFWMCSNGSLQCRICI

SEQ ID NO: 5108 - protein, 566 aa, synthetic construct; identical to SEQ ID NO: 2669
  REGION 1..566: note = hemagglutinin__InfluenzaA__ADI72922

SEQ ID NO: 5109 - protein, 566 aa, synthetic construct
  REGION 1..566: note = hemagglutinin__InfluenzaA__ADI72923
MKAILVVLLYTFATSNADTLCIGYHANNSTDTVDTVLEKNVTVTHSVNLLEDKHNGKLCKLRGVAPLHLGKCNIAGWILGNPECESLSTASSWSYIVETSSSDNGTCYPGDFIDYEELREQLSSVSSFERFEIFPKTSSWPNHDPNKGVTAACPHAGAKSFYKNLIWLVKKGNSYPKLSKSYINDKGKEVLVLWGIHHPSTSADQQSLYQNADAYVFVGTSRYSKKFKPEIAIRPKVRDQEGRMNYYWTLVEPGDKITFEATGNLVVPRYAFAMERNAGPGIIISDTPVHDCNTTCQTPKGAINTSLPFQNIHPITIGKCPKYVKSTKLRLATGLRNVPSIQSRGLFGAIAGFIEGGWTGMVDGWYGYHHQNEQGSGYAADLKSTQNAIDEITNKVNSVIEKMNTQFTAVGKEFNHLEKRIENLNKKVDDGFLDIWTYNAELLVLLENERTLDYHDSNVKNLYEKVRSQLKNNAKEIGNGCFEFYHKCDNTCMESVKNGTYDYPKYSEEAKLNREEIDGVKLESTRIYQILAIYSTVASSLVLVVSLGAISFWMCSNGSLQCRICI

SEQ ID NO: 5110 - protein, 566 aa, synthetic construct; identical to SEQ ID NO: 3467
  REGION 1..566: note = hemagglutinin__InfluenzaA__ADI72924

SEQ ID NO: 5111 - protein, 566 aa, synthetic construct; identical to SEQ ID NO: 2669
  REGION 1..566: note = hemagglutinin__InfluenzaA__ADI72925

SEQ ID NO: 5112 - protein, 566 aa, synthetic construct
  REGION 1..566: note = hemagglutinin__InfluenzaA__ADI72926
MKAILVVLLYTFATANADTLCIGYHANNSTDTVDTVLEKNVTVTHSVNLLEDKHNGKLCKLRGVAPLHLGKCNIAGWILGNPECESLSTASSWSYIVETSSSDNGTCYPGDFIDYEELREQLSSVSSFERFEIFPKTSSWPNHDPNKGVTAACPHAGAKSFYKNLIWLVKKGNSYPKLSKSYINDKGKEVLVLWGIHHPSTSADQQSLYQNADAYVFVGTSGYSKKFKPEIAIRPKVRDQEGRMNYYWTLVEPGDKITFEATGNLVVPRYAFAMERNAGSGIIISDTPVHDCNTTCQTPKGAINTSLPFQNIHPITIGKCPKYVKSTKLRLATGLRNVPSIQSRGLFGAIAGFIEGGWTGMVDGWYGYHHQNEQGSGYAADLKSTQNAIDEITNKVNSVIEKMNTQFTAVGKEFNHLEKRIENLNKKVDDGFLDIWTYNAELLVLLENERTLDYHDSNVKNLYEKVRSQLKNNAKEIGNGCFEFYHKCDNTCMESVKNGTYDYPKYSEEAKLNREEIDGVKLESTRIYQILAIYSTVASSLVLVVSLGAISFWMCSNGSLQCRICI

SEQ ID NO: 5113 - protein, 566 aa, synthetic construct
  REGION 1..566: note = hemagglutinin__InfluenzaA__ADI72927
MKAILVVLLYTFATANADTLCIGYHANNSTDTVDTVLEKNVTVTHSVNLLEDKHNGKLCKLRGVAPLHLGKCNIAGWILGNPECESLSTASSWSYIVETSSSDNGTCYPGDFIDYEELREQLSSVSSFERFEIFPKTSSWPNHDPNKGVTAACPHAGAKSFYKNLIWLVKKGNSYPKLSKSYINDKGKEVLVLWGIHHPSTSADQQSLYQNADAYVFVGTSRYSKKFKPEIAIRPKVRDQEGRMNYYWTLVEPGDKITFEATGNLVVPRYAFAMERNAGSGIITSDTPVHDCNTTCQTPKGAINTSLPFQNIHPITIGKCPKYVKSTKLRLATGLRNVPSIQSRGLFGAIAGFIEGGWTGMVDGWYGYHHQNEQGSGYAADLKSTQNAIDEITNKVNSVIEKMNTQFTAVGKEFNHLEKRIENLNKKVDDGFLDIWTYNAELLVLLENERTLDYHDSNVKNLYEKVRSQLKNNAKEIGNGCFEFYHKCDNTCMESVKNGTYDYPKYSEEAKLNREEIDGVKLESTRIYQILAIYSTVASSLVLVVSLGAISFWMCSNGSLQCRICI

SEQ ID NO: 5114 - protein, 566 aa, synthetic construct
  REGION 1..566: note = hemagglutinin__InfluenzaA__ADI72928
MKAILVVLLYTFATANADTLCIGYHANNSTDTVDTILEKNVTVTHSVNLLEDKHNGKLCKLRGVAPLHLGKCNIAGWILGNPECESLSTASSWSYIVETSSSDNGTCYPGDFIDYEELREQLSSVSSFERFEIFPKTSSWPNHDPNKGVTAACPHAGAKSFYKNLIWLVKKGNSYPKLSKSYINDKGKEVLVLWGIHHPSTSADQQSLYQNADAYVFVGTSRYSKKFKPEIAIRPKVRDQEGRMNYYWTLVEPGDKITFEATGNLVVPRYAFAMERNAGSGIIISDTPVHDCNTTCQTPKGAINTSLPFQNIHPITIGKCPKYVKSTKLRLATGLRNVPSIQSRGLFGAIAGFIEGGWTGMVDGWYGYHHQNEQGSGYAADLKSTQNAIDEITNKVNSVIEKMNTQFTAVGKEFNHLEKRIENLNKKVDDGFLDIWTYNAELLVLLENERTLDYHDSNVKNLYEKVRSQLKNNAKEIGNGCFEFYHKCDNTCMESVKNGTYDYPKYSEEAKLNRKEIDGVKLESTRIYQILAIYSTVASSLVLVVSLGAISFWMCSNGSLQCRICI

SEQ ID NO: 5115 - protein, 566 aa, synthetic construct; identical to SEQ ID NO: 2669
  REGION 1..566: note = hemagglutinin__InfluenzaA__ADI72929

SEQ ID NO: 5116 - protein, 566 aa, synthetic construct; identical to SEQ ID NO: 2669
  REGION 1..566: note = hemagglutinin__InfluenzaA__ADI72930

SEQ ID NO: 5117 - protein, 566 aa, synthetic construct
  REGION 1..566: note = hemagglutinin__InfluenzaA__ADI72931
MKAILVVLLYTFATANADTLCIGYHANNSTDTVDTVLEKNVTVTHSVNLLEDKHNGKLCKLRGVAPLHLGKCNIAGWILGNPECESLSTASSWSYIVETSSSDNGTCYPGDFIDYEELREQLSSVSSFERFEIFPKTSSWPNHDPNKGVTAACPHAGAKSFYKNLIWLVKKGNSYPKLSKSYINDKGKEVLVLWGIHHPSTSADQQSLYQNADAYVFVGTSRYSKKFKPEIAIRPKVRDQEGRMNYYWTLVEPGDKITFEATGNLVVPRYAFAMERNAGSGIIISDTPVHDCNTTCQTPKGAINTSLPFQNIHPITIGKCPKYVKSTKLRLATGLRNVPSIQSRGLFGAIAGFIEGGWTGMVDGWYGYHHQNEQGSGYAADLKSTQNAIDEITNKVNSVIEKMNTQFTAVGKEFNHLEKRIENLNKKVDDGFLDIWTYNAELLVLLENERTLDYHDSNVKNLYEKVRSQLKNNAKEIGNGCFEFYHKCDNTCMESVKNGTYDYPKYSEEAKLNREEIDGIKLESTRIYQILAIYSTVASSLVLVVSLGAISFWMCSNGSLQCRICI

SEQ ID NO: 5118 - protein, 566 aa, synthetic construct; identical to SEQ ID NO: 4325
  REGION 1..566: note = hemagglutinin__InfluenzaA__ADI72932

SEQ ID NO: 5119 - protein, 565 aa, synthetic construct
  REGION 1..565: note = hemagglutinin__InfluenzaA__ADI75818
MKVKLLVLLCTFTATYADTICIGYHANNSTDTVDTVLEKNVTVTHSVNLLENSHNGKLCLLKGIAPLQLGNCSVAGWILGNPECELLISKESWSYIVEKPNPENGTCYPGHFADYEELREQLSSVSSFERFEIFPKESSWPNHTVTGVSASCSHNGESSFYKNLLWLTEKNGLYPNLSKSYANNKEKEVLVLWGVHHPPSISDQKTLYHTENAYVSVVSSHYSRKFTPEIAKRPKVRDQEGRINYYWTLLEPGDTIIFEANGNLIAPRYAFALSRGFGSGIINSNAPMDKCDAKCQTPQGAINSSLPFQNVHPVTIGECPKYVRSAKLRMVTGLRNIPSIQSRGLFGAIAGFIEGGWTGMVDGWYGYHHQNEQGSGYAADQKSTQNAINGITNKVNSVIEKMNTQFTAVGKEFNKLERRMENLNKKVDDGFIDIWTYNAELLVLLENERTLDFHDSNVKNLYEKVKNQLKNNAKEIGNGCFEFYHKCNDECMESVKNGTYDYPKYSEESKLNREKIDGVKLESMGVYQILAIYSTVASSLVLLVSLGAISFWMCSNGSLQCRICI

SEQ ID NO: 5120 - protein, 565 aa, synthetic construct
  REGION 1..565: note = hemagglutinin__InfluenzaA__ADI75851
MKVKLLVLLCTFTATYADTICIGYHANNSTDTVDTVLEKNVTVTHSVNLLENSHNGKLCLLKGIAPLQLGNCSVAGWILGNPECGLLISKESWSYIVEKPNPENGTCYPGHFADYEELREQLSSVSSFERFEIFPKESSWPNHTVTGVSASCSHNGESSFYRNLLWLTGKNGLYPNLSKSYANNKEKEVLVLWGVHHPPNIVDQKTLYRTENAYVSVVSSHYSRKFTPEIAKRPKVRDQEGRINYYWTLLEPGDTIIFEANGNLIAPRYAFALSRGFGSGIINSNAPMGKCDAKCQTPQGAINSSLPFQNVHPVTIGECPKYVRSAKLRMVTGLRNIPSIQSRGLFGAIAGFIEGGWTGMVDGWYGYHHQNEQGSGYAADQKSTQNAINGITNKVNSVIEKMNTQFTAVGKEFNKLERRMENLNKKVDDGFIDIWTYNAELLVLLENERTLDFHDSNVKNLYEKVKSQLKNNAKEIGNGCFEFYHKCNDECMESVKNGTYDYPKYSEESKLNREKIDGVKLESMGVYQILAIYSTVASSLVLLVSLGAISFWMCSNGSLQCRICI

SEQ ID NO: 5121 - protein, 566 aa, synthetic construct; identical to SEQ ID NO: 2434
  REGION 1..566: note = hemagglutinin__InfluenzaA__ADI75884

SEQ ID NO: 5122 - protein, 566 aa, synthetic construct; identical to SEQ ID NO: 2434
  REGION 1..566: note = hemagglutinin__InfluenzaA__ADI75917

SEQ ID NO: 5123 - protein, 565 aa, synthetic construct
  REGION 1..565: note = hemagglutinin__InfluenzaA__ADI77349
MKVKLLVLLCTFTATYADTICIGYHANNSTDTVDTVLEKNVTVTHSVNLLENSHNGKLCLLKGIAPLQLGNCSVAGWILGNPECELLISKESWSYIVEKPNPENGTCYPGHFADYEELREQLSSVSSFERFEIFPKESSWPNHTVTGVSASCSHNGENSFYRNLLWLTGKNGLYPNLSKSYANNKEKEVLILWGVHHPPNMADQKTLYHTENAYVSVVSSHYSRKFTPEIAKRPKVRDQEGRINYYWTLLEPGDTIIFEANGNLIAPRYAFALSRGFGSGIINSNAPMDKCDTKCQTPQGAINSSLPFQNVHPVTIGECPKYVRSAKLRMVTGLRNIPSIQSRGLFGAIAGFIEGGWTGMVDGWYGYHHQNEQGSGYAADQKSTQNAINGITNKVNSVIEKMNTQFTAVGKEFNKLERRMENLNKKVDDGFIDIWTYNAELLVLLENERTLDFHDSNVKNLYEKVKSQLKNNAKEIGNGCFEFYHKCNDECMESVKNGTYDYPKYSEESKLNREKIDGVKLESMGVYQILAIYSTVASSLVLLVSLGAISFWMCSNGSLQCRICI

SEQ ID NO: 5124 - protein, 566 aa, synthetic construct; identical to SEQ ID NO: 2669
  REGION 1..566: note = hemagglutinin__InfluenzaA__ADI77360

SEQ ID NO: 5125 - protein, 566 aa, synthetic construct
  REGION 1..566: note = hemagglutinin__InfluenzaA__ADI99498
MKTILVVLLYTFATANADTLCIGYHANNSTDTVDTVLEKNVTVTHSVNLLEDKHNGKLCKLRGVAPLHLGKCNIAGWILGNPECESLSTASSWSYIVETSSSDNGTCYPGDFIDYEELREQLSSVSSFERFEIFPKTSSWPNHDSNKGVTAACPHAGAKSFYKNLIWLVKKGNSYPKLNKSYINDKGKEVLVLWGIHHPSTSADQQSLYQNADAYVFVGTSRYSKKFKPEIAIRPKVRGQEGRMNYYWTLVKPGDKITFEATGNLVVPRYAFAMERNAGSGIIISDTPVHDCNTTCQTPKGAINTSLPFQNIHPITIGKCPKYVKSTKLRLATGLRNVPSIQSRGLFGAIAGFIEGGWTGMVDGWYGYHHQNEQGSGYAADLKSTQNAIDEITNKVNSVIEKMNTQFTAVGKEFNHLEKRIENLNKKVDDGFLDIWTYNAELLVLLENERTLDYHDSNVKNLYEKVRSQLKNNAKEIGNGCFEFYHKCDNTCMESVKNGTYDYPKYSEEAKLNREEIDGVKLESTRIYQILAIYSTVASSLVLVVSLGAISFWMCSNGSLQCRICI

SEQ ID NO: 5126 - protein, 566 aa, synthetic construct
  REGION 1..566: note = hemagglutinin__InfluenzaA__ADI99560
MKAILVVLLYTFATANADTLCIGYHANNSTDTVDTVLEKNVTVTHSVNLLEDKHNGKLCKLRGVAPLHLGKCNIAGWILGNPECESLSTASSWSYIVETSSSDNGTCYPGDFINYEELREQLSSVSSFERFEIFPKTSSWPNHDSNKGVTAACPHAGAKSFYKNLIWLVKKGNSYPKLSKSYINDKGKEVLVLWGIHHPSTSADQQSLYQNADAYVFVGTSRYSKKFKPEIAIRPKVRDQEGRMNYYWTLVEPGDKITFEATGNLVVPRYAFAMERNAGSGIIISDTPVHDCNTTCQTPKGAINTSLPFQNIHPITIGKCPKYVKSTKLRLATGLRNVPSIQSRGLFGAIAGFIEGGWTGMVDGWYGYHHQNEQGSGYAADLKSTQNAIDKITNKVNSVIEKMNTQFTAVGKEFNHLEKRIENLNKKVDDGFLDIWTYNAELLVLLENERTLDYHDSNVKNLYEKVRSQLKNNAKEIGNGCFEFYHKCNNTCMESVKNGTYDYPKYSEEAKLNREEIDGVKLESTRIYQILAIYSTVASSLVLVVSLGAISFWMCSNGSLQCRICI

SEQ ID NO: 5127 - protein, 566 aa, synthetic construct; identical to SEQ ID NO: 5126
  REGION 1..566: note = hemagglutinin__InfluenzaA__ADI99570

SEQ ID NO: 5128 - protein, 566 aa, synthetic construct; identical to SEQ ID NO: 5126
  REGION 1..566: note = hemagglutinin__InfluenzaA__ADI99580

SEQ ID NO: 5129 - protein, 566 aa, synthetic construct; identical to SEQ ID NO: 4282
  REGION 1..566: note = hemagglutinin__InfluenzaA__ADI99590

SEQ ID NO: 5130 - protein, 566 aa, synthetic construct
  REGION 1..566: note = hemagglutinin__InfluenzaA__ADI99610
MKAILVVLLYTFATANADTLCIGYHANNSTDTVDTVLEKNVTVTHSVNLLEDKHNGKLCKLRGVAPLHLGKCNIAGWILGNPECESLSTASSWSYIVETSSSDNGTCYPGDFINYEELREQLSSVSSFERFEIFPKTSSWPNHDSNKGVTAACPHAGAKSFYKNLIWLVKKGNSYPKLSKSYINDKGKEILVLWGIHHPSTSADQQSLYQNADAYVFVGTSRYSKKFKPEIAIRPKVRDQEGRMNYYWTLVEPGDKITFEATGNLVVPRYAFAMERNAGSGIIISDTPVHDCNTTCQTPKGAINTSLPFQNIHPITIGKCPKYVKSTKLRLATGLRNVPSIQSRGLFGAIAGFIEGGWTGMVDGWYGYHHQNEQGSGYAADLKSTQNAIDKITNKVNSVIEKMNTQFTAVGKEFNHLEKRIENLNKKVDDGFLDIWTYNAELLVLLENERTLDYHDSNVKNLYEKVRSQLKNNAKEIGNGCFEFYHKCDNTCMESVKNGTYDYPKYSEEAKLNREEIDGVKLESTRIYQILAIYSTVASSLVLVVSLGAISFWMCSNGSLQCRICI

SEQ ID NO: 5131 - protein, 566 aa, synthetic construct
  REGION 1..566: note = hemagglutinin__InfluenzaA__ADI99620
MKAILVVLLYTFATANADTLCIGYHANNSTDTVDTVLEKNVTVTHSVNLLEDKHNGKLCKLRGVAPLHLGKCNIAGWILGNPECESLSTASSWSYIVETSSSDNGTCYPGDFINYEELREQLSSVSSFERFEIFPKTSSWPNHDSNKGVTAACPHAGAKSFYKNLIWLVKKGNSYPKLSKSYINDKGKEVLVLWGIHHPSTSADQQSLYQNADAYVFVGTSRYSKKFKPEIAIRPKVRDQEGRMNYYWTLVEPGDKITFEATGNLVVPRYAFAMERNAGSGIIITDTPVHDCNTTCQTPKGAINTSLPFQNIHPITIGKCPKYVKSTKLRLATGLRNVPSIQSRGLFGAIAGFIEGGWTGMVDGWYGYHHQNEQGSGYAADLKSTQNAIDKITNKVNSVIEKMNTQFTAVGKEFNHLEKRIENLNKKVDDGFLDIWTYNAELLVLLENERTLDYHDSNVKNLYEKVRSQLKNNAKEIGNGCFEFYHKCDNTCMESVKNGTYDYPKYSEEAKLNREEIDGVKLESTRIYQILAIYSTVASSLVLVVSLGAISFWMCSNGSLQCRICI

SEQ ID NO: 5132 - protein, 566 aa, synthetic construct
  REGION 1..566: note = hemagglutinin__InfluenzaA__ADI99630
MKAILVVLLYTFATANADTLCIGYHANNSTDTVDTVLEKNVTVTHSVNLLEDKNNGKLCKLRGVAPLHLGKCNIAGWILGNPECESLSTASSWSYIVETSSSDNGTCYPGNFIDYEELREQLSSVSSFERFEIFPKTSSWPNHDSNKGVTAACPHAGAKSFYKNLIWLVKKGNSYPKLSKSYINDKGKEVLVLWGIHHPSTSADQQSLYQNADAYVFVGTSRYSKKFKPEIAIRPKVRDQEGRMNYYWTLVEPGDKITFEATGNLVVPRYAFAMERNAGSGIIISDTPVHDCNTTCQTPKGAINTSLPFQNIHPITIGKCPKYVKSTKLRLATGLRNVPSIQSRGLFGAIAGFIEGGWTGMVDGWYGYHHQNEQGSGYAADLKSTQNAIDKITNKVNSVIEKMNTQFTAVGKEFNHLEKRIENLNKKVDDGFLDIWTYNAELLVLLENERTLDYHDSNVKNLYEKVRSQLKNNAKEIGNGCFEFYHKCDNTCMESVKNGTYDYPKYSEEAKLNREEIDGVKLESTRIYQILAIYSTVASSLVLVVSLGAISFWMCSNGSLQCRICI

SEQ ID NO: 5133 - protein, 566 aa, synthetic construct
  REGION 1..566: note = hemagglutinin__InfluenzaA__ADI99640
MKAILVVLLYTFATANADTLCIGYHANNSTDTVDTVLEKNVTVTHSVNLLEDKHNGKLCKLRGVAPLHLGKCNIAGWILGNPECESLSTASSWSYIVETSSSDNGTCYPGDFIDYEELREQLSSVSSFERFEIFPKTSSWPNHDSNKGVTAACPHAGAKSFYKNLIWLVKKGNSYPKLSKSYINDKGKEVLVLWGIHHPSTSTDQQSLYQNADSYVFVGTSRYSKKFKPEIAIRPKVRDQEGRMNYYWTLVEPGDKITFEATGNLVVPRYAFAMERNAGSGIIISDTPIHDCNTTCQTPEGAINTSLPFQNIHPITIGKCPKYVKSTKLRLATGLRNVPSIQSRGLFGAIAGFIEGGWTGMVDGWYGYHHQNEQGSGYAADLKSTQNAIDEITNKVNSVIEKMNTQFTAVGKEFNHLEKRIENLNKKVDDGFLDIWTYNAELLVLLENERTLDYHDSNVKNLYEKVRSQLKNNAKEIGNGCFEFYHKCDNTCMESVKNGTYDYPKYSEEAKLNREEIDGVKLESTRIYQILAIYSTVASSLVLVVSLGAISFWMCSNGSLQCRICI

SEQ ID NO: 5134 - protein, 566 aa, synthetic construct; identical to SEQ ID NO: 4221
  REGION 1..566: note = hemagglutinin__InfluenzaA__ADI99660

SEQ ID NO: 5135 - protein, 566 aa, synthetic construct
  REGION 1..566: note = hemagglutinin__InfluenzaA__ADI99670
MKAILVVLLYTFATANADTLCIGYHANNSTDTVDTVLEKNVTVTHSVNILEDKHNGKLCKLRGVAPLHLGKCNIAGWILGNPECESLSTASSWSYIVETSSSDNGTCYPGDFIDYEELREQLSSVSSFERFEIFPKTSSWPNHDSNKGVTAACPHAGAKSFYKNLIWLVKKGNSYPKLSKSYINDKGKEVLVLWGIHHPSTSADQQSLYQNADAYVFVGTSRYSKKFKPEIAIRPKVRDQEGRMNYYWTLVEPGDKITFEATGNLVVPRYAFAMERNAGSGIIISDTPVHDCNTTCQTPKGAINTSLPFQNIHPITIGKCPKYVKSTKLRLATGLRNVPSIQSRGLFGAIAGFIEGGWTGMVDGWYGYHHQNEQGSGYAADLKSTQNAIDEITNKVNSVIEKMNTQFTAVGKEFNHLEKRIENLNKKVDDGFLDIWTYNAELLVLLENERTLDYHDSNVKNLYEKVRSQLKNNAKEIGNGCFEFYHKCDNTCMESVKNGTYGYPKYSEEAKLNREEIDGVKLESTRIYQILAIYSTVASSLVLVVSLGAISFWMCSNGSLQCRICI

SEQ ID NO: 5136 - protein, 566 aa, synthetic construct
  REGION 1..566: note = hemagglutinin__InfluenzaA__ADI99680
MKAILVVLLYTFATANADTLCIGYHANNSTDTVDTVLEKNVTVTHSVNILEDKHNGKLCKLRGVAPLHLGKCNIAGWILGNPECESLSTASSWSYIVETSSSDNGTCYPGDFIDYEELREQLSSVSSFERFEIFPKTSSWPNHDSNKGVTAACPHAGAKSFYKNLIWLVKKGNSYPKLSKSYINDKGKEVLVLWGIHHPSTSADQQSLYQNADAYVFVGTSRYSKKFKPEIAIRPKVRDQEGRMNYYWTIVEPGDKITFEATGNLVVPRYAFAMERNAGSGIIISDTPVHDCNTTCQTPKGAINTSLPFQNIHPITIGKCPKYVKSTKLRLATGLRNVPSIQSRGLFGAIAGFIEGGWTGMVDGWYGYHHQNEQGSGYAADLKSTQNAIDEITNKVNSVIEKMNTQFTAVGKEFNHLEKRIENLNKKVDDGFLDIWTYNAELLVLLENERTLDYHDSNVKNLYEKVRSQLKNNAKEIGNGCFEFYHKCDNTCMESVKNGTYDYPKYSEEAKLNREEIDGVKLESTRIYQILAIYSTVASSLVLVVSLGAISFWMCSNGSLQCRICI

SEQ ID NO: 5137 - protein, 566 aa, synthetic construct
  REGION 1..566: note = hemagglutinin__InfluenzaA__ADI99690
MKAILAVLLYTFAIANADTLCIGYHANNSTDTVDTVLEKNVTVTHSVNILEDKHNGKLCKLRGVAPLHLGKCNIAGWILGNPECESLSTASSWSYIVETSSSDNGTCYPGDFIDYEELREQLSSVSSFERFEIFPKTSSWPNHDSNKGVTAACPHAGAKSFYKNLIWLVKKGNSYPKLSKSYINDKGKKVLVLWGIHHPSTSADQQSLYQNADAYVFVGTSRYSKKFKPEIAIRPKVRDQEGRMNYYWTLVEPGDKITFEATGNLVVPRYAFAMERNAGSGIIISDTPVHDCNTTCQTPKGAINTSLPFQNIHPITIGKCPKYVKSTKLRLATGLRNVPSIQSRGLFGAIAGFIEGGWTGMVDGWYGYHHQNEQGSGYAADLKSTQNAIDEITNKVNSVIEKMNTQFTAVGKEFNHLEKRIENLNKKVDDGFLDIWTYNAELLVLLENERTLDYHDSNVKNLYEKVRSQLKNNAKEIGNGCFEFYHKCDNTCMESVKNGTYDYPKYSEEAKLNREEIDGVKLESTRIYQILAIYSTVASSLVLVVSLGAISFWMCSNGSLQCRICI

SEQ ID NO: 5138 - protein, 566 aa, synthetic construct
  REGION 1..566: note = hemagglutinin__InfluenzaA__ADI99700
MKAILVVLLYTFATANADTLCIGYHANNSTDTVDTVLEKNVTVTHSVNLLEDKHNGKLCKLRGVSPLHLGKCNIAGWILGNPECESLSTASSWSYIVETSSSDNGTCYPGDFIDYEELREQLSSVSSFERFEIFPKTSSWPNHDSNKGVTAACPHAGAKSFYKNLIWLVKKGNSYPKLSKSYINDKGKEVLVLWGVHHPSTSADQQSLYQNADAYVFVGTSRYSKKFKPEIAIRPKVRDQEGRMNYYWTLVEPGDKITFEATGNLVAPRYAFAMERNAGSGIIISDTPVHDCNTTCQTPKGAINTSLPFQNIHPITIGKCPKYVKSTKLRLATGLRNVPSIQSRGLFGAIAGFIEGGWTGMVDGWYGYHHQNEQGSGYAADLKSTQNAIDEITNKVNSVIEKMNTQFTAVGKEFNHLEKRIENLNKKVDDGFLDIWTYNAELLVLLENERTLDYHDSNVKNLYEKVRSQLKNNAKEIGNGCFEFYHKCDNTCMESVKNGTYDYPKYSEEAKLNREEIDGVKLESTRIYQILAIYSTVASSLVLVVSLGAISFWMCSNGSLQCRICI

SEQ ID NO: 5139 - protein, 566 aa, synthetic construct; identical to SEQ ID NO: 4318
  REGION 1..566: note = hemagglutinin__InfluenzaA__ADI99710

SEQ ID NO: 5140 - protein, 566 aa, synthetic construct
  REGION 1..566: note = hemagglutinin__InfluenzaA__ADI99720
MKAILVVLLYTFATANADTLCIGYHANNSTDTVDTVLEKNVTVTHSVNLLEDKHNGKLCKLRGVAPLHLGKCNIAGWILGNPECESLSTASSWSYIVETSSSDNGTCYPGDFIDYEELREQLSSVSSFERFEIFPKTSSWPDHDSNKGVTAACPHAGAKSFYKNLIWLVKKGNSYPKLSKSYINDKGKEVLVLWGIHHPSTSADQQSLYQNADAYVFVGTSRYSKKFKPEIAIRPKVRGQEGRMNYYWTLVEPGDKITFEATGNLVVSRYAFAMERNAGSGIIISDTPVHDCNTTCQTPKGAINTSLPFQNIHPITIGKCPKYVKSTKLRLATGLRNVPSIQSRGLFGAIAGFIEGGWTGMVDGWYGYHHQNEQGSGYAADLKSTQNAIDEITNKVNSVIEKMNTQFTAVGKEFNHLEKRIENLNKKVDDGFLDIWTYNAELLVLLENERTLDYHDSNVKNLYEKVRSQLKNNAKEIGNGCFEFYHKCDNTCMESVKNGTYDYPKYSEEAKLNREEIDGVKLESTRIYQILAIYSTVASSLVLVVSLGAISFWMCSNGSLQCRICI

SEQ ID NO: 5141 - protein, 566 aa, synthetic construct; identical to SEQ ID NO: 2669
  REGION 1..566: note = hemagglutinin__InfluenzaA__ADI99730

SEQ ID NO: 5142 - protein, 566 aa, synthetic construct; identical to SEQ ID NO: 2669
  REGION 1..566: note = hemagglutinin__InfluenzaA__ADJ00497

SEQ ID NO: 5143 - protein, 566 aa, synthetic construct; identical to SEQ ID NO: 2669
  REGION 1..566: note = hemagglutinin__InfluenzaA__ADJ00498

SEQ ID NO: 5144 - protein, 566 aa, synthetic construct; identical to SEQ ID NO: 3863
  REGION 1..566: note = hemagglutinin__InfluenzaA__ADJ00501

SEQ ID NO: 5145 - protein, 566 aa, synthetic construct; identical to SEQ ID NO: 3833
  REGION 1..566: note = hemagglutinin__InfluenzaA__ADJ18163

SEQ ID NO: 5146 - protein, 566 aa, synthetic construct; identical to SEQ ID NO: 3833
  REGION 1..566: note = hemagglutinin__InfluenzaA__ADJ18165

SEQ ID NO: 5147 - protein, 566 aa, synthetic construct
  REGION 1..566: note = hemagglutinin__InfluenzaA__ADJ18167
MKAILVVLLYTFATANADTLCIGYHANNSTDTVDTVLEKNVTVTHSVNLLEDKHNGKLCKLRGVAPLHLGKCNIAGWILGNPECESLSTASSWSYIVETSSSDNGTCYPGDFIDYEELREQLSSVSSFERFEIFPKTSSWPNHDSNKGVTAACPYAGAKSFYKNLIWLVKKGNSYPKLSKSYINDKGKEVLVLWGIHHPSTSADQQSLYQNADAYVFVGTSRYSKKFKPEIAIRPKVRDREGRMNYYWTLVEPGDKITFEATGNLVVPRYAFAMERNAGSGIIISDTPVHDCNTTCQTPKGAINTSLPFQNIHPITIGKCPKYVKSTKLRLATGLRNIPSIQSRGLFGAIAGFIEGGWTGMVDGWYGYHHQNEQGSGYAADLKSTQNAIDKITNKVNSVIEKMNTQFTAVGKEFNHLEKRIENLNKKVDDGFLDIWTYNAELLVLLENERTLDYHDSNVKNLYEKVRSQLKNNAKEIGNGCFEFYHKCDNTCMESVKNGTYDYPKYSEEAKLNREEIDGVKLESTRIYQILAIYSTVASSLVLVVSLGAISFWMCSNGSLQCRICI

SEQ ID NO: 5148 - protein, 566 aa, synthetic construct
  REGION 1..566: note = hemagglutinin__InfluenzaA__ADJ18169
MKAILVVLLYTFATANADTLCIGYHANNSTDTVDTVLEKNVTVTHSVNLLEDKHNGKLCKLRGVAPLHLGKCNIAGWILGNPECESLSTASSWSYIVETSSSDNGTCYPGDFIDYEELREQLSSVSSFERFEIFPKTSSWPNHDSNKGVTAACPHAGAKSFYKNLIWLVKKGNSYPKLSKSYINDKGKEVLVLWGIHHPSTSADQQSLYQNADAYVFVGTSRYSKKFKPEIAIRPKVRDREGRMNYYWTLVEPGDKITFEATGNLVVPRYAFAMERNAGSGIIISDTPVHDCNTTCQTPKGAINTSLPFQNIHPITIGKCPKYVKSTKLRLATGLRNVPSIQSRGLFGAIAGFIEGGWTGMVDGWYGYHHQNEQGSGYAADLKSTQNAIDKITNKVNSVIEKMNTQFTAVGKEFNHLEKRIENLNKKVDDGFLDIWTYNAELLVLLENERTLDYHDSNVKNLYEKVRSQLKNNAKEIGNGCFEFYHKCDNTCMESVKNGTYDYPKYSEEAKLNREEIDGVKLESTRIYQILAIYSTVASSLVLVVSLGAISFWMCSNGSLQCRICI

SEQ ID NO: 5149 - protein, 566 aa, synthetic construct
  REGION 1..566: note = hemagglutinin__InfluenzaA__ADJ18171
MKAILVVLLYTFATANADTLCIGYHANNSTDTVDTVLEKNVTVTHSVNLLEDKHNGKLCKLRGVAPLHLGKCNIAGWILGNPECESLSTASSWPYIVETSSSDNGTCYPGDFIDYEELREQLSSVSSFERFEIFPKTSSWPNHDSNKGVTAACPHAGAKSFYQNLIWLVKKGNSYPKLSKSYIHDKGKEVLVLWGIHHPSTSADQQSLYQNADAYVFVGTSRYSKKFKPEIAIRPKVRDRQGRMNYYWTLVELGDKITFEATGNLVVPRYAFAMERNAGSGIIISDTPVHNCNTTCQTTTGAINTSLPFQNIHPITIGKCPKYVKSTKLRLATGLRNVPSIQSRGLFGAIAGFIEGGWTGMVDGWYGYHHQNEQGSGYAADLKSTQNAIDKITNKVNSVIEKMNTQFTAVGKEFNHLEKRIENLNKKVDDGFLDIWTYNAELLVLLENERTLDYHDSNVKNLYEKVRSQLKNNAKEIGNGCFEFYHKCDNTCMESVKNGTYDYPKYSEEAKLNREEIDGVKLESTRIYQILAIYSTVASSLVLVVSLGAISFWMCSNGSLQCRICI

SEQ ID NO: 5150 - protein, 566 aa, synthetic construct; identical to SEQ ID NO: 3833
  REGION 1..566: note = hemagglutinin__InfluenzaA__ADJ18173

SEQ ID NO: 5151 - protein, 566 aa, synthetic construct; identical to SEQ ID NO: 3833
  REGION 1..566: note = hemagglutinin__InfluenzaA__ADJ18175

SEQ ID NO: 5152 - protein, 566 aa, synthetic construct
  REGION 1..566: note = hemagglutinin__InfluenzaA__ADJ18177
MKAILVVLLYTFATANADTLCIGYHANNSTDTVDTVLEKNVTVTHSVNLLEDKHNGKLCKLRGVAPLHLGKCNIAGWILGNPECESLSTASSWSYIVETSSSDNGTCYPGDFIDYEELREQLSSVSSFERFEIFPKTSSWPNHDSNKGVTAACPHAGAKSFYKNLIWLVKKGNSYPKLSKSYINDKGKEVLVLWGIHHPSTSADQQSLYQNADAYVFVGTSRYSKKFKPEIAIRPKVRGQEGRMNYYWTLVEPGDKITFEATGNLVVPRYAFAMERNAGSGIIISDTPVHDCNTTCQTPKGAINTSLPFQNIHPITIGKCPKYVKSTKLRLATGLRNIPSVQSRGLFGAIAGFIEGGWTGMVDGWYGYHHQNEQGSGYAADLKSTQNAIDKITNKVNSVIEKMNTQFTAVGKEFNHLEKRIENLNKKVDDGFLDIWTYNAELLVLLENERTLDYHDSNVKNLYEKVRSQLKNNAKEIGNGCFEFYHKCDNTCMESVKNGTYDYPKYSEEAKLNREEIDGVKLESTRIYQILAIYSTVASSLVLVVSLGAISFWMCSNGSLQCRICI

SEQ ID NO: 5153 - protein, 566 aa, synthetic construct
  REGION 1..566: note = hemagglutinin__InfluenzaA__ADJ40444
MKAILVVLLYTFATANADTLCIGYHANNSTDTVDTVLKKNVTVTHSVNLLEDKHNGKLCKLRGVAPLHLGKCNIAGWILGNPECESLSTASSWSYIVETSSSDNGTCYPGDFIDYEELREQLSSVSSFERFEIFPKTSSWPNHDSNKGVTAACPHAGAKSFYKNLIWLVKKGNSYPKLSKSYINDKGKEVLVLWGIHHPSTSADQQSLYQNADAYVFVGTSRYSKKFKPEIAIRPKVRDQEGRMNYYWTLVEPGDKITFEATGNLVVPRYAFAMERNAGSGIIISDTPVHDCNTTCQTPKGAINTSLPFQNIHPITIGKCPKYVKSTKLRLATGLRNVPSIQSRGLFGAIAGFIEGGWTGMVDGWYGYHHQNEQGSGYAADLKSTQNAIDEITNKVNSVIEKMNTQFTAVGKEFNHLEKRIENLNKKVDDGFLDIWTYNAELLVLLENERTLDYHDSNVKNLYEKVRSQLKNNAKEIGNGCFEFYHKCDNTCMESVKNGTYDYPKYSEEAKLNREEIDGVKLESTRIYQILAIYSTVASSLVLVVSLGAISFWMCSNGSLQCRICI

SEQ ID NO: 5154 - protein, 566 aa, synthetic construct
  REGION 1..566: note = hemagglutinin__InfluenzaA__ADJ40454
MKAILVVLLYTFATANADTLCIGYHANNSTDTVDTVLEKNVTVTHSVNLLEDKHNGKLCKLRGVAPLHLGKCNIAGWILGNPECESLSTASSWSYIVETSSSDNGTCYPGDFIDYEELREQLSSVSSFERFEIFPKTSSWPNHDSNKGVTAACPHAGAKSFYKNLIWLVKKGNSYPKLSKSYINDKGKEVLVLWGIHHPSTSADQQSLYQNADAYVFVGTSRYSKKFKPEIAIRPKVRNQEGRMNYYWTLVEPGDKITFEATGNLVVPRYAFAMERNAGSGIIISDTPVHDCNTTCQTPKGAINTSLPFQNIHPITIGKCPKYVKSTKLRLATGLRNIPSIQSRGLFGAIAGFIEGGWTGMVDGWYGYHHQNEQGSGYAADLKSTQNAIDKITNKVNSVIEKMNTQFTAVGKEFNHLEKRIENLNKKVDDGFLDIWTYNAELLVLLENERTLDYHDSNVKNLYEKVRSQLKNNAKEIGNGCFEFYHKCDNTCMESVKNGTYDYPKYSEEAKLNREEIDGVELESTRIYQILAIYSTVASSLVLVVSLGAISFWMCSNGSLQCRICI

SEQ ID NO: 5155 - protein, 566 aa, synthetic construct
  REGION 1..566: note = hemagglutinin__InfluenzaA__ADJ40464
MKAILVVLLYTFATANTDTLCIGYHANNSTDTVDTVLEKNVTVTHSVNLLEDKHNGKLCKLRGVAPLHLGKCNIAGWILGNPECESLSTASSWSYIVETSSSDNGTCYPGDFIDYEELREQLSSVSSFERFEIFPKTSSWPNHDSNKGVTAACPHAGAKSFYKNLIWLVKKGNSYPKLSKSYINDKGKEVLVLWGIHHPSTSADQQSLYQNADAYVFVGTSRYSKKFKPEIAIRPKVRDQEGRMNYYWTLVEPGDKITFEATGNLVVPRYAFAMERNAGSGIIISDTPVHDCNTTCQTPKGAINTSLPFQNIHPITIGKCPKYVKSTKLRLATGLRNVPSIQSRGLFGAIAGFIEGGWTGMVDGWYGYHHQNEQGSGYAADLKSTQNAIDEITNKVNSVIEKMNTQFTAVGKEFNHLEKRIENLNKKVDDGFLDIWTYNAELLILLENERTLDYHDSNVKNLYEKVRSQLKNNAKEIGNGCFEFYHKCDNTCMESVKNGTYDYPKYSEEAKLNREEIDGVKLESTRIYQILAIYSTVASSLVLVVSLGAISFWMCSNGSLQCRICI

SEQ ID NO: 5156 - protein, 566 aa, synthetic construct
  REGION 1..566: note = hemagglutinin__InfluenzaA__ADJ40474
MKAILVVLLYTFATANADTLCIGYHANNSTDTVDTVLEKNVTVTHSVNLLEDKHNGKLCKLRGVAPLHLGKCNIAGWILGNPECESLSTASSWSYIVETSSSDNGTCYPGDFIDYEELREQLSSVSSFERFEIFPKTSSWPNHDSNKGVTAACPHAGAKSFYKNLIWLVKKGNSYPKLSKSYINDKGKEVLVLWGIHHPSTSADQQSLYQNADAYVFVGTSRYSKKFKPEIAIRPKVREQEGRMNYYWTLVEPGDKITFEATGNLVVPRYAFAMERNAGSGIIISDTPVHDCNTTCQTPKGAINTSLPFQNIHPITIGKCPKYVKSTKLRLATGLRNVPSIQSRGLFGAIAGFIEGGWTGMVDGWYGYHHQNEQGSGYAADLKSTQNAIDEITNKVNSVIEKMNTQFTAVGKEFNHLEKRIENLNKKVDDGFLDIWTYNAELLVLLENERTLDYHDSNVKNLYEKVRRQLKNNAKEIGNGCFEFYHKCDNTCMESVKNGTYDYPKYSEEAKLNREEIDGVKLESTRIYQILAIYSTVASSLVLVVSLGAISFWMCSNGSLQCRICI

SEQ ID NO: 5157 - protein, 566 aa, synthetic construct
  REGION 1..566: note = hemagglutinin__InfluenzaA__ADJ40494
MKAILVVLLYTFATANADTLCIGYHANNSTDTVDTVLEKNVTVTHSVDLLEDKHNGKLCKLRGVAPLHLGKCNIAGWILGNPECESLSTASSWSYIVETSSSDNGTCYPGDFIDYEELREQLSSVSSFERFEIFPKTSSWPNHDSNKGVTAACPHAGAKSFYKTLIWLVKKGNSYPKLSKSYINDKGKEVLVLWGIHHPSTSADQQSLYQNADAYVFVGTSRYSKKFKPEIAIRPKVRDQEGRMNYYWTLVEPGDKITFEATGNLVVPRYAFAMERNAGSGIIISDTPVHDCNTTCQTPKGAINTSLPFQNIHPITIGKCPKYVKSTKLRLATGLRNVPSIQSRGLFGAIAGFIEGGWTGMVDGWYGYHHQNEQGSGYAADLKSTQNAIDEITNKVNSVIEKMNTQFTAVGKEFNHLEKRIENLNKKVDDGFLDIWTYNAELLVLLENERTLDYHDSNVKNLYEKVRSQLKNNAKEIGNGCFEFYHKCDNTCMESVKNGTYDYPKYSEEAKLNREEIDGVKLESTRIYQILAIYSTVASSLVLVVSLGAISFWMCSNGSLQCRICI

SEQ ID NO: 5158 - protein, 566 aa, synthetic construct
  REGION 1..566: note = hemagglutinin__InfluenzaA__ADJ40514
MKAVLVVLLYTFATTNADTLCIGYHANNSTDTVDTVLEKNVTVTHSVNLLEDKHNGKLCKLRGVAPLHLGKCNIAGWILGNPECESLSTASSWSYIVETSSSDNGTCYPGDFIDYEELREQLSSVSSFERFEIFPKTSSWPNHDSNKGVTAACPHAGAKSFYKNLIWLVKKGNSYPKLSKSYINDKGKEVLVLWGIHHPSTSADQQSLYQNADAYVFVGTSRYSKKFKPEIAIRPKVRNQEGRMNYYWTLVEPGDKITFEATGNLVVPRYAFAMERNAGSGIIISDTPVHDCNTTCQTPKGAINTSLPFQNIHPITIGKCPKYVKSTKLRLATGLRNVPSIQSRGLFGAIAGFIEGGWTGMVDGWYGYHHQNEQGSGYAADLKSTQNAIDEITNKVNSVIEKMNTQFTAVGKEFNHLEKRIENLNKKVDDGFLDIWTYNAELLVLLENERTLDYHDSNVKNLYEKVRSQLKNNAKEIGNGCFEFYHKCDNTCMESVKNGTYDYPKYSEEAKLNREEIDGVKLESTRIYQILAIYSTVASSLVLVVSLGAISFWMCSNGSLQCRICI

SEQ ID NO: 5159 - protein, 566 aa, synthetic construct; identical to SEQ ID NO: 2669
  REGION 1..566: note = hemagglutinin__InfluenzaA__ADJ40524

SEQ ID NO: 5160 - protein, 566 aa, synthetic construct; identical to SEQ ID NO: 3022
  REGION 1..566: note = hemagglutinin__InfluenzaA__ADJ40534

SEQ ID NO: 5161 - protein, 566 aa, synthetic construct
  REGION 1..566: note = hemagglutinin__InfluenzaA__ADJ40554
MKAILVVLLYTFATANADTLCIGYHANNSTDTVDTVLEKNVTVTHSVNLLEDKHNGKLCKLRGVAPLHLGKCNIAGWILGNPECESLSTASSWSYIVETSSSDNGTCYPGDFIDYEELREQLSSVSSFERFEIFPNTSSWPNHDSNKGVTAACPHAGAKSFYKNLIWLVKKGNSYPKLSKSYINDKGKEVLVLWGIHHPSTSADQQSLYQNADAYVFVGTSRYSKKFKPEIAIRPKVRDQEGRMNYYWTLVEPGDKITFEATGNLVVPRYAFAMERNAGSGIIISDTPVHDCNTTCQTPKGAINTSLPFQNIHPITIGKCPKYVKSTKLRLATGLRNVPSIQSRGLFGAIAGFIEGGWTGMVDGWYGYHHQNEQGSGYAADLKSTQNAIDEITNKVNSVIEKMNTQFTAVGKEFNHLEKRIENLNKKVDDGFLDIWTYNAELLVLLENERTLDYHDSNVKNLYEKVRSQLKNNAKEIGNGCFEFYHKCDNTCMESVKNGTYDYPKYSEEAKLNREEIDGVKLESTRIYQILAIYSTVASSLVLVVSLGAISFWMCSNGSLQCRICI

SEQ ID NO: 5162 - protein, 566 aa, synthetic construct; identical to SEQ ID NO: 2669
  REGION 1..566: note = hemagglutinin__InfluenzaA__ADJ40564

SEQ ID NO: 5163 - protein, 566 aa, synthetic construct; identical to SEQ ID NO: 2669
  REGION 1..566: note = hemagglutinin__InfluenzaA__ADJ40574

SEQ ID NO: 5164 - protein, 566 aa, synthetic construct; identical to SEQ ID NO: 4089
  REGION 1..566: note = hemagglutinin__InfluenzaA__ADJ40584

SEQ ID NO: 5165 - protein, 566 aa, synthetic construct; identical to SEQ ID NO: 2669
  REGION 1..566: note = hemagglutinin__InfluenzaA__ADJ40594

SEQ ID NO: 5166 - protein, 566 aa, synthetic construct; identical to SEQ ID NO: 3238
  REGION 1..566: note = hemagglutinin__InfluenzaA__ADJ40604

SEQ ID NO: 5167 - protein, 566 aa, synthetic construct; identical to SEQ ID NO: 3238
  REGION 1..566: note = hemagglutinin__InfluenzaA__ADJ40614

SEQ ID NO: 5168 - protein, 566 aa, synthetic construct; identical to SEQ ID NO: 2669
  REGION 1..566: note = hemagglutinin__InfluenzaA__ADJ40634

SEQ ID NO: 5169 - protein, 566 aa, synthetic construct; identical to SEQ ID NO: 2669
  REGION 1..566: note = hemagglutinin__InfluenzaA__ADJ40644

SEQ ID NO: 5170 - protein, 566 aa, synthetic construct; identical to SEQ ID NO: 2669
  REGION 1..566: note = hemagglutinin__InfluenzaA__ADJ40654

SEQ ID NO: 5171 - protein, 566 aa, synthetic construct; identical to SEQ ID NO: 2669
  REGION 1..566: note = hemagglutinin__InfluenzaA__ADJ40664

SEQ ID NO: 5172 - protein, 566 aa, synthetic construct; identical to SEQ ID NO: 2669
  REGION 1..566: note = hemagglutinin__InfluenzaA__ADJ40674

SEQ ID NO: 5173 - protein, 566 aa, synthetic construct
  REGION 1..566: note = hemagglutinin__InfluenzaA__ADJ41816
MKTIIALSYMFCLVFAQNLPGNDNSTATLCLGHHAVPNGTLVKTITNDQIEVTNATELVQSSSTGRICDSPHRILDGKNCTLIDALLGDPHCDGFQNEKWDLFVERSKAFSNCYPYDVPDYASLRSLVASSGTLEFINEGFNWTGVTQSGGSCTCKRGSNDSFFSRLNWLYESESKYPVLNVTMPNNGKFDKLYIWGIHHPSTDKEQTNLYIRASGRVTVSTKRSQQTVIPNIGSRPWVRGLSSRISIYWTIVKPGDILLISSTGNLIAPRGYFKIRTGKSSIMRSDAPIGTCSSECITPNGSIPNDKPFQNVNKITYGACPRYVKQNTLKLATGMRNVPEKQTRGIFGAIAGFIENGWEGMVDGWYGFRHQNSEGTGQAADLKSTQAAIDQINGKLNRVIEKTNEKFHQIEKEFSEVEGRIQDLEKYVEDTKIDLWSYNAELLVALENQHTIDLTDSEMNKLFEKTRKQLRENAEDMGNGCFKIYHKCDNACIGSIRNGTYDHDVYRDEALNNRFQIKGVELKSGYKDWILWISFAISCFLLCVVLLGFIMWACQKGNIRCNICI

SEQ ID NO: 5174 - protein, 566 aa, synthetic construct; identical to SEQ ID NO: 2669
  REGION 1..566: note = hemagglutinin__InfluenzaA__ADJ56640

SEQ ID NO: 5175 - protein, 566 aa, synthetic construct; identical to SEQ ID NO: 3467
  REGION 1..566: note = hemagglutinin__InfluenzaA__ADJ56650

SEQ ID NO: 5176 - protein, 566 aa, synthetic construct; identical to SEQ ID NO: 2760
  REGION 1..566: note = hemagglutinin__InfluenzaA__ADJ67983

SEQ ID NO: 5177 - protein, 566 aa, synthetic construct; identical to SEQ ID NO: 2760
  REGION 1..566: note = hemagglutinin__InfluenzaA__ADJ67984

SEQ ID NO: 5178 - protein, 566 aa, synthetic construct; identical to SEQ ID NO: 2760
  REGION 1..566: note = hemagglutinin__InfluenzaA__ADJ67985

SEQ ID NO: 5179 - protein, 566 aa, synthetic construct
  REGION 1..566: note = hemagglutinin__InfluenzaA__ADJ80241
MKAILVVLLYTFATANADTLCIGYHANNSTDTVDTVLEKNVTVTHSVNLLEDKHNGKLCKLRGVAPLHLGKCNIAGWILGNPECESLSTASSWSYIVETSSSDNGTCYPGDFIDYEELREQLSSVSSFERFEIFPKTSSWPNHDSNKGVTAACPHAGAKSFYKNLIWLVKKGNSYPKLSKSYINDKGKEVLVLWGIHHPSTSADQQSLYQNADAYVFVGTSRYSKKFKPEIAIRPKVRNQEGRMNYYWTLVEPGDKITFEATGNLVVPRYAFAMERNAGSGIIISDTPVHDCNTTCQTPKGAINTSLPFQNIHPITIGKCPKYVKSTKLRLATGLRNVPSIQSRGLFGAIAGFIEGGWTGMVDGWYGYHHQNEQGSGYAADLKSTQNAIDKITNKVNSVIEKMNTQFTAVGKEFNHLEKRIENLNKKVDDGFLDIWTYNAELLVLLENERTLDYHDSNVKNLYEKVRSQLKNNAKEIGNGCFEFYHKCDNTCMESVKNGTYDYPKYSEEAKLNREEIDGVKLESTRIYQILAIYSTVASSLVLVVSLGAISFWMCSNGSLQCRICI

SEQ ID NO: 5180 - protein, 566 aa, synthetic construct
  REGION 1..566: note = hemagglutinin__InfluenzaA__ADJ80242
MKAILVVLLYTFATANADTLCIGYHANNSTDTVDTVLEKNVTVTHSVNLLEDKHNGKLCKLRGVAPLHLGKCNIAGWILGNPECESLSTASSWSYIVETSSSDNGTCYPGDFIDYEELREQLSSVSSFERFEIFPKTSSWPNHDSNKGVTAACPHAGAKSFYKNLIWLVKKGNSYPKLSKSYINDKGKEVLVLWGIHHPSTSADQQSLYQNADAYVFVGTSRYSKKFKPEIAIRPKVRDQEGRMNYYWTLVEPGDKITFEATGNLVVPRYAFAMERNAGSGIIISDTPVHDCNTTCQTPKGAINTSLPFQNIHPITIGKCPKYVKSTKLRLATGLRNVPSIQSRGLFGAIAGFIEGGWTGMVDGWYGYHHQNEQGSGYAADLKSTQNAIDEITNKVNSVIEKMNTQFTAVGKEFNHLEKRIENLNKKVDDGFLDIWTYNAELLVLLENERTLDYHDSNVKNLYEKVRSQLKNNAKEIGNGCFEFYHKCDNTCMESVKNGTYDYPKYSEEAKLNREEIDGVKLESTRIYQILAIYSTAASSLVLVVSLGAISFWMCSNGSLQCRICI

SEQ ID NO: 5181 - protein, 566 aa, synthetic construct; identical to SEQ ID NO: 4221
  REGION 1..566: note = hemagglutinin__InfluenzaA__ADJ80243

SEQ ID NO: 5182 - protein, 566 aa, synthetic construct; identical to SEQ ID NO: 2669
  REGION 1..566: note = hemagglutinin__InfluenzaA__ADJ80634

SEQ ID NO: 5183 - protein, 566 aa, synthetic construct; identical to SEQ ID NO: 4671
  REGION 1..566: note = hemagglutinin__InfluenzaA__ADJ80644

SEQ ID NO: 5184 - protein, 566 aa, synthetic construct; identical to SEQ ID NO: 4671
  REGION 1..566: note = hemagglutinin__InfluenzaA__ADJ80654

SEQ ID NO: 5185 - protein, 566 aa, synthetic construct; identical to SEQ ID NO: 3833
  REGION 1..566: note = hemagglutinin__InfluenzaA__ADJ80674

SEQ ID NO: 5186 - protein, 566 aa, synthetic construct; identical to SEQ ID NO: 3833
  REGION 1..566: note = hemagglutinin__InfluenzaA__ADJ80684

SEQ ID NO: 5187 - protein, 566 aa, synthetic construct
  REGION 1..566: note = hemagglutinin__InfluenzaA__ADJ80694
MKAILVVLLYTFATANADTLCIGYHANNSTDTVDTVLEKNVTVTHSVNILEDNHNGKLCKLRGVAPLHLGKCNIAGWILGNPECESLSTASSWSYIVETSSSDNGTCYPGDFIDYEELREQLSSVSSFERFEIFPKTSSWPNHDSNKGVTAACPHAGAKSFYKNLIWLVKKGNSYPKLSKSYINDKGKEVLVLWGIHHPSTSADQQSLYQNADAYVFVGSSRYSKKFKPEIAIRPKVRDQEGRMNYYWTLVEPGDKITFEATGNLVVPRYAFAMERNAGSGIIISDTPVHDCNTTCQTPKGAINTSLPFQNIHPITIGKCPKYVKSTKLRLATGLRNVPSIQSRGLFGAIAGFIEGGWTGMVDGWYGYHHQNEQGSGYAADLKSTQNAIDEITNKVNSVIEKMNTQFTAVGKEFNHLEKRIENLNKKVDDGFLDIWTYNAELLVLLENERTLDYHDSNVKNLYEKVRSQLKNNAKEVGNGCFEFYHKCDNTCMESVKNGTYDYPKYSEEAKLNREEIDGVKLESTRIYQILAIYSTAASSLVLVVSLGAISFWMCSNGSLQCRICI

SEQ ID NO: 5188 - protein, 566 aa, synthetic construct; identical to SEQ ID NO: 3833
  REGION 1..566: note = hemagglutinin__InfluenzaA__ADJ80704

SEQ ID NO: 5189 - protein, 566 aa, synthetic construct
  REGION 1..566: note = hemagglutinin__InfluenzaA__ADJ80714
MKAILVVLLYTFATANADTLCIGYHANNSTDTVDTVLEKNVTVTHSVNLLEDKHNGKLCKLRGAAPLHLGKCNIAGWILGNPECESLSTASSWSYIVETSSSDNGTCYPGDFIDYEELREQLSSVSSFERFEIFPKTSSWPNHDSNKGVTAACPHAGAKSFYKNLIWLVKKGNSYPKLSKSYINDKGKEVLVLWGIHHPSTSADQQSLYQNADAYVFVGTSRYSKKFKPEIAIRPKVRDQEGRMNYYWTLVEPGDKITFEATGNLVVPRYAFAMERNAGSGIIISDTPVHDCNTTCQTPKGAINTSLPFQNIHPITIGKCPKYVKSTKLRLATGLRNVPSIQSRGLFGAIAGFIEGGWTGMVDGWYGYHHQNEQGSGYAADLKSTQNAIDKITNKVNSVIEKMNTQFTAVGKEFNHLEKRIENLNKKVDDGFLDIWTYNAELLVLLENERTLDYHDSNVKNLYEKVRSQLKNNAKEIGNGCFEFYHKCDNTCMESVKNGTYDYPKYSEEAKLNREEIDGVKLESTRIYQILAIYSTVASSLVLVVSLGAISFWMCSNGSLQCRICI

SEQ ID NO: 5190 - protein, 566 aa, synthetic construct; identical to SEQ ID NO: 2669
  REGION 1..566: note = hemagglutinin__InfluenzaA__ADJ80724

SEQ ID NO: 5191 - protein, 566 aa, synthetic construct; identical to SEQ ID NO: 3833
  REGION 1..566: note = hemagglutinin__InfluenzaA__ADJ80734

SEQ ID NO: 5192 - protein, 566 aa, synthetic construct; identical to SEQ ID NO: 3833
  REGION 1..566: note = hemagglutinin__InfluenzaA__ADJ80744

SEQ ID NO: 5193 - protein, 566 aa, synthetic construct; identical to SEQ ID NO: 3833
  REGION 1..566: note = hemagglutinin__InfluenzaA__ADJ80754

SEQ ID NO: 5194 - protein, 566 aa, synthetic construct
  REGION 1..566: note = hemagglutinin__InfluenzaA__ADJ80774
MKAILVVLLYTFATANADTLCIGYHANNSTDTVDTVLEKNVTVTHSVNILEDKHNGKLCKLRGVAPLHLGKCNIAGWILGNPECESLSTANSWSYIVETSSSDNGTCYPGDFIDYEELREQLSSVSSFERFEIFPKTSSWPNHDSNKGVTAACPHAGAKSFYKNLIWLVKKGNSYPKLSKSYINDKGKEVLVLWGIHHPSTSADQQSLYQNADAYVFVGSSRYSKKFKPEIAIRPKVRDQEGRMNYYWTLVEPGDKITFEATGNLVVPRYAFAMERNAGSGIIISDTPVHDCNTTCQTPKGAINTSLPFQNIHPITIGKCPKYVKSTKLRLATGLRNVPSIQSRGLFGAIAGFIEGGWTGMVDGWYGYHHQNEQGSGYAADLKSTQNAIDEITNKVNSVIEKMNTQFTAVGKEFNHLEKRIENLNKKVDDGFLDIWTYNAELLVLLENERTLDYHDSNVKNLYEKVRSQLKNNAKEVGNGCFEFYHKCDNTCMESVKNGTYDYPKYSEEAKLNREEIDGVKLESTRIYQILAIYSTAASSLVLVVSLGAISFWMCSNGSLQCRICI

SEQ ID NO: 5195 - protein, 566 aa, synthetic construct
  REGION 1..566: note = hemagglutinin__InfluenzaA__ADJ80784
MKAILVVLLYTFATANADTLCIGYHANNSTDTVDTVLEKNVTVTHSVNLLEDKHNGKLCKLRGVAPLHLGKCNIAGWILGNPECESLSTASSWSYIVETSSSDNGTCYPGDFIDYEELREQLSSVSSFERFEIFPKTSSWPNHDSNKGVTAACPHAGAKSFYKNLIWLVKKGNSYPKLSKSYINDKGKEVLVLWGIHHPSTSADQQSLYQNADAYVFVGTSRYSKKFKPEIAIRPKVRDQEGRMNYYWTLVEPGDKITFEATGNLVVPRYAFAMERNAGSGIIISDTPVHDCNTTCQTPKGAINTSLPFHNIHPITIGKCPKYVKSTKLRLATGLRNVPSIQSRGLFGAIAGFIEGGWTGMVDGWYGYHHQNEQGSGYAADLKSTQNAIDKITNKVNSVIEKMNTQFTAVGKEFNHLEKRIENLNKKVDDGFLDIWTYNAELLVLLENERTLDYHDSNVKNLYEKVRSQLKNNAKEIGNGCFEFYHKCDNTCMESVKNGTYDYPKYSEEAKLNREEIDGVKLESTRIYQILAIYSTVASSLVLVVSLGAISFWMCSNGSLQCRICI

SEQ ID NO: 5196 - protein, 566 aa, synthetic construct; identical to SEQ ID NO: 3833
  REGION 1..566: note = hemagglutinin__InfluenzaA__ADJ80794

SEQ ID NO: 5197 - protein, 566 aa, synthetic construct; identical to SEQ ID NO: 4671
  REGION 1..566: note = hemagglutinin__InfluenzaA__ADJ80804

SEQ ID NO: 5198 - protein, 566 aa, synthetic construct
  REGION 1..566: note = hemagglutinin__InfluenzaA__ADJ80814
MKAILVVLLYTFATANADTLCIGYHANNSTDTVDTVLEKNVTVTHSVNLLEDKHNGKLCKLRGVAPLHLGKCNIAGWILGNPECESLSTASSWSYIVETSSSDNGTCYPGDFIDYEELREQLSSVSSFERFEIFPKTSSWPNHDSNKGVTAACPRAGAKSFYKNLIWLVKKGNSYPKLSKSYINDKGKEVLVLWGIHHPSTSADQQSLYQNADAYVFVGTSRYSKKFKPEIAIRPKVRDQEGRMNYYWTLVEPGDKITFEATGNLVVPRYAFAIERNAGSGIIISDTPVHDCNTTCQTPKGAINTSLPFQNIHPITIGKCPKYVKSTKLRLATGLRNVPSIQSRGLFGAIAGFIEGGWTGMVDGWYGYHHQNEQGSGYAADLKSTQNAIDKITNKVNSVIEKMNTQFTAVGKEFNHLEKRIENLNKKVDDGFLDIWTYNAELLVLLENERTLDYHDSNVKNLYEKVRSQLKNNAKEIGNGCFEFYHKCDNTCMESVKNGTYDYPKYSEEAKLNREEIDGVKLESTRIYQILAIYSTVASSLVLVVSLGAISFWMCSNGSLQCRICI

SEQ ID NO: 5199 - protein, 566 aa, synthetic construct
  REGION 1..566: note = hemagglutinin__InfluenzaA__ADJ80834
MKAILVVLLYTFATANADTLCIGYHANNSTDTVDTVLEKNVTVTHSVNLLEDKHNGKLCKLRGVAPLHLGKCNIAGWILGNPECESLSTASSWSYIVETSSSDNGTCYPGDFIDYEELREQLSSVSSFERFEIFPKTSSWPNHDSNKGVTAACPHAGAKSFYKNLIWLVKKGNSYPKLSKSYINDKGKEVLVLWGIHHPSTSTDQQSLYQNADAYVFVGTSRYSKKFKPEIAIRPKVRDQEGRMNYYWTLVEPGDKITFEATGNLVVPRYAFAMERNSGSGIIISDTPVHYCNTTCQTPKGAINTSLPFQNIHPITIGKCPKYVKSTKLRLATGLRNVPSIQSRGLFGAIAGFIEGGWTGMVDGWYGYHHQNEQGSGYAADLKSTQNAIDEITNKVNSVIEKMNTQFTAVGKEFNHLEKRIENLNKKVDDGFLDIWTYNAELLVLLENERTLDYHDSNVKNLYEKVRSQLKNNAKEIGNGCFEFYHKCDNTCMESVKNGTYDYPKYSEEAKLNREEIDGVKLESTRIYQILAIYSTVASSLVLVVSLGAISFWMCSNGSLQCRICI

SEQ ID NO: 5200 - protein, 566 aa, synthetic construct; identical to SEQ ID NO: 4871
  REGION 1..566: note = hemagglutinin__InfluenzaA__ADJ80848

SEQ ID NO: 5201 - protein, 566 aa, synthetic construct
  REGION 1..566: note = hemagglutinin__InfluenzaA__ADJ80858
MKTILVVLLYTFATANADTLCIGYHANNSTDTVDTVLEKNVTVTHSVNLLEDKHNGKLCKLRGVAPLHLGKCNIAGWILGNPECESLSTASSWSYIVETSSSDNGTCYPGDFIDYEELREQLSSVSSFERFEIFPKTSSWPNHDSNKGVTAACPHAGAKSFYKNLIWLVKKGNSYPKLSKSYINDKGKEVLVLWGIHHPSTSADQQSLYQNADAYVFVGTSRYSKKFKPEIAIRPKVRDQEGRMNYYWTLVEPGDKITFEATGNLVVPRYAFAMERNAGSGIIISDTPVHDCNTTCQTPKGAINTSLPFQNIHPITIGKCPKYVKSTKLRLATGLRNVPSIQSRGLFGAIAGFIEGGWTGMVDGWYGYHHQNEQGSGYAADLKSTQNAIDKITNKVNSVIEKMNTQFTAVGKEFNHLEKRIENLNKKVDDGFLDIWTYNAELLVLLENERTLDYHDSNVKNLYEKVRSQLKNNAKEIGNGCFEFYHKCDNTCMESVKNGTYDYPKYSEEAKLNREEIDGVKLESTRIYQILAIYSTVASSLVLVVSLGAISFWMCSNGSLQCRICI

SEQ ID NO: 5202 - protein, 566 aa, synthetic construct
  REGION 1..566: note = hemagglutinin__InfluenzaA__ADJ80868
MKAILVVLLYTFATANADTLCIGYHANNSTDTVDTVLEKNVTVTHSVNLLEDKHNGKLCKLRGVAPLHLGKCNIAGWILGNPECESLSTASSWSYIVETSSSDNGTCYPGDFIDYEELREQLSSVSSFERFEIFPKTSSWPNHDSNKGVTAACPNAGAKSFYKNLIWLVKKGNSYPKLSKSYINDKGKEVLVLWGIHHPSTSADQQSLYQNADAYVFVGTSRYSKKFKPEIAIRPKVRDQEGRMNYYWTLVEPGGKITFEATGNLVVPRYAFAMERNAGSGIIISDTPVHDCNTTCQTPKGAINTSLPFQNIHPITIGKCPKYVKSTKLRLATGLRNVPSIQSRGLFGAIAGFIEGGWTGMVDGWYGYHHQNEQGSGYAADLKSTQNAIDKITNKVNSVIEKMNTQFTAVGKEFNHLEKRIENLNKKVDDGFLDIWTYNAELLVLLENERTLDYHDSNVKNLYEKVRSQLKNNAKEIGNGCFEFYHKCDNTCMESVKNGTYDYPKYSEEAKLNREEIDGVKLESTRIYQILAIYSTVASSLVLVVSLGAISFWMCSNGSLQCRICI

SEQ ID NO: 5203 - protein, 566 aa, synthetic construct; identical to SEQ ID NO: 3833
  REGION 1..566: note = hemagglutinin__InfluenzaA__ADJ80883

SEQ ID NO: 5204 - protein, 566 aa, synthetic construct; identical to SEQ ID NO: 3833
  REGION 1..566: note = hemagglutinin__InfluenzaA__ADJ80893

SEQ ID NO: 5205 - protein, 566 aa, synthetic construct; identical to SEQ ID NO: 3833
  REGION 1..566: note = hemagglutinin__InfluenzaA__ADJ80910

SEQ ID NO: 5206 - protein, 566 aa, synthetic construct; identical to SEQ ID NO: 2669
  REGION 1..566: note = hemagglutinin__InfluenzaA__ADJ80927

SEQ ID NO: 5207 - protein, 566 aa, synthetic construct
  REGION 1..566: note = hemagglutinin__InfluenzaA__ADJ80937
MKAILVVLLYTFATANADTLCIGYHANNSTDTVDTVLEKNVTVTHSVNLLEDKHNGKLCKLRGVAPLHLGKCNIAGWILGNPECESLSTASSWSYIVETSSSDNGTCYPGDFIDYEELREQLSSVSSFERFEIFPKTSSWPNHDSNKGVTAACPHAGAKSFYKNLIWLVKKGNSYPKLSKSYINDKGKEVLVLWGIHHPSTSADQQSLYQNADAYAFVGTSRYSKKFKPEIAIRPKVRDQEGRMNYYWTLVEPGDKITFEATGNLVVPRYAFAMERNAGSGIIISDTPVHNCNTTCQTPKGAINTSLPFQNIHPITIGKCPKYVKSTKLRLATGLRNVPSIQSRGLFGAIAGFIEGGWTGMVDGWYGYHHQNEQGSGYAADLKSTQNAIDEITNKVNSVIEKMNTQFTAVGKEFNHLEKRIENLNKKVDDGFLDIWTYNAELLVLLENERTLDYHDSNVKSLYEKVRSQLKNNAKEIGNGCFEFYHKCDNTCMESVKNGTYDYPKYSEEAKLNREEIDGVKLESTRIYQILAIYSTVASSLVLVVSLGAISFWMCSNGSLQCRICI

SEQ ID NO: 5208 - protein, 566 aa, synthetic construct; identical to SEQ ID NO: 3833
  REGION 1..566: note = hemagglutinin__InfluenzaA__ADJ80947

SEQ ID NO: 5209 - protein, 566 aa, synthetic construct; identical to SEQ ID NO: 3833
  REGION 1..566: note = hemagglutinin__InfluenzaA__ADJ80967

SEQ ID NO: 5210 - protein, 566 aa, synthetic construct; identical to SEQ ID NO: 3833
  REGION 1..566: note = hemagglutinin__InfluenzaA__ADJ80977

SEQ ID NO: 5211 - protein, 566 aa, synthetic construct
  REGION 1..566: note = hemagglutinin__InfluenzaA__ADJ80993
MKAILVVLLYTFATANADTLCIGYHANNSTDTVDTVLEKNVTVTHSVNLLEDKHNGKLCKLRGVAPLHLGKCNIAGWILGNPECESLSTASSWSYIVETSSSDNGTCYPGDFIDYEELREQLSSVSSFERFEIFPKTSSWPNHDSNKGVTAACPNAGAKSFYKNLIWLVKKGNSYPKLSKSYINDKGKEVLVLWGIHHPSTSADQQSLYQNADAYVFVGTSRYSKKFKPEIAIRPKVRDQEGRMNYYWTLVEPGDKITFEATGNLVVPRYAFAMERNAGSGIIISDTPVHDCNTTCQTPKGAINTSLPFQNIHPITIGKCPKYVKSTKLRLATGLRNVPSIQSRGLFGAIAGFIEGGWTGMVDGWYGYHHQNEQGSGYAADLKSTQNAIDKITNKVNSVIEKMNTQFTAVGKEFNHLEKRIENLNKKVDDGFLDIWTYNAELLVLLENERTLDYHDSNVKNLYEKVRSQLKNNAKEIGNGCFEFYHKCDNTCMESVKNGTYDYPKYSEEAKLNREEIDGVKLESTRIYQILAIYSTVASSLVLVVSLGAISFWMCSNGSLQCRICI

SEQ ID NO: 5212 - protein, 566 aa, synthetic construct
  REGION 1..566: note = hemagglutinin__InfluenzaA__ADJ81003
MKAILVVLLYTFATANADTLCIGYHANNSTDTVDTVLEKNVTVTHSVNLLEDKHNGKLCKLRGVAPLHLGKCNIAGWILGNPECESLSTASSWSYIVETSSSDNGTCYPGDFIDYEELREQLSSVSSFERFEIFPKTSSWPNHDSNKGVTAACPHAGAKSFYKNLIWLVKKGNSYPKLSKSYINDKGKEVLVLWGIHHPSTSADQQSLYQNADAYVFVGTSRYSKKFKPEIAIRPKVRDQEGRMNYYWTLVEPGDKITFEATGNLVVPRYAFAMERNAGSGIIISDTPVHDCNTTCQTPKGAINTSLPFQNIHPITIGKCPKYVKSTKLRLATGLRNVPSIQSRGLFGAIAGFIEGGWTGMVDGWYGYHHQNEQGSGYAADLKSTQNAIDKITNKVNSVIEKMNTQFTAVGKEFNHLEKRIENLNKKVDDGFLDIWTYNAELLVLLENERTLDYHDSNVKNLYEKVRSQLKNNAKEIGNGCFEFYHKCDNTCMESVKNGTYDYPKYSEEAKLNREKIDGVKLESTRIYQILAIYSTVASSLVLVVSLGAISFWMCSNGSLQCRICI

SEQ ID NO: 5213 - protein, 566 aa, synthetic construct; identical to SEQ ID NO: 4871
  REGION 1..566: note = hemagglutinin__InfluenzaA__ADJ81013

SEQ ID NO: 5214 - protein, 566 aa, synthetic construct
  REGION 1..566: note = hemagglutinin__InfluenzaA__ADJ81023
MKAILVVLLYTFATANADTLCIGYHANNSTDTVDTVLEKNVTVTHSVNLLEDKHNGKLCKLRGVAPLHLGKCNIAGWILGNPECESLSTASSWSYIVETSSSDNGTCYPGDFIDYEELREQLSSVSSFERFEMFPKTSSWPNHDSNKGVTAACPHAGAKSFYKNLIWLVKKGNSYPKLNKSYINDKGKEVLVLWGIHHPSTSADQQSLYQNADAYVFVGTSRYSKKFKPEIAIRPKVRDQEGRMNYYWTLVEPGDKITFEATGNLVVPRYAFAMERNAGSGIIISDTPVHDCNTTCQTPKGAINTSLPFQNIHPITIGKCPKYVKSTKLRLATGLRNVPSIQSRGLFGAIAGFIEGGWTGMVDGWYGYHHQNEQGSGYAADLKSTQNAIDEITNKVNSVIEKMNTQFTAVGKEFNHLEKRIENLNKKVDDGFLDIWTYNAELLVLLENERTLDYHDSNVKNLYEKVRSQLKNNAKEIGNGCFEFYHKCDNTCMESVKNGTYDYPKYSEEAKLNREEIDGVKLESTRIYQILAIYSTVASSLVLVVSLGAISFWMCSNGSLQCRICI

SEQ ID NO: 5215 - protein, 566 aa, synthetic construct; identical to SEQ ID NO: 3833
  REGION 1..566: note = hemagglutinin__InfluenzaA__ADJ81033

SEQ ID NO: 5216 - protein, 566 aa, synthetic construct; identical to SEQ ID NO: 2669
  REGION 1..566: note = hemagglutinin__InfluenzaA__ADJ81043

SEQ ID NO: 5217 - protein, 566 aa, synthetic construct
  REGION 1..566: note = hemagglutinin__InfluenzaA__ADJ81053
MKAILVVLLYTFTTANADTLCIGYHANNSTDTVDTVLEKNVTVTHSVNLLEDKHNGKLCKLRGVAPLHLGKCNIAGWILGNPECESLSTASSWSYIVETSSSDNGTCYPGDFIDYEELREQLSSVSSFERFEIFPKTSSWPNHDSNKGVTAACPHAGAKSFYKNLIWLVKKGNSYPKLSKSYINDKGKEVLVLWGIHHPSTSADQQSLYQNADAYVFVGTSRYSKKFKPEIAIRPKVRDQEGRMNYYWTLVEPGDKITFEATGNLVVPRYAFAMERNAGSGIIISDTPVHDCNTTCQTPKGAINTSLPFQNIHPITIGKCPKYVKSTKLRLATGLRNVPSIQSRGLFGAIAGFIEGGWTGMVDGWYGYHHQNEQGSGYAADLKSTQNAIDKITNKVNSVIEKMNTQFTAVGKEFNHLEKRIENLNKKVDDGFLDIWTYNAELLVLLENERTLDYHDSNVKNLYEKVRSQLKNNAKEIGNGCFEFYHKCDNTCMESVKNGTYDYPKYSEEAKLNREEIDGVKLESTRIYQILAIYSTVASSLVLVVSLGAISFWMCSNGSLQCRICI

SEQ ID NO: 5218 - protein, 566 aa, synthetic construct; identical to SEQ ID NO: 3833
  REGION 1..566: note = hemagglutinin__InfluenzaA__ADJ81063

SEQ ID NO: 5219 - protein, 566 aa, synthetic construct; identical to SEQ ID NO: 3613
  REGION 1..566: note = hemagglutinin__InfluenzaA__ADJ84772

SEQ ID NO: 5220 - protein, 566 aa, synthetic construct
  REGION 1..566: note = hemagglutinin__InfluenzaA__ADJ88782
MKTIIALSYMLCLVFAQKLPGNDNSTATLCLGHHAVPNGTIVKTITNDQIEVTNATELVQSSSTGEICDSPHQILDGENCTLIDALLGDPQCDGFQNKKWDLFVERSKAYSNCYPYDVPDYASLRSLIASSGTLEFNNESFNWTGVTQNGTSSACIRRSNNSFFSRLNWLTHLKFKYPALNVTMPNNEQFDKLYIWGVHHPGTDNDQIFLYAQASGRITVSTKRSQQTVIPNIGSRPRVRNIPSRISIYWTIVKPGDILLINSTGNLIAPRGYFKIRSGKSSIMRSDAPIGKCNSECITPNGSIPNDKPFQNVNRITYGACPRYVKQNTLKLATGMRNVPEKQTRGIFGAIAGFIENGWEGMVDGWYGFRHQNSEGRGQAADLKSTQAAIDQINGKLNRLIGKTNEKFHQIEKEFSEVEGRIQDLEKYVEDTKIDLWSYNAELLVALENQHTIDLTDSEMNKLFEKTKKQLGENAEDMGNGCFKIYHKCDNACIGSIRNGTYDHDVYRDEALNNRFQIKGVELKSGYKDWILWISFAISCFLLCVALLGFIMWACQKGNIRCNICI

SEQ ID NO: 5221 - protein, 566 aa, synthetic construct
  REGION 1..566: note = hemagglutinin__InfluenzaA__ADK21733
MKAILVVLLYTFATANADTLCIGYHANNSTDTVDTVLEKNVTVTHSVNLLEDKHNGKLCKLRGVAPLHLGKCNIAGWILGNPECESLSTASSWSYIVETSSSDNGTCYPGDFIDYEELREQLSSVSSFERFEIFPKTSSWPNHDSNKGVTAACPHAGAKSFYKNLIWLVKKGNSYPKLSKSYINDKGKEVLVLWGIHHPSTSTDQQSLYQNADAYVFVGTSRYSKKFKPEIAIRPKVRDQEGRMNYYWTLVEPGDKITFEATGNLVVPRYAFAMERNAGSGIIISDTPAHDCNTTCQTPKGAINTSLPFQNIHPITIGKCPKYVKSTKLRLATGLRNVPSIQSRGLFGAIAGFIEGGWTGMVDGWYGYHHQNEQGSGYAADLKSTQNAIDKITNKVNSVIEKMNTQFTAVGKEFNHLEKRIENLNKKVDDGFLDIWTYNAELLVLLENERTLDYHDSNVKNLYEKVRSQLKNNAKEIGNGCFEFYHKCDNTCMESVKNGTYDYPKYSEEAKLNREEIDGVKLESTRIYQILAIYSTVASSLVLVVSLGAISFWMCSNGSLQCRICI

SEQ ID NO: 5222 - protein, 566 aa, synthetic construct
  REGION 1..566: note = hemagglutinin__InfluenzaA__ADK21743
MKAILVVLLYTFATANADTLCIGYHANNSTDTVDTVLEKNVTVTHSVNLLEDKHNGKLCKLRGVAPLHLGKCNIAGWILGNPECESLSTASSWSYIVETSSSDNGTCYPGDFIDYEELREQLSSVSSFERFEIFPKTSSWPNHDSNKGVTAACPHAGAKSFYKNLIWLVKKGNSYPKISNSYINDKGKEVLVLWGIHHPSTSADQQSLYQNADAYVFVGTSRYSKKFKPEIAIRPKVRDQEGRMNYYWTLVEPGDKITFEATGNLVVPRYAFAMERNAGSGIIISDTPAHDCNTTCQTPKGAINTSLPFQNIHPITIGKCPKYVKSTKLRLATGLRNVPSIQSRGLFGAIAGFIEGGWTGMVDGWYGYHHQNEQGSGYAADLKSTQNAIDEITNKVNSVIEKMNTQFTAVGKEFNHLEKRIENLNKKVDDGFLDIWTYNAELLVLLENERTLDYHDSNVKNLYEKVRSQLKNNAKEIGNGCFEFYHKCDNTCMESVKNGTYDYPKYSEEAKLNREEIDGVKLESTRIYQILAIYSTVASSLVLVVSLGAISFWMCSNGSLQCRICI

SEQ ID NO: 5223 - protein, 566 aa, synthetic construct
  REGION 1..566: note = hemagglutinin__InfluenzaA__ADK21753
MKAILVVLLYTFATANADTLCIGYHANNSTDTVDTVLEKNVTVTHSVNLLEDKHNGKLCKLRGVAPLHLGKCNIAGWILGNPECESLSTASSWSYIVETSSSDNGTCYPGDFIDYEELREQLSSVSSFERFEIFPKTSSWPNHDSNKGVTAACPHAGAKSFYKNLIWLVKKGNSYPKLSKSYINDKGKEVLVLWGIHHPSTSADQQSLYQNADAYVFVGTSRYSKKFKPEIAIRPKVRDQEGRMNYYWTLVEPGDKITFEATGNLVVPRYAFAMEGNAGSGIIISDTPVHDCNTTCQTPKGAINTSLPFQNIHPITIGKCPKYVKSTKLRLATGLRNVPSIQSRGLFGAIAGFIEGGWTGMVDGWYGYHHQNEQGSGYAADLKSTQNAIDKITNKVNSVIEKMNTQFTAVGKEFNHLEKRIENLNKKVDDGFLDIWTYNAELLVLLENERTLDYHDSNVKNLYEKVRSQLKNNAKEIGNGCFEFYHKCDNTCMESVKNGTYDYPKYSEEAKLNREEIDGVKLESTRIYQILAIYSTVASSLVLVVSLGAISFWMCSNGSLQCRICI

SEQ ID NO: 5224 - protein, 566 aa, synthetic construct
  REGION 1..566: note = hemagglutinin__InfluenzaA__ADK21763
MKAILVVLLYTFATANADTLCIGYHANNSTDTVDTVLEKNVTVTHSVNLLEDKHNGKLCKLRGVAPLHLGKCNIAGWILGNPECESLSTASSWSYIVETSSSDNGTCYPGDFIDYEELREQLSSVSSFERFEIFPKTSSWPNHDSNKGVTAACPHAGAKSFYKNLIWLVKKGNSYPKLSKSYINDKGKEVLVLWGIHHPSTSADQQSLYQNADAYVFVGTSKYSKKFKPEIAIRPKVRDQEGRMNYYWTLVEPGDKITFEATGNLVVPRYAFAMERNAGSGIIISDTPVHDCNTTCQTPKGAINTSLPFQNIHPITIGKCPKYVKSTKLRLATGLRNVPSIQSRGLFGAIAGFIEGGWTGMVDGWYGYHHQNEQGSGYAADLKSTQNAIDEITNKVNSVIEKMNTQFTAVGKEFNHLEKRIENLNKKVDDGFLDIWTYNAELLVLLENERTLDYHDSNVKNLYEKVRSQLKNNAKEIGNGCFEFYHKCDNTCMESVKNGTYDYPKYSEEAKLNREEIDGVKLESTRIYQILAIYSTVASSLVLVVSLGAISFWMCSNGSLQCRICI

SEQ ID NO: 5225 - protein, 566 aa, synthetic construct; identical to SEQ ID NO: 3833
  REGION 1..566: note = hemagglutinin__InfluenzaA__ADK21773

SEQ ID NO: 5226 - protein, 566 aa, synthetic construct; identical to SEQ ID NO: 3833
  REGION 1..566: note = hemagglutinin__InfluenzaA__ADK21783

SEQ ID NO: 5227 - protein, 566 aa, synthetic construct; identical to SEQ ID NO: 2669
  REGION 1..566: note = hemagglutinin__InfluenzaA__ADK21813

SEQ ID NO: 5228 - protein, 566 aa, synthetic construct; identical to SEQ ID NO: 4089
  REGION 1..566: note = hemagglutinin__InfluenzaA__ADK21823

SEQ ID NO: 5229 - protein, 566 aa, synthetic construct
  REGION 1..566: note = hemagglutinin__InfluenzaA__ADK21833
MKAILVVLLYTFATANADTLCIGYHANNSTDTVDTVLEKNVTVTHSVNLLEDKHNGKLCKLRGVAPLHLGKCNIAGWILGNPECESLSTASSWSYIVETSSSDNGTCYPGDFIDYEELREQLSSVSSFERFEIFPKTSSWPNHDSNKGVTAACPHAGAKSFYKNLIWLVKKGNSYPKLSKSYINDKGKEVLVLWGIHHPSTSADQQSLYQNADAYVFVGTSRYSKKFKPEIAIRPKVRDQEGRMNYYWTLVEPGDKITFEATGNLVVPRYAFAMERNAGSGIIISDTPVRDCNTTCQTPKGAINTSLPFQNIHPITIGKCPKYVKSTKLRLATGLRNVPSIQSRGLFGAIAGFIEGGWTGMVDGWYGYHHQNEQGSGYAADLKSTQNAIDEITNKVNSVIEKMNTQFTAVGKEFNHLEKRIENLNKKVDDGFLDIWTYNAELLVLLENERTLDYHDSNVKNLYEKVRSQLKNNAKEIGNGCFEFYHKCDNTCMESVKNGTYDYPKYSEEAKLNREEIDGVKLESTRIYQILAIYSTVASSLVLVVSLGAISFWMCSNGSLQCRICI

SEQ ID NO: 5230 - protein, 566 aa, synthetic construct; identical to SEQ ID NO: 3833
  REGION 1..566: note = hemagglutinin__InfluenzaA__ADK21843

SEQ ID NO: 5231 - protein, 566 aa, synthetic construct; identical to SEQ ID NO: 3022
  REGION 1..566: note = hemagglutinin__InfluenzaA__ADK21853

SEQ ID NO: 5232 - protein, 566 aa, synthetic construct; identical to SEQ ID NO: 4318
  REGION 1..566: note = hemagglutinin__InfluenzaA__ADK21863

SEQ ID NO: 5233 - protein, 566 aa, synthetic construct; identical to SEQ ID NO: 3116
  REGION 1..566: note = hemagglutinin__InfluenzaA__ADK21873

SEQ ID NO: 5234 - protein, 566 aa, synthetic construct
  REGION 1..566: note = hemagglutinin__InfluenzaA__ADK21883
MKAILVVLLYTFATANADTLCIGYHANNSTDTVDTVLEKNVTVTHSVNLLEDKHNGKLCKLRGVAPLHLGKCNIAGWILGNPECESLSTASSWSYIVETSSSDNGTCYPGDFIDYEELREQLSSVSSFERFEIFPKTSSWPNHDSNKGVTAACPHAGAKSFYKNLIWLVKKGNSYPKLSKSYINDKGKEVLVLWGIHHPSTSADQQSLYQNADAYVFVGTSRYSKKFKPEIAIRPKVRDQEGRMNYYWTLVEPGDKITFEATGNLVVPKYAFAMERNAGSGIIISDTPVHDCNTTCQTPKGAINTSLPFQNIHPITIGKCPKYVKSTKLRLATGLRNIPSIQSRGLFGAIAGFIEGGWTGMVDGWYGYHHQNEQGSGYAADLKSTQNAIDEITNKVNSVIEKMNTQFTAVGKEFNHLEKRIENLNKKVDDGFLDIWTYNAELLVLLENERTLDYHDSNVKNLYEKVRSQLKNNAKEIGNGCFEFYHKCDNTCMESVKNGTYDYPKYSEEAKLNREEIDGVKLESTRIYQILAIYSTVASSLVLVVSLGAISFWMCSNGSLQCRICI

SEQ ID NO: 5235 - protein, 566 aa, synthetic construct; identical to SEQ ID NO: 2669
  REGION 1..566: note = hemagglutinin__InfluenzaA__ADK21893

SEQ ID NO: 5236 - protein, 566 aa, synthetic construct; identical to SEQ ID NO: 4266
  REGION 1..566: note = hemagglutinin__InfluenzaA__ADK21903

SEQ ID NO: 5237 - protein, 566 aa, synthetic construct; identical to SEQ ID NO: 4379
  REGION 1..566: note = hemagglutinin__InfluenzaA__ADK21913

SEQ ID NO: 5238 - protein, 566 aa, synthetic construct
  REGION 1..566: note = hemagglutinin__InfluenzaA__ADK21923
MKAILVVLLYTFATANADTLCIGYHANNSTDTVDTVLEKNVTVTHSVNILEDKHNGKLCKLRGVAPLHLGKCNIAGWILGNPECESLSTASSWSYIVETSSSDNGTCYPGDFIDYEELREQLSSVSSFERFEIFPKTSSWPNHDSNKGVTAACPHAGAKSFYKNLIWLVKKGNSYPKLSKSYINDKGKEVLVLWGIHHPSTSADQQSLYQNADAYVFVGTSRYSKKFKPEIAIRPKVRDQEGRMNYYWTLVEPGDKITFEATGNLVVPRYAFAMERNAGSGIIISDTPVHDCNTTCQTPKGAINTSLPFQNIHPITIGKCPKYVKSTKLRLATGLRNVPSIQSRGLFGAIAGFIEGGWTGMVDGWYGYHHQNEQGSGYAADLKSTQNAIDEITNKVNSVIEKMNTQFTAVGKEFNHLEKRIENLNKKVDDGFLDIWTYNAELLVLLENERTLDYHDSNVKNLYEKARSQLKNNAKEIGNGCFEFYHKCDNTCMESVKNGTYDYPKYSEEAKLNREKIDGVKLESTRIYQILAIYSTVASTLVLVVSLGAISFWMCSNGSLQCRICI

SEQ ID NO: 5239 - protein, 566 aa, synthetic construct
  REGION 1..566: note = hemagglutinin__InfluenzaA__ADK21933
MKAILVVLLYTFATANADTLCIGYHANNSTDTVDTVLEKNVTVTHSVDLLEDKHNGKLCKLRGVAPLHLGKCNIAGWILGNPECESLSTASSWSYIVETSSSDNGTCYPGDFIDYEELREQLSSVSSFERFEIFPKTSSWPNHDSNKGVTAACPNAGAKSFYKNLIWLVKKGNSYPKLSKSYINDKGKEVLVLWGIHHPSTSADQQSLYQNADAYVFVGTSRYSKKFKPEIAIRPKVRDQEGRMNYYWTLVEPGDKITFEATGNLVVPRYAFAMERNAGSGIIISDTPVHDCNTTCQTPKGAINTSLPFQNIHPITIGKCPKYVKSTKLRLATGLRNVPSIQSRGLFGAIAGFIEGGWTGMVDGWYGYHHQNEQGSGYAADLKSTQNAIDEITNKVNSVIEKMNTQFTAVGKEFNHLEKRIENLNKKVDDGFLDIWTYNAELLVLLENERTLDYHDSNVKNLYEKVRSQLKNNAKEIGNGCFEFYHKCDNTCMESVKNGTYDYPKYSEEAKLNREEIDGVKLESTRIYQILAIYSTVASSLVLVVSLGAISFWMCSNGSLQCRICI

SEQ ID NO: 5240 - protein, 566 aa, synthetic construct; identical to SEQ ID NO: 2669
  REGION 1..566: note = hemagglutinin__InfluenzaA__ADK21943

SEQ ID NO: 5241 - protein, 566 aa, synthetic construct
  REGION 1..566: note = hemagglutinin__InfluenzaA__ADK21953
MKAILVVLLYTFATANADTLCIGYHANNSTDTVDTVLEKNVTVTHSVNLLEDKHNGKLCKLRGVAPLHLGKCNIAGWILGNPECESLSTASSWSYIVETSSSDNGTCYPGDFIDHEELREQLSSVSSFERFEIFPKTSSWPNHDSNKGVTAACPHAGAKSFYKNLIWLVKKGNSYPKLSKSYINDKGKEVLVLWAIHHPSTSADQQSLYQNADAYVFVGTSRYSKKFKPEIAIRPKVRDQEGRMNYYWTLVEPGDKITFEATGNLVVPRYAFAMERNAGSGIIISDTPVHDCNTTCQTPKGAINTSLPFQNIHPITIGKCPKYVKSTKLRLATGLRNVPSIQSRGLFGAIAGFIEGGWTGMVDGWYGYHHQNEQGSGYAADLKSTQNAIDEITNKVNSVIEKMNTQFTAVGKEFNHLEKRIENLNKKVDDGFLDIWTYNAELLVLLENERTLDYHDSNVKNLYEKVRSQLKNNAKEIGNGCFEFYHKCDNTCMESVKNGTYDYPKYSEEAKLNREEIDGVKLESTRIYQILAIYSTVASSLVLVVSLGAISFWMCSNGSLQCRICI

SEQ ID NO: 5242 - protein, 566 aa, synthetic construct; identical to SEQ ID NO: 4856
  REGION 1..566: note = hemagglutinin__InfluenzaA__ADK32390

SEQ ID NO: 5243 - protein, 566 aa, synthetic construct; identical to SEQ ID NO: 4856
  REGION 1..566: note = hemagglutinin__InfluenzaA__ADK32400

SEQ ID NO: 5244 - protein, 566 aa, synthetic construct
  REGION 1..566: note = hemagglutinin__InfluenzaA__ADK32420
MKAILVVLLYTFATANADTLCIGYHANNSTDTVDTVLEKNVTVTHSVNLLEDKHNGKLCKLRGVAPLHLGKCNIAGWILGNPECESLSTASSWSYIVETSSSDNGTCYPGDFIDYEELREQLSSVSSFERFEIFPKTSSWPNHDSNKGVTAACPHAGAKSFYKNLIWLVKKGNSYPKLSKSYINDKGKEVLVLWGIHHPSTSADQQSLYQNADAYVFVGTSRYSKKFKPEIAIRPKVREQEGRMNYYWTLVEPGDKITFEATGNLVVPRYAFAMERNAGSGIIISDTPVHDCNTTCQTPKGAINTSLPFQNIHSITIGKCPKYVKSTKLRLATGLRNVPSIQSRGLFGAIAGFIEGGWTGMVDGWYGYHHQNEQGSGYAADLKSTQNAIDEITNKVNSVIEKMNTQFTAVGKEFNHLEKRIENLNKKVDDGFLDIWTYNAELLVLLENERTLDYHDSNVKNLYEKVRNQLKNNAKEIGNGCFEFYHKCDNTCMESVKNGTYDYPKYSEEAKLNREEIDGVKLESTRIYQILAIYSTVASSLVLVVSLGAISFWMCSNGSLQCRICI

SEQ ID NO: 5245 - protein, 566 aa, synthetic construct; identical to SEQ ID NO: 4221
  REGION 1..566: note = hemagglutinin__InfluenzaA__ADK32430

SEQ ID NO: 5246 - protein, 566 aa, synthetic construct
  REGION 1..566: note = hemagglutinin__InfluenzaA__ADK32440
MKAILVVLLYTFATANADTLCIGYHANNSTDTVDTVLEKNVTVTHSVNLLEDKHNGKLCKLRGVAPLHLGKCNIAGWILGNPECESLSTASSWSYIVETSSSDNGTCYPGDFIDYEELREQLSSVSSFERFEIFPKTSSWPNHDSNKGVTAACPHAGAKSFYKNLIWLVKKGNSYPKLSKSYINDKGKEVLVLWGIHHPSTSADQQSLYQNADAYVFVGTSRYSKKFKPEIAIRPKVRDQEGRMNYYWTLVEPGDKITFEATGNLVVPRYAFAMERNAGSGIIISDTPVHDCNTTCQTPKGAINTSLPFQNIHPITIGKCPKYVKSTKLRLATGLRNVPSIQSRGLFGAIAGFIEGGWTGMVDGWYGYHHQNEQGSGYAADLKSTQNAIDGITNKVNSVIEKMNTQFTAVGKEFNHLEKRIENLNKKVDDGFLDIWTYNAELLVLLENERTLDYHDSNVKNLYEKVRSQLKNNAKEIGNGCFEFYHKCDNTCMESVKNGTYDYPKYSEEAKLNREEIDGVKLESTRIYQILAIYSTVASSLVLVVSLGAISFWMCSNGSLQCRICI

SEQ ID NO: 5247 - protein, 566 aa, synthetic construct
  REGION 1..566: note = hemagglutinin__InfluenzaA__ADK32450
MKAILVVLLYTFATANADTLCIGYHANNSTDTVDTVLEKNVTVTHSVNILEDKHNGKLCKLRGVAPLHLGKCNIAGWILGNPECESLSTASSWSYIVETSSSDNGTCYPGDFIDYEELREQLSSVSSFERFEIFPKTSSWPNHDSNKGVTAACPHAGAKSFYKNLIWLVKKGNSYPKLSKSYINDKGKEVLVLWGIHHPSTSADQQSLYQNADAYVFVGSSRYSKKFKPEIAIRPKVRDQEGRMNYYWTLVEPGDKITFEATGNLVVPRYAFAMERNAGSGIIISDAPVHDCNTTCQTPKGAINTSLPFQNIHPITIGKCPKYVKSTKLRLATGLRNVPSIQSRGLFGAIAGFIEGGWTGMVDGWYGYHHQNEQGSGYAADLKSTQNAIDEITNKVNSVIEKMNTQFTAVGKEFNHLEKRIENLNKKVDDGFLDIWTYNAELLVLLENERTLDYHDSNVKNLYEKVRSQLKNNAKEVGNGCFEFYHKCDNTCMESVKNGTYDYPKYSEEAKLNREEIDGVKLESTRIYQILAIYSTAASSLVLVVSLGAISFWMCSNGSLQCRICI

SEQ ID NO: 5248 - protein, 566 aa, synthetic construct
  REGION 1..566: note = hemagglutinin__InfluenzaA__ADK32460
MKAILVVLLYTFATANADTLCIGYHANNSTDTVDTVLEKNVTVTHSVNLLEDKHNGKLCKLRGVAPLHLGKCNIAGWILGNPECESLSTASSWSYIVETSSSDNGTCYPGDFIDYEELREQLSSVSSFERFEIFPKTSSWPNHDSNKGVTAACPHAGAKSFYKNLIWLVKKGNSYPKLSKSYINDKGKEVLVLWGIHHPSTSADQQSLYQNADAYAFVGTSRYSKKFKPEIAIRPKVRDQEGRMNYYWTLVEPGDKITFEATGNLVVPRYAFAMERNAGSGIIISDTPVHDCNTTCQTPKGAINTSLPFQNIHPITIGKCPKYVKSTKLRLATGLRNVPSIQSRGLFGAIAGFIEGGWTGMVDGWYGYHHQNEQGSGYAADLKSTQNAIDEITNKVNSVIEKMNTQFTAVGKEFNHLEKRIENLNKKVDDGFLDIWTYNAELLVLLENERTLDYHDSNVKNLYEKVRSQLKNNAKEIGNGCFEFYHKCDNTCMESVKNGTYDYPKYSEEAKLNREEIDGVKLESTRIYQILAIYSTVASSLVLVVSLGAISFWMCSNGSLQCRICI

SEQ ID NO: 5249 - protein, 566 aa, synthetic construct; identical to SEQ ID NO: 3833
  REGION 1..566: note = hemagglutinin__InfluenzaA__ADK32470

SEQ ID NO: 5250 - protein, 566 aa, synthetic construct
  REGION 1..566: note = hemagglutinin__InfluenzaA__ADK32480
MKAILVVLLYTFATANADTLCIGYHANNSTDTVDTVLEKNVTVTHSVNLLEDKHNGKLCKLRGVAPLHLGKCNIAGWILGNPECESLSTASSWSYIVETSSSDNGTCYPGDFIDYEELREQLSSVSSFERFEIFPKTSSWPNHDSNKGVTAACPHAGAKSFYKNLIWLVKKGNSYPKLSKSYINDKGKEVLVLWGIHHPSTSADQQSLYQNADAYVFVGTSRYSKKFKPEIAIRPKVRDQEGRMNYYWTLVEPGDKITFEATGNLVVPRYAFAMERNAGSGIIISDTPAHDCNTTCQTPKGAINTSLPFQNIHPITIGKCPKYVKSTKLRLATGLRNVPSIQSRGLFGAIAGFIEGGWTGMVDGWYGYHHQNEQGSGYAADLKSTQNAIDKITNKVNSVIEKMNTQFTAVGKEFNHLEKRIENLNKKVDDGFLDIWTYNAELLVLLENERTLDYHDSNVKNLYEKVRSQLKNNAKEIGNGCFEFYHKCDNTCMESVKNGTYDYPKYSEEAKLNREEIDGVKLESTRIYQILAIYSTVASSLVLVVSLGAISFWMCSNGSLQCRICI

SEQ ID NO: 5251 - protein, 566 aa, synthetic construct; identical to SEQ ID NO: 3833
  REGION 1..566: note = hemagglutinin__InfluenzaA__ADK32490

SEQ ID NO: 5252 - protein, 566 aa, synthetic construct; identical to SEQ ID NO: 3833
  REGION 1..566: note = hemagglutinin__InfluenzaA__ADK32502

SEQ ID NO: 5253 - protein, 566 aa, synthetic construct; identical to SEQ ID NO: 4305
  REGION 1..566: note = hemagglutinin__InfluenzaA__ADK32637

SEQ ID NO: 5254 - protein, 566 aa, synthetic construct; identical to SEQ ID NO: 3833
  REGION 1..566: note = hemagglutinin__InfluenzaA__ADK32647

SEQ ID NO: 5255 - protein, 566 aa, synthetic construct; identical to SEQ ID NO: 3997
  REGION 1..566: note = hemagglutinin__InfluenzaA__ADK32657

SEQ ID NO: 5256 - protein, 566 aa, synthetic construct; identical to SEQ ID NO: 4221
  REGION 1..566: note = hemagglutinin__InfluenzaA__ADK32677

SEQ ID NO: 5257 - protein, 566 aa, synthetic construct
  REGION 1..566: note = hemagglutinin__InfluenzaA__ADK32687
MKAILVVLLYTFATANADTLCIGYHANNSTDTVDTVLEKNVTVTHSVNLLEDKHNGKLCKLRGVAPLHLGKCNIAGWILGNPECESLSTASSWSYIVETSSSDNGTCYPGDFIDYEELREQLSSVSSFERFEIFPKTSSWPNHDSNKGVTAACPHAGAKNFYKNLIWLVKKGNSYPKLSKSYINDKGKEVLVLWGIHHPSTSADQQSLYQNADAYVFVGTSRYSKKFKPEIAIRPKVRDQEGRMNYYWTLVEPGDKITFEATGNLVVPRYAFAMERNAGSGIIISDTPVHDCNTTCQTPKGAINTSLPFQNIHPITIGKCPKYVKSTKLRLATGLRNVPSIQSRGLFGAIAGFIEGGWTGMVDGWYGYHHQNEQGSGYAADLKSTQNAIDKITNKVNSVIEKMNTQFTAVGKEFNHLEKRIENLNKKVDDGFLDIWTYNAELLVLLENERTLDYHDSNVKNLYEKVRSQLKNNAKEIGNGCFEFYHKCDNTCMESVKNGTYDYPKYSEEAKLNREEIDGVKLESTRIYQILAIYSTVASSLVLVVSLGAISFWMCSNGSLQCRICI

SEQ ID NO: 5258 - protein, 566 aa, synthetic construct; identical to SEQ ID NO: 4460
  REGION 1..566: note = hemagglutinin__InfluenzaA__ADK32697

SEQ ID NO: 5259 - protein, 566 aa, synthetic construct; identical to SEQ ID NO: 3833
  REGION 1..566: note = hemagglutinin__InfluenzaA__ADK32776

SEQ ID NO: 5260 - protein, 566 aa, synthetic construct; identical to SEQ ID NO: 4221
  REGION 1..566: note = hemagglutinin__InfluenzaA__ADK33621

SEQ ID NO: 5261 - protein, 566 aa, synthetic construct
  REGION 1..566: note = hemagglutinin__InfluenzaA__ADK33631
MKAILVVLLYTFATANADTLCIGYHANNSTDTVDTVLEKNVTVTHSVNLLEVKHNGKLCKLRGVAPLHLGKCNIAGWILGNPECESLSTASSWSYIVETSSSDNGTCYPGDFINYEELREQLSSVSSFERFEIFPKTSSWPNHDSNKGVTAACPHAGAKSFYKNLIWLVKKGNSYPKLSKSYINDKGKEVLVLWGIHHPSTSADQQSLYQNADAYVFVGTSRYSKKFKPEIAIRPKVRDQEGRMNYYWTLVEPGDKITFEATGNLVVPRYAFAMERNAGSGIIISDTPVHDCNTTCQTPKGAINTSLPFQNIHPITIGKCPKYVKSTKLRLATGLRNVPSIQSRGLFGAIAGFIEGGWTGMVDGWYGYHHQNEQGSGYAADLKSTQNAIDKITNKVNSVIEKMNTQFTAVGKEFNHLEKRIENLNKKVDDGFLDIWTYNAELLVLLENERTLDYHDSNVKNLYEKVRSQLKNNAKEIGNGCFEFYHKCDNTCMESVKNGTYDYPKYSEEAKLNREEIDGVKLESTRIYQILAIYSTVASSLVLVVSLGAISFWMCSNGSLQCRICI

SEQ ID NO: 5262 - protein, 566 aa, synthetic construct; identical to SEQ ID NO: 4221
  REGION 1..566: note = hemagglutinin__InfluenzaA__ADK33641

SEQ ID NO: 5263 - protein, 566 aa, synthetic construct; identical to SEQ ID NO: 3833
  REGION 1..566: note = hemagglutinin__InfluenzaA__ADK33651

SEQ ID NO: 5264 - protein, 566 aa, synthetic construct; identical to SEQ ID NO: 3833
  REGION 1..566: note = hemagglutinin__InfluenzaA__ADK33661

SEQ ID NO: 5265 - protein, 566 aa, synthetic construct; identical to SEQ ID NO: 3833
  REGION 1..566: note = hemagglutinin__InfluenzaA__ADK33671

SEQ ID NO: 5266 - protein, 566 aa, synthetic construct
  REGION 1..566: note = hemagglutinin__InfluenzaA__ADK33681
MKAILVVLLYTFATANADTLCIGYHANNSTDTVDTVLEKNVTVTHSVNLLEDKHNGKLCKLRGVAPLHLGKCNIAGWILGNPECESLSTASSWSYIVETSSSDNGTCYPGDFIDYEELREQLSSVSSFERFEIFPKTSSWPNHDSNKGVTAACPHAGAKSFYKNLIWLVKKGNSYPKLSKSYINDKGKEVLVLWGIHHPSTSADQQSLYQNADAYVFVGTSRYSKKFKPEIAIRPKVRDQEGRMNYYWTLVEPGDKITFEATGNLVVPRYAFAMERNAGSGIIISDTPVHDCNTTCQTPKGAINTSLPFQNIHPITIGKCPKYVKSTKLRLATGLRNVPSIQSRGLFGAIAGFIEGGWTGMVDGWYGYHHQNEQGSGYAADLKSTQNAIDEITNKVNSVIEKMNTQFTAVGKEFNHLEKRIENLNKKVDDGFLDIWTYNAELLVLLENERTLDYHDSNVKKLYEKVRSQLKNNAKEIGNGCFEFYHKCDNTCMESVKNGTYDYPKYSEEAKLNREEIDGVKLESTRIYQILAIYSTVASSLVLVVSLGAISFWMCSNGSLQCRICI

SEQ ID NO: 5267 - protein, 566 aa, synthetic construct; identical to SEQ ID NO: 4282
  REGION 1..566: note = hemagglutinin__InfluenzaA__ADK33691

SEQ ID NO: 5268 - protein, 566 aa, synthetic construct
  REGION 1..566: note = hemagglutinin__InfluenzaA__ADK33701
MKAILVVLLYTFATANADTLCIGYHANNSTDTVDTVLEKNVTVTHSVNLLEDKHNGKLCKLRGVAPLHLGKCNIAGWILGNPECESLSTASSWSYIVETSSSDNGTCYPGDFIDYEELREQLSSVSSFERFEIFPKTSSWPNHDSNKGVTAACPHAGAKSFYKNLIWLVKKGNSYPKLSKSYINDKGKEVLVLWGIHHPSTSADQQSLYQNADAYVFVGTSRYSKKFKPEIAIRPKVRDQEGRMNYYWTLVEPGDKITFEATGNLVVPRYAFAMERNAGSGIIISDTPVHDCNTTCQTPKGAINTSLPFQNIHPITIGKCPKYVKSTKLRLATGLRNVPSIQSRGLFGAIAGFIEGGWTGMVDGWYGYHHQNEQGSGYAADLKSTQNAIDKITNKVNSVIEKMNTQFTAVGKEFNHLEKRIENLNKKVDDGFLDIWTYNAELLVLLENERTLDYHDSNVKNLYEKVRSQLKNNAKEIGNGCFEFYHKCDNTCMESVKNGTYDYPKYSEEAKLNREEIDGVKLESTRVYQILAIYSTVASSLVLVVSLGAISFWMCSNGSLQCRICI

SEQ ID NO: 5269 - protein, 566 aa, synthetic construct
  REGION 1..566: note = hemagglutinin__InfluenzaA__ADK33711
MKAILVVLLYTFATANADTLCIGYHANNSTDTVDTVLEKNVTVTHSVNLLEDKHNGKLCKLRGVAPLHLGKCNIAGWILGNPECESLSTASSWSYIVETSSSDNGTCYPGDFIDYEELREQLSSVSSFERFEIFPKTSSWPNHDSNKGVTAACPHAGAKSFYKNLIWLVKKGNSYPKLSKSYINDKGKEILVLWGIHHPSTSADQQSLYQNADAYVFVGTSRYSKKFKPEIAIRPKVRDQEGRMNYYWTLVEPGDKITFEATGNLVVPRYAFAMERNAGSGIIISDTPVHDCNTTCQTPKGAINTSLPFQNIHPITIGKCPKYVKSTKLRLATGLRNIPSIQSRGLFGAIAGFIEGGWTGMVDGWYGYHHQNEQGSGYAADLKSTQNAIDEITNKVNSVIEKMNTQFTAVGKEFNHLEKRIENLNKKVDDGFLDIWTYNAELLVLLENERTLDYHDSNVKNLYEKVRSQLKNNAKEIGNGCFEFYHKCDNTCMESVKNGTYDYPKYSEEAKLNREEIDGVKLESTRIYQILAIYSTVASSLVLVVSLGAISFWMCSNGSLQCRICI

SEQ ID NO: 5270 - protein, 566 aa, synthetic construct
  REGION 1..566: note = hemagglutinin__InfluenzaA__ADK33721
MKAILVVLLYTFVTANADTLCIGYHANNSTDTVDTVLEKNVTVTHSVNLLEDKHNGKLCKLRGVAPLHLGKCNIAGWILGNPECESLSTASSWSYIVETSSSDNGTCYPGDFIDYEELREQLSSVSSFERFEIFPKTSSWPNHDSNKGVTAACPHAGAKSFYKNLIWLVKKGNSYPKLSKSYINDKGKEVLVLWGIHHPSTSADQQSLYQNADAYVFVGTSRYSKKFKPEIAIRPKVRDQEGRMNYYWTLVEPGDKITFEATGNLVVPRYAFAMERNAGSGIIISDTPVHDCNTTCQTPKGAINTSLPFQNIHPITIGKCPKYVKSTKLRLATGLRNVPSIQSRGLFGAIAGFIEGGWTGMVDGWYGYHHQNEQGSGYAADLKSTQHAIDEITNKVNSVIEKMNTQFTAVGKEFNHLEKRIENLNKKVDDGFLDIWTYNAELLVLLENERTLDYHDSNVKNLYEKVRSQLKNNAKEIGNGCFEFYHKCDNTCMESVKNGTYDYPKYSEEAKLNREEIDGVKLESTRIYQILAIYSTVASSLVLVVSLGAISFWMCSNGSLQCRICI

SEQ ID NO: 5271 - protein, 566 aa, synthetic construct
  REGION 1..566: note = hemagglutinin__InfluenzaA__ADK33731
MKATLVVLLYTFATANADTLCIGYHANNSTDTVDTVLEKNVTVTHSVNLLEDKHNGKLCKLRGVAPLHLGKCNIAGWILGNPECESLSTASSWSYIVETSSSGNGTCYPGDFIDYEELREQLSSVSSFERFEIFPKTSSWPNHDSNKGVTAACPHAGAKSFYKNLIWLVKKGNSYPKLSKSYINDKGKEVLVLWGIHHPSTSADQQSLYQNADAYAFVGTSRYSKKFKPEIAIRPKVRDQEGRMNYYWTLVEPGDKITFEATGNLLVPRYAFAMERNAGSGIIISDTPVHDCNTTCQTPKGAINTSLPFQNIHPITIGKCPKYVKSTKLRLATGLRNVPSIQSRGLFGAIAGFIEGGWTGMVDGWYGYHHQNEQGSGYAADLKSTQNAIDEITNKVNSVIEKMNTQFTAVGKEFNHLEKRIENLNKKVDDGFLDIWTYNAELLVLLENERTLDYHDSNVKNLYEKVRSQLKNNAKEIGNGCFEFYHKCDNTCMESVKNGTYDYPKYSEEAKLNREEIDGVKLESTRIYQILAIYSTVASSLVLVVSLGAISFWMCSNGSLQCRICI

SEQ ID NO: 5272 - protein, 566 aa, synthetic construct; identical to SEQ ID NO: 4836
  REGION 1..566: note = hemagglutinin__InfluenzaA__ADK33741

SEQ ID NO: 5273 - protein, 566 aa, synthetic construct; identical to SEQ ID NO: 2669
  REGION 1..566: note = hemagglutinin__InfluenzaA__ADK33751

SEQ ID NO: 5274 - protein, 566 aa, synthetic construct
  REGION 1..566: note = hemagglutinin__InfluenzaA__ADK33761
MKAILVVLLYTFATANADTLCIGYHANNSTDTVDTVLEKNVTVTHSVNLLEDKHNGKLCKLRGVAPLHLGKCNIAGWILGNPECESLSTASSWSYIVETSSSDNGTCYPGDFIDYEELREQLSSVSSFERFEIFPKTSSWPNHDSNKGVTAACPHAGAKSFYKNLIWLVKKGNSYPKLSKSYINDKGKEVLVLWGIHHPSTSADQQSLYQNADAYVFVGTSRYSKKFKPEIAIRPKVRDQEGRMNYYWTLVEPGDKITFEATGNLVVPRYAFAMERNAGSGIIISDTPVHDCNTTCQTPKGAINTSLPFQNIHPITIGKCPKYVKSTKLSLATGLRNVPSIQSRGLFGAIAGFIEGGWTGMVDGWYGYHHQNEQGSGYAADLKSTQNAIDEITNKVNSVIEKMNTQFTAVGKEFNHLEKRIENLNKKVDDGFLDIWTYNAELLVLLENERTLDYHDSNVKNLYEKVRSQLKNNAKEIGNGCFEFYHKCDNTCMESVKNGTYDYPKYSEEAKLNREEIDGVKLESTRIYQILAIYSTVASSLVLVVSLGAISFWMCSNGSLQCRICI

SEQ ID NO: 5275 - protein, 566 aa, synthetic construct; identical to SEQ ID NO: 3833
  REGION 1..566: note = hemagglutinin__InfluenzaA__ADK33771

SEQ ID NO: 5276 - protein, 566 aa, synthetic construct; identical to SEQ ID NO: 3833
  REGION 1..566: note = hemagglutinin__InfluenzaA__ADK33781

SEQ ID NO: 5277 - protein, 566 aa, synthetic construct; identical to SEQ ID NO: 3770
  REGION 1..566: note = hemagglutinin__InfluenzaA__ADK33791

SEQ ID NO: 5278 - protein, 566 aa, synthetic construct; identical to SEQ ID NO: 5268
  REGION 1..566: note = hemagglutinin__InfluenzaA__ADK33801

SEQ ID NO: 5279 - protein, 566 aa, synthetic construct
  REGION 1..566: note = hemagglutinin__InfluenzaA__ADK33811
MKAILVVLLYTFATANADTLCIGYHANNSTDTVDTVLEKNVTVTHSVNLLEDKHNGKLCKLRGVAPLHLGKCNIAGWILGNPECESLSTASSWSYIVETSSSDNGTCYPGDFIDYEELREQLSSVSSFERFEIFPKTSSWPNHDSNKGVTAACPHAGAKSFYKNLIWLVKKGNSYPKLSKSYINDKGKEVLVLWGIHHPSTSADQQSLYQNADAYVFVGTSRYSKKFKPEIAIRPKVRDQEGRMNYYWTLVEPGDKITFEATGNLVVPRYAFAMERNAGSGIIISDTPVHDCNTTCQTPKGAINTSLPFQNIHPITIGKCPKYVKSTKLRLATGLRNVPSIQSRGLFGAIAGFIEGGWTGMVDGWYGYHHQNEQGSGYAADLKSTQHAIDEITNKVNSVIEKMNTQFTAVGKEFNHLEKRIENLNKKVDDGFLDIWTYNAELLVLLENERTLDYHDSNVKNLYEKVRSQLKNNAKEIGNGCFEFYHKCDNTCMESVKNGTYDYPKYSEEAKLNREEIDGIKLESTRIYQILAIYSTVASSLVLVVSLGAISFWMCSNGSLQCRICI

SEQ ID NO: 5280 - protein, 566 aa, synthetic construct
  REGION 1..566: note = hemagglutinin__InfluenzaA__ADK33821
MKAILVVLLYTFATANADTLCIGYHANNSTDTVDTVLEKNVTVTHSVNLLEDKHNGKLCKLRGVAPLHLGKCNIAGWILGNPECESLSTASSWSYIVETSSSDNGTCYPGDFIDYEELREQLSSVSSFERFEIFPKTSSWPNHDSNKGVTAACPHAGAKSFYKNLIWLVKKGNSYPKLSKSYINDKGKEVLVLWGIHHPSTSADQQSLYQNADAYVFVGTSRYSKKFKPEIAIRPKVRDQEGRMNYYWTLVEPGDKITFEATGNLVVPRYAFTMERNAGSGIIISDTPVHDCNTTCQTPKGAINTSLPFQNIHPITIGKCPKYVKSTKLRLATGLRNVPSIQSRGLFGAIAGFIEGGWTGMVDGWYGYHHQNEQGSGYAADLKSTQNAIDEITNKVNSVIEKMNTQFTAVGKEFNHLEKRIENLNKKVDDGFLDIWTYNAELLVLLENERTLDYHDSNVKNLYEKVRNQLKNNAKEIGNGCFEFYHKCDNTCMESVKNGTYDYPKYSEEAKLNREEIDGVKLESTRIYQILAIYSTVASSLVLAVSLGAISFWMCSNGSLQCRICI

SEQ ID NO: 5281 - protein, 566 aa, synthetic construct
  REGION 1..566: note = hemagglutinin__InfluenzaA__ADK33831
MKAILVVLLYTFATANADTLCIGYHANNSTDTVDTVLEKNVTVTHSVNLLEDKHNGKLCKLRGIAPLHLGKCNIAGWILGNPECESLSTASSWSYIVETSSSDNGTCYPGDFIDYEELREQLSSVSSFERFEIFPNTSSWPNHDSNKGVTAACPHAGAKSFYKNLIWLVKKGNSYPKLSKSYINDKGKEVLVLWGIHHPSTSADQQSLYQNADAYVFVGTSRYSKKFKPEIAIRPKVRDQEGRMNYYWTLVEPGDKITFEATGNLVVPRYAFAMERNAGSGIIISDTPVHDCNTTCQTPKGAINTSLPFQNIHPITIGKCPKYVKSTKLRLATGLRNVPSIQSRGLFGAIAGFIEGGWTGMVDGWYGYHHQNEQGSGYAADLKSTQNAIDEITNKVNSVIEKMNTQFTAVGKEFNHLEKRIENLNKKVDDGFLDIWTYNAELLVLLENERTLDYHDSNVKNLYEKVRSQLKNNAKEIGNGCFEFYHKCDNTCMESVKNGTYDYPKYSEEAKLNREEIDGVKLESTRIYQILAIYSTVASSLVLVVSLGAISFWMCSNGSLQCRICI

SEQ ID NO: 5282 - protein, 566 aa, synthetic construct; identical to SEQ ID NO: 4089
  REGION 1..566: note = hemagglutinin__InfluenzaA__ADK33841

SEQ ID NO: 5283 - protein, 566 aa, synthetic construct; identical to SEQ ID NO: 4836
  REGION 1..566: note = hemagglutinin__InfluenzaA__ADK33851

SEQ ID NO: 5284 - protein, 566 aa, synthetic construct; identical to SEQ ID NO: 2669
  REGION 1..566: note = hemagglutinin__InfluenzaA__ADK33861

SEQ ID NO: 5285 - protein, 566 aa, synthetic construct
  REGION 1..566: note = hemagglutinin__InfluenzaA__ADK33871
MKAILVVLLYTFATANADTLCIGYHANNSTDTVDTVLEKNVTVTHSVNLLEDKHNGKLCKLRGVAPLHLGKCNIAGWILGNPECESLSTASSWSYIVETSSSDNGTCYPGDFIDYEELREQLSSVSSFERFEIFPKTSSWPNHDSNKGVTAACPHAGAKSFYKNLIWLVKKGNSYPKLSKSYINDKGKEVLVLWGIHHPSTSADQQSLYQNADAYVFVGTSRYSKKFKPEIAIRPKVREQEGRMNYYWTLVEPGDKITFEATGNLVIPRYAFAMERNAGSGIIISDTPVHDCNTTCQTPKGAINTSLPFQNIHPITIGKCPKYVKSTKLRLATGLRNVPSIQSRGLFGAIAGFIEGGWTGMVDGWYGYHHQNEQGSGYAADLKSTQNAIDEITNKVNSVIEKMNTQFTAVGKEFNHLEKRIENLNKKVDDGFLDIWTYNAELLVLLENERTLDYHDSNVKNLYEKVRSQLKNNAKEIGNGCFEFYHKCDNTCMESVKNGTYDYPKYSEEAKLNREEIDGVKLESTRIYQILAIYSTVASSLVLLVSLGAISFWMCSNGSLQCRICI

SEQ ID NO: 5286 - protein, 566 aa, synthetic construct
  REGION 1..566: note = hemagglutinin__InfluenzaA__ADK33881
MKAILVVLLYTFATANADTLCIGYHANNSTDTVDTVLEKNVTVTHSVNILEDKHNGKLCKLRGVAPLHLGKCNIAGWILGNPECESLSTASSWSYIVETSSSDNGTCYPGDFIDYEELREQLSSVSSFERFEIFPKTSSWPNHDSNKGVTAACPHAGAKSFYKNLIWLVKKGNSYPKLSKSYINDKGKEVLVLWGIHHPSTSADQQSLYQNADAYVFVGTSRYSKKFKPEIAIRPKVRDQEGRMNYYWTLVEPGDKITFEATGNLVVPRYAFAMERNAGSGIIISDTPVHDCNTTCQTPKGAINTSLPFQNIHPITIGKCPKYVKSTKLRLATGLRNVPSIQSRGLFGAIAGFIEGGWTGMVDGWYGYHHQNEQGSGYAADLKSTQNAIDEITNKVNSVIEKMNTQFTAVGKEFNHLEKRIENLNKKVDDGFLDIWTYNAELLVLLENERTLDYHDSNVKNLYEKVRSQLKNNAKEIGNGCFEFYHKCDNTCMESVKNGTYDYPKYSEEAKLNREEIDGVKLESTKIYQILAIYSTVASSLVLVVSLGAISFWMCSNGSLQCRICI

SEQ ID NO: 5287 - protein, 566 aa, synthetic construct
  REGION 1..566: note = hemagglutinin__InfluenzaA__ADK33891
MKAILVVLLYTFATANADTLCIGYHANNSTDTVDTVLEKNVTVTHSVNLLEDKHNGKLCKLRGIAPLHLGKCNIAGWILGNPECESLSTASSWSYIVETSSSDNGTCYPGDFIDYEELREQLSSVSSFERFEIFPKTSSWPNHDSNKGVTAACPHAGAKSFYKNLIWLVKKGNSYPKLSKSYINDKGKEVLVLWGIHHPSTSADQQSLYQNADAYVFVGTSRYSKKFKPEIAIRPKVRDQEGRMNYYWTLVEPGDKITFEATGNLVVPRYAFAMERNAGSGIIISDTPVHDCNTTCQTPKGAINTSLPFQNIHPITIGKCPKYVKSTKLRLATGLRNVPSIQSRGLFGAIAGFIEGGWTGMVDGWYGYHHQNEQGSGYAADLKSTQNAIDEITNKVNSVIEKMNTQFTAVGKEFNHLEKRIENLNKKVDDGFLDIWTYNAELLVLLENERTLDYHDSNVKNLYEKVRNQLKNNAKEIGNGCFEFYHKCDNTCMESVKNGTYDYPKYSEEAKLNREEIDGVKLESTRIYQILAIYSTVASSLVLVVSLGAISFWMCSNGSLQCRICI

SEQ ID NO: 5288 - protein, 566 aa, synthetic construct; identical to SEQ ID NO: 4836
  REGION 1..566: note = hemagglutinin__InfluenzaA__ADK33901

SEQ ID NO: 5289 - protein, 566 aa, synthetic construct
  REGION 1..566: note = hemagglutinin__InfluenzaA__ADK33911
MKAILVVLLYTFATANADTLCIGYHANNSTDTVDTVLEKNVTVTHSVNLLEGKHNGKLCKLRGVAPLHLGKCNIAGWILGNPECESLSTASSWSYIVETSSSDNGTCYPGDFIDYEELREQLSSVSSFERFEIFPKTSSWPNHDSNKGVTAACPHAGAKSFYKNLIWLIKKGNSYPKLSKSYINDKGKEVLVLWGIHHPSTSADQQSLYQNADAYVFVGTSRYSKKFKPEIAIRPKVRDQEGRMNYYWTLVEPGDKITFEATGNLVVPRYAFAMERNAGSGIIISDTPVHDCNTTCQTPKGAINTSLPFQNIHPITIGKCPKYVKSTKLRLATGLRNIPSIQSRGLFGAIAGFIEGGWTGMVDGWYGYHHQNEQGSGYAADLKSTQNAIDEITNKVNSVIEKMNTQFTAVGKEFNHLEKRIENLNKKVDDGFLDIWTYNAELLVLLENERTLDYHDSNVKNLYEKVRSQLKNNAKEIGNGCFEFYHKCDNTCMESVKNGTYDYPKYSEEAKLNREEIDGVKLESTRIYQILAIYSTVASSLVLVVSLGAISFWMCSNGSLQCRICI

SEQ ID NO: 5290 - protein, 566 aa, synthetic construct
  REGION 1..566: note = hemagglutinin__InfluenzaA__ADK33931
MKAILVVLLYTFATANADTLCIGYHANNSTDTVDTVLEKNVTVTHSVNLLEDKHNGKLCKLRGVAPLHLGKCNIAGWILGNPECESLSTASSWSYIVETSSSDNGTCYPGDFIDYEELREQLSSVSSFERFEIFPKTSSWPNHDSNKGVTAACPHAGAKSFYKNLIWLVKKGNSYPKLSKSYINDKGKEVLVLWGIHHPSTSADQQSLYQNADAYVFVGTSRYSKKFKPEIAIRPKVREQEGRMNYYWTLVEPGDKITFEATGNLVVPRYAFAMERNAGSGIIISDTPVHDCNTTCQTPKGAINTSLPFQNIHPITIGKCPKYVKSTKLRLATGLRNVPSIQSRGLFGAIAGFIEGGWTGMVDGWYGYHHQNEQGSGYAADLKSTQNAIDEITNKVNSVIEKMNTQFTAVGKEFNHLEKRIENLNKKVDDGFLDIWTYNAELLVLLENERTLDYHDSNVKNLYEKVRSQLKNNAKEIGNGCFEFYHKCDNTCMESVKNGTYDYPKYSEEAKLNREEIDGVKLESTRIYQILAIYSTVASSLVLLVSLGAISFWMCSNGSLQCRICI

SEQ ID NO: 5291 - protein, 566 aa, synthetic construct
  REGION 1..566: note = hemagglutinin__InfluenzaA__ADK33941
MKAILVVLLYTFATANADTLCIGYHANNSTDTVDTVLEKNVTVTHSVNLLEDKHNGKLCKLRGVAPLHLGKCNIAGWILGNPECESLSTASSWSYIVETSSSDNGTCYPGDFIDYEELREQLSSVSSFERFEIFPKTSSWPNHDSNKGVTAACPHAGAKSFYKNLIWLVKKGNSYPKLSKSYINDKGKEVLVLWGIHHPSTSADQQSLYQNADAYVFVGTSRYSKKFKPEIAIRPKVRDQEGRMNYYWTLVEPGDKITFEATGNLVVPRYAFAMERNAGSGIVISDTPVHDCNTTCQTPKGAINTSLPFQNIHPITIGKCPKYVKSTKLRLATGLRNIPSIQSRGLFGAIAGFIEGGWTGMVDGWYGYHHQNEQGSGYAADLKSTQNAIDKITNKVNSVIEKMNTQFTAVGKEFNHLEKRIENLNKKVDDGFLDIWTYNAELLVLLENERTLDYHDSNVKNLYEKVRSQLKNNAKEIGNGCFEFYHKCDNTCMESVKNGTYDYPKYSEEAKLNREEIDGVKLESTRIYQILAIYSTVASSLVLVVSLGAISFWMCSNGSLQCRICI

SEQ ID NO: 5292 - protein, 566 aa, synthetic construct; identical to SEQ ID NO: 5289
  REGION 1..566: note = hemagglutinin__InfluenzaA__ADK33951

SEQ ID NO: 5293 - protein, 566 aa, synthetic construct; identical to SEQ ID NO: 3833
  REGION 1..566: note = hemagglutinin__InfluenzaA__ADK33961

SEQ ID NO: 5294 - protein, 566 aa, synthetic construct; identical to SEQ ID NO: 3613
  REGION 1..566: note = hemagglutinin__InfluenzaA__ADK45312

SEQ ID NO: 5295 - protein, 566 aa, synthetic construct
  REGION 1..566: note = hemagglutinin__InfluenzaA__ADK45410
MKTIIALSYILCLVFAQKLPGNDNSTATLCLGHHAVPNGTIVKTITNDQIEVTNATELVQSSSTGEICDSPHQILDGENCTLIDALLGDPQCDGFQNKKWDLFVERSKAHSNCYPYDVPDYASLRSLVASSGTLEFNNESFNWTGVTQNGTSSACIRRSNNSFFSRLNWLTHLKFKYPALNVTMPNNEQFDKLYIWGVHHPGTDNDQIFLYAQASGRITVSTKRSQQTVIPNIGSRPRVRNIPSRISIYWTIVKPGDILLINSTGNLIAPRGYFKIRSGKSSIMRSDAPIGKCNSECITPNGSIPNDKPFQNVNRITYGACPRYVKQNTLKLATGMRNVPEKQTRGIFGAIAGFIENGWEGMVDGWYGFRHQNSEGRGQAADLKSTQAAIDQINGKLNRLIGKTNEKFHQIEKEFSEVEGRIQDLEKYVEDTKIDLWSYNAELLVALENQHTIDLTDSEMNKLFEKTKKQLRENAEDMGNGCFKIYHKCDNTCIGSIRNGTYDHDVYRDEALNNRFQIKGVELKSGYKDWILWISFAISCFLLCVALLGFIMWACQKGNIRCNICI

SEQ ID NO: 5296 - protein, 566 aa, synthetic construct
  REGION 1..566: note = hemagglutinin__InfluenzaA__ADK45421
MKTIIALSYILCLVFAQKLPGNDNSTATLCLGHHAVPNGTIVKTITNDQIEVTNATELVQSSSTGEICDSPHQILDGKNCTLIDALLGDPQCDGFQNKKWDLFVERSKAYSNCYPYDVPDYASLRSLVASSGTLEFNNESFNWTGVTQNGTSSACIRRSKNSFFSRLNWLTHLNFKYPALNVTMPNNEQFDKLYIWGVHHPGTDKDQIFLYAQASGRITVSTKRSQQTVIPNIGSRPRIRNIPSRISIYWTIVKPGDILLINSTGNLIAPRGYFKIRSGKSSIMRSDAPIGKCNSECITPNGSIPNDKPFQNVNRITYGACPRYVKQSTLKLATGMRNVPEKQTRGIFGAIAGFIENGWEGMVDGWYGFRHQNSEGRGQAADLKSTQAAIDQINGKLNRLIGKTNEKFHQIEKEFSEVEGRIQDLEKYVEDTKIDLWSYNAELLVALENQHTIDLTDSEMNKLFEKTKKQLRENAEDMGNGCFKIYHKCDNACIGSIRNGTYDHDVYRDEALNNRFQIKGVELKSGYKDWILWISFAISCFLLCVALLGFIMWACQKGNIRCNICI

SEQ ID NO: 5297 - protein, 566 aa, synthetic construct
  REGION 1..566: note = hemagglutinin__InfluenzaA__ADK45432
MKTIIALSYTLCLVFAQKLPRNDNSTATLCLGHHAVPNGTIVKTITNDQIEVTNATELVQSSSTGEICDNPHQILDGENCTLIDALLGDPQCDGFQNKKWDLFVERSKAYSNCYPYDVPDYASLRSLVASSGTLEFNNESFNWTGVTQNGTSSACIRRSNNSFFSRLNWLTHLKFKYPALNVTMPNNEQFDKLYIWGVHHPGTDNDQIFLYAQASGRITVSTKRSQQTVIPNIGSRPRVRNIPSRISIYWTIVKPGDILLINSTGNLIAPRGYFKIRSGKSSIMRSDAPIGKCNSECITPNGSIPNDKPFQNVNRITYGACPRYVKQNTLKLATGMRNVPEKQTRGIFGAIAGFIENGWEGMVDGWYGFRHQNSEGRGQAADLKSTQAAIDQINGKLNRLIGKTNEKFHQIEKEFSEVEGRIQDLEKYVEDTKIDLWSYNAELLVALENQHTIDLTDSEMNKLFEKTKKQLRENAEDMGNGCFKIYHKCDNACIGSIRNGTYDHDVYRDEALNNRFQIKGVELKSGYKDWILWISFAISCFLLCVALLGFIMWACQKGNIRCNICI

SEQ ID NO: 5298 - protein, 566 aa, synthetic construct; identical to SEQ ID NO: 2434
  REGION 1..566: note = hemagglutinin__InfluenzaA__ADK45443

SEQ ID NO: 5299 - protein, 566 aa, synthetic construct; identical to SEQ ID NO: 4833
  REGION 1..566: note = hemagglutinin__InfluenzaA__ADK48798

SEQ ID NO: 5300 - protein, 566 aa, synthetic construct; identical to SEQ ID NO: 3833
  REGION 1..566: note = hemagglutinin__InfluenzaA__ADK62683

SEQ ID NO: 5301 - protein, 566 aa, synthetic construct
  REGION 1..566: note = hemagglutinin__InfluenzaA__ADK62693
MKAILVVLLYTFATANADTLCIGYHANNSTDTVDTVLEKNVTVTHSVNLLEDKHNGKLCKLRGVAPLHLGKCNIAGWILGNPECGSLSTASSWSYIVETSSSDNGTCYPGDFIDYEELREQLSSVSSFERFEIFPKTSSWPNHDSNKGVTAACPHAGAKSFYKNLIWLVKKGNSYPKLSKSYINDKGKEVLVLWGIHHPSTSADQQSLYQNADAYVFVGTSRYSKKFKPEIAIRPKVREQEGRMNYYWTLVEPGDKITFEATGNLVVPRYAFAMERNAGSGIIISDTPVHDCNTTCQTPKGAINTSLPFQNVHPITIGKCPKYVKSTKLRLATGLRNVPSIQSRGLFGAIAGFIEGGWTGMVDGWYGYHHQNEQGSGYAADLKSTQNAIDEITNKVNSVIEKMNTQFTAVGKEFNHLEKRIENLNKKVDDGFLDIWTYNAELLVLLENERTLDYHDSNVKNLYEKVRSQLKNNAKEIGNGCFEFYHKCDNTCMESVKNGTYDYPKYSEEAKLNREEIDGVKLESTRIYQILAIYSTVASSLVLVVSLGAISFWMCSNGSLQCRICI

SEQ ID NO: 5302 - protein, 566 aa, synthetic construct; identical to SEQ ID NO: 3770
  REGION 1..566: note = hemagglutinin__InfluenzaA__ADK62703

SEQ ID NO: 5303 - protein, 566 aa, synthetic construct
  REGION 1..566: note = hemagglutinin__InfluenzaA__ADK64992
MKAILVVLLYTFATANADTLCIGYHANNSTDTVDTVLEKNVTVTHSVNLLEDKHNGKLCKLRGVAPLHLGKCNIAGWILGNPECESLSTASSWSYIVETSSSDNGTCYPGDFIDYEELREQLSSVSSFERFEIFPKTSSWPNHDSNKGVTAACPHAGAKSFYKNLIWLVKKGNSYPKLSKSYINDKGKEVLVLWGIHHPSTSADQQSLYQNADAYVFVGTSRYSKKFKPEIAIRPKVRDQEGRMNYYWTLVEPGDKITFEATGNLVVPRYAFAMERNAGSGIIISDTPVHDCNTTCQTPKGAINTSLPFQNIHPITIGKCPKYVKSTKLRLATGLRNVPSIQSRGLFGAIAGFIEGGWTGMVDGWYGYHHQNEQGSGYAADLKSTQNAIDEITNKVNSVIEKMNTQFTAVGKEFNHLEKRIENLNKKVDDGFLDIWTYNAELLVLLENERTLDYHDSNVKNLYEKVRSQLKNNAKEIGNGCFEFYHKCDNTCMESVKNGTYDYPKYSEEAKLNREEIDGIKLESTRIYQILAIYSTVASSLVLVVSLGAISFWMCSNGSLQYRICI

SEQ ID NO: 5304 - protein, 566 aa, synthetic construct
  REGION 1..566: note = hemagglutinin__InfluenzaA__ADK65001
MKAILVVLLYTFATANADTLCIGYHANNSTDTVDTVLEKNVTVTHSVNLLEDKHNGKLCKLGGVAPLHLGKCNIAGWILGNPECESLSTASSWSYIVETSSSDNGTCYPGDFIDYEELREQLSSVSSFERFEIFPKTSSWPNHDSNKGVTAACPHAGAKSFYKNLIWLVKKGNSYPKLSKSYINDKGKEVLVLWGIHHPSTSADQQSLYQNADAYVFVGTSRYSKKFKPEIAIRPKVRDQEGRMNYYWTLVEPGDKITFEATGNLVVPRYAFAMERNAGSGIIISDTPVHDCNTTCQTPKGAINTSLPFQNIHPITIGKCPKYVKSTKLRLATGLRNVPSIQSRGLFGAIAGFIEGGWTGMVDGWYGYHHQNEQGSGYAADLKSTQNAIDEITNKVNSVIEKMNTQFTAVGKEFNHLEKRIENLNKKVDDGFLDIWTYNAELLVLLENERTLDYHDSNVKNLYEKVRSQLKNNAKEIGNGCFEFYHKCDNTCLESVKNGTYDYPKYSEEAKLNREEIDGVKLESTRIYQILAIYSTVASSLVLVVSLGAISFWMCSNGSLQCRICI

SEQ ID NO: 5305 - protein, 566 aa, synthetic construct
  REGION 1..566: note = hemagglutinin__InfluenzaA__ADK65009
MKAILVVLLYTFATANADTLCIGYHANNSTDTVDTVLEKNVTVTHSVNLLEDKHNGKLCKLRGVAPLHLGKCNIAGWILGNPECESLSTASSWSYIVETSSSDNGTCYPGDFIDYEELREQLSSVSSFERFEIFPKTSSWPNHDPNKGVTAACPHAGAKSFYKNLIWLVKKGNSYPKLSKSYINDKGKEVLVLWGIHHPSTSADQQSLYQNADAYVFVGTSRYSKKFKPEIAIRPKVRDQEGRMNYYWTLVEPGDKITFGATGNLVVPRYAFAMERNAGSGIIISDTPVHDCNTTCQTPKGAINTSLPFQNIHPITIGKCPKYVKSTKLRLATGLRNVPSIQSRGLFGAIAGFIEGGWTGMVDGWYGYHHQNEQGSGYAADLKSTQNAIDEITNKVNSVIEKMNTQFTAVGKEFNHLEKRIENLNKKVDDGFLDIWTYNAELLVLLENERTLDYHDSNVKNLYEKVRSQLKNNAKEIGNGCFEFYHKCDNTCMESVKNGTYDYPKYSEEAKLNREEIDGVKLESTRIYQILAIYSTVASSLVLVVSLGAISFWMCSNGSLQCRICI

SEQ ID NO: 5306 - protein, 566 aa, synthetic construct
  REGION 1..566: note = hemagglutinin__InfluenzaA__ADK87287
MKTIIALSYILCLVFAQKLPGNDNSTATLCLGHHAVPNGTIVKTITNDQIEVTNATELVQSSSTGEICDSPHQILDGKNCTLIDALLGDPQCDGFQNKKWDLFVERSKAYSNCYPYDVPDYASLRSLVASSGTLEFNNESFNWTGVTQNGTSSACIRRSKNSFFSRLNWLTHLNFKYPALNVTMPNNEQFDKLYIWGVHHPGTDKDQIFLYAQASGRITVSTKRSQQTAIPNIGSRPRVRNIPSRISIYWTIVKPGDILLINSTGNLIAPRGYFKIRSGKSSIMRSDALIGKCNSECITPNGSIPNDKPFQNVNRITYGACPRYVKQNTLKLATGMRNVPEKQTRGIFGAIAGFIENGWEGMVDGWYGFRHQNSEGRGQAADLKSTQAAIDQINGKLNRLIGKTNEKFHQIEKEFSEVEGRIQDLEKYVEDTKIDLWSYNAELLVALENQHTIDLTDSEMNKLFEKTKKQLRENAEDMGNGCFKIYHKCDNACIGSIRNGTYDHDVYRDEALNNRFQIKGVELKSGYKDWILWISFAISCFLLCVALLGFIMWACQKGNIRCNICI

SEQ ID NO: 5307 - protein, 566 aa, synthetic construct
  REGION 1..566: note = hemagglutinin__InfluenzaA__ADK87288
MKTIIALSYILCLVFAQKLPGNDNSTATLCLGHHAVPNGTIVKTITNDQIEVTNATELVQSSSTGEICDSPHQILDGKNCTLIDALLGDPQCDGFQNKKWDLFVERSKAYSNCYPYDVPDYASLRSLVASSGTLEFNNESFNWTGVTQNGTSSACIRRSKNSFFSRLNWLTHLNFKYPALNVTMPNNEQFDKLYIWGVHHPGTDKDQIFLYAQATGRITVSTKRSQQTAIPNIGSRPRVRNIPSRISIYWTIVKPGDILLINSTGNLIAPRGYFKIRSGKSSIMRSDAPIGKCNSECITPNGSIPNDKPFQNVNRITYGACPRYVKQNTLKLATGMRNVPEKQTRGIFGAIAGFIENGWEGMVDGWYGFRHQNSEGRGQAADLKSTQAAIDQINGKLNRLIGKTNEKFHQIEKEFSEVEGRIQDLEKYVEDTKIDLWSYNAELLVALENQHTIDLTDSEMNKLFEKTKKQLRENAEDMGNGCFKIYHKCDNACIGSIRNGTYDHDVYRDEALNNRFQIKGVELKSGYKDWILWISFAISCFLLCVALLGFIMWACQKGNIRCNICI

SEQ ID NO: 5308 - protein, 566 aa, synthetic construct
  REGION 1..566: note = hemagglutinin__InfluenzaA__ADK87289
MKTIIALSYILCLVFAQKLPGNDNSTATLCLGHHAVPNGTIVKTITNDQIEVTNATELVQSSSTGEICDSPHQILDGKNCTLIDALLGDPQCDGFQNKKWDLFVERSKAYSNCYPYDVPDYASLRSLVASSGTLGFNNESFNWTGVTQNGTSSACIRRSKNSFFSRLNWLTHLNFKYPALNVTMPNNEQFDKLYIWGVHHPGTDKDQIFLYAQASGRITVSTKRSQQTAIPNIGSRPRVRNIPSRISIYWTIVKPGDILLINSTGNLIAPRGYFKIRSGKSSIMRSDAPIGKCNSECITPNGSIPNDKPFQNVNRITYGACPRYVKQNTLKLATGMRNVPEKQTRGIFGAIAGFIENGWEGMVDGWYGFRHQNSEGRGQAADLKSTQAAIDQINGKLNRLIGKTNEKFHQIEKEFSEVEGRIQDLGKYVEDTKIDLWSYNAELLVALENQHTIDLTDSEMNKLFEKTKKQLRENAEDMGNGCFKIYHKCDNACIGSIRNGTYDHDVYRDEALNNRFQIKGVELKSGYKDWILWISFAISCFLLCVALLGFIMWACQKGNIRCNICI

SEQ ID NO: 5309 - protein, 566 aa, synthetic construct
  REGION 1..566: note = hemagglutinin__InfluenzaA__ADK87291
MKTIIALSYIQCLVFAQKLPGNDNSTATLCLGHHAVPNGTIVKTITNDQIEVTNATELVQSSSTGEICDSPHQILDGKNCTLIDALLGDPQCDGFQNKKWDLFVERSKAYSNCYPYDVPDYASLRSLVASSGTLEFNNESFNWTGVTQNGTSSACIRRSKNSFFSRLNWLTHLNFKYPALNVTMPNNEQFDKLYIWGVHHPGTDKDQISLYAQASGRITVSTKRSQQTAIPNIGSRPRVRNIPSRISIYWTIVKPGDILLINSTGNLIAPRGYFKIRSGKSSIMRSDAPIGKCNSECITPNGSIPNDKPFQNVNRITYGACPRYVKQNTLKLATGMRNVPEKQTRGIFGAIAGFIENGWEGMVDGWYGFRHQNSEGRGQAADLKSTQAAIDQINGKLNRLIGKTNEKFHQIEKEFSEVEGRIQDLGKYVEDTKIDLWSYNAELLVALENQHTIDLTDSEMNKLFEKTKKQLRENAEDMGNGCFKIYHKCDNACIGSIRNGTYDHDVYRDEALNNRFQIKGVELKSGYKDWILWISFAISCFLLCVALLGFIMWACQKGNIRCNICI

SEQ ID NO: 5310 - protein, 566 aa, synthetic construct
  REGION 1..566: note = hemagglutinin__InfluenzaA__ADK87293
MKTIIALSYILCLVFAQKLPGNDNSTATLCLGHHAVPNGTIVKTITNDQIEVTNATELVQSSSTGEICDSPHQILDGKNCTLIDALLGDPQCDGFQNKKWDLFVERSKAYSNCYPYDVPDYASLRSLVASSGTLEFNNESFNWTGVTQDGTSSACIRRSKNSFFSKLNWLTHLNFKYPALNVTMPNNEQFDKLYIWGVHHPGTDKDQTFLYAQASGRITVSTKRSQQTAIPNIGSRPRVRNIPSRISIYWTIVKPGDILLINSTGNLIAPRGYFKIRSGKSSIMRSDAPIGKCNSECITPNGSIPNDKPFQNVNRITYGACPRYVKQNTLKLATGMRNVPEKQTRGIFGAIAGFIENGWEGMVDGWYGFRHQNSEGRGQAADLKSTQAAIDQINGKLNRLIGKTNEKFHQIEKEFSEVEGRIQDLEKYVEDTKIDLWSYNAELLVALENQHTIDLTDSEMSKLFEKTKKQLRENAEDMGNGCFKIYHKCDNACIGSIRNGTYDHDVYRDEALNNRFQIKGVELKSGYKDWILWISFAISCFLLCVALLGFIMWACQKGNIRCNICI

SEQ ID NO: 5311 - protein, 566 aa, synthetic construct
  REGION 1..566: note = hemagglutinin__InfluenzaA__ADK87295
MKTIIALSYILCLVFAQKLPGNDNSTATLCLGHHAVPNGTIVKTITNDQIEVTNATELVQSSSTGEICDSPHQILDGKNCTLIDALLGDPQCDGFQNKKWDLFVERSKAYSNCYPYDVPDYASLRSLVASSGSLEFNNESFNWTGVTQNGTSSACIRRSKNSFFSRLNWLTHLNFKYPALNVTMPNNEQFDKLYIWGVHHPGTDKDQIFLYAQASGRITVSTKRSQQTAIPNIGSRPRVRNIPSRISIYWTIVKPGDILLINSTGNLIAPRGYFKIRSGKSSIMRSDAPIGKCNSECITPNGSIPNDKPFQNVNRITYGACPRYVKQNTLKLATGMRNVPEKQTRGIFGAIAGFIENGWEGMVDGWYGFRHQNSEGRGQAADLKSTQAAIDQINGKLNRLIGKTNEKFHQIEKEFSEVEGRIQDLEKYVEDTKIDLWSYNAELLVALENQHTIDLTDSEMNKLFEKTKKQLRENAEDMGNGCFKIYHKCDNACIGSIRNGTYDHDVYRDEALNNRFQIKGVELKSGYKDWILWISFAISCFLLCVALLGFIMWACQKGNIRRNICI

SEQ ID NO: 5312 - protein, 566 aa, synthetic construct
  REGION 1..566: note = hemagglutinin__InfluenzaA__ADK87296
MKAILVVLLYTFATANADTLCIGYHANNSTDTVDTVLEKNVTVTHSVNLLEDKHNGKLCKLRGVAPLHLGKCNIAGWILGNPECESLSTASSWSYIVETSSSDNGTCYPGDFIDYEELREQLSSVSSFERFEIFPKTSSWPNHDPNKGVTAACPHAGAKSFYKNLIWLVKKGNSYPKLSKSYINDKGKEVLVLWGIHHPSTSADQQSLYQNADAYVFVGTSRYSKKFKPEIAIRPKVRDQEGRMNYYWTLVEPGDKITFEATGNLVVPRCAFAMERNAGSGIIISDTPVHDCNTTCQTPKGAINTSLPFQNIHPITIGKCPKYVKSTKLRLATGLRNVPSIQSRGLFGAIAGFIEGGWTGMVDGWYGYHHQNEQGSGYAADLKSTQNAIDEITNKVNSVIEKMNTQFTAVGKEFNHLEKRIENLNKKVDDGFLDIWTYNAELLVLLENERTLDYHDSNVKNLYEKVRSQLKNNAKEIGNGCFEFYHKCDNTCMESVKNGTYDYPKYSEEAKLNREEIDGVKLESTRIYQILAIYSTVASSLVLVVSLGAISFWMCSNGSLQCRICI

SEQ ID NO: 5313 - protein, 566 aa, synthetic construct
  REGION 1..566: note = hemagglutinin__InfluenzaA__ADK87298
MKAILVVLLYTFATANADTLCIGYHANNSTDTVDTVLEKNVTVTHSVNLLEDKHNGKLCKLRGVAPLHLGKCNIAGWILGNPECESLSTASSWSYIVETSSSDSGTCYPGDFIDYEELREQLSSVSSFERFEIFPKTSSWPNHDPNKGVTAACPHAGAKSFYKNLIWLVKKGNSYPKLSKSYINDKGKEVLVLWGIHHPSTSADQQSLYQNADAYVFVGTSRYSKKFKPEIAIRPKVRDQEGRMNYYWTLVEPGDKITFEATGNLVVPRYAFAMERNAGSGNIISDTPVHDCNTTCQTPKGAINTSLPFQNIHPITIGKCPKYVKSTKLRLATGLRNVPSIQSRGLFGAIAGFIEGGWTGMVDGWYGYHHQNEQGSGYAADLKSTQNAIDEITNKVNPVIEKMNTQFTAVGKEFNHLEKRIENLNKKVDDGFLDIWTYNAELLVLLENERTLDYHDSNVKNLYEKVRSQLKNNAKEIGNGCFEFYHKCDNTCMESVKNGTYDYPKYSEEAKLNREEIDGVKLESTRIYQILAIYSTVASSLVLVVSLGAISFWMCSNGSLQCRICI

SEQ ID NO: 5314 - protein, 566 aa, synthetic construct
  REGION 1..566: note = hemagglutinin__InfluenzaA__ADK87300
MKTIIALSYILCMVFAQKLPGNDNSTATLCLGHHAVPNGTIVKTITNDQIEVTNATELVQSSSTGEICDSPHQILDGKNCTLIDALLGDPQCDGFQNKKWDLFVERSKAYSNCYPYDVPDYASLRSLVASSGTLEFNNESFNWTGVTQNGTSSACIRRSKNSLFSRLNWLTHLNFKYPALNVTMPNNEQFDKLYIWGVHHPGTDKDQIFLYAQASGRITVSTKRSQQTAIPNIGSRPRVRNIPSRISIYWTIVKPGDILLINSTGNLIAPRGYFKIRSGKSSIMRSDAPIGKCNSECIAPNGSIPNDKSFQNVNRITYGACPRYVKQNTLKLATGMRNVPEKQTRGIFGAIAGFIENGWEGMVDGWYGFRHQNSEGRGQAADLKSTQAAIDQINGKLNRLIGKTNEKFHQIEKEFSEVEGRIQDLEKYVEDTKIDLWSYNAELLVALENQHTIDLTDSEMNKLFEKTKKQLRENAEDMGNGCFKIYHKCDNACIGSIRNGTYDHDVYRDEALNNRFQIKGVELKSGYKDWILWISFAISCFLLCVALLGFIMWACQKGNIRCNICI

SEQ ID NO: 5315 - protein, 566 aa, synthetic construct
  REGION 1..566: note = hemagglutinin__InfluenzaA__ADK87302
MKTIIALSYILCMVFAQKLPGNDNSTATLCLGHHAVPNGTIVKTITNDQIEVTNATELVQSSSTGEICDSPHQILDGKNCTLIDALLGDPQCDGFQNKKWDLFVERSKAYSNCYPYDVPDYASLRSLVASSGTLEFNNESFNWTGVTQNGTSSACIRRSKNSFFSRLNWLTHLNFKYPALNVTMPNNEQFDKLYIWGVHHPGTDKDQIFLYAQASGRITVSTKRSQQTAIPNIGSRPRVRNIPSRISIYWTIVKPGDILLINSTGNLIAPRGYFKIRSGKSSIMRSDAPIGKCNSECITPNGSIPNDKPFQNVNRITYGACPRYVKQNTLKLATGMRNVPEKQTRGIFGAIAGFIENGWEGMVDGWYGFRHQNSEGRGQAADLKSTQAAIDQINGKLNRLIGKTNEKFHQIEKEFSEVEGRIQDLEKYVEDTKIDLWSYNAELLVALENQHTIDLTDSEMNKLFEKTKKQLRENAEDMGNGCFKIYHKCDNACIGSIRNGTYDHDVYRDEALNNRFQIKGVELKSGYKDWILWISFAISCFLLCVALLGFIMWACQKGNIRCDICI

SEQ ID NO: 5316 - protein, 566 aa, synthetic construct
  REGION 1..566: note = hemagglutinin__InfluenzaA__ADK87304
MKTIIALSYILCLVFAQKIPGNDNSTATLCLGHHAVPNGTIVKTITNDQIEVTNATELVQSSSTGEICDSPHQILDGKNCTLIDALLGDPQCDGFQNKKWDLFVERSKAYSNCYPYDVPDYASLRSLVASSGTLEFNNESFNWTGVTQNGTSSACIRRSKNSFFSRLNWLTHLNFKYPALNVTMPNNEQFDKLYIWGVHHPGTDKDQIFLYAQASGRITVSTKRSQQTAIPNIGSRPRVRNIPSRISIYWTIVKPGDILLINSTGNLIAPRGYFKIRSGKSSIMRSDAPIGKCNSGCITPNGSIPNDKPFQNVNRITYGACPRYVKQNTLKLATGMRNVPEKQTRGIFGAIAGFIENGWEGMVDGWYGFRHQNSEGRGQAADLKSTQAAIDQINGKLNRLIGKTNEKFHQIEKEFSEVEGRIQDLEKYVEDTKIDLWSYNAELLVALENQHTIDLTDSEMNKLFEKTKKQLRENAEDMGNGCFKIYHKCDNACIGSIRNGTYGHDVYRDEALNNRFQIKGVELKSGYKDWFLWISFAISCFLLCVALLGFIMWACQKGNIRCNICI

SEQ ID NO: 5317 - protein, 566 aa, synthetic construct
  REGION 1..566: note = hemagglutinin__InfluenzaA__ADK87306
MKTIIALSYILCLVFAQKLPGNDNSTATLCLGHHAVPNGTIVKTITNDQIEVTNAAELVQSSSTGEICDSPHQILDGKNCTLIDALLGDPQCDGFQNKKWDLFVGRSKAYSNCYPYDVPDYASLRSLVASSGTLEFNNESFNWTGVTQNGTSSACIRRSKNSFFSRLNWLTHLNFKYPALNVTMPNNEQFDKLYIWGVHHPGTDKDQIFLYAQASGRITVSTKRSQQTAIPNIGSRPRVRNIPSRISIYWTIVKPGDILLINSTGNLIAPRGYFKIRSGKSSIMRSDAPIGKCNSECITPNGSIPNDKPFQNVNRITYGACPRYVKQNTLKLATGVRNVPEKQTRGIFGAIAGFIENGWEGMVDGWYGFRHQNSEGRGQAADLKSTQAAMDQINGKLNRLIGKTNEKLHQTEKEFSEVEGRIQDLEKYVEDTKIDLWSYNAELLVALESQHTIDLTDSEMNKLFEKTKKQLRENAEDMGNGCFKIYHKCDNACIGSIRNGTYDHDVYRDEALNNRFQIKGVELKSGYKDWILWISFAISCFLLCVALLGFIMWACQKGNIRCNICI

SEQ ID NO: 5318 - protein, 566 aa, synthetic construct
  REGION 1..566: note = hemagglutinin__InfluenzaA__ADK87308
MKTIIALSYILCMVFAQKLPGNDNSTATLCLGHHAVPNGTIVKTITNDQIEVTNATELVQSSSTGEICDSPHQILDGKNCTLIDALLGDPQCDGFQNKKWDLFVERSKAYSNCYPYDVPDYASLRSLVASSGTLEFNNESFNWTGVTQNGTSSACIRRSKNSFFSRLNWLTHLNFKYPALNVTMPNNEQFDKLYIWGVHHPGTDKDQIFLYAQASGRITVSTKRSQQTAIPNIGSRPRVRNIPSRISIYWTIVKPGDILLINSTGNLIAPRGYFKIRSGKSSIMRSDAPIGKCNSECITPNGSIPNDKPFQNVNRITYGACPRYVKQNTLKLATGMRNVPEKQTRGIFGAIAGFIENGWEGMVDGWYGFRHQNSEGRGQAADLKSTQAAIDQINGKLNRLIGKTNEKFHQIEKEFSEVEGRIQDLEKYVEDTKIDLWSYNAELLVALENQHTIDLTDSEMNKLFEKTKKQLRENAEDMGNGCFKIYHKCDNACIGSIRNGTYDHDVYRDEALNNRFQIKGVELKSGYKDWILWISFAISCFLLRVALLGFIMWACQKGNIRCNICI

SEQ ID NO: 5319 - protein, 566 aa, synthetic construct
  REGION 1..566: note = hemagglutinin__InfluenzaA__ADK87309
MKTIIALSYILCLVFAQKLPGNDNSTATLCLGHHAVPNGTIVKTITNDQIEVTNATELVQSSSTGEICDSPHQILDGKNCTLIDALLGDPQCDGFQNKKWDLFVERSKAYSNCYPYDVPDYASLRSLVASSGTLEFNNESFNWTGVTQNGTSSACIRRSKNSFFSRLNWLTHLNFKYPALNVTMPNNEQFDKLYIWGVHHPGTDKDQIFLYAQASGRITVSTKRSQQTAIPNIGSRPRVRNIPSRISIYWTIVKPGDILLINSTGNLIAPRGYFKIRSGKSSIMRSDAPIGKCNSECITPNGSIPNDKPFQNVNRITYGACPRYVKQNTLKLATGMRNVPEKQTRGIFGAIAGFIENGWEGMVDGWYGFRHQNSEGRGQAADLKSTQAAIDQINGKLNRLIGKTNEKFHQIEKEFSEVEGRIQDLEKYVEDTKIDLWSYNAELLVALENQHTIDLTDSEMNKLFEKTKKQLRENAEDMGNGCFKIYHKCDNACIGSIRNGTYDHDVYRDEALNNRFQIKGVELKSGYKDWILWISFAISCFLLCVALSGFIMWACQKGNIRCNICI

SEQ ID NO: 5320 - protein, 566 aa, synthetic construct
  REGION 1..566: note = hemagglutinin__InfluenzaA__ADK87310
MKAILVVLLYTFATANADTLCIGYHANNSTDTVDTVLEKNVTVTHSVNLLEDKHNGKLCKLRGVAPLHLGKCNIAGWILGNPECESLSTASSWSYIVETSSSDNGTCYPGDFIDYEELREQLSSVSSFERFEIFPKTGSWPNHDPNKGVTAACPHAGAKSFYKNLIWLVKKGNSYPKLSKSYINDKGKEVLVLWGIHHPSTSADQQSLYQNADAYVFVGTSRYSKKFKPEIAIRPKVRDQEGRMNYYWTLVEPGDKITFEATGNLVVPRYAFAMERNAGSGIIISDTPVHDCNTTCQTPKGAINTSLPFQNIHPITIGKCPKYVKSTKLRLATGLRNVPSIQSRGLFGAIAGFIEGGWTGMVDGWYGYHHQNEQGSGYAADLKSTQNAIDEITNKVNSVIEKMNTQFTAVGKEFNHLEKRIENLNKKVDDGFLDIWTYNAELLVLLENERTLDYHDSNVKNLYEKVRSQLKNNAKEIGNGCFEFYHKCDNTCMESVKNGTYDYPKYSEEAKLNREEIDGVKLESTRIYQILAIYSTVASSLVLVVSLGAISFWMCSNGSLQCRICI

SEQ ID NO: 5321 - protein, 566 aa, synthetic construct
  REGION 1..566: note = hemagglutinin__InfluenzaA__ADK87311
MKAILVVLLYTFATANADTLCIGYHADNSTDTVDTVLERNVTVTHSVNLLEDKHNGKLCKLRGVAPLHLGKCNIAGWILGNPECESLSTASSWSYIVETSSSDNGTCYPGDFIDYEELREQLSSVSSFERFEIFPKTSSWPNHDSNKGVTAACPHAGAKSFYKNLIWLVKKGNSYPKLSKSYINDKGKEVLVLWGIHHPSTSAGQQSLYQNADAYVFVGTSRYSKKFKPEIAIRPKVRDQEGRMNYYWTLVEPGDKITFEATGNLVVPRYAFAMERNAGSGIIISDTPVHDCNTTCQTPKGAINTSPPFQNIHPITIGKCPKYVKSTKLRLATGLRNVPSIQSRGLFGAIAGFIEGGWTGMVDGWYGYHHQNEQGSGYAADLKSTQNAIDEITNKVNSVIEKMNTQFTAVGKEFNHLEKRIENLNKKVDDGFLDIWTYNAELLVLLENERTLDYHDSNVKNLYEKVRSQLKNNAKEIGNGCFEFYHKCDNTCMESVKNGTYDYPKYSEEAKLNREEIDGVKLESTRIYQILAIYSTVASSLVLVVSLGAISFWMCSNGSLQCRICI

SEQ ID NO: 5322 - protein, 566 aa, synthetic construct
  REGION 1..566: note = hemagglutinin__InfluenzaA__ADK87313
MKTIIALSYILCLVFAQKIPGNDNSTATLCLGHHAVPNGTIVKTITNDQIEVTNATELVQSSSTGEICDSPHQILDGKNCTLIDALLGDPQCDGFQNKKWDLFVERSKAYSNCYPYDVPDYASLRSLVASSGTLEFNNESFNWTGVTQNGTSSACIRRSKNSFFSRLNWLTHLNFKYPALNVTMPNNEQFDKLYIWGVHHPGTDKDQIFLYAQASGRIAVSTKRSQQTAIPNIGSRPRVRNIPSRISIYWTIVKPGDILLINSTGNLIAPRGYFKIRSGKSSIMRSDAPIGKCNSGCITPNGSIPNDKPFQNVNRITYGACPRYVKQNTLKLATGMRNVPEKQTRGIFGAIAGFIENGWEGMVDGWYGFRHQNSEGRGQAADLKSTQAAIDQINGKLNRLIGKTNEKFHQIEKEFSEVEGRIQDLEKYVEDTKIDLWSYNAELLVALENQHTIDLTDSEMNKLFEKTKKQLRENAEDMGNGCFKIYHKCDNACIGSIRNGTYDHDVYRDEALNNRFQIKGVELKSGYKDWFLWISFAISCFLLCVALLGFIMWACQKGNIRCNICI

SEQ ID NO: 5323 - protein, 566 aa, synthetic construct
  REGION 1..566: note = hemagglutinin__InfluenzaA__ADK87315
MKAILVVLLYTFATANADTLCIGYHANNSTDTVDTVLEKNVTVTHSVNLLEDKHNGKLCKLRGVAPLHLGKCNIAGWILGNPECESLSTASSWSYIVETSSSDNGTCYPGDFIDYEELREQLSSVSSFERFEIFPKTSPWPNHDPNKGVTAACPHAGAKSFYKNLIWLVKKGNSYPKLSKSYINDKGKEVLVLWGIHHPSTSADQQSLYQNADAYVFVGTSRYSKKFKPEIAIRPKVRDQEGRMNYYWTLVEPGDKITFEATGNLVVPRYAFAMERNAGSGIIISDTPVHDCNTTCQTPKGAINTSLPFQNIHPITIGKCPKYVKSTKLRLATGLRNVPSIQSRGLFGAIAGFIEGGWTGMVDGWYGYHHQNEQGSGYAADLKSTQNAIDEITNKVNSVIEKMNTQFTAVGKESNHLETRIENLNKKVDDGFLDIWTYNAELLVLLENERTLDYHDSNVKNLYEKVRSQLKNNAKEIGNGCFEFYHKCDSTCMESVKNGTYDYPKYSEEAKLNREEIDGVKLESTRIYQILAIYSTVASSLVLVVSLGAISFWMCSNGSLQCRICI

SEQ ID NO: 5324 - protein, 566 aa, synthetic construct; identical to SEQ ID NO: 3467
  REGION 1..566: note = hemagglutinin__InfluenzaA__ADK87317

SEQ ID NO: 5325 - protein, 566 aa, synthetic construct
  REGION 1..566: note = hemagglutinin__InfluenzaA__ADK87319
MKAILVVLLYTFATANADTLCIGYHANNSTDTVDTVLEKNVTVTHSVNLLEDKHNGKLCKLRGVAPLHLGKCNIAGWILGNPECESLSTASSWSYIVETSSSDNGTCYPGDFIDYEELREQLSSVSSFERFEIFPKTSSWPNHDPNKGVTAACPHAGAKSFYKNLIWLVKKGNSYPKLSKSYINDKGKEVLVLWGIHHPSTSADQQSLYQNADAYVFVGTSRYSKKFKPEIAIRPKVRDQEGRMNYYWTLVEPGDKITFEATGNLVVPRYAFAMERNAGSGIIISDTPVHDCNTTCQTPKGAINTSLPFQNIHPITIGKCPKYVKSTELRLATGLRNVPSIQSRGLFGAIAGFIEGGWTGMVDGWYGYHHQNEQGSGYAADLKSTQNAIDEITNKVNSVIEKMNTQFTAVGKEFNHLEKRIENLNKKVDDGFLDIWTYNAELLVLLENERTLDYHDSNVKNLYEKVRSQLKNNAKEIGNGCFEFYHKCDNTCMESVKNGTYDYPKYSEEAKLNREEIDGVKLESTRIYRILAIYSTVASSLVLVVSLGAISFWMCSNGSLQCRICI

SEQ ID NO: 5326 - protein, 566 aa, synthetic construct
  REGION 1..566: note = hemagglutinin__InfluenzaA__ADK87321
MKTIIALSYILCLVFAQKIPGNDNSTATLCLGHHAVPNGTIVKTITNDQIEVTNATELVQSSSTGEICDSPHQILDGKNCTLIDALLGDPQCDGFQNKKWDLFVERSKAYSNCYPYDVPDYASLRSLVASSGTLEFNNESFNWTGVTQNGTSSACMRRSKNSFFSRLNWLTHLNFKYPALNVTMPNNEQFDKLYIWGVHHPGTDKDQIFLYAQASGRITVSTKRSQQTAIPNIGSRPRVRNIPSRISVYWTIVKPGDILLINSTGNLIAPRGYFKIRSGKSSIMRSDASIGKCNSGCITPNGSIPNDKPFQNVNRITYGACPRYVKQNTLKLATGMRNVPEKQTRGIFGAIAGFIENGWEGMVDGWYGFRHQNSEGRGQAADLKSTQAAIDQINGKLNRLIGKTNEKFHQIEKEFPEVEGRIQDLEKYVEDTKIDLWSYNAEPLVALENQHTIDLTDSEMNKLFEKTKKQLRENAEDMGNGCFKIYHKCDNACIGSIRNGTYDHDVYRDEALNNRFQIKGVELKSGYKDWFLWISFAISCFLLCVALLGFIMWACQKGNIRCNICI

SEQ ID NO: 5327 - protein, 566 aa, synthetic construct
  REGION 1..566: note = hemagglutinin__InfluenzaA__ADK87323
MKTIIALSYILCLVFAQKLPGNDNSTATLCLGHHAVPNGTIVKTITNDQIEVTNATELVQSSSTGEICDSPHQILDGKNCTLIDALLGDPQCDGFQNKKWDLFVERSKAYSNCYPYDVPDYASLRSLVASSGTLEFNNESFNWTGVTQNGTSSACIRRSKNSFFSRLNWLTHLNFKYPALNVTMPNNEQFDKLYIWGVHHPGTDKDQIFLYAQASGRITVSTKRSQQTAIPNIGSRPRVGNIPSRISIYWTIVKPGDILLINSTGNLIAPRGYFKIRSGKSSIMRSDAPIGKCNSECITPNGSIPNDKPFQNVNRITYGACPRYVKQNTLKLATGMRNVPEKQTRGIFGAIAGFIENGWEGMVDGWYGFRHQNSEGRGQAADLKSTQAAIDQINGKLNRLIGKTNEKFHQIEKEFSEVEGRIQDLEKYVEDTKIDLWSYNAELLVALENQHTIDLTDSEMNKLFEKTKKQLRENAEDMGNGCFKIYHKCDNACIGSIRNGTYDHDVYRDEALNNRFQIKGVELKSGYKDWILWISFAISCFLLCVALLGFIMWACQKGNIRCNICI

SEQ ID NO: 5328 - protein, 566 aa, synthetic construct
  REGION 1..566: note = hemagglutinin__InfluenzaA__ADK87325
MKTIIALSYILCLVFAQKLPGNDNSTATLCLGHHAVPNGTIVKTITNDQIEVTNATELVQSSSTGEICDSPHQILDGKNCTLIDALLGDPQCDGFQNKKWDLFVERSKAYSNCYPYDVPDYASLRSLVASSGTLEFNNESFNWTGVTQNGTSSACIRRSKNSFFSRLNWLTHLNFKYPALNVTMPNNEQFDKLYIWGVHHPGTDKDQIFLYAQASGRITVSTKRSQQTAIPNIGSRPRVRNIPSRISIYWTIVKPGDILLINSTGNLIAPRGYFKIRSGKSSIMRSDAPIGKCNSECITPNGSIPNDKPFQNVNRITYGACPRHVKQNTLKLATGMRNVPEKQTRGIFGAIAGFIENGWEGMVDGWYGFRHQNSEGRGQAADLKSTQAAIDQINGKLNRLIGKTNEKFHQIEKEFSEVEGRIQDLEKYVEDTKIDLWSYNAELLVALENQHTIDLTDSEMNKLFEKTKKQLRENAEDMGNGCFKIYHKCDNACIGSIRNGTYDHDVYRDEALNNRFQIKGVELKSGYKDWILWISFAISCFLLCVALLGFIMWACQKGNIRCNICI

SEQ ID NO: 5329 - protein, 566 aa, synthetic construct
  REGION 1..566: note = hemagglutinin__InfluenzaA__ADK87326
MKTIIALSYILCLVFAQKLPGNDNSTATLCLGHHAVPNGTIVKTITNDQIEVTNATELVQSSSTGEICDSPHQILDGKNCTLIDALLGDPQCDGFQNKKWDLFVERSKAYSNCYPYDVPDYASLRSLVASSGTLEFNNESFNWTGVTQNGTSSACIRRSKNSFFSRLNWLTHLNFKYPALNVTMPNNEQFDKLYIWGVHHPGTDKDQIFLYAQASGRITVSTKRSQQTAIPNIGSRPRVRNIPSRISIYWTIVKPGDILLINSTGNLIAPRGYFKIRSGKSSIMRSDAPIGKCNSECITPNGSIPNDKPFQNVNRITYGACPRYVKQNTLKLATGMRNVPEKQTRGIFGAIAGFIENGWEGMVDGWYGFRHQNSEGRGQAADLKSTQAAIDQINGKLNRLIGKTNEKFHQIEKEFSEVEGRIQDLEKYVEDTKIDLWSYNAELLVALENQHTIDLTDSEMNKLFEKTKKQLRENAEDMGNGCFKIYHKCDNACIGSIRNGTYDHDVYRDEALNNRFQIKGVELKSGCKDWILWISFAISCFLLCVALLGFTMWACQKGNIRCNICI

SEQ ID NO: 5330 - protein, 566 aa, synthetic construct
  REGION 1..566: note = hemagglutinin__InfluenzaA__ADK87328
MKAILVVLLYTFATANADTLCIGYHANNSTDTVDTVLEKNVTVTHSVNLLEDKHNGKLCKLRGVAPLHLGKCNIAGWILGNPECESLSTASSWSYIVETSSSDNGTCYPGDFIDYEELREQLSSVSSFERFEIFPKTSSWPNHDPNKGVTAACPHAGAKSFYKNLIWLVKKGNSYPKLSKSYINDKGKEVLVLWGIHHPSTSADQQSLYQNADAYVFVGTSRYSKKFKPEIAIRPKVRDQEGRMNYYWTLVEPGDKITFEATGNLVVPRYAFAMERNAGSGIIISDTPVHDCNTTCQTPKSAINTSLPFQNIHPITIGKCPKYVKSTKLRLATGLRNVPSIQSRGLFGAIAGFIEGGWTGMVDGWYGYHHQNEQGSGYAADLKSTQNAIDEITNKVNSVIEKMNTQFTAVGKEFNHLEKRIENLNKKVDDGFLDIWTYNAELLVLLENERTLDYHDSNVKNLYEKVRSQLKNNAKEIGNGCFEFYHKCDNTCMESVKNGTYDYPKYSEEAKLNREEIDGVKLESTRIYQILAIYSTVASSLVLVVSLGAISFWMCSNGSLQCRICI

SEQ ID NO: 5331 - protein, 566 aa, synthetic construct
  REGION 1..566: note = hemagglutinin__InfluenzaA__ADK87334
MKTIIALSYILCLVFAQKLPGNDNSTATLCLGHHAVPNGTIVKTITSDQIEVTNATELVQSSSTGEICDSPHQILDGKNCTLIDALLGDPQCDGFQNKKWDLFVERSKAYSNCYPYDVPDYASLRSLVASSGTLEFNNESFNWTGVTQNGTSSACIRRSKNSFFSKLNWLTHLNFKYPALNVTMPNNEQFDKLYIWGVRHPGTDKDQIFLYAQASGRITVSTKRSQQTVIPNIGSRPRVRNIPSRISTYWTIVKPGDILLINSTGNLIAPRGYFKIRSGKSSIMRSDTPIGKCNSECITPNGSIPNDKPFQNVNRITYGACPRYVKQNTLKLATGMRNVPEKQTRGIFGAIAGFIENGWEGMVDGWYGFRHQNSEGRGQAADLKSTQAAIDQINGKLNRLIGKTNEKFHQIEKEFSEVEGRIQDLEKYVEDTKIDLWSYNAELLVALENQHTIDLTDSEMNKLFEKTKKQLRENAEDMGNGCFKIYHKCDNACIGSIRNGTYDHDVYRDEALNNRFQIKGVELKSGYKDWILWISFAISCFLLCVALLGFIMWACQKGNIRCNICI

SEQ ID NO: 5332 - protein, 566 aa, synthetic construct
  REGION 1..566: note = hemagglutinin__InfluenzaA__ADK87336
MKTIIALSYILCLVFAQKLPGNDNSTATLCLGHHAVPNGTIVKTITNDQIEVTNATELVQSSSTGEICDSPHQILDGKNCTLIDALLGDPQCDGFQNKKWDLFVERSKAYSNCYPYDVPDYASLRSLVASSGTLEFNNESFNWTGVTQNGTSSACIRRSKNSFFSKLNWLTHLNFKYPALNVTMPNNEQFDKLYIWGVHHPGTDRDQIFLYAQASGRITVSTKRSQQTVIPNIGSRPRVRNIPSRISIYWTIVKPGDILLINSTGNLIAPRGYFKIRSGKSSIMRSDTPIGKSNSECITPNGSIPNDKPFQNVNRITYGACPRYVKQNTLKLATGMRNVPEKQTRGIFGAIAGFIENGWEGMVDGWYGFRHQNSEGRGQAADLKSTQAAIDQINGKLNRLIGKTNEKFHQIEKEFSEVEGRIQDLEKYVEDTKIDLWSYNAELLVALENQHTIDLTDSEMNKLFEKTKKQLREDAEDMGNGCFKIYHKCDNACIGSIRNGTYDHDVYRDEALNNRFQIKGVELKSGYKDWILWISFAISCFLLCVALLGFIMWACQKGNIRCNICI

SEQ ID NO: 5333 - protein, 566 aa, synthetic construct; identical to SEQ ID NO: 2669
  REGION 1..566: note = hemagglutinin__InfluenzaA__ADK87338

SEQ ID NO: 5334 - protein, 566 aa, synthetic construct
  REGION 1..566: note = hemagglutinin__InfluenzaA__ADK90193
MKAILVVLLYTFATANADTLCIGYHANNSTDTVDTVLEKNVTVTHSVNLLEDKHNGKLCKLRGVAPLHLGKCNIAGWILGNPECESLSTASSWSYIVETSSSDNGTCYPGDFIDYEELREQLSSVSSFERFEIFPKTSSWPNHDSNKGVTAACPHAGAKSFYKNLIWLVKKGNSYPKLSKSYINDKGKVVLVLWGIHHPSTSADQQSLYQNADAYVFVGTSRYSKKFKPEIAIRPKVRDQEGRMNYYWTLVEPGDKITFEATGNLVVPRYAFAMERNAGSGIIISDTPVHDCNTTCQTPKGAINTSLPFQNIHPITIGKCPKYVKSTKLRLATGLRNVPSIQSRGLFGAIAGFIEGGWTGMVDGWYGYHHQNEQGSGYAADLKSTQNAIDEITNKVNSVIEKMNTQFTAVGKEFNHLEKRIENLNKKVDDGFLDIWTYNAELLVLLENERTLDYHDSNVKNLYEKVRSQLKNNAKEIGNGCFEFYHKCDNTCMESVKNGTYDYPKYSEEAKLNREEIDGVKLESTRIYQILAIYSTVASSLVLVVSLGAISFWMCSNGSLQCRICI

SEQ ID NO: 5335 - protein, 566 aa, synthetic construct
  REGION 1..566: note = hemagglutinin__InfluenzaA__ADK90194
MKAILVVLLYTFATANADTLCIGYHANNSTDTVDTVLEKNVTVTHSVNLLEDKHNGKLCKLRGVAPLHLGKCNIAGWILGNPECESLSTASSWSYIVETSSSDNGTCYPGDFIDYEELREQLSSVSSFERFEIFPKTSSWPNHDSNKGVTAACPHAGAKSFYKNLIWLVKKGNSYPKLSKSYINDKGKEVLVLWGIHHPSTSADQQSLYQNADAYVFVGTSKYSKKFKPEIAIRPKVRDQEGRMNYYWTLVEPGDKITFEATGNLVVPRYAFAMERNAGSGIIISDTPVHDCNTTCQTPKGAINTSLPFQNIHPITIGKCPKYVKSTKLRLATGLRNVPSIQSRGLFGAIAGFIEGGWTGMVDGWYGYHHQNEQGSGYAADLKSTQNAIDEITNKVNSVIEKMNTQFTAVGKEFNHLEKRIENLNKKIDDGFLDIWTYNAELLVLLENERTLDYHDSNVKNLYEKVRSQLKNNAKEIGNGCFEFYHKCDNTCMESVKNGTYDYPKYSEEAKLNREEIDGVKLESTRIYQILAIYSTVASSLVLVVSLGAISFWMCSNGSLQCRICI

SEQ ID NO: 5336 - protein, 566 aa, synthetic construct
  REGION 1..566: note = hemagglutinin__InfluenzaA__ADK90195
MKAILVVLLYTFATANADTLCIGYHANNSTDTVDTVLEKNVTVTHSVNLLEDKHNGKLCKLRGVAPLHLGKCNIAGWILGNPECESLSTASSWSYIVETSSSDNGTCYPGDFIDYEELREQLSSVSSFERFEIFPKTSSWPNHDSNKGVTAACPHAGAKSFYKNLIWLVKKGNSYPKLSKSYINDKGKEVLVLWGIHHPSTSADQQSLYQNADAYVFVGTSRYSKKFKPEIAIRPKVRDQEGRMNYYWTLVEPGDKITFEATGNLVVPRYAFAMERNAGSGIVISDTPVHDCNTTCQTPKGAINTSLPFQNIHPITIGKCPKYVKSTKLRLATGLRNVPSIQSRGLFGAIAGFIEGGWTGMVDGWYGYHHQNEQGSGYAADLKSTQNAIDEITNKVNSVIEKMNTQFTAVGKEFNHLEKRIENLNKKIDDGFLDIWTYNAELLVLLENERTLDYHDSNVKNLYEKVRSQLKNNAKEIGNGCFEFYHKCDNTCMESVKNGTYDYPKYSEEAKLNREEIDGVKLESTRIYQILAIYSTVASSLVLVVSLGAISFWMCSNGSLQCRICI

SEQ ID NO: 5337 - protein, 566 aa, synthetic construct; identical to SEQ ID NO: 2656
  REGION 1..566: note = hemagglutinin__InfluenzaA__ADK90196

SEQ ID NO: 5338 - protein, 566 aa, synthetic construct
  REGION 1..566: note = hemagglutinin__InfluenzaA__ADK90197
MRAILGVLLYTFATANADTLCIGYHANNSTDTVDTVLEKNVTVTHSVNLLEDKHNGKLCKLRGVAPLHLGKCNIAGWILGNPECESLSTASSWSYIVETSSSDNGTCYPGDFIDYEELREQLSSVSSFERFEIFPKTSSWPNHDSNKGVTAACPHAGAKSFYKNLIWLVKKGNSYPKLSKSYINDKGKEVLVLWGIHHPSTSADQQSLYQNADAYVFVGTSRYSKKFKPEIAIRPKVRDQEGRMNYYWTLVEPGDKITFEATGNLVVPRYAFAMERNAGSGIIISDTPVHDCNTTCQTPKGAINTSLPFQNIHPITIGKCPKYVKSTKLRLATGLRNVPSIQSRGLFGAIAGFIEGGWTGMVDGWYGYHHQNEQGSGYAADLKSTQNAIDEITNKVNSVIEKMNTQFTAVGKEFNHLEKRIENLNKKVDDGFLDIWTYNAELLVLLENERTLDYHDSNVKNLYEKVRSQLKNNAKEIGNGCFEFYHKCDNTCMESVKNGTYDYPKYSEEAKLNREEIDGVKLESTRIYQILAIYSTVASSLVLVVSLGAISFWMCSNGSLQCRICI

SEQ ID NO: 5339 - protein, 566 aa, synthetic construct
  REGION 1..566: note = hemagglutinin__InfluenzaA__ADK90198
MKAILGVLLYTFATANADTLCIGYHANNSTDTVDTVLEKNVTVTHSVNLLEDKHNGKLCKLRGVAPLHLGKCNIAGWILGNPECESLSTASSWSYIVETSSSDNGTCYPGDFIDYEELREQLSSVSSFERFEIFPKTSSWPNHDSNKGVTAACPHAGAKSFYKNLIWLVKKGNSYPKLSKSYINDKGKEVLVLWGIHHPSTSADQQSLYQNADAYVFVGTSRYSKKFKPEIAIRPKVRDQEGRMNYYWTLVEPGDKITFEATGNLVVPRYAFAMERNAGSGIIISDTPVHDCNTTCQTPKGAINTSLPFQNIHPITIGKCPKYVKSTKLRLATGLRNVPSIQSRGLFGAIAGFIEGGWTGMVDGWYGYHHQNEQGSGYAADLKSTQNAIDEITNKVNSVIEKMNTQFTAVGKEFNHLEKRIENLNKKVDDGFLDIWTYNAELLVLLENERTLDYHDSNVKNLYEKVRSQLKNNAKEIGNGCFEFYHKCDNTCMESVKNGTYDYPKYSEEAKLNREEIDGVKLESTRIYQILAIYSTVASSLVLVVSLGAISFWMCSNGSLQCRICI

SEQ ID NO: 5340 - protein, 566 aa, synthetic construct; identical to SEQ ID NO: 2669
  REGION 1..566: note = hemagglutinin__InfluenzaA__ADK90199

SEQ ID NO: 5341 - protein, 566 aa, synthetic construct
  REGION 1..566: note = hemagglutinin__InfluenzaA__ADK90200
MKAILVVLLYTFATANADTLCIGYHANNSTDTVDTVLEKNVTVTHSVNLLEDKHNGKLCKLRGVAPLHLGKCNIAGWILGNPECESLSTASSWSYIVETSSSDNGTCYPGDFIDYEELREQLSSVSSFERFEIFPKTSSWPNHDSNKGVTAACPHAGAKSFYKNLIWLVKKGNSYPKLSKSYINDKGKEVLVLWGIHHPSTSADQQSLYQNADAYVFVGTSRYSKKFKPEIAIRPKVRDQEGRMNYYWTLVEPGDKIAFEATGNLVVPRYAFAMERNAGSGIIISDTPVHDCNTTCQTPKGAINTSLPFQNIHPITIGKCPKYVKSTKLRLATGLRNVPSIQSRGLFGAIAGFIEGGWTGMVDGWYGYHHQNEQGSGYAADLKSTQNAIDEITNKVNSVIEKMNTQFTAVGKEFNHLEKRIENLNKKVDDGFLDIWTYNAELLVLLENERTLDYHDSNVKNLYEKVRSQLKNNAKEIGNGCFEFYHKCDNTCMESVKNGTYDYPKYSEEAKLNREEIDGVKLESTRIYQILAVYSTVASSLVLVVSLGAISFWMCSNGSLQCRICI

SEQ ID NO: 5342 - protein, 566 aa, synthetic construct
  REGION 1..566: note = hemagglutinin__InfluenzaA__ADK90201
MKAILVVLLYTFATANADTLCIGYHANNSTDTVDTVLEKNVTVTHSVNLLEDKHNGKLCKLRGVAPLHLGKCNIAGWILGNPECESLSTASSWSYIVETSSSDNGTCYPGDFIDYEELREQLSSVSSFERFEIFPKTSSWPNHDSNKGVTAACPHAGAKSFYKNLIWLVKKGNSYPKLSKSYINDKGKEVLVLWGIHHPSTSADQQSLYQNADAYVFVGTSRYSKKFKPEIAVRPKVRDQEGRMNYYWTLVEPGDKITFEATGNLVVPRYAFAMERNAGSGIIISDTPVHDCNTTCQTPKGAINTSLPFQNIHPITIGKCPKYVKSTKLRLATGLRNVPSIQSRGLFGAIAGFIEGGWTGMVDGWYGYHHQNEQGSGYAADLKSTQNAIDEITNKVNSVIEKMNTQFTAVGKEFNHLEKRIENLNKKVDDGFLDIWTYNAELLVLLENERTLDYHDSNVKNLYEKVRSQLKNNAKEIGNGCFEFYHKCDNTCMESVKNGTYDYPKYSEEAKLNREEIDGVKLESTRIYQILAIYSTVASSLVLVVSLGAISFWMCSNGSLQCRICI

SEQ ID NO: 5343 - protein, 566 aa, synthetic construct
  REGION 1..566: note = hemagglutinin__InfluenzaA__ADK90202
MKAILVVLLYTFATANADTLCIGYHANNSTDTVDTVLEKNVTVTHSVNLLEDKHNGKLCKLRGVAPLHLGKCNIAGWILGNPECEPLSTASSWSYIVETSSSDNGTCYPGDFIDYEELREQLSSVSSFERLEIFPKTSSWPNHDSNKGVTAACPHAGAKSFYKNLIWLVKKGNSYPKLSKSYINDKGKEVLVLWGIHHPSTSADQQSLYQNADAYVFVGTSRYSKKFKPEIAIRPKVRDQEGRMNYYWTLVEPGDKITFEATGNLVVPRYAFAMERNAGSGIIISDTPVHDCNTTCQTPNGAINTSLPFQNIHPITIGKCPKYVKSTKLRLATGLRNVPSIQSRGLFGAIAGFIEGGWTGMVDGWYGYHHQNEQGSGYAADLKSTQNAIDEITNKVNSVIEKMNTQFTAVGKEFNHLEKRIENLNKKVDDGFLDIWTYNAELLVLLENERTLDYHDSNVKNLYEKVRSQLKNNAKEIGNGCFEFYHKCDNTCMESVKNGTYDYPKYSEEAKLNREEIDGVKLESTRIYQILAIYSTVASSLVLVVSLGAISFWMCSNGSLQCRICI

SEQ ID NO: 5344 - protein, 566 aa, synthetic construct; identical to SEQ ID NO: 2849
  REGION 1..566: note = hemagglutinin__InfluenzaA__ADK90203

SEQ ID NO: 5345 - protein, 566 aa, synthetic construct; identical to SEQ ID NO: 3770
  REGION 1..566: note = hemagglutinin__InfluenzaA__ADK90204

SEQ ID NO: 5346 - protein, 566 aa, synthetic construct
  REGION 1..566: note = hemagglutinin__InfluenzaA__ADK94191
MKTIIALSYILCLVFAQKLPGNDNSTATLCLGHHAVPNGTVVKTITNDQIEVTNATELVQSSSTGEICDSPHQILDGKNCTLIDALLGDPQCDGFQNKKWDLFVERSKAYSNCYPYDVPDYASLRSLVASSGTLEFNNESFNWTGVTQNGTSSACIRRSKNSFFSRLNWLTHLNFKYPALNVTMPNNEQFDKLYIWGVHHPGTDKDQIFLYAQASGRITVSTKRSQQTVIPNIGSRPRVRNIPSRVSIYWTIVKPGDILLINSTGNLIAPRGYFKIRSGKSSIMRSDAPIGKCNSECITPNGSIPNDKPFQNVNRITYGACPRYVKQNTLKLATGMRNVPEKQTRGIFGAIAGFIENGWEGMVDGWYGFRHQNSEGRGQAADLKSTQAAIDQINGKLNRLIGKTNEKFHQIEKEFSEVEGRIQDLEKYVEDTKIDLWSYNAELLVALENQHTIDLTDSEMNKLFEKTKKQLRENAEDMGNGCFKIYHKCDNACIGSIRNGTYDHDVYRDEALNNRFQIKGVELKSGYKDWILWISFAISCFLLCVALLGFIMWACQKGNIRCNICI

SEQ ID NO: 5347 - protein, 566 aa, synthetic construct
  REGION 1..566: note = hemagglutinin__InfluenzaA__ADK94202
MKTIIALSYILCLVFAQKLPGNDNSTATLCLGHHAVPNGTIVKTITNDQIEVTNATELVQSSSTGEICDSPHQILDGENCTLIDALLGDPQCDGFQNKKWDLFVERSKAYSNCYPYDVPDYASLRSLIASSGTLEFNNESFNWTGVTQNGTSSACIRRSNNSFFSRLNWLTHLKFKYPALNVTMPNNEQFDKLYIWGVHHPGTDNDQIFLYAQASGRITVSTKRSQQTVIPNIGSRPRVRNIPSRISIYWTIVKPGDILLINSTGNLIAPRGYFKIRSGKSSIMRSDAPIGKCNSECITPNGSIPNDKPFQNVNRITYGACPRYVKQNTLKLATGMRNVPEKQTRGIFGAIAGFIENGWEGMVDGWYGFRHQNSEGRGQAADLKSTQAAIDQINGKLNRLIGKTNEKFHQIEKEFSEVEGRIQDLEKYVEDTKIDLWSYNAELLVALENQHTIDLTDSEMNKLFEKTKKQLRENAEDMGNGCFKIYHKCDNACIGSIRNGTYDHDVYRDEALNNRFQIKGVELKSGYKDWILWISFAISCFLLCVALLGFIMWACQKGNIRCNICI

SEQ ID NO: 5348 - protein, 566 aa, synthetic construct; identical to SEQ ID NO: 2434
  REGION 1..566: note = hemagglutinin__InfluenzaA__ADK94213

SEQ ID NO: 5349 - protein, 566 aa, synthetic construct; identical to SEQ ID NO: 3613
  REGION 1..566: note = hemagglutinin__InfluenzaA__ADK94224

SEQ ID NO: 5350 - protein, 566 aa, synthetic construct
  REGION 1..566: note = hemagglutinin__InfluenzaA__ADK94257
METIIALSYILCLVFAQKLPGNDNSTATLCLGHHAVPNGTIVKTITNDQIEVTNATELVQSSSTGEICDSPHQILDGKNCTLIDALLGDPQCDGFQNKKWDLFVERSKAYSNCYPYDVPDYASLRSLVASSGTLEFNNESFNWTGVTQNGTSSACIRRSKNSFFSRLNWLTHLNFKYPALNVTMPNNEQFDKLYIWGVHHPGTDKDQIFLYAQASGRITVSTKRSQQTVIPNIGSRPRVRNIPSRISIYWTIVKPGDILLINSTGNLIAPRGYFKIRSGKSSIMRSDAPIGKCNSECITPNGSIPNDKPFQNVNRITYGACPRYVKQSTLKLATGMRNVPEKQTRGIFGAIAGFIENGWEGMVDGWYGFRHQNSEGRGQAADLKSTQAAIDQINGKLNRLIGKTNEKFHQIEKEFSEVEGRIQDLEKYVEDTKIDLWSYNAELLVALENQHTIDLTDSEMNKLFEKTKKQLRENAEDMGNGCFKIYHKCDNACIGSIRNGTYDHDVYRDEALNNRFQIKGVELKSGYKDWILWISFAISCFLLCVALLGFIMWACQKGNIRCNICI

SEQ ID NO: 5351 - protein, 566 aa, synthetic construct
  REGION 1..566: note = hemagglutinin__InfluenzaA__ADK94268
MKTIIALSYILCLVFAQKLPGNDNSTATLCLGHHAVPNGTIVKTITNDQIEVTNATELVQSSSTGEICDSPHQILDGKNCTLIDALLGDPQCDGFQNKKWDLFVERSKAYSNCYPYDVPDYASLRSLVASSGTLEFNNESFNWTGVTQNGTSSACIRRSKNSFFSRLNWLTHLNFKYPALNVTMPNNEQFDKLYIWGVHHPGTDKDQIFLYAQASGRITVSTKRSQQTVIPNIGSRPRVRNIPSRISIYWTIVKPGDILLINSTGNLIAPRGYFKIRSGKSSIMRSDAPIGKCNSECITPNGSIPNDKPFQNVNRITYGACPRYVKQSTLKLATGMRNVPEKQTRGIFGAIAGFIENGWEGMVDGWYGFRHQNSEGRGQAADLKSTQAAIDQINGKLNRLIGKTNEKFHQIEKEFSEVEGRIQDLEKYVEDTKIDLWSYNAELLVALENQHTIDLTDSEMNKLFEKTKKQLRENAEDMGNGCFKIYHKCDNACIGSIRNGTYDHDVYRDEALNNRFQIKGVELKSGYKDWILWISFAISCFLLCVALLGFIMWACQKGNIRCNICI

SEQ ID NO: 5352 - protein, 566 aa, synthetic construct
  REGION 1..566: note = hemagglutinin__InfluenzaA__ADK94279
MKTIIALSYILCLVFAQKLPGNDNSTATLCLGHHAVPNGTIVKTITNDQIEVTNATELVQSSSTGEICNSPHQILDGENCTLIDALLGDPQCDGFQNKKWDLFVERSKAYSNCYPYDVPDYASLRSLVASSGTLEFNNESFNWTGVTQNGTSSACIRRSNNSFFSRLNWLTHLKFKYPALNVTMPNNEQFDKLYIWGVHHPGTDNDQIFLYAQASGRITVSTKRSQQTVIPNIGSRPRVRNIPSRISIYWTIVKPGDILLINSTGNLIAPRGYFKIRSGKSSIMRSDAPIGKCNSECITPNGSIPNDKPFQNVNRITYGACPRYVKQNTLKLATGMRNVPEKQTRGIFGAIAGFIENGWEGMVDGWYGFRHQNSEGRGQAADLKSTQAAIDQINGKLNRLIGKTNEKFHQIEKEFSEVEGRIQDLEKYVEDTKIDLWSYNAELLVALENQHTIDLTDSEMNKLFEKTKKQLRENAEDMGNGCFKIYHKCDNACIGSIRNGTYDHDVYRDEALNNRFQIKGVELKSGYKDWILWISFAISCFLLCVALLGFIMWACQKGNIRCNICI

SEQ ID NO: 5353 - protein, 566 aa, synthetic construct; identical to SEQ ID NO: 3613
  REGION 1..566: note = hemagglutinin__InfluenzaA__ADK94290

SEQ ID NO: 5354 - protein, 566 aa, synthetic construct; identical to SEQ ID NO: 3613
  REGION 1..566: note = hemagglutinin__InfluenzaA__ADK94301

SEQ ID NO: 5355 - protein, 566 aa, synthetic construct
  REGION 1..566: note = hemagglutinin__InfluenzaA__ADK94323
MKTIIALSYILCLVFAQKLPGNDNSTATLCLGHHAVPNGTIVKTITNDQIEVTNATELVQSSSTGEICDSPHQILDGKNCTLIDALLGDPQCDGFQNKKWDLFVERSKAYSNCYPYDVPDYASLRSLVASSGTLEFNNESFNWTGVTQNGTSSACIRRSKNSFFSRLNWLTHLNFKYPALNVTMPNNEQFDKLYIWGVHHPGTDKDQIFLYAQASGRITVSTKRSQQTVIPNIGSRPRIRNIPSRISIYWTIVKPGDILLINSTGNLIAPRGYFKIRSGKSSIMRSDAPIGKCNSECITPNGSIPNDKPFQNVNRITYGACPRYVKQNTLKLATGMRNVPEKQTRGIFGAIAGFIENGWEGMVDGWYGFRHQNSEGRGQAADLKSTQAAIDQINGKLNRLIGKTNEKFHQIEKEFSEVEGRIQDLEKYVEDTKIDLWSYNAELLVALENQHTIDLTDSEMNKLFEKTKKQLRENAEDMGNGCFKIYHKCDNACIGSIRNGTYDHDVYRDEALNNRFQIKGVELKSGYKDWILWISFAISCFLLCVALLGFIMWACQKGNIRCNICI

SEQ ID NO: 5356 - protein, 566 aa, synthetic construct; identical to SEQ ID NO: 5346
  REGION 1..566: note = hemagglutinin__InfluenzaA__ADK94441

SEQ ID NO: 5357 - protein, 566 aa, synthetic construct
  REGION 1..566: note = hemagglutinin__InfluenzaA__ADK94476
MKTIIALSYILCLVFAQKLPGNDNSTATLCLGHHAVPNGTIVKTITNDQIEVTNATELVQSSSTGEICDSPHQILDGKNCTLIDALLGDPQCDGFQNKKWDLFVERSKAHSNCYPYDVPDYASLRSLVASSGTLEFNNESFNWTGVTQNGTSSACIRRSKNSFFSRLNWLTHLNFKYPALNVTMPNNEQFDKLYIWGAHHPGTDKDQIFLYAQASGRITVSTKRSQQTVIPNIGSRPRVRNIPSRISIYWTIVKPGDILLINSTGNLIAPRGYFKIRSGKSSIMRSDAPIGKCNSECITPNGSIPNDKPFQNVNRITYGACPRYVKQNTLKLATGMRNVPEKQTRGIFGAIAGFIENGWEGMVDGWYGFRHQNSEGRGQAADLKSTQAAIDQINGKLNRLIGKTNEKFHQIEKEFSEVEGRIQDLEKYVEDTKIDLWSYNAELLVALENQHTIDLTDSEMNKLFEKTKKQLRENAEDMGNGCFKIYHKCDNACIGSIRNGTYDHDVYRDEALNNRFQIKGVELKSGYKDWILWISFAISCFLLCVALLGFIMWACQKGNIRCNICI

SEQ ID NO: 5358 - protein, 566 aa, synthetic construct; identical to SEQ ID NO: 3613
  REGION 1..566: note = hemagglutinin__InfluenzaA__ADK94487

SEQ ID NO: 5359 - protein, 566 aa, synthetic construct
  REGION 1..566: note = hemagglutinin__InfluenzaA__ADK94498
MKTIIALSYILCLVFAQKLPGNDNSTATLCLGHHAVPNGTVVKTITNDQIEVTNATELVQSSSTGEICDSPHQILDGKNCTLIDALLGDPQCDGFQNKKWDLFVERSKAYSNCYPYDVPDYASLRSLVASSGTLEFNNESFNWTGVTQNGTSSACIRRSKNSFFSRLNWLTHLNFKYPALNVTMPNNEQFDKLYIWGVHHPGTDKDQIFLYAQASGRITVSTKRSQQTVIPNIGSRPRVRNIPSRISIYWTIVKPGDILLINSTGNLIAPRGYFKIRSGKSSIMRSDAPIGKCNSECITPNGSIPNDKPFQNVNRITYGACPRYVKQNTLKLATGMRNVPEKQTRGIFGAIAGFIENGWEGMVDGWYGFRHQNSEGRGQAADLKSTQAAIDQINGKLNRLIGKTNEKFHQIEKEFSEVEGRIQDLEKYVEDTKIDLWSYNAELLVALENQHTIDLTDSEMNKLFEKTKKQLRENAEDMGNGCFKIYHKCDNACIGSIRNGTYNHDVYRDEALNNRFQIKGVELKSGYKDWILWISFAISCFLLCVALLGFIMWACQKGNIRCNICI

SEQ ID NO: 5360 - protein, 566 aa, synthetic construct
  REGION 1..566: note = hemagglutinin__InfluenzaA__ADK94509
MKTIIALSYILCLVFAQKLPGNDNSTATLCLGHHAVPNGTIVKTITNDQIEVTNATELVQSSSTGEICDSPHQILDGKNCTLIDALLGDPQCDGFQNKKWDLFVERSKAYSNCYPYDVPDYASLRSLVASSGTLEFNNESFNWTGVTQNGTSSACIRRSKNSFFSRLNWLTHLNFKYPALNVTMPNNEQFDKLYIWGVHHPGTDKDQIFLYAQASGRITVSTKRSQQTAIPNIGSRPRVRNIPSRISIYWTIVKPGDILLINSTGNLIAPRGYFKIRSGKSSIMRSDAPIGKCNSECITPNGSIPNDKPFQNVNRITYGACPRYIKQNTLKLATGMRNVPEKQTRGIFGAIAGFIENGWEGMVDGWYGFRHQNSEGRGQAADLKSTQAAIDQINGKLNRLIGKTNEKFHQIEKEFSEVEGRIQDLEKYVEDTKIDLWSYNAELLVALENQHTIDLTDSEMNKLFEKTKKQLRENAEDMGNGCFKIYHKCDNACIGSIRNGTYDHDVYRDEALNNRFQIKGVELKSGYKDWILWISFAISCFLLCVALLGFIMWACQKGNIRCNICI

SEQ ID NO: 5361 - protein, 566 aa, synthetic construct
  REGION 1..566: note = hemagglutinin__InfluenzaA__ADK94520
MKTIIALSYILCLVFAQKLPGNDNSTATLCLGHHAVPNGTIVKTITNDQIEVTNATELVQSSSTGEICDSPHQILDGENCTLIDALLGDPQCDGFQNKKWDLFVERSKAYSNCYPYDVPDYASLRSLIASSGTLEFNNESFNWTGVTQNGTSSACIRRSNNSFFSRLNWLTHLRFKYPALNVTMPNNEQFDKLYIWGVHHPGTDNDQIFLYAQASGRITVSTKRSQQTVIPNIGSRPRVRNIPSRISIYWTIVKPGDILLINSTGNLIAPRGYFKIRSGKSSIMRSDAPIGKCNSECITPNGSIPNDKPFQNVNRITYGACPRYVKQNTLKLATGMRNVPEKQTRGIFGAIAGFIENGWEGMVDGWYGFRHQNSEGRGQAADLKSTQAAIDQINGKLNRLIGKTNEKFHQIEKEFSEVEGRIQDLEKYVEDTKIDLWSYNAELLVALENQHTIDLTDSEMNKLFEKTKKQLRENAEDMGNGCFKIYHKCDNACIGSIRNGTYDHDVYRDEALNNRFQIKGVELKSGYKDWILWISFAISCFLLCVALLGFIMWACQKGNIKCNICI

SEQ ID NO: 5362 - protein, 566 aa, synthetic construct; identical to SEQ ID NO: 3613
  REGION 1..566: note = hemagglutinin__InfluenzaA__ADK94531

SEQ ID NO: 5363 - protein, 566 aa, synthetic construct; identical to SEQ ID NO: 2434
  REGION 1..566: note = hemagglutinin__InfluenzaA__ADK94542

SEQ ID NO: 5364 - protein, 566 aa, synthetic construct
  REGION 1..566: note = hemagglutinin__InfluenzaA__ADK94553
MKTIIALSYILCLVFAQKLPGNDNSTATLCLGHHAVPNGTIVKTITNDQIEVTNATELVQSSSTGEICDSPHQILDGKNCTLIDALLGDPQCDGFQNKKWDLFVERSKAYSNCYPYDVPDYASLRSLVASSGTLEFNNESFNWTGVTQNGTSSACIRRSKNSFFSRLNWLTHLNFKYPALNVTMPNNEQFDKLYIWGVHHPGTDKDQIFLYAQASGRITVSTKRSQQTVIPNIGSRPRVRNIPSRISIYWTIVKPGDILLINSTGNLIAPRGYFKIRSGKSSIMRSDAPIGKCNSECITPNGSIPNDKPFQNVNRITYGACPRYVKQSTLKLATGMRNVPEKQTRGIFGAIAGFIENGWEGMVDGWYGFRHQNSEGRGQAADLKSTQAAIDQINGKLNRLIGKTNEKFHQIEKEFSEVEGRIQDLEKYVEDTKIDLWSYNAELLVALENQHTIDLTDSEMNKLFEKTKKQLRENAEDMGNGCFKIYHKCNNACIGSIRNGTYDHDVYRDEALNNRFQIKGVELKSGYKDWILWISFAISCFLLCVALLGFIMWACQKGNIRCNICI

SEQ ID NO: 5365 - protein, 566 aa, synthetic construct; identical to SEQ ID NO: 3613
  REGION 1..566: note = hemagglutinin__InfluenzaA__ADK94564

SEQ ID NO: 5366 - protein, 566 aa, synthetic construct
  REGION 1..566: note = hemagglutinin__InfluenzaA__ADK98501
MKAILVVLLYTFATANADTLCIGYHANNSTDTVDTVLEKNVTVTHSVNLLEDKHNGKLCKLRGVAPLHLGKCNIAGWILGNPECESLSTASSWSYIVETSSSGNGTCYPGDFIDYEELREQLSSVSSFERFEIFPKTSSWPNHDSNKGVTAACPHAGAKSFYKNLIWLVKKGNSYPKLSKSYINDKGKEVLVLWGIHHPSTSADQQSLYQNADAYVFVGTSRYSKKFKPEIAIRPKVRDQEGRMNYYWTLVEPGDKITFETTGNLVVPRYAFAMERNAGSGIIISDTPVHDCNTTCQTPKGAINTSLPFQNIHPITIGKCPKYVKSTKLRLATGLRNVPSIQSRGLFGAIAGFIEGGWTGMVDGWYGYHHQNEQGSGYAADLKSTQNAIDEITNKVNSVIEKMNTQFTAVGKEFNHLEKRIENLNKKVDDGFLDIWTYNAELLVLLENERTLDYHDSNVKNLYEKVRSQLKNNAKEIGNGCFEFYHKCDNTCMESVKNGTYDYPKYSEEAKLNREEIDGVKLESTRIYQILAIYSTVASSLVLVVSLGAISFWMCSNGSLQCRICI

SEQ ID NO: 5367 - protein, 566 aa, synthetic construct
  REGION 1..566: note = hemagglutinin__InfluenzaA__ADK98503
MKAILVVLLYTFATANADTLCIGYHANNSTDTVDTVLEKNVTVTHSVNLLEDKHNGKLCKLRGVAPLHLGKCNIAGWILGNPECESLSTASSWSYIVETSSSDNGTCYPGDFIDYEELREQLSSVSSFERFEIFPKTSSWPNHDPNKGVTAACPHAGAKSFYKNLIWLVKKGNSYPKLSKSYINDKGKEVLVLWGIHHPSTSADQQSLYQNVDAYVFVGTSRYSKKFKPEIAIRPKVRDQEGRMNYYWTLVEPGDKITFEATGNLVVPRYAFAMERNAGSGIIISDTPVHDCNTTCQTPKGAINTSLPFQNIHPITIGKCPKYVKSTKLRLATGLRNVPSIQSRGLFGAIAGFIEGGWTGMVDGWYGYHHQNEQGSGYAADLKSTQNAIDEITNKVNSVIEKMNTQFTAVGKEFNHLEKRIENLNKKVDDGFLDIWTYNAELLVLLENERTLDYHDSNVKNLYEKVRSQLKNNAKEIGNGCFEFYHKCDNTCMESVKNGTYDYPKYSEEAKLNREEIDGVKLESTRIYQILAIYSTVASSLVLVVSLGAISFWMCSNGSLQCRICI

SEQ ID NO: 5368 - protein, 566 aa, synthetic construct; identical to SEQ ID NO: 5351
  REGION 1..566: note = hemagglutinin__InfluenzaA__ADK98623

SEQ ID NO: 5369 - protein, 566 aa, synthetic construct; identical to SEQ ID NO: 2434
  REGION 1..566: note = hemagglutinin__InfluenzaA__ADK98634

SEQ ID NO: 5370 - protein, 566 aa, synthetic construct; identical to SEQ ID NO: 2434
  REGION 1..566: note = hemagglutinin__InfluenzaA__ADK98645

SEQ ID NO: 5371 - protein, 566 aa, synthetic construct; identical to SEQ ID NO: 5297
  REGION 1..566: note = hemagglutinin__InfluenzaA__ADK98656

SEQ ID NO: 5372 - protein, 566 aa, synthetic construct; identical to SEQ ID NO: 5364
  REGION 1..566: note = hemagglutinin__InfluenzaA__ADK98667

SEQ ID NO: 5373 - protein, 566 aa, synthetic construct
  REGION 1..566: note = hemagglutinin__InfluenzaA__ADK98678
MKTIIALSYILCLVFAQKLPGNDNSTATLCLGHHAVPNGTIVKTITNDQIEVTNATELVQSSSTGEICDSPHQILDGENCTLIDALLGDPQCDGFQNKKWDLFVERSKAYSNCYPYDVPDYASLRSLVASSGTLEFNNESFNWTGVTQNGTSSACIRRSNNSFFSRLNWLTHLKFKYPALNVTMPNNEQFDKLYIWGVHHPGTDNDQIFLYAQASGRITVSTKRSQQTVIPNIGSRPRVRNIPSRISIYWTIVKPGDILLINSTGNLIAPRGYFKIRSGKSSIMRSDAPIGKCNSECITQNGSIPNDKPFQNVNRITYGACPRYVKQNTLKLATGMRNVPEKQTRGIFGAIAGFIENGWEGMVDGWYGFRHQNSEGRGQAADLKSTQAAIDQINGKLNRLIGKTNEKFHQIEKEFSEVEGRIQDLEKYVEDTKIDLWSYNAELLVALENQHTIDLTDSEMNKLFEKTKKQLRENAEDMGNGCFKIYHKCDNACIGSIRNGTYDHDVYRDEALNNRFQIKGVELKSGYKDWILWISFAISCFLLCVALLGFIMWACQKGNIRCNICI

SEQ ID NO: 5374 - protein, 566 aa, synthetic construct; identical to SEQ ID NO: 2434
  REGION 1..566: note = hemagglutinin__InfluenzaA__ADK98689

SEQ ID NO: 5375 - protein, 566 aa, synthetic construct; identical to SEQ ID NO: 2434
  REGION 1..566: note = hemagglutinin__InfluenzaA__ADK98700

SEQ ID NO: 5376 - protein, 566 aa, synthetic construct; identical to SEQ ID NO: 2434
  REGION 1..566: note = hemagglutinin__InfluenzaA__ADK98711

SEQ ID NO: 5377 - protein, 566 aa, synthetic construct
  REGION 1..566: note = hemagglutinin__InfluenzaA__ADK98722
MKTIIALSYILCLVFAQKLPGNDNSTATLCLGHHAVPNGTIVKTITNDQIEVTNATELVQSSSTGEICDSPHQILDGENCTLIDALLGDPQCDGFQNKKWDLFVERSKAYSNCYPYDVPDYASLRSLVASSGTLEFNNESFNWTGVTQNGTSSACIRRSNNSFFSRLNWLTHLKFKYPALNVTMPNNEQFDKLYIWGVHHPGTDNDQIFLYAQASGRITVSTKGSQQTVIPNIGSRPRVRNIPSRISIYWTIVKPGDILLINSTGNLIAPRGYFKIRSGKSSIMRSDAPIGKCNSECITPNGSIPNDKPFQNVNRITYGACPRYVKQNTLKLATGMRNVPEKQTRGIFGAIAGFIENGWEGMVDGWYGFRHQNSEGRGQAADLKSTQAAIDQINGKLNRLIGKTNEKFHQIEKEFSEVEGRIQDLEKYVEDTKIDLWSYNAELLVALENQHTIDLTDSEMNKLFEKTKKQLRENAEDMGNGCFKIYHKCDNACIGSIRNGTYDHDVYRDEALNNRFQIKGVELKSGYKDWILWISFAISCFLLCVALLGFIMWACQKGNIRCNICI

SEQ ID NO: 5378 - protein, 566 aa, synthetic construct; identical to SEQ ID NO: 5351
  REGION 1..566: note = hemagglutinin__InfluenzaA__ADK98733

SEQ ID NO: 5379 - protein, 566 aa, synthetic construct; identical to SEQ ID NO: 2434
  REGION 1..566: note = hemagglutinin__InfluenzaA__ADK98744

SEQ ID NO: 5380 - protein, 566 aa, synthetic construct; identical to SEQ ID NO: 2434
  REGION 1..566: note = hemagglutinin__InfluenzaA__ADK98777

SEQ ID NO: 5381 - protein, 566 aa, synthetic construct; identical to SEQ ID NO: 2434
  REGION 1..566: note = hemagglutinin__InfluenzaA__ADK98788

SEQ ID NO: 5382 - protein, 566 aa, synthetic construct; identical to SEQ ID NO: 3613
  REGION 1..566: note = hemagglutinin__InfluenzaA__ADK98799

SEQ ID NO: 5383 - protein, 566 aa, synthetic construct
  REGION 1..566: note = hemagglutinin__InfluenzaA__ADK98810
MKTIIALSYILCLVFAQKLPGNDNSTATLCLGHHAVPNGTIVKTITNDQIEVTNATELVQSSSTGEICDSPHQILDGENCTLIDALLGDPQCDGFQNKKWDLFVERSKAYSNCYPYDVPDYASLRSLVASSGTLEFNNESFNWTGVTQNGTSSACIRRSNNSFFSRLNWLTHLKFKYPALNVTMPNNEQFDKLYIWGVHHPGTDNDQTFLYAQASGRITVSTKRSQQTVIPNIGSRPRVRNIPSRISIYWTIVKPGDILLINSTGNLIAPRGYFKIRSGKSSIMRSDAPIGKCNSECITPNGSIPNDKPFQNVNRITYGACPRYVKQNTLKLATGMRNVPEKQTRGIFGAIAGFIENGWEGMVDGWYGFRHQNSEGRGQAADLKSTQAAIDQINGKLNRLIGKTNEKFHQIEKEFSEVEGRIQDLEKYVEDTKIDLWSYNAELLVALENQHTIDLTDSEMNKLFEKTKKQLRENAEDMGNGCFKIYHKCDNACIGSIRNGTYDHNVYRDEALNNRFQIKEVELKSGYKDWILWISFAISCFLLCVALLGFIMWACQKGNIRCNICI

SEQ ID NO: 5384 - protein, 566 aa, synthetic construct
  REGION 1..566: note = hemagglutinin__InfluenzaA__ADK98821
MKTIIALSYILCLVFAQKLPGNDNSTATLCLGHHAVPNGTIVKTITNDQIEVTNATELVQSSSTGEICDSPHQILDGKNCTLIDALLGDPQCDGFQNKKWDLFVERSKAYSNCYPYDVPDYASLRSLVASSGTLEFNNESFNWTGVTQNGTSSACIRRSKNSFFSRLNWLTHLNFKYPALNVTMPNNEQFDKLYIWGVHHPGTDKDQIFLYAQASGRITVSTKRSQQTAIPNIGSRPRVRNIPSRISIYWTIVKPGDILLINSTGNLIAPRGYFKIRSGKSSIMRSDAPIGKCNSECITPNGSIPNDKPFQNVNRITYGACPRYVKQNTLKLATGMRNVPEKQTRGIFGAIAGFIENGWEGMVDGWYGFRHQNSEGRGQAADLKSTQAAIDQINGKLNRLIGKTNEKFHQIEKEFSEVEGRIQDLEKYVEDTKIDLWSYNAELLVALENQHTIDLTDSEMNKLFEKTRKQLRENAEDMGNGCFKIYHKCDNACIGSIRNGTYDHDVYRDEALNNRFQIKGVELKSGYKDWILWISFAISCFLLCVALLGFIMWACQKGNIRCNICI

SEQ ID NO: 5385 - protein, 566 aa, synthetic construct; identical to SEQ ID NO: 2434
  REGION 1..566: note = hemagglutinin__InfluenzaA__ADK98832

SEQ ID NO: 5386 - protein, 566 aa, synthetic construct; identical to SEQ ID NO: 5364
  REGION 1..566: note = hemagglutinin__InfluenzaA__ADK98843

SEQ ID NO: 5387 - protein, 566 aa, synthetic construct
  REGION 1..566: note = hemagglutinin__InfluenzaA__ADK98854
MKTIIALSYILCLVFTQKLPGNDNSTATLCLGHHAVPNGTIVKTITNDQIEVTNATELVQSSSTGEICDSPHQILDGENCTLIDALLGDPQCDGFQNKKWDLFVERSKAYSNCYPYDVPDYASLRSLVASSGTLEFNNESFNWTGVTQNGTSSACIRRSNNSFFSRLNWLTHLKFKYPALNVTMPNNEQFDKLYIWGVHHPGTDNDQIFLYAQASGRITVSTKRSQQTVIPNIGSRPRVRNIPSRISIYWTIVKPGDILLINSTGNLIAPRGYFKIRSGKSSIMRSDAPIGKCNSECITPNGSIPNDKPFQNVNRITYGACPRYVKQNTLKLATGMRNVPEKQTRGIFGAIAGFIENGWEGMVDGWYGFRHQNSEGRGQAADLKSTQAAIDQINGKLNRLIGKTNEKFHQIEKEFSEVEGRIQDLEKYVEDTKIDLWSYNAELLVALENQHTIDLTDSEMNKLFEKTKKQLRENAEDMGNGCFKIYHKCDNACIGSIRNGTYDHDVYRDEALNNRFQIKGVELKPGYKDWILWISFAISCFLLCVALLGFIMWACQKGNIRCNICI

SEQ ID NO: 5388 - protein, 566 aa, synthetic construct
  REGION 1..566: note = hemagglutinin__InfluenzaA__ADK98865
MKTIIALSYILCLVFAQKLPGSDNSTATLCLGHHAVPNGTIVKTITNDQIEVTNATELVQSSSTGEICDSPHQILDGENCTLIDALLGDPQCDDFQNKKWDLFVERSKAYSNCYPYDVPDYASLRSLVASSGTLEFNNESFNWTGVTQNGTSSACIRRSSNSFFSRLNWLTHLRFKYPALNVTMPNNEQFDKLYIWGVHHPGTDNDQIFLYAQASGRITVSTKRSQQTVIPNIGSRPRVRNIPSRISIYWTIVKPGDILLINSTGNLIAPRGYFKIRSGKSSIMRSDAPIGKCNSECITPNGSIPNDKPFQNVNRITYGACPRYVKQNTLKLATGMRNVPEKQTRGIFGAIAGFIENGWEGMVDGWYGFRHQNSEGRGQAADLKSTQAAIDQINGKLNRLIGKTNEKFHQIEKEFSEVEGRIQDLEKYVEDTKIDLWSYNAELLVALENQHTIDLTDSEMNKLFEKTKKQLRENAEDMGNGCFKIYHKCDNACIGSIRNGTYDHDVYRDEALNNRFQIKGVELKSGYKDWILWISFAISCFLLCVALLGFIMWACQKGNIRCNICI

SEQ ID NO: 5389 - protein, 566 aa, synthetic construct
  REGION 1..566: note = hemagglutinin__InfluenzaA__ADK98876
MKTIIALSYILCLVFAQKLPGNDNSTATLCLGHHAVPNGTIVKTITNDQIEVTNATELVQNSSTGEICDSPHQILDGKNCTLIDALLGDPQCDGFQNKKWDLFVERSKAYSNCYPYDVPDYASLRSLVASSGTLEFNNESFNWTGVTQNGTSSACIRRSKNSFFSRLNWLTHLNFKYPALNVTMPNNGQFDKLYIWGVHHPGTDKDQIFLYAQASGRITVSTKRSQQTVIPNIGSRPRVRNIPSRISIYWTIVKPGDILLINSTGNLIAPRGYFKIRSGKSSIMRSDAPIGKCNSECITPNGSIPNDKPFQNVNRITYGACPRYVKQNTLKLATGMRNVPEKQTRGIFGAIAGFIENGWEGMVDGWYGFRHQNSEGRGQAADLKSTQAAIDQINGKLNRLIGKTNEKFHQIEKEFSEVEGRIQDLEKYVEDTKIDLWSYNAELLVALENQHTIDLTDSEMNKLFEKTKKQLRENAEDMGNGCFKIYHKCDNACIGSIRNGTYDHDVYRDEALNNRFQIKGVELKSGYKDWILWISFAISCFLLCVALLGFIMWACQKGNIRCNICI

SEQ ID NO: 5390 - protein, 566 aa, synthetic construct; identical to SEQ ID NO: 5364
  REGION 1..566: note = hemagglutinin__InfluenzaA__ADK98887

SEQ ID NO: 5391 - protein, 566 aa, synthetic construct; identical to SEQ ID NO: 2434
  REGION 1..566: note = hemagglutinin__InfluenzaA__ADK98898

SEQ ID NO: 5392 - protein, 566 aa, synthetic construct
  REGION 1..566: note = hemagglutinin__InfluenzaA__ADK98909
MKTIIALSYILCLVFAQKLPGNDNSTATLCLGHHAVPNGTIVKTITNDQIEVTNATELVQISSTGEICDSPHQILDGENCTLIDALLGDPQCDGFQNKKWDLFVERSKAYSNCYPYDVPDYASLRSLVASSGTLEFNNESFNWTGVTQNGTSSACIRRSNNSFFSRLNWLTHLKFKYPALNVTMPNNEQFDKLYIWGVHHPGTDNDQIFLYAQASGRITVSTKRSQQTVIPNIGSRPRVRNIPSRISIYWTIVKPGDILLINSTGNLIAPRGYFKIRSGKSSIMRSDAPIGKCNSECITPNGSIPNDKPFQNVNRITYGACPRYVKQNTLKLATGMRNVPEKQTRGIFGAIAGFIENGWEGMVDGWYGFRHQNSEGRGQAADLKSTQAAIDQINGKLNRLIGKTNEKFHQIEKEFSEVEGRIQDLEKYVEDTKIDLWSYNAELLVALENQHTIDLTDSEMNKLFEKTKKQLRENAEDMGNGCFKIYHKCDNACIGSIRNGTYDHDVYRDEALNNRFQIKGVELKSGYKDWILWISFAISCFLLCVALLGFIMWACQKGNIRCNICI

SEQ ID NO: 5393 - protein, 566 aa, synthetic construct
  REGION 1..566: note = hemagglutinin__InfluenzaA__ADK98920
MKTIIALSYILCLVFAQKLPGNDNSTATLCLGHHAVPNGTIVKTITNDQIEVTNATELVQSSSTGEICDSPHQILDGKNCTLIDALLGDPQCDGFQNKKWDLFVERGKAYSNCYPYDVPDYASLRSLVASSGTLEFNNESFNWTGVTQNGTSSACIRRSKNSFFSRLNWLTHLNFKYPALNVTMPNNEQFDKLYIWGVHHPGTDKDQIFLYAQASGRITVSTKRSQQTVIPNIGSRPRVRNIPSRISIYWTIVKPGDILLINSTGNLIAPRGYFKIRSGKSSIMRSDAPIGKCNSECITPNGSIPNDKPFQNVNRITYGACPRYVKQSTLKLATGMRNVPEKQTRGIFGAIAGFIENGWEGMVDGWYGFRHQNSEGRGQAADLKSTQAAIDQINGKLNRLIGKTNEKFHQIEKEFSEVEGRIQDLEKYVEDTKIDLWSYNAELLVALENQHTIDLTDSEMNKLFEKTKKQLRENAEDMGNGCFKIYHKCDNACIGSIRNGTYDHDVYRDEALNNRFQIKGVELKSGYKDWILWISFAISCFLLCVALLGFIMWACQKGNIRCNICI

SEQ ID NO: 5394 - protein, 566 aa, synthetic construct; identical to SEQ ID NO: 2434
  REGION 1..566: note = hemagglutinin__InfluenzaA__ADK98931

SEQ ID NO: 5395 - protein, 566 aa, synthetic construct
  REGION 1..566: note = hemagglutinin__InfluenzaA__ADK98942
MKTIIALSYILCLVFAQKLPGNDNSTATLCLGHHAVPNGTIVKTITNDQIEVTNATELVQSSSTGEICDSPHQILDGENCTLIDALLGDPQCDGFQNKKWDLFVERSKAYSNCYPYDVPDYASLRSLVASSGTLEFNNESFNWTGVTQNGTSSACIRRSNNSFFSRLNWLTHLKFKYPALNVTMPNNEQFDKLYIWGVHHPGTDNDQIFLYAQASGRITVSTKRSQQTVISNIGSRPRVRNIPSRISIYWTIVKPGDILLINSTGNLIAPRGYFKIRSGKSSIMRSDAPIGKCNSECITPNGSIPNDKPFQNVNRITYGACPRYVKQNTLKLATGMRNVPEKQTRGIFGAIAGFIENGWEGMVDGWYGFRHQNSEGRGQAADLKSTQAAIDQINGKLNRLIGKTNEKFHQIEKEFSEVEGRIQDLEKYVEDTKIDLWSYNAELLVALENQHTIDLTDSEMNKLFEKTKKQLRENAEDMGNGCFKIYHKCDNACIGSIRNGTYDHNVYRDEALNNRFQIKGVELKSGYKDWILWISFAISCFLLCVALLGFIMWACQKGNIRCNICI

SEQ ID NO: 5396 - protein, 566 aa, synthetic construct
  REGION 1..566: note = hemagglutinin__InfluenzaA__ADK98953
MKTIIALSYMLCLVFAQKLPGNDNSTATLCLGHHAVPNGTIVKTITNDQIEVTNATELVQSSSTGEICDSPHQILDGENCTLIDALLGDPQCDGFQNKKWDLFVERSKAYSNCYPYDVPDYASLRSLIASSGTLEFNNESFNWTGVTQNGTSSACIRRSNNSFFSRLNWLTHLKFKYPALNVTMPNNEQFDKLYIWGVHHPGTDNDQIFLYAQASGRITVSTKRSQQTVIPNIGSRPRVRNIPSRISIYWTIVKPGDILLINSTGNLIAPRGYFKIRSGKSSIMRSDAPIGKCNSECITPNGSIPNDKPFQNVNRITYGACPRYVKQNTLKLATGMRNVPEKQTRGIFGAIAGFIENGWEGMVDGWYGFRHQNSEGRGQAADLKSTQAAIDQINGKLNRLIGKTNEKFHQIEKEFSEVEGRIQDLEKYVEDTKIDLWSYNAELLVALENQHTIDLTDSEMNKLFEKTKKQLRENAEDMGNGCFKIYHKCDNACIGSIRNGTYDHDVYRDEALNNRFQIKGVELKSGYKDWILWISFAISCFLLCVALLGFIMWACQKGNIRCNICI

SEQ ID NO: 5397 - protein, 566 aa, synthetic construct; identical to SEQ ID NO: 2434
  REGION 1..566: note = hemagglutinin__InfluenzaA__ADK98964

SEQ ID NO: 5398 - protein, 566 aa, synthetic construct; identical to SEQ ID NO: 5351
  REGION 1..566: note = hemagglutinin__InfluenzaA__ADK98975

SEQ ID NO: 5399 - protein, 566 aa, synthetic construct; identical to SEQ ID NO: 5396
  REGION 1..566: note = hemagglutinin__InfluenzaA__ADK98986

SEQ ID NO: 5400 - protein, 566 aa, synthetic construct; identical to SEQ ID NO: 3613
  REGION 1..566: note = hemagglutinin__InfluenzaA__ADK98997

SEQ ID NO: 5401 - protein, 566 aa, synthetic construct; identical to SEQ ID NO: 5396
  REGION 1..566: note = hemagglutinin__InfluenzaA__ADK99008

SEQ ID NO: 5402 - protein, 566 aa, synthetic construct
  REGION 1..566: note = hemagglutinin__InfluenzaA__ADK99030
MKTIIALSYILCLVFAQKLPGNDNSTATLCLGHHAVPNGTIVKTITNDQIEVTNATELVQSSSTGEICDSPHQILDGKNCTLIDALLGDPQCDGFQNKKWDLFVERSKAYSNCYPYDVPDYASLRSLVASSGTLEFNNESFNWTGVTQNGTSSACIRRSKNSFFSRLNWLTHLNFKYPALNVTMPNNERFDKLYIWGVHHPGTDKDQIFLYAQASGRITVSTKRSQQTVIPNIGSRPRVRNIPSRISIYWTIVKPGDILLINSTGNLIAPRGYFKIRSGKSSIMRSDAPIGKCNSECITPNGSIPNDKPFQNVNRITYGACPRYVKQNTLKLATGMRNVPEKQTRGIFGAIAGFIENGWEGMVDGWYGFRHQNSEGRGQAADLKSTQAAIDQINGKLNRLIGKTNEKFHQIEKEFSEVEGRIQDLEKYVEDTKIDLWSYNAELLVALENQHTIDLTDSEMNKLFEKTKKQLRENAEDMGNGCFKIYHKCDNACIGSIRNGTYDHDVYRDEALNNRFQIKGVELKSGYKDWILWISFAISCFLLCVALLGFIMWACQKGNIRCNICI

SEQ ID NO: 5403 - protein, 566 aa, synthetic construct
  REGION 1..566: note = hemagglutinin__InfluenzaA__ADK99041
MKTIIALSYILCLVFAQKLPGNDNSTATLCLGHHAVPNGTIVKTIANDQIEVTNATELVQSSSTGEICDSPHQILDGENCTLIDALLGDPQCDGFQNKKWDLFVERSKAYSNCYPYDVPDYASLRSLVASSGTLEFNNESFNWTGVTQNGTSSACIRRSNNSFFSRLNWLTHLKFKYPALNVTMPNNEQFDKLYIWGVHHPGTDNDQIFLYAQASGRITVSTKRSQQTVIPNIGSRPRVRNIPSRISIYWTIVKPGDILLINSTGNLIAPRGYFKIRSGKSSIMRSDAPIGKCNSECITPNGSIPNDKPFQNVNRITYGACPRYVKQNTLKLATGMRNVPEKQTRGIFGAIAGFIENGWEGMVDGWYGFRHQNSEGRGQAADLKSTQAAIDQINGKLNRLIGKTNEKFHQIEKEFSEVEGRIQDLEKYVEDTKIDLWSYNAELLVALENQHTIDLTDSEMNKLFEKTKKQLRENAEDMGNGCFKIYHKCDNACIGSIRNGTYDHDVYRDEALNNRFQIKGVELKSGYKDWILWISFAISCFLLCVALLGFIMWACQKGNIRCNICI

SEQ ID NO: 5404 - protein, 566 aa, synthetic construct; identical to SEQ ID NO: 5351
  REGION 1..566: note = hemagglutinin__InfluenzaA__ADK99063

SEQ ID NO: 5405 - protein, 566 aa, synthetic construct; identical to SEQ ID NO: 2434
  REGION 1..566: note = hemagglutinin__InfluenzaA__ADK99085

SEQ ID NO: 5406 - protein, 566 aa, synthetic construct; identical to SEQ ID NO: 2434
  REGION 1..566: note = hemagglutinin__InfluenzaA__ADK99096

SEQ ID NO: 5407 - protein, 566 aa, synthetic construct; identical to SEQ ID NO: 2434
  REGION 1..566: note = hemagglutinin__InfluenzaA__ADK99107

SEQ ID NO: 5408 - protein, 566 aa, synthetic construct
  REGION 1..566: note = hemagglutinin__InfluenzaA__ADK99118
MKTIIALSYILCLVFAQKLPGNDNSTATLCLGHHAVPNGTIVKTITNDQIEVTNATELVQSSSTGEICDIPHQILDGKNCTLIDALLGDPQCDGFQNKKWDLFVERSKAYSNCYPYDVPDYASLRSLVASSGTLEFNNESFNWTGVTQNGTSSACIRRSKNSFFSRLNWLTHLNFKYPALNVTMPNNEQFDKLYIWGVHHPGTDKDQIFLYAQASGRITVSTKRSQQTVIPNIGSRPRVRNIPSRISIYWTIVKPGDILLINSTGNLIAPRGYFKIRSGKSSIMRSDAPIGKCNSECITPNGSIPNDKPFQNVNRITYGACPRYVKQSTLKLATGMRNVPEKQTRGIFGAIAGFIENGWEGMVDGWYGFRHQNSEGRGQAADLKSTQAAIDQINGKLNRLIGKTNEKFHQIEKEFSEVEGRIQDLEKYVEDTKIDLWSYNAELLVALENQHTIDLTDSEMNKLFEKTKKQLRENAEDMGNGCFKIYHKCNNACIGSIRNGTYDHDVYRDEALNNRFQIKGVELKSGYKDWILWISFAISCFLLCVALLGFIMWACQKGNIRCNICI

SEQ ID NO: 5409 - protein, 566 aa, synthetic construct
  REGION 1..566: note = hemagglutinin__InfluenzaA__ADK99129
MKTIIALSYILCLVFAQKLPGNDNSTATLCLGHHAVPNGTIVKTITNDQIEVTNATELVQSSSTGEICDSPHQILDGKNCTLIDALLGDPQCDGFQNKKWDLFVERSKAYSNCYPYDVPDYASLRSLVASSGTLEFNNESFNWTGVTQNGTSSACIRRSKNSFFSRLNWLTHLNFKYPALNMTMPNNEQFDKLYIWGVHHPGTDKDQIFLYAQASGRITVSTKRSQQTVIPNIGSRPRVRNIPSRISIYWTIVKPGDILLINSTGNLIAPRGYFKIRSGKSSIMRSDAPIGKCNSECITPNGSIPNDKPFQNVNRITYGACPRYVKQSTLKLATGMRNVPEKQTRGIFGAIAGFIENGWEGMVDGWYGFRHQNSEGRGQAADLKSTQAAIDQINGKLNRLIGKTNEKFHQIEKEFSEVEGRIQDLEKYVEDTKIDLWSYNAELLVALENQHTIDLTDSEMNKLFEKTKKQLRENAEDMGNGCFKIYHKCNNACIGSIRNGTYDHDVYRDEALNNRFQIKGVELKSGYKDWILWISFAISCFLLCVALLGFIMWACQKGNIRCNICI

SEQ ID NO: 5410 - protein, 566 aa, synthetic construct; identical to SEQ ID NO: 5351
  REGION 1..566: note = hemagglutinin__InfluenzaA__ADK99140

SEQ ID NO: 5411 - protein, 566 aa, synthetic construct
  REGION 1..566: note = hemagglutinin__InfluenzaA__ADK99151
MKTIIALSYILCLVFAQKLPGNDNSTATLCLGHHAVPNGTIVKTITNDQIEVTNATELVQSSSTGEICDSPHQILDGKNCTLIDALLGDPQCDGLQNKKWDLFVERSKAYSNCYPYDVPDYASLRSLVASSGTLEFNNESFNWTGVTQNGTSSACIRRSKNSFFSRLNWLTHLNFKYPALNVTMPNNEQFDKLYIWGVHHPGTDKDQIFLYAQASGRITVSTKRSQQTAIPNIGSRPRVRNIPSRISIYWTIVKPGDILLINSTGNLIAPRGYFKIRSGKSSIMRSDAPIGKCNSKCITPNGSIPNDKPFQNVNRITYGACPRYVKQNTLKLATGMRNVPEKQTRGIFGAIAGFIENGWEGMVDGWYGFRHQNSEGRGQAADLKSTQAAIDQINGKLNRLIGKTNEKFHQIEKEFSEVEGRIQDLEKYVEDTKIDLWSYNAELLVALENQHTIDLTDSEMNKLFEKTKKQLRENAEDMGNGCFKIYHKCDNACIGSIRNGTYDHDVYRDEALNNRFQIKGVELKSGYKDWILWISFAISCFLLCVALLGFIMWACQKGNIRCNICI

SEQ ID NO: 5412 - protein, 566 aa, synthetic construct; identical to SEQ ID NO: 5351
  REGION 1..566: note = hemagglutinin__InfluenzaA__ADK99162

SEQ ID NO: 5413 - protein, 566 aa, synthetic construct
  REGION 1..566: note = hemagglutinin__InfluenzaA__ADK99173
MKTIIALSYILCLVFAQKLPGNDNSTATLCLGHHAVPNGTIVKTITNDQIEVTNATELIQSSSTGEICDSPHQILDGENCTLIDALLGDPQCDGLQNKKWDLFVERSKAYSNCYPYDVPDYASLRSLVASSGTLEFNNESFNWTGVTQNGTSSACIRRSNNSFFSRLNWLTHLKFKYPALNVTMPNNEQFDKLYIWGVHHPGTDNDQIFLYAQASGRITVSTKRSQQTVIPNIGSRPRVRNIPSRISIYWTIVKPGDILLINSTGNLIAPRGYFKIRSGKSSIMRSDAPIGKCNSECITPNGSIPNDKPFQNVNRITYGACPRYVKQNTLKLATGMRNVPEKQTRGIFGAIAGFIENGWEGMVDGWYGFRHQNSEGRGQAADLKSTQAAIDQINGKLNRLIGKTNEKFHQIEKEFSEVEGRIQDLEKYVEDTKIDLWSYNAELLVALENQHTIDLTDSEMNKLFEKTKKQLRENAEDMGNGCFKIYHKCDNACIGSIRNGTYDHDVYRDEALNNRFQIKGVELKSGYKDWILWISFAISCFLLCVALLGFIMWACQKGNIRCNICI

SEQ ID NO: 5414 - protein, 566 aa, synthetic construct
  REGION 1..566: note = hemagglutinin__InfluenzaA__ADK99184
MKTIIALSYILCLVSAQKLPGNDNSTATLCLGHHAVPNGTIVKTITNDQIEVTNATELVQSSSTGEICNSPHQILDGENCTLIDALLGDPQCDGFQNKKWDLFVERSKAYSNCYPYDVPDYASLRSLVASSGTLEFNNESFNWTGVTQNGTSSACIRRSNNSFFSRLNWLTHLKFKYPALNVTMPNNEQFDKLYIWGVHHPGTDNDQIFLYAQASGRITVSTKRSQQTVIPNIGSRPRVRNIPSRISIYWTIVKPGDILLINSTGNLIAPRGYFKIRSGKSSIMRSDAPIGKCNSECITPNGSIPNDKPFQNVNRITYGACPRYVKQNTLKLATGMRNVPEKQTRGIFGAIAGFIENGWEGMVDGWYGFRHQNSEGRGQAADLKSTQAAIDQINGKLNRLIGKTNEKFHQIEKEFSEVEGRIQDLEKYVEDTKIDLWSYNAELLVALENQHTIDLTDSEMNKLFEKTKKQLRENAEDMGNGCFKIYHKCDNACIGSIRNGTYDHDVYRDEALNNRFQIKGVELKSGYKDWILWISFAISCFLLCVALLGFIMWACQKGNIRCNICI

SEQ ID NO: 5415 - protein, 566 aa, synthetic construct; identical to SEQ ID NO: 2434
  REGION 1..566: note = hemagglutinin__InfluenzaA__ADK99195

SEQ ID NO: 5416 - protein, 566 aa, synthetic construct
  REGION 1..566: note = hemagglutinin__InfluenzaA__ADK99206
MKTIIALSYILCLVFAQKLPGNDNSTATLCLGHHAVPNGTVVKTITNDQIEVTNATELVQSSSTGEICDSPHQILDGKNCTLIDALLGDPQCDGFQNKKWDLFVERSKAYSNCYPYDVPDYASLRSLVASSGTLEFNNESFNWTGVTQNGTSSACIRRSKNSFFSRLNWLTHLNFKYPALNVTMPNNEQFDKLYIWGVHHPGTDKDQIFLYAQASGRITVSTKRSQQTVIPNIGSRPRVRNIPSRVSIYWTIVKPGDILLINSTGNLIAPRGYFKIRSGKSSIMRSDAPIGKCNSECITPNGSIPNDKPFQNVNRITYGACPRYVKQNTLKLATGMRNVPEKQTRGIFGAIAGFIENGWEGMVDGWYGFRHQNSEGRGQAADLKSTQAAIDQINGKLNRLIGKTNEKFHQIEKEFSEVEGRIQDLEKYVEDTKIDLWSYNAELLVSLENQHTIDLTDSEMNKLFEKTKKQLRENAEDMGNGCFKIYHKCDNACIGSIRNGTYDHDVYRDEALNNRFQIKGVELKSGYKDWILWISFAISCFLLCVALLGFIMWACQKGNIRCNICI

SEQ ID NO: 5417 - protein, 566 aa, synthetic construct; identical to SEQ ID NO: 5351
  REGION 1..566: note = hemagglutinin__InfluenzaA__ADK99217

SEQ ID NO: 5418 - protein, 566 aa, synthetic construct; identical to SEQ ID NO: 5351
  REGION 1..566: note = hemagglutinin__InfluenzaA__ADK99228

SEQ ID NO: 5419 - protein, 566 aa, synthetic construct
  REGION 1..566: note = hemagglutinin__InfluenzaA__ADK99239
MKTIIALSYILCLVFAQKLPGNDNSTATLCLGHHAVPNGTIVKTITNDQIEVTNATELVQSSSTGEICDSPHQILDGKNCTLIDALLGDPQCDGFQNKKWDLFVERSKAYSNCYPYDVPDYASLRSLVASSGTLEFNNESFNWTGVTQNGTSSACIRRSKNSFFSRLNWLTHLNFKYPALNVTMPNNEQFDKLYIWGVHHPGTDKDQIFLYAQASGRITVSTKRSQQTVIPNIGSRPRVRNIPSRISIYWTIVKPGDILLINSTGNLIAPRGYFKIRSGKSSIMRSDAPIGKCNSECITPNGSIPNDKPFQNVNRITYGACPRYVKQNTLKLATGMRNVPEKQTRGIFGAIAGFIENGWEGMVDGWYGFRHQNSEGRGQAADLKSTQAAIDQINGKLNRLIGKTNEKFHQIEKEFSEVEGRIQDLEKYVEDTKIDLWSYNAELLVALENQHTIDLTDSEMNKLFEKTKKQLRENAEDMGNGCFKIYHKCDNACIGSIRNGTYDHDVYRDEALNNRFQIKGVELKSGYKDWILWISFAISCFLLCVALLGFIMWACQKGNIRCNICI

SEQ ID NO: 5420 - protein, 566 aa, synthetic construct
  REGION 1..566: note = hemagglutinin__InfluenzaA__ADK99250
MKTIIALSYILCLVFAQKLPGNDNSTATLCLGHHAVPNGTIVKTITNDQIEVTNATELVQSSSTGEICDSPHQILDGENCTLIDALLGDPQCDGFQNKKWDLFVERSKAYSNCYPYDVPDYASLRSLVASSGTLEFNNESFNWTGVTQNGTSSACIRRSNNSFFSRLNWLTHLKFKYPALNVTMPNNEQFDKLYIWGVHHPGTDNDQIFLYAQASGRITVSTKRSQQTVIPNIGSRPRVRNIPSRISIYWTIVKPGDILLINSTGNLIAPRGYFKIRSGKSSIMRSDAPIGKCNSECITPNGSIPNDKPFQNVNRITYGACPRYVKQNTLKLATGMRNVPEKQTRGIFGAIAGFIENGWEGMVDGWYGFRHQNSEGRGQAADLKSTQAAIDQINGKLNRLIGKTNEKFHQIEKEFSEVEGRIQDIEKYVEDTKIDLWSYNAELLVALENQHTIDLTDSEMNKLFEKTKKQLRENAEDMGNGCFKIYHKCDNACIGSIRNGTYDHDVYRDEALNNRFQIKGVELKSGYKDWILWISFAISCFLLCVALLGFIMWACQKGNIRCNICI

SEQ ID NO: 5421 - protein, 566 aa, synthetic construct; identical to SEQ ID NO: 5351
  REGION 1..566: note = hemagglutinin__InfluenzaA__ADK99261

SEQ ID NO: 5422 - protein, 566 aa, synthetic construct
  REGION 1..566: note = hemagglutinin__InfluenzaA__ADK99283
MKTIIALSYILCLVFAQKLPGNDNSTATLCLGHHAVPNGTIVKTITNDQIEVTNATELVQSSSTGEICDSPHQILDGKNCTLIDALLGDPQCDGFQNKKWDLFVERSKAYSNCYPYDVPDYASLRSLVASSGTLEFNNESFNWTGVTQNGTSSACIRRSKNSFFSRLNWLTHLNFKYPALNVTMPNNEQFDKLYIWGVHHPGTDKDQIFLYAQASGRITVSTKRSQQTVIPNIGSRPRVRNIPSRISIYWTIVKPGDILLINSTGNLIAPRGYFKIRSGKSSIMRSDAPIGKCNSECITPNGSIPNDKPFQNVNRITYGACPRYVKQNTLKLATGMRNVPEKQTRGIFGAIAGFIENGWEGMVDGWYGFRHQNSEGRGQAADLKSTQAAIDQINGKLNRLIGKTNEKFHQIEKEFSEVEGRIQDLERYVEDTKIDLWSYNAELLVALENQHTIDLTDSEMNKLFEKTKKQLRENAEDMGNGCFKIYHKCDNACIGSIRNGTYDHDVYRDEALNNRFQIKGVELKSGYKDWILWISFAISCFLLCVALLGFIMWACQKGNIRCNICI

SEQ ID NO: 5423 - protein, 566 aa, synthetic construct
  REGION 1..566: note = hemagglutinin__InfluenzaA__ADK99294
MKTIIALSYILCLVFAQKLPGNDNSTATLCLGHHAVPNGTIVKTITNDQIEVTNATELVQSSSTGEICDSPHQILDGENCTLIDALLGDPQCDGFQDKKWDLFVERSKAYSNCYPYDVPDYASLRSLVASSGTLEFNNESFNWTGVTQNGTSSACIRRSNNSFFSRLNWLTHLNFKYPALNVTMPNNEQFDKLYIWGVHHPGTDKDQIFLYAQASGRITVSTKRSQQAVIPNIGSRPRVRNIPSRISIYWTIVKPGDILLINSTGNLIAPRGYFKIRSGKSSIMRSDAPIGKCNSECITPNGSIPNDKPFQNVNRITYGACPRYVKQNTLKLATGMRNVPEKQTRGIFGAIAGFIENGWEGMVDGWYGFRHQNSEGRGQAADLKSTQAAIDQINGKLNRLIGKTNEKFHQIEKEFSEVEGRIQDLEKYVEDTKIDLWSYNAELLVALENQHTIDLTDSEMNKLFEKTKKQLRENAEDMGNGCFKIYHKCDNACIGSIRNGTYDHDVYRDEALNNRFQIKGVELKSGYKDWILWISFAISCFLLCVALLGFIMWACQKGNIRCNICI

SEQ ID NO: 5424 - protein, 566 aa, synthetic construct; identical to SEQ ID NO: 2434
  REGION 1..566: note = hemagglutinin__InfluenzaA__ADK99305

SEQ ID NO: 5425 - protein, 566 aa, synthetic construct; identical to SEQ ID NO: 2434
  REGION 1..566: note = hemagglutinin__InfluenzaA__ADL27989

SEQ ID NO: 5426 - protein, 566 aa, synthetic construct
  REGION 1..566: note = hemagglutinin__InfluenzaA__ADL28000
MKTIIALSYILCLVFAQKLPGNDNSTATLCLGHHAVPNGTMVKTITNDQIEVTNATELVQSSSTGEICDSPHQILDGKNCTLIDALLGDPQCDGFQNKKWDLFVERSKAYSNCYPYDVPDYASLRSLVASSGTLEFNNESFNWTGVTQNGTSSACIRRSKNSFFSRLNWLTHLNFKYPALNVTMPNNEQFDKLYIWGVHHPGTDKDQIFLYAQASERITVSTKRSQQTVIPNIGSRPRVRNIPSRISIYWTIVKPGDILLINSTGNLIAPRGYFKIRSGKSSIMRSDAPIGKCNSECITPNGSIPNDKPFQNVNRITYGACPRYVKQSTLKLATGMRNVPEKQTRGIFGAIAGFIENGWEGMVDGWYGFRHQNSEGRGQAADLKSTQAAIDQINGKLNRLIGKTNEKFHQIEKEFSEVEGRIQDLEKYVEDTKIDLWSYNAELLVALENQHTIDLTDSEMNKLFEKTKKQLRENAEDMGNGCFKIYHKCDNACIGSIRNGTYDHDVYRDEALNNRFQIKGVELKSGYKDWILWISFAISCFLLCVALLGFIMWACQKGNIRCNICI

SEQ ID NO: 5427 - protein, 566 aa, synthetic construct
  REGION 1..566: note = hemagglutinin__InfluenzaA__ADL28011
MKTIIALSYILCLVFAQKLPGNDNSTATLCLGHHAVPNGTIVKTITNDQIEVTNATELVQSSSTGEICDSPHQILDGENCTLIDALLGDPQCDGFQNKKWDLFVERSKAYSNCYPYDVPDYASLRSLVASSGTLEFNNESFNWTGVTQNGTSSACIRRSNNSFFSRLNWLTHLKFKYPALNVTMPNNEQFDKLYIWGVHHPGTDNDQIFLYAQASGRITVSTRRSQQTVIPNIGSRPRVRNIPSRISIYWTIVKPGDILLINSTGNLIAPRGYFKIRSGKSSIMRSDAPIGKCNSECITPNGSIPNDKPFQNVNRITYGACPRYVKQNTLKLATGMRNVPEKQTRGIFGAIAGFIENGWEGMVDGWYGFRHQNSEGRGQAADLKSTQAAIDQINGKLNRLIGKTNEKFHQIEKEFSEVEGRIQDLEKYVEDTKIDLWSYNAELLVALENQHTIDLTDSEMNKLFEKTKKQLRENAEDMGNGCFKIYHKCDNACIGSIRNGTYDHDVYRDEALNNRFQIKGVELKSGYKDWILWISFAISCFLLCVALLGFIMWACQKGNIRCNICI

SEQ ID NO: 5428 - protein, 566 aa, synthetic construct; identical to SEQ ID NO: 5351
  REGION 1..566: note = hemagglutinin__InfluenzaA__ADL28022

SEQ ID NO: 5429 - protein, 566 aa, synthetic construct; identical to SEQ ID NO: 2434
  REGION 1..566: note = hemagglutinin__InfluenzaA__ADL28033

SEQ ID NO: 5430 - protein, 566 aa, synthetic construct; identical to SEQ ID NO: 3613
  REGION 1..566: note = hemagglutinin__InfluenzaA__ADL28044

SEQ ID NO: 5431 - protein, 566 aa, synthetic construct
  REGION 1..566: note = hemagglutinin__InfluenzaA__ADL28055
MKTIVALSYILCLVFAQKLPGNDNSTATLCLGHHAVPNGTIVKTITNDQIEVTNATELVQSSSTGEICDSPHQILDGENCTLIDALLGDPQCDGFQNKKWDLFVERSKAYSNCYPYDVPDYASLRSLVASSGTLEFNNESFNWTGVTQNGTSSACIRRSNNSFFSRLNWLTHLKFKYPALNVTMPNNEQFDKLYIWGVHHPGTDNDQIFLYAQASGRITVSTKRSQQTVIPNIGSRPRVRNIPSRISIYWTIVKPGDILLINSTGNLIAPRGYFKIRSGKSSIMRSDAPIGKCNSECITPNGSIPNDKPFQNVNRITYGACPRYVKQNTLKLATGMRNVPEKQTRGIFGAIAGFIENGWEGMVDGWYGFRHQNSEGRGQAADLKSTQAAIDQINGKLNRLIGKTNEKFHQIEKEFSEVEGRIQDLEKYVEDTKIDLWSYNAELLVALENQHTIDLTDSEMNKLFEKTKKQLRENAEDMGNGCFKIYHKCDNACIGSIRNGTYDHDVYRDEALNNRFQIKGVELKSGYKDWILWISFAISCFLLCVALLGFIMWACQKGNIRCNICI

SEQ ID NO: 5432 - protein, 566 aa, synthetic construct; identical to SEQ ID NO: 2434
  REGION 1..566: note = hemagglutinin__InfluenzaA__ADL28066

SEQ ID NO: 5433 - protein, 566 aa, synthetic construct; identical to SEQ ID NO: 5351
  REGION 1..566: note = hemagglutinin__InfluenzaA__ADL28077

SEQ ID NO: 5434 - protein, 566 aa, synthetic construct
  REGION 1..566: note = hemagglutinin__InfluenzaA__ADL28088
MKTIIALSYILCLVFAQKLPGNDNSTATLCLGHHAVPNGTIVKTITNDQIEVTNATELVQSSSTGEICDSPHQILDGENCTLIDALLGDPQCDGFQNKKWDLFVERSKAYSNCYPYDVPDYASLRSLVASSGTLEFNNESFNWTGVTQNGTSSACIRRSNNSFFSRLNWLTHLKFKYPALNVTMPNNEQFDKLYIWGVHHPGTDNDQIFLYSQASGRITVSTKRSQQTVIPNIGSRPRVRNIPSRISIYWTIVKPGDILLINSTGNLIAPRGYFKIRSGKSSIMRSDAPIGKCNSECITPNGSIPNDKPFQNVNRITYGACPRYVKQNTLKLATGMRNVPEKQTRGIFGAIAGFIENGWEGMVDGWYGFRHQNSEGRGQAADLKSTQAAIDQINGKLNRLIGKTNEKFHQIEKEFSEVEGRIQDLEKYVEDTKIDLWSYNAELLVALENQHTIDLTDSEMNKLFEKTKKQLRENAEDMGNGCFKIYHKCDNACIGSIRNGTYDHDVYRDEALNNRFQIKGVELKSGYKDWILWISFAISCFLLCVALLGFIMWACQKGNIRCNICI

SEQ ID NO: 5435 - protein, 566 aa, synthetic construct; identical to SEQ ID NO: 2434
  REGION 1..566: note = hemagglutinin__InfluenzaA__ADL28099

SEQ ID NO: 5436 - protein, 566 aa, synthetic construct
  REGION 1..566: note = hemagglutinin__InfluenzaA__ADL28110
MKTIIALSYILCLVFAQKLPGNDNSTATLCIGHHAVPNGTIVKTITNDQIEVTNATELVQNSSTGEICDSPHQILDGKNCTLIDALLGDPQCDGFQNKKWDLFVERSKAYSNCYPYDVPDYASLRSLVASSGTLEFNNESFNWTGVTQNGTSSACIRRSKNSFFSRLNWLTHLNFKYPALNVTMPNNEQFDKLYIWGVHHPGTDKDQIFLYAQASGRITVSTKRSQQTAIPNIGSRPRVRNIPSRISIYWTIVKPGDILLINSTGNLIAPRGYFKIRSGKSSIMRSDAPIDKCNSECITPNGSIPNDKPFQNVNRITYGACPRYVKQNTLKLATGMRNVPEKQTRGIFGAIAGFIENGWEGMVDGWYGFRHQNSEGRGQAADLKSTQAAIDQINGKLNRLIGKTNEKFHQIEKEFSEVEGRIQDLEKYVEDTKIDLWSYNAELLVALENQHTIDLTDSEMNKLFEKTKKQLRENAEDMGNGCFKIYHKCDNACIGSIRNGTYDHDVYRDEALNNRFQIKGVELKSGYKDWILWISFAISCFLLCVALLGFIMWACQKGNIRCNICI

SEQ ID NO: 5437 - protein, 566 aa, synthetic construct
  REGION 1..566: note = hemagglutinin__InfluenzaA__ADL28126
MKTIIALSYILCLVFAQKLPGNDNSTATLCLGHHAVPNGTIVKTITNDQIEVTNATELVQSSSTGEICDSPHQILDGENCTLIDALLGDPQCDGFQNKKWDLFVERSKAYSNCYPYDVPDYASLRSLVASSGTLEFNNESFNWTGVNQNGTSSACIRRSNNSFFSRLNWLTHLKFKYPALNVTMPNNEQFDKLYIWGVHHPGTDNDQIFLYAQASGRITVSTKRSQQTVIPNIGSRPRVRNIPSRISIYWTIVKPGDILLINSTGNLIAPRGYFKIRSGKSSIMRSDAPIGKCNSECITPNGSIPNDKPFQNVNRITYGACPRYVKQNTLKLATGMRNVPEKQTRGIFGAIAGFIENGWEGMVDGWYGFRHQNSEGRGQAADLKSTQAAIDQINGKLNRLIGKTNEKFHQIEKEFSEVEGRIQDLEKYVEDTKIDLWSYNAELLVALENQHTIDLTDSEMNKLFEKTKKQLRENAEDMGNGCFKIYHKCDNACIGSIRNGTYDHDVYRDEALNNRFQIKGVELKSGYKDWILWISFAISCFLLCVALLGFIMWACQKGNIRCNICI

SEQ ID NO: 5438 - protein, 566 aa, synthetic construct
  REGION 1..566: note = hemagglutinin__InfluenzaA__ADL28137
MKTIIALSYILCLVSAQKLPGNDNSTATLCLGHHAVPNGTIVKTITNDQIEVTNATELVQSSSTGEICDGPHQILDGENCTLIDALLGDPQCDGFQNKKWDLFVERSKAYSNCYPYDVPDYASLRSLVASSGTLEFNNESFNWTGVTQNGTSSACIRRSNNSFFSRLNWLTHLKFKYPALNVTMPNNEQFDKLYIWGVHHPGTDNDQIFLYAQASGRITVSTKRSQQTVIPNIGSRPRVRNIPSRISIYWTIVKPGDILLINSTGNLIAPRGYFKIRSGKSSIMRSDAPIGKCNSECITPNGSIPNDKPFQNVNRITYGACPRYVKQNTLKLATGMRNVPEKQTRGIFGAIAGFIENGWEGMVDGWYGFRHQNSEGRGQAADLKSTQAAIDQINGKLNRLIGKTNEKFHQIEKEFSEVEGRIQDLEKYVEDTKIDLWSYNAELLVALENQHTIDLTDSEMNKLFEKTKKQLRENAEDMGNGCFKIYHKCDNACIGSIRNGTYDHDVYRDEALNNRFQIKGVELKSGYKDWILWISFAISCFLLCVALLGFIMWACQKGNIRCNICI

SEQ ID NO: 5439 - protein, 566 aa, synthetic construct; identical to SEQ ID NO: 2434
  REGION 1..566: note = hemagglutinin__InfluenzaA__ADL28148

SEQ ID NO: 5440 - protein, 566 aa, synthetic construct; identical to SEQ ID NO: 5351
  REGION 1..566: note = hemagglutinin__InfluenzaA__ADL28170

SEQ ID NO: 5441 - protein, 566 aa, synthetic construct; identical to SEQ ID NO: 2434
  REGION 1..566: note = hemagglutinin__InfluenzaA__ADL28181

SEQ ID NO: 5442 - protein, 566 aa, synthetic construct; identical to SEQ ID NO: 5346
  REGION 1..566: note = hemagglutinin__InfluenzaA__ADL28192

SEQ ID NO: 5443 - protein, 566 aa, synthetic construct; identical to SEQ ID NO: 5352
  REGION 1..566: note = hemagglutinin__InfluenzaA__ADL28203

SEQ ID NO: 5444 - protein, 566 aa, synthetic construct; identical to SEQ ID NO: 3411
  REGION 1..566: note = hemagglutinin__InfluenzaA__ADL28214

SEQ ID NO: 5445 - protein, 566 aa, synthetic construct
  REGION 1..566: note = hemagglutinin__InfluenzaA__ADL28225
MKTIIALSYILCLVFAQKLPGNDNSTATLCLGHHAVPNGTIVKTITNDQIEVTNATELVQSSSTGEICDSPHQILDGENCTLIDALLGDPQCDGFQNKKWDLFVERSKAYSNCYPYDVPDYASLRSLVASSGTLEFNNESFNWTGVTQNGTSSACIRRSNNSFFSRLNWLTHLKFKYPALNVTMPNNEQFDKLYIWGVHHPGTDNDQIFLYSQASGRITVSTKRSQQTVIPNIGSRPRVRNIPSRISIYWTIVKPGDILLINSTGNLIAPRGYFKIRSGKSSIMRSDAPIGKCNSECITPNGSIPNDKPFQNVNRITYGACPRYVKQNTLKLATGMRNVPEKQTRGIFGAIAGFIENGWEGMVDGWYGFRHQNSEGRGQAADLKSTQAAIDQINGKLNRLIGKTNEKFHQIEKEFSEVEGRIQDLEKYVEDTKTDLWSYNAELLVALENQHTIDLTDSEMNKLFEKTKKQLRENAEDMGNGCFKIYHKCDNACIGSIRNGTYDHDVYRDEALNNRFQIKGVELKSGYKDWILWISFAISCFLLCVALLGFIMWACQKGNIRCNICI

SEQ ID NO: 5446 - protein, 566 aa, synthetic construct; identical to SEQ ID NO: 5351
  REGION 1..566: note = hemagglutinin__InfluenzaA__ADL28236

SEQ ID NO: 5447 - protein, 566 aa, synthetic construct; identical to SEQ ID NO: 2434
  REGION 1..566: note = hemagglutinin__InfluenzaA__ADL28247

SEQ ID NO: 5448 - protein, 566 aa, synthetic construct; identical to SEQ ID NO: 5364
  REGION 1..566: note = hemagglutinin__InfluenzaA__ADL28258

SEQ ID NO: 5449 - protein, 566 aa, synthetic construct; identical to SEQ ID NO: 2434
  REGION 1..566: note = hemagglutinin__InfluenzaA__ADL28370

SEQ ID NO: 5450 - protein, 566 aa, synthetic construct; identical to SEQ ID NO: 2669
  REGION 1..566: note = hemagglutinin__InfluenzaA__ADL29672

SEQ ID NO: 5451 - protein, 566 aa, synthetic construct; identical to SEQ ID NO: 2911
  REGION 1..566: note = hemagglutinin__InfluenzaA__ADL29682

SEQ ID NO: 5452 - protein, 566 aa, synthetic construct; identical to SEQ ID NO: 2669
  REGION 1..566: note = hemagglutinin__InfluenzaA__ADL29692

SEQ ID NO: 5453 - protein, 566 aa, synthetic construct
  REGION 1..566: note = hemagglutinin__InfluenzaA__ADL29702
MKAILVVLLYTFATANADTLCIGYHANNSTDTVDTVLEKNVTVTHSVNLLEDKHNGKLCKLRGVAPLHLGKCNIAGWILGNPECESLSTASSWSYIVETSSSDNGTCYPGDFIDYEELREQLSSVSSFERFEIFPKTSSWPNHDSNKGVTAACPHAGAKSFYKNLIWLVKKGNSYPKLSKSYINDKGKEVLVLWGIHHPSTSADQQSLYQNADTYVFVGTSRYSKKFKPEIAIRPKVRDQEGRMNYYWTLVEPGDKITFEATGNLVVPRYAFAMERNAGSGIIISDTPVHDCNTTCQTPKGAINTSLPFQNIHPITIGKCPKYVKSTKLRLATGLRNVPSIQSRGLFGAIAGFIEGGWTGMVDGWYGYHHQNEQGSGYAADLKSTQNAIDEITNKVNSVIEKMNTQFTAVGKEFNHLEKRIENLNKKIDDGFLDIWTYNAELLVLLENERTLDYHDSNVKNLYEKVRNQLKNNAKEIGNGCFEFYHKCDNTCMESVKNGTYDYPKYSEEAKLNREEIDGVKLESTRIYQILAIYSTVASSLVLVVSLGAISFWMCSNGSLQCRICI

SEQ ID NO: 5454 - protein, 566 aa, synthetic construct; identical to SEQ ID NO: 2669
  REGION 1..566: note = hemagglutinin__InfluenzaA__ADL29730

SEQ ID NO: 5455 - protein, 566 aa, synthetic construct; identical to SEQ ID NO: 2669
  REGION 1..566: note = hemagglutinin__InfluenzaA__ADL29740

SEQ ID NO: 5456 - protein, 566 aa, synthetic construct; identical to SEQ ID NO: 2669
  REGION 1..566: note = hemagglutinin__InfluenzaA__ADL29750

SEQ ID NO: 5457 - protein, 566 aa, synthetic construct
  REGION 1..566: note = hemagglutinin__InfluenzaA__ADL29760
MKAILVVLLYTFATANADTLCIGYHANNSTDTVDTVLEKNVTVTHSVNLLEYKHNGKLCKLRGVAPLHLGKCNIAGWILGNPECESLSTASSWSYIVETSSSDNGTCYPGDFIDYEELREQLSSVSSFERFEIFPKTSSWPNHDSNKGVTAACPHAGAKSFYKNLIWLVKKGNSYPKLSKSYINDKGKEVLVLWGIHHPSTSADQQSLYQNADAYVFVGTSRYSKKFKPEIAIRPKVRDQEGRMNYYWTLVEPGDKITFEATGNLVVPRYAFAMERNAGSGIIISDTPVHDCNTTCQTPKGAINTSLPFQNIHPITIGKCPKYVKSTKLRLATGLRNVPSIQSRGLFGAIAGFIEGGWTGMVDGWYGYHHQNEQGSGYAADLKSTQNAIDEITNKVNSVIEKMNTQFTAVGKEFNHLEKRIENLNKKVDDGFLDIWTYNAELLVLLENERTLDYHDSNVKNLYEKVRSQLKNNAKEIGNGCFEFYHKCDNTCMESVKNGTYDYPKYSEEAKLNREEIDGVKLESTRIYQILAIYSTVASSLVLVVSLGAISFWMCSNGSLQCRICI

SEQ ID NO: 5458 - protein, 566 aa, synthetic construct; identical to SEQ ID NO: 2669
  REGION 1..566: note = hemagglutinin__InfluenzaA__ADL29770

SEQ ID NO: 5459 - protein, 566 aa, synthetic construct; identical to SEQ ID NO: 4169
  REGION 1..566: note = hemagglutinin__InfluenzaA__ADL29780

SEQ ID NO: 5460 - protein, 566 aa, synthetic construct
  REGION 1..566: note = hemagglutinin__InfluenzaA__ADL29879
MKAILVVLLYTFATANADTLCIGYHANNSTDTVDTVLEKNVTVTHSVNLLEDKHNGKLCKLRGVAPLHLGKCNIAGWILGNPECESLSTASSWSYIVETSSSDNGTCYPGDFIDYEELREQLSSVSSFERFEIFPKTSSWPNHDSNKGVTAACPHAGAKSFYKNLIWLVKKGNSYPKLSKSYINDKGKEVLVLWGIHHPSTSADQQSLYQNADSYVFVGTSKYSKKFKPEIAIRPKVRDQEGRMNYYWTLVEPGDKITFEATGNLVVPRYAFAMERNAGSGIIISDTPVHDCNTTCQTPKGAINTSLPFQNIHPITIGKCPKYVKSTKLRLATGLRNVPSIQSRGLFGAIAGFIEGGWTGMVDGWYGYHHQNEQGSGYAADLKSTQNAIDEITNKVNSVIEKMNTQFTAVGKEFNHLEKRIENLNKKVDDGFLDIWTYNAELLVLLENERTLDYHDSNVKNLYEKVRSQLKNNAKEIGNGCFEFYHKCDNTCMESVKNGTYDYPKYSEEAKLNREEIDGVKLESTRIYQILAIYSTVASSLVLVVSLGAISFWMCSNGSLQCRICI

SEQ ID NO: 5461 - protein, 566 aa, synthetic construct
  REGION 1..566: note = hemagglutinin__InfluenzaA__ADL32017
MKAILVVLLYTFATANADTLCIGYHANNSTDTVDTVLEKNVTVTHSVNLLEDKHNGKLCQLRGVAPLHLGKCNIAGWILGNPECESLSTASSWSYIVETSSSDNGTCYPGDFIDYEELREQLSSVSSFERFEIFPKTSSWPNHDSNKGVTAACPHAGAKSFYKNLIWLVKKGNSYPKLSKSYINDKGKEVLVLWGIHHPSTSADQQSLYQNADTYVFVGTSRYSKKFKPEIAIRPKVRDQEGRMNYYWTLVEPGDKITFEATGNLVVPRYAFAMERNAGSGIIISDTPVHDCNTTCQTPKGAINTSLPFQNIHPITIGKCPKYVKSTKLRLATGLRNVPSIQSRGLFGAIAGFIEGGWTGMVDGWYGYHHQNEQGSGYAADLKSTQNAIDEITNKVNSVIEKMNTQFTAVGKEFNHLEKRIENLNKKIDDGFLDIWTYNAELLVLLENERTLDYHDSNVKNLYEKVRSQLKNNAKEIGNGCFEFYHKCDNTCMESVKNGTYDYPKYSEEAKLNREEIDGVKLESTRIYQILAIYSTVASSLVLVVSLGAISFWMCSNGSLQCRICI

SEQ ID NO: 5462 - protein, 566 aa, synthetic construct
  REGION 1..566: note = hemagglutinin__InfluenzaA__ADL32037
MKAILVVLLYTFATANADTLCIGYHANNSTDTVDTVLEKNVTVTHSVNLLEDKHNGKLCKLRGVAPLHLGKCNIAGWILGNPECESLSTASSWSYIVETSSSDNGTCYPGDFIDYEELREQLSSVSSFERFEIFPKTSSWPNHDSNKGVTAACPHAGAKSFYKNLIWLVKKGNSYPKLSKSYINDKGKEVLVLWGIHHPSTSVDQQSLYQNADAYVFVGTSRYSKKFKPEIAIRPKVRDQEGRMNYYWTLVEPGDKITFEATGNLVVPRYAFAMERNAGSGIIISDTPVHDCNTTCQTPKGAINTSLPFQNIHPITIGKCPKYVKSTKLRLATGLRNVPSIQSRGLFGAIAGFIEGGWTGMVDGWYGYHHQNEQGSGYAADLKSTQNAIDEITNKVNSVIEKMNTQFTAVGKEFNHLEKRIENLNKKVDDGFLDIWTYNAELLVLLENERTLDYHDSNVKNLYEKVRSQLKNNAKEIGNGCFEFYHKCDNTCMESVKNGTYDYPKYSEEAKLNREEIDGVKLESTRIYQILAIYSTVASSLVLVVSLGAISFWMCSNGSLQCRICI

SEQ ID NO: 5463 - protein, 566 aa, synthetic construct; identical to SEQ ID NO: 2669
  REGION 1..566: note = hemagglutinin__InfluenzaA__ADL32047

SEQ ID NO: 5464 - protein, 566 aa, synthetic construct
  REGION 1..566: note = hemagglutinin__InfluenzaA__ADL32057
MKAILVVLLYTFATANADTLCIGYHANNSTDTVDTVLEKNVTVTHSVNLLEDKHNGKLCKLRGVAPLHLGKCNIAGWILGNPECESLSTASSWSYIVETSSSDNGTCYPGDFIDYEELREQLSSVSSFERFEIFPKTSSWPNHDSNKGVTAACPHAGAKSFYKNLIWLVKKGNSYPKLSKSYINDKGKEVLVLWGIHHPSTSADQQGLYQNADAYVFVGTSRYSKKFKPEIAIRPKVRDQEGRMNYYWTLVEPGDKITFEATGNLVVPRYAFAMERNAGSGIIISDTPVHDCNTTCQTPKGAINTSLPFQNIHPITIGKCPKYVKGTKLRLATGLRNVPSIQSRGLFGAIAGFIEGGWTGMVDGWYGYHHQNEQGSGYAADLKSTQNAIDEITNKVNSVIEKMNTQFTAVGKEFNHLEKRIENLNKKVDDGFLDIWTYNAELLVLLENERTLDYHDSNVKNLYEKVRSQLKNNAKEIGNGCFEFYHKCDNTCMESVKNGTYDYPKYSEEAKLNREEIDGVKLESTRIYQILAIYSTVASSLVLVVSLGAISFWMCSNGSLQCRICI

SEQ ID NO: 5465 - protein, 566 aa, synthetic construct; identical to SEQ ID NO: 2669
  REGION 1..566: note = hemagglutinin__InfluenzaA__ADL32090

SEQ ID NO: 5466 - protein, 566 aa, synthetic construct; identical to SEQ ID NO: 2669
  REGION 1..566: note = hemagglutinin__InfluenzaA__ADL32114

SEQ ID NO: 5467 - protein, 566 aa, synthetic construct; identical to SEQ ID NO: 2669
  REGION 1..566: note = hemagglutinin__InfluenzaA__ADL32344

SEQ ID NO: 5468 - protein, 566 aa, synthetic construct; identical to SEQ ID NO: 3116
  REGION 1..566: note = hemagglutinin__InfluenzaA__ADL32354

SEQ ID NO: 5469 - protein, 566 aa, synthetic construct
  REGION 1..566: note = hemagglutinin__InfluenzaA__ADL32364
MKAILVVLLYTFATANADTLCIGYHANNSTDTVDTVLEKNVTVTHSVNLLEDKHNGKLCKLRGVAPLHLGKCNIAGWILGNPECESLSTAISWSYIVETSSSDNGTCYPGDFIDYEELREQLSSVSSFERFEIFPKTSSWPNHDSNKGVTAACPHAGAKSFYKNLIWLVKKGNSYPKLSKSYINDKGKEVLVLWGIHHPSTSADQQSLYQNADTYVFVGTSRYSKKFKPEIAIRPKVRDQEGRMNYYWTLVEPGDKITFEATGNLVVPRYAFAMERNAGSGIIISDTPVHDCNTTCQTPKGAINTSLPFQNIHPITIGKCPKYVKSTKLRLATGLRNVPSIQSRGLFGAIAGFIEGGWTGMVDGWYGYHHQNEQGSGYAADLKSTQNAIDEITNKVNSVIEKMNTQFTAVGKEFNHLEKRIENLNKKIDDGFLDIWTYNAELLVLLENERTLDYHDSNVKNLYEKVRSQLKNNAKEIGNGCFEFYHKCDNTCMESVKNGTYDYPKYSEEAKLNREEIDGVKLESTRIYQILAIYSTVASSLVLVVSLGAISFWMCSNGSLQCRICI

SEQ ID NO: 5470 - protein, 566 aa, synthetic construct; identical to SEQ ID NO: 2669
  REGION 1..566: note = hemagglutinin__InfluenzaA__ADL32374

SEQ ID NO: 5471 - protein, 566 aa, synthetic construct
  REGION 1..566: note = hemagglutinin__InfluenzaA__ADL32384
MKAILVVLLYTFATATADTLCIGYHANNSTDTVDTVLEKNVTVTHSVNLLEDKHNGKLCKLRGVAPLHLGKCNIAGWILGNPECESLSTASSWSYIVETSSSDNGTCYPGDFIDYEELREQLSSVSSFERFEIFPKTSSWPNHDSNKGVTAACPHAGAKSFYKNLIWLVKKGNSYPKLSKSYINDKGKEVLVLWGIHHPSTSADQQSLYQNADAYVFVGTSRYSKKFKPEIAIRPKVRDQEGRMNYYWTLVEPGDKITFEATGNLVVPRYAFAMERNAGSGIIISDTPVHDCNTTCQTPKGAINTSLPFQNIHPITIGKCPKYVKSTKLRLATGLRNVPSIQSRGLFGAIAGFIEGGWTGMVDGWYGYHHQNEQGSGYAADLKSTQNAIDEITNKVNSVIEKMNTQFTAVGKEFNHLEKRIENLNKKVDDGFLDIWTYNAELLVLLENERTLDYHDSNVKNLYEKVRSQLKNNAKEIGNGCFEFYHKCDNTCMESVKNGTYDYPKYSEEAKLNREEIDGVKLESTRIYQILAIYSTVASSLVLVVSLGAISFWMCSNGSLQCRICI

SEQ ID NO: 5472 - protein, 566 aa, synthetic construct
  REGION 1..566: note = hemagglutinin__InfluenzaA__ADL32394
MKAILVVLLYTFATANADTLCIGYHANNSTDTVDTVLEKNVTVTHSVNLLEDKHNGKLCKLRGVAPLHLGKCNIAGWILGNPECESFSTTSSWSYIVETSSSDNGTCYPGDFIDYEELREQLSSVSSFERFEIFPKTSSWPNHDSNKGVTAACPHAGAKSFYKNLIWLVKKGNSYPKLSKSYINDKGKEVLVLWGIHHPSTSADQQSLYQNADTYVFVGTSRYSKKFKPEIAIRPKVRDQEGRMNYYWTLVEPGDKITFEATGNLVVPRYAFAMERNAGSGIIISDTPVHDCNTTCQTPKGAINTSLPFQNIHPITIGKCPKYVKSTKLRLATGLRNVPSIQSRGLFGAIAGFIEGGWTGMVDGWYGYHHQNEQGSGYAADLKSTQNAIDEITNKVNSVIEKMNTQFTAVGKEFNHLEKRIENLNKKIDDGFLDIWTYNAELLVLLENERTLDYHDSNVKNLYEKVRSQLKNNAKEIGNGCFEFYHKCDNTCMESVKNGTYDYPKYSEEAKLNREEIDGVKLESTRIYQILAIYSTVASSLVLVVSLGAISFWMCSNGSLQCRICI

SEQ ID NO: 5473 - protein, 566 aa, synthetic construct; identical to SEQ ID NO: 2669
  REGION 1..566: note = hemagglutinin__InfluenzaA__ADL32404

SEQ ID NO: 5474 - protein, 566 aa, synthetic construct
  REGION 1..566: note = hemagglutinin__InfluenzaA__ADL32414
MKAILVVLLYTFATANADTLCIGYHANNSTDTVDTVLEKNVTVTHSVNLLEDKHNGKLCKLRGVAPLHLGKCNIAGWILGNPECESLSTASSWSYIVETSSSDNGTCYPGDFIDYEELREQLSSVSSFERFEIFPKTSSWPNHDSNKGVTAACPHAGAKSFYKNLIWLVKKGNSYPKLSKSYINDKGKEVLVLWGIHHPSTSADQQSLYQNADAYVFVGTSRYSKKFKPEIAIRPKVRAQEGRMNYYWTLVEPGDKITFEATGNLVVPRYAFAMERNAGSGIIISDTPVHDCNTTCQTPKGAINTSLPFQNIHPITIGKCPKYVKSTKLRLATGLRNVPSIQSRGLFGAIAGFIEGGWTGMVDGWYGYHHQNEQGSGYAADLKSTQHAIDEITNKVNSVIEKMNTQFTAVGKEFNHLEKRIENLNKKVDDGFLDIWTYNAELLVLLENERTLDYHDSNVKNLYEKVRSQLKNNAKEIGNGCFEFYHKCDNTCMESVKNGTYDYPKYSEEAKLNREEIDGVKLESTRIYQILAIYSTVASSLVLVVSLGAISFWMCSNGSLQCRICI

SEQ ID NO: 5475 - protein, 566 aa, synthetic construct
  REGION 1..566: note = hemagglutinin__InfluenzaA__ADL32424
MKAILVVLLYTFAIANADTLCIGYHANNSTDTVDTVLEKNVTVTHSVNLLEDKHNGKLCKLRGVAPLHLGKCNIAGWILGNPECESLSTASSWSYIVETSSSDNGTCYPGDFIDYEELREQLSSVSSFERFEIFPKTSSWPNHDSNKGVTAACPHAGAKSFYKNLIWLVKKGNSYPKLSKSYINDKGKEVLVLWGIHHPSTSADQQSLYQNADAYVFVGTSRYSKKFKPEIAIRPKVRDQEGRMNYHWTLVEPGDKITFEATGNLVVPRYAFAMERNAGSGIIISDTPVHDCNTTCQTPKGAINTSLPFQNIHPITIGKCPKYVKSTKLRLATGLRNVPSIQSRGLFGAIAGFIEGGWTGMVDGWYGYHHQNEQGSGYAADLKSTQHAIDEITNKVNSVIEKMNTQFTAVGKEFNHLEKRIENLNKKVDDGFLDIWTYNAELLVLLENERTLDYHDSNVKNLYEKVRSQLKNNAKEIGNGCFEFYHKCDNTCMESVKNGTYDYPKYSEEAKLNREEINGVKLESTRIYQILAIYSTVASSLVLVVSLGAISFWMCSNGSLQCRICI

SEQ ID NO: 5476 - protein, 566 aa, synthetic construct
  REGION 1..566: note = hemagglutinin__InfluenzaA__ADL32434
MKAILVVLLYTFATANADTLCIGYHANNSTDTVDTVLEKNVTVTHSVNLLEDKHNGKLCKLRGVAPLHLGKCNIAGWILGNPECESLSTASSWSYIVETSSSDNGTCYPGDFIDYEELREQLSSVSSFERFEIFPKTSSWPIHDSNKGVTAACPHAGAKSFYKNLIWLVKKGNSYPKLSKSYINDKGKEVLVLWGIHHPSTSADQQSLYQNADAYVFVGTSRYSKKFKPEIAIRPKVRDQEGRMNYYWILVEPGDKITFEATGNLVVPRYAFAMERNAGSGIIISDTPVHDCNTTCQTPKGAINTSLPFQNIHPITIGKCPKYVKSTKLRLATGLRNVPSIQSRGLFGAIAGFIEGGWTGMVDGWYGYHHQNEQGSGYAADLKSTQHAIDEITNKVNSVIEKMNTQFTAVGKEFNHLEKRIENLNKKVDDGFLDIWTYNAELLVLLENERTLDYHDSNVKNLYEKVRSQLKNNAKEIGNGCFEFYHKCDNTCMESVKNGTYDYPKYSEEAKLNREEIDGVKLESTRIYQILAIYSTVASSLVLVVSLGAISFWMCSNGSLQCRICI

SEQ ID NO: 5477 - protein, 566 aa, synthetic construct; identical to SEQ ID NO: 4089
  REGION 1..566: note = hemagglutinin__InfluenzaA__ADL32444

SEQ ID NO: 5478 - protein, 566 aa, synthetic construct
  REGION 1..566: note = hemagglutinin__InfluenzaA__ADL32454
MEAILVVLLYTFATANADTLCIGYHANNSTDTVDTVLEKNVTVTHSVNLLEDKHNGKLCKLRGVAPLHLGKCNIAGWILGNPECESLSTASSWSYIVETSSSDNGTCYPGDFIDYEELREQLSSVSSFERFEIFPKTSSWPNHDSNKGVTAACPHAGAKSFYKNLIWLVKKGNSYPKLSKSYINDKGKEVLVLWGIHHPSTSADQQSLYQNADAYVFVGSSRYSKKFKPEIAIRPKVRDQEGRMNYYWTLVEPGDKITFEATGNLVVPRYAFAMERNAGSGIIISDTPVHDCNTTCQTPKGAINTSLPFHNIHPITIGKCPKYVKSTKLRLATGLRNVPSIQSRGLFGAIAGFIEGGWTGMVDGWYGYHHQNEQGSGYAADLKSTQNAIDEITNKVNSVIEKMNTQFTAVGKEFNHLEKRIENLNKKVDDGFLDIWTYNAELLVLLENERTLDYHDSNVKNLYEKVRSQLKNNAKELGNGCFEFYHKCDNTCMESVKNGTYDYPKYSEEAKLNREEIDGVKLESTRIYQILAIYSTVASSLVLVVSLGAISFWMCSNGSLQCRICI

SEQ ID NO: 5479 - protein, 566 aa, synthetic construct; identical to SEQ ID NO: 4836
  REGION 1..566: note = hemagglutinin__InfluenzaA__ADL32464

SEQ ID NO: 5480 - protein, 566 aa, synthetic construct; identical to SEQ ID NO: 4836
  REGION 1..566: note = hemagglutinin__InfluenzaA__ADL32484

SEQ ID NO: 5481 - protein, 566 aa, synthetic construct
  REGION 1..566: note = hemagglutinin__InfluenzaA__ADL32504
MKAILVVLLYTFATANADTLCIGYHANNSTDTVDTVLEKNVTVTHSVNLLEDKHNGKLCKLRGVAPLHLGKCNIAGWILGNPECESLSTASSWSYIVETSSSDNGMCYPGDFIDYEELREQLSSVSSFERFEIFPKTSSWPNHDSNKGVTAACPHAGAKSFYKNLIWLVKKGNSYPKLSKSYINDKGKEVLVLWGIHHPSTSADQQSLYQNADAYVFVGTSRYSKKFKPEIAIRPKVRDQEGRMNYYWTLVEPGDKITFEATGNLVVPRYAFAMERNAGSGIIISDTPVHDCNTTCQTPKGAINTSLPFQNIHPITIGKCPKYVKSTKLRLATGLRNVPSIQSRGLFGAIAGFIEGGWTGMVDGWYGYHHQNEQGSGYAADLKSTQHAIDEITNKVNSVIEKMNTQFTAVGKEFNHLEKRIENLNKKVDDGFLDIWTYNAELLVLLENERTLDYHDSNVKNLYEKVRSQLKNNAKEIGNGCFEFYHKCDNTCMESVKNGTYDYPKYSEEAKLNREEIDGVKLESTRIYQILAIYSTVASSLVLVVSLGAISFWMCSNGSLQCRICI

SEQ ID NO: 5482 - protein, 566 aa, synthetic construct; identical to SEQ ID NO: 4089
  REGION 1..566: note = hemagglutinin__InfluenzaA__ADL32514

SEQ ID NO: 5483 - protein, 566 aa, synthetic construct; identical to SEQ ID NO: 4836
  REGION 1..566: note = hemagglutinin__InfluenzaA__ADL32524

SEQ ID NO: 5484 - protein, 566 aa, synthetic construct
  REGION 1..566: note = hemagglutinin__InfluenzaA__ADL32544
MKAILVVLLYTFATSNADTLCIGYHANNSTDTVDTVLEKNVTVTHSVNLLEDKHNGKLCKLRGVAPLHLGKCNIAGWILGNPECESLSTASSWSYIVETSSSDNGTCYPGDFIDYEELREQLSSVSSFERFEIFPKTSSWPNHDSNKGVTAACPHAGAKSFYKNLIWLVKKGNSYPKLRKSYINDKGKEVLVLWGIHHPSTSADQQSLYQNADAYVFVGTSRYSKKFKPEIAIRPKVRDQEGRMNYYWTLVEPGDKITFEATGNLVVPRYAFAMERNAGSGIIISDTPVHDCNTTCQTPKGAINTSLPFQNIHPITIGKCPKYVKSTKLRLATGLRNVPSIQSRGLFGAIAGFIEGGWTGMVDGWYGYHHQNEQGSGYAADLKSTQHAIDEITNKVNSVIEKMNTQFTAVGKEFNHLEKRIENLNKKVDDGFLDIWTYNAELLVLLENERTLDYHDSNVKNLYEKVRSQLKNNAKEIGNGCFEFYHKCDNTCMESVKNGTYDYPKYSEEAKLNREEIDGVKLESTRIYQILAIYSTVASSLVLVVSLGAISFWMCSNGSLQCRICI

SEQ ID NO: 5485 - protein, 566 aa, synthetic construct; identical to SEQ ID NO: 5270
  REGION 1..566: note = hemagglutinin__InfluenzaA__ADL32554

SEQ ID NO: 5486 - protein, 566 aa, synthetic construct; identical to SEQ ID NO: 4282
  REGION 1..566: note = hemagglutinin__InfluenzaA__ADL32670

SEQ ID NO: 5487 - protein, 566 aa, synthetic construct
  REGION 1..566: note = hemagglutinin__InfluenzaA__ADL32690
MKAILVVLLYTFATANADTLCIGYHANNSTDTVDTVLEKNVTVTHSVNILEDKHNGKLCKLRGVAPLHLGKCNIAGWILGNPECESLSTASSWSYIVETSSSDNGTCYPGDFIDYEELREQLSSVSSFERFEIFPKTSSWPNHDSNKGVTAACPHAGAKSFYKNLMWLVKKGNSYPKLSKSYINDKGKEVLVLWGIHHPSTSADQQSLYQNADAYVFVGSSRYSKKFKPEIAIRPKVRDQEGRMNYYWTLVEPGDKITFEATGNLVVPRYAFAMERNAGSGIIISDTPVHDCNTTCQTPKGAINTSLPFQNIHPITIGKCPKYVKSTKLRLATGLRNVPSIQSRGLFGAIAGFIEGGWTGMVDGWYGYHHQNEQGSGYAADLKSTQNAIDEITNKVNSVIEKMNTQFTAVGKEFNHLEKRIENLNKKVDDGFLDIWTYNAELLVLLENERTLDYHDSNVKNLYEKVRSQLKNNAKEIGNGCFEFYHKCDNTCMESVKNGTYDYPKYSEEAKLNREEIDGVKLESTRIYQILAIYSTVASSLVLVVSLGAISFWMCSNGSLQCRICI

SEQ ID NO: 5488 - protein, 566 aa, synthetic construct; identical to SEQ ID NO: 2849
  REGION 1..566: note = hemagglutinin__InfluenzaA__ADL32710

SEQ ID NO: 5489 - protein, 566 aa, synthetic construct; identical to SEQ ID NO: 2669
  REGION 1..566: note = hemagglutinin__InfluenzaA__ADL32720

SEQ ID NO: 5490 - protein, 566 aa, synthetic construct; identical to SEQ ID NO: 4441
  REGION 1..566: note = hemagglutinin__InfluenzaA__ADL32730

SEQ ID NO: 5491 - protein, 566 aa, synthetic construct; identical to SEQ ID NO: 4441
  REGION 1..566: note = hemagglutinin__InfluenzaA__ADL32740

SEQ ID NO: 5492 - protein, 566 aa, synthetic construct; identical to SEQ ID NO: 3613
  REGION 1..566: note = hemagglutinin__InfluenzaA__ADL39137

SEQ ID NO: 5493 - protein, 565 aa, synthetic construct
  REGION 1..565: note = hemagglutinin__InfluenzaA__ADL39148
MKVKLLVLLCTFTATYADTICIGYHANNSTDTVDTVLEKNVTVTHSVNLLENSHNGKLCLLKGIAPLQLGNCSVAGWILGNPECELLISKESWSYIVEKPNPENGTCYPGHFADYEELREQLSSVSSFERFEIFPKESSWPNHTVTGVSASCSHNGESSFYRNLLWLTGKNGLYPNLSKSYANNKEKEVLVLWGVHHPPNIVDQKTLYRTENAYVSVVSSHYSRKFTPEIAKRPKVRDQEGRINYYWTLLEPGDTIIFEANGNLIAPRYAFALSRDFGSGIINSNAPMDKCDAKCQTPQGAINSSLPFQNVHPVTIGECPKYVRSAKLRMVTGLRNIPSIQSRGLFGAIAGFIEGGWTGMVDGWYGYHHQNEQGSGYAADQKSTQNAINGITNKVNSVIEKMNTQFTAVGKEFNKLERRMENLNKKVDDGFIDIWTYNAELLVLLENERTLDFHDSNVKNLYEKVKSQLKNNAKEIGNGCFEFYHKCNDECMESVKNGTYDYPKYSEESKLNREKIDGVKLESMGVYQILAIYSTVASSLVLLVSLGAISFWMCSNGSLQCRICI

SEQ ID NO: 5494 - protein, 566 aa, synthetic construct
  REGION 1..566: note = hemagglutinin__InfluenzaA__ADL39159
MKTIIALSYILCLVFAQKLPGNDNSTATLCLGHHAVPNGTIVKTITNDQIEVTNATELVQSSSTGEICDSPHQIIDGENCTLIDALLGDPQCDGFQNKKWDLFVERSKAYSNCYPYDVPDYASLRSLVASSGTLEFNNESFNWTGVTQNGTSSACIRRSNNSFFSRLNWLTHLKFKYPALNVTMPNNEQFDKLYIWGVHHPGTDNDQIFLYAQASGRITVSTKRSQQTVIPNIGSRPRVRNIPSRISIYWTIVKPGDILLINSTGNLIAPRGYFKIRSGKSSIMRSDAPIGKCNSECITPNGSIPNDKPFQNVNRITYGACPRYVKQNTLKLATGMRNVPEKQTRGIFGAIAGFIENGWEGMVDGWYGFRHQNSEGRGQAADLKSTQAAIDQINGKLNRLIGKTNEKFHQIEKEFSEVEGRIQDLEKYVEDTKIDLWSYNAELLVALENQHTIDLTDSEMNKLFEKTKKQLRENAEDMGNGCFKIYHKCDNACIRSIRNGTYDHDVYRDEALNNRFQIKGVELKSGYKDWILWISFAISCFLLCFALLGFIMWACQKGNIRCNICI

SEQ ID NO: 5495 - protein, 566 aa, synthetic construct
  REGION 1..566: note = hemagglutinin__InfluenzaA__ADL39170
MKTIIALSYILCLVFAQKLPGNDNSTATLCLGHHAVPNGTIVKTITNDQIEVTNATELVQSSSTGEICDSPHQILDGKNCTLIDALLGDPQCDGFQNKKWDLFVERSKAYSNCYPYDVPDYASLRSLVASSGTLEFNNESFNWTGVTQNGTSSACIRRSKNSFFSRLNWLTHLNFKYPALNVTVPNNEQFDKLYIWGVHHPGTDKDQIFLYAQASGRITVSTKRSQQTVIPNIGSRPRVRNIPSRISIYWTIVKPGDVLLINSTGNLIAPRGYFKIRSGKSSIMRSDAPIGKCNSECITPNGSIPNDKPFQNVNRITYGACPRYVKQNTLKLATGMRNVPEKQTRGIFGAIAGFIENGWEGMVDGWYGFRHQNSEGRGQAADLKSTQAAIDQINGKLNRLIGKTNEKFHQIEKEFSEVEGRIQDLEKYVEDTKIDLWSYNAELLVALENQHTIDLTDSEMNKLFEKTKKQLRENAEDMGNGCFKIYHKCDNACIGSIRNGTYDHDVYRDEALNNRFQIKGVELKSGYKDWILWISFAISCFLLCVALLGFIMWACQKGNIRCNICI

SEQ ID NO: 5496 - protein, 566 aa, synthetic construct; identical to SEQ ID NO: 3613
  REGION 1..566: note = hemagglutinin__InfluenzaA__ADL39203

SEQ ID NO: 5497 - protein, 566 aa, synthetic construct; identical to SEQ ID NO: 2434
  REGION 1..566: note = hemagglutinin__InfluenzaA__ADL39214

SEQ ID NO: 5498 - protein, 565 aa, synthetic construct
  REGION 1..565: note = hemagglutinin__InfluenzaA__ADL39225
MKVKLLVLLCTFTATYADTICIGYHANNSTDTVDTVLEKNVTVTHSVNLLENSHNGKLCLLKGIAPLQLGNCSVAGWILGNPECELLISKESWSYIVEKPNPENGTCYPGYFADYEELREQLSSVSSFERFEIFPKESSWPNHTVTGASASCSHNGENSFYRNLLWLTGKNGLYPNLSKSYANNKEKEVLVLWGVHHPPNIADQKTLYHTENAYVSVVSSHYSRKFTPEIAKRPKVRDQEGRINYYWTLLEPGDTIIFEANGNLIAPRYAFALSRGFGSGIINSNAPMDKCDAKCQTPQGAINSSLPFQNVHPVTIGECPKYVRSAKLRMVTGLRNIPSIQSRGLFGAIAGFIEGGWTGMVDGWYGYHHQNEQGSGYAADQKSTQNAINGITNKVNSVIEKMNTQFTAVGKEFNKLERRMENLNKKVDDGFIDIWTYNAELLVLLENERTLDFHDSNVKNLYEKVKSQLKNNAKEIGNGCFEFYHKCNDECMESVKNGTYDYPKYSEESKLNREKIDGVKLESMGVYQILAIYSTVASSLVLLVSLGAISFWMCSNGSLQCRICI

SEQ ID NO: 5499 - protein, 565 aa, synthetic construct
  REGION 1..565: note = hemagglutinin__InfluenzaA__ADL39236
MKVKLLVLLCTFTATYADTICIGYHANNSTDTVDTVLEKNVTVTHSVNLLENSHNGKLCLLKGIAPLQLGNCSVAGWILGNPECELLISKESWSYIVEKPNPENGTCYPGYFADYEELREQLSSVSSFERFEIFPKESSWPNHTVTGVSASCSHNGESSFYRNLLWLTGKNGLYPNLSKSYTNNKEKEVLVLWGVHHPPNIVDQKTLYRTENAYVSVVSSHYSRKFTPEIAKRPKVRDQEGRINYYWTLLEPGDTIIFEANGNLIAPRYAFALSRGFGSGIINSNAPMGKCDAKCQTPQGAINSSLPFQNVHPVTIGECPKYVRSAKLRMVTGLRNIPSIQSRGLFGAIAGFIEGGWTGMVDGWYGYHHQNEQGSGYAADQKSTQNAINGITNKVNSVIEKMNTQFTAVGKEFNKLERRMENLNKKVDDGFIDIWTYNAELLVLLENERTLDFHDSNVKNLYEKVKSQLKNNAKEIGNGCFEFYHKCNDECMESVKNGTYDYPKYSEESKLNREKIDGVKLESMGVYQILAIYSTVASSLVLLVSLGAISFWMCSNGSLQCRICI

SEQ ID NO: 5500 - protein, 566 aa, synthetic construct
  REGION 1..566: note = hemagglutinin__InfluenzaA__ADL39280
MKTIIALSYILCLVFAQKLPGNDNSTATLCLGHHAVPNGTIVKTITNDQIEVTNATELVQSSSTGEICDSPHQILDGENCTLIDALLGDPQCDGFQNKKWDLFVERSKAYSNCYPYDVPDYASLRSLVASSGTLEFNNESFNWTGVTQNGTSSACIRRSNNSFFSRLNWLTHLRFKYPALNVTMPNNEQFDKLYIWGVHHPGTDNDQIFLYAQASGRITVSTKRSQQTVIPNIGSRPRVRNIPSRISIYWTIVKPGDILLINSTGNLIAPRGYFKIRSGKSSIMRSDAPIGKCNSECITPNGSIPNDKPFQNVNRITYGACPRYVKQNTLKLATGMRNVPEKQTRGIFGAIAGFIENGWEGMVDGWYGFRHQNSEGRGQAADLKSTQAAIDQINGKLNRLIGKTNEKFHQIEKEFSEVEGRIQDLEKYVEDTKIDLWSYNAELLVALENQHTIDLTDSEMNKLFEKTKKQLRENAEDMGNGCFKIYHKCDNACIGSIRNGTYDHDVYRDEALNNRFQIKGVELKSGYKDWILWISFAISCFLLCVALLGFIMWACQKGNIRCNICI

SEQ ID NO: 5501 - protein, 565 aa, synthetic construct
  REGION 1..565: note = hemagglutinin__InfluenzaA__ADL39291
MKVKLLVLLCTFTATYADTICIGYHANNSTDTVDTVLEKNVTVTHSVNLLENSHNGKLCLLKGIAPLQLGNCSVAGWILGNPECELLISKESWSYIVEKPNPENGTCYPGHFADYEELREQLSSVSSFERFEIFPKESSWPNHTVTGVSASCSHNGESSFYRNLLWLTEKNGLYPNLSKSYANNKEKEVLVLWGVHHPPNMGDQKTLYHTENAYVSVVSSHYSRKFTPEIAKRPKVRDQEGRINYYWTLLEPGDTIIFEANGNLIAPRYAFALSRGFGSGIINSNAPMDKCDAKCQTPQGAINSSLPFQNVHPVTIGECPKYVRSAKLRMVTGLRNIPSIQSRGLFGAIAGFIEGGWTGMVDGWYGYHHQNEQGSGYAADQKSTQNAINGITNKVNSVIEKMNTQFTAVGKEFNKLERRMENLNKKVDDGFIDIWTYNAELLVLLENERTLDFHDSNVKNLYEKVKSQLKNNAKEIGNGCFEFYHKCNDECMESVKNGTYDYPKYSEESKLNREKIDGVKLESMGVYQILAIYSTVASSLVLLVSLGAISFWMCSNGSLQCRICI

SEQ ID NO: 5502 - protein, 566 aa, synthetic construct; identical to SEQ ID NO: 2434
  REGION 1..566: note = hemagglutinin__InfluenzaA__ADL39302

SEQ ID NO: 5503 - protein, 566 aa, synthetic construct; identical to SEQ ID NO: 5500
  REGION 1..566: note = hemagglutinin__InfluenzaA__ADL39313

SEQ ID NO: 5504 - protein, 566 aa, synthetic construct
  REGION 1..566: note = hemagglutinin__InfluenzaA__ADL39335
MKTIIALSYILCLVFAQKLPGNDNSTATLCLGHHAVPNGTIVKTITNDQIEVTNATELVQSSSTGEICDSPHQILDGENCTLIDALLGDPQCDGFQNKKWDLFVERSKAYSNCYPYDVPDYASLRSLVASSGTLEFNNESFNWTGVTQNGTSSACIRRSNNSFFSRLNWLTHLRFKYPALNVTMPNNEQFDKLYIWGVHHPGTDNDQIFLYAQASGRITVSTKRSQQTVIPNIGSRPRVRNIPSRISIYWTIVKPGDILLINSTGNLIAPRGYFKIRSGKSSIMRSDAPIGKCNSECITPNGSIPNDKPFQNVNRITYGACPRYVKQNTLKLATGMRNVPEKQTRGIFGAIAGFIENGWEGMVDGWYGFRHQNSEGRGQAADLKSTQAAIDQINGKLNRLIGKTNEKFHQIEKEFSEVEGRIQDLEKYVEDTKIDLWSYNAELLVALENQHTIHLTDSEMNKLFEKTKKQLRENAEDMGNGCFKIYHKCDNACIGSIRNGTYDHDVYRDEALNNRFQIKGVELKSGYKDWILWISFAISCFLLCVALLGFIMWACQKGNIRCNICI

SEQ ID NO: 5505 - protein, 566 aa, synthetic construct; identical to SEQ ID NO: 2434
  REGION 1..566: note = hemagglutinin__InfluenzaA__ADL39368

SEQ ID NO: 5506 - protein, 565 aa, synthetic construct
  REGION 1..565: note = hemagglutinin__InfluenzaA__ADL39390
MKVKLLVLLCTFTATYADTICIGYHANNSTDTVDTVLEKNVTVTHSVNLLENSHNGKLCLLKGIAPLQLGNCSVAGWILGNPECELLISKESWSYIVEKPNPENGTCYPGHFADYEELREQLSSVSSFERFEIFPKESSWPNHTVTGVSASCSHNGESSFYRNLLWLTGKNGLYPSLSKSYANNKEKEVLVLWGVHHPPNIVDQKTLYRTENAYVSVVSSHYSRKFTPEIAKRPKVRDQEGRINYYWTLLEPGDTIIFEANGNLIAPRYAFALSRGFGSGIINSNAPMGKCDAKCQTPQGAINSSLPFQNVHPVTIGECPKYVRSAKLRMVTGLRNIPSIQSRGLFGAIAGFIEGGWTGMVDGWYGYHHQNEQGSGYAADQKSTQNAINGITNKVNSVIEKMNTQFTAVGKEFNKLERRMENLNKKVDDGFIDIWTYNAELLVLLENERTLDFHDSNVKNLYEKVKSQLKNNAKEIGNGCFEFYHKCNDECMESVKNGTYDYPKYSEESKLNREKIDGVKLESMGVYQILAIYSTVASSLVLLVSLGAISFWMCSNGSLQCRICI

SEQ ID NO: 5507 - protein, 566 aa, synthetic construct
  REGION 1..566: note = hemagglutinin__InfluenzaA__ADL39401
MKTIIALSYILCLVFAQKLPGNDNSTATLCLGHHAVPNGTIVKTITNDQIEVTNATELVQSSSTGEICDSPHQILDGENCTLIDALLGDPQCDGFQNKKWDLFVERSKAYSNCYPYDVPDYASLRSLVASSGTLEFNNESFNWTGVTQNGTSSSCMRRSNNSFFSRLNWLTHLKFKYPALNVTMPNNEQFDKLYIWGVHHPGTDNDQIFLYAQASGRITVSTKRSQQTVIPNIGSRPRVRNIPSRISIYWTIVKPGDILLINSTGNLIAPRGYFKIRSGKSSIMRSDAPIGKCNSECITPNGSIPNDKPFQNVNRITYGACPRYVKQNTLKLATGMRNVPEKQTRGIFGAIAGFIENGWEGMVDGWYGFRHQNSEGRGQAADLKSTQAAIDQINGKLNRLIGKTNEKFHQIEKEFSEVEGRIQDLEKYVEDTKIDLWSYNAELLVALENQHTIDLTDSEMNKLFEKTKKQLRENAEDMGNGCFKIYHKCDNACIGSIRNGTYDHDVYRDEALNNRFQIKGVELKSGYKDWILWISFAISCFLLCVALLGFIMWACQKGNIRCNICI

SEQ ID NO: 5508 - protein, 566 aa, synthetic construct
  REGION 1..566: note = hemagglutinin__InfluenzaA__ADL39412
MKTIIALSYILCLVFAQKLPGNDNSTATLCLGHHAVPNGTIVKTITNDQIEVTNATELVQSSSTGEICDSPHQILDGENCTLIDALLGDPQCDGFQNKKWDLFVERSKAYSNCYPYDVPDYASLRSLVASSGTLEFNNESFNWTGVTQNGTSSACIRRSNNSFFSRLNWLTHLKFKYPALNVTMPNNEQFDKLYIWGVHHPGTDNDQIFLYAQASGRITVSTKRSQQTVIPNIGSRPRVRNIPSRISIYWTIVKPGDILLINSTGNLIAPRGYFKIRSEKSSIMRSDAPIGKCNSECITPNGSIPNDKPFQNVNRITYGACPRYVKQNTLKLATGMRNVPEKQTRGIFGAIAGFIENGWEGMVDGWYGFRHQNSEGRGQAADLKSTQAAIDQINGKLNRLIGKTNEKFHQIEKEFSEVEGRIQDLEKYVEDTKIDLWSYNAELLVALENQHTIDLTDSEMNKLFEKTKKQLRENAEDMGNGCFKIYHKCDNACIGSIRNGTYDHDVYRDEALNNRFQIKGVELKSGYKDWILWISFAISCFLLCVALLGFIMWACQKGNIRCNICI

SEQ ID NO: 5509 - protein, 565 aa, synthetic construct
  REGION 1..565: note = hemagglutinin__InfluenzaA__ADL39423
MKVKLLVLLCTFTATYADTICIGYHANNSTDTVDTVLEKNVTVTHSVNLLENSHNGKLCLLKGIAPLQLGNCSVAGWILGNPECELLISKESWSYIVEKPNPENGTCYPGHFADYEELREQLSSVSSFERFEIFPKESSWPSHTVTGVSASCSHNGENSFYRNLLWLTGKNGLYPNLSKSYANNKEKEVLVLWGVHHPPNIADQKTLYHTENAYVSVVSSHYSRKFTPEIAKRPKVRDQEGRINYYWTLLEPGDTIIFEANGNLIAPRYAFALSRGFGSGIINSNAPMDKCDAKCQTPQGAINSSLPFQNVHPVTIGECPKYVRSAKLRMVTGLRNIPSIQSRGLFGAIAGFIEGGWTGMVDGWYGYHHQNEQGSGYAADQKSTQNAINGITNKVNSVIEKMNTQFTAVGKEFNKLERRMENLNKKVDDGFIDIWTYNAELLVLLENERTLDFHDSNVKNLYEKVKNQLKNNAKEIGNGCFEFYHKCNDECMESVKNGTYDYPKYSEESKLNREKIDGVKLESMGVYQILAIYSTVASSLVLLVSLGAISFWMCSNGSLQCRICI

SEQ ID NO: 5510 - protein, 566 aa, synthetic construct
  REGION 1..566: note = hemagglutinin__InfluenzaA__ADL39434
MKTIIALSYILCLVFAQKLPGNDNSTATLCLGHHAVPNGTIVKTITNDQIEVTNATELVQSSSTGEICDSPHQILDGENCTLIDALLGDPQCDGFQNKKWDLFVERSKAYSNCYPYDVPDYASLRSLVASSGTLEFNNESFNWTGVTQNGTSSACIRRSNNSFFSRLNWLTHLRFKYPALNVTMPNNEQFDKLYIWGVHHPGTDNDQIFLYAQASGRITVSTKRSQQTVIPNIGSRPRVRDIPSRISIYWTIVKPGDILLINSTGNLIAPRGYFKIRSGKSSIMRSDAPIGKCNSECITPNGSIPNDKPFQNVNRITYGACPRYVKQNTLKLATGMRNVPEKQTRGIFGAIAGFIENGWEGMVDGWYGFRHQNSEGRGQAADLKSTQAAIDQINGKLNRLIGKTNEKFHQIEKEFSEVEGRIQDLEKYVEDTKIDLWSYNAELLVALENQHTIDLTDSEMNKLFEKTKKQLRENAEDMGNGCFKIYHKCDNACIGSIRNGTYDHDVYRDEALNNRFQIKGVELKSGYKDWILWISFAISCFLLCVALLGFIMWACQKGNIRCNICI

SEQ ID NO: 5511 - protein, 565 aa, synthetic construct
  REGION 1..565: note = hemagglutinin__InfluenzaA__ADL39445
MKVKLLVLLCTFTATYADTICIGYHANNSTDTVDTVLEKNVTVTHSVNLLENSHNGKLCLLKGIAPLQLGNCSVAGWILGNPECELLISKESWSYIVEKPNPENGTCYPGHFADYEELREQLSSVSSFERFEIFPKESSWPNHTVTGVSASCSHNGESSFYRNLLWLTGKNGLYPTLSKSYANNKEKEVLVLWGVHHPPNIVDQKTLYRTENAYVSVVSSHYSRKFTPEIAKRPKVRDQEGRINYYWTLLEPGDTIIFEANGNLIAPRYAFALSRGFGSGIINSNAPMDKCDAKCQTPQGAINSSLPFQNVHPVTIGECPKYVRSAKLRMVTGLRNIPSIQSRGLFGAIAGFIEGGWTGMVDGWYGYHHQNEQGSGYAADQKSTQNAINGITNKVNSVIEKMNTQFTAVGKEFNKLERRMENLNKKVDDGFIDIWTYNAELLVLLENERTLDFHDSNVKNLYEKVKSQLKNNAKEIGNGCFEFYHKCNDECMESVKNGTYDYPKYSEESKLNREKIDGVKLESMGVYQILAIYSTVASSLVLLVSLGAISFWMCSNGSLQCRICI

SEQ ID NO: 5512 - protein, 565 aa, synthetic construct
  REGION 1..565: note = hemagglutinin__InfluenzaA__ADL39456
MKVKLLVLLCTFTATYADTICIGYHANNSTDTVDTVLEKNVTVTHSVNLLENSHNGKLCLLKGIAPLQLGNCSVAGWILGNPECELLISKESWSYIVEKPNPENGTCYPGHFADYEELREQLSSVSSFERFEIFPKESSWPSHTVTGVSASCSHNGENSFYRNLLWLTGKNGLYPNLSKSYANNKEKEVLVLWGVHHPPNIADQKTLYHTENAYVSVVSSHYSRKFTPEIAKRPKVRDQEGRINYYWTLLEPGDTIIFEANGNLIAPRYAFALSRGFGSGIINSNAPMDKCDAKCQTPQGAINSSLPFQNVHPVTIGECPKYVRSAKLRMVTGLRNIPSIQSRGLFGAIAGFIEGGWTGMVDGWYGYHHQNEQGSGYAADQKSTQNAINGITNKVNSVIEKMNTQFTAVGKEFNKLERRMENLNKKVDDGFIDIWTYNAELLVLLENERTLDFHDSNVKNLYEKVKSQLKNNAKEIGNGCFEFYHKCNDECMESVKNGTYDYPKYSEESKLNREKIDGVKLESMGVYQILAIYSTVASSLVLLVSLGAISFWMCSNGSLQCRICI

SEQ ID NO: 5513 - protein, 565 aa, synthetic construct
  REGION 1..565: note = hemagglutinin__InfluenzaA__ADL39467
MKVKLLVLLCTFTATYADTICIGYHANNSTDTVDTVLEKNVTVTHSVNLLENSHNGKLCLLKGIAPLQLGNCSVAGWILGNPECELLISKESWSYIVEKPNPENGTCYPGHFADYEELREQLSSVSSFERFEIFPKESSWPNHTVTGVSASCSHNGESSFYRNLLWLTGKNGLYPNLSKSYANNKEKEVLVLWGVHHPPNIVDQKTLYRTENAYVSVVSSHYSRKFTPEIAKRPKVRDQEGRINYYWTLLEPGDTIIFEANGNLIAPRYAFALSRGFGSGIINSNAPMGKCDAKCQTPQGAINSSLPFQNVHPVTIGECPKYVRSAKLRMVTGLRNIPSIQSRGLFGAIAGFIEGGWTGMVDGWYGYHHQNEQGSGYAADQKSTQNAINGITNKVNSVIEKMNTQFTAVGKEFNKLERRMENLNKKVDDGFIDIWTYNAELLVLLENERTLDFHDSNVKNLYEKVKSQLKNNAKEIGNGCFEFYHKCNDECMESVKNGTYDYPKYSEESKLNREKIDGVKLESMGVYQILAIYSTVASSLVLLVSLGAISFWMCSNGSLQCRICI

SEQ ID NO: 5514 - protein, 566 aa, synthetic construct; identical to SEQ ID NO: 2669
  REGION 1..566: note = hemagglutinin__InfluenzaA__ADL41164

SEQ ID NO: 5515 - protein, 566 aa, synthetic construct; identical to SEQ ID NO: 2762
  REGION 1..566: note = hemagglutinin__InfluenzaA__ADL41173

SEQ ID NO: 5516 - protein, 565 aa, synthetic construct
  REGION 1..565: note = hemagglutinin__InfluenzaA__ADL60242
MKVKLLVLLCTFTATYADTICIGYHANNSTDTVDTVLEKNVTVTHSVNLLENSHNGKLCLLKGIAPLQLGNCSVAGWILGNPECELLISKESWSYIVEKPNPENGTCYPGHFADYEELREQLSSVSSFERFEIFPKESSWPNHTVTGVSASCSHNGERSFYRNLLWLTGKNGLYPNLSKSYANNKEKEVLVLWGVHHPPDIGNQKTLYHTENAYVSVVSSHYSRKFTPEIAKRPKVRDQEGRINYYWTLLEPGDTIIFEANGNLIAPRYAFALSRGFGSGIINSNAPMDKCDAKCQTPQGAINSSLPFQNVHPVTIGECPKYVRSAKLRMVTGLRNIPSIQSRGLFGAIAGFIEGGWTGMVDGWYGYHHQNEQGSGYAADQKSTQNAINGITNKVNSVIEKMNTQFTAVGKEFNKLERRMENLNKKVDDGFIDIWTYNAELLVLLENERTLDFHDSNVKNLYEKVKSQLKNNAKEIGNGCFEFYHKCNDECMESVKNGTYDYPKYSEESKLNREKIDGVKLESMGVYQILAIYSTVASSLVLLVSLGAISFWMCSNGSLQCRICI

SEQ ID NO: 5517 - protein, 565 aa, synthetic construct
  REGION 1..565: note = hemagglutinin__InfluenzaA__ADL60253
MKVKLLVLLCTFTATYADTICIGYHANNSTDTVDTVLEKNVTVTHSVNLLENSHNGKLCLLKGIAPLQLGNCSVAGWILGNPECGLLISKESWSYIVEKPNPENGTCYPGYFADYEELREQLSSVSSFERFEIFPKESSWPNHTVTGVSASCSHNGESSFYRNLLWLTGKNGLYPNLSKSYANNKEKEVLVLWGVHHPPNIGNQKALYHTENAYVSVVSSHYSRKFTPEIAKRPKVRDQEGRINYYWTLLEPGDTIIFEANGNLIAPRYAFALSRGFGSGIINSNAPMDKCDAKCQTPQGAINSSLPFQNVHPVTIGECPKYVRSAKLRMVTGLRNIPSIQSRGLFGAIAGFIEGGWTGMVDGWYGYHHQNEQGSGYAADQKSTQNAINGITNKVNSVIEKMNTQFTAVGKEFNKLERRMENLNKKVDDGFIDIWTYNAELLVLLENERTLDFHDSNVKNLYEKVKSQLKNNAKEIGNGCFEFYHKCNDECMESVKNGTYDYPKYSEESKLNREKIDGVKLESMGVYQILAIYSTVASSLVLLVSLGAISFWMCSNGSLQCRICI

SEQ ID NO: 5518 - protein, 565 aa, synthetic construct; identical to SEQ ID NO: 5516
  REGION 1..565: note = hemagglutinin__InfluenzaA__ADL60264

SEQ ID NO: 5519 - protein, 565 aa, synthetic construct; identical to SEQ ID NO: 5516
  REGION 1..565: note = hemagglutinin__InfluenzaA__ADL60275

SEQ ID NO: 5520 - protein, 565 aa, synthetic construct
  REGION 1..565: note = hemagglutinin__InfluenzaA__ADL60286
MKVKLLVLLCTFTATYADTICIGYHANNSTDTVDTVLEKNVTVTHSVNLLENSHNGKLCLLKGIAPLQLGNCSVAGWILGNPECELLISKESWSYIVEKPNPENGTCYPGHFADYEELREQLSSVSSFERFEIFPKESSWPNHTVTGVSASCSHNGESSFYRNLLWLTGKNGLYPNLSKSYANNKEKEVLVLWGVHHPPSISNQKTLYHTENAYVSVVSSHYSRKFTPEVAKRPKVRDQEGRINYYWTLLEPGDTIIFEANGNLIAPRYAFALSRGFGSGIINSNAPMDKCDAKCQTPQGAINSSLPFQNVHPVTIGECPKYVRSAKLRMVTGLRNIPSIQSRGLFGAIAGFIEGGWTGMVDGWYGYHHQNEQGSGYAADQKSTQNAINGITNKVNSVIEKMNTQFTAVGKEFNKLERRMENLNKKVDDGFIDIWTYNAELLVLLENERTLDFHDSNVKNLYEKVKSQLKNNAKEIGNGCFEFYHKCNDECMESVKNGTYDYPKYSEESKLNREKIDGVKLESMGVYQILAIYSTVASSLVLLVSLGAISFWMCSNGSLQCRICI

SEQ ID NO: 5521 - protein, 565 aa, synthetic construct
  REGION 1..565: note = hemagglutinin__InfluenzaA__ADL60297
MKVKLLVLLCTFTATYADTICIGYHANNSTDTVDTVLEKNVTVTHSVNLLENSHNGKLCLLKGIAPLQLGNCSVAGWILGNPECELLISKESWSYIVEKPNPENGTCYPGHFADYEELREQLSSVSSFERFEIFPKESSWPNHTVTGVSASCSHNGESSFYRNLLWLTRKNGLYPNLSKSYANNKEKEVLVLWGVHHPPNIGDQKTLYHTENAYVSVVSSHYSRKFTPEIAKRPKVRDQEGRINYYWTLLEPGDTIIFEANGNLIAPRYAFALSRGFGSGIINSNAPMDKCDAKCQTPQGAINSSLPFQNVHPVTIGECPKYVRSAKLRMVTGLRNIPSIQSRGLFGAIAGFIEGGWTGMVDGWYGYHHQNEQGSGYAADQKSTQNAINGITNKVNSVIEKMNTQFTAVGKEFNKLERRMENLNKKVDDGFIDIWTYNAELLVLLENERTLDSHDSNVKNLYEKVKSQLKNNAKEIGNGCFEFYHKCNDECMESVKNGTYDYPKYSEESKLNREKIDGVKLESMGVYQILAIYSTVASSLVLLVSLGAISFWMCSNGSLQCRICI

SEQ ID NO: 5522 - protein, 565 aa, synthetic construct
  REGION 1..565: note = hemagglutinin__InfluenzaA__ADL60308
MKVKLLVLLCTFAATYADTICIGYHANNSTDTVDTVLEKNVTVTHSVNLLENSHNGKLCLLKGIAPLQLGNCSVAGWILGNPECELLISKESWSYIVEKPNPENGTCYPGHFADYEELREQLSSVSSFERFEIFPKESSWPNHTVTGVSASCSHNGESSFYRNLLWLTGKNGLYPNLSKSYANNKEKEVLVLWGVHHPPNIGVQKALYHTENAYVSVVSSHYSRKFTPEIAKRPKVRDQEGRINYYWTLLEPGDTIIFEANGNLIAPRYAFALSRGFGSGIINSNAPMDKCDAKCQTPQGAINSSLPFQNVHPVTIGECPKYVRSAKLRMVTGLRNIPSIQSRGLFGAIAGFIEGGWTGMVDGWYGYHHQNEQGSGYAADQKSTQNAINGITNKVNSVIEKMNTQFTAVGKEFNKLERRMENLNKKVDDGFIDIWTYNAELLVLLENERTLDFHDSNVKNLYEKVKSQLKNNAKEIGNGCFEFYHKCNDECMESVKNGTYDYPKYSEESKLNREKIDGVKLESMGVYQILAIYSTVASSLVLLVSLGAISFWMCSNGSLQCRICI

SEQ ID NO: 5523 - protein, 565 aa, synthetic construct
  REGION 1..565: note = hemagglutinin__InfluenzaA__ADL60341
MKVKLLVLLCTFTATYADTICIGYHANNSTDTVDTVLEKNVTVTHSVNLLENSHNGKLCLLKGIAPLQLGNCSVAGWILGNPECELLISKESWSYIVEKPNPENGTCYPGHFADYEELREQLSSVSSFERFEIFPKESSWPNHTVTGVSASCSHNGESSFYRNLLWLTGKNGLYPNLSKSYANNKEKEVLVLWGVHHPPNIGVQKALYHTEIAYVSVVSSHYSRKFTPEIAKRPKVRDQEGRINYYWTILEPGDTIIFEANGNLIAPRYAFALSRGFGSGIINSNAPMDKCDAKCQTPQGAINSSLPFQNVHPVTIGECPKYVRSAKLRMVTGLRNIPSIQSRGLFGAIAGFIEGGWTGMVDGWYGYHHQNEQGSGYAADQKSTQNAINGITNKVNSVIEKMNTQFTAVGKEFNKLERRMENLNKKVDDGFIDIWTYNAELLVLLENERTLDFHDSNVKNLYEKVKSQLKNNAKEIGNGCFEFYHKCNDECMESVKNGTYDYPKYSEESKLNREKIDGVKLESMGVYQILAIYSTVASSLVLLVSLGAISFWMCSNGSLQCRICI

SEQ ID NO: 5524 - protein, 565 aa, synthetic construct
  REGION 1..565: note = hemagglutinin__InfluenzaA__ADL60352
MKVKLLVLLCTFTATYADTICIGYHANNSTDTVDTVLEKNVTVTHSVNLLENSHNGKLCLLKGIAPLQLGNCSVAGWILGNPECELLISKESWSYIVEKPNPENGTCYPGHFAGYEELREQLSSVSSFERFEIFPKESSWPNHTVTGVSASCSHNGERSFYRNLLWLTGKNGLYPNLSKSYANNKEKEVLVLWGVHHPPDIGNQKTLYHTENAYVSVVSSHYSRKFTPEIAKRPKVRDQEGRINYYWTLLEPGDTIIFEANGNLIAPRYAFALSRGFGSGIINSNAPMDKCDAKCQTPQGAINSSLPFQNVHPVTIGECPKYVRSAKLRMVTGLRNIPSIQSRGLFGAIAGFIEGGWTGMVDGWYGYHHQNEQGSGYAADQKSTQNAINGITNKVNSVIEKMNTQFTAVGKEFNKLERRMENLNKKVDDGFIDIWTYNAELLVLLENERTLDFHDSNVKNLYEKVKSQLKNNAKEIGNGCFEFYHKCNDECMESVKNGTYDYPKYSEESKLNREKIDGVKLESMGVYQILAIYSTVASSLVLLVSLGAISFWMCSNGSLQCRICI

SEQ ID NO: 5525 - protein, 566 aa, synthetic construct
  REGION 1..566: note = hemagglutinin__InfluenzaA__ADL60363
MKTIIALSYILCLVFAQKFPGNDNSTATLCLGHHAVPNGTIVKTITNDQIEVTNATELVQSSSTGEICDSPHQILDGENCTLIDALLGDPQCDGFQNKNWDLFVERSKAYSNCYPYDVPDYASLRSLIASSGTLEFNNESFNWTGVTQNGTSSACIRRSNNSFFSRLNWLTHSKFKYPALNVTMPNNENFDKLYIWGVHHPGTDNDQIFLYAQASGRITISTKRSQQTVIPNIGSRPRVRDIPSRISIYWTIVKPGDILLINSTGNLIAPRGYFKIRSGKSSIMRSDAPIGKCNSECITPNGSIPNDKPFQNVNRITYGACPRYVKQNTLKLATGMRNVPEKQTRGIFGAIAGFIENGWEGMVDGWYGFRHQNSEGVGQAADLKSTQAAIDQINGKLNRLIGKTNEKFHQIEKEFSEVEGRIQDLEKYVEDTKIDLWSYNAELLVALENQHTIDLTDSEMNKLFEKTKKQLRENAEDMGNGCFKIYHKCDNACIGSIRNGTYDHDVYRDEALNNRFQIKGVELKSGYKDWILWISFAISCFLLCIALLGFIMWACQKGNIRCNICI

SEQ ID NO: 5526 - protein, 565 aa, synthetic construct
  REGION 1..565: note = hemagglutinin__InfluenzaA__ADL60374
MKVKLLVLLCTFTATYADTICIGYHANNSTDTVDTVLEKNVTVTHSVNLLENSHNGKLCLLKGIAPLQLGNCSVAGWILGNPECELLISKESWSYIVEKPNPENGTCYPGHFADYEELREQLSSVSSFERFEIFPKESSWPNHTVTGVSASCSHDGESSFYRNLLWLTGKNGLYPNLSKSYANNKEKEVLVLWGVHHPPNIGDQKALYHTENAYVSVVSSHYSRKFTPEIAKRPKVRDQEGRINYYWTLLEPGDTIIFEANGNLIAPRYAFALSRGFGSGIINSNAPMDKCDAKCQTPQGAINSSLPFQNVHPVTIGECPKYVRSAKLRVVTGLRNIPSIQSRGLFGAIAGFIEGGWTGMVDGWYGYHHQNEQGSGYAADQKSTQNAINGITNKVNSVIEKMNTQFTAVGKEFNKLERRMENLNKKVDDGFIDIWTYNAELLVLLENERTLDFHDSNVKNLYEKVKSQLKNNAKEIGNGCFEFYHKCNDECMESVKNGTYDYPKYSEESKLNREKIDGVKLESMGVYQILAIYSTVASSLVLLVSLGAISFWMCSNGSLQCRICI

SEQ ID NO: 5527 - protein, 566 aa, synthetic construct
  REGION 1..566: note = hemagglutinin__InfluenzaA__ADM07135
MKAILVVLLYTFATANADTLCIGYHANNSTDTVDTVLEKNVTVTHSVNLLEDKHNGKLCKLRGVAPLHLGKCNIAGWILGNPECESLSTASSWSYIVETSSSDNGTCYPGDFIDYEELREQLSSVSSFERFEIFPKTSSWPNHESNKGVTAACPHAGAKSFYKNLIWLVKKGNSYPKLSKSYINDKGKEVLVLWGIHHPSTSADQQSLYQNADAYVFVGTSRYSKKFKPEIAIRPKVRDQEGRMNYYWTLVEPGDKITFEATGNLVVPRYAFAMERNAGSGIIISDTPVHDCNTTCQTPKGAINTSLPFQNIHPITIGKCPKYVKSTKLRLATGLRNVPSIQSRGLFGAIAGFIEGGWTGMVDGWYGYHHQNEQGSGYAADLKSTQNAIDEITNKVNSVIEKMNTQFTAVGKEFNHLEKRIENLNKKVDDGFLDIWTYNAELLVLLENERTLDYHDSNVKNLYEKVRSQLKNNAKEIGNGCFEFYHKCDNTCMESVKNGTYDYPKYSEEAKLNREEIDGVKLESTRIYQILAIYSTVASSLVLVVSLGAISFWMCSNGSLQCRICI

SEQ ID NO: 5528 - protein, 566 aa, synthetic construct; identical to SEQ ID NO: 3154
  REGION 1..566: note = hemagglutinin__InfluenzaA__ADM07144

SEQ ID NO: 5529 - protein, 566 aa, synthetic construct
  REGION 1..566: note = hemagglutinin__InfluenzaA__ADM07154
MKAILVVLLYTFATANADTLCIGYHANNSTDTVDTVLEKNVTVTHSVNLLEDKHNGKLCKLRGVAPLHLGKCNIAGWILGNPECESLSTASSWSYIVETSSSDNGTCYPGDFIDYEELREQLSSVSSFERFEIFPKTSSWPNHDSNKGVTAACPHAGAKSFYKNLIWLVKKGNSYPKLSKSYINDKGKEVLVLWGIHHPPTSADQQSLYQNADAYVFVGTSRYSKKFKPEIAIRPKVRDQEGRMNYYWTLVEPGDKITFEATGNLVVPRYAFAMVRNAGSGIIISDTPVHDCNTTCQTPKGAINTSLPFQNIHPITIGKCPKYVKSTKLRLATGLRNVPSIQSRGLFGAIAGFIEGGWTGMVDGWYGYHHQNEQGSGYAADLKSTQNAIDEITNKVNSVIEKMNTQFTAVGKEFNHLEKRIENLNKKVDDGFLDIWTYNAELLVLLENERTLDYHDSNVKNLYEKVRSQLKNNAKEIGNGCFEFYHKCDNTCMESVKNGTYDYPKYSEEAKLNREEIDGVKLESTRIYQILAIYSTVASSLVLVVSLGAISFWMCSNGSLQCRICI

SEQ ID NO: 5530 - protein, 566 aa, synthetic construct; identical to SEQ ID NO: 3154
  REGION 1..566: note = hemagglutinin__InfluenzaA__ADM07163

SEQ ID NO: 5531 - protein, 565 aa, synthetic construct; identical to SEQ ID NO: 5513
  REGION 1..565: note = hemagglutinin__InfluenzaA__ADM07460

SEQ ID NO: 5532 - protein, 566 aa, synthetic construct
  REGION 1..566: note = hemagglutinin__InfluenzaA__ADM07504
MKTIIALSYILCLVFAQKLPGNDNSTATLCLGHHAVPNGTIVKTITNDQIEVTNATELVQSSSTGEICDSPHQILDGENCTLIDALLGDPQCDGFQNKKWDLFVERSKAYSNCYPYDVPDYASLRSLVASSGTLEFNNESFNWTGVTQNGTSSACIRRSNNSFFSRLNWLTHLNFKYPALNVTMPNNEQFDKLYIWGVHHPGTDKDQIFLYAQASGRITVSTKRSQQAVIPNIGSRPRVRNIPSRISIYWTIVKPGDILLINSTGNLIAPRGYFKIRNGKSSIMRSDAPIGKCNSECITPNGSIPNDKPFQNVNRITYGACPRYVKQNTLKLATGMRNVPEKQTRGIFGAIAGFIENGWEGMVDGWYGFRHQNSEGRGQAADLKSTQAAIDQINGKLNRLIGKTNEKFHQIEKEFSEVEGRIQDLEKYVEDTKIDLWSYNAELLVALENQHTIDLTDSEMNKLFEKTKKQLRENAEDMGNGCFKIYHKCDNACIGSIRNGTYDHDVYRDEALNNRFQIKGVELKSGYKDWILWISFAISCFLLCVALLGFIMWACQKGNIRCNICI

SEQ ID NO: 5533 - protein, 566 aa, synthetic construct
  REGION 1..566: note = hemagglutinin__InfluenzaA__ADM12806
MKTIIALSYILCLVFAQKLPGNDNSTATLCLGHHAVPNGTIVKTITNDQIEVTNATELVQSSSTGEICDSPHQILDGENCTLIDALLGDPQCDGFQNKKWDLFVERSKAYSNCYPYDVPDYASLRSLVASSGTLEFNNESFNWTGVTQNGTSSACIRRSNNSFFSRLNWLTHLNFKYPALNVTMPNNEQFDKLYIWGVHHPGTDKDQIFLYAQASGRITVSTKRSQQAVIPNIGSRPRVRNIPSRISIYWTIVKPGDILLINSTGNLIAPRGYFKIRSGKSSIMRSDAPIGKCNSECITPNGSIPNDKPFQNVNRITYGACPRYVKQSTLKLATGMRNVPEKQTRGIFGAIAGFIENGWEGMVDGWYGFRHQNSEGRGQAADLKSTQAAIDQINGKLNRLIGKTNEKFHQIEKEFSEVEGRIQDLEKYVEDTKIDLWSYNAELLVALENQHTIDLTDSEMNKLFEKTKKQLRENAEDMGNGCFTIYHKCDNACIGSIRNGTYDHNVYRDEALNNRFQIKGVELKSGYKDWILWISFAISCFLLCVALLGFIMWACQKGNIRCNICI

SEQ ID NO: 5534 - protein, 566 aa, synthetic construct; identical to SEQ ID NO: 5533
  REGION 1..566: note = hemagglutinin__InfluenzaA__ADM12817

SEQ ID NO: 5535 - protein, 566 aa, synthetic construct; identical to SEQ ID NO: 5533
  REGION 1..566: note = hemagglutinin__InfluenzaA__ADM12828

SEQ ID NO: 5536 - protein, 566 aa, synthetic construct; identical to SEQ ID NO: 5533
  REGION 1..566: note = hemagglutinin__InfluenzaA__ADM12839

SEQ ID NO: 5537 - protein, 566 aa, synthetic construct
  REGION 1..566: note = hemagglutinin__InfluenzaA__ADM12850
MKAIIALSYILCLVFAQKLPGNDNSTATLCLGHHAVPNGTIVKTITNDQIEVTNATELVQSSSTGEICDSPHQILDGENCTLIDALLGDPQCDGFQNKKWDLFVERSKAYSNCYPYDVPDYASLRSLVASSGTLEFNNESFNWTGVTQNGTSSACIRRSNNSFFSRLNWLTHLNFKYPALNVTMPNNEQFDKLYIWGVHHPGTDKDQIFLYAQASGRITVSTKRSQQAVIPNIGSRPRVRNIPSRISIYWTIVKPGDILLINSTGNLIAPRGYFKIRSGKSSIMRSDAPIGKCNSECITPNGSIPNDKPFQNVNRITYGACPRYVKQSTLKLATGMRNVPEKQTRGIFGAIAGFIENGWEGMVDGWYGFRHQNSEGRGQAADLKSTQAAIDQINGKLNRLIGKTNEKFHQIEKEFSEVEGRIQDLEKYVEDTKIDLWSYNAELLVALENQHTIDLTDSEMNKLFEKTKKQLRENAEDMGNGCFTIYHKCDNACIGSIRNGTYDHNVYRDEALNNRFQIKGVELKSGYKDWILWISFAISCFLLCVALLGFIMWACQKGNIRCNICI

SEQ ID NO: 5538 - protein, 566 aa, synthetic construct; identical to SEQ ID NO: 2669
  REGION 1..566: note = hemagglutinin__InfluenzaA__ADM12861

SEQ ID NO: 5539 - protein, 566 aa, synthetic construct; identical to SEQ ID NO: 2669
  REGION 1..566: note = hemagglutinin__InfluenzaA__ADM12871

SEQ ID NO: 5540 - protein, 566 aa, synthetic construct; identical to SEQ ID NO: 2669
  REGION 1..566: note = hemagglutinin__InfluenzaA__ADM12881

SEQ ID NO: 5541 - protein, 566 aa, synthetic construct; identical to SEQ ID NO: 2669
  REGION 1..566: note = hemagglutinin__InfluenzaA__ADM12891

SEQ ID NO: 5542 - protein, 566 aa, synthetic construct; identical to SEQ ID NO: 2669
  REGION 1..566: note = hemagglutinin__InfluenzaA__ADM12901

SEQ ID NO: 5543 - protein, 566 aa, synthetic construct; identical to SEQ ID NO: 3771
  REGION 1..566: note = hemagglutinin__InfluenzaA__ADM12911

SEQ ID NO: 5544 - protein, 566 aa, synthetic construct; identical to SEQ ID NO: 2669
  REGION 1..566: note = hemagglutinin__InfluenzaA__ADM12921

SEQ ID NO: 5545 - protein, 566 aa, synthetic construct; identical to SEQ ID NO: 2669
  REGION 1..566: note = hemagglutinin__InfluenzaA__ADM12931

SEQ ID NO: 5546 - protein, 566 aa, synthetic construct; identical to SEQ ID NO: 2669
  REGION 1..566: note = hemagglutinin__InfluenzaA__ADM12941

SEQ ID NO: 5547 - protein, 566 aa, synthetic construct; identical to SEQ ID NO: 2669
  REGION 1..566: note = hemagglutinin__InfluenzaA__ADM12951

SEQ ID NO: 5548 - protein, 566 aa, synthetic construct
  REGION 1..566: note = hemagglutinin__InfluenzaA__ADM12961
MKAVLVVLLYTFATANADTLCIGYHANNSTDTVDTVLEKNVTVTHSVNILEDKHNGKLCKLGGVAPLHLGKCNIAGWILGNPECESLSTASSWSYIVETSSSDNGTCYPGDFIDYEELREQLSSVSSFERFEIFPKTSSWPNHDSNKGVTAACPHAGAKSFYKNLIWLVKKGNSYPKLSKSYINDKGKEVLVLWGIHHPSTSADQQSLYQNADAYVFVGTSRYSKKFKPEIAIRPKVRDQEGRMNYYWTLVEPGDKITFEATGNLVVPRYAFAMERNAGSGIIISDTPVHDCNTTCQTPKGAINTSLPFQNIHPITIGKCPKYVKSTKLRLATGLRNVPSIQSRGLFGAIAGFIEGGWTGMVDGWYGYHHQNEQGSGYAADLKSTQNAIDEITNKVNSVIEKMNTQFTAVGKEFNHLEKRIENLNKKVDDGFLDIWTYNAELLVLLENERTLDYHDSNVKNLYEKVRSQLKNNAKEIGNGCFEFYHKCDNTCMESVKNGTYDYPKYSEEAKLNREEIDGVKLESTRIYQILAIYSTVASSLVLVVSLGAISFWMCSNGSLQCRICI

SEQ ID NO: 5549 - protein, 566 aa, synthetic construct; identical to SEQ ID NO: 4318
  REGION 1..566: note = hemagglutinin__InfluenzaA__ADM12971

SEQ ID NO: 5550 - protein, 566 aa, synthetic construct; identical to SEQ ID NO: 3770
  REGION 1..566: note = hemagglutinin__InfluenzaA__ADM12981

SEQ ID NO: 5551 - protein, 566 aa, synthetic construct
  REGION 1..566: note = hemagglutinin__InfluenzaA__ADM12991
MKAILVVLLYTFETANADTLCIGYHANNSTDTVDTVLEKNVTVTHSVNLLEDKHNGKLCKLRGVAPLHLGKCNIAGWILGNPECESLSTASSWSYIVETSSSDNGTCYPGDFIDYEELREQLSSVSSFERFEIFPKTSSWPNHDSNKGVTAACPHAGAKSFYKNLIWLVKKGNSYPKLSKSYINDKGKEVLVLWGIHHPSTSADQQSLYQNADAYVFVGTSRYSKKFKPEIAIRPKVRDQEGRMNYYWTLVEPGDKITFEATGNLVVPRYAFAMERNAGSGIIISDTPVHDCNTTCQTPKGAINTSLPFQNIHPITIGKCPKYVKSTKLRLATGLRNVPSIQSRGLFGAIAGFIEGGWTGMVDGWYGYHHQNEQGSGYAADLKSTQHAIDEITNKVNSVIEKMNTQFTAVGKEFNHLEKRIENLNKKVDDGFLDIWTYNAELLVLLENERTLDYHDSNVKNLYEKVRSQLKNNAKEIGNGCFEFYHKCDNTCMESVKNGTYDYPKYSEEAKLNREEIDGVKLESTRIYQILAIYSTVASSLVLVVSLGAISFWMCSNGSLQCRICI

SEQ ID NO: 5552 - protein, 566 aa, synthetic construct
  REGION 1..566: note = hemagglutinin__InfluenzaA__ADM13001
MKAILVVLLYTFATANADTLCIGYHANNSTDTVDTVLEKNVTVTHSVNLLEDKHNGKLCKLRGVAPLHLGKCNIAGWILGNPECESLSTASSWSYIVETSSSDNGTCYPGDFIDYEELREQLSSVSSFERFEIFPKTSSWPNHDSNKGVTAACPHAGAKSFYKNLIWLVKKGNSYPKLSKSYINDKGKEVLVLWGIHHPSTSADQQSLYQNADAYVFVGTSRYSKKFKPEIAIRPKVRDQEGRMNYYWTLVEPGDKITFEATGNLVVPRYAFAMERNAGSGIIISDTPVHDCNTTCQTPKGAINTSLPFQNIHPITIGKCPKYVKSTKLRLATGLRNIPSIQSRGLFGAIAGFIEGGWTGMVDGWYGYHHQNEQGSGYAADLKSTQHAIDEITNKVNSVIEKMNTQFTAVGKEFNHLEKRIENLNKKVDDGFLDIWTYNAELLVLLENERTLDYHDSNVKNLYEKVRSQLKNNAKEIGNGCFEFYHKCDNTCMESVKNGTYDYPKYSEEAKLNREEIDGVKLESTRIYQILAIYSTVASSLVLVVSLGAISFWMCSNGSLQCRICI

SEQ ID NO: 5553 - protein, 566 aa, synthetic construct; identical to SEQ ID NO: 3833
  REGION 1..566: note = hemagglutinin__InfluenzaA__ADM13011

SEQ ID NO: 5554 - protein, 566 aa, synthetic construct
  REGION 1..566: note = hemagglutinin__InfluenzaA__ADM13021
MKAILVVLLYTFATANADTLCIGYHANNSTDTIDTVLEKNVTVTHSVNLLEDKHNGKLCKLRGVAPLHLGKCNIAGWILGNPECESLSTASSWSYIVETSSSDNGTCYPGDFIDYEELREQLSSVSSFERFEIFPKTSSWPNHDSNKGVTAACPHAGAKSFYKNLIWLVKKGNSYPKLSKSYINDKGKEVLVLWGIHHPSTSADQQSLYQNADAYVFVGTSRYSKKFKPEIAIRPKVRDQEGRMNYYWTLVEPGDKITFEATGNLVVPRYAFAMERNAGSGIIISDTPVHDCNTTCQTPKGAINTSLPFQNIHPITIGKCPKYVKSTKLRLATGLRNVPSIQSRGLFGAIAGFIEGGWTGMVDGWYGYHHQNEQGSGYAADLKSTQNAIDKITNKVNSVIEKMNTQFTAVGKEFNHLEKRIENLNKKVDDGFLDIWTYNAELLVLLENERTLDYHDSNVKNLYEKVRSQLKNNAKEIGNGCFEFYHKCDNTCMESVKNGTYDYPKYSEEAKLNREEIDGVKLESTRIYQILAIYSTVASSLVLVVSLGAISFWMCSNGSLQCRICI

SEQ ID NO: 5555 - protein, 566 aa, synthetic construct; identical to SEQ ID NO: 4015
  REGION 1..566: note = hemagglutinin__InfluenzaA__ADM13031

SEQ ID NO: 5556 - protein, 566 aa, synthetic construct
  REGION 1..566: note = hemagglutinin__InfluenzaA__ADM13041
MKAILVVLLYTFATANADTLCIGYHANNSTDTVDTVLEKNVTVTHSVNLLEDKHNGKLCKLRGVAPLHLGKCNIAGWILGNPECESLSTASSWSYIVETSSSDNGTCYPGDFIDYEELREQLSSVSSFERFEIFPKTSSWPNHDSNKGVTAACPHAGAKSFYKNLIWLVKKGNSYPKLSKSYINDKGKEVLVLWGIHHPSTSADQQSLYQNADAYVFVGTSRYSKKFKPEIAIRPKVREQEGRMNYYWTLVEPGDKITFEATGNLVVPRYAFAMERNAGSGIIISDTPVHDCNTTCQTPKGAINTSLPFQNVHPITIGKCPKYVKSTKLRLATGLRNVPSIQSRGLFGAIAGFIEGGWTGMVDGWYGYHHQNEQGSGYAADLKSTQNAIDEITNKVNSVIEKMNTQFTAVGKEFNHLEKRIENLNKKVDDGFLDIWTYNAELLVLLENERTLDYHDSNVKNLYEKVRSQLKNNAKEIGNGCFEFYHKCDNTCMESVKNGTYDYPKYSEEAKLNREEIDGVKLESTRIYQILAIYSTVASSLVLVVSLGAISFWMCSNGSLQCRICI

SEQ ID NO: 5557 - protein, 566 aa, synthetic construct
  REGION 1..566: note = hemagglutinin__InfluenzaA__ADM13051
MKAILVVLLYTFATTNADTLCIGYHANNSTDTVDTVLEKNVTVTHSVNLLEDKHNGKLCKLRGVAPLHLGKCNIAGWILGNPECESLSTASSWSYIVETSSSDNGTCYPGDFIDYEELREQLSSVSSFERFEIFPKTSSWPNHDSNKGVTAACPHAGAKSFYKNLIWLVKKGNSYPKLSKSYINDKGKEVLVLWGIHHPSTSADQQSLYQNADAYVFVGTSRYSKKFKPEIAIRPKVRDQEGRMNYYWTLVEPGDKITFEATGNLVVPRYAFAMERNAGSGIIISDTPVHDCNTTCQTPKGAINTSLPFQNIHPITIGKCPKYVKSTKLRLATGLRNVPSIQSRGLFGAIAGFIEGGWTGMVDGWYGYHHQNEQGSGYAADLKSTQNAIDKITNKVNSVIEKMNTQFTAVGKEFNHLEKRIENLNKKVDDGFLDIWTYNAELLVLLENERTLDYHDSNVKNLYEKVRSQLKNNAKEIGNGCFEFYHKCDNTCMESVKNGTYDYPKYSEEAKLNREEIDGVKLESTRIYQILAIYSTVASSLVLVVSLGAISFWMCSNGSLQCRICI

SEQ ID NO: 5558 - protein, 566 aa, synthetic construct
  REGION 1..566: note = hemagglutinin__InfluenzaA__ADM13061
MKAILVVLLYTFATANADTLCIGYHANNSTDTVDTVLEKNVTVTHSVNLLEDKHNGKLCKLRGIAPLHLGKCNIAGWILGNPECESLSTASSWSYIVETSSSDNGTCYPGDFIDYEELREQLSSVSSFERFEIFPKTSSWPNHDSNKGVTAACPHAGAKSFYKNLIWLVKKGNSYPKLSKSYINDKGKEVLVLWGIHHPSTSADQQSLYQNADAYVFVGTSRYSKKFKPEIAIRPKVRDQEGRMNYYWTLVEPGDKITFEATGNLVVPRYAFAMERNAGSGIIISDTPVHDCNTSCQTPKGAINTSLPFQNIHPITIGKCPKYVKSTKLRLATGLRNVPSIQSRGLFGAIAGFIEGGWTGMVDGWYGYHHQNEQGSGYAADLKSTQNAIDEITNKVNSVIEKMNTQFTAVGKEFNHLEKRIENLNKKVDDGFLDIWTYNAELLVLLENERTLDYHDSNVKNLYEKVRSQLKNNAKEIGNGCFEFYHKCDNTCMESVKNGTYDYPKYSEEAKLNREEIDGVKLESTRIYQILAIYSTVASSLVLVVSLGAISFWMCSNGSLQCRICI

SEQ ID NO: 5559 - protein, 566 aa, synthetic construct; identical to SEQ ID NO: 4836
  REGION 1..566: note = hemagglutinin__InfluenzaA__ADM13071

SEQ ID NO: 5560 - protein, 566 aa, synthetic construct
  REGION 1..566: note = hemagglutinin__InfluenzaA__ADM13081
MKAILVVLLYTFATANADTLCIGYHANNSTDTVDTVLEKNVTVTHSVNLLEDKHNGKLCKLRGIAPLHLGKCNIAGWILGNPECESLSTASSWSYIVETSGSDNGTCYPGDFIDYEELREQLSSVSSFERFEIFPKTSSWPNHDSNKGVTAACPHAGAKSFYKNLIWLVKKGNSYPKLSKSYINDKEKEVLVLWGIHHPSTSADQQSLYQNADAYVFVGTSRYSKKFKPEIAIRPKVRDQEGRMNYYWTLVEPGDKITFEATGNLVVPRYAFAMERNAGSGIIISDTPVHDCNTTCQTPKGAINTSLPFQNIHPITIGKCPKYVKSTKLRLATGLRNVPSIQSRGLFGAIAGFIEGGWTGMVDGWYGYHHQNEQGSGYAADLKSTQNAIDEITNKVNSVIEKMNTQFTAVGKEFNHLEKRIENLNKKVDDGFLDIWTYNAELLVLLENERTLDYHDSNVKNLYEKVRSQLKNNAKEIGNGCFEFYHKCDNTCMESVKNGTYDYPKYSEEAKLNREEIDGVKLESTRIYQILAIYSTVASSLVLVVSLGAISFWMCSNGSLQCRICI

SEQ ID NO: 5561 - protein, 566 aa, synthetic construct; identical to SEQ ID NO: 4089
  REGION 1..566: note = hemagglutinin__InfluenzaA__ADM13091

SEQ ID NO: 5562 - protein, 566 aa, synthetic construct; identical to SEQ ID NO: 3833
  REGION 1..566: note = hemagglutinin__InfluenzaA__ADM13101

SEQ ID NO: 5563 - protein, 566 aa, synthetic construct
  REGION 1..566: note = hemagglutinin__InfluenzaA__ADM13111
MKAILVVLLYTFETANADTLCIGYHANNSTDTVDTVLEKNVTVTHSVNLLEDKHNGKLCKLRGVAPLHLGKCNIAGWILGNPECESLSTASSWSYIVETSSSDNGTCYPGDFINYEELREQLSSVSSFERFEIFPKTSSWPNHDSNKGVTAACPHAGAKSFYKNLIWLVKKGNSYPKLSKSYINDKGKEVLVLWGIHHPSTSADQQSLYQNADAYVFVGTSRYSKKFKPEIAIRPKVRDQEGRMNYYWTLVDPGDKITFEATGNLVVPRYAFAMERNAGSGIIISDTPVHDCNTTCQTPNGAINTSLPFQNIHPITIGKCPKYVKSTKLRLATGLRNVPSIQSRGLFGAIAGFIEGGWTGMVDGWYGYHHQNEQGSGYAADLKSTQNAIDKITNKVNSVIEKMNTQFTAVGKEFNHLEKRIENLNKKVDDGFLDIWTYNAELLVLLENERTLDYHDSNVKNLYEKVRSQLKNNAKEIGNGCFEFYHKCDNTCMESVKNGTYDYPKYSEEAKLNREEIDGVKLESTRIYQILAIYSTVASSLVLVVSLGAISFWMCSNGSLQCRICI

SEQ ID NO: 5564 - protein, 566 aa, synthetic construct; identical to SEQ ID NO: 2669
  REGION 1..566: note = hemagglutinin__InfluenzaA__ADM13121

SEQ ID NO: 5565 - protein, 566 aa, synthetic construct; identical to SEQ ID NO: 3833
  REGION 1..566: note = hemagglutinin__InfluenzaA__ADM13131

SEQ ID NO: 5566 - protein, 566 aa, synthetic construct; identical to SEQ ID NO: 3997
  REGION 1..566: note = hemagglutinin__InfluenzaA__ADM13141

SEQ ID NO: 5567 - protein, 566 aa, synthetic construct; identical to SEQ ID NO: 3997
  REGION 1..566: note = hemagglutinin__InfluenzaA__ADM13151

SEQ ID NO: 5568 - protein, 566 aa, synthetic construct; identical to SEQ ID NO: 3770
  REGION 1..566: note = hemagglutinin__InfluenzaA__ADM13161

SEQ ID NO: 5569 - protein, 566 aa, synthetic construct; identical to SEQ ID NO: 4318
  REGION 1..566: note = hemagglutinin__InfluenzaA__ADM13171

SEQ ID NO: 5570 - protein, 566 aa, synthetic construct; identical to SEQ ID NO: 4318
  REGION 1..566: note = hemagglutinin__InfluenzaA__ADM13181

SEQ ID NO: 5571 - protein, 566 aa, synthetic construct
  REGION 1..566: note = hemagglutinin__InfluenzaA__ADM13191
MKAILVVLLYTLATANADTLCIGYHANNSTDTVDTVLEKNVTVTHSVNLLEDKHNGKLCKLRGVAPLHLGKCNIAGWILGNPECESLSTASSWSYIVETSSSDNGTCYPGDFIDYEELREQLSSVSSFERFEIFPKTSSWPNHDSNKGVTAACPHAGAKSFYKNLIWLVKKGNSYPKLSKSYINDKGKEVLVLWGIHHPSTSADQQSLYQNADAYVFVGTSRYSKKFKPEIAIRPKVRDQEGRMNYYWTLVEPGDKITFEATGNLVVPRYAFAMERNAGSGIIISDTPVHDCNTTCQTPKGAINTSLPFQNIHPITIGKCPKYVKSTKLRLATGLRNVPSIQSRGLFGAIAGFIEGGWTGMVDGWYGYHHQNEQGSGYAADLKSTQHAIDEITNKVNSVIEKMNTQFTAVGKEFNHLEKRIENLNKKVDDGFLDIWTYNAELLVLLENERTLDYHDSNVKNLYEKVRSQLKNNAKEIGNGCFEFYHKCDNTCMESVKNGTYDYPKYSEEAKLNREEIDGVKLESTRIYQILAIYSTVASSLVLVVSLGAISFWMCSNGSLQCRICI

SEQ ID NO: 5572 - protein, 566 aa, synthetic construct
  REGION 1..566: note = hemagglutinin__InfluenzaA__ADM13211
MKAILVVLLYTLATANADTLCIGYHANNSTDTVDTVLEKNVTVTHSVNLLEDKHNGKLCKLRGIAPLHLGKCNIAGWILGNPECESLSTASSWSYIVETSSSDNGTCYPGDFIDYEELREQLSSVSSFERFEIFPKTSSWPNHDSNKGVTAACPHAGAKSFYKNLIWLVKKGNSYPKLSKSYINDKGKEVLVLWGIHHPSTSADQQSLYQNADAYVFVGTSRYSKKFKPEIAIRPKVRDQEGRMNYYWTLVEPGDKITFEATGNLVVPRYAFAMERNAGSGIIISDTPVHDCNTTCQTPKGAINTSLPFQNIHPITIGKCPKYVKSTKLRLATGLRNVPSIQSRGLFGAIAGFIEGGWTGMVDGWYGYHHQNEQGSGYAADLKSTQNAIDEITNKVNSVIEKMNTQFTAVGKEFNHLEKRIENLNKKVDDGFLDIWTYNAELLVLLENERTLDYHDSNVKNLYEKVRSQLKNNAKEIGNGCFEFYHKCDNTCMESVKNGTYDYPKYSEEAKLNREEIDGVKLESTRIYQILAIYSTVASSLVLVVSLGAISFWMCSNGSLQCRICI

SEQ ID NO: 5573 - protein, 566 aa, synthetic construct; identical to SEQ ID NO: 5572
  REGION 1..566: note = hemagglutinin__InfluenzaA__ADM13221

SEQ ID NO: 5574 - protein, 566 aa, synthetic construct
  REGION 1..566: note = hemagglutinin__InfluenzaA__ADM13231
MKAILVVLLYTFETANADTLCIGYHANNSTDTVDTVLEKNVTVTHSVNLLEDKHNGKLCKLRGVAPLHLGKCNIAGWILGNPECESLSTASSWSYIVETSSSDNGTCYPGDFINYEELREQLSSVSSFERFEIFPKTSSWPNHDSNKGVTAACPHAGAKSFYKNLIWLVKKGNSYPKLSKSYINDKGKEVLVLWGIHHPSTSADQQSLYQNADAYVFVGTSRYSKKFKPEIAIRPKVRDQEGRMNYYWTLVEPGDKITFEATGNLVVPRYAFAMERNAGSGIIISDTPVHDCNTTCQTPNGAINTSLPFQNIHPITIGKCPKYVKSTKLRLATGLRNVPSIQSRGLFGAIAGFIEGGWTGMVDGWYGYHHQNEQGSGYAADLKSTQNAIDKITNKVNSVIEKMNTQFTAVGKEFNHLEKRIENLNKKVDDGFLDIWTYNAELLVLLENERTLDYHDSNVKNLYEKVRSQLKNNAKEIGNGCFEFYHKCDNTCMESVKNGTYDYPKYSEEAKLNREEIDGVKLESTRIYQILAIYSTVASSLVLVVSLGAISFWMCSNGSLQCRICI

SEQ ID NO: 5575 - protein, 566 aa, synthetic construct; identical to SEQ ID NO: 3833
  REGION 1..566: note = hemagglutinin__InfluenzaA__ADM13241

SEQ ID NO: 5576 - protein, 566 aa, synthetic construct
  REGION 1..566: note = hemagglutinin__InfluenzaA__ADM13251
MKAILVVLLYTFATTNADTLCIGYHANNSTDTVDTVLEKNVTVTHSVNLLEDKHNGKLCKLRGVAPLHLGKCNIAGWILGNPECESLSTASSWSYIVETSSSDNGTCYPGDFIDYEELREQLSSVSSFERFEIFPKTSSWPNHDSNKGVTAACPHAGAKSFYKNLIWLVKKGNSYPKLSKSYINDKGKEVLVLWGIHHPSTSADQQSLYQNADAYVFVGTSRYSKKFKPEIAIRPKVRDQEGRMNYYWTLVEPGDKITFEATGNLVVPRYAFAMERDAGSGIIISDTPVHDCNTTCQTPKGAINTSLPFQNIHPITIGKCPKYVKSTKLRLATGLRNVPSIQSRGLFGAIAGFIEGGWTGMVDGWYGYHHQNEQGSGYAADLKSTQNAIDKITNKVNSVIEKMNTQFTAVGKEFNHLEKRIENLNKKVDDGFLDIWTYNAELLVLLENERTLDYHDSNVKNLYEKVRSQLKNNAKEIGNGCFEFYHKCDNTCMESVKNGTYDYPKYSEEAKLNREEIDGVKLESTRIYQILAIYSTVASSLVLVVSLGAISFWMCSNGSLQCRICI

SEQ ID NO: 5577 - protein, 566 aa, synthetic construct
  REGION 1..566: note = hemagglutinin__InfluenzaA__ADM13261
MKAILVVLLYTFATANADTLCIGYHANNSTDTVDTVLEKNVTVTHSVNLLEDKHNGKLCKLRGIAPLHLGKCNIAGWILGNPECESLSTASSWSYIVETSGSDNGTCYPGDFIDYEELREQLSSVSSFERFEIFPKTSSWPNHDSNKGVTAACPHAGAKSFYKNLIWLVKKGNSYPKLSKSYINDKGKEVLVLWGIHHPSTSADQQSLYQNADAYVFVGTSRYSKKFKPEIAIRPKVRDQEGRMNYYWTLVEPGDKITFEATGNLVVPRYAFAMERNAGSGIIISDTPVHDCNTTCQTPKGAINTSLPFQNIHPITIGKCPKYVKSTKLRLATGLRNVPSIQSRGLFGAIAGFIEGGWTGMVDGWYGYHHQNEQGSGYAADLKSTQNAIDEITNKVNSVIEKMNTQFTAVGKEFNHLEKRIENLNKKVDDGFLDIWTYNAELLVLLENERTLDYHDSNVKNLYEKVRSQLKNNAKEIGNGCFEFYHKCDNTCMESVKNGTYDYPKYSEEAKLNREEIDGVKLESTRIYQILAIYSTVASSLVLVVSLGAISFWMCSNGSLQCRICI

SEQ ID NO: 5578 - protein, 566 aa, synthetic construct
  REGION 1..566: note = hemagglutinin__InfluenzaA__ADM13271
MKAILVVLLYTFATANADTLCIGYHANNSTDTVDTVLEKNVTVTHSVNLLEDKHNGKLCKLRGVAPLHLGKCNIAGWILGNPECESLSTASSWSYIVETSSSDNGTCYPGDFIDYEELREQLSSVSSFERFEIFPKTSSWPNHDSNKGVTAACPHAGAKSFYKNLIWLVKKGNSYPKLSKSYINDKGKEVLVLWGIHHPSTSADQQSLYQNADAYVFVGTSRYSKKFKPEIAIRPKVRDQEGRMNYYWTLVEPGDKITFEATGNLVVPRYAFAMERNAGSGIIISDTPVHDCNTTCQTPKGAINTSLPFQNIHPITIGKCPKYVKSTKLRLATGLRNVPSIQSRGLFGAIAGFIEGGWTGMVDGWYGYHHQNEQGSGYAADLKSTQNAIDKITNKVNSVIEKMNTQFTAVGKEFNHLEKRIENLNKKVDDGFLDIWTYNAELLVLLENERTLDYHDSNVKNLYEKVRSQLKNNAKEIGNGCFEFYHKCDNTCMESVKNGTYDYPKYSEEAKLNREEIDGVKLESTRIHQILAIYSTVASSLVLVVSLGAISFWMCSNGSLQCRICI

SEQ ID NO: 5579 - protein, 566 aa, synthetic construct; identical to SEQ ID NO: 5574
  REGION 1..566: note = hemagglutinin__InfluenzaA__ADM13281

SEQ ID NO: 5580 - protein, 566 aa, synthetic construct; identical to SEQ ID NO: 3770
  REGION 1..566: note = hemagglutinin__InfluenzaA__ADM13291

SEQ ID NO: 5581 - protein, 566 aa, synthetic construct
  REGION 1..566: note = hemagglutinin__InfluenzaA__ADM13301
MKAILVVLLYTFATANADTLCIGYHANNSTDTVDTILEKNVTVTHSVNLLEDKHNGKLCKLRGVAPLHLGKCNIAGWILGNPECESLSTASSWSYIVETSSSDNGTCYPGDFIDYEELREQLSSVSSFERFEIFPKTSSWPNHDSNKGVTAACPHAGAKSFYKNLIWLVKKENSYPKLSKSYINDKGKEVLVLWGIHHPSTSADQQSLYQNVDAYVFVGTSRYSKKFKPEIAIRPKVRDQEGRMNYYWTLVEPGDKITFEATGNLVVPRYAFAMERNAGSGIIISDTPVHDCNTTCQTPKGAINTSLPFQNIHPITIGKCPKYVKSTKLRLATGLRNVPSIQSRGLFGAIAGFIEGGWTGMVDGWYGYHHQNEQGSGYAADLKSTQNAIDEITNKVNSVIEKMNTQFTAVGKEFNHLEKRIENLNKKVDDGFLDIWTYNAELLVLLENERTLDYHDSNVKNLYEKVRSQLKNNAKEIGNGCFEFYHKCDNTCMESVKNGTYDYPKYSEEAKLNREEIDGVKLESTRIYQILAIYSTVASSLVLVVSLGAISFWMCSNGSLQCRICI

SEQ ID NO: 5582 - protein, 566 aa, synthetic construct
  REGION 1..566: note = hemagglutinin__InfluenzaA__ADM13311
MKAILVVLLYTFATANADTLCIGYHANNSTDTVDTILEKNVTVTHSVNLLENKHNGKLCKLRGVSPLHLGKCNIAGWILGNPECESLSTASSWSYIVETSSSDNGTCYPGDFIDYEELREQLSSVSSFERFEIFPKTSSWPNHDSNKGVTAACPHAGAKSFYKNLIWLVKKGNSYPKLSKSYINDKGKEVLVLWGIHHPSTSADQQSLYQNADAYVFVGTSRYSKKFKPEIAIRPKVRDQEGRMNYYWTLVEPGDKITFEATGNLVVPRYAFAMERNAGSGIIISDTPVHDCNTTCQTPKGAINTSLPFQNIHPITIGKCPKYVKSTKLRLATGLRNVPSIQSRGLFGAIAGFIEGGWTGMVDGWYGYHHQNEQGSGYAADLKSTQNAIDEITNKVNSVIEKMNTQFTAVGKEFNHLEKRIENLNKKVDDGFLDIWTYNAELLVLLENERTLDYHDSNVKNLYEKVRSQLKNNAKEIGNGCFEFYHKCDNTCMESVKNGTYDYPKYSEEAKLNREEIDGVKLESTRIYQILAIYSTAASSLVLVVSLGAISFWMCSNGSLQCRICI

SEQ ID NO: 5583 - protein, 566 aa, synthetic construct; identical to SEQ ID NO: 3833
  REGION 1..566: note = hemagglutinin__InfluenzaA__ADM13321

SEQ ID NO: 5584 - protein, 566 aa, synthetic construct
  REGION 1..566: note = hemagglutinin__InfluenzaA__ADM13331
MKAILVVLLYTFATANADTLCIGYHANNSTDTVDTVLEKNVTVTHSVNLLEDKHNGKLCKLRGVAPLHLGKCNIAGWILGNPECESLSTASSWSYIVETSSSDNGTCYPGDFIDYEELREQLSSVSSFERFEIFPKTSSWPDHDSNKGVTAACPHAGAKSFYKNLIWLVKKGNSYPKLSKSYINDKGKEVLVLWGIHHPSTSADQQSLYQNADAYVFVGTSRYSKKFKPEIAIRPKVRDQEGRMNYYWTLVEPGDKITFEATGNLVVPRYAFAMERNAGSGIIISDTPVHDCNTTCQTPKGAINTSLPFQNIHPITIGKCPKYVKSTKLRLATGLRNVPSIQSRGLFGAIAGFIEGGWTGMVDGWYGYHHQNEQGSGYAADLKSTQNAIDKITNKVNSVIEKMNTQFTAVGKEFNHLEKRIENLNKKVDDGFLDIWTYNAELLVLLENERTLDYHDSNVKNLYEKVRSQLKNNAKEIGNGCFEFYHKCDNTCMESVKNGTYDYPKYSEEAKLNREEIDGVKLESTRIYQILAIYSTVASSLVLVVSLGAISFWMCSNGSLQCRICI

SEQ ID NO: 5585 - protein, 566 aa, synthetic construct; identical to SEQ ID NO: 4282
  REGION 1..566: note = hemagglutinin__InfluenzaA__ADM13341

SEQ ID NO: 5586 - protein, 566 aa, synthetic construct; identical to SEQ ID NO: 5248
  REGION 1..566: note = hemagglutinin__InfluenzaA__ADM13351

SEQ ID NO: 5587 - protein, 566 aa, synthetic construct; identical to SEQ ID NO: 2329
  REGION 1..566: note = hemagglutinin__InfluenzaA__ADM13442

SEQ ID NO: 5588 - protein, 566 aa, synthetic construct; identical to SEQ ID NO: 2329
  REGION 1..566: note = hemagglutinin__InfluenzaA__ADM13443

SEQ ID NO: 5589 - protein, 566 aa, synthetic construct; identical to SEQ ID NO: 2329
  REGION 1..566: note = hemagglutinin__InfluenzaA__ADM13444

SEQ ID NO: 5590 - protein, 566 aa, synthetic construct; identical to SEQ ID NO: 3276
  REGION 1..566: note = hemagglutinin__InfluenzaA__ADM13445

SEQ ID NO: 5591 - protein, 566 aa, synthetic construct; identical to SEQ ID NO: 2329
  REGION 1..566: note = hemagglutinin__InfluenzaA__ADM13446

SEQ ID NO: 5592 - protein, 566 aa, synthetic construct
  REGION 1..566: note = hemagglutinin__InfluenzaA__ADM13447
MKTIIALSYIFCLALGQDLPGNDNSTATLCLGHHAVPNGTLVKTITDDQIEVTNATELVQSSSTGKICNNPHRILDGIDCTLIDALLGDPHCDVFQNETWDLFVERSKAFSNCYPYDVPDYASLRSLVASSGTLEFITEGFTWTGVTQNGGSNACKRGPGSGFFSRLNWLTKSGSTYSVLNVTMPNNDNFDKLYIWGVHHPSTNQEQTSLYVQASGRVTVSTRRSQQTIIPNIGSRPWVRGLSSRISIYWTIVKPGDVLVINSNGNLIAPRGYFKMRTGKSSIMRSDAPIDTCISECITPNGSIPNDKPFQNVNKITYGACPKYVKQNTLKLATGMRNVPEKQTRGLFGAIAGFIENGWEGMIDGWYGFRHQNSEGTGQAADLKSTQAAIDQINGKLNRVIEKTNEKFHQIEKEFSEVEGRIQDLEKYVEDTKIDLWSYNAELLVALENQHTIDLTDSEMNKLFEKTRRQLRENAEDMGNGCFKIYHKCDNACIESIRNGTYDHDVYRDEALNNRFQIKGVELKSGYKDWILWISFAISCFLLCVVLLGFIMWACQRGNIRCNICI

SEQ ID NO: 5593 - protein, 566 aa, synthetic construct; identical to SEQ ID NO: 2399
  REGION 1..566: note = hemagglutinin__InfluenzaA__ADM13448

SEQ ID NO: 5594 - protein, 566 aa, synthetic construct
  REGION 1..566: note = hemagglutinin__InfluenzaA__ADM13449
MKTIIALSYIFCLAFGQDLPGNDNSTATLCLGHHAVPNGTLVKTITDDQIEVTNATELVQSSSTGKICNNPHRILDGIDCTLIDALLGDPHCDVFQNETWDLFVERSKAFSNCYPYDVPDYASLRSLVASSGTLEFITEGFTWTGVTQNGGSNACKRGPGSGFFSRLNWLTKSGSTYPVLNVTMPNNDNFDKLYIWGVHHPSTNQEQTSLYVQASGRVTVSTRRSQQTIIPNIESRPWVRGLSSRISIYWTIVNPGDVLVINSNGNLIAPRGYFKMRTGKSSIMRSDAPIDTCISECITPNGSIPNDKPFQNVNKITYGACPKYVKQNTLKLATGMRNVPEKQTRGLFGAIAGFIENGWEGMIDGWYGFRHQNSEGTGQAADLKSTQAAIDQINGKLNRVIEKTNEKFHQIEKEFSEVEGRIQDLEKYVEDTKIDLWSYNAELLVALENQHTIDLTDSEMNKLFEKTRRQLRENAEDMGNGCFKIYHKCDNACIESIRNGTYDHDVYRDEALNNRFQIKGVELKSGYKDWILWISFAISCFLLCVVLLGFIMWACQRGNIRCNICI

SEQ ID NO: 5595 - protein, 566 aa, synthetic construct; identical to SEQ ID NO: 2431
  REGION 1..566: note = hemagglutinin__InfluenzaA__ADM13450

SEQ ID NO: 5596 - protein, 566 aa, synthetic construct
  REGION 1..566: note = hemagglutinin__InfluenzaA__ADM13451
MKTIIALSYIFCLALGQDLPGNDNRTATLCLGHHAVPNGTLVKTITDDQIEVTNATELVQSSSTGKICNNPHRILDGIDCTLIDALLGDPHCDVFQNETWDLFVERSKAFSNCYPYDVPDYASLRSLVASSGTLEFITEGFTWTGVTQNGGSNACKRGPGSGFFSRLNWLTKSGSTYPVLNVTMPNNDNFDKLYIWGVHHPSTNQEQTSLYVQASGRVTVSTRRSQQTIIPNIGSRPWVRGLSSRISIYWTIVKPGDVLVINSNGNLIAPRGYFKMRTGKSSIMRSDAPIDTCISECITPNGSIPNDKPFQNVNKITYGACPKYVKQNTLKLATGMRNVPEKQTRGLFGAIAGFIENGWEGMIDGWYGFRHQNSEGTGQAADLKSTQATIDQINGKLNRVIEKTNEKFHQIEKEFSEVEGRIQDLEKYVEDTKIDLWSYNAELLVALENQHTIDLTDSEMNKLFEKTRRQLRENAEDMGNGCFKIYHKCDNACIESIRNGTYDHDVYRDEALNNRFQIKGVELKSGYKDWILWISFAISCFLLCVVLLGFIMWACQRGNIRCNICI

SEQ ID NO: 5597 - protein, 566 aa, synthetic construct; identical to SEQ ID NO: 2316
  REGION 1..566: note = hemagglutinin__InfluenzaA__ADM13452

SEQ ID NO: 5598 - protein, 566 aa, synthetic construct
  REGION 1..566: note = hemagglutinin__InfluenzaA__ADM14467
MKAILVVLLYTFATANADTLCIGYHANNSTDTVDTVLEKNVTVTHSVNLLEDKHNGKLCKLRGVAPLHLGKCNIAGWILGNPECESLSTASSWSYIVETSSSDNGTCYPGDFIDYEELREQLSSVSSFERFEIFPKTSSWPNHDSNKGVTAACSHAGAKSFYKNLIWLVKKGNSYPKLSKSYINDKGKEVLVLWGIHHPSTSADQQSLYQNADAYVFVGTSRYSKKFKPEIAIRPKVRDQEGRMNYYWTLVEPGDKITFEATGNLVVPRYAFAMERNAGSGIIISDTPVHDCNTTCQTPKGAINTSLPFQSIHPITIGKCPKYVKSTKLRLATGLRNVPSIQSRGLFGAIAGFIEGGWTGMVDGWYGYHHQNEQGSGYAADLKSTQNAIDKITNKVNSVIEKMNTQFTAVGKEFNHLEKRIENLNKKVDDGFLDIWTYNAELLVLLENERTLDYHDSNVKNLYEKVRSQLKNNAKEIGNGCFEFYHKCDNTCMESVKNGTYDYPKYSEEAKLNREEIDGVKLESTRIYQILAIYSTVASSLVLVVSLGAISFWMCSNGSLQCRICI

SEQ ID NO: 5599 - protein, 564 aa, synthetic construct
  REGION 1..564: note = hemagglutinin__InfluenzaA__ADM14516
MKAILVVLLYTFATANADTLCIGYHANNSTDTVNTVLEKNVTVTHSVNLLEDKHNGKLCKLRGVAPLHLGKCNIAGWILGNPECESLSTASSWSYIVETSSSDNGTCYPGDFIDYEELREQLSSVSSFERFEIFPKTSSWPNHDSNKGVTAACPHAGAKSFYKNLIWLVKKGNSYPKLSKSYINDKGKEVLVLWGIHHPSTSTDQQSLYQNADAYVFVGTSRYSKKFKPEIAIRPKVRDQEGRMNYYWTLVEPGDKITFEATGNLVVPRYAFAMERNAGSGIIISDTPVHDCNTTCQTPKGAINTSLPFQNIHPITIGKCPKYVKSTKLRLATGLRNVPSIQSRGLFGAIAGFIEGGWTGMVDGWYGYHHQNEQGSGYAADLKSTQNAIDEITNKVNSVIEKMNTQFTAVGKEFNHLEKRIENLNKKVDDGFLDIWTYNAELLVLLENERTLDYHDSNVKNLYEKVRSQLKNNAKEIGNGCFEFYHKCDNTCMESVKNGTYDYPKYSEEAKLNREEIDGVKLESTRIYQILAIYSTVASSLVLVVSLGAISFWMCSGHSCRICI

SEQ ID NO: 5600 - protein, 566 aa, synthetic construct
  REGION 1..566: note = hemagglutinin__InfluenzaA__ADM14525
MKATLVVLLYTFATANADTLCIGYHANNSTDTVDTVLEKNVTVTHSVNLLEDKHNGKLCKLRGVAPLHLGKCNIAGWILGNPECESLSTASSWSYIVETSSSDNGTCYPGDFIDYEELREQLSSLSSFERFEIFPKTSSWPNHDSNKGVTAACPHAGAKSFYKNLIWLVKKGNSYPKLSKSYINDKGKDVLVLWGIHHPSTSADQQSLYQNADAYVFVGTSRYSKKFKPEIAIRPKVRDQEGRMNYYWTLVEPGDKITFEATGNLVVPRYAFAMERNAGSGIIISDTPVHDCNTTCQTPKGAINTSLPFQNIHPITIGKCPKYVKSTKLRLATGLRNVPSIQSRGLFGAIAGFIEGGWTGMVDGWYGYHHQNEQGSGYAADLKSTQNAIDEITNKVNSVIEKMNTQFTAVGKEFNHLEKRIENLNKKVDDGFLDIWTYNAELLVLLENERTLDYHDSNVKNLYEKVRSQLKNNAKEIGNGCFEFYHKCDNTCMESVKNGTYDYPKYSEEAKLNREEIDGVKLESTRIYQILAIYSTVASSLVLVVSLGAISFWMCSNGSLQCRICI

SEQ ID NO: 5601 - protein, 564 aa, synthetic construct
  REGION 1..564: note = hemagglutinin__InfluenzaA__ADM14553
MKAILVVLLYTFATANADTLCIGYHANNSTDTVDTILEKNVTVTHSVNLLEDKHNGKLCKLRGVAPLHLGKCNIAGWILGNPECESLSTASSWSYIVETSSSDNGTCYPGDFIDYEELREQLSSVSSFERFEIFPKTSSWPNHDSNKGVTAACPHAGAKSFYKNLIWLVKKGNSYPKLSKSYINDKGKEVLVLWGIHHPSTSADQQSLYQNADAYVFVETSRYSKKFKPEIAIRPKVRDQEGRMNYYWTLVEPGDKITFEATGNLVVPRYAFAMERNAGSGIIISDTSVHDCNTTCQTPKGAINTSLPFQNIHPITIGKCPKYVKSTKLRLATGLRNVPSIQSRGLFGAIAGFIEGGWTGMVDGWYGYHHQNEQGSGYAADLKSTQNAIDEITNKVNSVIEKMNTQFTAVGKEFNHLEKRIENLNKKVDDGFLDIWTYNAELLVLLENERTLDYHDSNVKNLYEKVRSQLKNNAKEIGNGCFEFYHKCDNTCMESVKNGTYDYPKYSEEAKLNREEIDGVKLESTRIYQILAIYSTVASSLVLVVSLGAISFWMCSGHSCRICI

SEQ ID NO: 5602 - protein, 566 aa, synthetic construct; identical to SEQ ID NO: 3116
  REGION 1..566: note = hemagglutinin__InfluenzaA__ADM14562

SEQ ID NO: 5603 - protein, 566 aa, synthetic construct; identical to SEQ ID NO: 2669
  REGION 1..566: note = hemagglutinin__InfluenzaA__ADM14571

SEQ ID NO: 5604 - protein, 566 aa, synthetic construct
  REGION 1..566: note = hemagglutinin__InfluenzaA__ADM14580
MKAILVVLLYTFATANADTLCIGYHANNSTDTVDTVLEKNVTVTHSVNLLEDKHNGKLCKLRGVAPLHLGKCNIAGWILGNPECESLSTASSWSYIVETSSSDNGTCYPGDFIDYEELREQLSSVSSFERFEIFPKTSSWPNHDSNKGVTAACPHAGAKSFYKNLIWLVKKGNSYPKLSKSYINDKGKEVLVLWGIHHPSTSADQQSLYQNADAYVFVGTSRYSKKFKPEIAIRPKVRDQEGRMNYYWTLVEPGDKITFEATGNLVVPRYAFAMEKNAGSGIIISDTPVHDCNTTCQTPKGAINTSLPFQNIHPITIGKCPKYVKSTKLRLATGLRNVPSIQSRGLFGAIAGFIEGGWTGMVDGWYGYHHQNEQGSGYAADLKSTQNAIDEITNKVNSVIEKMNTQFTAVGKEFNHLEKRIENLNKKVDDGFLDIWTYNAELLVLLENERTLDYHDSNVKNLYEKVRSQLKNNAKEIGNGCFEFYHKCDNTCMESVKNGTYDYPKYSEEAKLNREEINGVKLESTRIYQILAIYSTVASSLVLVVSLGAISFWMCSNGSLQCRICI

SEQ ID NO: 5605 - protein, 566 aa, synthetic construct
  REGION 1..566: note = hemagglutinin__InfluenzaA__ADM14589
MKAILVVLLYTFATANADTLCIGYHANNSTDTVDTVLEKNVTVTHSVNLLEDKHNGKLCKLRGVAPLHLGKCNIAGWILGNPECESLSTASSWSYIVETSSSDNGTCYPGDFIDYEELREQLSSVSSFERFEIFPKTSSWPNHDSNKGVTAACPHAGAKSFYKNLIWLVKKGNSYPKLSKSYINDKGKEVLVLWGIHHPSTSADQQSLYQNADAYVFVGTSRYSKKFKPEIAIRPKVRDQEGRMNYYWTLVEPGDKITFEATGNLVVPRYAFAMEKNAGSGIIISDTPVHDCNTTCQTPKGAINTSLPFQNIHPITIGKCPKYVKSTKLRLATGLRNVPSIQSRGLFGAIAGFIEGGWTGMVDGWYGYHHQNGQGSGYAADLKSTQNAIDEITNKVNSVIEKMNTQFTAVGKEFNHLEKRIENLNKKVDDGFLDIWTYNAELLVLLENERTLDYHDSNVKNLYEKVRSQLKNNAKEIGNGCFEFYHKCDNTCMESVKNGTYDYPKYSEEAKLNREEINGVKLESTRIYQILAIYSTVASSLVLVVSLGAISFWMCSNGSLQCRICI

SEQ ID NO: 5606 - protein, 566 aa, synthetic construct
  REGION 1..566: note = hemagglutinin__InfluenzaA__ADM14599
MKAILVVLLYTFATANADTLCIGYHANNSTDTVDTVLEKNVTVTHSVNLLEDKHNGKLCKLRGVAPLHLGKCNIAGWILGNPECESLSTASSWSYIVETSSSDNGTCYPGDFIDYEELREQLSSVSSFERFEIFPKTSSWPNHDSNKGVTAACPHAGAKSFYKNLIWLVKKGNSYPKLSKSYINDKGKEVLVLWGIHHPSTSADQQSLYQNADAYVFVGTSRYSKKFKPEIVIRPKVRDQEGRMNYYWTLVEPGDKITFEATGNLVVPRYAFAMERNAGSGIIISDTPVHDCNTTCQTPKGAINTSLPFQNIHPITIGKCPKYVKSTKLRLATGLRNVPSIQSRGLFGAIAGFIEGGWTGMVDGWYGYHHQNEQGSGYAADLKSTQNAIDEITNKVNSVIEKMNTQFTAVGKEFNHLEKRIENLNKKVDDGFLDIWTYNAELLVLLENERTLDYHDSNVKNLYEKVRSQLKNNAKEIGNGCFEFYHKCDNTCMESVKNGTYDYPKYSEEAKLNREEIDGVKLESTRIYQILAIYSTVASSLVLVVSLGAISFWMCSNGSLQCRICI

SEQ ID NO: 5607 - protein, 566 aa, synthetic construct; identical to SEQ ID NO: 3829
  REGION 1..566: note = hemagglutinin__InfluenzaA__ADM14609

SEQ ID NO: 5608 - protein, 566 aa, synthetic construct
  REGION 1..566: note = hemagglutinin__InfluenzaA__ADM14618
MKAILVVLLYTFATANADTLCIGYHANNSTDTVDTVLEKNVTVTHSVNLLEDKHNGKLCKLRGVAPLHLGKCNIAGWILGNPECESLSTASSWSYIVETSSSDNGTCYPGDFIDYEELREQLSSVSSFERFEIFPKTSSWPNHDSNKGVTAACPHAGAKSFYKNLIWLVKKGNSYPKLSKSYINDKGKEVLVLWGIHHPSTSADQQSLYQNADAYVFVGTSRYSKKFKPEIAIRPKVRDQEGRMNYYWTLVEPGDKITFEATGNLVVPRYAFAMERNAGSGIIISDTPVHDCNTTCQTPKGAINTSLPFQNNHPITIGKCPKYVKSTKLRLATGLRNVPSIQSRGLFGAIAGFIEGGWTGMVDGWYGYHHQNEQGSGYAADLKSTQNAIDEITNKVNSVIEKMNTQFTAVGKEFNHLEKRIENLNKKVDDGFLDIWTYNAELLVLLENERTLDYHDSNVKNLYEKVRSQLKNNAKEIGNGCFEFYHKCDNTCMESVKNGTYDYPKYSEEAKLNREEIDGVKLESTRIYQILAIYSTVASSLVLVVSLGAISFWMCSNGSLQCRICI

SEQ ID NO: 5609 - protein, 566 aa, synthetic construct; identical to SEQ ID NO: 2669
  REGION 1..566: note = hemagglutinin__InfluenzaA__ADM14627

SEQ ID NO: 5610 - protein, 566 aa, synthetic construct
  REGION 1..566: note = hemagglutinin__InfluenzaA__ADM14655
MKAILVVLLYTFATANADTLCIGYHANNSTDTVDTVLEKNVTVTHSVNLLEDKHNGKLCKLRGVAPLHLGKCNIAGWILGNPECESLSTASSWSYIVETSSSDNGTCYPGDFIDYEELREQLSSVSSFERFEIFPKTSSWPNHDSNKGVTAACPHAGAKSFYKNLIWLVKKGNSYPKLSKSYINDKGKEVLVLWGIHHPSTSADQQSLYQNADAYVFVGTSRYSKKFKPEIAIRPKVRDQEGRMNYYWTLVEPGDKITFEATGNLVVPRYAFAMERNAGSGIIISDTPVHDCNTTCQTPKGAINTSLPFQNIHPITIGKCPKYVRSTKLRLATGLRNVPSIQSRGLFGAIAGFIEGGWTGMVDGWYGYHHQNEQGSGYAADLKSTQNAIDEITNKVNSVIEKMNTQFTAVGKEFNHLEKRIENLNKKVDDGFLDIWTYNAELLVLLENERTLDYHDSNVKNLYEKVRSQLKNNAKEIGNGCFEFYHKCDNTCMESVKNGTYDYPKYSEEAKLNREEIDGVKLESTRIYQILAIYSTVASSLVLVVSLGAISFWMCSNGSLQCRICI

SEQ ID NO: 5611 - protein, 566 aa, synthetic construct
  REGION 1..566: note = hemagglutinin__InfluenzaA__ADM14664
MKAILVVLLYTFATANADTLCIGYHANNSTDTVDTVLEKNVTVTHSVNLLEDKHNGKLCKLRGVAPLHLGKCNIAGWILGNPECESLSTASSWSYIVETSSSDNGTCYPGDFIDYEELREQLSSVSSFERFEIFPKTSSWPNHDSNKGVTAACPHAGAKSFYKNLIWLVKKGNSYPKLSKSYINDKGKEVLVLWGIHHPSTSADQQSLYQNADAYVFVGTSRYSKKFKPEIAIRPKVRDQEGRMNYYWTLVEPGDKITFEATGNLVVPRYAFAMERNAGSGIIISDTPVHDCNTTCQTPNGAINTSLPFQNIHPITIGKCPKYVKSTKLRLATGLRNIPSIQSRGLFGAIAGFIEGGWTGMVDGWYGYHHQNEQGSGYAADLKSTQNAIDEITNKVNSVIEKMNTQFTAVGKEFNHLEKRIENLNKKVDDGFLDIWTYNAELLVLLENERTLDYHDSNVKNLYEKVRSQLKNNAKEIGNGCFEFYHKCDNTCMESVKNGTYDYPKYSEEAKLNREEIDGVKLESTRIYQILAIYSTVASSLVLVVSLGAISFWMCSNGSLQCRICI

SEQ ID NO: 5612 - protein, 566 aa, synthetic construct; identical to SEQ ID NO: 2669
  REGION 1..566: note = hemagglutinin__InfluenzaA__ADM14673

SEQ ID NO: 5613 - protein, 566 aa, synthetic construct; identical to SEQ ID NO: 2669
  REGION 1..566: note = hemagglutinin__InfluenzaA__ADM14682

SEQ ID NO: 5614 - protein, 566 aa, synthetic construct; identical to SEQ ID NO: 2669
  REGION 1..566: note = hemagglutinin__InfluenzaA__ADM14691

SEQ ID NO: 5615 - protein, 566 aa, synthetic construct; identical to SEQ ID NO: 3833
  REGION 1..566: note = hemagglutinin__InfluenzaA__ADM14700

SEQ ID NO: 5616 - protein, 564 aa, synthetic construct
  REGION 1..564: note = hemagglutinin__InfluenzaA__ADM14709
MKAILVVLLYTFATANADTLCIGYHANNSTDTVDTVLEKNVTVTHSVNLLEDKHNGKLCKLRGVAPLHLGKCNIAGWILGNPECESLSTASSWSYIVETSSSDNGTCYPGDFIDYEELREQLSSVSSFERFEIFPKTNSWPNHDSNKGVTAACPHAGAKSFYKNLIWLVKKGNSYPKLSKSYINDKGKEVLVLWGIHHPSTSADQQSLYQNADAYVFVGTSKYSKKFKPEIAIRPKVRDQEGRMNYYWTLVEPGDKITFEATGNLVVPRYAFAMERNAGSGIIISDTPVHDCNTTCQTPKGAINTSLPFQNIHPITIGKCPKYVKSTKLRLATGLRNVPSIQSRGLFGAIAGFIEGGWTGMVDGWYGYHHQNEQGSGYAADLKSTQNAIDGITNKINSVIEKMNTQFTAVGKEFNHLEKRIENLNKKVDDGFLDIWTYNAELLVLLENERTLNYHDSNVKNLYEKVRSQLKNNAKEIGNGCFEFYHKCDNTCMESVKNGTYDYPKYSEEAKLNREEIDGVKLESTRIYQILAIYSTVASSLVLVVSLGAISFWMCSGHSCRICI

SEQ ID NO: 5617 - protein, 566 aa, synthetic construct
  REGION 1..566: note = hemagglutinin__InfluenzaA__ADM14718
MKAILVVLLYTFATANADTLCIGYHANNSTDTVDTVLEKNVTVTHSVNLLEDKHNGKLCKLRGVAPLHLGKCNIAGWILGNPECESLSTASSWSYIVETSSSDNGTCYPGDFIDYEELREQLSSMSSFERFEIFPKTSSWPNHDSNKGVTAACPHAGAKSFYKNLIWLVKKGNSYPKLSKSYINDKGKEVLVLWGIHHPSTSADQQSLYQNADAYVFVGTSRYSKKFKPEIAIRPKVRDQEGRMNYYWTLVEPGDKITFEATGNLVVPRYAFAMERNAGSGIIISDTPVHDCNTTCQTPKGAINTSLPFQNIHPITIGKCPKYVKSTKLRLATGLRNVPSIQSRGLFGAIAGFIEGGWTGMVDGWYGYHHQNEQGSGYAADLKSTQNAIDKITNKVNSVIEKMNTQFTAVGKEFNHLEKRIENLNKKVDDGFLDIWTYNAELLVLLENERTLDYHDSNVKNLYEKVRSQLKNNAKEIGNGCFEFYHKCDNTCMESVKNGTYDYPKYSEEAKLNREEIDGVKLESTRIYQILAIYSTVASSLVLVVSLGAISFWMCSNGSLQCRICI

SEQ ID NO: 5618 - protein, 564 aa, synthetic construct
  REGION 1..564: note = hemagglutinin__InfluenzaA__ADM14728
MKAILVVLLYTFATANADTLCIGYHANNSTDTVDTVLEKNVTVTHSVNLLEDKHNGKLCKLRGVAPLHLGKCNIAGWILGNPECESLSTASSWSYIVETSSSDNGTCYPGDFIDYEELREQLSSVSSFERFEIFPKTSSWPNHDSNKGVTAACPHAGAKSFYKNLIWLVKKGNSYPKLSNSYINDKGKEVLVLWGIHHPSTSADQQSLYQNADAYVFVGTSRYSKKFKPEIAIRPKVRDQEGRMNYYWTLVEPGDKITFEATGNLVVPRYAFAMERNAGSGIIISDTPAHDCNTTCQTPKGAINTSLPFQNIHPITIGKCPKYVKSTKLRLATGLRNVPSIQSRGLFGAIAGFIEGGWTGMVDGWYGYHHQNEQGSGYAADLKSTQNAIDEITNKVNSVIEKMNTQFTAVGKEFNHLEKRIENLNKKVDDGFLDIWTYNAELLVLLENERTLDYHDSNVKNLYEKVRSQLKNNAKEIGNGCFEFYHKCDNTCMESVKNGTYDYPKYSEEAKLNREEIDGVKLESTRIYQILAIYSTVASSLVLVVSLGAISFWMCSGHSCRICI

SEQ ID NO: 5619 - protein, 566 aa, synthetic construct
  REGION 1..566: note = hemagglutinin__InfluenzaA__ADM14737
MKAILVVLLYTFATANADTLCIGYHANNSTDTVNTVLEKNVTVTHSVNLLEDKHNGKLCKLRGVAPLHLGKCNIAGWILGNPECESLSTASSWSYIVETSSSDNGTCYPGDFIDYEELREQLSSVSSFERFEIFPKTSSWPNHDSNKGVTAACPHAGAKSFYKNLIWLVKKGNSYPKLSKSYINDKGKEVLVLWGIHHPSTSADQQSLYQNADAYVFVGTSRYSKKFKPEIAIRPKVRDQEGRMNYYWTLVEPGDKITFEATGNLVVPRYAFAMEKNAGSGIIISDTPVHDCNTTCQTPKGAINTSLPFQNIHPITIGKCPKYVKSTKLRLATGLRNVPSIQSRGLFGAIAGFIEGGWTGMVDGWYGYHHQNEQGSGYAADLKSTQNAIDEITNKVNSVIEKMNTQFTAVGKEFNHLEKRIENLNKKVDDGFLDIWTYNAELLVLLENERTLDYHDSNVKNLYEKVRSQLKNNAKEIGNGCFEFYHKCDNTCMESVKNGTYDYPKYSEEAKLNREEIDGVKLESTRIYQILAIYSTVASSLVLVVSLGAISFWMCSNGSLQCRICI

SEQ ID NO: 5620 - protein, 566 aa, synthetic construct
  REGION 1..566: note = hemagglutinin__InfluenzaA__ADM14746
MKAILVVLLYTFATANADTLCIGYHANNSTDTVDTVLEKNVTVTHSVNLLEDKHNGKLCKLRGVAPLHLGKCNIAGWVLGNPECESLSTASSWSYIVETPSSDNGTCYPGDFIDYEELREQLSSVSSFERFEIFPKTSSWPNHDSNKGVTAACPHAGAKSFYKNLIWLVKKGNSYPKLSKSYINDKGKEVLVLWGIHHPSTSADQQSLYQNADAYVFVGTSRYSKKFKPEIAIRPKVRDQEGRMNYYWTLVEPGDKITFEATGNLVVPRYAFAMERNAGSGIIISDTPVHDCNTTCQTPKGAINTSLPFQNIHPITIGKCPKYVKSKKLRLATGLRNVPSIQSRGLFGAIAGFIEGGWTGMVDGWYGYHHQNEQGSGYAADLKSTQNAIDEITNKVNSVIEKMNTQFTAVGKEFNHLEKRIENLNKKVDDGFLDIWTYNAELLVLLENERTLDYHDSNVKNLYEKVRSQLKNNAKEIGNGCFEFYHKCDNTCMESVKNGTYDYPKYSEEAKLNREEIDGVKLESTRIYQILAIYSTVASSLVLVVSLGAISFWMCSNGSLQCRICI

SEQ ID NO: 5621 - protein, 564 aa, synthetic construct
  REGION 1..564: note = hemagglutinin__InfluenzaA__ADM14756
MKAILVVLLYTFATANADTLCVGYHANNSTDTVDTVLEKNVTVTHSVNLLEDKHNGKLCKLRGVAPLHLGKCNIAGWILGNPECESLSTASSWSYIVETSSSDNGTCYPGDFIDYEELREQLSSVSSFERFEIFPKTSSWPNHDSNKGVTAACPHAGAKSFYKNLIWLVKKGNSYPKLSKSYINDKGKEVLVLWGIHHPSTSADQQSLYQNADAYVFVGTSRYSKKFKPEIAIRPKVRDQEGRMNYYWTLVEPGDKITFEATGNLVVPRYAFAMERNAGSGIIISDTPVHDCNTTCQTPKGAINTSLPFQNIHPITIGKCPKYVKSTKLRLATGLRNVPSIQSRGLFGAIAGFIEGGWTGMVDGWYGYHHQNEQGSGYAADLKSTQNAIDKITNKVNSVIEKMNTQFTAVGKEFNHLEKRIENLNKKVDDGFLDIWTYNAELLVLLENERTLDYHDSNVKNLYEKVRSQLKNNAKEIGNGCFEFYHKCDNTCMESVKNGTYDYPKYSEEAKLNREEIDGVKLESTRIYQILAIYSTVASSLVLVVSLGAISFWMCSGHSCRICI

SEQ ID NO: 5622 - protein, 566 aa, synthetic construct; identical to SEQ ID NO: 3833
  REGION 1..566: note = hemagglutinin__InfluenzaA__ADM14765

SEQ ID NO: 5623 - protein, 564 aa, synthetic construct
  REGION 1..564: note = hemagglutinin__InfluenzaA__ADM14775
MKAILVVLLYTFATANADTLCIGYHANNSTDTVDTVLEKNVTVTHSVNLLEDKHNGKLCKLRGVAPLHLGKCNIAGWILGNPECESLSTASSWSYIVETSSSDNGTCYPGDFIDYEELREQLSSVSSFERFEIFPKTSSWPNHDSNKGVTAACPHAGAKSFYKNLIWLVKKGNSYPKLNKSYINDKGKEVLVLWGIHHPSTSADQQSLYQNADAYVFVGTSRYSKKFKPEIAIRPKVRDQEGRMNYYWTLVEPGDKITFEATGNLVVPRYAFAMERNAGSGIIISDTPVHDCNTTCQTPKGAINTSLPFQNIHPITIGECPKYVKSTKLRLATGLRNVPSIQSRGLFGAIAGFIEGGWTGMVDGWYGYHHQNEQGSGYAADLKSTQNAIDKITNKVNSVIEKMNTQFTAVGKEFNHLEKRIENLNKKVDDGFLDIWTYNAELLVLLENERTLDYHDSNVKNLYEKVRSQLKNNAKEIGNGCFEFYHKCDNTCMESVKNGTYDYPKYSEEAKLNREEIDGVKLESTRIYQILAIYSTVASSLVLVVSLGAISFWMCSGHSCRICI

SEQ ID NO: 5624 - protein, 564 aa, synthetic construct
  REGION 1..564: note = hemagglutinin__InfluenzaA__ADM14802
MKAILVVLLYTFATANADTLCIGYHANNSTDTVDTVLEKNVTVTHSVNLLEDKHNGKLCKIRGVAPLHLGKCNIAGWILGNPECESLSTASSWSYIVETSSSDNGTCYPGDFIDYEELREQLSSVSSFERFEIFPKTSSWPNHDSNKGVTAACPHAGAKSFYKNLIWLVKKGNSYPKLSKSYINDKGKEVLVLWGIHHPSTSADQQSLYQNADAYVFVGTSRYSKKFKPEIAIRPKVRDQEGRMNYYWTLVEPGDKITFEATGNLVVPRYAFAMERNAGSGIIISDTPVHDCNTTCQTPKGAINTSLPFQNIHPITIGKCPKYVKSTKLRLATGLRNVPSIQSRGLFGAIAGFIEGGWTGMVDGWYGYHHQNEQGSGYAADLKSTQNAIDEITNKVNSVIEKMNTQFTAVGKEFNHLEKRIENLNKKVDDGFLDIWTYNAELLVLLENERTLDYHDSNVKNLYEKVRSQLKNNAKEIGNGCFEFYHKCDNTCMESVKNGTYDYPKYSEEAKLNREEIDGVKLESTRIYQILAIYSTVASSLVLVVSLGAISFWMCSGHSCRICI

SEQ ID NO: 5625 - protein, 567 aa, synthetic construct
  REGION 1..567: note = hemagglutinin__InfluenzaA__ADM14830
MKAILVVLLYTFATANADTLCIGYHANNSTDTVDTVLEKNVTVTHSVNLLEDKHNGKLCKLRGVAPLHLGKCNIAGWILGNPECELLSTASSWSYIVETSSSDNGTCYPGDFIDYEELREQLSSVSSFERFEIFPKTSSWPNHDSNKGVTAACPHAGAKSFYKNLIWLVKKGNSYPKLSKSYINDKGKEVLVLWGIHHPSTSADQQSLYQNADAYVFVGTSRYSKKFKPEIAIRPKVRDQEGRMNYYWTLVEPGDKITFEATGNLVVPRYAFAMERNAESGIIISDTPVHDCNTTCQTPKGAINTSLPFQNIHPITIGKCPKYVKSTKLRLATGLRNVPSIQSRGLFGAIAGFIEGGWTGMVDGWYGYHHQNEQGSGYAADLKSTQNAIDEITNKVNSVIEKMNTQFTAVGKEFNHLEKRIENLNKKVDDGFLDIWTYNAELLVLLENERTLDYHDSNVKKLYEKVRSQLKNNAKEIGNGCFEFYHKCDNTCMESVKNGTYDYPKYSEEAKLNREEIDGVKLESTRIYQILAIYSTVASSLVLVVSLGAISFWMCSGHSCLQCRICI

SEQ ID NO: 5626 - protein, 564 aa, synthetic construct
  REGION 1..564: note = hemagglutinin__InfluenzaA__ADM14848
MKAILVVLLYTFATANADTLCIGYHANNSTDTVDTVLEKNVTVTHSVNLLEDKHNGKLCKLRGVAPLHLGKCNIAGWILGNPECESLSTASSWSYIVETSSSDNGTCYPGDFIDYEELREQLSSVSSFERFEIFPKTSSWPNHDSNKGVTAACPHAGAKSFYKNLIWLVKKGNSYPKLSKSYINDKGKEVLVLWGIHHPSTSADQQSLYQNADAYVFVGSSRYSKKFKPEIAIRPKVRDQEGRMNYYWTLVEPGDKITFEATGNLVVPRYAFAMERNAGSGIIISDTPVHDCNTTCQTPKGAINTSLPFQNIHPITIGKCPKYVKSTKLRLATGLRNVPSIQSRGLFGAIAGFIEGGWTGMVDGWYGYHHQNEQGSGYAADLKSTQNAIDEITNKVNSVIEKMNTQFTAVGKEFNHLEKRIENLNKKVDDGFLDIWTYNAELLVLLENERTLDYHDSNVKNLYEKVRSQLKNNAKEIGNGCFEFYHKCDNTCMESVKNGTYDYPKYSEEAKLNREEIDGVKLESTRIYQILAIYSTVASSLVLVVSLGAISFWMCSGHSCRICI

SEQ ID NO: 5627 - protein, 564 aa, synthetic construct
  REGION 1..564: note = hemagglutinin__InfluenzaA__ADM14866
MKAILVVLLYTFATANADTLCIGYHANNSTDTVDTVLEKNVTVTHSVNLLEDKHNGKLCKLRGVAPLHLGKCNIAGWILGNPECESLSTASSWSYIVETSSSDNGTCYPGDFIDYEELREQLSSVSSFERFEIFPKTSSWPNHDSDKGVTAACPHAGAKSFYKNLIWLVKKGNSYPKLSKSYINDKGKEVLVLWGIHHPSTSADQQSLYQNADAYVFVGTSRYSKKFKPEIAIRPKVRDQEGRMNYYWTLVEPGDKITFEATGNLVVPRYAFAMERNAGSGIIISDTPVHDCNTTCQTPKGAINTSLPFQNIHPITIGKCPKYVKSIKLRLATGLRNVPSIQSRGLFGAIAGFIEGGWTGMVDGWYGYHHQNEQGSGYAADLKSTQNAIDEITNKVNSVIEKMNTQFTAVGKEFNHLEKRIENLNKKVDDGFLDIWTYNAELLVLLENERTLDYHDSNVKNLYEKVRSQLKNNAKEIGNGCFEFYHKCDNTCMESVKNGTYDYPKYSEEAKLNREEIDGVKLESTRIYQILAIYSTVASSLVLVVSLGAISFWMCSGHSCRICI

SEQ ID NO: 5628 - protein, 564 aa, synthetic construct
  REGION 1..564: note = hemagglutinin__InfluenzaA__ADM14876
MKAILVVLLYTFATANADTLCIGYHANNSTDTVDTVLEKNVTVTHSVNLLEDKHNGKLCKLRGVAPLHLGKCNIAGWILGNPECESLSTASSWSYIVETSSSDNGTCYPGDFIDYEELREQLSSVSSFERFEIFPKTSSWPNHDSNKGVTAACPHAGAKSFYKNLIWLVKKGNSYPKLSKSYINDKEKEVLVLWGIHHPSTSADQQSLYQNADAYVFVGTSRYSKKFKPEIAIRPKVRDQEGRMNYYWTLVEPGDKITFEATGNLVVPRYAFAMERNAGSGIIISDTPVHDCNTTCQTPKGAINTSLPFQNIHPITIGKCPKYVKSTKLRLATGLRNVPSIQSRGLFGAIAGFIEGGWTGMVDGWYGYHHQNEQGSGYAADLKSTQNAIDEITNKVNSVIEKMNTQFTAVGKEFNHLEKRIENLNKKVDDGFLDIWTYNAELLVLLENERTLDYHDSNVKNLYEKVRSQLKNNAKEIGNGCFEFYHKCDNTCMESVKNGTYDYPKYSEEAKLNREEIDGVKLESTRIYQILAIYSTVASSLVLVVSLGAISFWMCSGHSCRICI

SEQ ID NO: 5629 - protein, 567 aa, synthetic construct
  REGION 1..567: note = hemagglutinin__InfluenzaA__ADM14885
MKAILVVLLYTFATANADTLCIGYHANNSTDTVDTVLEKNVTVTHSVNLLEDKHNGKLCKLRGVAPLHLGKCNIAGWILGNPECELLSTASSWSYIVETSSSDNGTCYPGDFIDYEELREQLSSVSSFERFEIFPKTSSWPNHDSNKGVTAACPHAGAKSFYKNLIWLVKKGNSYPKLSKSYINDKEKEVLVLWGIHHPSTSADQQSLYQNADAYVFVGTSRYSKKFKPEIVIRPKVRDQEGRMNYYWTLVEPGDKITFEATGNLVVPRYAFAMERNAESGIIISDTPVHDCNTTCQTPKGAINTSLPFQNIHPITIGKCPKYVKSTKLRLATGLRNVPSIQSRGLFGAIAGFIEGGWTGMVDGWYGYHHQNEQGSGYAADLKSTQNAIDEITNKVNSVIEKMNTQFTAVGKEFNHLEKRIENLNKKVDDGFLDIWTYNAELLVLLENERTLDYHDSNVKKLYEKVRSQLKNNAKEIGNGCFEFYHKCDNTCMESVKNGTYDYPKYSEEAKLNREEIDGVKLESTRIYQILAIYSTVASSLVLVVSLGAISFWMCSGHGSLQCRICI

SEQ ID NO: 5630 - protein, 564 aa, synthetic construct
  REGION 1..564: note = hemagglutinin__InfluenzaA__ADM14894
MKAILVVLLYTFATANADTLCIGYHANNSTDTVDTVLEKNVTVTHSVNLLEDKHNGKLCKLRGVAPLHLGKCNIAGWILGNPECESLSTASSWSYIVETSSSDNGTCYPGDFIDYEELREQLSSVSSFERFEIFPKTSSWPNHDSNKGVTAACPHAGAKSFYKNLIWLVKKGNSYPKLSKSYINDKEKEVLVLWGIHHPSTSADQQSLYQNADAYVFVGTSRYSKKFKPEIVIRPKVRDQEGRMNYYWTLVEPGDKITFEATGNLVVPRYAFAMERNAGSGIVISDTPVHDCNTTCQTPKGAINTSLPFQNIHPITIGKCPKYVKSTKLRLATGLRNVPSIQSRGLFGAIAGFIEGGWTGMVDGWYGYHHQNEQGSGYAADLKSTQNAIDEITNKVNSVIEKMNTQFTAVGKEFNHLEKRIENLNKKVDDGFLDIWTYNAELLVLLENERTLDYHDSNVKKLYEKVRSQLKNNAKEIGNGCFEFYHKCDNTCMKSVKNGTYDYPKYSEEAKLNREEIDGVKLESTRIYQILAIYSTVASSLVLVVSLGAISFWMCSGHSCRICI

SEQ ID NO: 5631 - protein, 564 aa, synthetic construct
  REGION 1..564: note = hemagglutinin__InfluenzaA__ADM14903
MKAILVVLLCTFATANADTLCIGYHANNSTDTVDTVLEKNVTVTHSVNLLEDKHNGKLCKLRGVAPLHLGKCNIAGWILGNPECESLSTASSWSYIVETSSSDNGTCYPGDFIDYEELREQLSSVSSFERFEIFPKTSSWPNHDSNKGVTAACPHAGAKSFYKNLIWLVKKGNSYPKLSKSYINDKGKEVLVLWGIHHPSTSADQQSLYQNADAYVFVGTSRYSKKFKPEIAIRPKVRDQEGRMNYYWTLVEPGDKITFEATGNLVVPRYAFAMERNAGSGIIISDTPVHDCNTTCQTPKGAINTSLPFQNIHPITIGKCPKYVKSTKLRLATGLRNVPSIQSRGLFGAIAGFIEGGWTGMVDGWYGYHHQNEQGSGYAADLKSTQNAIDKITNKVNSVIEKMNTQFTAVGKEFNHLEKRIENLNKKVDDGFLDIWTYNAELLVLLENERTLDYHDSNVKNLYEKVRSQLKNNAKEIGNGCFEFYHKCDNTCMESVKNGTYDYPKYSEEAKLNREEIDGVKLESTRIYQILAIYSTVASSLVLVVSLGAISFWMCSGHSCRICI

SEQ ID NO: 5632 - protein, 564 aa, synthetic construct
  REGION 1..564: note = hemagglutinin__InfluenzaA__ADM14912
MKAILVVLLYTFATANADTLCIGYHANNSTDTVDTVLEKNVTVTHSVNLLEDKHNGKLCKLRGVAPLHLGKCNIAGWILGNPECESLSTASSWSYIVETSSSDNGTCYPGDFIDYEELREQLSSVSSFERFEIFPKTSSWPNHDSNKGVTAACPHAGAKSFYKNLIWLVKKGNSYPKLSKSYINDKGKEVLVLWGIHHPSTSADQQSLYQNADAYVFVGTSRYSKKFKPEIAIRPKVRDQEGRMNYYWTLVEPGDKITFEATGNLVVPRYAFAMERNAGSGIIISDTPVHDCNTTCQTPEGAINTSLPFQNIHPITIGKCPKYVKSTKLRLATGLRNVPSIQSRGLFGAIAGFIEGGWTGMVDGWYGYHHQNEQGSGYAADLKSTQNAIDEITNKVNSVIEKMNTQFTAVGKEFNHLEKRIENLNKKVDDGFLDIWTYNAELLVLLENERTLDYHDSNVKNLYEKVRSQLKNNAKEIGNGCFEFYHKCDNTCMESVKNGTYDYPKYSEEAKLNREEIDGVKLESTRIYQILAIYSTVASSLVLVVSLGAISFWMCSGHSCRICI

SEQ ID NO: 5633 - protein, 564 aa, synthetic construct
  REGION 1..564: note = hemagglutinin__InfluenzaA__ADM14921
MKAILVVLLYTFATANADTLCIGYHANNSTDTVDTVLEKNVTVTHSVNLLEDKHNGKLCKLRGVAPLHLGKCNIAGWILGNPECESLSTASSWSYIVETSSSDNGTCYPGDFIDYEELREQLSSVSSFERFEIFPKTSSWPNHDSNKGVTAACPHAGAKSFYKNLIWLVKKGNSYPKLSKSYINDKGKEVLVLWGIHHPSTSADQQSLYQNADAYVFVGTSRYSKKFKPEIAIRPKVRDQEGRMNYYWTLVEPGDKITFEATGNLVVPRYAFAMERNAGSGIIISDTPVHDCNTTCQTPKGAINTSLPFQNIHPITIGKCPKYVKSTKLRLATGLRNVPSIQSRGLFGAIAGFIEGGWTGMVDGWYGYHHQNEQGSGYAADLKSTQNAIDEITNKVNSVIEKMNTQFTAVGKEFNHLEKRIENLNKKVDDGFLDIWTYNAELLVLLENERTLDYHDSNVKNLYEKVRSQLKNNAKEIGNGCFEFYHKCDNTCMESVKNGTYDYPKYSEEAKLNREEIDGVKLESTRIYQILAIYSTVASSLVLVVSLGAISFWMCSGHSCRICI

SEQ ID NO: 5634 - protein, 566 aa, synthetic construct; identical to SEQ ID NO: 3833
  REGION 1..566: note = hemagglutinin__InfluenzaA__ADM14930

SEQ ID NO: 5635 - protein, 566 aa, synthetic construct
  REGION 1..566: note = hemagglutinin__InfluenzaA__ADM14948
MKAILVVLLYTFATANADTLCIGYHANNSTDTVDTVLEKNVTVTHSVNLLEDKHNGKLCKLRGVAPLHLGKCNIAGWILGNPECESLSTASSWSYIVETSSSDNGTCYPGDFIDYEELREQLSSVSSFERFEIFPKTSSWPNHDSNKGVTAACPHAGAKGFYKNLIWLVKKGNSYPKLSKSYINDKGKEVLVLWGIHHPSTSADQQSLYQNADAYVFVGTSRYSRKFKPEIAIRPKVRDQEGRMNYYWTLVEPGDKITFEATGNLVVPRYAFAMERNAGSGIIISDTPVHDCNTTCQTPEGAINTSLPFQNIHPITIGKCPKYVKSTKLRLATGLRNVPSIQSRGLFGAIAGFIEGGWTGMVDGWYGYHHQNEQGSGYAADLKSTQNAIDEITNKVNSVIEKMNTQFTAVGKEFNHLEKRIENLNKKVDDGFLDIWTYNAELLVLLENERTLDYHDSNVKNLYEKVRSQLKNNAKEIGNGCFEFYHKCDNTCMESVKNGTYDYPKYSEEAKLNREEIDGVKLESTRIYQILAIYSTVASSLVLVVSLGAISFWMCSNGSLQCRICI

SEQ ID NO: 5636 - protein, 564 aa, synthetic construct
  REGION 1..564: note = hemagglutinin__InfluenzaA__ADM14966
MKAILVVLLYTFATANADTLCIGYHANNSTDTVDTVLEKNVTVTHSVNILEDKHNGKLCKLRGVAPLHLGKCNIAGWILGNPECESLSTASSWSYIVETSSSDNGTCYPGDFIDYEELREQLSSVSSFERFEIFPKTSSWPNHDSNKGVTAACPHAGAKSFYKNLIWLVKKGNSYPKLSKSYINDKGKEVLVLWGIHHPSTSADQQSLYQNADAYVFVGSSRYSKKFKPEIAIRPKVRDQEGRMNYYWTLVEPGDKITFEATGNLVVPRYAFAMERNAGSGIIISDTPVHDCNTTCQTPKGAINTSLPFQNIHPITIGKCPKYVKSTKLRLATGLRNVPSIQSRGLFGAIAGFIEGGWTGMVDGWYGYHHQNEQGSGYAADLKSTQNAIDEITNKVNSVIEKMNTQFTAVGKEFNHLEKRIENLNKKVDDGFLDIWTYNAELLVLLENERTLDYHDSNVKNLYEKVRSQLKNNAKEIGNGCFEFYHKCDNTCMESVKNGTYDYPKYSEEAKLNREEIDGVKLESTRIYQILAIYSTVASSLVLVVSLGAISFWMCSGHSCRICI

SEQ ID NO: 5637 - protein, 566 aa, synthetic construct; identical to SEQ ID NO: 2849
  REGION 1..566: note = hemagglutinin__InfluenzaA__ADM14975

SEQ ID NO: 5638 - protein, 566 aa, synthetic construct
  REGION 1..566: note = hemagglutinin__InfluenzaA__ADM14985
MKAILVVLLYTFATANADTLCIGYHANNSTDTVDTVLEKNVTVTHSVNLLEDKHNGKLCKLRGVAPLHLGKCNIAGWILGNPECESLSTASSWSYIVETSSSDNGTCYPGDFIDYEELREQLSSVSSFERFEIFPKTSSWPNHDSNKGVTAACPHAGAKSFYKNLIWLVKKGNSYPKLSKSYINDKEKEVLVLWGIHHPSTSADQQSLYQNADAYVFVGTSRYSKKFKPEIAIRPKVRGQEGRMNYYWTLVEPGDKITFEATGNLVVPRYAFAMERNAGSGIVISDTPVHDCNTTCQTPKGAINTSLPFQNIHSITIGKCPKYVKSTKLRLATGLRNVPSIQSRGLFGAIAGFIEGGWTGMVDGWYGYHHQNEQGSGYAADLKSTQNAIDEITNKVNSVIEKMNTQFTAVGKEFNHLEKRIENLNKKVDDGFLDIWTYNAELLVLLENERTLDYHDSNVKNLYEKVRSQLKNNAKEIGNGCFEFYHKCDNTCMESVKNGTYDYPKYSEEAKLNREEIDGVKLESTRIYQILAIYSTVASSLVLVVSLGAISFWMCSNGSLQCRICI

SEQ ID NO: 5639 - protein, 566 aa, synthetic construct
  REGION 1..566: note = hemagglutinin__InfluenzaA__ADM23841
MKAILVVLLYTFATANADTLCIGYHANNSTDTVDTVLEKNVTVTHSVNLLEDKHNGKLCKLRGVAPLHLGKCNIAGWILGNPECESLSTASSWSYIVETSSSDNGTCYPGDFIDYEELREQLSSVSSFERFEIFPKTSSWPNHDSNKGVTAACPHAGAKSFYKNLIWLVKKGNSYPKLSKSYINDKGKEVLVLWGIHHQSTSADQQSLYQNADAYVFVGTSRYSKKFKPEIAIRPKVRDQEGRMNYYWTLVEPGDKITFEATGNLVVPRYAFAMERNAGSGIIISDTPVHDCNTTCQTPKGAINTSLPFQNIHPITIGKCPKYVKSTKLRLATGLRNVPSIQSRGLFGAIAGFIEGGWTGMVDGWYGYHHQNEQGSGYAADLKSTQNAIDEITNKVNSVIEKMNTQFTAVGKEFNHLEKRIENLNKKVDDGFLDIWTYNAELLVLLENERTLDYHDSNVKNLYEKVRSQLKNNAKEIGNGCFEFYHKCDNTCMESVKNGTYDYPKYSEEAKLNREEIDGVKLESTRIYQILAIYSTVASSLVLVVSLGAISFWMCSNGSLQCRICI

SEQ ID NO: 5640 - protein, 566 aa, synthetic construct; identical to SEQ ID NO: 3833
  REGION 1..566: note = hemagglutinin__InfluenzaA__ADM23843

SEQ ID NO: 5641 - protein, 566 aa, synthetic construct
  REGION 1..566: note = hemagglutinin__InfluenzaA__ADM23844
MKAILVVLLYTFATANADTLCIGYHANNSTDTVDTVLEKNVTVTHSVNLLEDKHNGKLCKLRGVAPLHLGKCNIAGWILGNPECESLSTASSWSYIVETSISDNGTCYPGDFIDYEELREQLSSVSSFERFEIFPKTSSWPNHDSNKGVTTACPHAGAKGFYKNLIWLVKKGNSYPKLSKSYINDKGKEVLVLWGIHHQSTSADQQSLYQNADAYVFVGTSRYSKKFKPEIAIRPKVRDQEGRMNYYWTLVEPGDKITFEATGNLVVPRYAFAMERNAGSGIIISDTPVHDCNTTCQTPKGAINTSLPFQNIHPITIGKCPKYVKSTKLRLATGLRNVPSIQSRGLFGAIAGFIEGGWTGMVDGWYGYHHQNEQGSGYAADLKSTQNAIDKITNKVNSVIEKMNTQFTAVGKEFNHLEKRIENLNKKVDDGFLDIWTYNAELLVLLENERTLDYHDSNVKNLYEKVRSQLKNNAKEIGNGCFEFYHKCDNTCMESVKNGTYDYPKYSEEAKLNREEIDGVKLESTRIYQILAIYSTVASSLVLVVSLGAISFWMCSNGSLQCRICI

SEQ ID NO: 5642 - protein, 566 aa, synthetic construct
  REGION 1..566: note = hemagglutinin__InfluenzaA__ADM23845
MKAILVVLLYTFATANADTLCIGYHANNSTDTVDTVLEKNVTVTHSVNLLEDKHNGKLCKLRGVAPLHLGKCNIAGWILGNPECESLSTASSWSYIVETSISDNGTCYPGDFIDYEELREQLSSVSSFERFEIFPKTSSWPNHDSNKGVTTACPHAGAKSFYKNLIWLVKKGNSYPKLSKSYINDKGKEVLVLWGIHHQSTSADQQSLYQNADAYVFVGTSRYSKKFKPEIAIRPKVRDQEGRMNYYWTLVEPGDKITFEATGNLVVPRYAFAMERNAGSGIIISDTPVHDCNTTCQTPKGAINTSLPFQNIHPITIGKCPKYVKSTKLRLATGLRNVPSIQSRGLFGAIAGFIEGGWTGMVDGWYGYHHQNEQGSGYAADLKSTQNAIDKITNKVNSVIEKMNTQFTAVGKEFNHLEKRIENLNKKVDDGFLDIWTYNAELLVLLENERTLDYHDSNVKNLYEKVRSQLKNNAKEIGNGCFEFYHKCDNTCMESVKNGTYDYPKYSEEAKLNREEIDGVKLESTRIYQILAIYSTVASSLVLVVSLGAISFWMCSNGSLQCRICI

SEQ ID NO: 5643 - protein, 566 aa, synthetic construct
  REGION 1..566: note = hemagglutinin__InfluenzaA__ADM23846
MKAILVVLLYTFATANADTLCIGYHANNSTDTVDTVLEKNVTVTHSVNLLEDKHNGKLCKLRGVAPLHLGKCNIAGWILGNPECESLSTASSWSYIVETSISDNGTCYPGDFIDYEELREQLSSVSSFERFEIFPKTSSWPNHDSNKGVTTACPHAGAKSFYKNLIWLVKKGNSYPKLSKSYINDKGKEVLVLWGIHHPSTSADQQSLYQNADAYVFVGTSRYSKKFKPEIAIRPKVRDQEGRMNYYWTLVEPGDKITFEATGNLVVPRYAFAMERNAGSGIIISDTPVHDCNTTCQTPKGAINTSLPFQNIHPITIGKCPKYVKSTKLRLATGLRNVPSIQSRGLFGAIAGFIEGGWTGMVDGWYGYHHQNEQGSGYAADLKSTQNAIDKITNKVNSVIEKMNTQFTAVGKEFNHLEKRIENLNKKVDDGFLDIWTYNAELLVLLENERTLDYHDSNVKNLYEKVRSQLKNNAKEIGNGCFEFYHKCDNTCMESVKNGTYDYPKYSEEAKLNREEIDGVKLESTRIYQILAIYSTVASSLVLVVSLGAISFWMCSNGSLQCRICI

SEQ ID NO: 5644 - protein, 566 aa, synthetic construct
  REGION 1..566: note = hemagglutinin__InfluenzaA__ADM23847
MKAILVVLLYTFATANADTLCIGYHANNSTDTVDTVLEKNVTVTHSVNLLEDKHNGKLCKLRGVAPLHLGKCNIAGWILGNPECESLSTASSWSYIVETSISDNGTCYPGDFIDYEELREQLSSVSSFERFEIFPKTSSWPNHDSNKGVTTACPHAGAKGFYKNLIWLVKKGNSYPKLSKSYINDKGKEVLVLWGIHHQSTSADQQSLYQNADAYVFVGTSRYSKKFKPEIAIRPKVRDQEGRMNYYWTLVEPGDKITFEATGNLVVPRYAFAMERNVGSGIIISDTPVHDCNTTCQTPKGAINTSLPFQNIHPITIGKCPKYVKSTKLRLATGLRNVPSIQSRGLFGAIAGFIEGGWTGMVDGWYGYHHQNEQGSGYAADLKSTQNAIDKITNKVNSVIEKMNTQFTAVGKEFNHLEKRIENLNKKVDDGFLDIWTYNAELLVLLENERTLDYHDSNVKNLYEKVRSQLKNNAKEIGNGCFEFYHKCDNTCMESVKNGTYDYPKYSEEAKLNREEIDGVKLESTRIYQILAIYSTVASSLVLVVSLGAISFWMCSNGSLQCRICI

SEQ ID NO: 5645 - protein, 566 aa, synthetic construct
  REGION 1..566: note = hemagglutinin__InfluenzaA__ADM23849
MKAILVVLLYTFATANADTLCIGYHANNSTDTVDTVLEKNVTVTHSVNLLEDKHNGKLCKLRGVAPLHLGKCNIAGWILGNPECESLSTASSWSYIVETSSSDNGTCYPGDFIDYEELREQLSSVSSFERFEIFPKTSSWPNHDSNKGVTAACPHAGAKSFYKNLIWLVKKGNSYPKLSKSYINDKGKEVLVLWGIHHQSTSADQQSLYQNADAYVFVGTSRYSKKFKPEIAIRPKVRDQEGRMNYYWTLVEPGDKITFEATGNLVVPRYAFAMERNAGSGIIISDTPVHDCNTTCQTPKGAINTSLPFQNIHPITIGKCPKYVKSTKLRLATGLRNVPSIQSRGLFGAIAGFIEGGWTGMVDGWYGYHHQNEQGSGYAADLKSTQNAIDKITNKVNSVIEKMNTQFTAVGKEFNHLEKRIENLNKKVDDGFLDIWTYNAELLVLLENERTLDYHDSNVKNLYEKVRSQLKNNAKEIGNGCFEFYHKCDNTCMESVKNGTYDYPKYSEEAKLNREEIDGVKLESTRIYQILAIYSTVASSLVLVVSLGAISFWMCSNGSLQCRICI

SEQ ID NO: 5646 - protein, 566 aa, synthetic construct
  REGION 1..566: note = hemagglutinin__InfluenzaA__ADM23851
MEAILVVLLYTFATANADTLCIGYHANNSTDTVDTVLEKNVTVTHSVNLLEDKHNGKLCKLRGVAPLHLGKCNIAGWILGNPECESLSTASSWSYIVETSSSDNGTCYPGDFIDYEELREQLSSVSSFERFEIFPKTSSWPNHDSNKGVTAACPHAGAKSFYKNLIWLVKKGNSYPKLSKSYINDKGKEVLVLWGIHHQSTSADQQSLYQNADAYVFVGSSRYSKKFKPEIAIRPKVRDQEGRMNYYWTLVEPGDKITFEATGNLVVPRYAFAMERNAGSGIIISDTPVHDCNTTCQTPKGAINTSLPFHNIHPITIGKCPKYVKSTKLRLATGLRNVPSIQSRGLFGAIAGFIEGGWTGMVDGWYGYHHQNEQGSGYAADLKSTQNAIDEITNKVNSVIEKMNTQFTAVGKEFNHLEKRIENLNKKVDDGFLDIWTYNAELLVLLENERTLDYHDSNVKNLYEKVRSQLKNNAKEIGNGCFEFYHKCDNTCMESVKNGTYDYPKYSEEAKLNREKIDGVKLESTRIYQILAIYSTVASSLVLVVSLGAISFWMCSNGSLQCRICI

SEQ ID NO: 5647 - protein, 566 aa, synthetic construct
  REGION 1..566: note = hemagglutinin__InfluenzaA__ADM23852
MEAILVVLLYTFATANADTLCIGYHANNSTDTVDTVLEKNVTVTHSVNLLEDKHNGKLCKLRGVAPLHLGKCNIAGWILGNPECESLSTASSWSYIVETSSSDNGTCYPGDFIDYEELREQLSSVSSFERFEIFPKTSSWPNHDSNKGVTAACPHAGAKSFYKNLIWLVKKGNSYPKLSKSYINDKGKEVLVLWGIHHPSTSADQQSLYQNADAYVFVGSSRYSKKFKPEIAIRPKVRDQEGRMNYYWTLVEPGDKITFEATGNLVVPRYAFAMERNAGSGIIISDTPVHDCNTTCQTPKGAINTSLPFHNIHPITIGKCPKYVKSTKLRLATGLRNVPSIQSRGLFGAIAGFIEGGWTGMVDGWYGYHHQNEQGSGYAADLKSTQNAIDEITNKVNSVIEKMNTQFTAVGKEFNHLEKRIENLNKKVDDGFLDIWTYNAELLVLLENERTLDYHDSNVKNLYEKVRSQLKNNAKEIGNGCFEFYHKCDNTCMESVKNGTYDYPKYSEEAKLNREKIDGVKLESTRIYQILAIYSTVASSLVLVVSLGAISFWMCSNGSLQCRICI

SEQ ID NO: 5648 - protein, 566 aa, synthetic construct; identical to SEQ ID NO: 5647
  REGION 1..566: note = hemagglutinin__InfluenzaA__ADM23853

SEQ ID NO: 5649 - protein, 566 aa, synthetic construct; identical to SEQ ID NO: 2911
  REGION 1..566: note = hemagglutinin__InfluenzaA__ADM23855

SEQ ID NO: 5650 - protein, 566 aa, synthetic construct
  REGION 1..566: note = hemagglutinin__InfluenzaA__ADM23856
MKAILVVLLYTFATVNADTLCIGYHANNSTDTVDTVLEKNVTVTHSVNLLEDKHNGKLCKLRGVAPLHLGKCNIAGWILGNPECESLSTASSWSYIVETSSSDNGTCYPGDFIDYEELREQLSSVSSFERFEIFPKTSSWPNHDSNKGVTAACPHAGAKSFYKNLIWLVKKGNSYPKLSKSYINDKRKEVLVLWGIHHQSTSADQQSLYQNADAYVFVGTSRYSKKFKPEIAIRPKVRDQEGRMNYYWTLVEPGDKITFEATGNLVVPRYAFAMERNAGSGIIISDTPVHDCNTTCQTPKGAINTSLPFQNIHPITIGKCPKYVKSTKLRLATGLRNVPSIQSRGLFGAIAGFIEGGWTGMVDGWYGYHHQNEQGSGYAADLKSTQNAIDKITNKVNSVIEKMNTQFTAVGKEFNHLEKRIENLNKKVDDGFLDIWTYNAELLVLLENERTLDYHDSNVKNLYEKVRSQLKNNAKEIGNGCFEFYHKCDNTCMESVKNGTYDYPKYSEEAKLNREEIDGVKLESTRIYQILAIYSTVASSLVLVVSLGAISFWMCSNGSLQCRICI

SEQ ID NO: 5651 - protein, 566 aa, synthetic construct; identical to SEQ ID NO: 2669
  REGION 1..566: note = hemagglutinin__InfluenzaA__ADM25945

SEQ ID NO: 5652 - protein, 566 aa, synthetic construct; identical to SEQ ID NO: 2911
  REGION 1..566: note = hemagglutinin__InfluenzaA__ADM25948

SEQ ID NO: 5653 - protein, 566 aa, synthetic construct; identical to SEQ ID NO: 4698
  REGION 1..566: note = hemagglutinin__InfluenzaA__ADM26264

SEQ ID NO: 5654 - protein, 566 aa, synthetic construct; identical to SEQ ID NO: 4698
  REGION 1..566: note = hemagglutinin__InfluenzaA__ADM26265

SEQ ID NO: 5655 - protein, 566 aa, synthetic construct; identical to SEQ ID NO: 4698
  REGION 1..566: note = hemagglutinin__InfluenzaA__ADM26266

SEQ ID NO: 5656 - protein, 566 aa, synthetic construct; identical to SEQ ID NO: 4698
  REGION 1..566: note = hemagglutinin__InfluenzaA__ADM26267

SEQ ID NO: 5657 - protein, 566 aa, synthetic construct
  REGION 1..566: note = hemagglutinin__InfluenzaA__ADM26268
MKAILVVLLYTFTTANADTLCIGYHANNSTDTVDTVLEKNVTVTHSVNLLEDKHNGKLCKLRGVAPLHLGKCNIAGWILGNPECESLSTASSWSYIVETSSSDNGTCYPGDFIDYEELREQLSSVSSFERFEIFPKTSSWPNHDSNKGVTAACPHAGAKSFYKNLIWLVKKGNSYPKLSKSYINDKGKEVLVLWGIHHPSTSADQQSLYQNADAYVFVGTSRYSKKFKPEIAIRPKVREQEGRMNYYWTLVEPGDKITFEATGNLVVPRYAFAMERNAGSGIIISDTPVHDCNTTCQTPKGAINTSLPFQNIHSITIGKCPKYVKSTKLRLATGLRNVPSIQSRGLFGAIAGFIEGGWTGMVDGWYGYHHQNEQGSGYAADLKSTQNAIDEITNKVNSVIEKMNTQFTAVGKEFNHLEKRIENLNKKVDDGFLDIWTYNAELLVLLENERTLDYHDSNVKNLYEKVRSQLKNNAKEIGNGCFEFYHKCDNTCMESVKNGTYDYPKYSEEAKLKREEIDGVKLESTRIYQILAIYSTVASSLVLVVSLGAISFWMCSNGSLQCRICI

SEQ ID NO: 5658 - protein, 566 aa, synthetic construct
  REGION 1..566: note = hemagglutinin__InfluenzaA__ADM26269
MKTILVVLLYTFTTANADTLCIGYHANNSTDTVDTVLEKNVTVTHSVNLLEDKHNGKLCKLRGVAPLHLGKCNIAGWILGNPECESLSTASSWSYIVETSSSDNGTCYPGDFIDYEELREQLSSVSSFERFEIFPKTSSWPNHDSNKGVTAACPHAGAKSFYKNLIWLVKKGNSYPKLSKSYINDKGKEVLVLWGIHHPSTSADQQSLYQNADAYVFVGTSRYSKKFKPEIAIRPKVREQEGRMNYYWTLVEPGDKITFEATGNLVVPRYAFAMERNAGSGIIISDTPVHDCNTTCQTPKGAINTSLPFQNIHSITIGKCPKYVKSTKLRLATGLRNVPSIQSRGLFGAIAGFIEGGWTGMVDGWYGYHHQNEQGSGYAADLKSTQNAIDEITNKVNSVIEKMNTQFTAVGKEFNHLEKRIENLNKKVDDGFLDIWTYNAELLVLLENERTLDYHDSNVKNLYEKVRSQLKNNAKEIGNGCFEFYHKCDNTCMESVKNGTYDYPKYSEEAKLKREEIDGVKLESTRIYQILAIYSTVASSLVLVVSLGAISFWMCSNGSLQCRICI

SEQ ID NO: 5659 - protein, 566 aa, synthetic construct
  REGION 1..566: note = hemagglutinin__InfluenzaA__ADM26270
MKAILVVLLYTFTTANADTLCIGYHANNSTDTVDTVLEKNVTVTHSVNLLEDKHNGKLCKLRGVAPLHLGKCNIAGWILGNPECESLSTASSWSYIVETSSSDNGTCYPGDFIDYEELREQLSSVSSFERFEIFPKTSSWPNHDSNKGVTAACPHAGAKSFYKNLIWLVKKGNSYPKLSKSYINDKGKEVLVLWGIHHPSTSADQQSLYQNADAYVFVGTSRYSKKFKPEIAIRPKVREQEGRMNYYWTLVEPGDKITFEATGNLVVPRYAFAMERNAGSGIIISDTPVHDCNTTCQTPKGAINTSLPFQNIHSITIGRCPKYVKSTKLRLATGLRNVPSIQSRGLFGAIAGFIEGGWTGMVDGWYGYHHQNEQGSGYAADLKSTQNAIDEITNKVNSVIEKMNTQFTAVGKEFNHLEKRIENLNKKVDDGFLDIWTYNAELLVLLENERTLDHHDSNVKNLYEKVRSQLKNNAKEIGNGCFEFYHKCDNTCMESVKNGTYDYPKYSEEAKLNREEIDGVKLESTRIYQILAIYSTVASSLVLVVSLGAISFWMCSNGSLQCRICI

SEQ ID NO: 5660 - protein, 566 aa, synthetic construct; identical to SEQ ID NO: 4698
  REGION 1..566: note = hemagglutinin__InfluenzaA__ADM26271

SEQ ID NO: 5661 - protein, 566 aa, synthetic construct
  REGION 1..566: note = hemagglutinin__InfluenzaA__ADM26272
MKAILVVLLYTFTTANADTLCIGYHANNSTDTVDTVLEKNVTVTHSVNLLEDKHNGKLCKLRGVAPLHLGKCNIAGWILGNPECESLSTASSWSYIVETSSSDNGTCYPGDFIDYEELREQLSSVSSFERFEIFPKTSSWPNHDSNKGVTAACPHAGAKSFYKNLIWLVKKGNSYPKLSKSYINDKGKEVLVLWGIHHPSTSADQQSLYQNADAYVFVGTSRYSKKFKPEIAIRPKVREQEGRMNYYWTLVEPGDKITFEATGNLVVPRYAFAMERNAGSGIIISDTPVHDCNTTCQTPKGAINTSLPFQNIHSITIGRCPKYVKSTKLRLATGLRNVPSIQSRGLFGAIAGFIEGGWTGMVDGWYGYHHQNEQGSGYAADLKSTQNAIDEITNKVNSVIEKMNTQFTAVGKEFNHLEKRIENLNKKVDDGFLDIWTYNAELLVLLENERTLDYHDSNVKNLYEKVRSQLKNNAKEIGNGCFEFYHKCDNTCMESVKNGTYDYPKYSEEAKLNREEIDGVKLESTRIYQILAIYSTVASSLVLVVSLGAISFWMCSNGSLQCRICI

SEQ ID NO: 5662 - protein, 566 aa, synthetic construct
  REGION 1..566: note = hemagglutinin__InfluenzaA__ADM26274
MKAILVVLLYTFTTANADTLCIGYHANNSTDTVDTVLEKNVTVTHSVNLLEDKHNGKLCKLRGVAPLHLGKCNIAGWILGNPECESLSTASSWSYIVETSSSDNGTCYPGDFIDYEELREQLSSVSSFERFEIFPKTSSWPNHDSNKGVTAACPHAGAKSFYKNLIWLVKKGNSYPKLSKSYINDKGKEVLVLWGIHHPSTSADQQSLYQNADAYVFVGTSRYSKKFKPEIAIRPKVREQEGRMNYYWTLVEPGDKITFEATGNLVVPRYAFAMERNAGSGIIISDTPVHDCNTTCQTPKGAINTSLPFQNIHSITIGKCPKYVKSTKLRLATGLRNVPSIQSRGLFGAIAGFIEGGWTGMVDGWYGYHHQNEQGSGYAADLKSTQNAIDEITNKVNSVIEKMNTQFTAVGKEFNHLEKRIENLNKKVDDGFLDIWTYNAELLVLLENERTLDYHDSNVKDLYEKVRSQLKNNAKEIGNGCFEFYHKCDNTCMESVKNGTYDYPKYSEEAKLNREEIDGVKLESTRIYQILAIYSTVASSLVLVVSLGAISFWMCSNGSLQCRICI

SEQ ID NO: 5663 - protein, 566 aa, synthetic construct; identical to SEQ ID NO: 4698
  REGION 1..566: note = hemagglutinin__InfluenzaA__ADM26276

SEQ ID NO: 5664 - protein, 566 aa, synthetic construct
  REGION 1..566: note = hemagglutinin__InfluenzaA__ADM26277
MKAILVVLLYTFTTANADTLCIGYHANNSTDTVDTVLEKNVTVTHSVNLLEDKHNGKLCKLRGVAPLHLGKCNIAGWILGNPECESLSTASSWSYIVETSSSDNGTCYPGDFIDYEELREQLSSVSSFERFEIFPKTSSWPNHDSNKGVTAACPHAGAKSFYKNLIWLVKKGNSYPKLSKSYINDKGKEVLVLWGIHHPSTSADQQSLYQNADAYVFVGTSRYSKKFKPEIAIRPKVREQEGRMNYYWTLVEPGDKITFEATGNLVVPRYAFAMERNAGSGIIISDTPVHDCNTTCQTPKGAINTSLPFQNIHSITIGKCPKYVKSTKLRLATGLRNVPSIQSRGLFGAIAGFIEGGWTGMVDGWYGYHHQNEQGSGYAADLKSTQNAIDEITNKVNSVIEKMNTQFTAVGKEFNHLEKRIENLNKKVDDGFLDIWTYNAELLVLLENERTLDYHDSNVKNLYEKVRSQLKNNAKEIGNGCFEFYHKCDNTCMESVKNGTYDYPKYSEEAKLNREEIDGVKLESTRIYQILAIYSTVASSLVLIVSLGAISFWMCSNGSLQCRICI

SEQ ID NO: 5665 - protein, 566 aa, synthetic construct
  REGION 1..566: note = hemagglutinin__InfluenzaA__ADM26278
MKAILVVLLYTFTTANADTLCIGYHANNSTDTVDTVLEKNVTVTHSVNLLEDKHNGKLCKLRGVAPLHLGKCNIAGWILGNPECESLSTASSWSYIVETSSSDNGTCYPGDFIDYEELREQLSSVSSFERFEIFPKTSSWPNHDSNKGVTAACPHAGAKSFYKNLIWLVKKGNSYPKLSKSYINDKGKEVLVLWGIHHPSTSADQQSLYQNADAYVSVGTSRYSKKFKPEIAIRPKVREQEGRMNYYWTLVEPGDKITFEATGNLVVPRFAFAMERNAGSGIIISDTPVHDCNTTCQTPKGAINTSLPFQNIHSITIGKCPKYVKSTKLRLATGLRNVPSIQSRGLFGAIAGFIEGGWTGMVDGWYGYHHQNEQGSGYAADLKSTQNAIDEITNKVNSVIEKMNTQFTAVGKEFNHLEKRIENLNKKVDDGFLDIWTYNAELLVLLENERTLDYHDSNVKNLYEKVRSQLKNNAKEIGNGCFEFYHKCDNTCMESVKNGTYDYPKYSEEAKLKREEIDGVKLESTRIYQILAIYSTVASSLVLVVSLGAISFWMCSNGSLQCRICI

SEQ ID NO: 5666 - protein, 566 aa, synthetic construct
  REGION 1..566: note = hemagglutinin__InfluenzaA__ADM26279
MKAILVVLLYTFTTANADTLCIGYHANNSTDTVDTVLEKNVTVTHSVNLLEDKHNGKLCKLRGVAPLHLGKCNIAGWILGNPECESLSTASSWSYIVETSSSDNGTCYPGDFIDYEELREQLSSVSSFERFEIFPKTSSWPNHDSNKGVTAACPHAGAKSFYKNLIWLVKKGNSYPKLSKSYINDKGKEVLVLWGIHHPSTSADQQSLYQNADAYVFVGTSRYSKKFKPEIAIRPKVRGQEGRMNYYWTLVEPGDKITFEATGNLVVPRYAFAMERNAGSGIIISDTPVHDCNTTCQTPKGAINTSLPFQNIHSITIGKCPKYVKSTKLRLATGLRNVPSIQSRGLFGAIAGFIEGGWTGMVDGWYGYHHQNEQGSGYAADLKSTQNAIDEITNKVNSVIEKMNTQFTAVGKEFNHLEKRIENLNKKVDDGFLDIWTYNAELLVLLENERTLDYHDSNVKNLYEKVRSQLKNNAKEIGNGCFEFYHKCDNTCMESVKNGTYDYPKYSEEAKLNREEIDGVKLESTRIYQILAIYSTVASSLVLVVSLGAISFWMCSNGSLQCRICI

SEQ ID NO: 5667 - protein, 566 aa, synthetic construct; identical to SEQ ID NO: 4698
  REGION 1..566: note = hemagglutinin__InfluenzaA__ADM26280

SEQ ID NO: 5668 - protein, 566 aa, synthetic construct
  REGION 1..566: note = hemagglutinin__InfluenzaA__ADM26281
MKAILVVLLYTFATANADTLCIGYHANNSTDTVDTVLEKNVTVTHSVNLLEDKHNGKLCKLRGVAPLHLGKCNIAGWILGNPECESLSTASSWSYIVETSSSDNGTCYPGDFIDYEELREQLSSVSSFERFEIFPKTSSWPNHDSNKGVTAACPHAGAKSFYKNLIWLVKKGNSYPKLSKSYINDKGKEVLVLWGIHHPSTSADQQSLYQNADAYVFVGTSRYSKKFKPEIAIRPKVRDQEGRMNYYWTLVEPGDKITFEATGNLVVPRYAFAMERNAGSGIIISDTPVHDCNTTCQTPKGAINTSLPFQSIHPITIGKCPKYVKSTKLRLATGLRNVPSIQSRGLFGAIAGFIEGGWTGMVDGWYGYHHQNEQGSGYAADLKSTQNAIDKITNKVNSVIEKMNTQFTAVGKEFNHLERRIENLNKKVDDGFLDIWTYNAELLVLLENERTLDYHDSNVKNLYEKVRSQLKNNAKEIGNGCFEFYHKCDNTCMESVKNGTYDYPKYSEEAKLNREEIDGVKLESTRVYQILAIYSTVASSLVLVVSLGAISFWMCSNGSLQCRICI

SEQ ID NO: 5669 - protein, 566 aa, synthetic construct
  REGION 1..566: note = hemagglutinin__InfluenzaA__ADM26282
MKAILVVLLYTFTTANADTLCIGYHANNSTDTVDTVLEKNVTVTHSVNLLEDKHNGKLCKLRGVAPLHLGKCNIAGWILGNPECESLSTASSWSYIVETSSSDNGTCYPGDFIDYEELREQLSSVSSFERFEIFPKTSSWPNHDSNKGVTAACPHAGAKSFYKNLIWLVKKGNSYPKLSKSYINDKGKEVLVLWGIHHPSTSADQQSLYQNADAYVFVGTSRYSKKFKPEIAIRPKVREQEGRMNYYWTLVEPGDKITFEATGNLVVPRYAFAMERNAGSGIIISDTPVHDCNTTCQTPKGAINTSLPFQNIHSITIGKCPKYVKSTKLRLATGLRNVPSIQSRGLFGAIAGFIEGGWTGMVDGWYGYHHQNEQGSGYAADLKSTQNAIDEITNKVNSVIEKMNTQFTAVGKEFNHLERRIENLNKKVDDGFLDIWTYNAELLVLLENERTLDYHDSNVKNLYEKVRSQLKNNAKEIGNGCFEFYHKCDNTCMESVKNGTYDYPKYSEEAKLNREEIDGVKLESTRIYQILAIYSTVASSLVLVVSLGAISFWMCSNGSLQCRICI

SEQ ID NO: 5670 - protein, 566 aa, synthetic construct
  REGION 1..566: note = hemagglutinin__InfluenzaA__ADM26283
MKAILVVLLYTFTTANADTLCIGYHANNSTDTVDTVLEKNVTVTHSVNLLEDKHNGKLCKLRGVAPLHLGKCNIAGWILGNPECESLSTASSWSYIVETSSSDNGTCYPGDFIDYEELREQLSSVSSFERFEIFPKTSSWPNHDSNKGVTAACPHAGAKSFYKNLIWLVKKGNSYPKLSKSYINDKGKEVLVLWGIHHPSTSADQQSLYQNADAYVFVGTSRYSKKFKPEIAIRPKVREQEGRMNYYWTLVEPGDKITFEATGNLVVPRYAFAMERNAGSGIIISDTPVHDCNTTCQTPKGAINTSLPFQNIHSITIGKCPKYVKSTKLRLATGLRNVPSIQSRGLFGAIAGFIEGGWTGMVDGWYGYHHQNEQGSGYAADLKSTQNAIDEITNKVNSVIEKMNTQFTAVGKEFNHLEKRIENLNKKVDDGFLDIWTYNAELLVLLENERTLDYHDSNVKNLYEKVRSQLKNNAKEIGNGCFEFYHKCDNTCMESVKNGTYDYPKYSEEAKLNREKIDGVKLESTRIYQILAIYSTVASSLVLVVSLGAISFWMCSNGSLQCRICI

SEQ ID NO: 5671 - protein, 566 aa, synthetic construct; identical to SEQ ID NO: 4698
  REGION 1..566: note = hemagglutinin__InfluenzaA__ADM26284

SEQ ID NO: 5672 - protein, 566 aa, synthetic construct; identical to SEQ ID NO: 4698
  REGION 1..566: note = hemagglutinin__InfluenzaA__ADM26285

SEQ ID NO: 5673 - protein, 566 aa, synthetic construct
  REGION 1..566: note = hemagglutinin__InfluenzaA__ADM26784
MKTIIALSYILCLVFAQKLPGNDNSTATLCLGHHAVPNGTIVKTITNDQIEVTNATELVQSSSTGEICDSPHQILDGENCTLIDALLGDPQCDGFQNKKWDLFVERSKAYSNCYPYDVPDYASLRSLVASSGTLEFNNESFNWTGVTQNGTSSACMRRSNNSFFSRLNWLTHLKFKYPALNVTMPNNEQFDKLYIWGVHHPGTDNDQIFLYAQASGRITVSTKRSQQTVIPNIGSRPRVRNIPSRISIYWTIVKPGDILLINSTGNLIAPRGYFKIRSGKSSIMRSDAPIGKCNSECITPNGSIPNDKPFQNVNRITYGACPRYVKQNTLKLATGMRNVPEKQTRGIFGAIAGFIENGWEGMVDGWYGFRHQNSEGRGQAADLKSTQAAIDQINGKLNRLIGKTNEKFHQIEKEFSEVEGRIQDLEKYVEDTKIDLWSYNAELLVALENQHTIDLTDSEMNKLFEKTKKQLRENAEDMGNGCFKIYHKCDNACIGSIRNGTYDHDVYRDEALNNRFQIKGVELKSGYKDWILWISFAISCFLLCVALLGFIMWACQKGNIRCNICI

SEQ ID NO: 5674 - protein, 566 aa, synthetic construct; identical to SEQ ID NO: 2434
  REGION 1..566: note = hemagglutinin__InfluenzaA__ADM26795

SEQ ID NO: 5675 - protein, 566 aa, synthetic construct
  REGION 1..566: note = hemagglutinin__InfluenzaA__ADM26817
MKTTIALSHILCLVFAQKLPGNDNSTATLCLGHHAVPNGTIVKTITNDQIEVTNATELVQSSSAGEICDSPHQILDGENCTLIDALLGDPQCDGFQNKKWDLFVERRRAYSNCYPYDVPDYASLRSLVASSGTLEFNNESFNWTGVTQNGTSSACIRRSNNSFFSRLNWLTHLNFKYPALNVTMPNNEQFDKLYIWGVHHPGTDKDQIFLYAQASGRITVSTKRSQQAVIPNIGSRPRVRNIPSRISIYWTIVKPGDILLINSTGNLIAPRGYFKIRSGKSSIMRSDAPIGKCNSECITPNGSIPNDKPFQNVNRITYGACPRYVKQSTLKLATGMRNVPEKQTRGIFGAIAGFIENGWEGMVDGWYGFRHQNSEGRGQAADLKSTQAAIDQINGKLNRLIGKTNEKFHQIEKEFSEVEGRIQDLEKYVEDTKIDLWSYNAELLVALENQHTIDLTDSEMNKLFEKTKKQLRENAEDMGNGCFKIYHKCDNACIGSIRNGTYDHDVYRDEALNNRFQIKGVELKSGYKDWILWISFAISCFLLCVALLGFIMWACQKGNIRCNICI

SEQ ID NO: 5676 - protein, 567 aa, synthetic construct
  REGION 1..567: note = hemagglutinin__InfluenzaA__ADM31424
MEKIVLLFTTISLVKSDHICIGYHANNSTEQVDTIMEKNVTVTHAQDILEKTHNGKLCDLNGVKPLILKDCSVAGWLLGNPLCDEFINVPEWSYIVEKANPANDLCYPGNFNDYEELKHLLSRINHFEKIQIIPKDSWSDHEASLGVSAACSYQGNSSFFRNVVWLIKKDNAYPTIKKDYNNTNQEDLLVLWGIHHPNDEAEQTRLYQNPTTYISIGTSTLNQRLVPKIATRSKINGQSGRIDFFWTILKPNDAIHFESNGNFIAPEYAYKIVKKGDSTIMKSEVEYGNCNTRCQTPIGAINSSMPFHNIHPLTIGECPKYVKSNKLVLATGLRNSPQRERRRKRGLFGAIAGFIEGGWQGMVDGWYGYHHSNEQGSGYAADKESTQKAIDGVTNKVNSIIDKMNTQFEAVGREFNNLERRIENLNKKMEDGFLDVWTYNAELLVLMENERTLDFHDSNVKNLYDKVRLQLKDNAKELGNGCFEFYHKCNNECMESVRNGTYDYPQYSEEARLKREEISGVKLESIGIYQILSIYSTVASSLVLAIMMAGLSLWMCSNGSLQCRICI

SEQ ID NO: 5677 - protein, 566 aa, synthetic construct; identical to SEQ ID NO: 5270
  REGION 1..566: note = hemagglutinin__InfluenzaA__ADM31478

SEQ ID NO: 5678 - protein, 566 aa, synthetic construct
  REGION 1..566: note = hemagglutinin__InfluenzaA__ADM31488
MKAILVVLLYTFATANADTLCIGYHANNSTDTVDTVLEKNVTVTHSVNILEDKHNGKLCKLRGVAPLHLGKCNIAGWILGNPECESLSTASSWSYIVETSSSDNGTCYPGDFIDYEELREQLSSVSSFERFEIFPKTSSWPNHDSNKGVTAACPHAGAKSFYKNLIWLVKKGNSYPKLSKSYINDKGKEVLVLWGIHHPSTSADQQSLYQNADAYVFVGSSKYSKKFKPEIAIRPKVRDQEGRMNYYWTLVEPGDKITFEATGNLVVPRYAFAMERNAGSGIIISDTPVHDCNTTCQTPKGAINTSLPFQNIHPITIGKCPKYVKSTKLRLATGLRNVPSIQSRGLFGAIAGFIEGGWTGMVDGWYGYHHQNEQGSGYAADLKSTQNAIDEITNKVNSVIEKMNTQFTAVGKEFNHLEKRIENLNKKVDDGFLDIWTYNAELLVLLENERTLDYHDSNVKNLYEKVRSQLKNNAKEVGNGCFEFYHKCDNTCMESVKNGTYDYPKYSEEAKLNREEIDGVKLESTRIYQILAIYSTAASSLVLVVSLGAISFWMCSNGSLQCRICI

SEQ ID NO: 5679 - protein, 566 aa, synthetic construct
  REGION 1..566: note = hemagglutinin__InfluenzaA__ADM31498
MKAILVVLLYTFATANADTLCIGYHANNSTDTVDTVLEKNVTVTHSVNLLEDKHNGKLCKLRGVAPLHLGKCNIAGWILGNPECESLSTASSWSYIVETSSSDNGTCYPGDFIDYEELREQLSSVSSFERFEIFPKTSSWPNHDSNKGVTAACPHAGAKSFYKNLIWLVKKGNSYPKLSKSYINDKGKEVLVLWGIHHPSTSADQQSLYQNADAYVFVGTSRYSKKFKPEIAIRPKVRDQEGRMNYYWTLVKPGDKITFEATGNLVVPRYAFAMERNAGSGIIISDTPVHDCNTTCQTPKGAINTSLPFQNIHPITIGKCPKYVKSTKLRLATGLRNVPSIQSRGLFGAIAGFIEGGWTGMVDGWYGYHHQNEQGSGYAADLKSTQHAIDEITNKVNSVIEKMNTQFTAVGKEFNHLEKRIENLNKKVDDGFLDIWTYNAELLVLLENERTLDYHDSNVKNLYEKVRSQLKNNAKEIGNGCFEFYHKCDNTCMESVKNGTYDYPKYSEEAKLNREEIDGVKLESTRIYQILAIYSTVASSLVLVVSLGAISFWMCSNGSLQCRICI

SEQ ID NO: 5680 - protein, 566 aa, synthetic construct
  REGION 1..566: note = hemagglutinin__InfluenzaA__ADM31508
MKAILVVLLYTFATANADTLCIGYHANNSTDTVDTVLEKNVTVTHSVNLLEDKHNGKLCKLRGVAPLHLGKCNIAGWILGNPECESLSTASSWSYIVETSSSDNGTCYPGDFIDYEELREQLSSVSSFERFEIFPKTRSWPNHDSNKGVTAACPHAGAKSFYKSLIWLVKKGNSYPKLSKSYINDKGKEVLVLWGIHHPSTSADQQSLYQNADAYVFVGTSRYSKKFKPEIAIRPKVRDQEGRMNYYWTLVEPGDKITFEATGNLVVPRYAFAMERNAGSGIIISDTPVHDCNTTCQTPKGAINTSLPFQNIHPITIGKCPKYVKSTKLRLATGLRNVPSIQSRGLFGAIAGFIEGGWTGMVDGWYGYHHQNEQGSGYAADLKSTQHAIDEITNKVNSVIEKMNTQFTAVGKEFNHLEKRIENLNKKVDDGFLDIWTYNAELLVLLENERTLDYHDSNVKNLYEKVRSQLKNNAKEIGNGCFEFYHKCDNTCMESVKNGTYDYPKYSEEAKLNREEIDGVKLESTRIYQILAIYSTVASSLVLVVSLGAISFWMCSNGSLQCRICI

SEQ ID NO: 5681 - protein, 566 aa, synthetic construct
  REGION 1..566: note = hemagglutinin__InfluenzaA__ADM31518
MKAILVVLLYTFATANADTLCIGYHANNSTDTVDTVLEKNVTVTHSVNLLEDKHNGKLCKLRGVAPLHLGKCNIAGWILGNPECESLSTASSWSYIVETSSSDNGTCYPGDFIDYEELREQLSSVSSFERFEIFPKTSSWPNHDSNKGVTAACPHAGAKSFYKNLIWLVKKGNSYPKLSKSYVNDKGKEVLVLWGIHHPSTSADQQSLYQNADAYVFVGTSRYSKKFKPEIAIRPKVRDQEGRMNYYWTLVEPGDKITFEATGNLVVPRYAFAMERNAGSGIIISDTPVHDCNTTCQTPKGAINTSLPFQNIHPITIGKCPKYVKSTKLRLATGLRNIPSIQSRGLFGAIAGFIEGGWTGMVDGWYGYHHQNEQGSGYAADLKSTQNAIDEITNKVNSVIEKMNTQFTAVGKEFNHLEKRIENLNKKVDDGFLDIWTYNAELLVLLENERTLDYHDSNVKNLYEKVRSQLKNNAKEIGNGCFEFYHKCDNTCMESVKNGTYDYPKYSEEAKLNREEIDGVKLESTRIYQILAIYSTVASSLVLVVSLGAISFWMCSNGSLQCRICI

SEQ ID NO: 5682 - protein, 566 aa, synthetic construct
  REGION 1..566: note = hemagglutinin__InfluenzaA__ADM31528
MKAILVVLLYTFATANADTLCIGYHANNSTDTVDTVLEKNVTVTHSVNLLEDKHNGKLCKLRGVAPLHLGKCNIAGWILGNPECESLSTASSWSYIVETSSSDNGTCYPGDFIDYEELREQLSSVSSFERFEMFPKTSSWPNHDSNKGVTAACPHAGAKSFYKNLIWLVKKGNSYPKLSKSYINDKGKEVLVLWGIHHPSTSADQQSLYQNADAYVFVGTSRYSKKFKPEIAIRPKVRDQEGRMNYYWTLVEPGDKITFEATGNLVVPRYAFAMERNAGSGIIISDTPVHDCNTTCQTPKGAINTSLPFQNIHPITIGKCPKYVKSTKLRLATGLRNVPSIQSRGLFGAIAGFIEGGWTGMVDGWYGYHHQNEQGSGYAADLKSTQNAIDKITNKVNSVIEKMNTQFTAVGKEFNHLEKRIENLNKKVDDGFLDIWTYNAELLVLLENERTLDYHDSNVKNLYEKVRSQLKNNAKEVGNGCFEFYHKCDNTCMESVKNGTYDYPKYSEEAKLNREEIDGVKLESTRIYQILAIYSTVASSLVLVVSLGAISFWMCSNGSLQCRICI

SEQ ID NO: 5683 - protein, 566 aa, synthetic construct
  REGION 1..566: note = hemagglutinin__InfluenzaA__ADM31538
MKAILVVLLYTFATANADTLCIGYHANNSTDTVDTVLEKNVTVTHSVNLLEDKHDGKLCKLRGVAPLHLGKCNIAGWILGNPECESLSTASSWSYIVETSSSDNGTCYPGDFIDYEELREQLSSVSSFERFEIFPKTSSWPNHDSNKGVTAACPHAGAKSFYKNLIWLVKKGNSYPKLSKSYINDKGKEVLVLWGIHHPSTSADQQSLYQNADAYVFVGTSRYSKKFKPEIAIRPKVRDQEGRMNYYWTLVEPGDKITFEATGNLVVPRYAFAMERNAGSGIIISDTPVHDCNTTCQTPKGAINTSLPFQNIHPITIGKCPKYVKSTKLRLATGLRNIPSIQSRGLFGAIAGFIEGGWTGMVDGWYGYHHQNEQGSGYAADLKSTQNAIDKITNKVNSVIEKMNTQFTAVGKEFNHLEKRIENLNKKVDDGFLDIWTYNAELLVLLENERTLDYHDSNVKNLYEKVRSQLKNNAKEIGNGCFEFYHKCDNTCMESVKNGTYDYPKYSEEAKLNREEIDGVKLESTRIYQILAIYSTVASSLVLVVSLGAISFWMCSNGSLQCRICI

SEQ ID NO: 5684 - protein, 566 aa, synthetic construct
  REGION 1..566: note = hemagglutinin__InfluenzaA__ADM31548
MKAILVVLLYTFATANADTLCIGYHANNSTDTVDTVLEKNVTVTHSVNLLEDKHNGKLCKLRGVAPLHLGKCNIAGWILGNPECESLSTASSWSYIVETSSSDNGTCYPGDFIDYEELREQLSSVSSFERFEIFPKTSSWPNHDSNKGVTAACPHAGAKSFYKNLIWLVKKGNSYPKLSKSYINDKGKEVLVLWGIHHPSTSADQQSLYQNADAYVFVGTSRYSKKFKPEVAIRPKVRDQEGRMNYYWTLVEPGDKITFEATGNLVVPRYAFAMERNAGSGIIISDTPVHDCNTTCQTPKGAINTSLPFQNIHPITIGKCPKYVKSTKLRLATGLRNIPSIQSRGLFGAIAGFIEGGWTGMVDGWYGYHHQNEQGSGYAADLKSTQNAIDEITNKVNSVIEKMNTQFTAVGKEFNHLEKRIENLNKKVDDGFLDIWTYNAELLVLLENERTLDYHDSNVKNLYEKVRSQLKNNAKEIGNGCFEFYHKCDNTCMESVKNGTYDYPKYSEEAKLNREEIDGVKLESTRIYQILAIYSTVASSLVLVVSLGAISFWMCSNGSLQCRICI

SEQ ID NO: 5685 - protein, 566 aa, synthetic construct
  REGION 1..566: note = hemagglutinin__InfluenzaA__ADM31558
MKAILVVLLYTFATANADTLCIGYHANNSTDTVDTVLEKNVTVTHSVNLLEDKHNGKLCKLRGVAPLHLGKCNIAGWILGNPECESLSTASSWSYIVETSSSDNGTCYPGDFIDYEELREQLSSVSSFERFEIFPKTSSWPNHDSNKGVTAACPHAGAKSFYKNLIWLVKKGNSYPKLSKSYINDKGKEVLVLWGIHHPSTSADQQSLYQNADAYVFVGTSRYSKKFKPEIAIRPKVRDQEGRMNYYWTLVEPGDKITFEATGNLVVPRYAFAMERNAGSGIIISDTPVHDCNTTCQTPKGAINTSLPFQNIHPITIGKCPKYVKSTKLRLATGLRNIPSIQSRGLFGAIAGFIEGGWTGMVDGWYGYHHQNEQGSGYAADLKSTQNAIDKITNKVNSVIEKMNTQFTAVGKEFNHLEKRIENLNKKVDDGFLDIWTYNAELLVLLENERTLDYHDSNVKNLYEKVRSQLKNNAKEIRNGCFEFYHKCDNTCMESVKNGTYDYPKYSEEAKLNREEIDGVKLESTRIYQILAIYSTVASSLVLVVSLGAISFWMCSNGSLQCRICI

SEQ ID NO: 5686 - protein, 566 aa, synthetic construct; identical to SEQ ID NO: 4266
  REGION 1..566: note = hemagglutinin__InfluenzaA__ADM31568

SEQ ID NO: 5687 - protein, 566 aa, synthetic construct; identical to SEQ ID NO: 2669
  REGION 1..566: note = hemagglutinin__InfluenzaA__ADM31578

SEQ ID NO: 5688 - protein, 566 aa, synthetic construct
  REGION 1..566: note = hemagglutinin__InfluenzaA__ADM31588
MKAILVVLLYTFATANADTLCIGYHANNSTDTVDTILEKNVTVTHSVNLLEDKHNGKLCKLRGVAPLHLGKCNIAGWILGNPECESLSTASSWSYIVETSSSDNGTCYPGDFIDYEELREQLSSVSSFERFEMFPKTSSWPNHDSNKGVTAACPHAGAKSFYKNLIWLVKKGNSYPKLNKSYINDKGKEVLVLWGIHHPSTSADQQSLYQNADAYVFVGTSRYSKKFKTEIAIRPKVRDQEGRMNYYWTLVEPGDKITFEATGNLVVPRYAFAMERNAGSGIIISDTPVHDCNTTCQTPKGAINTSLPFQNIHPITIGKCPKYVKSTKLRLATGLRNVPSIQSRGLFGAIAGFIEGGWTGMVDGWYGYHHQNEQGSGYAADLKSTQNAIDEITNKVNSVIEKMNTQFTAVGKEFNHLEKRIENLNKKVDDGFLDIWTYNAELLVLLENERTLDYHDSNVKNLYEKVRSQLKNNAKEVGNGCFEFYHKCDNTCMESVKNGTYDYPKYSEEAKLNREEIDGVKLESTRIYQILAIYSTVASSLVLVVSLGAISFWMCSNGSLQCRICI

SEQ ID NO: 5689 - protein, 566 aa, synthetic construct
  REGION 1..566: note = hemagglutinin__InfluenzaA__ADM31598
MNAILVVLLYTFATANADTLCIGYHANNSTDTVDTLLEKNVTVTHSVNLLEDKHNGKLCKLRGVAPLHLGKCDIAGWILGNPECESLSTASSWSYIVETSSSDNGTCYPGDFIDYEELREQLSSVSSFERFEIFPKTSSWPDHDSNKGVTAACPHAGAKSFYKNLIWLVKKGNSYPKLSKSYINDKGKEVLVLWGIHHPSTSADQQSLYQNADAYVFVGTSRYSKKFKPEIAIRPKVRDQEGRMNYHWTLVEPGDKITFEATGNLVVPRYAFAMERNAGSGIIISDAPVHDCNTTCQTPKGAINTSLPFQNIHPITIGKCPKYVKSTKLRLATGLRNVPSIQSRGLFGAIAGFIEGGWTGMVDGWYGYHHQNEQGSGYAADLKSTQNAIDEITNKINSVIEKMNTQFTAVGKEFNHLEKRIENLNKKVDDGFLDIWTYNAELLVLLENERTLDYHDSNVKNLYEKVRSQLKNNAKEIGNGCFEFYHKCDNTCMESVKNGTYDYPKYSEEAKLNREEIDGVKLESTRIYQILAIYSTVASSLVLVVSLGAISFWMCSNGSLQCRICI

SEQ ID NO: 5690 - protein, 566 aa, synthetic construct
  REGION 1..566: note = hemagglutinin__InfluenzaA__ADM31608
MKAILVVLLYTFATVNADTLCIGYHANNSTDTVDTVLEKNVTVTHSVNLLEDKHNGKLCKLRGVAPLHLGKCNIAGWILGNPECESLSTASSWSYIVETSSSDNGTCYPGDFIDYEELREQLSSVSSFERFEIFPKTSSWPNHDSNKGVTAACPHAGAKSFYKNLIWLVKKGNSYPKLSKSYINDKGKEVLVLWGIHHPSTSADQQSLYQNADAYVFVGTSRYSKKFKPEIAIRPKVRDQEGRMNYYWTLVEPGDKITFEATGNLVVPRYAFAMERNAGSGIIISDTPVHDCNTTCQTPKGAINTSLPFQNIHPITIGKCPKYVKSTKLRLATGLRNVPSIQSRGLFGAIAGFIEGGWTGMVDGWYGYHHQNEQGSGYAADLKSTQNAIDKITNKVNSVIEKMNTQFTAVGKEFNHLEKRIENLNKKVDDGFLDIWTYNAELLVLLENERTLDYHDSNVKNLYEKVRSQLKNNAKEIGNGCFEFYHKCDNTCMESVKNGTYDYPKYSEEAKLNREEIDGVKLESTRIYQILAIYSTVASSLVLVVSLGAISFWMCSNGSLQCRICI

SEQ ID NO: 5691 - protein, 566 aa, synthetic construct; identical to SEQ ID NO: 4221
  REGION 1..566: note = hemagglutinin__InfluenzaA__ADM31618

SEQ ID NO: 5692 - protein, 566 aa, synthetic construct; identical to SEQ ID NO: 3833
  REGION 1..566: note = hemagglutinin__InfluenzaA__ADM31628

SEQ ID NO: 5693 - protein, 566 aa, synthetic construct; identical to SEQ ID NO: 5572
  REGION 1..566: note = hemagglutinin__InfluenzaA__ADM31638

SEQ ID NO: 5694 - protein, 566 aa, synthetic construct; identical to SEQ ID NO: 4089
  REGION 1..566: note = hemagglutinin__InfluenzaA__ADM31648

SEQ ID NO: 5695 - protein, 566 aa, synthetic construct; identical to SEQ ID NO: 4836
  REGION 1..566: note = hemagglutinin__InfluenzaA__ADM31658

SEQ ID NO: 5696 - protein, 566 aa, synthetic construct; identical to SEQ ID NO: 4089
  REGION 1..566: note = hemagglutinin__InfluenzaA__ADM31668

SEQ ID NO: 5697 - protein, 566 aa, synthetic construct; identical to SEQ ID NO: 2669
  REGION 1..566: note = hemagglutinin__InfluenzaA__ADM31688

SEQ ID NO: 5698 - protein, 566 aa, synthetic construct
  REGION 1..566: note = hemagglutinin__InfluenzaA__ADM31698
MKAILVVLLYTFATANADTLCIGYHANNSTDTVDTVLEKNVTVTHSVNLLEDKHNGKLCKLRGVAPLHLGKCNIAGWILGNPECESLSTASSWSYIVETSSSDNGTCYPGDFIDYEELREQLSSVSSFERFEIFPKTSSWPNHDSNKGVTAACPHAGAKSFYKNLIWLVKKGNSYPKLSKSYINDKGKEVLVLWGIHHPSTSADQQSLYQNADAYVFVGTSRYSKKFKPEIAIRPKVRDQEGRMNYYWTLVEPGDKITFEATGNLVVPRYAFAMERNAGSGIIISDTPVHDCNTTCQTPKGAINTSLPFQNIHPITIGKCPKYVKSTKLRLATGLRNIPSIQSRGLFGAIAGFIEGGWTGMVDGWYGYHHQNEQGSGYAADLKSTQNAIDKITNKVNSVIEKMNTQFTAVGKEFNHLEKRIENLNKKVDDGFLDIWTYNAELLVLLENERTLDYHDSNVKNLYEKVRSQLKNNAKEIGNGCFEFYHKCDNTCMESVKNGTYDYPKYSEEAKLNREEIDGVKLESTRIYQILAIYSTVASSLILVVSLGAISFWMCSNGSLQCRICI

SEQ ID NO: 5699 - protein, 566 aa, synthetic construct; identical to SEQ ID NO: 5574
  REGION 1..566: note = hemagglutinin__InfluenzaA__ADM31708

SEQ ID NO: 5700 - protein, 566 aa, synthetic construct
  REGION 1..566: note = hemagglutinin__InfluenzaA__ADM31718
MKAILVVLLYTFATANADTLCIGYHANNSTDTVDTVLEKNVTVTHSVNLLEDKHNGKLCKLRGVAPLHLGKCNIAGWILGNPECESLSTASSWSYIVETSSSDNGTCYPGDFIDYEELREQLSSVSSFERFEIFPKTSSWPNHDSNKGVTAACPHAGAKSFYKNLIWLVKKGNSYPKLSKSYINDKGKEVLVLWGIHHPSTSADQQSLYQNADTYVFVGTSRYSKKFKPEIAIRPKVRDQEGRMNYYWTLVEPGDKITFEATGNLVVPRYAFAMERNAGSGIIISDTPVHDCNTTCQTPKGAINTSLPFQNIHPITIGKCPKYVKSTKLRLATGLRNVPSIQSRGLFGAIAGFIEGGWTGMVDGWYGYHHQNEQGSGYAADLKSTQNAIDKITNKVNSVIEKMNTQFTAVGKEFNHLEKRIENLNKKVDDGFLDIWTYNAELLVLLENERTLDYHDSNVKNLYEKVRSQLKNNAKEIGNGCFEFYHKCDNTCMESVKNGTYDYPKYSEEAKLNREEIDGVKLESTRIYQILAIYSTVASSLVLVVSLGAISFWMCSNGSLQCRICI

SEQ ID NO: 5701 - protein, 566 aa, synthetic construct
  REGION 1..566: note = hemagglutinin__InfluenzaA__ADM31728
MKAILIVLLYTFATANADTLCIGYHANNSTDTVDTVLEKNVTVTHSVNLLEDKHNGKLCKLRGVAPLHLGKCNIAGWILGNPECESLSTASSWSYIVETSSSGNGTCYPGDFIDYEELREQLSSVSSFERFEIFPKTSSWPNHDSNKGVTAACPHAGAKSFYKNLIWLVKKGNSYPKLSKSYINDKGKEVLVLWGIHHPSTSADQQSLYQNADAYVFVGTSRYSKKFKPEIAIRPKVRDQEGRMNYYWTLVEPGDKITFEATGNLVVPRYAFAMERNAGSGIITSDTPVHDCNTTCQTPKGAINTSLPFQNIHPITIGKCPKYVKSTKLRLATGLRNVPSIQSRGLFGAIAGFIEGGWTGMVDGWYGYHHQNEQGSGYAADLKSTQNAIDEITNKVNSVIEKMNTQFTAVGKEFNHLEKRIENLNKKVDDGFLDIWTYNAELLVLLENERTLDYHDSNVKNLYEKVRSQLKNNAKEIGNGCFEFYHKCDNTCMESVKNGTYDYPKYSEEAKLNREEIDGVKLESTRIYQILAIYSTVASSLVLVVSLGAISFWMCSNGSLQCRICI

SEQ ID NO: 5702 - protein, 566 aa, synthetic construct
  REGION 1..566: note = hemagglutinin__InfluenzaA__ADM31738
MKAILVVLLYTFATANADTLCIGYHANNSTDTVDTVLEKNVTVTHSVNILEDKHNGKLCKLRGVAPLHLGKCNIAGWILGNPECESLSTASSWSYIVETSSSDNGTCYPGDFIDYEELREQLSSVSSFERFEIFPKTSSWPNHDSNKGVTAACPHAGARSFYKNLIWLVKKGNSYPKLSKSYINDKGKEVLVLWGIHHPSTSADQQSLYQNADAYVFVGTSRYSKKFKPEIAIRPKVRDQEGRMNYYWTLVEPGDKITFEATGNLVVPRYAFAMERNAGSGIIISDTPVHDCNTTCQTPKGAINTSLPFQNIHPITIGKCPKYVKSTKLRLATGLRNVPSIQSRGLFGAIAGFIEGGWTGMVDGWYGYHHQNEQGSGYAADLKSTQNAIDEITNKVNSVIEKMNTQFTAVGKEFNHLEKRIENLNKKVDDGFLDIWTYNAELLVLLENERTLDYHDSNVKNLYEKVRSQLKNNAKEIGNGCFEFYHKCDNTCMESVKNGTYDYPKYSEEAKLNREEIDGVKLESTRIYQILAIYSTVASSLVLVVSLGAISFWMCSNGSLQCRICI

SEQ ID NO: 5703 - protein, 566 aa, synthetic construct; identical to SEQ ID NO: 4318
  REGION 1..566: note = hemagglutinin__InfluenzaA__ADM31748

SEQ ID NO: 5704 - protein, 566 aa, synthetic construct
  REGION 1..566: note = hemagglutinin__InfluenzaA__ADM31758
MKAILVVLLYTFATANADTLCIGYHANNSTDTVDTVLEKNVTVTHSVNLLEDKHNGKLCKLRGIAPLHLGKCNIAGWILGNPECESLSTASSWSYIVETSSSDNGTCYPGDFIDYEELREQLSSVSSFERFEIFPKTSSWPNHDSNKGVTAACPHAGAKSFYKNLIWLVKKGNSYPKLSKSYINDKGKEVLVLWGIHHPSTSADQQSLYQNADAYVFVGTSRYSKKFKPEIAIRPKVRDQEGRMNYYWTLIDPGDKITFEATGNLVVPRYAFAMERNAGSGIIISDTPVHDCNTTCQTPKGAINTSLPFQNIHPITIGKCPKYVKSTKLRMATGLRNVPSIQSRGLFGAIAGFIEGGWTGMVDGWYGYHHQNEQGSGYAADLKSTQNAIDEITNKVNSVIEKMNTQFTAVGKEFNHLEKRIENLNKKVDDGFLDIWTYNAELLVLLENERTLDYHDSNVKNLYEKVRSQLKNNAKEIGNGCFEFYHKCDNTCMESVKNGTYDYPKYSEEAKLNREEIDGVKLESTRIYQILAIYSTVASSLVLVVSLGAISFWMCSNGSLQCRICI

SEQ ID NO: 5705 - protein, 566 aa, synthetic construct; identical to SEQ ID NO: 3029
  REGION 1..566: note = hemagglutinin__InfluenzaA__ADM31768

SEQ ID NO: 5706 - protein, 566 aa, synthetic construct; identical to SEQ ID NO: 2669
  REGION 1..566: note = hemagglutinin__InfluenzaA__ADM31778

SEQ ID NO: 5707 - protein, 566 aa, synthetic construct; identical to SEQ ID NO: 4836
  REGION 1..566: note = hemagglutinin__InfluenzaA__ADM31798

SEQ ID NO: 5708 - protein, 566 aa, synthetic construct
  REGION 1..566: note = hemagglutinin__InfluenzaA__ADM31808
MKAILVVLLYTFATANADTLCIGYHANNSTDTVDTVLEKNVTVTHSVNLLEDKHNGKLCKLRGVAPLHLGKCNIAGWILGNPECESLSTASSWSYIVETSSSGNGTCYPGDFIDYEELREQLSSVSSFERFEIFPKTSSWPNHDSNKGVTAACPHAGAKSFYKNLLWLVKKGNSYPKLSKSYINDKGKEVLVLWGIHHPSTSADQQSLYQNADAYVFVGTSRYSKKFKPEIAIRPKVRDQEGRMNYYWTLVGPGDKITFEATGNLVVPRYAFAMERNAGSGIIISDTPVHDCNTTCQTPKGAINTSLPFQNIHPITIGKCPKYVKSTKLRLATGLRNVPSIQSRGLFGAIAGFIEGGWTGMVDGWYGYHHQNEQGSGYAADLKSTQNAIDEITNKVNSVIEKMNTQFTAVGKEFNHLEKRIENLNKKVDDGFLDIWTYNAELLVLLENERTLDYHDSNVKNLYEKVRSQLKNNAKEIGNGCFEFYHKCDNTCMESVKNGTYDYPKYSEEAKLNREEIDGVKLESTRIYQILAIYSTVASSLVLVVSLGAISFWMCSNGSLQCRICI

SEQ ID NO: 5709 - protein, 566 aa, synthetic construct; identical to SEQ ID NO: 4836
  REGION 1..566: note = hemagglutinin__InfluenzaA__ADM31818

SEQ ID NO: 5710 - protein, 566 aa, synthetic construct
  REGION 1..566: note = hemagglutinin__InfluenzaA__ADM31828
MKAILVVLLYTFATANADTLCIGYHANNSTDTVDTVLERNVTVTHSVNLLEDKHNGKLCKLRGVAPLHLGKCNIAGWILGNPECESLSTASSWSYIVETSSSDNGTCYPGDFIDYEELREQLSSVSSFERFEIFPKTSSWPNHDSNKGVTAACPHAGAKSFYKNLIWLVKKGKSYPKLSKSYINDKGKEVLVLWGIHHPSTSADQQSLYQNADAYVFVGTSRYSKKFKPEIAIRPKVREQEGRMNYYWTLVEPGDKITFEATGNLVVPRYAFAMERNAGSGIIISDTPVHDCNTTCQTPKGAINTSLPFQNIHPITIGKCPKYVKSTKLRLATGLRNVPSIQSRGLFGAIAGFIEGGWTGMVDGWYGYHHQNEQGSGYAADLKSTQNAIDEITNKVNSVIEKMNTQFTAVGKEFNHLEKRIENLNKKVDDGFLDIWTYNAELLVLLENERTLDYHDSNVKNLYEKVRSQLKNNAKEIGNGCFEFYHKCDNTCMESVKNGTYDYPKYSEEAKLNREEIDGVKLESTRIYQILAIYSTVASSLVLLVSLGAISFWMCSNGSLQCRICI

SEQ ID NO: 5711 - protein, 566 aa, synthetic construct; identical to SEQ ID NO: 5710
  REGION 1..566: note = hemagglutinin__InfluenzaA__ADM31838

SEQ ID NO: 5712 - protein, 566 aa, synthetic construct; identical to SEQ ID NO: 2669
  REGION 1..566: note = hemagglutinin__InfluenzaA__ADM31848

SEQ ID NO: 5713 - protein, 566 aa, synthetic construct
  REGION 1..566: note = hemagglutinin__InfluenzaA__ADM31858
MKAILVVLLYTFATANADTLCIGYHANNSTDTVDTVLEKNVTVTHSVNLLEDKHNGKLCKLRGVAPLHLGKCNIAGWILGNPECESLSTASSWSYIVETSSSDNGTCYPGDFIDYEELREQLSSVSSFERFEIFPKTSSWPNHDSNKGVTAACSHAGAKSFYKNLIWLVKKGNSYPKLNKSYINDKGKEVLVLWGIHHPSTSADQQSLYQNADAYVFVGTSRYSKKFKPEIAIRPKVREQEGRMNYYWTLVEPGDKITFEATGNLVVPRYAFAMERNAGSGIIISDTPVHDCNTTCQTPKGAINTSLPFQNIHPITIGKCPKYVKSTKLRLATGLRNVPSIQSRGLFGAIAGFIEGGWTGMVDGWYGYHHQNEQGSGYAADLKSTQNAIDEITNKVNSVIEKMNTQFTAVGKEFNHLEKRIENLNKKVDDGFLDIWTYNAELLVLLENERTLDYHDSNVKNLYEKVRSQLKNNAKEIGNGCFEFYHKCDNTCMESVKNGTYDYPKYSEEAKLNREEIDGVELESTRIYQILAIYSTVASSLVLVVSLGAISFWMCSNGSLQCRICI

SEQ ID NO: 5714 - protein, 566 aa, synthetic construct
  REGION 1..566: note = hemagglutinin__InfluenzaA__ADM31868
MKAILVVLLYTFATANADTLCIGYHANNSTDTVDTVLEKNVTVTHSVNLLEDKHNGKLCKLRGVAPLHLGKCNIAGWILGNPECELLSTASSWSYIVETSSSDNGTCYPGDFINYEELREQLSSVSSFERFEIFPKTSSWPNHDSNKGVTAACPHAGAKSFYKNLIWLVKKGNSYPKLSKSYINDKGKEVLVLWGVHHPSTSADQQSLYQNADAYVFVGTSRYSKKFKPEIAIRPKVRDQEGRMNYYWTLVEPGDKITFEATGNLVVPRYAFSMERNAGSGIIISDTPVHDCNTTCQTPKGAINTSLPFQNIHPITIGKCPKYVKSTKLRLATGLRNVPSIQSRGLFGAIAGFIEGGWTGMVDGWYGYHHQNEQGSGYAADLKSTQNAIDKITNKVNSVIEKMNTQFTAVGKEFNHLEKRIENLNKKVDDGFLDIWTYNAELLVLLENERTLDYHDSNVKNLYEKVRSQLKNNAKEIGNGCFEFYHKCDNTCMESVKNGTYDYPKYSEEAKLNREKIDGVKLESTRIYQILAIYSTVASSLVLVVSLGAISFWMCSNGSLQCRICI

SEQ ID NO: 5715 - protein, 566 aa, synthetic construct
  REGION 1..566: note = hemagglutinin__InfluenzaA__ADM31878
MKAILVVLLYTFATANADTLCIGYHANNSTDTVDTVLEKNVTVTHSVNILEDKHNGKLCKLRGVAPLHLGKCNIAGWILGNPECESLSTASSWSYIVETSSSDNGTCYPGDFIDYEELREQLSSVSSFERFEIFPKASSWPNHDSNKGVTAACPHAGAKSFYKNLIWLVKKGNSYPKLSKSYINDKGKEVLVLWGIHHPSTSADQQSLYQNADAYVFVGTSRYSKKFKPEIAIRPKVRDQEGRMNYYWTLVEPGDKITFEATGNLVVPRYAFAMERNAGSGIIISDTPVHDCNTTCQTPKGAINTSLPFQNIHPITIGKCPKYVKSTKLRLATGLRNVPSIQSRGLFGAIAGFIEGGWTGMVDGWYGYHHQNEQGSGYAADLKSTQNAIDEITNKVNSVIEKMNTQFTAVGKEFNHLEKRIENLNKKVDDGFLDIWTYNAELLVLLENERTLDYHDSNVKNLYEKVRSQLKNNAKEIGNGCFEFYHKCDNTCMESVKNGTYDYPKYSEEAKLNREEIDGVKLESTRIYQILAIYSTVASSLVLVVSLGAISFWMCSNGSLQCRICI

SEQ ID NO: 5716 - protein, 566 aa, synthetic construct; identical to SEQ ID NO: 4318
  REGION 1..566: note = hemagglutinin__InfluenzaA__ADM31888

SEQ ID NO: 5717 - protein, 566 aa, synthetic construct; identical to SEQ ID NO: 2849
  REGION 1..566: note = hemagglutinin__InfluenzaA__ADM31898

SEQ ID NO: 5718 - protein, 566 aa, synthetic construct
  REGION 1..566: note = hemagglutinin__InfluenzaA__ADM31908
MKAILVVLLYTFATANADTLCIGYHANNSTDTVDTVLEKNVTVTHSVNILEDKHNGKLCKLRGVAPLHLGKCNIAGWILGNPECESLSTASSWSYIVETSSSDNGTCYPGDFIDHEELREQLSSVSSFERFEIFPKTSSWPNHDSNKGVTAACPHAGAKSFYKNLIWLVKKGNSYPKLSKSYINDKGKEVLVLWGIHHPSTSADQQSLYQNADAYVFVGSSRYSKKFKPEIAIRPKVRDQEGRMNYYWTLVEPGDKITFEATGNLVVPRYAFAMERNAGSGIIISDTPVHDCNTTCQTPKGAINTSLPFQNIHPITIGKCPKYVKSTKLRLATGLRNVPSIQSRGLFGAIAGFIEGGWTGMVDGWYGYHHQNEQGSGYAADLKSTQNAIDEITNKVNSVIEKMNTQFTAVGKEFNHLEKRIENLNKKVDDGFLDIWTYNAELLVLLENERTLDYHDSNVKNLYEKVRSQLKNNAKEIGNGCFEFYHKCDNTCMESVKNGTYDYPKYSEEAKLNREEIDGVKLESTRIYQILAIYSTVASSLVLVVSLGAISFWMCSNGSLQCRICI

SEQ ID NO: 5719 - protein, 566 aa, synthetic construct; identical to SEQ ID NO: 2849
  REGION 1..566: note = hemagglutinin__InfluenzaA__ADM31918

SEQ ID NO: 5720 - protein, 566 aa, synthetic construct; identical to SEQ ID NO: 4441
  REGION 1..566: note = hemagglutinin__InfluenzaA__ADM31928

SEQ ID NO: 5721 - protein, 566 aa, synthetic construct; identical to SEQ ID NO: 4441
  REGION 1..566: note = hemagglutinin__InfluenzaA__ADM31948

SEQ ID NO: 5722 - protein, 566 aa, synthetic construct; identical to SEQ ID NO: 2669
  REGION 1..566: note = hemagglutinin__InfluenzaA__ADM31958

SEQ ID NO: 5723 - protein, 566 aa, synthetic construct; identical to SEQ ID NO: 4441
  REGION 1..566: note = hemagglutinin__InfluenzaA__ADM31968

SEQ ID NO: 5724 - protein, 566 aa, synthetic construct; identical to SEQ ID NO: 4257
  REGION 1..566: note = hemagglutinin__InfluenzaA__ADM31978

SEQ ID NO: 5725 - protein, 566 aa, synthetic construct; identical to SEQ ID NO: 2849
  REGION 1..566: note = hemagglutinin__InfluenzaA__ADM31998

SEQ ID NO: 5726 - protein, 566 aa, synthetic construct; identical to SEQ ID NO: 2849
  REGION 1..566: note = hemagglutinin__InfluenzaA__ADM32008

SEQ ID NO: 5727 - protein, 566 aa, synthetic construct
  REGION 1..566: note = hemagglutinin__InfluenzaA__ADM32018
MKAILVVLLYTFAIANADTLCIGYHANNSTDTVDTVLEKNVTVTHSVNLLEDKHNGKLCKLRGVAPLHLGKCDIAGWILGNPECESLSTASSWSYIVETSSSDNGTCYPGDFIDYEELREQLSSVSSFERFEIFPKTSSWPNHDSNKGVTAACPHAGAKSFYKNLIWLVKKGNSYPKLSKSYINDKGKEVLVLWGIHHPSTSADQQSLYQNADAYVFVGTSRYSKKFKPEIAIRPKVRDQEGRMNYYWTLVEPGDKITFEATGNLVVPRYAFAMERNAGSGIIISDTPVHDCNTTCQTPKGAINTSLPFQNIHPITIGKCPKYVKSTKLRLATGLRNVPSIQSRGLFGAIAGFIEGGWTGMVDGWYGYHHQNEQGSGYAADLKSTQNAIDEITNKVNSVIEKMNTQFTAVGKEFNHLEKRIENLNKKVDDGFLDIWTYNAELLVLLENERTLDYHDSNVKNLYEKVRSQLKNNAKEIGNGCFEFYHKCDNTCMESVKNGTYDYPKYSEEAKLNREEIDGVKLESTRIYQILAIYSTVASSLVLVVSLGAISFWMCSNGSLQCRICI

SEQ ID NO: 5728 - protein, 566 aa, synthetic construct
  REGION 1..566: note = hemagglutinin__InfluenzaA__ADM32028
MKAILVVLLYTFATANADTLCIGYHANNSTDTVDTVLEKNVTVTHSVDLLEDKHNGKLCKLRGVAPLHLGKCNIAGWILGNPECESLSTASSWSYIVETSSSDNGTCYPGDFIDYEELREQLSSVSSFERFEIFPKTSSWPNHDSNKGVTAACPHAGAKSFYKNLIWLVKKGNSYPKLSKSYINDKGKEVLVLWGIHHPSTSADQQSLYQNADAYVFVGTSRYSKKFKPEIAIRPKVRDQEGRMNYYWTLVEPGDKITFEATGNLVVPRYAFAMERNAGSGIIISDTPVHDCNTTCQTPKGAINTSLPFQNVHPITIGKCPKYVKSTKLRLATGLRNVPSIQSRGLFGAIAGFIEGGWTGMVDGWYGYHHQNEQGSGYAADLKSTQNAIDEITNKVNSVIEKMNTQFTAVGKEFNHLEKRIENLNKKVDDGFLDIWTYNAELLVLLENERTLDYHDSNVKNLYEKVRSQLKNNAKEIGNGCFEFYHKCDNTCMESVKNGTYDYPKYSEEAKLNREEIDGVKLESTRIYQILAIYSTVASSLVLVVSLGAISFWMCSNGSLQCRICI

SEQ ID NO: 5729 - protein, 566 aa, synthetic construct; identical to SEQ ID NO: 4441
  REGION 1..566: note = hemagglutinin__InfluenzaA__ADM32038

SEQ ID NO: 5730 - protein, 566 aa, synthetic construct; identical to SEQ ID NO: 2849
  REGION 1..566: note = hemagglutinin__InfluenzaA__ADM32048

SEQ ID NO: 5731 - protein, 566 aa, synthetic construct; identical to SEQ ID NO: 3833
  REGION 1..566: note = hemagglutinin__InfluenzaA__ADM32058

SEQ ID NO: 5732 - protein, 566 aa, synthetic construct; identical to SEQ ID NO: 3833
  REGION 1..566: note = hemagglutinin__InfluenzaA__ADM32068

SEQ ID NO: 5733 - protein, 566 aa, synthetic construct; identical to SEQ ID NO: 2669
  REGION 1..566: note = hemagglutinin__InfluenzaA__ADM32078

SEQ ID NO: 5734 - protein, 566 aa, synthetic construct; identical to SEQ ID NO: 4257
  REGION 1..566: note = hemagglutinin__InfluenzaA__ADM32088

SEQ ID NO: 5735 - protein, 566 aa, synthetic construct
  REGION 1..566: note = hemagglutinin__InfluenzaA__ADM32098
MKAILVVLLYTFAIANADTLCIGYHANNSTDTVDTVLEKNVTVTHSVNLLEDKHNGKLCKLRGVAPLHLGKCNIAGWILGNPECESLSTASSWSYIVETSSSDNGTCYPGDFIDYEELREQLSSVSSFERFEIFPKTSSWPNHDSNKGVTAACPHAGAKSFYKNLIWLVKKGNSYPKLSKSYINDKGKEVLVLWGIHHPSTSADQQSLYQNADAYVFVGTSRYSKKFKPEIAIRPKVRDQEGRMNYYWTLVEPGDKITFEATGNLVVPRYAFAMERNAGSGIIISDTPVHDCNTTCQTPKGAINTSLPFQNIHPITIGKCPKYVKSTKLRLATGLRNVPSIQSRGLFGAIAGFIEGGWTGMVDGWYGYHHQNEQGSGYAADLKSTQNAIDEITNKVNSVIEKMNTQFTAVGKEFNHLEKRIENLNKKVDDGFLDIWTYNAELLVLLENERTLDYHDSNVKNLYEKVRSQLKNNAKEIGNGCFEFYHKCDNTCMESVKNGTYDYPKYSEEAKLNREEIDGVKLESTRIYQILAIYSTVASSLVLVVSLGAISFWMCSNGSLQCRICI

SEQ ID NO: 5736 - protein, 566 aa, synthetic construct; identical to SEQ ID NO: 2669
  REGION 1..566: note = hemagglutinin__InfluenzaA__ADM32108

SEQ ID NO: 5737 - protein, 566 aa, synthetic construct; identical to SEQ ID NO: 4441
  REGION 1..566: note = hemagglutinin__InfluenzaA__ADM32551

SEQ ID NO: 5738 - protein, 566 aa, synthetic construct; identical to SEQ ID NO: 2849
  REGION 1..566: note = hemagglutinin__InfluenzaA__ADM32561

SEQ ID NO: 5739 - protein, 566 aa, synthetic construct; identical to SEQ ID NO: 2849
  REGION 1..566: note = hemagglutinin__InfluenzaA__ADM32571

SEQ ID NO: 5740 - protein, 566 aa, synthetic construct; identical to SEQ ID NO: 2669
  REGION 1..566: note = hemagglutinin__InfluenzaA__ADM32581

SEQ ID NO: 5741 - protein, 566 aa, synthetic construct; identical to SEQ ID NO: 4441
  REGION 1..566: note = hemagglutinin__InfluenzaA__ADM32591

SEQ ID NO: 5742 - protein, 566 aa, synthetic construct; identical to SEQ ID NO: 2669
  REGION 1..566: note = hemagglutinin__InfluenzaA__ADM32601

SEQ ID NO: 5743 - protein, 566 aa, synthetic construct; identical to SEQ ID NO: 2669
  REGION 1..566: note = hemagglutinin__InfluenzaA__ADM32611

SEQ ID NO: 5744 - protein, 566 aa, synthetic construct; identical to SEQ ID NO: 3833
  REGION 1..566: note = hemagglutinin__InfluenzaA__ADM32621

SEQ ID NO: 5745 - protein, 566 aa, synthetic construct
  REGION 1..566: note = hemagglutinin__InfluenzaA__ADM32631
MKAILVVLLYTFATANADTLCIGYHANNSTDTVDTVLEKNVTVTHSVNILEDKHNGKLCKLKGVAPLHLGKCNIAGWILGNPECESLSTASSWSYIVETSSSDNGTCYPGDFIDYEELREQLSSVSSFERFEIFPKTSSWPNHDSNKGVTAACPHAGAKSFYKNLIWLVKKGNLYPKLSKSYINDKGKEVLVLWGIHHPSTSADQQSLYQNADAYVFVGSSKYSKKFKPEIAIRPKVRDQEGRMNYYWTLVEPGDKITFEATGNLVVPRYAFAMERNAGSGIIISDTPVHNCNTTCQTPKGAINTSLPFQNIHPITIGKCPKYVKSTKLRLATGLRNVPSIQSRGLFGAIAGFIEGGWTGMVDGWYGYHHQNEQGSGYAADLKSTQNAIDEITNKVNSVIEKMNTQFTAVGKEFNHLEKRIENLNKKVDDGFLDIWTYNAELLVLLENERTLDYHDSNVKNLYEKVRSQLKNNAKEIGNGCFEFYHKCDNTCMESVKNGTYDYPKYSEEAKLNREEIDGVKLESTRIYQILAIYSTVASSLVLVVSLGAISFWMCSNGSLQCRICI

SEQ ID NO: 5746 - protein, 566 aa, synthetic construct; identical to SEQ ID NO: 3833
  REGION 1..566: note = hemagglutinin__InfluenzaA__ADM32641

SEQ ID NO: 5747 - protein, 566 aa, synthetic construct; identical to SEQ ID NO: 2669
  REGION 1..566: note = hemagglutinin__InfluenzaA__ADM32651

SEQ ID NO: 5748 - protein, 566 aa, synthetic construct
  REGION 1..566: note = hemagglutinin__InfluenzaA__ADM32661
MKAILVVLLYTFAIANADTLCIGYHANNSTDTVDTVLEKNVTVTHSVNLLEDKHNGKLCKLRGVAPLHLGKCNIAGWILGNPECESLSTASSWSYIVETSSSDNGTCYPGDFNDYEELREQLSSVSSFERFEIFPKTSSWPNHDSNKGVTAACPHAGAKSFYKNLIWLVKKGNSYPKLSKSYINDKGKEVLVLWGIHHPSTSADQQSLYQNADAYVFVGTSRYSKKFKPEIAIRPKVRDQEGRMNYYWTLVEPGDKITFEATGNLVVPRYAFAMERNAGSGIIISDTPVHDCNTTCQTPKGAINTSLPFQNIHPITIGKCPKYVKSTKLRLATGLRNVPSIQSRGLFGAIAGFIEGGWTGMVDGWYGYHHQNEQGSGYAADLKSTQNAIDEITNKVNSVIEKMNTQFTAVGKEFNHLEKRIENLNKKVDDGFLDIWTYNAELLVLLENERTLDYHDSNVKNLYEKVRSQLKNNAKEIGNGCFEFYHKCDNTCMESVKNGTYDYPKYSEEAKLNREEIDGVKLESTRIYQILAIYSTVASSLVLVVSLGAISFWMCSNGSLQCRICI

SEQ ID NO: 5749 - protein, 566 aa, synthetic construct; identical to SEQ ID NO: 4257
  REGION 1..566: note = hemagglutinin__InfluenzaA__ADM32671

SEQ ID NO: 5750 - protein, 566 aa, synthetic construct; identical to SEQ ID NO: 2669
  REGION 1..566: note = hemagglutinin__InfluenzaA__ADM32681

SEQ ID NO: 5751 - protein, 566 aa, synthetic construct; identical to SEQ ID NO: 2849
  REGION 1..566: note = hemagglutinin__InfluenzaA__ADM32691

SEQ ID NO: 5752 - protein, 566 aa, synthetic construct; identical to SEQ ID NO: 2669
  REGION 1..566: note = hemagglutinin__InfluenzaA__ADM32701

SEQ ID NO: 5753 - protein, 566 aa, synthetic construct; identical to SEQ ID NO: 2849
  REGION 1..566: note = hemagglutinin__InfluenzaA__ADM32711

SEQ ID NO: 5754 - protein, 566 aa, synthetic construct; identical to SEQ ID NO: 2849
  REGION 1..566: note = hemagglutinin__InfluenzaA__ADM32721

SEQ ID NO: 5755 - protein, 566 aa, synthetic construct; identical to SEQ ID NO: 2849
  REGION 1..566: note = hemagglutinin__InfluenzaA__ADM32741

SEQ ID NO: 5756 - protein, 566 aa, synthetic construct; identical to SEQ ID NO: 2849
  REGION 1..566: note = hemagglutinin__InfluenzaA__ADM32751

SEQ ID NO: 5757 - protein, 566 aa, synthetic construct; identical to SEQ ID NO: 4257
  REGION 1..566: note = hemagglutinin__InfluenzaA__ADM32761

SEQ ID NO: 5758 - protein, 566 aa, synthetic construct
  REGION 1..566: note = hemagglutinin__InfluenzaA__ADM32771
MKAILVVLLYTFATANADTLCIGYHANNSTDTVDTVLEKNVTVTHSVNLLEDKHNGKLCKLRGVAPLHLGKCNIAGWILGNPECESLSTASSWSYIVETSSSDNGTCYPGDFIDYEELREQLSSVSSFERFEIFPKTSSWPNHDSNKGVTAACPHAGAKSFYKNLIWLVKKGNSYPKLSESYINDKGKEVLVLWGIHHPSTSADQQSLYQNADAYVFVGTSRYSKKFKPEIAIRPKVRDQEGRMNYYWTLVEPGDKITFEATGNLVVPRYAFAMERNAGSGIIISDTPVHDCNTTCQTPKGAINTSLPFQNIHPITIGKCPKYVKSTKLRLATGLRNVPSIQSKGLFGAIAGFIEGGWTGMVDGWYGYHHQNEQGSGYAADLKSTQNAIDEITNKVNSVIEKMNTQFTAVGKEFNHLEKRIENLNKKVDDGFLDIWTYNAELLVLLENERTLDYHDSNVKNLYEKVRSQLKNNAKEIGNGCFEFYHKCDNTCMESVKNGTYDYPKYSEEAKLNREEIDGVKLESTRIYQILAIYSTVASSLVLVVSLGAISFWMCSNGSLQCRICI

SEQ ID NO: 5759 - protein, 566 aa, synthetic construct
  REGION 1..566: note = hemagglutinin__InfluenzaA__ADM32781
MKAILVVLLYTFATANADTLCIGYHANNSTDTVDTVLEKNVTVTHSVDLLEDKHNGKLCKLRGVAPLHLGKCNIAGWILGNPECESLSTASSWSYIVETSSSDNGTCYPGDFIDYEELREQLSSVSSFERFEIFPKTSSWPNHDSNKGVTAACPHAGAKSFYKNLIWLVKKGNSYPKLSKSYINDKGKEVLVLWGIHHPSTSADQQSLYQNADAYVFVGTSRYSKKFKPEIAIRPKVRDQEGRMNYYWTLVEPGDKITFEATGNLVVPRYAFAMERNAGSGIIISDTPVHDCNTTCQTPKGAINTSFPFQNIHPITIGKCPKYVKSTKLRLATGLRNVPSIQSRGLFGAIAGFIEGGWTGMVDGWYGYHHQNEQGSGYAADLKSTQNAIDEITNKVNSVIEKMNTQFTAVGKEFNHLEKRIENLNKKVDDGFLDIWTYNAELLVLLENERTLDYHDSNVKNLYEKVRSQLKNNAKEIGNGCFEFYHKCDNTCMESVKNGTYDYPKYSEEAKLNREEIDGVKLESTRIYQILAIYSTVASSLVLVVSLGAISFWMCSNGSLQCRICI

SEQ ID NO: 5760 - protein, 566 aa, synthetic construct; identical to SEQ ID NO: 2849
  REGION 1..566: note = hemagglutinin__InfluenzaA__ADM32791

SEQ ID NO: 5761 - protein, 566 aa, synthetic construct
  REGION 1..566: note = hemagglutinin__InfluenzaA__ADM32801
MKAILVVLLYTFATANADTLCIGYHANNSTDTVDTVLEKNVTVTHSVNILENKHNGKLCKLRGVAPLHLGKCNIAGWILGNPECESLSTASSWSYIVETSSSDNGTCYPGDFIDYEELREQLSSVSSFERFEIFPKTSSWPNHDSNKGVTAACPHAGAKSFYKNLIWLVKKGNSYPKLSKSYINDKGKEVLVLWGIHHPSTSADQQSLYQNADAYVFVGSSRYSKKFKPEIAIRPKVRDQEGRMNYYWTLVEPGDKITFEATGNLVVPRYAFAMERNAGSGIIISDTPVHDCNTTCQTPKGAINTSLPFQNIHPITIGKCPKYVKSTKLRLATGLRNVPSIQSRGLFGAIAGFIEGGWTGMVDGWYGYHHQNEQGSGYAADLKSTQNAIDEITNKVNSVIEKMNTQFTAVGKEFNHLEKRIENLNKKVDDGFLDIWTYNAELLVLLENERTLDYHDSNVKNLYEKVRSQLKNNAKEIGNGCFEFYHKCDNTCMESVKNGTYDYPKYSEEAKLNREEIDGVKLESTRIYQILAIYSTVASSLVLVVSLGAISFWMCSNGSLQCRICI

SEQ ID NO: 5762 - protein, 566 aa, synthetic construct
  REGION 1..566: note = hemagglutinin__InfluenzaA__ADM32811
MKAILVVLLYTFATANADTLCIGYHANNSTDTVDTVLEKNVTVTHSVNLLEDKHNGKLCKLRGVAPLHLGKCNIAGWILGNPECESLSTASSWSYIVETSSSDNGTCYPGDFIDYEELREQLSSVSSFERFEIFPKTSSWPNHDSNKGVTAACPHAGAKSFYKNLIWLVKKGNSYPKLSKSYINDKGKEVLVLWGIHHPSTSADQQSLYQNADAYVFVGTSRYSKKFKPEIAIRPKVRDQEGRMNYYWTLVEPGDKITFEATGNLVVPRYAFAMERNAGSGIIISDTPVHDCNTTCQTPKGAINTSLPFHNIHPITIGKCPKYVKSTKLRLATGLRNVPSIQSRGLFGAIAGFIEGGWTGMVDGWYGYHHQNEQGSGYAADLKSTQNAIDEITNKVNSVIEKMNTQFTAVGKEFNHLEKRIENLNKKVDDGFLDIWTYNAELLVLLENERTLDYHDSNVKNLYEKVRSQLKNNAKEIGNGCFEFYHKCDNTCMESVKNGTYDYPKYSEEAKLNREEIDGVKLESTRIYQILAIYSTVASSLVLVVSLGAISFWMCSNGSLQCRICI

SEQ ID NO: 5763 - protein, 566 aa, synthetic construct; identical to SEQ ID NO: 2669
  REGION 1..566: note = hemagglutinin__InfluenzaA__ADM32821

SEQ ID NO: 5764 - protein, 566 aa, synthetic construct; identical to SEQ ID NO: 4257
  REGION 1..566: note = hemagglutinin__InfluenzaA__ADM32831

SEQ ID NO: 5765 - protein, 566 aa, synthetic construct; identical to SEQ ID NO: 2849
  REGION 1..566: note = hemagglutinin__InfluenzaA__ADM32841

SEQ ID NO: 5766 - protein, 566 aa, synthetic construct; identical to SEQ ID NO: 4257
  REGION 1..566: note = hemagglutinin__InfluenzaA__ADM32851

SEQ ID NO: 5767 - protein, 566 aa, synthetic construct; identical to SEQ ID NO: 2849
  REGION 1..566: note = hemagglutinin__InfluenzaA__ADM32861

SEQ ID NO: 5768 - protein, 566 aa, synthetic construct; identical to SEQ ID NO: 3833
  REGION 1..566: note = hemagglutinin__InfluenzaA__ADM32871

SEQ ID NO: 5769 - protein, 566 aa, synthetic construct; identical to SEQ ID NO: 4836
  REGION 1..566: note = hemagglutinin__InfluenzaA__ADM32881

SEQ ID NO: 5770 - protein, 566 aa, synthetic construct
  REGION 1..566: note = hemagglutinin__InfluenzaA__ADM32929
MKAILVVLLYTFATANADTLCIGYHANNSTDTVDTVLEKNVTVTHSVNLLEDKHNGKLCKLRGVAPLHLGKCNIAGWILGNPECESLSTASSWSYIVETSSSDNGTCYPGDFIDYEELREQLSSVSSFERFEIFPKTSSWPNHDSNKGVTAACPHAGAKSFYKNLIWLVKKGNSYPKLSKSYINDKGKEVLVLWGIHHPSTSADQQSLYQNADAYVFVGTSRYSKKFKPEIAIRPKVRDQEGRMNYYWTLVEPGDKITFEATGNLVVPRYAFAMERNAGSGIIISDTPVHDCNTTCQTPKGAINTSLPFQNIHPITIGKCPKYVKSTKLRLATGLRNVPSIQSRGLFGAIAGFIEGGWTGMVDGWYGYHHQNEQGSGYAADLKSTQNAIDKITNKVNSVIEKMNTQFTAVGKEFNHLEKRIENLNKKVDDGFLDIWTYNAELLVLLENERTLDYHDSNVKNLYEKVRSQLKNNAKEIGNGCFEFYHKCDNTCMESVKNGTYDYPKYSEEAKLNREEIDGVKLESTRIYQILAIYSTVASSLVLVVSLGAISFWMCSNGSLRCRICI

SEQ ID NO: 5771 - protein, 566 aa, synthetic construct
  REGION 1..566: note = hemagglutinin__InfluenzaA__ADM32939
MEAILVVLLYTFATANADTLCIGYHANNSTDTVDTVLEKNVTVTHSVNLLEDKHNGKLCKLRGVAPLHLGKCNIAGWILGNPECESLSTASSWSYIVETSSSDNGTCYPGDFIDYEELREQLSSVSSFERFEIFPKTSSWPNHDSNKGVTAACPHAGAKSFYKNLIWLVKKGNSYPKLSKSYINDKGKEVLVLWGIHHPSTSADQQSLYQNADAYVFVGSSRYSKKFKPEIAIRPKVRDQEGRMNYYWTLVEPGDKITFEATGNLVVPRYAFAMERNAGSGIIISDTPVHDCNTTCQTPKGAINTSLPFHNIHPITIGKCPKYVKSTKLRLATGLRNIPSIQSRGLFGAIAGFIEGGWTGMVDGWYGYHHQNEQGSGYAADLKSTQNAIDEITNKVNSVIEKMNTQFTAVGKEFNHLEKRIENLNKKVDDGFLDIWTYNAELLVLLENERTLDYHDSNVKNLYEKVRSQLKNNAKEIGNGCFEFYHKCDNTCMESVKNGTYDYPKYSEEAKLNREEIDGVKLESTRIYQILAIYSTVASSLVLVVSLGAISFWMCSNGSLRCRICI

SEQ ID NO: 5772 - protein, 566 aa, synthetic construct
  REGION 1..566: note = hemagglutinin__InfluenzaA__ADM32949
MKAILVVLLYTFATANADTLCIGYHANNSTDTVDTVLEKNVTVTHSVNLLEDKHNGKLCKLRGVAPLHLGKCNIAGWILGNPECESLSTASSWSYIVETSSSDNGTCYPGDFIDYEELREQLSSVSSFERFEIFPKTSSWPNHDSNKGVTAACPHAGAKSFYKNLIWLVKKGNSYPKLSKSYINDKGKEVLVLWGIHHPSTSADQQSLYQNADAYVFVGTSRYSKKFKPEIAIRPKVRDQEGRMNYYWTLVEPGDKITFEATGNLVVPRYAFAMERNAGSGIIISDTPVHDCNTTCQTPNGAINTSLPFQNIHPITIGKCPKYVKSTKLRLATGLRNIPSIQSRGLFGAIAGFIEGGWTGMVDGWYGYHHQNEQGSGYAADLKSTQNAIDEITNKVNSVIEKMNTQFTAVGKEFNHLEKRIENLNKKVDDGFLDIWTYNAELLVLLENERTLDYHDSNVKNLYEKVRSQLKNNAKEIGNGCFEFYHKCDNTCMESVKNGTYDYPKYSEEAKLNREEIDGVKLESTRIYQILAIYSTVASSLVLVVSLGAISFWMCSNGSLRCRICI

SEQ ID NO: 5773 - protein, 566 aa, synthetic construct
  REGION 1..566: note = hemagglutinin__InfluenzaA__ADM32958
MKAILVFLLYTFATANADTLCIGYHANNSTDTVDTVLEKNVTVTHSVNILEDKHNGKLCKLRGVAPLHLGKCNIAGWILGNPECESLSTASSWSYIVETSSSDNGTCYPGDFIDYEELREQLSSVSSFERFEIFPKTSSWPNHDSNKGVTAACPHAGAKSFYKNLIWLVKKGNSYPKLSKSYINDKGKEVLVLWGIHHPSTSADQQSLYQNADAYVFVESSRYSKKFKPEIAIRPKVRDQEGRMNYYWTLVEPGDKITFEATGNLVVPRYAFAMERNAGSGIIISDTPVHDCNTTCQTPKGAINTSLPFQNIHPITIGKCPKYVKSTKLRLATGLRNVPSIQSRGLFGAIAGFIEGGWTGMVDGWYGYHHQNEQGSGYAADLKSTQNAIDEITNKVNSVIEKMNTQFTAVGKEFNHLEKRLENLNKKVDDGFLDIWTYNAELLVLLENERTLDYHDSNVKNLYEKVRSQLKNNAKEVGNGCFEFYHKCDNTCMESVKNGTYDYPKYSEEAKLNREEIDGVKLESTRIYQILAIYSTAASSLVLVVSLGAISFWMCSNGSLRCRICI

SEQ ID NO: 5774 - protein, 566 aa, synthetic construct
  REGION 1..566: note = hemagglutinin__InfluenzaA__ADM32977
MKAILVVLLCTFATANADTLCIGYHANNSTDTVDTVLEKNVTVTHSVNLLEDKHNGKLCKLRGVAPLHLGKCNIAGWILGNPECESLSTASSWSYIVETSSSDNGTCYPGDFIDYEELREQLSSVSSFERFEIFPKTSSWPNHDSNKGVTAACPHAGAKSFYKNLIWLVKKGNSYPKLSKSYINDKGKEVLVLWGIHHPSTSADQQSLYQNADAYVFVGTSKYSKKFKPEIAIRPKVRDQEGRMNYYWTLVEPGDKITFEATGNLVVPRYAFAMERNAGSGIIISDTPVHDCNTTCQTPKGAINTSLPFQNIHPITIGKCPKYVKSTKLRLATGLRNVPSIQSRGLFGAIAGFIEGGWTGMVDGWYGYHHQNEQGSGYAADLKSTQNAIDGITNKINSVIEKMNTQFTAVGKEFNHLEKRIENLNKKVDDGFLDIWTYNAELLVLLENERTLDYHDSNVKNLYEKVRSQLKNNAKEIGNGCFEFYHKCDNTCMESVKNGTYDYPKYSEEAKLNREEIDGVKLESTRIYQILAIYSTVASSLVLVVSLGAISFWMCSNGSLRCRICI

SEQ ID NO: 5775 - protein, 566 aa, synthetic construct
  REGION 1..566: note = hemagglutinin__InfluenzaA__ADM32986
MKAILVVLLYTFATANADTLCIGYHANNSTDTVDTVLEKNVTVTHSVNLLEDKHNGKLCKLRGVAPLHLGKCNIAGWILGNPECESLSTASSWSYIVETSSSDNGTCYPGDFIDYEELREQLSSVSSFERFEIFPKTNSWPNHDSNKGVTAACPHAGAKSFYKNLIWLVKKGNSYPKLSKSYINDKGKEVLVLWGIHHPSTSADQQSLYQNADAYVFVGTSKYSKKFKPEIAIRPKVRDQEGRMNYYWTLVEPGDKITFEATGNLVVPRYAFAMERNAGSGIIISDTPVHDCNTTCQTPKGAINTSLPFQNIHPITIGKCPKYVKSTKLRLATGLRNVPSIQSRGLFGAIAGFIEGGWTGMVDGWYGYHHQNEQGSGYAADLKSTQNAIDGITNKINSVIEKMNTQFTAVGKEFNHLEKRIENLNKKVDDGFLDIWTYNAELLVLLENERTLNYHDSNVKNLYEKVRSQLKNNAKEIGNGCFEFYHKCDNTCMESVKNGTYDYPKYSEEAKLNREEIDGVKLESTRIYQILAIYSTVASSLVLVVSLGAISFWMCSNGSLRCRICI

SEQ ID NO: 5776 - protein, 566 aa, synthetic construct
  REGION 1..566: note = hemagglutinin__InfluenzaA__ADM32995
MKAILVVLLYTFATANADTLCIGYHANNSTDTVDTVLEKNVTVTHSVNLLEDKHNGKLCKLRGVAPLHLGKCNIAGWILGNPECESLSTASSWSYIVETSSSDNGTCYPGDFIDYEELREQLSSVSSFERFEIFPKTNSWPNHDSNKGVTAACPHAGAKSFYKNLIWLVKKGNSYPKLSKSYINDKGKEVLVLWGIHHPSTSADQQSLYQNADAYVFVGTSKYSKKFKPEIAIRPKVRDQEGRMNYYWTLVEPGDKITFEATGNLVVPRYAFAMERNAGSGIIISDTPVHDCNTTCQTPKGAINTSLPFQNIHPITIGKCPKYVKSTKLRLATGLRNVPSIQSRGLFGAIAGFIEGGWTGMVDGWYGYHHQNEQGSGYAADLKSTQNAIDGITNKINSVIEKMNTQFTAVGKEFNHLEKRIENLNKKVDDGFLDIWTYNAELLVLLENERTLDYHDSNVKNLYEKVRSQLKNNAKEIGNGCFEFYHKCDNTCMESVKNGTYDYPKYSEEAKLNREEIDGVKLESTRIYQILAIYSTVASSLVLVVSLGAISFWMCSNGSLRCRICI

SEQ ID NO: 5777 - protein, 566 aa, synthetic construct; identical to SEQ ID NO: 3770
  REGION 1..566: note = hemagglutinin__InfluenzaA__ADM33004

SEQ ID NO: 5778 - protein, 566 aa, synthetic construct; identical to SEQ ID NO: 2669
  REGION 1..566: note = hemagglutinin__InfluenzaA__ADM33023

SEQ ID NO: 5779 - protein, 566 aa, synthetic construct
  REGION 1..566: note = hemagglutinin__InfluenzaA__ADM33040
MKAILVVLLYTFATANADTLCIGYHANNSTDTVDTVLEKNVTVTHSVNLLEDKHNGKLCKLRGVAPLHLGKCNIAGWILGNPECESLSTASSWSYIVETSSSDNGTCYPGDFIDYEELREQLSSVSSFERFEIFPKTSSWPNHDSNKGVTAACPHAGAKSFYKNLIWLVKKGNSYPKLSKSYINDKGKEVLVLWGIHHPSTSADQQSLYQNADAYVFVGSSRYSKKFKPEIAIRPKVRDQEGRMNYYWTLVEPGDKITFEATGNLVVPRYAFAMERNAGSGIIISDTPVHDCNTTCQTPKGAINTSLPFQNIHPITIGKCPKYVKSTKLRLATGLRNVPSIQSRGLFGAIAGFIEGGWTGMVDGWYGYHHQNEQGSGYAADLKSTQNAIDEITNKVNSVIEKMNTQFTAVGKEFNHLEKRIENLNKKVDDGFLDIWTYNAELLVLLENERTLDYHDSNVKNLYEKVRSQLKNNAKEIGNGCFEFYHKCDNTCMESVKNGTYDYPKYSEEAKLNREEIDGVKLESTRIYQILAIYSTVASSLVLVVSLGAISFWMCSNGSLRCRICI

SEQ ID NO: 5780 - protein, 566 aa, synthetic construct
  REGION 1..566: note = hemagglutinin__InfluenzaA__ADM33050
MKAILVVLLYTFATANADTLCIGYHANNSTDTVDTVLEKNVTVTHSVNLLEDKHNGKLCKLRGVAPLHLGKCNIAGWILGNPECESLSTASSWSYIVETSSSDNGTCYPGDFIDYEELREQLSSVSSFERFEIFPKTSSWPNHDSNKGVTAACPHAGAKSFYKNLIWLVKKGNSYPKLNKSYINDKGKEVLVLWGIHHPSTSADQQSLYQNADAYVFVGTSRYSKKFKPEIAIRPKVRDQEGRMNYYWTLVEPGDKITFEATGNLLVPRYAFAMERNAGSGIIISDTPVHDCNTTCQTPKGAINTSLPFQNIHPITIGKCPKYVKSTKLRLATGLRNVPSIQSRGLFGAIAGFIEGGWTGMVDGWYGYHHQNEQGSGYAADLKSTQNAIDEITNKVNSVIEKMNTQFTAVGKEFNHLEKRIENLNKKVDDGFLDIWTYNAELLVLLENERTLDYHDSNVKNLYEKVRSQLKNNAKEIGNGCFEFYHKCDNTCMESVKNGTYDYPKYSEEAKLNREEIDGVKLESTRIYQILAIYSTVASSLVLVVSLGAISFWMCSNGSLRCRICI

SEQ ID NO: 5781 - protein, 566 aa, synthetic construct
  REGION 1..566: note = hemagglutinin__InfluenzaA__ADM33069
MKAILVVLLYTFATANADTLCIGYHANNSTDTVDTVLEKNVTVTHSVNLLEDKHNGKLCKLRGVAPLHLGKCNIAGWILGNPECESLSTASSWSYIVETSSSDNGTCYPGDFIDYEELREQLSSVSSFERFEIFPKTSSWPNHDSNKGVTAACPHAGAKSFYKNLIWLVKKGNSYPKLSKSYINDKGKEVLVLWGIHHPSTSADQQSLYQNADAYVFVGTSRYSKKFKPEIAIRPKVRDQEGRMNYYWTLVEPGDKITFEATGNLVVPRYAFAMERNAGSGIIISDTPVHDCNTTCQTPEGAINTSLPFQNIHPITIGKCPKYVKSTKLRLATGLRNVPSIQSRGLFGAIAGFIEGGWTGMVDGWYGYHHQNEQGSGYAADLKSTQNAIDEITNKVNSVIEKMNTQFTAVGKEFNHLEKRIENLNKKVDDGFLDIWTYNAELLVLLENERTLDYHDSNVKNLYEKVRSQLKNNAKEIGNGCFEFYHKCDNTCMESVKNGTYDYPKYSEEAKLNREEIDGVKLESTRIYQILAIYSTVASSLVLVVSLGAISFWMCSNGSLRCRICI

SEQ ID NO: 5782 - protein, 566 aa, synthetic construct
  REGION 1..566: note = hemagglutinin__InfluenzaA__ADM33079
MKAILVVLLYTFATANADTLCIGYHANNSTDTVDTVLEKNVTVTHSVNLLEDKHNGKLCKLRGVAPLHLGKCNIAGWILGNPECESLSTASSWSYIVETSSSDNGTCYPGDFIDYEELREQLSSVSSFERFEIFPKTSSWPNHDSNKGVTAACPHAGAKSFYKNLIWLVKKGNSYPKLSKSYINDKGKEVLVLWGIHHPSTSADQQSLYQNADAYVFVGTSRYSKKFKPEIAIRPKVRDQEGRMNYYWTLVEPGDKITFEATGNLVVPRYAFAMERNAGSGIIISDTPVHDCNTTCQTPKGAINTSLPFQNIHPITIGKCPKYVKSTKLRLATGLRNVPSIQSRGLFGAIAGFIEGGWTGMVDGWYGYHHQNEQGSGYAADLKSTQNAIDEITNKVNSVIEKMNTQFTAVGKEFNHLEKRIENLNKKVDDGFLDIWTYNAELLVLLENERTLDYHDSNVKNLYEKVRSQLKNNAKEIGNGCFEFYHKCDNTCMESVKNGTYDYPKYSEEAKLNREEIDGVKLESTRIYQILAIYSTVASSLVLVVSLGAISFWMCSNGSLRCRICI

SEQ ID NO: 5783 - protein, 566 aa, synthetic construct
  REGION 1..566: note = hemagglutinin__InfluenzaA__ADM33099
MKAILVVLLYTFATANADTLCIGYHANNSTDTVDTVLEKNVTVTHSVNLLEDKHNGKLCKLRGVAPLHLGKCNIAGWILGNPECESLSTASSWSYIVETSSSDNGTCYPGDFIDYEELREQLSSVSSFERFEIFPKTSSWPNHDSNKGVTAACPHAGAKSFYKNLIWLVKKGNSYPKLSKSYINDKGKEVLVLWGIHHPSTSADQQSLYQNADAYVFVGTSRYSKKFKPEIAIRPKVRDQEGRMNYYWTLVEPGDKITFEATGNLMVPRYAFAMERNAGSGIIISDTPVHDCNTTCQTPKGAINTSLPFQNIHPITIGKCPKYVKSTKLRLATGLRNVPSIQSRGLFGAIAGFIEGGWTGMVDGWYGYHHQNEQGSGYAADLKSTQNAIDEITNKVNSVIEKMNTQFTAVGKEFNHLEKRIENLNKKVDDGFLDIWTYNAELLVLLENERTLDYHDSNVKNLYEKVRSQLKNNAKEIGNGCFEFYHKCDNTCMESVKNGTYDYPKYSEEAKLNREEIDGVKLESTRIYQILAIYSTVASSLVLVVSLGAISFWMCSNGSLRCRICI

SEQ ID NO: 5784 - protein, 566 aa, synthetic construct; identical to SEQ ID NO: 5783
  REGION 1..566: note = hemagglutinin__InfluenzaA__ADM33109

SEQ ID NO: 5785 - protein, 566 aa, synthetic construct
  REGION 1..566: note = hemagglutinin__InfluenzaA__ADM33128
MKAILVVLLYTFATANADTLCIGYHANNSTDTVDTVLEKNVTVTHSVNLLEDKHNGKLCKLRGVAPLHLGKCNIAGWILGNPECESLSTASSWSYIVETSSSDNGTCYPGDFIDYEELREQLSSVSSFERFEIFPKTSSWPNHDSNKGVTAACPHAGAKSFYKNLIWLVKKGNSYPKLSKSYINDKGKEVLVLWGIHHPSTSADQQSLYQNADAYVFVGTSRYSKKFKPEIAIRPKVREQEGRMNYYWTLVEPGDKITFEATGNLVVPRYAFAMERNAGSGIIISDTPVHDCNTTCQTPKGAINTSLPFQNIHPITIGKCPKYVKSTKLRLATGLRNVPSIQSRGLFGAIAGFIEGGWTGMVDGWYGYHHQNEQGSGYAADLKSTQNAIDEITNKVNSVIEKMNTQFTAVGKEFNHLEKRIENLNKKVDDGFLDIWTYNAELLVLLENERTLDYHDSNVKNLYEKVRSQLKNNAKEIGNGCFEFYHKCDNTCMESVKNGTYDYPKYSEEAKLNREEIDGVKLESTRIYQILAIYSTVASSLVLVVSLGAISFWMCSNGSLRCRICI

SEQ ID NO: 5786 - protein, 566 aa, synthetic construct; identical to SEQ ID NO: 5785
  REGION 1..566: note = hemagglutinin__InfluenzaA__ADM33137

SEQ ID NO: 5787 - protein, 566 aa, synthetic construct; identical to SEQ ID NO: 5785
  REGION 1..566: note = hemagglutinin__InfluenzaA__ADM33147

SEQ ID NO: 5788 - protein, 566 aa, synthetic construct; identical to SEQ ID NO: 5785
  REGION 1..566: note = hemagglutinin__InfluenzaA__ADM33157

SEQ ID NO: 5789 - protein, 566 aa, synthetic construct
  REGION 1..566: note = hemagglutinin__InfluenzaA__ADM33167
MKAILVVLLYTFATANADTLCIGYHANNSTDTVDTVLEKNVTVTHSVNILEDKHNGKLCKLRGVAPLHLGKCNIAGWILGNPECESLSTASSWSYIVETSSSDNGTCYPGDFIDYEELREQLSSVSSFERFEIFPKTSSWPNHDSNKGVTAACPHAGAKSFYKNLIWLVKKGNSYPKLSKSYINDKGKEVLVLWGIHHPSTSADQQSLYQNADAYVFVGTSRYSKKFKPEIAIRPKVRDQEGRMNYYWTLVEPGDKITFEATGNLVVPRYAFAMERNAGSGIIISDTPVHDCNTTCQTPKGAINTSLPFQNIHPITIGKCPKYVKSTKLRLATGLRNVPSIQSRGLFGAIAGFIEGGWTGMVDGWYGYHHQNEQGSGYAADLKSTQNAIDEITNKVNSVIEKMNTQFTAVGKEFNHLEKRIENLNKKVDDGFLDIWTYNAELLVLLENERTLDYHDSNVKNLYEKVRSQLKNNAKEIGNGCFEFYHKCDNTCMESVKNGTYDYPKYSEEAKLNREKIDGVKLESTRIYQILAIYSTVASSLVLVVSLGAISFWMCSNGSLRCRICI

SEQ ID NO: 5790 - protein, 566 aa, synthetic construct; identical to SEQ ID NO: 4856
  REGION 1..566: note = hemagglutinin__InfluenzaA__ADM33177

SEQ ID NO: 5791 - protein, 566 aa, synthetic construct; identical to SEQ ID NO: 5785
  REGION 1..566: note = hemagglutinin__InfluenzaA__ADM33186

SEQ ID NO: 5792 - protein, 566 aa, synthetic construct; identical to SEQ ID NO: 5785
  REGION 1..566: note = hemagglutinin__InfluenzaA__ADM33195

SEQ ID NO: 5793 - protein, 566 aa, synthetic construct; identical to SEQ ID NO: 5782
  REGION 1..566: note = hemagglutinin__InfluenzaA__ADM33204

SEQ ID NO: 5794 - protein, 566 aa, synthetic construct
  REGION 1..566: note = hemagglutinin__InfluenzaA__ADM33222
MEAILVVLLYTFATANADTLCIGYHANNSTDTVDTVLEKNVTVTHSVNLLEDKHNGKLCKLRGVAPLHLGKCNIAGWILGNPECESLSTASSWSYIVETSSSDNGTCYPGDFIDYEELREQLSSVSSFERFEIFPKTSSWPNHDSNKGVTAACPHAGAKSFYKNLIWLVKKGNSYPKLSKSYINDKGKEVLVLWGIHHPSTSADQQSLYQNADAYVFVGSSRYSKKFKPEIAIRPKVRDQEGRMNYYWTLVEPGDKITFEATGNLVVPRYAFAMERNAGSGIIISDTPVHDCNTTCQTPKGAINTSLPFHNIHPITIGKCPKYVKSTKLRLATGLRNVPSIQSRGLFGAIAGFIEGGWTGMVDGWYGYHHQNEQGSGYAADLKSTQNAIDEITNKVNSVIEKMNTQFTAVGKEFNHLEKRIENLNKKVDDGFLDIWTYNAELLVLLENERTLDYHDSNVKNLYEKVRNQLKNNAKEIGNGCFEFYHKCDNTCMESVKNGTYDYPKYSEEAKLNREEIDGVKLESTRIYQILAIYSTVASSLVLVVSLGAISFWMCSNGSLRCRICI

SEQ ID NO: 5795 - protein, 566 aa, synthetic construct
  REGION 1..566: note = hemagglutinin__InfluenzaA__ADM33232
MEAILVVLLYTFATANADTLCIGYHANNSTDTVDTVLEKNVTVTHSVNLLEDKHNGKLCKLRGVAPLHLGKCNIAGWILGNPECESLSTASSWSYIVETSSSDNGTCYPGDFIDYEELREQLSSVSSFERFEIFPKTSSWPNHDSNKGVTAACPHAGAKSFYKNLIWLVKKGNSYPKLSKSYINDKGKEVLVLWGIHHPSTSADQQSLYQNADAYVFVGSSRYSKKFKPEIAIRPKVRDQEGRMNYYWTLVEPGDKITFEATGNLVVPRYAFAMERNAGSGIIISDTPVHDCNTTCQTPKGAINTSLPFHNIHPITIGKCPKYVKSTKLRLATGLRNVPSIQSRGLFGAIAGFIEGGWTGMVDGWYGYHHQNEQGSGYAADLKSTQNAIDEITNKVNSVIEKTNTQFTAVGKEFNHLEKRIENLNKKVDDGFLDIWTYNAELLVLLENERTLDYHDSNVKNLYEKVRNQLKNNAKEIGNGCFEFYHKCDNTCMESVKNGTYDYPKYSEEAKLNREEIDGVKLESTRIYQILAIYSTVASSLVLVVSLGAISFWMCSNGSLQCRICI

SEQ ID NO: 5796 - protein, 566 aa, synthetic construct
  REGION 1..566: note = hemagglutinin__InfluenzaA__ADM33241
MKAILVVLLYTFATANADTLCIGYHANNSTDTVDTVLEKNVTVTHSVNILEDKHNGKLCKLRGVAPLHLGKCNIAGWILGNPECESLSTASSWSYIVETSSSDNGTCYPGDFIDYEELREQLSSVSSFERFEIFPKTSSWPNHDSNKGVTAACPHAGAKSFYKNLIWLVKKENSYPKLSKSYINDKGKEVLVLWGIHHPSTSADQQSLYQNADAYVFVGSSRYSKKFKPEITIRPKVRDQEGRMNYYWTLVEPGDKITFEATGNLVVPRYAFAMERNAGSGIIISDTPVHDCNTTCQTPKGAINTSLPFQNIHPITIGKCPKYVKSTKLRLATGLRNVPSIQSRGLFGAIAGFIEGGWTGMVDGWYGYHHQNEQGSGYAADLKSTQNAIDEITNKVNSVIEKMNTQFTAVGKEFNHLEKRIENLNKKVDDGFLDIWTYNAELLVLLENERTLDYHDSNVKNLYEKVRSQLKNNAKEIGNGCFEFYHKCDNTCMESVKNGTYDYPKYSEEAKLNREEIDGVKLESTRIYQILAIYSTVASSLVLVVSLGAISFWMCSNGSLRCRICI

SEQ ID NO: 5797 - protein, 566 aa, synthetic construct; identical to SEQ ID NO: 5794
  REGION 1..566: note = hemagglutinin__InfluenzaA__ADM33251

SEQ ID NO: 5798 - protein, 566 aa, synthetic construct
  REGION 1..566: note = hemagglutinin__InfluenzaA__ADM33260
MKAILVVLLYTFATANADTLCIGYHANNSTDTVDTVLEKNVTVTHSVNILEDKHNGKLCKLRGVAPLHLGKCNIAGWILGNPECESLSTASSWSYIVETSSSDNGTCYPGDFIDYEELREQLSSVSSFERFEIFPKTSSWPNHDSNKGVTAACPHAGAKSFYKNLIWLVKKGDSYPKLSKSYINDKGKEVLVLWGIHHPSTSADQQSLYQNADAYVFVGSSRYSKKFKPEIAIRPKVRDQEGRMNYYWTLVEPGDKITFEATGNLVVPRYAFAMERNAGSGIIISDTPVHDCNTTCQTPKGAINTSLPFQNIHPITIGKCPKYVKSTKLRLATGLRNVPSIQSRGLFGAIAGFIEGGWTGMVDGWYGYHHQNEQGSGYAADLKSTQNAIDEITNKVNSVIEKMNTQFTAVGKEFNHLEKRIENLNKKVDDGFLDIWTYNTELLVLLENERTLDYHDSNVKNLYEKVRSQLKNNAKEIGNGCFEFYHKCDNTCMESVKNGTYDYPKYSEEAKLNREEIDGVKLESTRIYQILAIYSTVASSLVLVVSLGAISFWMCSNGSLRCRICI

SEQ ID NO: 5799 - protein, 566 aa, synthetic construct
  REGION 1..566: note = hemagglutinin__InfluenzaA__ADM33280
MKAILVVLLYTFATANADTLCIGYHANNSTDTVDTVLEKNVTVTHSVNILEDKHNGKLCKLRGVAPLHLGKCNIAGWILGNPECESLSTVSSWSYIVETSSSDNGTCYPGDFIDYEELREQLSSVSSFERFEIFPKTSSWPNHDSNKGVTAACPHAGAKSFYKNLIWLVKKGNSYPKLSKSYINDKGKEVLVLWGIHHPSTSADQQSLYQNADAYVFVGSSRYSKKFKPEIAIRPKVRDQEGRMNYYWTLVEPGDKITFEATGNLVVPRYAFAMERNAGSGIIISDTPVHDCNTTCQTPRGAINTSLPFQNIHPITIGKCPKYVKSTKLRLATGLRNVPSIQSRGLFGAIAGFIEGGWTGMVDGWYGYHHQNEQGSGYAADLKSTQNAIDEITNKVNSVIEKMNTQFTAVGKEFNHLEKRIENLNKKVDDGFLDIWTYNAELLVLLENERTLDYHDSNVKNLYEKVRSQLKNNAKEIGNGCFEFYHKCDNTCMESVKNGTYDYPKYSEEAKLNREEIDGVKLESTRIYQILAIYSTVASSLVLVVSLGAISFWMCSNGSLQCRICI

SEQ ID NO: 5800 - protein, 566 aa, synthetic construct; identical to SEQ ID NO: 3116
  REGION 1..566: note = hemagglutinin__InfluenzaA__ADM33290

SEQ ID NO: 5801 - protein, 566 aa, synthetic construct; identical to SEQ ID NO: 2669
  REGION 1..566: note = hemagglutinin__InfluenzaA__ADM33300

SEQ ID NO: 5802 - protein, 566 aa, synthetic construct; identical to SEQ ID NO: 2656
  REGION 1..566: note = hemagglutinin__InfluenzaA__ADM33310

SEQ ID NO: 5803 - protein, 566 aa, synthetic construct
  REGION 1..566: note = hemagglutinin__InfluenzaA__ADM33320
MKAILVVMLYTFATANADTLCIGYHANNSTDTVDTVLEKNVTVTHSVNLLEDKHNGKLCKLRGVAPLHLGKCNIAGWILGNPECESLSTASSWSYIVETFSSDNGTCYPGDFIDYEELREQLSSVSSFERFEIFPKTSSWPNHDSNKGVTAACPHAGAKSFYKNLIWLVKKGNSYPKLSKSYINDKGKEVLVLWGIHHPSTSADQQSLYQNADAYVFVGSSRYSKKFKPEIAIRPKVRDQEGRMNYYWTLVEPGDKITFEATGNLVVPRYAFAMERNAGSGIIISDTPVHDCNTTCQTPKGAINTSLPFQNIHPITIGKCPKYVKSTKLRLATGLRNVPSIQSRGLFGAIAGFIEGGWTGMVDGWYGYHHQNEQGSGYAADLKSTQNAIDEITNKVNSVIEKMNTQFTAVGKEFNHLEKRIENLNKKVDDGFLDIWTYNAELLVLLENERTLDYHDSNVKNLYEKVRSQLKNNAKEIGNGCFEFYHKCDNTCMESVKNGTYDYPKYSEEAKLNREEIDGVKLESTRIYQILAIYSTVASSLVLVVSLGAISFWMCSNGSLQCRICI

SEQ ID NO: 5804 - protein, 566 aa, synthetic construct; identical to SEQ ID NO: 2695
  REGION 1..566: note = hemagglutinin__InfluenzaA__ADM33340

SEQ ID NO: 5805 - protein, 566 aa, synthetic construct
  REGION 1..566: note = hemagglutinin__InfluenzaA__ADM33355
MKAILVVMLYTFATANADTLCIGYHANNSTDTVDTVLEKNVTVTHSVNLLEDKHNGKLCKLRGVAPLHLGKCNIAGWILGNPECESLSTASSWSYIVETSSSDNGTCYPGDFIDYEELREQLSSVSSFERFEIFPKTSSWPNHDSNKGVTAACPHAGAKSFYKNLIWLVKKGNSYPKLSKSYINDKGKEVLVLWGIHHPSTSADQQSLYQNADAYVFVGSSRYSKKFKPEIAIRPKVRDQEGRMNYYWTLVEPGDKITFEATGNLVVPRYAFAMERNAGSGIIISDTPVHNCNTTCQTPKGAINTSLPFQNIHPITIGKCPKYVKSTKLRLATGLRNVPSIQSRGLFGAIAGFIEGGWTGMVDGWYGYHHQNEQGSGYAADLKSTQNAIDEITNKVNSVIEKMNTQFTAVGKEFNHLEKRIENLNKKVDDGFLDIWTYNAELLVLLENERTLDYHDSNVKNLYEKVRSQLKNNAKEIGNGCFEFYHKCDNTCMESVKNGTYDYPKYSEEAKLNREEIDGVKLESTRIYQILAIYSTVASSLVLVVSLGAISFWMCSNGSLQCRICI

SEQ ID NO: 5806 - protein, 566 aa, synthetic construct; identical to SEQ ID NO: 5805
  REGION 1..566: note = hemagglutinin__InfluenzaA__ADM33365

SEQ ID NO: 5807 - protein, 566 aa, synthetic construct; identical to SEQ ID NO: 2695
  REGION 1..566: note = hemagglutinin__InfluenzaA__ADM33375

SEQ ID NO: 5808 - protein, 566 aa, synthetic construct
  REGION 1..566: note = hemagglutinin__InfluenzaA__ADM33385
MKAILVVMLYTFATANADTLCIGYHANNSTDTVDTVLEKNVTVTHSVNLLEDKHNGKLCKLRGVAPLHLGKCNIAGWILGNPECESLSTASSWSYIVETSSSDNGTCYPGDFIDYEELREQLSSVSSFERFEIFPKTSSWPNHDSNKGVTAACPHAGAKSFYKNLIWLVKKGNSYPKLSKSYINDKGKEVLVLWGIHHPSTSADQQSLYQNADAYVFVGSSRYSKKFKPEIAIRPKVRDQEGRMNYYWTLVEPGDKITFEATGNLVVPRYAFAMERNAGSGIIISDTPVHDCNTTCQTSKGAINTSLPFQNIHPITIGKCPKYVKSTKLRLATGLRNVPSIQSRGLFGAIAGFIEGGWTGMVDGWYGYHHQNEQGSGYAADLKSTQNAIDEITNKVNSVIEKMNTQFTAVGKEFNHLEKRIENLNKKVDDGFLDIWTYNAELLVLLENERTLDYHDSNVKNLYEKVRSQLKNNAKEIGNGCFEFYHKCDNTCMESVKNGTYDYPKYSEEAKLNREEIDGVKLESTRIYQILAIYSTVASSLVLVVSLGAISFWMCSNGSLQCRICI

SEQ ID NO: 5809 - protein, 566 aa, synthetic construct; identical to SEQ ID NO: 3116
  REGION 1..566: note = hemagglutinin__InfluenzaA__ADM33395

SEQ ID NO: 5810 - protein, 566 aa, synthetic construct; identical to SEQ ID NO: 3116
  REGION 1..566: note = hemagglutinin__InfluenzaA__ADM33405

SEQ ID NO: 5811 - protein, 566 aa, synthetic construct; identical to SEQ ID NO: 5805
  REGION 1..566: note = hemagglutinin__InfluenzaA__ADM33415

SEQ ID NO: 5812 - protein, 566 aa, synthetic construct; identical to SEQ ID NO: 3512
  REGION 1..566: note = hemagglutinin__InfluenzaA__ADM33425

SEQ ID NO: 5813 - protein, 566 aa, synthetic construct
  REGION 1..566: note = hemagglutinin__InfluenzaA__ADM34007
MKAILVVLLYTFATANADTLCIGYHANNSTDTVDTVLEKNVTVTHSVNLLEDKHNGKLCKLRGVAPLHLGKCNIAGWILGNPECESLSTASSWSYIVETSSSDNGTCYPGDFIDYEELREQLSSVSSFERFEIFPKTSSWPNHDSNKGVTAACPHAGAKSFYKNLIWLVKKGNSYPKLSKSYINDKGKEVLVLWGIHHPSTSADQQSLYQNADAYVFVGTSRYSKKFKPEIAIRPKVRDQEGRMNYYWTLEEPGDKITFEATGNLVVPRYAFAMERNAGSGIIISDTPVHDCNTTCQTPKGAINTSLPFQNIHPITIGKCPKYVKSTKLRLATGLRNVPSIQSRGLFGAIAGFIEGGWTGMVDGWYGYHHQNEQGSGYAADLKSTQNAIDEITNKVNSVIEKMNTQFTAVGKEFNHLEKRIENLNKKVDDGFLDIWTYNAELLVLLENERTLDYHDSNVKNLYEKVRSQLKNNAKEIGNGCFEFYHKCDNTCMESVKNGTYDYPKYSEEAKLNREEIDGVKLESTRIYQILAIYSTVASSLVLVVSLGAISFWMCSNGSLQCRICI

SEQ ID NO: 5814 - protein, 566 aa, synthetic construct; identical to SEQ ID NO: 2669
  REGION 1..566: note = hemagglutinin__InfluenzaA__ADM52443

SEQ ID NO: 5815 - protein, 566 aa, synthetic construct
  REGION 1..566: note = hemagglutinin__InfluenzaA__ADM52453
MKAILVVLLYTFATANADTLCIGYHANNSTDTVDTVLEKNVTVTHSVNILEDKHNGKLCKLRGVAPLHLGKCNIAGWILGNPECESLSTASSWSYIVETSSSDNGTCYPGDFIDYEELREQLSSVSSFERFEIFPKTSSWPNHDSNKGVTAACPHAGAKSFYKNLIWLVKKGNSYPKLSKSYINDKGKEVLVLWGIHHPSTSADQQSLYQNADAYVFVGSSRYSKKFKPEIAIRPKVRDQEGRMNYYWTLVEPGDKITFEATGNLVVPRYAFAMERNAGSGIIISDTPIHDCNTTCQTPKGAINTSLPFQNVHPITIGKCPKYVKSTKLRLATGLRNVPSIQSRGLFGAIAGFIEGGWTGMVDGWYGYHHQNEQGSGYAADLKSTQNAIDEITNKVNSVIEKMNTQFTAVGKEFNHLEKRIENLNKKVDDGFLDIWTYNAELLVLLENERTLDYHDSNVKNLYEKVRSQLKNNAKEIGNGCFEFYHKCDNTCMESVKNGTYDYPKYSEEAKLNREEIDGVKLESTRIYQILAIYSTVASSLVLVVSLGAISFWMCSNGSLQCRICI

SEQ ID NO: 5816 - protein, 566 aa, synthetic construct
  REGION 1..566: note = hemagglutinin__InfluenzaA__ADM52473
MKAILAVLLYTFATANADTLCIGYHANNSTDTVDTVLEKNVTVTHSVNLLEDKHNGKLCKLRGVAPLHLGKCNIAGWILGNPECESLSTASSWSYIVETSSSGNGTCYPGDFIDYEELREQLSSVSSFERFEIFPKTSSWPNHDSNKGVTAACPHAGAKSFYKNLLWLVKKGNSYPKLSKSYINDKGKEVLVLWGIHHPSTSADQQSLYQNADAYVFVGTSRYSKKFKPEIAIRPKVRDQEGRMNYYWTLVGPGDKITFEATGNLVVPRYAFAMERNAGSGIIISDTPVHDCNTTCQTPKGAINTSLPFQNIHPITIGKCPKYVKSTKLRLATGLRNVPSIQSRGLFGAIAGFIEGGWTGMVDGWYGYHHQNEQGSGYAADLKSTQNAIDEITNKVNSVIEKMNTQFTAVGKEFNHLEKRIENLNKKVDDGFLDIWTYNAELLVLLENERTLDYHDSNVKNLYEKVRSQLKNNAKEIGNGCFEFYHKCDNTCMESVKNGTYDYPKYSEEAKLNREEIDGVKLESTRIYQILAIYSTVASSLVLVVSLGAISFWMCSNGSLQCRICI

SEQ ID NO: 5817 - protein, 566 aa, synthetic construct; identical to SEQ ID NO: 3833
  REGION 1..566: note = hemagglutinin__InfluenzaA__ADM52483

SEQ ID NO: 5818 - protein, 566 aa, synthetic construct; identical to SEQ ID NO: 2849
  REGION 1..566: note = hemagglutinin__InfluenzaA__ADM52493

SEQ ID NO: 5819 - protein, 566 aa, synthetic construct; identical to SEQ ID NO: 2849
  REGION 1..566: note = hemagglutinin__InfluenzaA__ADM52513

SEQ ID NO: 5820 - protein, 566 aa, synthetic construct; identical to SEQ ID NO: 2849
  REGION 1..566: note = hemagglutinin__InfluenzaA__ADM52524

SEQ ID NO: 5821 - protein, 566 aa, synthetic construct; identical to SEQ ID NO: 2849
  REGION 1..566: note = hemagglutinin__InfluenzaA__ADM52534

SEQ ID NO: 5822 - protein, 566 aa, synthetic construct; identical to SEQ ID NO: 2849
  REGION 1..566: note = hemagglutinin__InfluenzaA__ADM52554

SEQ ID NO: 5823 - protein, 566 aa, synthetic construct; identical to SEQ ID NO: 2849
  REGION 1..566: note = hemagglutinin__InfluenzaA__ADM52564

SEQ ID NO: 5824 - protein, 566 aa, synthetic construct; identical to SEQ ID NO: 2656
  REGION 1..566: note = hemagglutinin__InfluenzaA__ADM52574

SEQ ID NO: 5825 - protein, 566 aa, synthetic construct; identical to SEQ ID NO: 2669
  REGION 1..566: note = hemagglutinin__InfluenzaA__ADM52584

SEQ ID NO: 5826 - protein, 566 aa, synthetic construct
  REGION 1..566: note = hemagglutinin__InfluenzaA__ADM52594
MKAILVVLLYTFATANADTLCIGYHANNSTDTVDTVLEKNVTVTHSVNLLEDKHNGKLCKLRGVAPLHLGKCNIAGWILGNPECESLSTASSWSYIVETSSSDNGTCYPGDFIDYEELREQLSSVSSFERFEIFPKTSSWPNHDSNKGVTAACPHAGAKSFYKNLIWLVKKGNSYPKLSKSYINDKGKEVLVLWGIHHPSTSADQQSLYQNADAYVFVGTSKYSKKFKPEIAIRPKVRDQEGRMNYYWTLVEPGDKITFEATGNLVVPRYAFAMERNAGSGIIISDTPVHDCNTTCQTPKGAINTSLPFQNIHPITIGKCPKYVKSTKLRLATGLRNVPSIQSRGLFGAIAGFIEGGWTGMVDGWYGYHHQNEQGSGYAADLKSTQNAIDKITNKVNSVIEKMNTQFTAVGKEFNHLEKRIENLNKKVDDGFLDIWTYNAELLVLLENERTLDYHDSNVKNLYEKVRSQLKNNAKEIGNGCFEFYHKCDNTCMESVKNGTYDYPKYSEEAKLNREEIDGVKLESTRIYQILAIYSTVASSLVLVVSLGAISFWMCSNGSLQCRICI

SEQ ID NO: 5827 - protein, 566 aa, synthetic construct; identical to SEQ ID NO: 2849
  REGION 1..566: note = hemagglutinin__InfluenzaA__ADM52604

SEQ ID NO: 5828 - protein, 566 aa, synthetic construct; identical to SEQ ID NO: 2849
  REGION 1..566: note = hemagglutinin__InfluenzaA__ADM52614

SEQ ID NO: 5829 - protein, 566 aa, synthetic construct; identical to SEQ ID NO: 4441
  REGION 1..566: note = hemagglutinin__InfluenzaA__ADM52624

SEQ ID NO: 5830 - protein, 566 aa, synthetic construct; identical to SEQ ID NO: 2849
  REGION 1..566: note = hemagglutinin__InfluenzaA__ADM52634

SEQ ID NO: 5831 - protein, 566 aa, synthetic construct; identical to SEQ ID NO: 2849
  REGION 1..566: note = hemagglutinin__InfluenzaA__ADM52644

SEQ ID NO: 5832 - protein, 566 aa, synthetic construct; identical to SEQ ID NO: 2849
  REGION 1..566: note = hemagglutinin__InfluenzaA__ADM52654

SEQ ID NO: 5833 - protein, 566 aa, synthetic construct; identical to SEQ ID NO: 4257
  REGION 1..566: note = hemagglutinin__InfluenzaA__ADM52664

SEQ ID NO: 5834 - protein, 566 aa, synthetic construct; identical to SEQ ID NO: 4441
  REGION 1..566: note = hemagglutinin__InfluenzaA__ADM52674

SEQ ID NO: 5835 - protein, 566 aa, synthetic construct; identical to SEQ ID NO: 2849
  REGION 1..566: note = hemagglutinin__InfluenzaA__ADM52684

SEQ ID NO: 5836 - protein, 566 aa, synthetic construct; identical to SEQ ID NO: 4441
  REGION 1..566: note = hemagglutinin__InfluenzaA__ADM52704

SEQ ID NO: 5837 - protein, 566 aa, synthetic construct; identical to SEQ ID NO: 4257
  REGION 1..566: note = hemagglutinin__InfluenzaA__ADM52714

SEQ ID NO: 5838 - protein, 566 aa, synthetic construct
  REGION 1..566: note = hemagglutinin__InfluenzaA__ADM86399
MKAILVVLLYTFATANADTLCIGYHANNSTDTVDTVLEKNVTVTHSVNILEDKHNGKLCKLRGVAPLHLGKCNIAGWILGNPECESLSTASSWSYIVETSSSDNGTCYPGDFIDYEELREQLSSVSSFERFEIFPKTSSWPNHDSNKGVTAACPHAGAKSFYKNLIWLVKKGNSYPKLSKSYINDKGKEVLVLWGIHHPSTSADQQSLYQNADAYVFVGSSRYSKKFKPEIAIRPKVRDQEGRMNYYWTLVEPGDKITFEATGNLVVPRYAFAMERNAGSGIIISDTPVHDCNTTCQTPKGAVNTSLPFQNIHPITIGKCPKYVKSTKLRLATGLRNVPSIQSRGLFGAIAGFIEGGWTGMVDGWYGYHHQNEQGSGYAADLKSTQNAIDEITNKVNSVIEKMNTQFTAVGKEFNHLEKRIENLNKKVDDGFLDIWTYNAELLVLLENERTLDYHDSNVKNLYEKVRSQLKNNAKEVGNGCFEFYHKCDNTCMESVKNGTYDYPKYSEEAKLNREEIDGVKLESTRIYQILAIYSTAASSLVLVVSLGAISFWMCSNGSLQCRICI

SEQ ID NO: 5839 - protein, 566 aa, synthetic construct; identical to SEQ ID NO: 2669
  REGION 1..566: note = hemagglutinin__InfluenzaA__ADM86409

SEQ ID NO: 5840 - protein, 566 aa, synthetic construct; identical to SEQ ID NO: 2669
  REGION 1..566: note = hemagglutinin__InfluenzaA__ADM86419

SEQ ID NO: 5841 - protein, 566 aa, synthetic construct; identical to SEQ ID NO: 4318
  REGION 1..566: note = hemagglutinin__InfluenzaA__ADM86440

SEQ ID NO: 5842 - protein, 566 aa, synthetic construct; identical to SEQ ID NO: 2669
  REGION 1..566: note = hemagglutinin__InfluenzaA__ADM86450

SEQ ID NO: 5843 - protein, 568 aa, synthetic construct
  REGION 1..568: note = hemagglutinin__InfluenzaA__ADM95450
MEKIVLLFAIVSLVKSDQICIGYHANNSTEQVDTIMEKNVTVTHAQDILEKTHNGKLCDLDGVKPLILRDCSVAGWLLGNPMCDEFINVPEWSYIVEKANPVNDLCYPGDFNDYEELKHLLSRINHFEKIQIIPKSSWPSHEASLGVSAACPYQGKSSFFRNVVWLIKKNNTYPTIKRSYNNTNQEDLLVMWGIHHPNDAAEQTNLYQNPTTYISVGTSTLNQRLTPRIATRSKVNGQSGRMEFFWTILKPNDAINFESNGNFIAPEYAYKIVKKGDSTIMKSELEYGNCNTKCQTPMGAINSSMPFHNIHPLTIGECPKYVKSNRLVLATGLRNSPQREGRRKKRGLFGAIAGFIEGGWQGMVDGWYGYHHSNEQGSGYAADKESTQKAIDGVTNKVNSIIDKMNTQFEAVGREFNNLERRIENLNKKMEDGFLDVWTYNAELLVLMENERTLDFHDSNVKNLYDKVRLQLRDNAKELGNGCFEFYHKCDNECMESVRNGTYDYPQYSEEARLKREEISGVKLESIGIYQILSIYSTVASSLALAIMVAGLSLWMCSNGSLQCRICI

SEQ ID NO: 5844 - protein, 566 aa, synthetic construct; identical to SEQ ID NO: 2669
  REGION 1..566: note = hemagglutinin__InfluenzaA__ADM95745

SEQ ID NO: 5845 - protein, 566 aa, synthetic construct; identical to SEQ ID NO: 2669
  REGION 1..566: note = hemagglutinin__InfluenzaA__ADM95746

SEQ ID NO: 5846 - protein, 566 aa, synthetic construct; identical to SEQ ID NO: 2669
  REGION 1..566: note = hemagglutinin__InfluenzaA__ADM95747

SEQ ID NO: 5847 - protein, 566 aa, synthetic construct; identical to SEQ ID NO: 2669
  REGION 1..566: note = hemagglutinin__InfluenzaA__ADM95749

SEQ ID NO: 5848 - protein, 566 aa, synthetic construct
  REGION 1..566: note = hemagglutinin__InfluenzaA__ADM95750
MKAILVVLLYTFATANADTLCIGYHANNSTDTVDTVLEKNVTVTHSFNLLEDKHNGKLCKLRGVAPLHLGKCNIAGWILGNPECESLSTASSWSYIVETSSSDNGTCYPGDFIDYEELREQLSSVSSFERFEIFPKTSSWPNHDSNKGVTAACPHAGAKSFYKNLIWLVKKGSSYPKLSKSYINDKGKEVLVLWGIHHPSTSADQQSLYQNADAYVFVGSSRYSKKFKPEIAIRPKVRDQEGRMNYYWTLVEPGDKITFEATGNLVVPRYAFAMERNAGSGIIISDTPVHDCNTTCQTPKGAINTSLPFQNIHPITIGKCPKYVKSTKLRLATGLRNVPSIQSRGLFGAIAGFIEGGWTGMVDGWYGYHHQNEQGSGYAADLKSTQNAIDEITNKVNSVIEKMNTQFTAVGKEFNHLEKRIENLNKKVDDGFLDIWTYNAELLVLLENERTLDYHDSNVKNLYEKVRSQLKNNAKEIGNGCFEFYHKCDNTCMESVKNGTYDYPKYSEEAKLNREEIDGVKLESTRIYQILAIYSTVASSLVLVVSLGAISFWMCSNGSLQCRICI

SEQ ID NO: 5849 - protein, 566 aa, synthetic construct; identical to SEQ ID NO: 2669
  REGION 1..566: note = hemagglutinin__InfluenzaA__ADM95751

SEQ ID NO: 5850 - protein, 566 aa, synthetic construct; identical to SEQ ID NO: 2669
  REGION 1..566: note = hemagglutinin__InfluenzaA__ADM95752

SEQ ID NO: 5851 - protein, 566 aa, synthetic construct; identical to SEQ ID NO: 2669
  REGION 1..566: note = hemagglutinin__InfluenzaA__ADM95753

SEQ ID NO: 5852 - protein, 566 aa, synthetic construct; identical to SEQ ID NO: 2669
  REGION 1..566: note = hemagglutinin__InfluenzaA__ADM95754

SEQ ID NO: 5853 - protein, 566 aa, synthetic construct; identical to SEQ ID NO: 2669
  REGION 1..566: note = hemagglutinin__InfluenzaA__ADM95755

SEQ ID NO: 5854 - protein, 566 aa, synthetic construct; identical to SEQ ID NO: 2849
  REGION 1..566: note = hemagglutinin__InfluenzaA__ADM95757

SEQ ID NO: 5855 - protein, 566 aa, synthetic construct; identical to SEQ ID NO: 2669
  REGION 1..566: note = hemagglutinin__InfluenzaA__ADM95758

SEQ ID NO: 5856 - protein, 566 aa, synthetic construct
  REGION 1..566: note = hemagglutinin__InfluenzaA__ADM95759
MKAILVVLLYTFATANADTLCIGYHANNSTDTVDTVLEKNVTVTHSVNLLEDKHNGKLCKLRGVAPLHLGKCNIAGWILGNPECESLSTASSWSYIVETSSSDYGTCYPGDFIDYEELREQLSSVSSFERFEIFPKTSSWPNHDSNKGVTAACPHAGAKSFYKNLIWLVKKGNSYPKLSKSYINDKGKEVLVLWGIHHPSTSADQQSLYQNADAYVFVGTSRYSKKFKPEIAIRPKVRDQEGRMNYYWTLVEPGDKITFEATGNLVVPRYAFAMERNAGSGIIISDTPVHDCNTTCQTPKGAINTSLPFQNIHPITIGKCPKYVKSTKLRLATGLRNVPSIQSRGLFGAIAGFIEGGWTGMVDGWYGYHHQNEQGSGYAADLKSTQNAIDEITNKVNSVIEKMNTQFTAVGKEFNHLEKRIENLNKKVDDGFLDIWTYNAELLVLLENERTLDYHDSNVKNLYEKVRSQLKNNAKEIGNGCFEFYHKCDNTCMESVKNGTYDYPKYSEEAKLNREEIDGVKLESTRIYQILAIYSTVASSLVLVVSLGAISFWMCSNGSLQCRICI

SEQ ID NO: 5857 - protein, 566 aa, synthetic construct; identical to SEQ ID NO: 2656
  REGION 1..566: note = hemagglutinin__InfluenzaA__ADM95760

SEQ ID NO: 5858 - protein, 566 aa, synthetic construct; identical to SEQ ID NO: 2669
  REGION 1..566: note = hemagglutinin__InfluenzaA__ADM95761

SEQ ID NO: 5859 - protein, 566 aa, synthetic construct
  REGION 1..566: note = hemagglutinin__InfluenzaA__ADM95763
MKAILVVLLYTFATANADTLCIGYHANNSTDTVDTVLEKNVTVTHSVNLLEDKNNGKLCKLRGVAPLHLGKCNIAGWILGNPECESLSTASSWSYIVETSSSDNGTCYPGDFIDYEELREQLSSVSSFERFEIFPKTSSWPNHDSNKGVTAACPHAGAKSFYKNLIWLVKKGNSYPKLSKSYINDKGKEVLVLWGIHHPSTSADQQSLYQNADAYVFVGSSRYSKKFKPEIAIRPKVRDQEGRMNYYWTLVEPGDKITFEATGNLVVPRYAFAMERNAGSGIIISDTPVHDCNTTCQTPKGAINTSLPFQNIHPITIGKCPKYVKSTKLRLATGLRNVPSIQSRGLFGAIAGFIEGGWTGMVDGWYGYHHQNEQGSGYAADLKSTQNAIDEITNKVNSVIEKMNTQFTAVGKEFNHLEKRIENLNKKVDDGFLDIWTYNAELLVLLENERTLDYHDSNVKNLYEKVRSQLKNNAKEIGNGCFEFYHKCDNTCMESVKNGTYDYPKYSEEAKLNREEIDGVKLESTRIYQILAIYSTVASSLVLVVSLGAISFWMCSNGSLQCRICI

SEQ ID NO: 5860 - protein, 566 aa, synthetic construct; identical to SEQ ID NO: 2669
  REGION 1..566: note = hemagglutinin__InfluenzaA__ADM95764

SEQ ID NO: 5861 - protein, 566 aa, synthetic construct; identical to SEQ ID NO: 2669
  REGION 1..566: note = hemagglutinin__InfluenzaA__ADM95765

SEQ ID NO: 5862 - protein, 566 aa, synthetic construct; identical to SEQ ID NO: 2669
  REGION 1..566: note = hemagglutinin__InfluenzaA__ADM95767

SEQ ID NO: 5863 - protein, 566 aa, synthetic construct; identical to SEQ ID NO: 3512
  REGION 1..566: note = hemagglutinin__InfluenzaA__ADM95768

SEQ ID NO: 5864 - protein, 566 aa, synthetic construct; identical to SEQ ID NO: 3022
  REGION 1..566: note = hemagglutinin__InfluenzaA__ADM95769

SEQ ID NO: 5865 - protein, 566 aa, synthetic construct; identical to SEQ ID NO: 4785
  REGION 1..566: note = hemagglutinin__InfluenzaA__ADM95771

SEQ ID NO: 5866 - protein, 566 aa, synthetic construct; identical to SEQ ID NO: 2669
  REGION 1..566: note = hemagglutinin__InfluenzaA__ADM95772

SEQ ID NO: 5867 - protein, 566 aa, synthetic construct; identical to SEQ ID NO: 2669
  REGION 1..566: note = hemagglutinin__InfluenzaA__ADM95774

SEQ ID NO: 5868 - protein, 566 aa, synthetic construct; identical to SEQ ID NO: 2669
  REGION 1..566: note = hemagglutinin__InfluenzaA__ADM95775

SEQ ID NO: 5869 - protein, 566 aa, synthetic construct; identical to SEQ ID NO: 3022
  REGION 1..566: note = hemagglutinin__InfluenzaA__ADM95776

SEQ ID NO: 5870 - protein, 566 aa, synthetic construct; identical to SEQ ID NO: 3022
  REGION 1..566: note = hemagglutinin__InfluenzaA__ADM95778

SEQ ID NO: 5871 - protein, 566 aa, synthetic construct
  REGION 1..566: note = hemagglutinin__InfluenzaA__ADM95779
MKAILVVLLYTFATANADTLCIGYHANNSTDTVDTVLEKNVTVTHSVNLLEDKHNGKLCKLRGVAPLHLGKCNIAGWILGNPECESLSTASSWSYIVETSSSDNGTCYPGDFIDYEELREQLSSVSSFERFEIFPKTSSWPNHDSNKGVTAACPHAGAKSFYKNLIWLVKKGNSYPKLSKSYINDKGKEVLVLWGIHHPSTSADQQSLYQNADAYVFVGTSRYSKKFKPEIAIRPKVRDQEGRMNYYWTLVEPGDKITFEATGNLVVPRYAFAMERNAGSGIIISDTPVHDCNTTCQTPKGAINTSLPFQNIHPITIGKCPKYVKSTKLRLATGLRNIPSIQSRGLFGAIAGFIEGGWTGMVDGWYGYHHQNEQGSGYAADLKSTQNAIDEITNKVNSVIEKMNTQFTAVGKEFNHLEKRIENLNKKVDDGFLDIWTYNAELLVLLENERTLDYHDSNVKNLYEKVRSQLKNNAKEIGNGCFEFYHKCDNTCMESVKNGTYDYPKYSEEAKLNREEIDGVKLEPTRIYQILAIYSTVASSLVLVVSLGAISFWMCSNGSLQCRICI

SEQ ID NO: 5872 - protein, 566 aa, synthetic construct; identical to SEQ ID NO: 3022
  REGION 1..566: note = hemagglutinin__InfluenzaA__ADM95780

SEQ ID NO: 5873 - protein, 566 aa, synthetic construct; identical to SEQ ID NO: 3512
  REGION 1..566: note = hemagglutinin__InfluenzaA__ADM95783

SEQ ID NO: 5874 - protein, 566 aa, synthetic construct; identical to SEQ ID NO: 2669
  REGION 1..566: note = hemagglutinin__InfluenzaA__ADM95784

SEQ ID NO: 5875 - protein, 566 aa, synthetic construct; identical to SEQ ID NO: 2669
  REGION 1..566: note = hemagglutinin__InfluenzaA__ADM95785

SEQ ID NO: 5876 - protein, 566 aa, synthetic construct
  REGION 1..566: note = hemagglutinin__InfluenzaA__ADM95786
MKAILVVLLYTFATANADTLCIGYHANNSTDTVDTVLEKNVTVTHSVNLLEDKHNGKLCKLRGVAPLHLGKCNIAGWILGNPECESLSTASSWSYIVETSSSDNGTCYPGDFIDYEELREQLSSVSSFERFEIFPKTSSWPNHDSNKGVTAACSHAGAKSFYKNLIWLVKKGNSYPKLSKSYINDKGKEVLVLWGIHHPSTSADQQSLYQNADAYVFVGTSRYSKKFKPEIAIRPKVREQEGRMNYYWTLVEPGDKITFEATGNLVVPRYAFAMERNAGSGIIISDTPVHDCNTTCQTPKGAINTSLPFQNIHPITIGKCPKYVKSTKLRLATGLRNVPSIQSRGLFGAIAGFIEGGWTGMVDGWYGYHHQNEQGSGYAADLKSTQNAIDEITNKVNSVIEKMNTQFTAVGKEFNHLEKRIENLNKKVDDGFLDIWTYNAELLVLLENERTLDYHDSNVKNLYEKVRSQLKNNAKEIGNGCFEFYHKCDNTCMESVKNGTYDYPKYSEEAKLNREEIDGVKLESTRIYQILAIYSTVASSLVLVVSLGAISFWMCSNGSLQCRICI

SEQ ID NO: 5877 - protein, 566 aa, synthetic construct; identical to SEQ ID NO: 3022
  REGION 1..566: note = hemagglutinin__InfluenzaA__ADM95788

SEQ ID NO: 5878 - protein, 566 aa, synthetic construct; identical to SEQ ID NO: 3022
  REGION 1..566: note = hemagglutinin__InfluenzaA__ADM95789

SEQ ID NO: 5879 - protein, 566 aa, synthetic construct
  REGION 1..566: note = hemagglutinin__InfluenzaA__ADM95790
MKAILVVLLYTFATANADTLCIGYHANNSTDTVDTVLEKNVTVTHSVNLLEDKHNGKLCKLRGVAPLHLGKCNIAGWILGNPECESLSTASSWSYIVETSSSDNGTCYPGDFIDYEELREQLSSVSSFERFEIFPKTSSWPNHDSNKGVTAACPHAGAKSFYKNLIWLVKKGNSYPKLRKSYINDKGKEVLVLWGIHHPSTSADQQSLYQNADAYVFVGTSRYSKKFKPEIAIRPKVRDQEGRMNYYWTLVEPGDKITFEATGNLVVPRYAFAMERNAGSGIIISDTPVHDCNTTCQTPKGAINTSLPFQNIHPITIGKCPKYVKSTKLRLATGLRNIPSIQSRGLFGAIAGFIEGGWTGMVDGWYGYHHQNEQGSGYAADLKSTQNAIDEITNKVNSVIEKMNTQFTAVGKEFNHLEKRIENLNKKVDDGFLDIWTYNAELLVLLENERTLDYHDSNVKNLYEKVRSQLKNNAKEIGNGCFEFYHKCDNTCMESVKNGTYDYPKYSEEAKLNREEIDGVKLESTRIYQILAIYSTVASSLVLVVSLGAISFWMCSNGSLQCRICI

SEQ ID NO: 5880 - protein, 566 aa, synthetic construct; identical to SEQ ID NO: 5879
  REGION 1..566: note = hemagglutinin__InfluenzaA__ADM95791

SEQ ID NO: 5881 - protein, 566 aa, synthetic construct; identical to SEQ ID NO: 5879
  REGION 1..566: note = hemagglutinin__InfluenzaA__ADM95792

SEQ ID NO: 5882 - protein, 566 aa, synthetic construct; identical to SEQ ID NO: 5266
  REGION 1..566: note = hemagglutinin__InfluenzaA__ADM95793

SEQ ID NO: 5883 - protein, 566 aa, synthetic construct; identical to SEQ ID NO: 3022
  REGION 1..566: note = hemagglutinin__InfluenzaA__ADM95794

SEQ ID NO: 5884 - protein, 566 aa, synthetic construct; identical to SEQ ID NO: 2669
  REGION 1..566: note = hemagglutinin__InfluenzaA__ADM95795

SEQ ID NO: 5885 - protein, 566 aa, synthetic construct; identical to SEQ ID NO: 3771
  REGION 1..566: note = hemagglutinin__InfluenzaA__ADM95798

SEQ ID NO: 5886 - protein, 566 aa, synthetic construct
  REGION 1..566: note = hemagglutinin__InfluenzaA__ADM95799
MKAILVVLLYTFATANADTLCIGYHANNSTDTVDTVLEKNVTVTHSVNLLEDKHNGKLCKLRGVAPLHLGKCNIAGWILGNPECESLSTASSWSYIVETSSSDNGTCYPGDFIDYEELREQLSSVSSFERFEIFPKTSSWPNHDSNKGVTAACPHAGAKSFYKNLIWLVKKGNSYPKLSKSYINDKGKEVLVLWGIHHPSTSADQQSLYQNADAYVFVGTSRYSKKFKPEIAIRPKVRDQEGRMNYYWTLVEPGDKITFEATGNLVVPRYAFAMERNAGSGIIISDTPVHDCNTTCQTPKGAINTSLPFQNIHPITIGKCPKYVKSTKLRLATGLRNVPSIQSRGLFGAIAGFIEGGWTGMVDGWYGYHHQNEQGSGYAADLKSTQNAIDEITNKVNSVIEKMNTQFTAVGKEFNHLEKRIENLNKKVDDGFLDIWTYNAELLVLLENERTLDYHDSNVKNLYEKVRSQLKNNAKEIENGCFEFYHKCDNTCMESVKNGTYDYPKYSEEAKLNREEIDGVKLESTRIYQILAIYSTVASSLVLVVSLGAISFWMCSNGSLQCRICI

SEQ ID NO: 5887 - protein, 566 aa, synthetic construct
  REGION 1..566: note = hemagglutinin__InfluenzaA__ADM95800
MKAILVVLLYTFATANADTLCIGYHANNSTDTVDTVLEKNVTVTHSVNLLEDKHNGKLCKLRGVAPLHLGKCNIAGWILGNPECESLSTASSWSYIVETSSSDNGTCYPGDFIDYEELREQLSSVSSFERFEIFPKTSSWPNHDSNKGVTAACPHAGAKSFYKNLIWLVKKGNSYPKLSKSYINDKGKEVLVLWGIHHPSTSADQQSLYQNADAYVFVGTSRYSKKFKPEIAIRPKVRDQEGRMNYYWTLVAPGDKITFEATGNLVVPRYAFAMERNAGSGIIISDTPVHDCNTTCQTPKGAINTSLPFQNIHPITIGKCPKYVKSTKLRLATGLRNVPSIQSRGLFGAIAGFIEGGWTGMVDGWYGYHHQNEQGSGYAADLKSTQNAIDEITNKVNSVIEKMNTQFTAVGKEFNHLEKRIENLNKKVDDGFLDIWTYNAELLVLLENERTLDYHDSNVKNLYEKVRSQLKNNAKEIGNGCFEFYHKCDNTCMESVKNGTYDYPKYSEEAKLNREEIDGVKLESTRIYQILAIYSTVASSLVLVVSLGAISFWMCSNGSLQCRICI

SEQ ID NO: 5888 - protein, 566 aa, synthetic construct; identical to SEQ ID NO: 3022
  REGION 1..566: note = hemagglutinin__InfluenzaA__ADM95801

SEQ ID NO: 5889 - protein, 566 aa, synthetic construct; identical to SEQ ID NO: 3022
  REGION 1..566: note = hemagglutinin__InfluenzaA__ADM95802

SEQ ID NO: 5890 - protein, 566 aa, synthetic construct; identical to SEQ ID NO: 5876
  REGION 1..566: note = hemagglutinin__InfluenzaA__ADM95803

SEQ ID NO: 5891 - protein, 566 aa, synthetic construct
  REGION 1..566: note = hemagglutinin__InfluenzaA__ADM95804
MKAILVVLLYTFATANADTLCIGYHANNSTDTVDTVLEKNVTVTHSVNLLEDKHNGKLCKLRGVAPLHLGKCNIAGWILGNPECESLSTASSWSYIVETSSSDNGTCYPGDFIDYEELREQLSSVSSFERFEIFPKTSSWPNHDSNKGVTAACPHAGAKNFYKNLIWLVKKGNSYPKLSKSYINDKGKEVLVLWGIHHPSTSADQQSLYQNADAYVFVGTSRYSKKFKPEIAIRPKVRDQEGRMNYYWTLVEPGDKITFEATGNLVVPRYAFAMERNAGSGIIISDTPVHDCNTTCQTPKGAINTSLPFQNIHPITIGKCPKYVKSTKLRLATGLRNVPSIQSRGLFGAIAGFIEGGWTGMVDGWYGYHHQNEQGSGYAADLKSTQNAIDEITNKVNSVIEKMNTQFTAVGKEFNHLEKRIENLNKKVDDGFLDIWTYNAELLVLLENERTLDYHDSNVKKLYEKVRSQLKNNAKEIGNGCFEFYHKCDNTCMESVKNGTYDYPKYSEEAKLNREEIDGVKLESTRIYQILAIYSTVASSLVLVVSLGAISFWMCSNGSLQCRICI

SEQ ID NO: 5892 - protein, 566 aa, synthetic construct; identical to SEQ ID NO: 4351
  REGION 1..566: note = hemagglutinin__InfluenzaA__ADM95805

SEQ ID NO: 5893 - protein, 566 aa, synthetic construct; identical to SEQ ID NO: 3770
  REGION 1..566: note = hemagglutinin__InfluenzaA__ADM95808

SEQ ID NO: 5894 - protein, 566 aa, synthetic construct; identical to SEQ ID NO: 3770
  REGION 1..566: note = hemagglutinin__InfluenzaA__ADM95809

SEQ ID NO: 5895 - protein, 566 aa, synthetic construct; identical to SEQ ID NO: 3770
  REGION 1..566: note = hemagglutinin__InfluenzaA__ADM95810

SEQ ID NO: 5896 - protein, 566 aa, synthetic construct
  REGION 1..566: note = hemagglutinin__InfluenzaA__ADM95812
MKAILVVLLYTFATANADTLCIGYHANNSTDTVDTVLEKNVTVTHSVNLLEDKHNGKLCKLRGVAPLHLGKCNIAGWILGNPECELLSTASSWSYIVETSSSDNGTCYPGDFIDYEELREQLSSVSSFERFEIFPKTSSWPNHDSNKGVTAACPHAGAKSFYKNLIWLVKKGNSYPKLSKSYINDKGKEVLVLWGIHHPSTSADQQSLYQNADAYVFVGTSRYSKKFKPEIAIRPKVRDQEGRMNYYWTLVEPGDKITFEATGNLVVPRYAFAMERNAGSGIIISDTPVHDCNTTCQTPKGAINTSLPFQNIHPITIGKCPKYVKSTKLRLATGLRNVPSIQSRGLFGAIAGFIEGGWTGMVDGWYGYHHQNEQGSGYAADLKSTQNAIDEITNKVNSVIEKMNTQFTAVGKEFNHLEKRIENLNKKVDDGFLDIWTYNAELLVLLENERTLDYHDSNVKNLYEKVRSQLKNNAKEIGNGCFEFYHKCDNTCMESVKNGTYDYPKYSEEAKLNREEIDGVKLESTRIYQILAIYSTVASSLVLVVSLGAISFWMCSNGSLQCRICI

SEQ ID NO: 5897 - protein, 566 aa, synthetic construct; identical to SEQ ID NO: 5266
  REGION 1..566: note = hemagglutinin__InfluenzaA__ADM95816

SEQ ID NO: 5898 - protein, 566 aa, synthetic construct; identical to SEQ ID NO: 5266
  REGION 1..566: note = hemagglutinin__InfluenzaA__ADM95819

SEQ ID NO: 5899 - protein, 566 aa, synthetic construct; identical to SEQ ID NO: 4351
  REGION 1..566: note = hemagglutinin__InfluenzaA__ADM95820

SEQ ID NO: 5900 - protein, 566 aa, synthetic construct; identical to SEQ ID NO: 5266
  REGION 1..566: note = hemagglutinin__InfluenzaA__ADM95821

SEQ ID NO: 5901 - protein, 566 aa, synthetic construct; identical to SEQ ID NO: 3770
  REGION 1..566: note = hemagglutinin__InfluenzaA__ADM95822

SEQ ID NO: 5902 - protein, 566 aa, synthetic construct; identical to SEQ ID NO: 3770
  REGION 1..566: note = hemagglutinin__InfluenzaA__ADM95823

SEQ ID NO: 5903 - protein, 566 aa, synthetic construct
  REGION 1..566: note = hemagglutinin__InfluenzaA__ADM95824
MKAILVVLLYTFATANADTLCIGYHANNSTDTVDTVLEKNVTVTHSVNLLEDKHNGKLCKLRGVAPLHLGKCNIAGWILGNPECESLSTASSWSYIVETSSSDNGTCYPGDFIDYEELREQLSSVSSFERFEIFPKTSSWPNHDSNKGVTAACPHAGAKSFYKNLIWLVKKGNSYPKLSKSYINDKGKEVLVLWGIHHPSTSADQQSLYQNADAYVFVGTSRYSKKFKPEIAIRPKVRDQEGRMNYHWTLVEPGDKITFEATGNLVVPRYAFAMERNAGSGIIISDTPVHDCNTTCQTPKGAINTSLPFQNIHPITIGKCPKYVKSTKLRMATGLRNVPSIQSRGLFGAIAGFIEGGWTGMVDGWYGYHHQNEQGSGYAADLKSTQNAIDEITNKVNSVIEKMNTQFTAVGKEFNHLEKRIENLNKKVDDGFLDIWTYNAELLVLLENERTLDYHDSNVKNLYEKVRSQLKNNAKEIGNGCFEFYHKCDNTCMESVKNGTYDYPKYSEEAKLNREEIDGVKLESTRIYQILAIYSTVASSLVLVVSLGAISFWMCSNGSLQCRICI

SEQ ID NO: 5904 - protein, 566 aa, synthetic construct; identical to SEQ ID NO: 5266
  REGION 1..566: note = hemagglutinin__InfluenzaA__ADM95825

SEQ ID NO: 5905 - protein, 566 aa, synthetic construct; identical to SEQ ID NO: 5266
  REGION 1..566: note = hemagglutinin__InfluenzaA__ADM95826

SEQ ID NO: 5906 - protein, 566 aa, synthetic construct
  REGION 1..566: note = hemagglutinin__InfluenzaA__ADM95827
MKAILVVLLYTFATANADTLCIGYHANNSTDTVDTVLEKNVTVTHSVNLLEDKHNGKLCKLKGVAPLHLGKCNIAGWILGNPECESLSTASSWSYIVETSSSDNGTCYPGDFIDYEELREQLSSVSSFERFEIFPKTSSWPNHDSNKGVTAACPHAGAKSFYKNLIWLVKKGNSYPKLSKSYINDKGKEVLVLWGIHHPSTSADQQSLYQNADAYVFVGTSRYSKKFKPEIAIRPKVRDQEGRMNYYWTLVEPGDKITFEATGNLVVPRYAFAMERNAGSGIIISDTPVHDCNTTCQTPKGAINTSLPFQNIHPITIGKCPKYVKSTKLRLATGLRNVPSIQSRGLFGAIAGFIEGGWTGMVDGWYGYHHQNEQGSGYAADLKSTQHAIDEITNKVNSVIEKMNTQFTAVGKEFNHLEKRIENLNKKVDDGFLDIWTYNAELLVLLENERTLDYHDSNVKNLYEKVRSQLKNNAKEIGNGCFEFYHKCDNTCMESVKNGTYDYPKYSEEAKLNREEIDGVKLESTRIYQILAIYSTVASSLVLVVSLGAISFWMCSNGSLQCRICI

SEQ ID NO: 5907 - protein, 566 aa, synthetic construct
  REGION 1..566: note = hemagglutinin__InfluenzaA__ADM95828
MKAILVVLLYTFATANADTLCIGYHANNSTDTVDTVLEKNVTVTHSVNLLEDKHNGKLCKLRGVAPLHLGKCNIAGWILGNPECESLSTASSWSYIVETSSSDNGTCYPGDFIDYEELREQLSSVSSFERFEIFPKTSSWPNHDSNKGVTAACPHAGAKSFYKNLIWLVKKGNSYPKLSKSYINDKGKEVLVLWGIHHPSTSADQQSLYQNADAYVFVGTSRYSKKFKPEIAIRPKVRDQEGRMNYYWTLVEPGDKITFEATGNLVVPRYAFAMERNAGSGIIISDTPAHDCNTTCQTPKGAINTSLPFQNIHPITIGKCPKYVKSTKLRMATGLRNVPSIQSRGLFGAIAGFIEGGWTGMVDGWYGYHHQNEQGSGYAADLKSTQNAIDEITNKVNSVIEKMNTQFTAVGKEFNHLEKRIENLNKKVDDGFLDIWTYNAELLVLLENERTLDYHDSNVKNLYEKVRSQLKNNAKEIGNGCFEFYHKCDNTCMESVKNGTYDYPKYSEEAKLNREEIDGVKLESTRIYQILAIYSTVASSLVLVVSLGAISFWMCSNGSLQCRICI

SEQ ID NO: 5908 - protein, 566 aa, synthetic construct
  REGION 1..566: note = hemagglutinin__InfluenzaA__ADM95829
MKAILVVLLYTFATANADTLCIGYHANNSTDTVDTVLEKNVTVTHSVNLLEDKHNGKLCKLRGVAPLHLGKCNIAGWILGNPECESLSTASSWSYIVETSSSDNGTCYPGDFIDYEELREQLSSVSSFERFEIFPKTSSWPNHDSNKGVTAACPHAGAKSFYKNLIWLVKKGNSYPKLSKSYINDKGKEVLVLWGIHHPSTSADQQSLYQNADAYVFVGTSRYSKKFKPEIAIRPKVRDQEGRMNYYWTLVEPGDKITFEATGNLVVPRYAFAMERNAGSGIIISDTPVHDCNTTCQTPKGAINTSLPFQNIHPITIGKCPKYVKSTKLRLATGLRNVPSIQSRGLFGAIAGFIEGGWTGMVDGWYGYHHQNEQGSGYAADLKSTQNAIDEITNKVNSVIEKMNTQFTAVGKEFNHLEKRIENLNKKVDDGFLDIWTYNAELLVLLENERTLDYHDSNVKKLYEKVRSQLKNNAKEIGNGCFEFYHKCDNMCMESVKNGTYDYPKYSEEAKLNREEIDGVKLESTRIYQILAIYSTVASSLVLVVSLGAISFWMCSNGSLQCRICI

SEQ ID NO: 5909 - protein, 566 aa, synthetic construct
  REGION 1..566: note = hemagglutinin__InfluenzaA__ADM95831
MKAILVVLLYTFVTANADTLCIGYHANNSTDTVDTVLEKNVTVTHSVNLLEDKHNGKLCKLRGVAPLHLGKCNIAGWILGNPECESLSTASSWSYIVETSSSDNGTCYPGDFIDYEELREQLSSVSSFERFEIFPKTSSWPNHDSNKGVTAACPHAGAKSFYKNLIWLVKKGNSYPKLSKSYINDKGKEVLVLWGIHHPSTSADQQSLYQNADAYVFVGTSRYSKKFKPEIAIRPKVRDQEGRMNYYWTLVEPGDKITFEATGNLVVPRYAFAMEKNAGSGIIISDTPVHDCNTTCQTPKGAINTSLPFQNIHPITIGKCPKYVKSTKLRLATGLRNVPSIQSRGLFGAIAGFIEGGWTGMVDGWYGYHHQNEQGSGYAADLKSTQHAIDEITNKVNSVIEKMNTQFTAVGKEFNHLEKRIENLNKKVDDGFLDIWTYNAELLVLLENERTLDYHDSNVKNLYEKVRSQLKNNAKEIGNGCFEFYHKCDNTCMESVKNGTYDYPKYSEEAKLNREEIDGVKLESTRIYQILAIYSTVASSLVLVVSLGAISFWMCSNGSLQCRICI

SEQ ID NO: 5910 - protein, 566 aa, synthetic construct; identical to SEQ ID NO: 3770
  REGION 1..566: note = hemagglutinin__InfluenzaA__ADM95832

SEQ ID NO: 5911 - protein, 566 aa, synthetic construct; identical to SEQ ID NO: 4351
  REGION 1..566: note = hemagglutinin__InfluenzaA__ADM95833

SEQ ID NO: 5912 - protein, 566 aa, synthetic construct; identical to SEQ ID NO: 5896
  REGION 1..566: note = hemagglutinin__InfluenzaA__ADM95834

SEQ ID NO: 5913 - protein, 566 aa, synthetic construct; identical to SEQ ID NO: 4351
  REGION 1..566: note = hemagglutinin__InfluenzaA__ADM95836

SEQ ID NO: 5914 - protein, 566 aa, synthetic construct; identical to SEQ ID NO: 5266
  REGION 1..566: note = hemagglutinin__InfluenzaA__ADM95837

SEQ ID NO: 5915 - protein, 566 aa, synthetic construct
  REGION 1..566: note = hemagglutinin__InfluenzaA__ADM95838
MKAILVVLLYTFATANADTLCIGYHANNSTDTVDTVLEKNVTVTHSVNLLEDKHNGKLCKLRGVAPLHLGKCNIAGWILGNPECESLSTASSWSYIVETSSSDNGTCYPGDFIDYEELREQLSSVSSFERFEIFPKTSSWPNHDSNKGVTAACLHAGAKSFYKNLIWLVKKGNSYPKLSKSYINDKGKEVLVLWGIHHPSTSADQQSLYQNADAYVFVGTSRYSKKFKPEIAIRPKVRDQEGRMNYYWTLVEPGDKITFEATGNLVVPRYAFAMERNAGSGIIISDTPVHDCNTTCQTPKGAINTSLPFQNIHPITIGKCPKYVKSTKLRLATGLRNVPSIQSRGLFGAIAGFIEGGWTGMVDGWYGYHHQNEQGSGYAADLKSTQNAIDKITNKVNSVIEKMNTQFTAVGKEFNHLEKRIENLNKKVDDGFLDIWTYNAELLVLLENERTLDYHDSNVKNLYEKVRSQLKNNAKEIGNGCFEFYHKCDNTCMESVKNGTYDYPKYSEEAKLNREEIDGVKLESTRIYQILAIYSTVASSLVLVVSLGAISFWMCSNGSLQCRICI

SEQ ID NO: 5916 - protein, 566 aa, synthetic construct; identical to SEQ ID NO: 4351
  REGION 1..566: note = hemagglutinin__InfluenzaA__ADM95839

SEQ ID NO: 5917 - protein, 566 aa, synthetic construct; identical to SEQ ID NO: 5876
  REGION 1..566: note = hemagglutinin__InfluenzaA__ADM95840

SEQ ID NO: 5918 - protein, 566 aa, synthetic construct; identical to SEQ ID NO: 5876
  REGION 1..566: note = hemagglutinin__InfluenzaA__ADM95842

SEQ ID NO: 5919 - protein, 566 aa, synthetic construct; identical to SEQ ID NO: 5266
  REGION 1..566: note = hemagglutinin__InfluenzaA__ADM95843

SEQ ID NO: 5920 - protein, 566 aa, synthetic construct; identical to SEQ ID NO: 5266
  REGION 1..566: note = hemagglutinin__InfluenzaA__ADM95844

SEQ ID NO: 5921 - protein, 566 aa, synthetic construct
  REGION 1..566: note = hemagglutinin__InfluenzaA__ADM95845
MKAILVVLLYTFATANADTLCIGYHANNSTDTVDTVLEKNVTVTHSVNLLEDKHNGKLCKLRGVAPLHLGKCNIAGWILGNPECESLSTASSWSYIVETSSSDNGTCYPGDFIDYEELREQLSSVSSFERFEIFPKTSSWPNHDSNKGVTAACPHAGAKSFYKNLIWLVKKGNSYPKLSKSYINDKGKEVLVLWGIHHPSTSADQQSLYQNADAYVFVGTSRYSKKFKPEIAIRPKVRDQEGRMNYYWTLVEPGDKITFEATGNLVVPRYAFAMERNAGSGIIISDTPVHDCNTTCQTPKGAINTSLPFQNIHPITIGKCPKYVKSTKLRMATGLRNVPSIQSRGLFGAIAGFIEGGWTGMVDGWYGYHHQNEQGSGYAADLKSTQNAIDEITNKVNSVIEKMNTQFTAVGKEFNHLEKRIENLNKKVDDGFLDIWTYNAELLVLLENERTLDYHDSNVKNLYEKVRSQLKNNAKEIGNGCFEFYHKCDNTCMESVKNGTYDYPKYSEETKLNREEIDGVKLESTRIYQILAIYSTVASSLVLVVSLGAISFWMCSNGSLQCRICI

SEQ ID NO: 5922 - protein, 566 aa, synthetic construct
  REGION 1..566: note = hemagglutinin__InfluenzaA__ADM95846
MKAILVVLLYTFATANADTLCIGYHANNSTDTVDTVLEKNVTVTHSVNLLEDKHNGKLCKLRGVAPLHLGKCNIAGWILGNPECESLSTASSWSYIVEASSSDNGTCYPGDFIDYEELREQLSSVSSFERFEIFPKTSSWPNHDSNKGVTAACPHAGAKSFYKNLIWLVKKGNSYPKLSKSYINDKGKEVLVLWGIHHPSTSADQQSLYQNADAYVFVGTSRYSKKFKPEIAIRPKVRDQEGRMNYYWTLVEPGDKITFEATGNLVVPRYAFAMERNAGSGIIISDTPVHDCNTTCQTPKGAINTSLPFQNIHPITIGKCPKYVKSTKLRLATGLRNIPSIQSRGLFGAIAGFIEGGWTGMVDGWYGYHHQNEQGSGYAADLKSTQNAIDEITNKVNSVIEKMNTQFTAVGKEFNHLEKRIENLNKKVDDGFLDIWTYNAELLVLLENERTLDYHDSNVKNLYEKVRSQLKNNAKEIGNGCFEFYHKCDNTCMESVKNGTYDYPKYSEEAKLNREEIDGVKLESTRIYQILAIYSTVASSLVLVVSLGAISFWMCSNGSLQCRICI

SEQ ID NO: 5923 - protein, 566 aa, synthetic construct; identical to SEQ ID NO: 3770
  REGION 1..566: note = hemagglutinin__InfluenzaA__ADM95847

SEQ ID NO: 5924 - protein, 566 aa, synthetic construct; identical to SEQ ID NO: 3770
  REGION 1..566: note = hemagglutinin__InfluenzaA__ADM95848

SEQ ID NO: 5925 - protein, 566 aa, synthetic construct
  REGION 1..566: note = hemagglutinin__InfluenzaA__ADM95849
MKAILVVLLYTFATANADTLCIGYHANNSTDTVDTVLEKNVTVTHSVNLLEDKHNGKLCKLRGVAPLHLGKCNIAGWILGNPECESLSTASSWSYIVETSSSDNGTCYPGDFIDYEELREQLSSVSSFERFEIFPKTSSWPNHDSNKGVTAACPHAGAKSFYKNLIWLVKKGNSYPKLSKSYINDKGKEVLVLWGIHHPSTSADQQSLYQNADAYVFVGTSRYSKKFKPEIAIRPKVRDQEGRMNYYWTLVEPGDKITFEATGNLVVPRYAFAMERNAGSGIIISDTPVHDCNTTCQTPKGAINTSLPFQNIHPITIGKCPKYVKSTKLRLATGLRNVPSIQSRGLFGAIAGFIEGGWTGMVDGWYGYHHQNEQGSGYAADLKSTQNAIDEITNKVNSVIEKMNTQFTAVGKEFNHLEKRIENLNKKVDDGFLDIWTYNAELLVLLENERTLDYHDSNVKKLYEKVRSQLKNNAKEIGNGCFEFYHKCDNTCMESVKNGTYDYPKYSEEAKLNREEIDGVKLESTRIYQILAIYSTVASSLVLVISLGAISFWMCSNGSLQCRICI

SEQ ID NO: 5926 - protein, 566 aa, synthetic construct; identical to SEQ ID NO: 5266
  REGION 1..566: note = hemagglutinin__InfluenzaA__ADM95850

SEQ ID NO: 5927 - protein, 566 aa, synthetic construct
  REGION 1..566: note = hemagglutinin__InfluenzaA__ADM95851
MKAILVVLLYTFATANADTLCIGYHANNSTDTVDTVLEKNVTVTHSVNLLEDKHNGKLCKLRGVAPLHLGKCNIAGWILGNPECESLSTTSSWSYIVETSSSDNGTCYPGDFIDYEELREQLSSVSSFERFEIFPKTSSWPNHDSNKGVTAACPHAGAKSFYKNLIWLVKKGNSYPKLSKSYINDKGKEVLVLWGIHHPSTSADQQSLYQNADAYVFVGTSRYSKKFKPEIAIRPKVRDQEGRMNYYWTLVEPGDKITFEATGNLVVPRYAFAMERNAGSGIIISDTPVHDCNTTCQTPKGAINTSLPFQNIHPITIGKCPKYVKSTKLRLATGLRNIPSIQSRGLFGAIAGFIEGGWTGMVDGWYGYHHQNEQGSGYAADLKSTQNAIDEITNKVNSVIEKMNTQFTAVGKEFNHLEKRIENLNKKVDDGFLDIWTYNAELLVLLENERTLDYHDSNVKNLYEKVRSQLKNNAKEIGNGCFEFYHKCDNTCMESVKNGTYDYPKYSEEAKLNREEIDGVKLESTRIYQILAIYSTVASSLVLVVSLGAISFWMCSNGSLQCRICI

SEQ ID NO: 5928 - protein, 566 aa, synthetic construct
  REGION 1..566: note = hemagglutinin__InfluenzaA__ADM95852
MKAILVVLLYTFATANADTLCIGYHANNSTDTVDTVLEKNVTVTHSVNLLEDKHNGKLCKLRGVAPLHLGKCNIAGWILGNPECESLSTASSWSYIVETSSSDNGTCYPGDFIDYEELREQLSSVSSFERFEIFPKTSSWPNHDSNKGVTAACPHAGAKSFYKNLIWLVKKGNSYPKLSKSYINDKGKEVLVLWGIHHPSTSADQQSLYQNADAYVFVGTSRYSKKFKPEIAIRPKVRDQEGRMNYYWTLVEPGDKITFEATGNLVVPRYAFAMERNAGSGIIISDTPVHDCNTTCQTPKGAINTSLPFQNIHPITIGKCPKYVKSTKLRLATGLRNVPSIQSRGLFGAIAGFIEGGWTGMVDGWYGYHHQNEQGSGYAADLKSTQNAIDEITNKVNSVIEKMNTQFTAVGKEFNHLEKRIENLNKKVDDGFLDIWTYNAELLVLLENERTLDYHDSNVKKLYEKIRSQLKNNAKEIGNGCFEFYHKCDNTCMESVKNGTYDYPKYSEEAKLNREEIDGVKLESTRIYQILAIYSTVASSLVLVVSLGAISFWMCSNGSLQCRICI

SEQ ID NO: 5929 - protein, 566 aa, synthetic construct; identical to SEQ ID NO: 4089
  REGION 1..566: note = hemagglutinin__InfluenzaA__ADM95854

SEQ ID NO: 5930 - protein, 566 aa, synthetic construct
  REGION 1..566: note = hemagglutinin__InfluenzaA__ADM95855
MKAILVVLLYTFATTNADTLCIGYHANNSTDTVDTVLEKNVTVTHSVNLLEDKHNGKLCKLRGVAPLHLGKCNIAGWILGNPECESLSTASSWSYIVETSSSDNGTCYPGDFIDYEELREQLSSVSSFERFEIFPKTSSWPNHDSNKGVTAACPHAGAKSFYKNLIWLVKKGNSYPKLSKSYINDKGKEVLVLWGIHHPSTSADQQSLYQNADAYVFVGTSRYSKKFKPEIAIRPKVRDQEGRMNYYWTLVEPGDKITFEATGNLVVPRYAFAMERNAGSGIIISDTPVHDCNTTCQTPKGAINTSLPFQNIHPITIGKCPKYVKSTKLRLATGLRNVPSIQSRGLFGAIAGFIEGGWTGMVDGWYGYHHQNEQGSGYAADLKSTQNAIDEITNKVNSVIEKMNTQFTAVGKEFNHLEKRIENLNKKVDDGFLDIWTYNAELLVLLENERTLDYHDSNVKKLYEKVRSQLKNNAKEIGNGCFEFYHKCDNTCMESVKNGTYDYPKYSEEAKLNREEIDGVKLESTRIYQILAIYSTVASSLVLVVSLGAISFWMCSNGSLQCRICI

SEQ ID NO: 5931 - protein, 566 aa, synthetic construct
  REGION 1..566: note = hemagglutinin__InfluenzaA__ADM95857
MKAILVVLLYTFATANADTLCIGYHANNSTDTVDTVLEKNVTVTHSVNLLEDKHNGKLCKLRGVAPLHLGKCNIAGWILGNPECESLSTANSWSYIVETSSSDNGTCYPGDFIDYEELREQLSSVSSFERFEIFPKTSSWPNHDSNKGVTAACPHAGAKSFYKNLIWLVKKGNSYPKLSKSYINDKGKEVLVLWGIHHPSTSADQQSLYQNADAYVFVGTSRYSKKFKPEIAIRPKVRDQEGRMNYYWTLVEPGDKITFEATGNLVVPRYAFAMERNAGSGIIISDTPVHDCNTTCQTPKGAINTSLPFQNIHPITIGKCPKYVKSTKLRMATGLRNVPSIQSRGLFGAIAGFIEGGWTGMVDGWYGYHHQNEQGSGYAADLKSTQNAIDEITNKVNSVIEKMNTQFTAVGKEFNHLEKRIENLNKKVDDGFLDIWTYNAELLVLLENERTLDYHDSNVKNLYEKVRSQLKNNAKEIGNGCFEFYHKCDNTCMESVKNGTYDYPKYSEEAKLNREEIDGVKLESTRIYQILAIYSTVASSLVLVVSLGAISFWMCSNGSLQCRICI

SEQ ID NO: 5932 - protein, 566 aa, synthetic construct; identical to SEQ ID NO: 4351
  REGION 1..566: note = hemagglutinin__InfluenzaA__ADM95858

SEQ ID NO: 5933 - protein, 566 aa, synthetic construct
  REGION 1..566: note = hemagglutinin__InfluenzaA__ADM95859
MKAILVVLLYTFATANADTLCIGYHANNSTDTVDTVLEKNVTVTHSVNLLEDKHNEKLCKLRGVAPLHLGKCNIAGWILGNPECESLSTASSWSYIVETSSSDNGTCYPGDFIDYEELREQLSSVSSFERFEIFPKTSSWPNHDSNKGVTAACPHAGAKSFYKNLIWLVKKGNSYPKLSKSYINDKGKEVLVLWGIHHPSTSADQQSLYQNADAYVFVGTSRYSKKFKPEIAIRPKVRDQEGRMNYYWTLVEPGDKITFEATGNLVVPRYAFAMERNAGSGIIISDTPVHDCNTTCQTPKGAINTSLPFQNIHPITIGKCPKYVKSTKLRLATGLRNVPSIQSRGLFGAIAGFIEGGWTGMVDGWYGYHHQNEQGSGYAADLKSTQNAIDEITNKVNSVIEKMNTQFTAVGKEFNHLEKRIENLNKKVDDGFLDIWTYNAELLVLLENERTLDYHDSNVKKLYEKVRSQLKNNAKEIGNGCFEFYHKCDNTCMESVKNGTYDYPKYSEEAKLNREEIDGVKLESTRIYQILAIYSTVASSLVLVVSLGAISFWMCSNGSLQCRICI

SEQ ID NO: 5934 - protein, 566 aa, synthetic construct; identical to SEQ ID NO: 4296
  REGION 1..566: note = hemagglutinin__InfluenzaA__ADM95860

SEQ ID NO: 5935 - protein, 566 aa, synthetic construct; identical to SEQ ID NO: 5896
  REGION 1..566: note = hemagglutinin__InfluenzaA__ADM95862

SEQ ID NO: 5936 - protein, 566 aa, synthetic construct
  REGION 1..566: note = hemagglutinin__InfluenzaA__ADM95864
MKAILVVLLYTFATANADTLCIGYHANNSTDTVDTVLEKNVTVTHSVNLLEDKHNGKLCKLRGVAPLHLGKCNIAGWILGNPECESLSTASSWSYIVETSSSDNGTCYPGDFIDYEELREQLSSVSSFERFEIFPKTSSWPNHDSNKGVTAACPHAGAKSFYKNLIWLVKKGNSYPKLSKSYINDKGKEVLVLWGIHHPSTSADQQSLYQNADAYVFVGTSRYSKKFKPEIAIRPRVRDQEGRMNYHWTLVEPGDKITFEATGNLVVPRYAFAMERNAGSGIIISDTPVHDCNTTCQTPKGAINTSLPFQNIHPITIGKCPKYVKSTKLRLATGLRNIPSIQSRGLFGAIAGFIEGGWTGMVDGWYGYHHQNEQGSGYAADLKSTQNAIDEITNKVNSVIEKMNTQFTAVGKEFNHLEKRIENLNKKVDDGFLDIWTYNAELLVLLENERTLDYHDSNVKNLYEKVRSQLKNNAKEIGNGCFEFYHKCDNTCMESVKNGTYDYPKYSEEAKLNREEIDGVKLESTRIYQILAIYSTVASSLVLVVSLGAISFWMCSNGSLQCRICI

SEQ ID NO: 5937 - protein, 566 aa, synthetic construct; identical to SEQ ID NO: 4221
  REGION 1..566: note = hemagglutinin__InfluenzaA__ADM95865

SEQ ID NO: 5938 - protein, 566 aa, synthetic construct
  REGION 1..566: note = hemagglutinin__InfluenzaA__ADM95866
MKAILVVLLYTFATTNADTLCIGYHANNSTDTVDTVLEKNVTVTHSVNLLEDKHNGKLCKLRGVAPLHLGKCNIAGWILGNPECESLSTASSWSYIVEISSSDNGTCYPGDFIDYEELREQLSSVSSFERFEIFPKTSSWPNHDSNKGVTAACPHAGAKSFYKNLIWLVKKGNSYPKLSKSYINDKGKEVLVLWGIHHPSTSADQQSLYQNADAYVFVGTSRYSKKFKPEIAIRPKVRDQEGRMNYYWTLVEPGDKITFEATGNLVVPRYAFAMERNAGSGIIISDTPVHDCNTTCQTPKGAINTSLPFQNIHPITIGKCPKYVKSTKLRLVTGLRNVPSIQSRGLFGAIAGFIEGGWTGMVDGWYGYHHQNEQGSGYAADLKSTQNAIDKITNKVNSVIEKMNTQFTAVGKEFNHLEKRIENLNKKVDDGFLDIWTYNAELLVLLENERTLDYHDSNVKNLYEKVRSQLKNNAKEIGNGCFEFYHKCDNTCMESVKNGTYDYPKYSEEAKLNREEIDGVKLESTRIYQILAIYSTAASSLVLVVSLGAISFWMCSNGSLQCRICI

SEQ ID NO: 5939 - protein, 565 aa, synthetic construct; identical to SEQ ID NO: 5513
  REGION 1..565: note = hemagglutinin__InfluenzaA__ADN06300

SEQ ID NO: 5940 - protein, 565 aa, synthetic construct
  REGION 1..565: note = hemagglutinin__InfluenzaA__ADN06311
MKVKLLVLLCTLTATYADTICIGYHANNSTDTVDTVLEKNVTVTHSVNLLENSHNGKLCLLKGIAPLQLGNCSVAGWILGNPECELLISKESWSYIVEKPNPENGTCYPGHFADYEELREQLSSVSSFERFEIFPKGSSWPNHTVTGVSASCSHNGENSFYRNLLWLTGKNGLYPNLSKSYANNKEKEVLVLWGVHHPPNIADQKTLYHTENAYVSVVSSHYSRKFTPEIAKRPKVRDQEGRINYYWTLLEPGDTIIFEANGNLIAPRYAFALSRGFGSGIINSNAPMDKCDAKCQTPQGAINSSLPFQNVHPVTIGECPKYVRSAKLRMVTGLRNIPSIQSRGLFGAIAGFIEGGWTGMVDGWYGYHHQNEQGSGYAADQKSTQNAINGITNKVNSVIEKMNTQFTAVGKEFNKLERRMENLNKKVDDGFIDIWTYNAELLVLLENERTLDFHDSNVKNLYEKVKSQLKNNAKEIGNGCFEFYHKCNDECMESVKNGTYDYPKYSEESKLNREKIDGVKLESMGVYQILAIYSTVASSLVLLVSLGAISFWMCSNGSLQCRICI

SEQ ID NO: 5941 - protein, 565 aa, synthetic construct
  REGION 1..565: note = hemagglutinin__InfluenzaA__ADN06322
MKVKLLVLLCTFTATYADTICIGYHANNSTDTVDTVLEKNVTVTHSVNLLENSHNGKLCLLKGIAPLQLGNCSVAGWILGNPECELLISKESWSYIVEKPNPENGTCYPGHFADYEELREQLSSVSSFERFEIFPKESSWPNHTVTGVSASCSHNGESSFYRNLLWLTGKNGLYPNLSKSYANNKEKEVLVLWGVHHPPNMVDQRTLYRTENAYVSVVSSHYSRKFTPEIAKRPKVRDQEGRINYYWTLLEPGDTIIFEANGNLIAPRYAFALSRGFGSGIINSNAPMGKCDAKCQTPQGAINSSLPFQNVHPVTIGECPKYVRSAKLRMVTGLRNIPSIQSRGLFGAIAGFIEGGWTGMVDGWYGYHHQNEQGSGYAADQKSTQNAINGITNKVNSVIEKMNTQFTAVGKEFNKLERRMENLNKKVDDGFIDIWTYNAELLVLLENERTLDFHDSNVKNLYEKVKSQLKNNAKEIGNGCFEFYHKCNDECMESVKNGTYDYPKYSEESKLNREKIDGVKLESMGVYQILAIYSTVASSLVLLVSLGAISFWMCSNGSLQCRICI

SEQ ID NO: 5942 - protein, 565 aa, synthetic construct
  REGION 1..565: note = hemagglutinin__InfluenzaA__ADN06344
MKVKLLVLLCTFTATYADTICIGYHANNSTDTVDTVLEKNVTVTHSVNLLENSHNGKLCLLKGIAPLQLGNCSVAGWILGNPECELLISKESWSYIVEKPNPENGTCYPGHFADYEELREQLSSVSSFERFEIFPKESSWPNHTVTGVSASCSHNGESSFYRNLLWLTGKNGLYPNLSKSYANNKEKEVLVLWGVHHPPSISDQKTLYHTENAYVSVVSSHYSRKFTPEIAKRPKVRDQEGRINYYWTLLEPGDTIIFEANGNLIAPRYAFALSRGFGSGIINSNAPMDKCDAKCQTPQGAINSSLPFQNVHPVTIGECPKYVRSAKLRMVTGLRNIPSIQSRGLFGAIAGFIEGGWTGMVDGWYGYHHQNEQGSGYAADQKSTQNAINGITNKVNSVIEKMNTQFTAVGKEFNKLERRMENLNKKVDDGFIDIWTYNAELLVLLENERTLDFHDSNVKNLYEKVKSQLKNNAKEIGNGCFEFYHKCNDECMESVKNGTYDYPKYSEESKLNREKIDGVKLESMGVYQILAIYSTVASSLVLLVSLGAISFWMCSNGSLQCRICI

SEQ ID NO: 5943 - protein, 566 aa, synthetic construct; identical to SEQ ID NO: 5533
  REGION 1..566: note = hemagglutinin__InfluenzaA__ADN06366

SEQ ID NO: 5944 - protein, 566 aa, synthetic construct
  REGION 1..566: note = hemagglutinin__InfluenzaA__ADN26165
MKAILVVLLYTFATANADTLCIGYHANNSTDTVDTVLEKNVTVTHSVNLLEGKHNGKLCKLRGVAPLHLGKCNIAGWILGNPECESLSTASSWSYIVETSSSDNGTCYPGDFIDYEELREQLSSVSSFERFEIFPKTSSWPNHDSNKGVTAACPHAGAKSFYKNLIWLIKKGNSYPKLSKSYINDKGKEVLVLWGIHHPSTSADQQSLYQNADAYVFVGTSRYSKKFKPEIAIRPKVRDQEGRMNYYWTLVEPGDKITFEATGNLVVPRYAFAMERNAGSGIIISDTPVHDCNTTCQTPKGAINTSLPFQNIHPITIGKCPKYVKSTKLRLATGLRNIPSIQSRGLFGAIAGFIEGGWTGMVDGWYGYHHQNEQGSGYAADLKSTQNAIDEITNKVNSVIEKMNTQFTAVGKEFNHLEKRIENLNKKVDDGFLDIWTYNAELLVLLENERTLDYHDSNVKNLYEKVRSQLKNNAKEIGNGCFEFYHKCDNTCMESVKNGTYDYPKYSEEAKLNREEIDGVKLESARIYQILAIYSTVASSLVLVVSLGAISFWMCSNGSLQCRICI

SEQ ID NO: 5945 - protein, 566 aa, synthetic construct; identical to SEQ ID NO: 2849
  REGION 1..566: note = hemagglutinin__InfluenzaA__ADN26175

SEQ ID NO: 5946 - protein, 566 aa, synthetic construct
  REGION 1..566: note = hemagglutinin__InfluenzaA__ADN78194
MKAILVVLLYTFATTNADTLCIGYHANNSTDTVDTVLEKNVTVTHSVNLLEDKHNGKLCKLRGVAPLHLGKCNIAGWILGNPECESLSTASSWSYIVETSSSDNGTCYPGDFIDYEELREQLSSVSSFERFEIFPKTSSWPNHDSNKGVTAACPHAGAKSFYKNLIWLVKKGNSYPKLSKSYINDKGKEVLVLWGIHHPSTSADQQSLYQNADAYVFVGTSRYSKKFKPEIAIRPKVRDQEGRMNYYWTLVEPGDKITFEATGNLVVPRYAFAMERNAGSGIIISDTPVHDCNTTCQTPKGAINTSLPFQNIHPITIGKCPKYVKSTKLRLATGLRNVPSIQSRGLFGAIAGFIEGGWTGMVDGWYGYHHQNEQGSGYAADLKSTQNAIDKITNKVNSVIEKMNTQFTAVGKEFNHLEKRIENLNKKVDDGLLDIWTYNAELLVLLENERTLDYHDSNVKNLYEKVRSQLKNNAKEIGNGCFEFYHKCDNTCMESVKNGTYDYPKYSEEAKLNREEIDGVKLESTRIYQILAIYSTVASSLVLVVSLGAISFWMCSNGSLQCRICI

SEQ ID NO: 5947 - protein, 566 aa, synthetic construct; identical to SEQ ID NO: 3833
  REGION 1..566: note = hemagglutinin__InfluenzaA__ADN78195

SEQ ID NO: 5948 - protein, 566 aa, synthetic construct; identical to SEQ ID NO: 4221
  REGION 1..566: note = hemagglutinin__InfluenzaA__ADN78212

SEQ ID NO: 5949 - protein, 566 aa, synthetic construct; identical to SEQ ID NO: 4221
  REGION 1..566: note = hemagglutinin__InfluenzaA__ADN78221

SEQ ID NO: 5950 - protein, 565 aa, synthetic construct; identical to SEQ ID NO: 5940
  REGION 1..565: note = hemagglutinin__InfluenzaA__ADN89050

SEQ ID NO: 5951 - protein, 565 aa, synthetic construct
  REGION 1..565: note = hemagglutinin__InfluenzaA__ADN89061
MKVKLLVLLCTFTATYADTICIGYHANNSTDTVDTVLEKNVTVTHSVNLLENSHNGKLCLLKGIAPLQLGNCSVAGWILGNPECELLISKESWSYIVEKPNPENGTCYPGHFADYEELREQLSSVSSFERFEIFPKESSWPNHTVTGVSASCSHNGESSFYRNLLWLTEKNGLYPNLSKSYANNKEKEVLVLWGVHHPPSISDQKTLYHTENAYVSVVSSHYSRKFTPEIAKRPKVRDQEGRINYYWTLLEPGDTIIFEANGNLIAPRYAFALSRGFGSGIINSNAPMDKCDAKCQTPQGAINSSLPFQNVHPVTIGECPKYVRSAKLRMVTGLRNIPSIQSRGLFGAIAGFIEGGWTGMVDGWYGYHHQNEQGSGYAADQKSTQNAINEITNKVNSVIEKMNTQFTAVGKEFNKLERRMENLNKKVDDGFIDIWTYNAELLVLLENERTLDFHDSNVKNLYEKVKNQLKNNAKEIGNGCFEFYHKCNDECMESVKNGTYDYPKYSEESKLNREKIDGVKLESMGVYQILAIYSTVASSLVLLVSLGAISFWMCSNGSLQCRICI

SEQ ID NO: 5952 - protein, 565 aa, synthetic construct; identical to SEQ ID NO: 5942
  REGION 1..565: note = hemagglutinin__InfluenzaA__ADN89072

SEQ ID NO: 5953 - protein, 565 aa, synthetic construct
  REGION 1..565: note = hemagglutinin__InfluenzaA__ADN89083
MKVKLLVLLCTFTATYADTICIGYHANNSTDTVDTVLEKNVTVTHSVNLLENSHNGKLCLLKGIAPLQLGNCSVAGWILGNPECELLISKESWSYIVEKPNPENGTCYPGHFADYEELREQLSSVSSFERFEIFPKESSWPNHTVTGVSASCSHNGENSFYRNLLWLTGKNGLYPNLSKSYANNKEKEVLVLWGVHHPPNMADQKTLYHTENAYVSVVSSHYSRKFTPEIAKRPKVRDQEGRINYYWTLLEPGDTIIFEANGNLIAPRYAFALSRGFGSGIINSNAPMDKCDAKCQTPQGAINSSLPFQNVHPVTIGECPKYVRSAKLRMVTGLRNIPSIQSRGLFGAIAGFIEGGWTGMVDGWYGYHHQNEQGSGYAADQKSTQNAINGITNKVNSVIEKMNTQFTAVGKEFNKLERRMENLNKKVDDGFIDIWTYNAELLVLLENERTLDFHDSNVKNLYEKVKSQLKNNAKEIGNGCFEFYHKCNDECMESVKNGTYDYPKYSEESKLNREKIDGVKLESMGVYQILAIYSTVASSLVLLVSLGAISFWMCSNGSLQCRICI

SEQ ID NO: 5954 - protein, 565 aa, synthetic construct
  REGION 1..565: note = hemagglutinin__InfluenzaA__ADN89094
MKVKLLVLLCTFTATYADTICIGYHANNSTDTVDTALEKNVTVTHSVNLLENSHNGKLCLLKGIAPLQLGNCSVAGWILGNPECELLISKESWSYIVEKPNPENGTCYPGHFADYEELREQLSSVSSFERFEIFPKESSWPNHTVTGVSASCSHNGENSFYRNLLWLTGKNGLYPNLSKSYANNKGKEVLVLWGVHHPPNIADQKTLYHTENAYVSVVSSHYSRKFTPEIAKRPKVRDQEGRINYYWTLLEPGDTIIFEANGNLIAPRYAFALSRGFGSGIINSNAPMDKCDAKCQTPQGAINSSLPFQNVHPVTIGECPKYVRSAKLRMVTGLRNIPSIQSRGLFGAIAGFIEGGWTGMVDGWYGYHHQNEQGSGYAADQKSTQNAINGITNKVNSVIEKMNTQFTAVGKEFNKLERRMENLNKKVDDGFIDIWTYNAELLVLLENERTLDFHDSNVKNLYEKVKSQLKNNAKEIGNGCFEFYHKCNDECMESVKNGTYDYPKYSEESKLNREKIDGVKLESMGVYQILAIYSTVASSLVLLVSLGAISFWMCSNGSLQCRICI

SEQ ID NO: 5955 - protein, 565 aa, synthetic construct
  REGION 1..565: note = hemagglutinin__InfluenzaA__ADN89116
MKVKLLILLCTFTATYADTICIGYHANNSTDTVDTVLEKNVTVTHSVNLLENSHNGKLCLLKGIAPLQLGNCSVAGWILGNPECELLISKESWSYIVEKPNPENGTCYPGHFADYEELREQLSSVSSFERFEIFPKESSWPNHTVTGVSASCSHNGESSFYRNLLWLTVKNGLYPNLSKSYANNKEKEVLVLWGVHHPPNIVDQKTLYRTENAYVSVVSSHYSRKFTPEIAKRPKVRDQEGRINYYWTLLEPGDTIIFEANGNLIAPRYAFALSRGFGSGIINSNAPMDKCDAKCQTPRGAINSSLPFQNVHPVTIGECPKYVRSAKLRMVTGLRNIPSIQSRGLFGAIAGFIEGGWTGMVDGWYGYHHQNEQGSGYAADQKSTQNAINGITNKVNSVIEKMNTQFTAVGKEFNNLERRMENLNKKVDDGFIDIWTYNAELLVLLENERTLDFHDSNVKNLYEKVKSQLKNNAKEIGNGCFEFYHKCNDECMESVKNGTYDYPKYSEESKLNREKIDGVKLESMGVYQILAIYSTVASSLVLLVSLGAISFWMCSNGSLQCRICI

SEQ ID NO: 5956 - protein, 565 aa, synthetic construct
  REGION 1..565: note = hemagglutinin__InfluenzaA__ADN89127
MKVKLLVLLCTLTATYADTICIGYHANNSTDTVDTVLEKNVTVTHSVNLLENSHNGKLCLLKGIAPLQLGNCSVAGWILGNPECELLISKESWSYIVEKPNPENGTCYPGHFADYEELREQLSSVSSFERFEIFPKGSSWPNHTVTGVSASCSHNGENSFYRNLLWLTGKNGLYPNLSKSYANNKEKEVLVLWGVHHPPNIADQKTLYHTENAYVSVVSSHYSRKFTPEIAKRPKVRDQEGRINYYWTLLEPGDTIIFEANGNLIAPRYAFALSRGFGSGIINSNAPMDKCDAKCQTPQGAINSSLPFQNVHPVTIGECPKYVRSAKLRMVTGLRNIPSIQSRGLFGAIAGFIEGGWTGMVDGWYGYHHQNEQGSGYAADQKSTQNAINGITNKVNSVIEKMNTQFTAVGKEFNKLERRMENLNKKVDDGFIDIWTYNAELLVLLENERTLDFHDSNVKNLYEKVKSQLKNNAEEIGNGCFEFYHKCNDECMESVKNGTYDYPKYSEESKLNREKIDGVKLESMGVYQILAIYSTVASSLVLLVSLGAISFWMCSNGSLQCRICI

SEQ ID NO: 5957 - protein, 565 aa, synthetic construct
  REGION 1..565: note = hemagglutinin__InfluenzaA__ADN89149
MKVKLLVLLCTFTATYADTICIGYHANNSTDTVDTVLEKNVTVTHSVNLLENSHNGKLCLLKGIAPLQLGNCSVAGWILGNPECELLISKESWSYIVEKPNPENGTCYPGHFADYEELREQLSSVSSFERFEIFPKESSWPNHTVTGVSASCSHNGESSFYRNLLWLTEKNGLYPNLSKSYANNKEKEVLVLWGVHHPPSISDQKTLYHTENAYVSVVSSHYSRKFTPEVAKRPKVRDQEGRINYYWTLLEPGDTIIFEANGNLIAPRYAFALSRGFGSGIINSNAPMDKCDAKCQTPQGAINSSLPFQNVHPVTIGECPKYVRSAKLRMVTGLRNIPSIQSRGLFGAIAGFIEGGWTGMVDGWYGYHHQNEQGSGYAADQKSTQNAINGITNKVNSVIEKMNTQFTAVGKEFNKLERRMENLNKKVDDGFIDIWTYNAELLVLLENERTLDFHDSNVKNLYEKVKSQLKNNAKEIGNGCFEFYHKCNDECMESVKNGTYDYPKYSEESKLNREKIDGVKLESMGVYQILAIYSTVASSLVLLVSLGAISFWMCSNGSLQCRICI

SEQ ID NO: 5958 - protein, 565 aa, synthetic construct; identical to SEQ ID NO: 5513
  REGION 1..565: note = hemagglutinin__InfluenzaA__ADN89171

SEQ ID NO: 5959 - protein, 565 aa, synthetic construct
  REGION 1..565: note = hemagglutinin__InfluenzaA__ADN89182
MKVKLLVLLCTLTATYADTICIGYHANNSTDTVDTVLEKNVTVTHSVNLLENSHNGKLCLLKGIAPLQLGNCSVAGWILGNPECELLISKESWSYIVEKPNPENGTCYPGHFADYEELREQLSSVSSFERFEIFPKESSWPNHTVTGVSASCSHNGESSFYRNLLWLTGKNGLYPNLSKSYANNKEKEVLVLWGVHHPPNIVDQKTLYRTENAYVSVVSSHYSRKFTPEIAKRPKVRDQEGRINYYWTLLEPGDTIIFEANGNLIAPRYAFALSRGFGSGIINSNAPMDKCDAKCQTPQGAINSSLPFQNVHPVTIGECPKYVRSAKLRMVTGLRNIPSIQSRGLFGAIAGFIEGGWTGMVDGWYGYHHQNEQGSGYAADQKSTQNAINGITNKVNSVIEKMNTQFTAVGKEFNKLERRMENLNKKVDDGFIDIWTYNAELLVLLENERTLDFHDSNVKNLYEKVKSQLKNNAKEIGNGCFEFYHKCNDECMESVKNGTYDYPKYSEESKLNREKIDGVKLESMGVYQILAIYSTVASSLVLLVSLGAISFWMCSNGSLQCRICI

SEQ ID NO: 5960 - protein, 565 aa, synthetic construct; identical to SEQ ID NO: 5513
  REGION 1..565: note = hemagglutinin__InfluenzaA__ADN89193

SEQ ID NO: 5961 - protein, 565 aa, synthetic construct; identical to SEQ ID NO: 5513
  REGION 1..565: note = hemagglutinin__InfluenzaA__ADN89204

SEQ ID NO: 5962 - protein, 565 aa, synthetic construct; identical to SEQ ID NO: 5940
  REGION 1..565: note = hemagglutinin__InfluenzaA__ADN89215

SEQ ID NO: 5963 - protein, 565 aa, synthetic construct
  REGION 1..565: note = hemagglutinin__InfluenzaA__ADN89226
MKVKLLVLLCTFAATYADTICIGYHANNSTDTVDTVLEKNVTVTHSVNLLENSHNGKLCLLKGIAPLQLGNCSVAGWILGNPECELLISKESWSYIVEKPNPENGTCYPGHFADYEELREQLSSVSSFERFEIFPKESSWPNHTVTGVSASCSHNGESSFYRNLLWLTEKNGLYPNLSKSYANNKEKEVLVLWGVHHPPSISDQKTLYHTENAYVSVVSSHYSRKFTPEIAKRPKVRDQEGRINYYWTLLEPGDTIIFEANGNLIAPRYAFALNRGFGSGIINSNAPMDKCDAKCQTPQGAINSSLPFQNVHPVTIGECPKYVRSAKLRMVTGLRNIPSVQSRGLFGAIAGFIEGGWTGMVDGWYGYHHQNEQGSGYAADQKSTQNAINGITNKVNSVIEKMNTQFTAVGKEFNKLERRMENLNKKVDDGFIDIWTYNAELLVLLENERTLDFHDSNVKNLYEKVKNQLKNNAKEIGNGCFEFYHKCNDECMESVKNGTYDYPKYSEESKLNREKIDGVKLESMGVYQILAIYSTVASSLVLLVSLGAISFWMCSNGSLQCRICI

SEQ ID NO: 5964 - protein, 565 aa, synthetic construct; identical to SEQ ID NO: 5940
  REGION 1..565: note = hemagglutinin__InfluenzaA__ADN89237

SEQ ID NO: 5965 - protein, 565 aa, synthetic construct
  REGION 1..565: note = hemagglutinin__InfluenzaA__ADN89248
MKVKLLVLLCTFTATYADTICIGYHANNSTDTVDTVLEKNVTVTHSVNLLENSHNGKLCLLKGIAPLQLGNCSIAGWILGNPECELLISKESWSYIVEKPNPENGTCYPGHFADYEELREQLSSVSSFERFEIFPKESSWPNHTVTGVSASCSHNGESSFYRNLLWLTGKNGLYPNLSKSYANNKEKEVLVLWGVHHPPSISDQKTLYHTENAYVSVVSSHYSRKFTPEIAKRPKVRDQEGRINYYWTLLEPGDTIIFEANGNLIAPRYAFALSRGFGSGIINSNAPMDKCDAKCQTPQGAINSSLPFQNVHPVTIGECPKYVRSAKLRMVTGLRNIPSIQSRGLFGAIAGFIEGGWTGMVDGWYGYHHQNEQGSGYAADQKSTQNAINGITNKVNSVIEKMNTQFTAVGKEFNKLERRMENLNKKVDDGFIDIWTYNAELLVLLENERTLDFHDSNVKNLYEKVKSQLKNNAKEIGNGCFEFYHKCNDECMESVKNGTYDYPKYSEESKLNREKIDGVKLESMGVYQILAIYSTVASSLVLLVSLGAISFWMCSNGSLQCRICI

SEQ ID NO: 5966 - protein, 565 aa, synthetic construct; identical to SEQ ID NO: 5953
  REGION 1..565: note = hemagglutinin__InfluenzaA__ADN89259

SEQ ID NO: 5967 - protein, 565 aa, synthetic construct
  REGION 1..565: note = hemagglutinin__InfluenzaA__ADN89281
MKVKLLVLLCTFTATYADTICIGYHANNSTDTVDTVLEKNVTVTHSVNLLENSHNGKLCLLKGIAPLQLGNCSVAGWILGNPECELLISKESWSYIVEKPNPENGTCYPGHFADYEELREQLSSVSSFERFEIFPKESSWPNHTVTGVSASCSHNGESSFYRNLLWLTEKNGLYPNLSKSYANNKEKEVLVLWGVHHPPSISDQKTLYHTENAYVSVVSSHYSRKFTPEIAKRPKVRDQEGRINYYWTLLEPGDTIIFEANGNLIAPRYAFALSRGFGSGIINSNAPMDKCDAKCQTPQGAINSSLPFQNVHPVTIGECPKYVRSAKLRMVTGLRNIPSIQSRGLFGAIAGFIEGGWTGMVDGWYGYHHQNEQGSGYAADQKSTQNAINGITNKVNSVIEKMNTQFTAVGKEFNKLERRMENLNKKVDDGFIDIWTYNAELLVLLENERTLDFHDSNVKNLYEKVKNQLKNNAKEIGNGCFEFYHKCNDECMESVKNGTYDYPKYSEESKLNREKIDGVKLESMGVYQILAIYSTVASSLVLLVSLGAISFWMCSNGSLQCRICI

SEQ ID NO: 5968 - protein, 565 aa, synthetic construct; identical to SEQ ID NO: 5967
  REGION 1..565: note = hemagglutinin__InfluenzaA__ADN89292

SEQ ID NO: 5969 - protein, 565 aa, synthetic construct; identical to SEQ ID NO: 5967
  REGION 1..565: note = hemagglutinin__InfluenzaA__ADN89303

SEQ ID NO: 5970 - protein, 565 aa, synthetic construct; identical to SEQ ID NO: 3626
  REGION 1..565: note = hemagglutinin__InfluenzaA__ADN89314

SEQ ID NO: 5971 - protein, 565 aa, synthetic construct; identical to SEQ ID NO: 3131
  REGION 1..565: note = hemagglutinin__InfluenzaA__ADN89325

SEQ ID NO: 5972 - protein, 565 aa, synthetic construct
  REGION 1..565: note = hemagglutinin__InfluenzaA__ADN89336
MKVKLLVLLCTFTATYADTICIGYHANNSTDTVDTVLEKNVTVTHSVNLLENSHNGKLCLLKGIAPLQLGNCSVAGWILGNPECELLISKESWSYIVEKPNPENGTCYPGHFADYEELREQLSSVSSFERFEIFPKESSWPNHTVTGVSASCSHNGERSFYRNLLWLTGKNGLYPNLSKSYANNKEKEVLVLWGVHHPPDIGDQKTLYHTENAYVSVVSSHYSRKFTPEIAKRPKVRDQEGRINYYWTLLEPGDTIIFEANGNLIAPRYAFALSRGFGSGIINSNAPMDKCDAKCQTPQGAINSSLPFQNVHPVTIGECPKYVRSAKLRMVTGLRNIPSIQSRGLFGAIAGFIEGGWTGMVDGWYGYHHQNEQGSGYAADQKSTQNAINGITNKVNSVIEKMNTQFTAVGKEFNKLERRMENLNKKVDDGFIDIWTYNAELLVLLENERTLDFHDSNVKNLYEKVKSQLKNNAKEIGNGCFEFYHKCNDECMESVKNGTYDYPKYSEESKLNREKIDGVKLESMGVYQILAIYSTVASSLVLLVSLGAISFWMCSNGSLQCRICI

SEQ ID NO: 5973 - protein, 565 aa, synthetic construct; identical to SEQ ID NO: 5963
  REGION 1..565: note = hemagglutinin__InfluenzaA__ADN89347

SEQ ID NO: 5974 - protein, 565 aa, synthetic construct; identical to SEQ ID NO: 3131
  REGION 1..565: note = hemagglutinin__InfluenzaA__ADN89358

SEQ ID NO: 5975 - protein, 565 aa, synthetic construct
  REGION 1..565: note = hemagglutinin__InfluenzaA__ADN89369
MKVKLLVLLCTFTATYADTICIGYHANNSTDTVDTVLEKNVTVTHSVNLLENSHNGKLCLLKGIAPLQLGNCSVAGWILGNPECELLISKESWSYIVEKPNPENGTCYPGHFADYEELREQLSSVSSFERFEIFPKESSWPNHTVTGVSASCSHNGESSFYRNLLWLTVKNGLYPNLSKSYANNKEKEVLVLWGVHHPPNIVDQKTLYRTENAYVSVVSSHYSRKFIPEIAKRPKVRDQEGRINYYWTLLEPGDTIIFEANGNLIAPRYAFALSRGFGSGIINSNAPMDKCDAKCQTPRGAINSSLPFQNVHPVTIGECPKYVRSAKLRMVTGLRNIPSIQSRGLFGAIAGFIEGGWTGMVDGWYGYHHQNEQGSGYAADQKSTQNAINGITNKVNSVIEKMNTQFTAVGKEFNKLERRMENLNKKVDDGFIDIWTYNAELLVLLENERTLDFHDSNVKNLYEKVKSQLKNNAKEIGNGCFEFYHKCNDECMESVKNGTYDYPKYSEESKLNREKIDGVKLESMGVYQILAIYSTVASSLVLLVSLGAISFWMCSNGSLQCRICI

SEQ ID NO: 5976 - protein, 565 aa, synthetic construct
  REGION 1..565: note = hemagglutinin__InfluenzaA__ADN89380
MKVKLLVLLCTLTATYADTICIGYHANNSTDTVDTVLEKNVTVTHSVNLLENSHNGKLCLLKGIAPLQLGNCSVAGWILGNPECELLISKESWSYIVEKPNPENGTCYPGHFADYEELREQLSSVSSFERFEIFPKESSWPNHTVTGVSASCSHNGESSFYRNLLWLTGKNGLYPNLSKSYANNKEKEVLVLWGVHHPPNIVDQKTLYRTENAYVSVVSSHYSRKFTPEIAKRPKVRDQEGRINYYWTLLEPGDTIIFEANGNLIAPRYAFALSRGFGSGIINSNAPMDKCDAKCQTPQGAINSSLPFQNVHPVTIGECPKYVRSAKLRMVTGLRNIPSIQSRGLFGAIAGFIEGGWTGMVDGWYGYHHQNEQGSGYAADQKSTQNAINGITNKVNSVIEKMNTQFTAVGKEFNKLERRMENLNKKVDDGFIDIWTYNAELLVLLENERTLDFHDSNVKNLYEKVKSQLKNNAKEIGNGCFEFYHKCNNECMESVKNGTYDYPKYSEESKLNREKIDGVKLESMGVYQILAIYSTVASSLVLLVSLGAISFWMCSNGSLQCRICI

SEQ ID NO: 5977 - protein, 565 aa, synthetic construct
  REGION 1..565: note = hemagglutinin__InfluenzaA__ADN89391
MKVKLLVLLCTFTATYADTICIGYHANNSTDTVDTVLEKNVTVTHSVNLLENSHNGKLCLLKGIAPLQLGNCSVAGWILGNPECELLISKESWSYIVEKPNPENGTCYPGHFADYEELREQLSSVSSFERFEIFPKESSWPNHTVTGVSASCSHNGERSFYKNLLWLTGKNGLYPNLSKSYANNKEKEVLVLWGVHHPPDIGDQKTLYHTENAYVSVVSSHYSRKFTPEIAKRPKVRDQEGRINYYWTLLEPGDTIIFEANGNLIAPRYAFALSRGFGSGIINSNAPMDKCDAKCQTPQGAINSSLPFQNVHPVTIGECPKYVRSAKLRMVTGLRNIPSIQSRGLFGAIAGFIEGGWTGMVDGWYGYHHQNEQGSGYAADQKSTQNAINGITNKVNSVIEKMNTQFTAVGKEFNKLERRMENLNKKVDDGFIDIWTYNAELLVLLENERTLDFHDSNVKNLYEKVKSQLKNNAKEIGNGCFEFYHKCNDECMESVKNGTYDYPKYSEESKLNREKIDGVKLESMGVYQILAIYSTVASSLVLLVSLGAISFWMCSNGSLQCRICI

SEQ ID NO: 5978 - protein, 565 aa, synthetic construct
  REGION 1..565: note = hemagglutinin__InfluenzaA__ADN89402
MKVKLLVLLCTFTATYADTICIGYHANNSTDTVDTVLEKNVTVTHSVNLLENSHNGKLCLLKGIAPLQLGNCSVAGWILGNPECELLISKKSWSYIVEKPNPENGTCYPGHFADYEELKEQLSSVSSFERFEIFPKESSWPNHTVTGVSASCSHNGESSFYRNLLWLTGKNGLYPNLSKSYANNKEKEVLVLWGVHHPPNIVDQKTLYRTENAYVSVVSSHYSRKFTPEIAKRPKVRDQEGRINYYWTLLEPGDTIIFEANGNLIAPRYAFALSRGFGSGIINSNAPMGKCDAKCQTPQGAINSSLPFQNVHPVTIGECPKYVRSAKLRMVTGLRNIPSIQSRGLFGAIAGFIEGGWTGMVDGWYGYHHQNEQGSGYAADQKSTQNAINGITNKVNSVIEKMNTQFTAVGKEFNKLERRMENLNKKVDDGFIDIWTYNAELLVLLENERTLDFHDSNVKNLYEKVKSQLKNNAKEIGNGCFEFYHKCNDECMESVKNGTYDYPKYSEESKLNREKIDGVKLESMGVYQILAIYSTVASSLVLLVSLGAISFWMCSNGSLQCRICI

SEQ ID NO: 5979 - protein, 565 aa, synthetic construct; identical to SEQ ID NO: 5940
  REGION 1..565: note = hemagglutinin__InfluenzaA__ADN89413

SEQ ID NO: 5980 - protein, 565 aa, synthetic construct; identical to SEQ ID NO: 5513
  REGION 1..565: note = hemagglutinin__InfluenzaA__ADN89424

SEQ ID NO: 5981 - protein, 565 aa, synthetic construct
  REGION 1..565: note = hemagglutinin__InfluenzaA__ADN89435
MKVKLLVLLCTFTATYADTICIGYHANNSTDTVDTVLEKNVTVTHSVNLLENSHNGKLCLLKGIAPLQLGNCSVAGWILGNPECELLISKESWSYIVEKPNPENGTCYPGHFADYEELREQLSSVSSFERFEIFPKESSWPNHTVTGVSASCSHNGENSFYRNLLWLTGKNGLYPNLSKSYANNKEKEVLVLWGVHHPPNIADQKTLYHTENAYVSVVSSHYSRKFTPEIAKRPKVRDQEGRINYYWTLLEPGDTIIFEANGNLIAPRYAFALSRGFGSGIINSNAPMDKCDAKCQTPQGAINSSLPFQNVHPVTIGECPKYVRSAKLRMVTGLRNIPSIQSRGLFGAIAGFIEGGWTGMVDGWYGYHHQNEQGSGYAADQKSTQNAINGITNKVNSVIEKMNTQFTAVGKEFNKLERRMENLNKKVDDGFIDIWTYNAELLVLLENERTLDFHDSNVKNLYEKVKSQLKNNAKEIGNGCFEFYHKCNDECMESVKNGTYDYPKYSEESRLNREKIDGVKLESMGVYQILAIYSTVASSLVLLVSLGAISFWMCSNGSLQCRICI

SEQ ID NO: 5982 - protein, 565 aa, synthetic construct
  REGION 1..565: note = hemagglutinin__InfluenzaA__ADN89446
MKAKLLVLLCTFTATYADTICIGYHANNSTDTVDTVLEKNVTVTHSVNLLENSHNGKLCLLKGIAPLQLGNCSVAGWILGNPECELLISKESWSYIVEKPNPENGTCYPGHFADYEELREQLSSVSSFERFEIFPKESSWPNHTVTGVSASCSHNGENSFYRNLLWLTGKNGLYPNLSKSYANNKEKEVLVLWGVHHPPNIADQKTLYHTENAYVSVVSSHYSRKFTPEIAKRPKVRDQEGRINYYWTLLEPGDTIIFEANGNLIAPRYAFALSRGFGSGIINSNAPMDKCDAKCQTPQGAINSSLPFQNVHPVTIGECPKYVRSAKLRMVTGLRNIPSIQSRGLFGAIAGFIEGGWTGMVDGWYGYHHQNEQGSGYAADQKSTQNAINGITNKVNSVIEKMNTQFTAVGKEFNKLERRMENLNKKVDDGFIDIWTYNAELLVLLENERTLDFHDSNVKNLYEKVKSQLKNNAKEIGNGCFEFYHKCNDECMESVKNGTYDYPKYSEESKLNREKIDGVKLESMGVYQILAIYSTVASSLVLLVSLGAISFWMCSNGSLQCRICI

SEQ ID NO: 5983 - protein, 565 aa, synthetic construct; identical to SEQ ID NO: 5513
  REGION 1..565: note = hemagglutinin__InfluenzaA__ADN89457

SEQ ID NO: 5984 - protein, 565 aa, synthetic construct
  REGION 1..565: note = hemagglutinin__InfluenzaA__ADN89468
MKVKLLVLLCTFTATYADTICIGYHANNSTDTVDTVLEKNVTVTHSVNLLENSHNGKLCLLKGIAPLQLGNCSVAGWILGNPECELLISKESWSYIVEKPNPENGTCYPGHFADYEELREQLSSVSSFERFEIFPKDSSWPNHTVTGVSASCSHNGESSFYRNLLWLTGKNGLYPNLSKSYANNKEKEVLVLWGVHHPPSINDQKTLYHTENAYVSVVSSHYSRKFTPEIAKRPKVRDQEGRINYYWTLLEPGDTIIFEANGNLIAPRYAFALSRGFGSGIINSNAPMDKCDAKCQTPQGAINSSLPFQNVHPVTIGECPKYVRSAKLRMVTGLRNIPSIQSRGLFGAIAGFIEGGWTGMVDGWYGYHHQNEQGSGYAADQKSTQNAINGITNKVNSVIEKMNTQFTAVGKEFSKLERRMENLNKKVDDGFIDIWTYNAELLVLLENERTLDFHDSNVKNLYEKVKSQLKNNAKEIGNGCFEFYHKCNDECMESVKNGTYDYPKYSEESKLNREKIDGVKLESMGVYQILTIYSTVASSLVLLISLGAISFWMCSNGSLQCRICI

SEQ ID NO: 5985 - protein, 565 aa, synthetic construct; identical to SEQ ID NO: 5942
  REGION 1..565: note = hemagglutinin__InfluenzaA__ADN89479

SEQ ID NO: 5986 - protein, 565 aa, synthetic construct; identical to SEQ ID NO: 5942
  REGION 1..565: note = hemagglutinin__InfluenzaA__ADN89490

SEQ ID NO: 5987 - protein, 565 aa, synthetic construct; identical to SEQ ID NO: 5965
  REGION 1..565: note = hemagglutinin__InfluenzaA__ADN89501

SEQ ID NO: 5988 - protein, 565 aa, synthetic construct; identical to SEQ ID NO: 5953
  REGION 1..565: note = hemagglutinin__InfluenzaA__ADN89512

SEQ ID NO: 5989 - protein, 565 aa, synthetic construct; identical to SEQ ID NO: 5967
  REGION 1..565: note = hemagglutinin__InfluenzaA__ADN89523

SEQ ID NO: 5990 - protein, 565 aa, synthetic construct; identical to SEQ ID NO: 5976
  REGION 1..565: note = hemagglutinin__InfluenzaA__ADN89534

SEQ ID NO: 5991 - protein, 565 aa, synthetic construct; identical to SEQ ID NO: 5981
  REGION 1..565: note = hemagglutinin__InfluenzaA__ADN89545

SEQ ID NO: 5992 - protein, 565 aa, synthetic construct; identical to SEQ ID NO: 3626
  REGION 1..565: note = hemagglutinin__InfluenzaA__ADN89556

SEQ ID NO: 5993 - protein, 565 aa, synthetic construct; identical to SEQ ID NO: 5942
  REGION 1..565: note = hemagglutinin__InfluenzaA__ADN89567

SEQ ID NO: 5994 - protein, 565 aa, synthetic construct
  REGION 1..565: note = hemagglutinin__InfluenzaA__ADN89578
MKVKLLVLLCTLTATYADTICIGYHANNSTDTVDTVLEKNVTVTHSVNLLENSHNGKLCLLKGIAPLQLGNCSVAGWILGNPECELLISKESWSYIVEKPNPENGTCYPGHFADYEELREQLSSVSSFERFEIFPKGSSWPNHTVTGVSASCSHNGENSFYRNLLWLTGKNGLYPNLSKSYANNKEKEVLLLWGVHHPPNIADQKTLYHTENAYVSVVSSHYSRKFTPEIAKRPKVRDQEGRINYYWTLLEPGDTIIFEANGNLIAPRYAFALSRGFGSGIINSNAPMDKCDAKCQTPQGAINSSLPFQNVHPVTIGECPKYVRSAKLRMVTGLRNIPSIQSRGLFGAIAGFIEGGWTGMVDGWYGYHHQNEQGSGYAADQKSTQNAINGITNKVNSVIEKMNTQFTAVGKEFNKLERRMENLNKKVDDGFIDIWTYNAELLVLLENERTLDFHDSNVKNLYEKVKSQLKNNAKEIGNGCFEFYHKCNDECMESVKNGTYDYPKYSEESKLNREKIDGVKLESMGVYQILAIYSTVASSLVLLVSLGAISFWMCSNGSLQCRICI

SEQ ID NO: 5995 - protein, 565 aa, synthetic construct; identical to SEQ ID NO: 5513
  REGION 1..565: note = hemagglutinin__InfluenzaA__ADN89589

SEQ ID NO: 5996 - protein, 565 aa, synthetic construct
  REGION 1..565: note = hemagglutinin__InfluenzaA__ADN89600
MKVKLLVLLCTFTATYADTICIGYHANNSTDTVDTVLEKNVTVTHSVNLLENSHNGKLCLLKGIAPLQLGNCSVAGWILGNPECELLISKESWSYIVEKPNPENGTCYPGHFADYEELREQLSSVSSFERFEIFPKESSWPNHTVTGVSASCSHNGESSFYRNLLWLTRKNGLYPNLSKSYANNKEKEVLVLWGVHHPPNMVDQKTLYRTENAYVSVVSSHYSRKFTPEIAKRPKVRDQEGRINYYWTLLEPGDTIIFEANGNLIAPRYAFALSRGFGSGIINSNAPMGKCDAKCQTPQGAINSSLPFQNVHPVTIGECPKYVRSAKLRMVTGLRNIPSIQSRGLFGAIAGFIEGGWTGMVDGWYGYHHQNEQGSGYAADQKSTQNAINGITNKVNSVIEKMNTQFTAVGKEFNKLERRMENLNKKVDDGFIDIWTYNAELLVLLENERTLDFHDSNVKNLYEKVKSQLKNNAKEIGNGCFEFYHKCNDECMESVKNGTYDYPKYSEESKLNREKIDGVKLESMGVYQILAIYSTVASSLVLLVSLGAISFWMCSNGSLQCRICI

SEQ ID NO: 5997 - protein, 565 aa, synthetic construct; identical to SEQ ID NO: 5513
  REGION 1..565: note = hemagglutinin__InfluenzaA__ADN89611

SEQ ID NO: 5998 - protein, 565 aa, synthetic construct; identical to SEQ ID NO: 5940
  REGION 1..565: note = hemagglutinin__InfluenzaA__ADN89622

SEQ ID NO: 5999 - protein, 565 aa, synthetic construct; identical to SEQ ID NO: 5981
  REGION 1..565: note = hemagglutinin__InfluenzaA__ADN89633

SEQ ID NO: 6000 - protein, 565 aa, synthetic construct; identical to SEQ ID NO: 5965
  REGION 1..565: note = hemagglutinin__InfluenzaA__ADN89644

SEQ ID NO: 6001 - protein, 565 aa, synthetic construct; identical to SEQ ID NO: 5981
  REGION 1..565: note = hemagglutinin__InfluenzaA__ADN89655

SEQ ID NO: 6002 - protein, 565 aa, synthetic construct; identical to SEQ ID NO: 5513
  REGION 1..565: note = hemagglutinin__InfluenzaA__ADN89666

SEQ ID NO: 6003 - protein, 565 aa, synthetic construct; identical to SEQ ID NO: 5953
  REGION 1..565: note = hemagglutinin__InfluenzaA__ADN89677

SEQ ID NO: 6004 - protein, 565 aa, synthetic construct; identical to SEQ ID NO: 5953
  REGION 1..565: note = hemagglutinin__InfluenzaA__ADN89688

SEQ ID NO: 6005 - protein, 565 aa, synthetic construct; identical to SEQ ID NO: 5940
  REGION 1..565: note = hemagglutinin__InfluenzaA__ADN89699

SEQ ID NO: 6006 - protein, 565 aa, synthetic construct; identical to SEQ ID NO: 5942
  REGION 1..565: note = hemagglutinin__InfluenzaA__ADN89710

SEQ ID NO: 6007 - protein, 565 aa, synthetic construct; identical to SEQ ID NO: 5965
  REGION 1..565: note = hemagglutinin__InfluenzaA__ADN89721

SEQ ID NO: 6008 - protein, 565 aa, synthetic construct; identical to SEQ ID NO: 5942
  REGION 1..565: note = hemagglutinin__InfluenzaA__ADN89732

SEQ ID NO: 6009 - protein, 565 aa, synthetic construct; identical to SEQ ID NO: 5942
  REGION 1..565: note = hemagglutinin__InfluenzaA__ADN89743

SEQ ID NO: 6010 - protein, 565 aa, synthetic construct; identical to SEQ ID NO: 5967
  REGION 1..565: note = hemagglutinin__InfluenzaA__ADN89765

SEQ ID NO: 6011 - protein, 565 aa, synthetic construct
  REGION 1..565: note = hemagglutinin__InfluenzaA__ADN89776
MKVKLLVLLCTFTATYADTICIGYHANNSTDTVDTVLEKNVTVTHSVNLLENSHNGKLCLLKGIAPLQLGNCSVAGWILGNPECELLISKESWSYIVEKPNPENGTCYPGHFADYEELREQLSSVSSFERFEIFPKESSWPNHTVTGVSASCSHNGESSFYRNLLWLTGKNGLYPNLSKSYANNKEKEVLVLWGVHHPPSISDQKTLYHTENAYVSVVSSHYSRKFTPEVAKRPKVRDQEGRINYYWTLLEPGDTIIFEANGNLIAPRYAFALSRGFGSGIINSNAPMDKCDAKCQTPQGAINSSLPFQNVHPVTIGECPKYVRSAKLRMVTGLRNIPSIQSRGLFGAIAGFIEGGWTGMVDGWYGYHHQNEQGSGYAADQKSTQNAINGITNKVNSVIEKMNTQFTAVGKEFNKLERRMENLNKKVDDGFIDIWTYNAELLVLLENERTLDFHDSNVKNLYEKVKSQLKNNAKEIGNGCFEFYHKCNDECMESVKNGTYDYPKYSEESKLNREKIDGVKLESMGVYQILAIYSTVASSLVLLVSLGAISFWMCSNGSLQCRICI

SEQ ID NO: 6012 - protein, 565 aa, synthetic construct; identical to SEQ ID NO: 5953
  REGION 1..565: note = hemagglutinin__InfluenzaA__ADN89787

SEQ ID NO: 6013 - protein, 565 aa, synthetic construct; identical to SEQ ID NO: 5967
  REGION 1..565: note = hemagglutinin__InfluenzaA__ADN89798

SEQ ID NO: 6014 - protein, 565 aa, synthetic construct; identical to SEQ ID NO: 5513
  REGION 1..565: note = hemagglutinin__InfluenzaA__ADN89809

SEQ ID NO: 6015 - protein, 565 aa, synthetic construct; identical to SEQ ID NO: 5513
  REGION 1..565: note = hemagglutinin__InfluenzaA__ADN89820

SEQ ID NO: 6016 - protein, 565 aa, synthetic construct; identical to SEQ ID NO: 5513
  REGION 1..565: note = hemagglutinin__InfluenzaA__ADN89831

SEQ ID NO: 6017 - protein, 565 aa, synthetic construct
  REGION 1..565: note = hemagglutinin__InfluenzaA__ADN89842
MKVKLLVLLCTFTATYADTICIGYHANNSTDTVDTVLEKNVTVTHSVNLLENRHNGKLCLLKGIAPLQLGNCSVAGWILGNPECELLISKESWSYIVEKPNPENGTCYPGHFADYEELREQLSSVSSFERFEIFPKESSWPNHTVTGVSASCSHNGESSFYRNLLWLTGKNGLYPNLSKSYANNKEKEVLVLWGVHHPPNIVDQKTLYRTENAYVSVVSSHYSRKFTPEIAKRPKVRDQEGRINYYWTLLEPGDTIIFEANGNLIAPRYAFALSRGFGSGIINSNAPMDKCDAKCQTPQGAINSSLPFQNVHPVTIGECPKYVRSAKLRMVTGLRNIPSIQSRGLFGAIAGFIEGGWTGMVDGWYGYHHQNEQGSGYAADQKSTQNAINGITNKVNSVIEKMNTQFTAVGKEFNKLERRMENLNKKVDDGFIDIWTYNAELLVLLENERTLDFHDSNVKNLYEKVKSQLKNNAKEIGNGCFEFYHKCNDECMESVKNGTYDYPKYSEESKLNREKIDGVKLESMGVYQILAIYSTVASSLVLLVSLGAISFWMCSNGSLQCRICI

SEQ ID NO: 6018 - protein, 566 aa, synthetic construct; identical to SEQ ID NO: 5533
  REGION 1..566: note = hemagglutinin__InfluenzaA__ADN89864

SEQ ID NO: 6019 - protein, 566 aa, synthetic construct; identical to SEQ ID NO: 5533
  REGION 1..566: note = hemagglutinin__InfluenzaA__ADN89875

SEQ ID NO: 6020 - protein, 566 aa, synthetic construct
  REGION 1..566: note = hemagglutinin__InfluenzaA__ADN89886
MKTIIALSYILCLVFAQKLPGNDNSTATLCLGHHAVPNGTIVKTITNDQIEVTNATELVQSSSTGEICDSPHQILDGENCTLIDALLGDPQCDGFQNKKWDLFVERSKAYSNCYPYDVPDYASLRSLVASSGTLEFNNESFNWTGVTQNGTSSACIRRSNNSFFSRLNWLTHLNFKYPALNVTMPNNEQFDKLYIWGVHHPGTDKDQIFLYAQASGRITVSTKRSQQAVIPNIGSRPRVRNIPSRISIYWTIVKPGDILLINSTGNLIAPRGYFKIRSGKSSIMRSDAPIGKCNSECITPNGSIPNDKPFQNVNRITYGACPRYVKQSTLKLATGMRNVPEKQTRGIFGAIAGFIENGWEGMVDGWYGFRHQNSEGRGQAADLKSTQAAIDQINGKLNRLIGKTNEKFHQIEKEFSEVEGRIQDLEKYVEDTKIDLWSYNAELLVALENQHTIDLTDSEMNKLFEKTRKQLRENAEDMGNGCFTIYHKCDNACIGSIRNGTYDHNVYRDEALNNRFQIKGVELKSGYKDWILWISFAISCFLLCVALLGFIMWACQKGNIRCNICI

SEQ ID NO: 6021 - protein, 566 aa, synthetic construct; identical to SEQ ID NO: 5533
  REGION 1..566: note = hemagglutinin__InfluenzaA__ADN89897

SEQ ID NO: 6022 - protein, 566 aa, synthetic construct; identical to SEQ ID NO: 5533
  REGION 1..566: note = hemagglutinin__InfluenzaA__ADN89908

SEQ ID NO: 6023 - protein, 566 aa, synthetic construct; identical to SEQ ID NO: 5533
  REGION 1..566: note = hemagglutinin__InfluenzaA__ADN89919

SEQ ID NO: 6024 - protein, 566 aa, synthetic construct; identical to SEQ ID NO: 5533
  REGION 1..566: note = hemagglutinin__InfluenzaA__ADN89930

SEQ ID NO: 6025 - protein, 566 aa, synthetic construct; identical to SEQ ID NO: 5533
  REGION 1..566: note = hemagglutinin__InfluenzaA__ADN89941

SEQ ID NO: 6026 - protein, 566 aa, synthetic construct; identical to SEQ ID NO: 5533
  REGION 1..566: note = hemagglutinin__InfluenzaA__ADN89952

SEQ ID NO: 6027 - protein, 566 aa, synthetic construct; identical to SEQ ID NO: 5533
  REGION 1..566: note = hemagglutinin__InfluenzaA__ADN89963

SEQ ID NO: 6028 - protein, 566 aa, synthetic construct
  REGION 1..566: note = hemagglutinin__InfluenzaA__ADN89974
MKTIIALSYILCLVFAQKLPGNDNSTATLCLGHHAVPNGTIVKTITNDQIEVTNATELVQSSSTGEICDSPHQILDGENCTLIDALLGDPQCDGFQNKKWDLFVERSKAYSNCYPYDVPDYASLRSLVASSGTLEFNNESFNWTGVTQNGTSSACIRRSNNSFFSRLNWLTHLNFKYPALNVTMPNNEQFDKLYIWGVHHPGTDKDQIFLYAQASGRITVSTKRSQQAVIPNIGSRPRVRNIPSRISIYWTIVKPGDILLINSTGNLIAPRGYFKIQSGKSSIMRSDAPIGKCNSECITPNGSIPNDKPFQNVNRITYGACPRYVKQSTLKLATGMRNVPEKQTRGIFGAIAGFIENGWEGMVDGWYGFRHQNSEGRGQAADLKSTQAAIDQINGKLNRLIGKTNEKFHQIEKEFSEVEGRIQDLEKYVEDTKIDLWSYNAELLVALENQHTIDLTDSEMNKLFEKTKKQLRENAEDMGNGCFTIYHKCDNACIGSIRNGTYDHNVYRDEALNNRFQIKGVELKSGYKDWILWISFAISCFLLCVALLGFIMWACQKGNIRCNICI

SEQ ID NO: 6029 - protein, 566 aa, synthetic construct; identical to SEQ ID NO: 5533
  REGION 1..566: note = hemagglutinin__InfluenzaA__ADN89985

SEQ ID NO: 6030 - protein, 566 aa, synthetic construct; identical to SEQ ID NO: 5533
  REGION 1..566: note = hemagglutinin__InfluenzaA__ADN89996

SEQ ID NO: 6031 - protein, 566 aa, synthetic construct; identical to SEQ ID NO: 5533
  REGION 1..566: note = hemagglutinin__InfluenzaA__ADN90007

SEQ ID NO: 6032 - protein, 566 aa, synthetic construct; identical to SEQ ID NO: 5533
  REGION 1..566: note = hemagglutinin__InfluenzaA__ADN90018

SEQ ID NO: 6033 - protein, 566 aa, synthetic construct; identical to SEQ ID NO: 5533
  REGION 1..566: note = hemagglutinin__InfluenzaA__ADN90040

SEQ ID NO: 6034 - protein, 566 aa, synthetic construct; identical to SEQ ID NO: 5533
  REGION 1..566: note = hemagglutinin__InfluenzaA__ADN90051

SEQ ID NO: 6035 - protein, 566 aa, synthetic construct; identical to SEQ ID NO: 5533
  REGION 1..566: note = hemagglutinin__InfluenzaA__ADN90062

SEQ ID NO: 6036 - protein, 566 aa, synthetic construct; identical to SEQ ID NO: 5533
  REGION 1..566: note = hemagglutinin__InfluenzaA__ADN90073

SEQ ID NO: 6037 - protein, 566 aa, synthetic construct; identical to SEQ ID NO: 5533
  REGION 1..566: note = hemagglutinin__InfluenzaA__ADN90084

SEQ ID NO: 6038 - protein, 566 aa, synthetic construct; identical to SEQ ID NO: 5533
  REGION 1..566: note = hemagglutinin__InfluenzaA__ADN90095

SEQ ID NO: 6039 - protein, 566 aa, synthetic construct; identical to SEQ ID NO: 5533
  REGION 1..566: note = hemagglutinin__InfluenzaA__ADN90106

SEQ ID NO: 6040 - protein, 566 aa, synthetic construct; identical to SEQ ID NO: 5533
  REGION 1..566: note = hemagglutinin__InfluenzaA__ADN90117

SEQ ID NO: 6041 - protein, 566 aa, synthetic construct; identical to SEQ ID NO: 5533
  REGION 1..566: note = hemagglutinin__InfluenzaA__ADN90128

SEQ ID NO: 6042 - protein, 566 aa, synthetic construct; identical to SEQ ID NO: 5533
  REGION 1..566: note = hemagglutinin__InfluenzaA__ADN90139

SEQ ID NO: 6043 - protein, 566 aa, synthetic construct; identical to SEQ ID NO: 5533
  REGION 1..566: note = hemagglutinin__InfluenzaA__ADN90150

SEQ ID NO: 6044 - protein, 566 aa, synthetic construct; identical to SEQ ID NO: 5533
  REGION 1..566: note = hemagglutinin__InfluenzaA__ADN90161

SEQ ID NO: 6045 - protein, 566 aa, synthetic construct; identical to SEQ ID NO: 5533
  REGION 1..566: note = hemagglutinin__InfluenzaA__ADN90172

SEQ ID NO: 6046 - protein, 566 aa, synthetic construct; identical to SEQ ID NO: 5533
  REGION 1..566: note = hemagglutinin__InfluenzaA__ADN90183

SEQ ID NO: 6047 - protein, 566 aa, synthetic construct; identical to SEQ ID NO: 5533
  REGION 1..566: note = hemagglutinin__InfluenzaA__ADN90194

SEQ ID NO: 6048 - protein, 566 aa, synthetic construct; identical to SEQ ID NO: 5533
  REGION 1..566: note = hemagglutinin__InfluenzaA__ADN90205

SEQ ID NO: 6049 - protein, 566 aa, synthetic construct; identical to SEQ ID NO: 5533
  REGION 1..566: note = hemagglutinin__InfluenzaA__ADN90216

SEQ ID NO: 6050 - protein, 566 aa, synthetic construct; identical to SEQ ID NO: 3430
  REGION 1..566: note = hemagglutinin__InfluenzaA__ADN92467

SEQ ID NO: 6051 - protein, 566 aa, synthetic construct
  REGION 1..566: note = hemagglutinin__InfluenzaA__ADN92478
MKTIIALSHILCLVFAQKLPGNDNSTATLCLGHHAVPNGTIVKTITNDQIEVTNATELVQSSSTGEICDSPHQILDGKNCTLIDALLGDPQCDGFQNKKWDLFVERSKAYSNCYPYDVPDYASLRSLVASSGTLEFNNESFNWTGVTQNGTSSACIRRSKNSFFSRLNWLTHLNFKYQALNVTMPNNEQFDKLYIWGVHHPGTDKDQIFLYAQASGRITVSTKRSQQTVIPNIGSRPRVRNIPSRISIYWTIVKPGDILLINSTGNLIAPRGYFKIQSGKSSIMRSDAPIGKCNSECITPNGSIPNDKPFQNVNRITYGACPRYVKQNTLKLATGMRNVPEKQTRGIFGAIAGFIENGWEGMVDGWYGFRHQNSEGRGQAADLKSTQAAIDQINGKLNRLIGKTNEKFHQIEKEFSEVEGRIQDLEKYVEDTKIDLWSYNAELLVALENQHTIDLTDSEMNKLFEKTKKQLRENAEDMGNGCFKIYHKCDNACIGSIRNGTYDHDVYRDEALNNRFQIKGVELKSGYKDWILWISFAISCFLLCVALLGFIMWACQKGNIRCNICI

SEQ ID NO: 6052 - protein, 566 aa, synthetic construct
  REGION 1..566: note = hemagglutinin__InfluenzaA__ADN92489
MKTIIALSYILCLVFAQKLPGNDNSTATLCLGHHAVPNGTIVKTITNDQIEVTNATELVQSSSTGEICDSPHQILDGKNCTLIDALLGDPQCDGFQNKKWDLFVERSKAYSNCYPYDVPDYASLRSLVASSGTLEFNNENFNWTGVTQNGTSSACIRRSKNSFFSRLNWLTHLNFKYQALNVTMPNNEQFDKLYIWGVHHPGTDKDQIFLYAQASGRITVSTKRSQQTVIPNIGSRPRVRNIPSRISIYWTIVKPGDILLINSTGNLIAPRGYFKIQSGKSSIMRSDAPIGKCNSECITPNGSIPNDKPFQNVNRITYGACPRYVKQNTLKLATGMRNVPEKQTRGIFGAIAGFIENGWEGMVDGWYGFRHQNSEGRGQAADLKSTQAAIDQINGKLNRLIGKTNEKFHQIEKEFSEVEGRIQDLEKYVEDTKIDLWSYNAELLVALENQHTIDLTDSEMNKLFEKTKKQLRENAEDMGNGCFKIYHKCDNACIGSIRNGTYDHDVYRDEALNNRFQIKGVELKSGYKDWILWISFAISCFLLCVALLGFIMWACQKGNIRCNICI

SEQ ID NO: 6053 - protein, 566 aa, synthetic construct; identical to SEQ ID NO: 3430
  REGION 1..566: note = hemagglutinin__InfluenzaA__ADN92500

SEQ ID NO: 6054 - protein, 566 aa, synthetic construct; identical to SEQ ID NO: 2669
  REGION 1..566: note = hemagglutinin__InfluenzaA__ADN92510

SEQ ID NO: 6055 - protein, 566 aa, synthetic construct; identical to SEQ ID NO: 2669
  REGION 1..566: note = hemagglutinin__InfluenzaA__ADN92520

SEQ ID NO: 6056 - protein, 566 aa, synthetic construct; identical to SEQ ID NO: 3771
  REGION 1..566: note = hemagglutinin__InfluenzaA__ADN92530

SEQ ID NO: 6057 - protein, 566 aa, synthetic construct; identical to SEQ ID NO: 2911
  REGION 1..566: note = hemagglutinin__InfluenzaA__ADN92540

SEQ ID NO: 6058 - protein, 566 aa, synthetic construct; identical to SEQ ID NO: 2669
  REGION 1..566: note = hemagglutinin__InfluenzaA__ADN92550

SEQ ID NO: 6059 - protein, 566 aa, synthetic construct; identical to SEQ ID NO: 2669
  REGION 1..566: note = hemagglutinin__InfluenzaA__ADN92560

SEQ ID NO: 6060 - protein, 566 aa, synthetic construct
  REGION 1..566: note = hemagglutinin__InfluenzaA__ADO00730
MKAILVVLLYTFATANADTLCIGYHANNSTDTVDTVLEKNVTVTHSVNLLEDKHNGKLCKLRGVAPLHLGKCNIAGWILGNPECGSLSTASSWSYIVETSSSDNGTCYPGDFIDYEELREQLSSVSSFERFEIFPKTSSWPNHDSNKGVTAACPHAGAKSFYKNLIWLVKKGNSYPKLSKSYINDKGKEVLVLWGIHHPSTSADQQSLYQNADAYVFVGTSRYSKKFKPEIAIRPKVRDQEGRMNYYWTLVEPGDKITFEATGNLVVPRYAFAMERNAGSGIIISDTPVHDCNTTCQTPKGAINTSLPFQNIHPITIGKCPKYVKSTKLRLATGLRNVPSIQSRGLFGAIAGFIEGGWTGMVDGWYGYHHQNEQGSGYAADLKSTQNAIDGITNKVNSVIEKMNTQFTAVGKEFNHLEKRIENLNKKVDDGFLDIWTYNAELLVLLENERTLDYHDSNVKNLYEKVRSQLKNNAKEIGNGCFEFYHKCDNTCMESVKNGTYDYPKYSEEAKLNREEIDGVKLESTRIYQILAIYSTVASSLVLVVSLGAISFWMCSNGSLQCRICI

SEQ ID NO: 6061 - protein, 566 aa, synthetic construct; identical to SEQ ID NO: 4089
  REGION 1..566: note = hemagglutinin__InfluenzaA__ADO00740

SEQ ID NO: 6062 - protein, 566 aa, synthetic construct; identical to SEQ ID NO: 3833
  REGION 1..566: note = hemagglutinin__InfluenzaA__ADO00750

SEQ ID NO: 6063 - protein, 566 aa, synthetic construct; identical to SEQ ID NO: 2669
  REGION 1..566: note = hemagglutinin__InfluenzaA__ADO12143

SEQ ID NO: 6064 - protein, 566 aa, synthetic construct; identical to SEQ ID NO: 2669
  REGION 1..566: note = hemagglutinin__InfluenzaA__ADO12153

SEQ ID NO: 6065 - protein, 566 aa, synthetic construct; identical to SEQ ID NO: 2669
  REGION 1..566: note = hemagglutinin__InfluenzaA__ADO12163

SEQ ID NO: 6066 - protein, 566 aa, synthetic construct; identical to SEQ ID NO: 2669
  REGION 1..566: note = hemagglutinin__InfluenzaA__ADO12173

SEQ ID NO: 6067 - protein, 566 aa, synthetic construct; identical to SEQ ID NO: 2669
  REGION 1..566: note = hemagglutinin__InfluenzaA__ADO12183

SEQ ID NO: 6068 - protein, 566 aa, synthetic construct; identical to SEQ ID NO: 2669
  REGION 1..566: note = hemagglutinin__InfluenzaA__ADO12193

SEQ ID NO: 6069 - protein, 566 aa, synthetic construct; identical to SEQ ID NO: 2669
  REGION 1..566: note = hemagglutinin__InfluenzaA__ADO12203

SEQ ID NO: 6070 - protein, 566 aa, synthetic construct; identical to SEQ ID NO: 2669
  REGION 1..566: note = hemagglutinin__InfluenzaA__ADO12213

SEQ ID NO: 6071 - protein, 566 aa, synthetic construct; identical to SEQ ID NO: 2669
  REGION 1..566: note = hemagglutinin__InfluenzaA__ADO12223

SEQ ID NO: 6072 - protein, 566 aa, synthetic construct; identical to SEQ ID NO: 2669
  REGION 1..566: note = hemagglutinin__InfluenzaA__ADO12233

SEQ ID NO: 6073 - protein, 566 aa, synthetic construct; identical to SEQ ID NO: 2669
  REGION 1..566: note = hemagglutinin__InfluenzaA__ADO12243

SEQ ID NO: 6074 - protein, 566 aa, synthetic construct; identical to SEQ ID NO: 2669
  REGION 1..566: note = hemagglutinin__InfluenzaA__ADO12253

SEQ ID NO: 6075 - protein, 566 aa, synthetic construct; identical to SEQ ID NO: 2669
  REGION 1..566: note = hemagglutinin__InfluenzaA__ADO12263

SEQ ID NO: 6076 - protein, 566 aa, synthetic construct; identical to SEQ ID NO: 2669
  REGION 1..566: note = hemagglutinin__InfluenzaA__ADO12273

SEQ ID NO: 6077 - protein, 566 aa, synthetic construct; identical to SEQ ID NO: 2669
  REGION 1..566: note = hemagglutinin__InfluenzaA__ADO12283

SEQ ID NO: 6078 - protein, 566 aa, synthetic construct; identical to SEQ ID NO: 2669
  REGION 1..566: note = hemagglutinin__InfluenzaA__ADO12293

SEQ ID NO: 6079 - protein, 566 aa, synthetic construct; identical to SEQ ID NO: 2669
  REGION 1..566: note = hemagglutinin__InfluenzaA__ADO12303

SEQ ID NO: 6080 - protein, 566 aa, synthetic construct; identical to SEQ ID NO: 2669
  REGION 1..566: note = hemagglutinin__InfluenzaA__ADO12313

SEQ ID NO: 6081 - protein, 566 aa, synthetic construct; identical to SEQ ID NO: 2669
  REGION 1..566: note = hemagglutinin__InfluenzaA__ADO12323

SEQ ID NO: 6082 - protein, 566 aa, synthetic construct; identical to SEQ ID NO: 2669
  REGION 1..566: note = hemagglutinin__InfluenzaA__ADO12333

SEQ ID NO: 6083 - protein, 566 aa, synthetic construct; identical to SEQ ID NO: 2669
  REGION 1..566: note = hemagglutinin__InfluenzaA__ADO12343

SEQ ID NO: 6084 - protein, 566 aa, synthetic construct; identical to SEQ ID NO: 2669
  REGION 1..566: note = hemagglutinin__InfluenzaA__ADO12353

SEQ ID NO: 6085 - protein, 566 aa, synthetic construct; identical to SEQ ID NO: 2669
  REGION 1..566: note = hemagglutinin__InfluenzaA__ADO12363

SEQ ID NO: 6086 - protein, 566 aa, synthetic construct
  REGION 1..566: note = hemagglutinin__InfluenzaA__ADO12373
MKAILVVLLYTFATANADTLCIGYHANNSTDTVDTVLEKNVTVTHSVNLLEDKHNGKLCKLRGVAPLHLGKCNIAGWILGNPECESLSTASSWSYIVETSSSDNGTCYPGDFIDYEELREQLSSVSSFERFEIFPKTSSWPNHDSNKGVTAACPHAGAKSFYKNLIWLVKKGNSYPKLSKSYINNKGKEVLVLWGIHHPSTSADQQSLYQNADAYVFVGTSRYSKKFKPEIAIRPKVRDQEGRMNYYWTLVEPGDKITFEATGNLVVPRYAFAMERNAGSGIIISDTPVHDCNTTCQTPKGAINTSLPFQNIHPITIGKCPKYVKSTKLRLATGLRNVPSIQSRGLFGAIAGFIEGGWTGMVDGWYGYHHQNEQGSGYAADLKSTQNAIDEITNKVNSVIEKMNTQFTAVGKEFNHLEKRIENLNKKVDDGFLDIWTYNAELLVLLENERTLDYHDSNVKNLYEKVRSQLKNNAKEIGNGCFEFYHKCDNTCMESVKNGTYDYPKYSEEAKLNREEIDGVKLESTRIYQILAIYSTVASSLVLVVSLGAISFWMCSNGSLQCRICI

SEQ ID NO: 6087 - protein, 566 aa, synthetic construct; identical to SEQ ID NO: 4154
  REGION 1..566: note = hemagglutinin__InfluenzaA__ADO12383

SEQ ID NO: 6088 - protein, 566 aa, synthetic construct
  REGION 1..566: note = hemagglutinin__InfluenzaA__ADO12403
MKAILVVLLYTFATANADTLCIGYHANNSTDTVDTVLEKNVTVTHSVNLLEDKHNGKLCKLRGVAPLHLGKCNIAGWILGNPECESLSTASSWSYIVETSSSDNGTCYPGDFIDYEELREQLSSVSSFERFEIFPKTSSWPNHDSNKGVTAACPHAGAKSFYKNLIWLVKKGNSYPKLSKSYINDKGKEVLVLWGIHHPSTSADQQSLYQNADAYVFVGTSRYSKKFKPEIAIRPKVRDQEGRMNYYWTLVEPGDKITFEATGNLVVPRYAFAMERNAGSGIIISDTPVHDCNTTCQTPKGAINTSLPFQNVHPITIGKCPKYVKSTKLRLATGLRNVPSIQSRGLFGAIAGFIEGGWTGMVDGWYGYHHQNEQGSGYAADLKSTQNAIDEITNKVNSVIEKMNTQFTAVGKEFNHLEKRIENLNKKVDDGFLDIWTYNAELLVLLENERTLDYHDSNVKNLYEKVRSQLKNNAKEIGNGCFEFYHKCDNTCMESVKNGTYDYPKYSEEAKLNREEIDGVKLESTRIYQILAIYSTVASSLVLVVSLGAISFWMCSNGSLQCRICI

SEQ ID NO: 6089 - protein, 566 aa, synthetic construct; identical to SEQ ID NO: 4305
  REGION 1..566: note = hemagglutinin__InfluenzaA__ADO12413

SEQ ID NO: 6090 - protein, 566 aa, synthetic construct; identical to SEQ ID NO: 2669
  REGION 1..566: note = hemagglutinin__InfluenzaA__ADO12423

SEQ ID NO: 6091 - protein, 566 aa, synthetic construct; identical to SEQ ID NO: 2669
  REGION 1..566: note = hemagglutinin__InfluenzaA__ADO12433

SEQ ID NO: 6092 - protein, 566 aa, synthetic construct; identical to SEQ ID NO: 2669
  REGION 1..566: note = hemagglutinin__InfluenzaA__ADO12443

SEQ ID NO: 6093 - protein, 566 aa, synthetic construct; identical to SEQ ID NO: 2669
  REGION 1..566: note = hemagglutinin__InfluenzaA__ADO12453

SEQ ID NO: 6094 - protein, 566 aa, synthetic construct; identical to SEQ ID NO: 2669
  REGION 1..566: note = hemagglutinin__InfluenzaA__ADO12463

SEQ ID NO: 6095 - protein, 566 aa, synthetic construct
  REGION 1..566: note = hemagglutinin__InfluenzaA__ADO12473
MKAILVVLLYTFATANADTLCIGYHANNSTDTVDTVLEKNVTVTHSVNLLEDKQNGKLCKLRGVAPLHLGKCNIAGWILGNPECESLSTASSWSYIVETSSSDNGTCYPGDFIDYEELREQLSSVSSFERFEIFPKTSSWPNHDSNKGVTAACPHAGAKSFYKNLIWLVKKGNSYPKLSKSYINDKGKEVLVLWGIHHPSTSADQQSLYQNADAYVFVGTSRYSKKFKPEIAIRPKVRDQEGRMNYYWTLVEPGDKITFEATGNLVVPRYAFAMERNAGSGIIISDTPVHDCNTTCQTPKGAINTSLPFQNIHPITIGKCPKYVKSTKLRLATGLRNVPSIQSRGLFGAIAGFIEGGWTGMVDGWYGYHHQNEQGSGYAADLKSTQNAIDEITNKVNSVIEKMNTQFTAVGKEFNHLEKRIENLNKKVDDGFLDIWTYNAELLVLLENERTLDYHDSNVKNLYEKVRSQLKNNAKEIGNGCFEFYHKCDNTCMESVKNGTYDYPKYSEEAKLNREEIDGVKLESTRIYQILAIYSTVASSLVLVVSLGAISFWMCSNGSLQCRICI

SEQ ID NO: 6096 - protein, 566 aa, synthetic construct; identical to SEQ ID NO: 2669
  REGION 1..566: note = hemagglutinin__InfluenzaA__ADO12493

SEQ ID NO: 6097 - protein, 566 aa, synthetic construct
  REGION 1..566: note = hemagglutinin__InfluenzaA__ADO12503
MKAILVVLLYTFATANADTLCIGYHANNSTDTVDTVLEKNVTVTHSVNLLEDKHNGKLCKLRGVAPLHLGKCNIAGWILGNPECESLSTASSWSYIVETSSSDNGTCYPGDFIDYEELREQLSSVSSFERFEIFPKTSSWPNHDSNKGVTAACPHAGAKSFYKNLIWLVKKGNSYPKLSKSYINDKGKEVLVLWGIHHPSTSADQQSLYQNADAYVFVGTSRYSKKFKPEIAIRPKVRDQEGRMNYYWTLVEPGDKITFEATGNLVVPRYAFAMERNAGSGIIISDTPVHDCNTTCQTPKGAINTSLPFQNIHPITIGKCPKYVKSTKLRLATGLRNVPSIQSRGLFGAIAGFIEGGWTGMVDGWYGYHHQNEQGSGYAADLKSTQNAIDEITNKVNSVIEKMNTQFTAVGKEFNHLEKRIENLNKKVDDGFLDIWTYNAELLVLLENERTLDYHDSNVKNLYEKVRSQLKNNAKEIGNGCFEFYHKCDNTCMESVKNGTYDYPKYSEEAKLNREEIDGVKLESTRIYQILAIYSTVASSLVLVVSLGAINFWMCSNGSLQCRICI

SEQ ID NO: 6098 - protein, 566 aa, synthetic construct
  REGION 1..566: note = hemagglutinin__InfluenzaA__ADO12513
MKAILVVLLYTFATANADTLCIGYHANNSTDTVDTVLEKNVTVTHSVNLLEDKHNGKLCKLREVAPLHLGKCNIAGWILGNPECESLSTASSWSYIVETSSSDNGTCYPGDFIDYEELREQLSSVSSFERFEIFPKTSSWPNHDSNKGVTAACPHAGAKSFYKNLIWLVKKGNSYPKLSKSYINDKGKEVLVLWGIHHPSTSADQQSLYQNADAYVFVGTSRYSKKFKPEIAIRPKVRDQEGRMNYYWTLVEPGDKITFEATGNLVVPRYAFAMERNAGSGIIISDTPVHDCNTTCQTPKGAINTSLPFQNIHPITIGKCPKYVKSTKLRLATGLRNVPSIQSRGLFGAIAGFIEGGWTGMVDGWYGYHHQNEQGSGYAADLKSTQNAIDEITNKVNSVIEKMNTQFTAVGKEFNHLEKRIENLNKKVDDGFLDIWTYNAELLVLLENERTLDYHDSNVKNLYEKVRSQLKNNAKEIGNGCFEFYHKCDNTCMESVKNGTYDYPKYSEEAKLNREEIDGVKLESTRIYQILAIYSTVASSLVLVVSLGAISFWMCSNGSLQCRICI

SEQ ID NO: 6099 - protein, 566 aa, synthetic construct; identical to SEQ ID NO: 2669
  REGION 1..566: note = hemagglutinin__InfluenzaA__ADO12523

SEQ ID NO: 6100 - protein, 566 aa, synthetic construct
  REGION 1..566: note = hemagglutinin__InfluenzaA__ADO12533
MKAILVVLLYTFATANADTLCIGYHANNSTDTVDTVLEKNVTVTHSVNLLEDKHNGKLCKLRGVAPLHLGKCNIAGWILGNPECESLSTASSWSYIVETSSSDNGTCYPGDFIDYEELREQLSSVSSFERFEIFPKTSSWPNHDSNKGVTAACPHAGAKSFYKNLIWLVKKGNSYPKLSKSYINDKGKEVLVLWGIHHPSTSADQQSLYQNADAYVFVGTSRYSKKFKPEIAIRPKVRDQEGRMNYYWTLVEPGDKITFEATGNLVVPRYAFAMERNAGSGIIISDTPVHDCNTTCQTPKGAINTSLPFQNIHPITIGKCPKYVKSTRLRLATGLRNVPSIQSRGLFGAIAGFIEGGWTGMVDGWYGYHHQNEQGSGYAADLKSTQNAIDEITNKVNSVIEKMNTQFTAVGKEFNHLEKRIENLNKKVDDGFLDIWTYNAELLVLLENERTLDYHDSNVKNLYEKVRSQLKNNAKEIGNGCFEFYHKCDNTCMESVKNGTYDYPKYSEEAKLNREEIDGVKLESTRIYQILAIYSTVASSLVLVVSLGAISFWMCSNGSLQCRICI

SEQ ID NO: 6101 - protein, 566 aa, synthetic construct; identical to SEQ ID NO: 2669
  REGION 1..566: note = hemagglutinin__InfluenzaA__ADO12543

SEQ ID NO: 6102 - protein, 566 aa, synthetic construct; identical to SEQ ID NO: 2669
  REGION 1..566: note = hemagglutinin__InfluenzaA__ADO12553

SEQ ID NO: 6103 - protein, 566 aa, synthetic construct; identical to SEQ ID NO: 2669
  REGION 1..566: note = hemagglutinin__InfluenzaA__ADO12563

SEQ ID NO: 6104 - protein, 566 aa, synthetic construct; identical to SEQ ID NO: 2669
  REGION 1..566: note = hemagglutinin__InfluenzaA__ADO12573

SEQ ID NO: 6105 - protein, 566 aa, synthetic construct
  REGION 1..566: note = hemagglutinin__InfluenzaA__ADO12593
MKAILVVLLYTFATANADTLCIGYHANNSTDIVDTVLEKNVTVTHSVNLLEDKHNGKLCKLRGVAPLHLGKCNIAGWILGNPECESLSTASSWSYIVETSSSDNGTCYPGDFIDYEELREQLSSVSSFERFEIFPKTSSWPNHDSNKGVTAACPHAGAKSFYKNLIWLVKKGNSYPKLSKSYINDKGKEVLVLWGIHHPSTSADQQSLYQNADAYVFVGTSRYSKKFKPEIAIRPKVRDQEGRMNYYWTLVEPGDKITFEATGNLVVPRYAFAMERNAGSGIIISDTPVHDCNTTCQTPKGAINTSLPFQNIHPITIGKCPKYVKSTKLRLATGLRNVPSIQSRGLFGAIAGFIEGGWTGMVDGWYGYHHQNEQGSGYAADLKSTQNAIDEITNKVNSVIEKMNTQFTAVGKEFNHLEKRIENLNKKVDDGFLDIWTYNAELLVLLENERTLDYHDSNVKNLYEKVRSQLKNNAKEIGNGCFEFYHKCDNTCMESVKNGTYDYPKYSEEAKLNREEIDGVKLESTRIYQILAIYSTVASSLVLVVSLGAISFWMCSNGSLQCRICI

SEQ ID NO: 6106 - protein, 566 aa, synthetic construct; identical to SEQ ID NO: 2669
  REGION 1..566: note = hemagglutinin__InfluenzaA__ADO12603

SEQ ID NO: 6107 - protein, 566 aa, synthetic construct; identical to SEQ ID NO: 2669
  REGION 1..566: note = hemagglutinin__InfluenzaA__ADO12613

SEQ ID NO: 6108 - protein, 566 aa, synthetic construct; identical to SEQ ID NO: 2669
  REGION 1..566: note = hemagglutinin__InfluenzaA__ADO12623

SEQ ID NO: 6109 - protein, 566 aa, synthetic construct
  REGION 1..566: note = hemagglutinin__InfluenzaA__ADO14349
MKAILVVLLYTFATANADTLCIGYHANNSTDTVDTVLEKNVTVTHSVNLLEDKHKGKLCKLRGVAPLHLGKCNIAGWILGNPECESLSTASSWSYIVETSSSDKGTCYPGDFIDYEELREQLSSVSSFERFEIFPKTSSWPNHDSNKGVTAACPHAGAKSFYKNLIWLVKKGNSYPKLSKSYINDKGKEVLVLWGIHHPSTSADQQSLYQNADAYVFVGTSRYSKKFKPEIAIRPKVRDQEGRMNYYWTLVEPGDKITFEATGNLVVPRYAFAMERNAGSGIIISDTPVHDCNTTCQTPKGAINTSLPFQNIHPITIGKCPKYVKSTKLRLATGLRNIPSIQSRGLFGAIAGFIEGGWTGMVDGWYGYHHQNEQGSGYAADLKSTQNAIDEITNKVNSVIEKMNTQFTAVGKEFNHLEKRIENLNKKVDDGFLDIWTYNAELLVLLENERTLDYHDSNVKNLYEKVRSQLKNNAKEIGNGCFEFYHKCDNTCMESVKNGTYDYPKYSEEAKLNREEIDGVKLESTRIYQILAIYSTVASSLVLVVSLGAISFWMCSNGSLQCRICI

SEQ ID NO: 6110 - protein, 566 aa, synthetic construct; identical to SEQ ID NO: 4933
  REGION 1..566: note = hemagglutinin__InfluenzaA__ADO14351

SEQ ID NO: 6111 - protein, 566 aa, synthetic construct
  REGION 1..566: note = hemagglutinin__InfluenzaA__ADO14353
MKAILVVLLYTFATANADTLCIGYHANNSTDTVDTVLEKNVTVTHSVNLLEDKHNGKLCKLRGVAPLHLGKCNIAGWILGNPECESLSTASSWSYIVETSSSDNGTCYPGDFIDYEELREQLSSVSSFERFEIFPKTSSWPNHDSNKGVTAACPHAEAKSFYKNLIWLVKKGNSYPKLSKSYINDKGKEVLVLWGIHHPSTSADQQSLYQNADAYVFVGTSRYSKKFKPEIAIRPKVRDQEGRMNYYWTLVEPGDKITFEATGNLVVPRYAFAMERNAGSGIIISDTPVHDCNTTCQTPKGAINTSLPFQNIHPITIGKCPKYVKSTKLRLATGLRNIPSIQSRGLFGAIAGFIEGGWTGMVDGWYGYHHQNEQGSGYAADLKSTQNAIDEITNKVNSVIEKMNTQFTAVGKEFNHLEKRIENLNKKVDDGFLDIWTYNAELLVLLENERTLDYHDSNVKNLYEKVRSQLKNNAKEIGNGCFEFYHKCDNTCMESVKNGTYDYPKYSEEAKLNREEIDGVKLESTRIYQILAIYSTVASSLVLVVSLGAISFWMCSNGSLQCRICI

SEQ ID NO: 6112 - protein, 566 aa, synthetic construct
  REGION 1..566: note = hemagglutinin__InfluenzaA__ADO14354
MKAILVVLLYTFATANADTLCMGYHANNSTDTVDTVLEKNVTVTHSVNLLEDKHNGKLCKLRGVAPLHLGKCNIAGWILGNPECESLSTASSWSYIVETSSSDNGTCYPGDFIDYEELREQLSSVSSFERFEIFPKTSSWPNHDSNKGVTAACPHAGAKSFYKNLIWLVKKGNSYPKLSKSYINDKGKEVLVLWGIHHPSTSADQQSLYQNADAYVFVGTSRYSKKFKPEIAIRPKVREQEGRMNYYWTLVEPGDKITFEATGNLVVPRYAFAMERNAGSGIIISDTPVHDCNTTCQTPKGAINTSLPFQNIHPITIGKCPKYVKSTKLRLATGLRNVPSIQSRGLFGAIAGFIEGGWTGMVDGWYGYHHQNEQGSGYAADLKSTQNAIDEITNKVNSVIEKMNTQFTAVGKEFNHLEKRIENLNKKVDDGFLDIWTYNAELLVLLENERTLDYHDSNVKNLYEKVRSQLKNNAKEIGNGCFEFYHKCDNTCMESVKNGTYDYPKYSEEAKLNREEIDGVKLESTRIYQILAIYSTVASSLVLVVSLGAISFWMCSNGSLQCRICI

SEQ ID NO: 6113 - protein, 566 aa, synthetic construct
  REGION 1..566: note = hemagglutinin__InfluenzaA__ADO14356
MKAILVVLLYTFATANADTLCIGYHANNSTDTVDTVLEKNVTVTHSVNLLEDKHNGKLCKLRGVAPLHLGKCNIAGWILGNPECESLSTASSWSYIVETSSSDNGTCYPGDFIDYEELREQLSSVSSFERFEIFPKTSSWPNHDSNKGVTAACPHAGAKSFYKNLIWLVKKGNSYPKLSKSYINDKGKEVLVLWGIHHPSTSADQQSLYQNADAYVFVGTSRYSKKFKPEIAIRPKVRGQEGRMNYYWTLVEPGDKITFEATGNLVVPRYAFAMERNAGSGIIISDTPVHDCNTTCQTPKGAINTSLPFQNIHPITIGKCPKYVKSTKLRLATGLRNIPSIQSRGLFGAIAGFIEGGWTGMVDGWYGYHHQNEQGSGYAADLKSTQNAIDEITNKVNSVIEKMNTQFTAVGKEFNHLEKRIENLNKKVDDGFLDIWTYNAELLVLLENERTLDYHDSNVKNLYEKVRSQLKNNAKEIGNGCFEFYHKCDNTCMESVKNGTYDYPEYSEEAKLNREEIDGVKLESTRIYQILAIYSTVASSLVLVVSLGAISFWMCSNGSLQCRICI

SEQ ID NO: 6114 - protein, 566 aa, synthetic construct; identical to SEQ ID NO: 4933
  REGION 1..566: note = hemagglutinin__InfluenzaA__ADO14357

SEQ ID NO: 6115 - protein, 566 aa, synthetic construct
  REGION 1..566: note = hemagglutinin__InfluenzaA__ADO14359
MKAILVVLLYTFATANADTLCIGYHANNSTDTVDTVLEKNVTVTHSVNLLEDKHNGKLCKLRGVAPLHLGKCNIAGWILGNPECESLSTASSWSYIVETSSSDNGTCYPGDFIDYEELREQLSSVSSFERFEIFPKTSSWPNHDSNKGVTAACPHAGAKSFYKNLIWLVKKGNSYPKLSKSYINDKGKEVLVLWGIHHPPTSADQQSLYQNADAYVFVGTSRYSKKFKPEIAIRPKVRDQEGRMNYYWTLVEPGDKITFEATGNLVVPRYAFAMERNAGSGIIISDTPVHDCNTTCQTPKGAINTSLPFQNIHPITIGKCPKYVKSTKLRLATGLRNVPSIQSRGLFGAIAGFIEGGWTGMVDGWYGYHHQNEQGSGYAADLKSTQNAIDKITNKVNSVIEKMNTQFTAVGKEFNHLEKRIENLNKKVDDGFLDIWTYNAELLVLLENERTLDYHDSNVKNLYEKVRSQLKNNAKEIGNGCFEFYHKCDNTCMESVKNGTYDYPKYSEEAKLNREEIDGVKLESTRIYQILAIYSTVASSLVLVVSLGAISFWMCSNGSLQCRICI

SEQ ID NO: 6116 - protein, 566 aa, synthetic construct
  REGION 1..566: note = hemagglutinin__InfluenzaA__ADO14361
MKAILVVLLYTFATANADTLCIGYHANNSTDTVDTVLEKNVTVTHSVNLLEDKHNGKLCKLRGVAPLHLGKCNIAGWILGNPECESLSTASSWSYIVETSSSDKGTCYPGDFIDYEELREQLSSVSSFERFEIFPKTSSWPNHDSNKGVTAACPHAGAKSFYKNLIWLVKKGNSYPKLSKSYINDKGKEVLVLWGIHHPSTSADQQSLYQNADAYVFVGTSRYSKKFKPEIAIRPKVRDQEGRMNYYWTLVEPGDKITFEATGNLVVPRYAFAMERNAGSGIIISDTPVHDCNTTCQTPKGAINTSLPFQNIHPITIGKCPKYVKSTKLRLATGLRNIPSIQSRGLFGAIAGFIEGGWTGMVDGWYGYHHQNEQGSGYAADLKSTQNAIDEITNKVNSVIEKMNTQFTAVGKEFNHLEKRIENLNKKVDDGFLDIWTYNAELLVLLENERTLDYHDSNVKNLYEKVRSQLKNNAKEIGNGCFEFYHKCDNTCMESVKNGTYDYPKYSEEAKLNREEIDGVKLESTRIYQILAIYSTVASSLVLVVSLGAISFWMCSNGSLQCRICI

SEQ ID NO: 6117 - protein, 566 aa, synthetic construct
  REGION 1..566: note = hemagglutinin__InfluenzaA__ADO14362
MKAILVVLLYTFATANADTLCIGYHANNSTDTVDTVLEKNVTVTHSVNLLEDKHNGKLCKLRGVAPLHLGKCNIAGWILGNPECESLSTASSWSYIVETSSSDNGTCYPGDFIDYEELREQLSSVSSFERFEIFPKTSSWPNHDSNKGVTAACPHAGAKSFYKNLIWLVKKGNSYPKLSKSYINDKGKEVLVLWGIHHPSNSADQQSLYQNADAYVFVGTSRYSKKFKPEIAIRPKVRDQEGRMNYYWTLVEPGDKITFEATGNLVVPRYAFAMERNAGSGIIISDTPVHDCNTTCQTPKGAINTSLPFQNIHPITIGKCPKYVKSTKLRLATGLRNVPSIQSRGLFGAIAGFIEGGWTGMVDGWYGYHHQNEQGSGYAADLKSTQNAIDEITNKVNSVIEKMNTQFTAVGKEFNHLEKRIENLNKKVDDGFLDIWTYNAELLVLLENERTLDYHDSNVKNLYEKVRSQLKNNAKEIGNGCFEFYHKCDNTCMESVKNGTYDYPKYSEEAKLNREEIDGVKLESTRIYQILAIYSTVASSLVLVVSLGAISFWMCSNGSLQCRICI

SEQ ID NO: 6118 - protein, 560 aa, synthetic construct
  REGION 1..560: note = hemagglutinin__InfluenzaA__ADO21015
MEVVSLITILLLVTVSNADKICIGYQSTNSTETVDTLTENNVPVAHAKELLHTEHNGMLCATNLGHPLILDTCTIEGLIYGNPSCDLLLGGREWSYIVERPSAVNGLCYPGNVENLEELRSLFSSASSYQRIQIFPGTIWNVSYGGTSKACSDSFYKSMRWLTQKNNAYPIQDAQYTNNRGKNILFMWGINHPPTDTTQTNLYTRTDTTTSVATEDINRTFKPLIGPRPLVNGQQGRIDYYWSVLKPGQTLRVRSNGNLIAPWYGHILSGESHGRILKTDLNSGNCVVQCQTERGGLNTTLPFHNVSKYAFGNCPKYVGVKSLKLAVGLRNVPARSSRGLFGAIAGFIEGGWSGLVAGWYGFQHSNDQGVGMAADRDSTQKAIDKITSKVNNIVDKMNKQYEIIDHEFSEVETRLNMINNKIDDQIQDIWAYNAELLVLLENQKTLDEHDANVNNLYNKVKRALGSNAVEDGKGCFELYHKCDDQCMETIRNGTYNRRKYKEESRLERQKIEGVKLESEGTYKILTIYSTVASSLVIAMGFAAFLFWAMSNGSCRCNICI

SEQ ID NO: 6119 - protein, 560 aa, synthetic construct
  REGION 1..560: note = hemagglutinin__InfluenzaA__ADO21026
MEVVSLITILLLVTVSNADKICIGYQSTNSTETVDTLTENNVPVAHAKELLHTEHNGMLCATNLGHPLILDTCTIEGLIYGNPSCDLLLGGREWSYIVERPSAVNGLCYPGNVENLEELRSLFSSASSYQRIQIFPGTIWNVSYGGTSKACSDSFYKSMRWLTQKNNAYPIQDAQYTNNRGKNILFMWGINHPPTDTTQTNLYTRTDTTTSVATEDINRTFNPLIGPRPLVNGQQGRIDYYWSVLKPGQTLRVRSNGNLIAPWYGHILSGESHGRILKTDLNSGNCVVQCQTERGGLNTTLPFHNVSKYAFGNCPKYVGVKSLKLAVGLRNVPARSSRGLFGAIAGFIEGGWSGLVAGWYGFQHSNDQGVGMAADRDSTQKAIDKITSKVNNIVDKMNKQYEIIDHEFSEVETRLNIINNKIDDQIQDIWAYNAELLVLLENQKTLDEHDANVNNLYNKVKRALGSNAVEDGKGCFELYHKCDDQCMETIRNGTYNRRKYKEESRLERQKIEGVKLESEGTYKILTIYSTVASSLVIAMGFAAFLFWAMSNGSCRCNICI

SEQ ID NO: 6120 - protein, 560 aa, synthetic construct
  REGION 1..560: note = hemagglutinin__InfluenzaA__ADO21037
MEVVSLITILLLVTVSNADKICIGYQSTNSTETVDTLTENNVPVAHAKELLHTEHNGMLCATNLGHPLILDTCTIEGLIYGNPSCDLLLGGREWSYIVERPSAVNGLCYPGNVENLEELRSLFSSASSYQRIQIFPGTIWNVSYGGTSKACSDSFYKSMRWLTQKNNAYPIQDAQYTNNRGKNILFMWGINHPPTDTTQTNLYTRTDTTTSVATEDINRTFKPYIGPRPLVNGQQGRIDYYWSVLKPGQTLRVRSNGNLIAPWYGHILSGESHGRILKTDLNSGNCVVQCQTERGGLNTTLPFHNVSKYAFGNCPKYVGVKSLKLAVGLRNVPARSSRGLFGAIAGFIEGGWSGLVAGWYGFQHSNDQGVGMAADRDLTQKAIDKITSKVNNIVDKMNKQYEIIDHEFSEVETRLNMINNKIDDQIQDIWAYNAELLVLLENQKTLDEHDANVNNLYNKVKRALGSNAVEDGKGCFELYHKCDDQCMETIRNGTYNRRKYKEESRLERQKIEGVKLESEGTYKILTIYSTVASSLVIAMGFAAFLFWAMSNGSCRCNICI

SEQ ID NO: 6121 - protein, 560 aa, synthetic construct
  REGION 1..560: note = hemagglutinin__InfluenzaA__ADO21048
MEVVSLITILLLVTVSNADKICIGYQSTNSTETVDTLTENNVPVAHAKELLHTEHNGMLCATNLGHPLILDTCTIEGLIYGNPSCDLLLGGREWSYIVERPSAVNGLCYPGNVENLEELRSLFSSASSYQRIQIFPGTIWNVSYGGTSKACSDSFYKSMRWLTQKNNAYPIQDAQYTNNRGKNIHFMWGINHPPTDTTQTNLYTRTDTTTSVATEDINRTFKPLIGPRPLVNGQQGRIDYYWSVLKPGQTLRVRSNGNLIAPWYGHILSGESHGRILKTDLNSGNCVVQCQTERGGLNTTLPFHNVSKYAFGNCPKYVGVKSLKLAVGLRNVPARSSRGLFGAIAGFIEGGWSGLVAGWYGFQHSNDQGVGMAADRVSTQKAIDKITSKVNNIVDKMNKQYEIIDHEFSEVETRLNMINNKIDDQIQDIWAYNAELLVLLENQKTLDEHDANVNNLYNKVKRALGSNAVEDGKGCFELYHKCDDQCMETIRNGTYNRRKYKEESRLERQKIEGVKLESEGTYKILTIYSTVASSLVIAMGFAAFLFWAMSNGSCRCNICI

SEQ ID NO: 6122 - protein, 566 aa, synthetic construct
  REGION 1..566: note = hemagglutinin__InfluenzaA__ADO25092
MKAILVVLLYTFATANADTLCIGYHANNSTDTVDTVLEKNVTVTHSVNLLEDKHNGKLCKLRGVAPLHLGKCNIAGWILGNPECESLSTASSWSYIVETSSSDNGTCYPGDFIDYEELREQLSSVSSFERFEIFPKTSSWPNHDSNKGVTAACPHAGAKSFYKNLIWLVKKGNSYPKLSNSYINDKGKEVLVLWGIHHPSTSADQQSLYQNADAYVFVGTSRYSKKFKPEIAIRPKVRDQEGRMNYYWTLVEPGDKITFEATGNLVVPRYAFAMERNAGSGIIISDTPAHDCNTTCQTPKGAINTSLPFQNIHPITIGKCPKYVKSTKLRLATGLRNVPSIQSRGLFGAIAGFIEGGWTGMVDGWYGYHHQNEQGSGYAADLKSTQNAIDEITNKVNSVIEKMNTQFTAVGKEFNHLEKRIENLNKKVDDGFLDIWTYNAELLVLLENERTLDYHDSNVKNLYEKVRSQLKNNAKEIGNGCFEFYHKCDNTCMESVKNGTYDYPKYSEEAKLNREEIDGVKLESTRIYQILAIYSTVASSLVLVVSLGAISFWMCSNGSLQCRICI

SEQ ID NO: 6123 - protein, 566 aa, synthetic construct; identical to SEQ ID NO: 4541
  REGION 1..566: note = hemagglutinin__InfluenzaA__ADO25112

SEQ ID NO: 6124 - protein, 566 aa, synthetic construct; identical to SEQ ID NO: 4541
  REGION 1..566: note = hemagglutinin__InfluenzaA__ADO25122

SEQ ID NO: 6125 - protein, 566 aa, synthetic construct
  REGION 1..566: note = hemagglutinin__InfluenzaA__ADO25132
MNAILVVLLYTFATANADTLCIGYHANNSTDTVDTLLEKNVTVTHSVNLLEDKHNGKLCKLRGVAPLHLGKCNIAGWILGNPECESLSTASSWSYIVETSSSDNGTCYPGDFIDYEELREQLSSVSSFERFEIFPKTSSWPNHDSNKGVTAACPHAGAKSFYKNLIWLVKKGNSYPKLSKSYINDKGKEVLVLWGIHHPSTSADQQSLYQNADAYVFVGTSRYSKKFKPEIAIRPKVRDQEGRMNYYWTLVEPGDKITFEATGNLVVPRYAFAMERNAGSDIIISDTPVHDCNTTCQTPKGAINTSLPFQNIHPITIGKCPKYVKSTKLRLATGLRNVPSIQSRGLFGAIAGFIEGGWTGMVDGWYGYHHQNEQGSGYAADLKSTQNAIDEITNKINSVIEKMNTQFTAVGKEFNHLEKRIENLNKKVDDGFLDIWTYNAELLVLLENERTLDYHDSNVKNLYEKVRSQLKNNAKEIGNGCFEFYHKCDNTCMESVKNGTYDYPKYSEEAKLNREEIDGVKLESTRIYQILAIYSTVASSLVLVVSLGAISFWMCSNGSLQCRICI

SEQ ID NO: 6126 - protein, 566 aa, synthetic construct; identical to SEQ ID NO: 4282
  REGION 1..566: note = hemagglutinin__InfluenzaA__ADO25142

SEQ ID NO: 6127 - protein, 566 aa, synthetic construct
  REGION 1..566: note = hemagglutinin__InfluenzaA__ADO25152
MKAILVVLLYTFAAANADTLCIGYHANNSTDTVDTVLEKNVTVTHSVNLLEDKHNGKLCKLRGVAPLHLGKCNIAGWILGNPECESLSTASSWSYIVETSSSDNGTCYPGDFINYEELREQLSSVSLFERFEIFPKTSSWPNHDSNKGVTAACPHAGAKSFYKNLIWLVKKGNSYPKLSKSYINDKGKEVLVLWGIHHPSTSADQQSLYQNADAYVFVGTSRYSKKFKPEIAIRPKVRDQEGRMNYYWTLVEPGDKITFEATGNLVVPRYAFAMERNAGSGIIISDTPVHDCNTTCQTPKGAINTSLPFQNIHPITIGKCPKYVKSTKLRLATGLRNVPSIQSRGLFGAIAGFIEGGWTGMVDGWYGYHHQNEQGSGYAADLKSTQNAIDKITNKVNSVIEKMNTQFTAVGKEFNHLEKRIENLNKKVDDGFLDIWTYNAELLVLLENERTLDYHDSNVKNLYEKVRSQLKNNAKEIGNGCFEFYHKCDNTCMESVKNGTYDYPKYSEEAKLNREEIDGVKLESTRIYQILAIYSTVASSLVLVVSLGAISFWMCSNGSLQCRICI

SEQ ID NO: 6128 - protein, 566 aa, synthetic construct; identical to SEQ ID NO: 4221
  REGION 1..566: note = hemagglutinin__InfluenzaA__ADO25162

SEQ ID NO: 6129 - protein, 566 aa, synthetic construct; identical to SEQ ID NO: 4221
  REGION 1..566: note = hemagglutinin__InfluenzaA__ADO25172

SEQ ID NO: 6130 - protein, 566 aa, synthetic construct; identical to SEQ ID NO: 4221
  REGION 1..566: note = hemagglutinin__InfluenzaA__ADO25182

SEQ ID NO: 6131 - protein, 566 aa, synthetic construct; identical to SEQ ID NO: 2669
  REGION 1..566: note = hemagglutinin__InfluenzaA__ADO25192

SEQ ID NO: 6132 - protein, 566 aa, synthetic construct; identical to SEQ ID NO: 2669
  REGION 1..566: note = hemagglutinin__InfluenzaA__ADO25202

SEQ ID NO: 6133 - protein, 566 aa, synthetic construct
  REGION 1..566: note = hemagglutinin__InfluenzaA__ADO25212
MKAILVVLLYTFATANADTLCIGYHANNSTDTVDTVLEKNVTVTHSVNLLEDKHNGKLCKLRGVAPLHLGKCNIAGWILGNPECESLSTASSWSYIVETSSSDNGTCYPGDFIDYEELREQLSSVSSFERFEIFPKTSSWPNHDSNKGVTAACPHAGAKSFYKNLIWLVKKGNSYPKLSKSYINDKRKEVLVLWGIHHPSTSADQQSLYQNADSYVFVGTSRYSKKFKPEIAIRPKVRDQEGRMNYYWTLVEPGDKITFEATGNLVVPRYAFAMERNAGSGIIISDTPVHDCNTTCQTPEGAINTSLPFQNIHPITIGKCPKYVKSTKLRLATGLRNVPSIQSRGLFGAIAGFIEGGWTGMVDGWYGYHHQNEQGSGYAADLKSTQNAIDEITNKVNSVIEKMNTQFTAVGKEFNHLEKRIENLNKKVDDGFLDIWTYNAELLVLLENERTLDYHDSNVKNLYEKVRSQLKNNAKEIGNGCFEFYHKCDNTCMESVKNGTYDYPKYSEEAKLNREEIDGVKLESTRIYQILAIYSTVASSLVLVVSLGAISFWMCSNGSLQCRICI

SEQ ID NO: 6134 - protein, 566 aa, synthetic construct
  REGION 1..566: note = hemagglutinin__InfluenzaA__ADO25222
MKAILVVLLYTFATANADTLCIGYHANNSTDTVDTVLEKNVTVTHSVNLLEDKHNGKLCKLRGVAPLHLGKCNIAGWILGNPECESLSTASSWSYIVETSSSDNGTCYPGDFIDYEELREQLSSVSSFERFEIFPKTSSWPNHDSNKGVTAACPHAGAKSFYKNLIWLVKKGNSYPKLNKSYINDKGKEVLVLWGIHHPSTSADQQSLYQNADAYVFVGTSRYSKKFKPEIAIRPKVRDQEGRMNYYWTLVEPGDKITFEATGNLVVPRYAFAMERNAGSGIIISDTPVHDCNTTCQTPKGAINTSLPFQNIHPITIGKCPKYVKSTKLRLATGLRNVPSIQSRGLFGAIAGFIEGGWTGMVDGWYGYHHQNEQGSGYAADLKSTQNAIDKITNKVNSVIEKMNTQFTAVGKEFNHLEKRIENLNKKVDDGFLDIWTYNAELLVLLENERTLDYHDSNVKNLYEKVRSQLKNNAKEIGNGCFEFYHKCDNTCMESVKNGTYDYPKYSEEAKLNREEIDGVKLESTRIYQILAIYSTVASSLVLVVSLGAISFWMCSNGSLQCRICI

SEQ ID NO: 6135 - protein, 566 aa, synthetic construct; identical to SEQ ID NO: 4282
  REGION 1..566: note = hemagglutinin__InfluenzaA__ADO25232

SEQ ID NO: 6136 - protein, 566 aa, synthetic construct; identical to SEQ ID NO: 4221
  REGION 1..566: note = hemagglutinin__InfluenzaA__ADO25242

SEQ ID NO: 6137 - protein, 566 aa, synthetic construct; identical to SEQ ID NO: 4299
  REGION 1..566: note = hemagglutinin__InfluenzaA__ADO25252

SEQ ID NO: 6138 - protein, 566 aa, synthetic construct; identical to SEQ ID NO: 4541
  REGION 1..566: note = hemagglutinin__InfluenzaA__ADO25262

SEQ ID NO: 6139 - protein, 566 aa, synthetic construct
  REGION 1..566: note = hemagglutinin__InfluenzaA__ADO25272
MKAILVVLLYTFATANADTLCIGYHANNSTDTVDTVLEKNVTVTHSVNLLEDKHNGKLCKLRGVAPLHLGKCNIAGWILGNPECESLSTASSWSYIVETSSSDNGTCYPGDFIDYEELREQLSSVSSFERFEMFPKTSSWPNHDSNKGVTAACPHAGVKSFYKNLIWLVKKGNSYPKLSKSYINDKGKEVLVLWGIHHPSTSADQQSLYQNADAYVFVGTSRYSKKFKPEIAIRPKVRDQEGRMNYYWTLVEPGDKITFEATGNLVVPRYAFAMERNAGSGIIISDTPVHDCNTTCQTPKGAINTSLPFQNIHPITIGKCPKYVKSTKLRLATGLRNVPSIQSRGLFGAIAGFIEGGWTGMVDGWYGYHHQNEQGSGYAADLKSTQNAIDEITNKVNSVIEKMNTQFTAVGKEFNHLEKRIENLNKKVDDGFLDIWTYNAELLVLLENERTLDYHDSNVKNLYEKVRSQLKNNAKEIGNGCFEFYHKCDNTCMESVKNGTYDYPKYSEEAKLNREEIDGVKLESTRIYQILAIYSTVASSLVLVVSLGAISFWMCSNGSLQCRICI

SEQ ID NO: 6140 - protein, 566 aa, synthetic construct; identical to SEQ ID NO: 4282
  REGION 1..566: note = hemagglutinin__InfluenzaA__ADO25282

SEQ ID NO: 6141 - protein, 565 aa, synthetic construct; identical to SEQ ID NO: 2488
  REGION 1..565: note = hemagglutinin__InfluenzaA__ADO27622

SEQ ID NO: 6142 - protein, 566 aa, synthetic construct; identical to SEQ ID NO: 2669
  REGION 1..566: note = hemagglutinin__InfluenzaA__ADO29887

SEQ ID NO: 6143 - protein, 566 aa, synthetic construct
  REGION 1..566: note = hemagglutinin__InfluenzaA__ADO29888
MKAILVVLLYTFATANADTLCIGYHANNSTDTVDTVLEKNVTVTHSVNLLEDKHNGKLCRLRGVAPLHLGKCNIAGWILGNPECESLSTASSWSYIVETSSSDNGTCYPGDFIDYEELREQLSSVSSFERFEIFPKTSSWPNHDPNKGVTAACPHAGAKSFYKNLIWLVKKGNSYPKLSKSYINDKGKEVLVLWGIHHPSTSADQQSLYQNADAYVFVGTSRYSKKFKPEIAIRPKVRDQEGRMNYYWTLVEPGDKITFEATGNLVVPRYAFAMERNAGSGIIISDTPVHDCNTTCQTPKGAINTSLPFQNIHPITIGKCPKYVKSTKLRLATGLRNVPSIQSRGLFGAIAGFIEGGWTGMVDGWYGYHHQNEQGSGYAADLKSTQNAIDEITNKVNSVIEKMNTQFTAVGKEFNHLEKRIENLNKKVDDGFLDIWTYNAELLVLLENERTLDYHDSNVKNLYEKVRSQLKNNAKEIGNGCFEFYHKCDNTCMESVKNGTYDYPKYSEEAKLNREEIDGVKLESTRIYQILAIYSTVASSLVLVVSLGAISFWMCSNGSLQCRICI

SEQ ID NO: 6144 - protein, 566 aa, synthetic construct
  REGION 1..566: note = hemagglutinin__InfluenzaA__ADO29889
MKAILVVLLYTFATANADILCIGYHANNSTDTVDTVLEKNVTVTHSVNLLEDKHNGKLCKLRGVAPLHLGKCNIAGWILGNPECESFSTSSSWSYIVETSSSDNGTCYPGDFIDYEELREQLSSVSSFERFEIFPKTSSWPNHDSNKGVTAACPHAGAKSFYKNLIWLVKKGNSYPKLSKSYINDKGKEVLVLWGIHHPSTSADQQSLYQNADAYVFVGTSRYSKKFKPEIAIRPKVRDQEGRMNYYWTLVEPGDKITFEATGNLVVPRYAFAMERNAGSGIIISDTPVHDCNTTCQTPKGAINTSLPFQNIHPITIGKCPKYVKSTKLRLATGLRNVPSIQSRGLFGAIAGFIEGGWTGMVDGWYGYHHQNEQGSGYAADLKSTQNAIDEITNKVNSVIEKMNTQFTAVGKEFNHLEKRIENLNKKVDDGFLDIWTYNAELLVLLENERTLDYHDSNVKNLYEKVRSQLKNNAKEIGNGCFEFYHKCDNTCMESVKNGTYDYPKYSEEAKLNREEIDGVKLESTRIYQILAIYSTVASSLVLVVSLGAISFWMCSNGSLQCRICI

SEQ ID NO: 6145 - protein, 566 aa, synthetic construct
  REGION 1..566: note = hemagglutinin__InfluenzaA__ADO29890
MKAILVVLLYTFATAKADTLCIGYHANNSADTVDTVLEKNVTVTHSVNLLEDKHNGKLCKLRGVAPLHLGKCNIAGWILGNPECESLSTASSWSYIVETSSSDNGTCYPGDFIDYEELREQLSSVSSFERFEIFPKTSSWPNHDPNKGVTAACPHAGAKSFYKNLIWLVKKGNSYPKLSKSYINDKGKEVLVLWGIHHPSTSVDQQSLYQNADAYVFVGTSRYSKKFKPEIAIRPKVRDQEGRMNYYWTLVEPGDKITFEATGNLVVPRYAFAMERNAGSGIIISDTPVHDCNTTCQTPKGAINTSLPFQNIHPITIGKCPKYVKSTKLRLATGLRNVPSIQSRGLFGAIAGFIEGGWTGMVDGWYGYHHQNEQGSGYAADLKSTQNAIDEITNKVNSVIEKMNTQFTAVGKEFNHLEKRIENLNKKVDDGFLDIWTYNAELLVLLENERTLDYHDSNVKNLYEKVRSQLKNNAKEIGNGCFEFYHKCDNTCMESVKNGTYDYPKYSEEAKLNREEIDGVKLESTRIYQILAIYSTVASSLVLVVSLGAISFWMCSNGSLQCRICI

SEQ ID NO: 6146 - protein, 566 aa, synthetic construct
  REGION 1..566: note = hemagglutinin__InfluenzaA__ADO29891
MKAILVVLLYTFATANADTLCIGYHANNSTDTVDTVLEKNVTVTHSVNLLEDKHNGKLCKLRGVAPLHLGKCNIAGWILGNPECESLSTASSWSYIVETSSSDNGTCYPGDFIDYEELREQLSSVSSFERFEIFPKTSSWPNHDSNKGVTAACPHAGAKSFYKNLIWLVKKGNSYPKLSKSYINDKGKEVLVLWGIHHPSTSADQQSLYQNADAYVFVGTSRYSKKFKPEIAIRPKVRDQEGRMNYYWTLVEPGDKTTFEATGNLVVPRYAFAMERNAGSGIIISDTPVHDCNTTCQTPKGAINTSLPFQNIHPITIGKCPKYVKSTKLRLATGLRNVPSIQSRGLFGAIAGFIEGGWTGMVDGWYGYHHQNEQGSGYAADLKSTQNAIDKITNKVNSVIEKMNTQFTAVGKEFNHLEKRIENLNKKVDDGFLDIWTYNAELLVLSENERTLDYHDSNVKNLYEKVRSQLKNNAKEIGNGCFEFYHKCDNTCMESVKNGTYDYPKYSEEAKLNREEIDGVKLESTRIYQILAIYSTVASSLVLVVSLGAISFWMCSNGSLQCRICI

SEQ ID NO: 6147 - protein, 566 aa, synthetic construct
  REGION 1..566: note = hemagglutinin__InfluenzaA__ADO29892
MKAILVVLLYTFATAKADTLCIGYHANNSTDTVDTVLEKNVTVTHSVNLLEDKHNGKLCKLRGVAPLHLGKCNIAGRILGNPECESLSTASSWSYIVETSSSDNGTCYPGDFIDYEELREQLSSVSSFERFEIFPKTSSWPNHDPNKGVTAACPHAGAKSFYKNLIWLVKKGNSYPKLSKSYINDKGKEVLVLWGIHHPSTSVDQQSLYQNADAYVFVGTSRYSKKFKPEIAIRPKVRDQEGRMNYYWTLVEPGDKITFEATGNLVVPRYAFAMERNAGSGIIISDTPVHDCNTTCQTPKGAINTSLPFQNIHPITIGKCPKYVKSTKLRLATGLRNVPSIQSRGLFGAIAGFIEGGWTGMVDGWYGYHHQNEQGSGYAADLKSTQNAIDEITNKVNSVIEKMNTQFTAVGKEFNHLEKRIENLNKKVDDGFLDIWTYNAELLVLLENERTLDYHDSNVKNLYEKVRSQLKNNAKEIGNGCFEFYHKCDNTCMESVKNGTYDYPKYSEEAKLNREEIDGVKLESTRIYQILAIYSTVASSLVLVVSLGAISFWMCSNGSLQCRICI

SEQ ID NO: 6148 - protein, 566 aa, synthetic construct; identical to SEQ ID NO: 3467
  REGION 1..566: note = hemagglutinin__InfluenzaA__ADO29893

SEQ ID NO: 6149 - protein, 566 aa, synthetic construct
  REGION 1..566: note = hemagglutinin__InfluenzaA__ADO29894
MKAILVVLLYTFATANADTLCIGYHANNSTDTVDTVLEMNVTVTHSVNLLEDKHNGKLCKLRGVAPLHLGKCNIAGWILGNPECESFSTSSSWSYIVETSSSDNGTCYPGDFIDYEELREQLSSVSSFERFEIFPKTSSWPNHDSNKGVTAACPHAGAKSFYKNLIWLVKKGSSYPKLSKSYINDKGKEVLVLWGIHHPSTSADQQSLYQNADAYVFVGTSRYSKKFKPEIAIRPKVRDQEGRMNYYWTLVEPGDKITFEATGNLVVPRYAFAMERNAGSGIIISDTPVHDCNTTCQTPKGAINTSLPFQNIHPITIGKCPKYVKSTKLRLATGLRNVPSIQSRGLFGAIAGFIEGGWTGMVDGWYGYHHQNEQGSGYAADLKSTQNAIDEITNKVNSVIEKMNTQFTAVGKEFNHLEKRIENLNKKVDDGFLDIWTYNAELLVLLENERTLDYHDSNVKNLYEKVRSQLKNNAKEIGNGCFEFYHKCDNTCMESVKNGTYDYPKYSEEAKLNREEIDGVKLESTRIYQILAIYSTVASSLVLVVSLGAISFWMCSNGSLQCRICI

SEQ ID NO: 6150 - protein, 566 aa, synthetic construct
  REGION 1..566: note = hemagglutinin__InfluenzaA__ADO29895
MKAILVALLYTFATANADTLCIGYHANNSTDTVDTVLEKNVTVTHSVNLLEDKHNGKLCKLRGVAPLHLGKCNIAGWILGNPECESFSTSSSWSYIVETSSSDNGTCYPGDFIDYEELREQLSSVSSFERFEIFPKTSSWPNHDSNKGVTAACPHAGAKSFYKNLIWLVKKGSSYPKLSKSYINDKGKEVLVLWGIHHPSTSADQQSLYQNADAYVFVGTSRYSKKFKPEIAIRPKVRDQEGRMNYYWTLVEPGDKITFEATGNLVVPRYAFAMERNAGSGIIISDTPVHDCNTTCQTPKGAINTSLPFQNIHPITIGKCPKYVKGTKLRLATGLRNVPSIQSRGLFGAIAGFIEGGWTGMVDGWYGYHHQNEQGSGYAADLKSTQNAIDEITNKVNSVIEKMNTQFTAVGKEFNHLEKRIENLNKKVDDGFLDIWTYNAELLVLLENERTLDYHDSNVKNLYEKVRSQLKNNAKEIGNGCFEFYHKCDNTCMERVKNGTYDYPKYSEEAKLNREEIDGVKLESTRIYQILAIYSTVASSLVLVVSLGAISFWMCSNGSLQCRICI

SEQ ID NO: 6151 - protein, 566 aa, synthetic construct
  REGION 1..566: note = hemagglutinin__InfluenzaA__ADO29897
MKAILVVLLYTFATANADILCIGYHANNSTDTVDTVLEKNVTVTHSVNLLEDKHNGKLCKLRGVAPLHLGKCNIAGWILGNPECESFSTSSSWSYIVETSSSDNGKCYPGDFIDYEELREQLSSVSSFERFEIFPKTSSWPNHDSNKGVTTACPHAGAKSFYKNLIWLVKKGNSYPRLSKSYINDKGKEVLVLWGIHHPSTSADQQSLYQNADAYVFVGTSRYSKKFKPEIAIRPKVRDQEGRMNYYWTLVEPGDKITFEATGNLVVPRYAFAMERNAGSGIIISDTPVHGCNTTCQTPKGAINTSLPFQNIHPITIGKCPKYVKSTKLRLATGLRNVPSIQSRGLFGAVAGFIEGGWTGMVDGWYGYHHQNEQGSGYAADLKSTQNAIDEITNKVNSVIEKMNTQFTAVGKEFNHLEKRIENLNKKVDDGFLDIWTYNAELLVLLENERTLDYHDSNVKNLYEKVRSQLKNNAKEIGNGCFEFYHKCDNTCMESVKNGTYDYPKYSEEAKLNREEIDGVKLESTRIYQILAIYSTVASSLVLVVSLGAISFWMCSNGSLQCRICI

SEQ ID NO: 6152 - protein, 566 aa, synthetic construct; identical to SEQ ID NO: 3467
  REGION 1..566: note = hemagglutinin__InfluenzaA__ADO29898

SEQ ID NO: 6153 - protein, 566 aa, synthetic construct
  REGION 1..566: note = hemagglutinin__InfluenzaA__ADO29899
MKAILVVLLYTFATANADTLCIGYHANNSTDTVDTVLEKNVTVTHSVNLLEDKHNGKLCKLRGVAPLHLGKCNIAGWILGNPECESLSTASSWSYIVETSSSDNGTCYPGDFIDYEELREQLSSVSSFERFEIFPKTSSWPNHDSNKGVTAACPHAGAKSFYKNLIWLVKKGNSYPKLSKSYINDKGKEVLVLWGIHHPSTSADQQSLYQNADAYVFVGTSRYSKKFKPEIAIRPKVRDQEGRMNYYWTLVEPGDKITFEATGNLVVPRYAFAMERNAGSGIIISDTPVHDCNTTCQTPKGAINTSLPFQNIHPITIGKCPKYVKSTKLRLATGLRNVPSIQSRGLFGAIAGFIEGGWTGMVDGWYGYHHQNEQGSGYAADLKSTQNAIDKITNKVNSVIEKMNTQFTAVGKEFNHLEKRIENLNKKVDDGFLDIWTYNAELLVLLENERTLDYHDSNVKNLYEKVRSQLKNNAKEIGNGCFEFYHKCDNTCMESVKNGTYDYPKYSEEAKLNREEIDGVKLESTRIYQILAIYSTVASSLVLVVSLGAISFWMCSNGSLQCRTCI

SEQ ID NO: 6154 - protein, 566 aa, synthetic construct
  REGION 1..566: note = hemagglutinin__InfluenzaA__ADO29900
MKAILVVLLYTFATANADTLCIGYHANNSTDTVDTVLEKNVTVTHSVNLLEDKHNGKLCKLRGVAPLHLGKCNIAGWILGNPECESLSTASSWSYIVETSSSDNGTCYPGDLIDYEELREQLSSVSSFERFEIFPKTSSWPNHDLNKGVTAACPHAGAKSFYKNLIWLVKKGNSYPKLSKSYINDKGKEVLVLWGIHHPSTSADQQSLYQNADAYVFVGTSRYSKKSKPEIAIRPKVRDQEGRMNYYWTLVEPGDKITFEATGNLVVPRYAFAMERNAGSGIIISDTPVHDCNTTCQTPKGAINTSLPFQNIHPITIGKCPKYVRSTKLRLATGLRNVPSIQSRGLFGAIAGFIEGGWTGMVDGWYGYHHQNEQGSGYAADLKSTQNAIDEITNKVNSVIEKMNTQFTAVGKEFNHLEKRIENLNKKVDDGFLDIWAYNAELLVLLENERTLDYHDSNVKNLYEKVRSQLKNNAKEIGNGCFEFYHKCDNTCMESVKNGTYDYPKYSEEAKLNREEIDGVKLESTRIYQILAIYSTVASSLVLVVSLGAISFWMCSNGSLQCRICI

SEQ ID NO: 6155 - protein, 566 aa, synthetic construct
  REGION 1..566: note = hemagglutinin__InfluenzaA__ADO29901
MKAILVVLLYTFATANADTLCIGYHANNSTDTVDTVLEKNVTVTHSVNLLEDKHNEKLCKLRGVAPLHLGKCNIAGWILGNPECESLSTASSWSYIVETSSSDNGTCYPGDFIDYEELREQLSSVSSFERFEIFPKTSSWPNHDSNKGVTAACPHAGAKSFYKNLIWLAKKGNSYPKVSKSYINDKGKEVLVLWGIHHPSTSADQQSLYQNADAYVFVGTSRYSKKFKPEIAIRPKVRDQEGRMNYYWTLVEPGDKITFEATGNLVVPRYAFAMERNAGSGIIISDTPVHDCNTTCQTPKGAINTSLPFQNIHPITIGKCPKYVKSTKLRLATGLRNVPSIQSRGLFGAIAGFIEGGWTGMVDGWYGYHHQNEQGSGYAADLKSTQNAIDEITNKVNSVIEKMNTQFTAVGKEFNHLEKRIENLNKKVDDGFLDIWTYNAELLVLLENERTLDYHDSNVKNLYEKVRSQLKNNAKEIGNGCFEFYHKCDNTCMESVKNGTYDYPKYSEEAKLNREEIDGVKLESTRIYQILAIYSTVASSLVLVVSLGAISFWMCFNGSLQCRICI

SEQ ID NO: 6156 - protein, 566 aa, synthetic construct
  REGION 1..566: note = hemagglutinin__InfluenzaA__ADO29902
MKAILVVLLYTFATANADTLCIGYHANNSTDTVDTVLEKNVTVTHSVNLLEDKHNGKLCKLRGVAPLHLGKCNIAGWILGNPECESLSTASSWSYIVETSSSDNGTCYPGDFIDYEELREQLSSVSSFERFEIFPKTSSWPNHDSNKGVTAACPHAGAKSFYKNLIWLVKKGNSYPKLSKSYINDKGKEVLVLWGIHHPSTSADQQSLYQNADAYVFVGTSRYSKKFKPEIAIRPKVRDQEGRMNYYWTLVEPGDKITFEATGNLVVPRYAFAMERNAGSGIIISDTPVHDCNTTCQTPKGAINTSLPFQNIHPITIGKCPKYVKSTKLRLATGLRNVPSIQSRGLFGAIAGFIEGGWTGMVDGWYGYHHQNEQGSGYAADLKSTQNAIDKITNKVNSVIEKMNTQFTAVGKEFNHLEKRIENLNKKVDDGFLDIWTYNAELLVLLENERTLDYHDSNVKNLYEKVRSQLKNNAKEIGNGCFEFYHKCDNTCMEGVKNGTYDYPKYSEEAKLNREEIDGVKLESTRIYQILAIYSTVASSLVLVVSLGAISFWMCSNGSLQCRICI

SEQ ID NO: 6157 - protein, 566 aa, synthetic construct
  REGION 1..566: note = hemagglutinin__InfluenzaA__ADO29903
MKAILVVLLYTFATANADTLCIGYHANNSTDTVDTVLEKNVTVTHSVNLLEDKHNGKLCKLRGVAPLHLGKCNTAGWILGNPECESLSTASSWSYIVETSSSDNGTCYPGDFIDYEELREQLSSVSSFERFEIFPKTSSWPNHDPNKGVTAACPHAGAKSFYKNLIWLVKKGNSYPKLSKSYINDKGKEVLVLWGIHHPSTSADQQSLYQNADAYVFVGTSRYSKKFKPEIAIRPKVRDQEGRMNYYWTLVEPGDKITFEATGNLVVPRYAFAMERNAGSGIIISDTPVHDCNTTCQTPKGAINTSLPFQNIHPITIGKCPKYVKSTKLRLATGLRNVPSIQSRGLFGAIAGFIEGGWTGMVDGWYGYHHQNEQGSGYAADLKSTQNAIDEITNKVNSVIEKMNTQFTAVGKEFNHLEKRIENLNKKVDDGFLDIWTYNAELLVLLENERTLDYHDSNVKNLYEKVRSQLKNNAKEIGNGCFEFYHKCDNTCMESVKNGTYDYPKYSEEAKLNREEIDGVKLESTRIYQILAIYSTVASSLVLVVSLGAISFWMCSNGSLQCRICI

SEQ ID NO: 6158 - protein, 566 aa, synthetic construct
  REGION 1..566: note = hemagglutinin__InfluenzaA__ADO29904
MKAILVVLLYTFATANADTLCIGYHANNSTDTVDTVLEKNVTVTHSVNLLEDKHNGKLCKLRGVAPLHLGRCNIAGWILGNPECESLSTASSWSYIVETSSSDNGTCYPGDFIDYEELREQLSSVSSFERFEIFPKTSSWPNHDPNKGVTAACPHAGAKSFYKNLIWLVKKGNSYPKLSKSYINDKGKEVLVLWGIHRPSTSADQQSLYQNADAYVFVGTSRYSKKFKPEIAIRPKVGDQEGRMNYYWTLVEPGDKITFEATGNLVVPRYAFAMERNAGSGIIISNTPVHDCNTTCQTPKGAINTSLPFQNIHPITIGKCPKYVKSTKLRLATGLRNVPSIQSRGLFGAIAGFIEGGWTGMVDGWYGYHHQNEQGSGYAADLKSTQNAIDEITNKVNSVIEKMNTQFTAVGKEFNHLEKRIENLNKKVDDGFLDIWTYNAELLVLLENERTLDYHDSNVKNLYEKVRSQLKNNAKEIGNGCFEFYHKCDNTCMESVKNGTYDYPKYSEEAKLNREEIDGVKLESTRIYQILAIYSTVASSLVLVVSLGAISFWMCSNGSLQCRICI

SEQ ID NO: 6159 - protein, 566 aa, synthetic construct
  REGION 1..566: note = hemagglutinin__InfluenzaA__ADO29905
MKAILVVLLYTFATANADTLCIGYHANNSTDTVDTVLEKNVTVTRSVNLLEDKHNGKLCKLRGVAPLHLGKCNIAGWILGNPECESLSTASSWSYIVETSSSDNGTCYPGDFIDYEELREQLSSVSSFERFEIFPKTSSWPNHDPNKGVTAACPHAGAKSFYKNLIWLVKKGNSYPKLSKSYINDKGKEVLVLWGIHHPSTSADQQSLYQNADAYVFVGTSRYSKKFKPEIAIRPKVRDQEGRMNYYWTLVEPGDKITFEATGNLVVPRYAFAMERNAGSGIIISNTPVHDCNTTCQTPKGAINTSLPFQNIHPITIGKCPKYVKSTKLRLATGLRNVPSIQSRGLFGAIAGFIEGGWTGMVDGWYGYHHQNEQGSGYAADLKSTQNAIDEITNKVNSVIEKMNTQFTAVGKEFNHLEKRIENLNKKVDDGFLDIWTYNAELLVLLENERTLDYHDSNVKNLYEKVRSQLKNNAKEIGNGCFEFYHKCDNTCMESVKNGTYDYPKYSEEAKLNREEIDGVKLESTRIYQILAIYSTVASSLVLVVSLGAISFWMCSNGSLQCRICI

SEQ ID NO: 6160 - protein, 566 aa, synthetic construct
  REGION 1..566: note = hemagglutinin__InfluenzaA__ADO29906
MKAILVVLLYTFATANADTLCIGYHANNSTDTVDTVLEKNVTVTHSVNLLEDKHNRKLCKLRGVAPLHLGKCNIAGWILGNPECESLSTASSWSYIVETSSSDNGTCYPGDFIDYEELREQLSSVSSFERFEIFPKTSSWPNHDPNKGVTAACPHAGAKSFYKNLIWLVKKGNSYPKLSKSYINDKGKEVLVLWGIHHPSTSADQQSLYQNADAYVFVGTSRYSKKFKPEIAIRPKVRDQEGRMNYYWTLVEPGDKITFEATGNLVVPRYAFAMERNAGSGIIISDTPVHDCNTTCQTPKGAINTSLPFQNIHPITIGKCPKYVKSTKLRLATGLRNVPSIQSRGLFGAIAGFIEGGWTGMVDGWYGYHHQNEQGSGYAADLKSTQNAIDEITNKVNSVIEKMNTQFTAVGKEFNHLEKRIENLNKKVDDGFLDIWTYNAELLVLLENERTLDYHDSNVKNLYEKVRSQLKNNAKEIGNGCFEFYHKCDNTCMESVKNGTYDYPKYSEEAKLNREEIDGVKLESTRIYQILAIYSTVASSLVLVVSLGAISFWMCSNGSLQCRICI

SEQ ID NO: 6161 - protein, 566 aa, synthetic construct
  REGION 1..566: note = hemagglutinin__InfluenzaA__ADO29907
MKAILVVLLYTFATANADTLCIGYHANNSTDTVDTVLEKNVTVTHSVNLLEDKHNGKLCKLRGVAPLHLGKCNIAGWILGNPECESLSTASSWSYIVETSSSDNGTCYPGDFIDYEELREQLSSVSSFERFEIFPKTSSWPNHDPNKGVTAACPHAGAKSFYKNLIWLVKKGNSYPKLSKSYINDKGKEVLVLWGIHHPSTSADQQSLYQNADAYVFVGTSRYSKKLKPEIAIRPKVRDQEGRMNYHWTLVEPGDKITFEATGNLVVPRYAFAMERNAGSGIIISDTPVHDCNTTCQTPKGAINTSLPFQNIHPITIGKCPKYVKSTKLRLATGLRNVPSIQSRGLFGAIAGFIEGGWTGMVDGWYGYHHQNEQGSGYAADLKSTQNAIDEITNKVNSVIEKMNTQFTAVGKEFNHLEKRIENLNKKVDDGFLDIWTYNAELLVLLENERTLDYHDSNVKNLYEKVRSQLKNNAKEIGNGCFEFYHKCDNTCMESVKNGTYDYPKYSEEAKLNREEIDGVKLESTRIYQILAIYSTVASSLVLVVSLGAISFWMCSNGSLQCRICI

SEQ ID NO: 6162 - protein, 566 aa, synthetic construct
  REGION 1..566: note = hemagglutinin__InfluenzaA__ADO29908
MKAILVVLLYTFATANADTLCIGYHANNSTDTVDTVLEKNVTVTHSVNLLEDKHNGKLCKLRGVAPLHLGKCNIAGWILGNPECESLSTASSWSYIVETSSSDNGTCYPGDFIDYEELREQLSSVSSFERFEIFPKTSSWPNHDPNKGVTAACPHAGAKSFYKNLIWLVKKGNSYPKLSKSYINDKGKEVLVLWGIHHPSTSADQQSLYQNADAYVFVGTSRYSKKFKPEIAIRPKVRDQEWRMNYYWTLVEPGDKITFEATGNLVVPRYAFAMERNAGSGIIISDTPVHDCNTTCQTPKGAINTSLPFQNIHPITIGKCPKYVKSTKLRLATGLRNVPSIQSRGLFGAIAGFIEGGWTGMVDGWYGYHHQNEQGSGYAADLKSTQNAIDEITNKVNSVIEKMNTQFTAVGKEFNHLEKRIENLNKKVDDGFLDIWTYNAELLVLLENERTLDYHDSNVKNLYEKVRSQLKNNAKEIGNGCFEFYHKCDNTCMESVKNGTYDYPKYSEEAKLNREEIDGVKLESTRVYQILATYSTVASSLVLVVSLGAISFWMCSNGSLQCRICI

SEQ ID NO: 6163 - protein, 566 aa, synthetic construct
  REGION 1..566: note = hemagglutinin__InfluenzaA__ADO29909
MKAILVVLLYTFATANADTLRIGYHANNSTDTVDTVLEKNVTVTHSVNLLEDKHNGKLCKLRGVAPLHLGKCNIAGWILGNPECESLSTASSWSYIVETSSSDNGTCYPGDFIDYEELREQLSSVSSFERFEIFPKTSSWPNHDPNKGVTAACPHAGAKSFYKNLIWLVKKGNSYPKLSKSYINDKGKEVLVLWGIHHPSTSADQQSLYQNADAYVFVGTSRYSKKFKPEIAIRPKVRDQEGRMNYYWTLVEPGDKITFEATGNLVVPRYAFAMERNAGSGIIISDTPVHDCNTTCQTPKGAINTSLPFQNIHPITIGKCPKYVKSTKLRLATGLRNVPSIQSRGLFGAIAGFIEGGWTGMVDGWYGYHHQNEQGSGYAADLKSIQNAIDEITNKVNSVIEKMNTQFTAVGKEFNHLEKRIENLNKKVDDGFLDIWTYNAELLVLLENERTLDYHDSNVKNLYEKVRSQLKNNAKEIGNGCFEFYHKCDNTCMESVKNGTYDYPKYSEEAKLNREEIDGVKLESTRIYQILAIYSTVASSLILVVSLGAISFWMCSNGSLQCRICI

SEQ ID NO: 6164 - protein, 566 aa, synthetic construct
  REGION 1..566: note = hemagglutinin__InfluenzaA__ADO29910
MKAILVVLLYTFATANADTLCIGYHANNSTDTVDTVLEKNVTVTHSVNLLEDKHNGKLCKPRGVAPLHLGKCNIAGWILGNPECESLSTASSWSYIVETSSSDNGTCYPGDFIDYEELREQLSSVSSFERFEIFPKTSSWPNHDPNKGVTAACPHAGAKSFYKNLIWLVKKGNSYPKLSKSYINDKGKEVLVLWGIHHPSTSADQQSLYQNADAYVFVGTSRYSKKFKPEIAIRPKVRDQEGRMNYYWTLVEPGDKITFEAIGNLVVPRYAFAMERNAGSGIIISDTPVHDCNTTCQTPKGAINTSLPFQNIHPITIGKCPKYVKSTKLRLATGLRNVPSIQSRGLFGAIAGFIEGGWTGMVDGWYGYHHQNEQGSGYAADLKSTQNAIDEITNKVNSVIEKMNTQFTAVGKEFNHLEKRIENLNKKVDDGFLDIWTYNAELLVLLENERTLDYHDSNVKNLYEKVRSQLKNNAKEIGNGCFEFYHKCDNTCMESVKNGTYDYPKYSEEAKLNRGEIDGVKLESTRIYQILAIYSTVASSLVLVVSLGAISFWMCSNGSLQCRICI

SEQ ID NO: 6165 - protein, 566 aa, synthetic construct; identical to SEQ ID NO: 4391
  REGION 1..566: note = hemagglutinin__InfluenzaA__ADO30407

SEQ ID NO: 6166 - protein, 566 aa, synthetic construct; identical to SEQ ID NO: 4282
  REGION 1..566: note = hemagglutinin__InfluenzaA__ADO30417

SEQ ID NO: 6167 - protein, 566 aa, synthetic construct; identical to SEQ ID NO: 4004
  REGION 1..566: note = hemagglutinin__InfluenzaA__ADO33202

SEQ ID NO: 6168 - protein, 566 aa, synthetic construct; identical to SEQ ID NO: 3512
  REGION 1..566: note = hemagglutinin__InfluenzaA__ADO33240

SEQ ID NO: 6169 - protein, 566 aa, synthetic construct; identical to SEQ ID NO: 2669
  REGION 1..566: note = hemagglutinin__InfluenzaA__ADO33247

SEQ ID NO: 6170 - protein, 566 aa, synthetic construct; identical to SEQ ID NO: 3512
  REGION 1..566: note = hemagglutinin__InfluenzaA__ADO33254

SEQ ID NO: 6171 - protein, 566 aa, synthetic construct; identical to SEQ ID NO: 3512
  REGION 1..566: note = hemagglutinin__InfluenzaA__ADO33261

SEQ ID NO: 6172 - protein, 566 aa, synthetic construct; identical to SEQ ID NO: 3512
  REGION 1..566: note = hemagglutinin__InfluenzaA__ADO33269

SEQ ID NO: 6173 - protein, 566 aa, synthetic construct; identical to SEQ ID NO: 4004
  REGION 1..566: note = hemagglutinin__InfluenzaA__ADO33277

SEQ ID NO: 6174 - protein, 566 aa, synthetic construct; identical to SEQ ID NO: 3512
  REGION 1..566: note = hemagglutinin__InfluenzaA__ADO33285

SEQ ID NO: 6175 - protein, 566 aa, synthetic construct; identical to SEQ ID NO: 4004
  REGION 1..566: note = hemagglutinin__InfluenzaA__ADO33293

SEQ ID NO: 6176 - protein, 566 aa, synthetic construct; identical to SEQ ID NO: 4004
  REGION 1..566: note = hemagglutinin__InfluenzaA__ADO33307

SEQ ID NO: 6177 - protein, 566 aa, synthetic construct; identical to SEQ ID NO: 3512
  REGION 1..566: note = hemagglutinin__InfluenzaA__ADO33313

SEQ ID NO: 6178 - protein, 566 aa, synthetic construct; identical to SEQ ID NO: 5762
  REGION 1..566: note = hemagglutinin__InfluenzaA__ADO33329

SEQ ID NO: 6179 - protein, 566 aa, synthetic construct; identical to SEQ ID NO: 3512
  REGION 1..566: note = hemagglutinin__InfluenzaA__ADO33337

SEQ ID NO: 6180 - protein, 566 aa, synthetic construct; identical to SEQ ID NO: 3512
  REGION 1..566: note = hemagglutinin__InfluenzaA__ADO33345

SEQ ID NO: 6181 - protein, 566 aa, synthetic construct; identical to SEQ ID NO: 4004
  REGION 1..566: note = hemagglutinin__InfluenzaA__ADO33352

SEQ ID NO: 6182 - protein, 566 aa, synthetic construct; identical to SEQ ID NO: 2669
  REGION 1..566: note = hemagglutinin__InfluenzaA__ADO33360

SEQ ID NO: 6183 - protein, 566 aa, synthetic construct; identical to SEQ ID NO: 3512
  REGION 1..566: note = hemagglutinin__InfluenzaA__ADO33368

SEQ ID NO: 6184 - protein, 566 aa, synthetic construct; identical to SEQ ID NO: 3512
  REGION 1..566: note = hemagglutinin__InfluenzaA__ADO33376

SEQ ID NO: 6185 - protein, 566 aa, synthetic construct; identical to SEQ ID NO: 2656
  REGION 1..566: note = hemagglutinin__InfluenzaA__ADO33384

SEQ ID NO: 6186 - protein, 566 aa, synthetic construct; identical to SEQ ID NO: 2669
  REGION 1..566: note = hemagglutinin__InfluenzaA__ADO33391

SEQ ID NO: 6187 - protein, 566 aa, synthetic construct
  REGION 1..566: note = hemagglutinin__InfluenzaA__ADO79917
MKAILVVLLYTFATANADTLCIGYHANNSTDTVDTVLEKNVTVTHSVNLLEDKHNGKLCKLRGVAPLHLGKCNIAGWILGNPECESLSTASSWSYIVETSSSDNGTCYPGDFIDYEELREQLSSVSSFERFEIFPKTSSWPNHDSNKGVTAACPHAGAKSFYKNLIWLVKKGNSYPKLSKSYINDKGKEVLVLWGIHHPSTSADQQSLYQNADAYVFVGTSRYSKKFKPEIAIRPKVRDREGRMNYYWTLVEPGDKITFEATGNLVVPRYAFAMERNAGSGIIISDTPVHNCNTTCQTPKGAINTSLPFQNIHPITIGKCPKYVKSTKLRLATGLRNVPSIQSRGLFGAIAGFIEGGWTGMVDGWYGYHHQNEQGSGYAADLKSTQNAIDEITNKVNSVIEKMNTQFTAVGKEFNHLEKRIENLNKKVDDGFLDIWTYNAELLVLLENERTLDYHDSNVKNLYEKVRSQLKNNAKEIGNGCFEFYHKCDNTCMESVKNGTYDYPKYSEEAKLNREEIDGVKLESTRIYQILAIYSTVASSLVLVVSLGAISFWMCSNGSLQCRICI

SEQ ID NO: 6188 - protein, 566 aa, synthetic construct
  REGION 1..566: note = hemagglutinin__InfluenzaA__ADO79923
MKAILVVLLYTFATANADTLCIGYHANNSTDTVDTVLEKNVTVTHSVNLLEDKHNGKLCKLRGVAPLHLGKCNIAGWILGNPECESLSTASSWSYIVETSSTDKWTCYPGDFIDYEELREQLSSVSSFERFEIFPKTSSWPNHDSNKGVTAACPHAGAKSFYKNLIWLVKKGNSYPKLSKSYINDKGKEVLVLWGIHHPSTSADQQSLYQNADAYVFVGTSRYSKKFKPEIAIRPKVRDQERRMNYYWTLVQPGDKITFQATGNLVVPRYAFAMERNAGSGIIISDTPVHNCNTTCQTPKGAINTSLPFQNIHPITIGKCPKYVKSTKLRLATGLRNVPSIQSRGLFGAIAGFIEGGWTGMVDGWYGYHHQNEQGSGYAADLKSTQNAIDEITNKVNSVIEKMNTQFTAVGKEFNHLEKRIENLNKKVDDGFLDIWTYNAELLVLLENERTLDYHDSNVKNLYEKVRSQLKNNAKEIGNGCFEFYHKCDNTCMESVKNGTYDYPKYSEEAKLNREEIDGVKLESTRIYQILAIYSTVASSLVLVVSLGAISFWMCSNGSLQCRICI

SEQ ID NO: 6189 - protein, 566 aa, synthetic construct
  REGION 1..566: note = hemagglutinin__InfluenzaA__ADO79924
MKAILVVLLYTFATANADTLCIGYHANNSTDTVDTVLEKNVTVTHSVNLLEDKHNGKLCKLRGVAPLHLGKCNIAGWILGNPECESLSTASSWSYIVETSSTDKWTCYPGDFIDYEELREQLSSVSSFERFEIFPKTSSWPNHDSNKGVTAACPHAGAKSFYKNLIWLVKKGNSYPKLSKSYINDKGKEVLVLWGIHHPSTSADQQSLYQNADAYVFVGTSRYSKKFKPEIAIRPKVRDREGRMNYYWTLIEPGDKITFEPTGNLVVPRYAFAMERNAGSGIIISDTPVHNCNTTCQTPKGAINTSLPFQNIHPITIGKCPKYVKSTKLRLATGLRNVPSIQSRGLFGAIAGFIEGGWTGMVDGWYGYHHQNEQGSGYAADLKSTQNAIDEITNKVNSVIEKMNTQFTAVGKEFNHLEKRIENLNKKVDDGFLDIWTYNAELLVLLENERTLDYHDSNVKNLYEKVRSQLKNNAKEIGNGCFEFYHKCDNTCMESVKNGTYDYPKYSEEAKLNREEIDGVKLESTRIYQILAIYSTVASSLVLVVSLGAISFWMCSNGSLQCRICI

SEQ ID NO: 6190 - protein, 566 aa, synthetic construct
  REGION 1..566: note = hemagglutinin__InfluenzaA__ADO79925
MKAILVVLLYTFATANADTLCIGYHANNSTDTVDTVLEKNVTVTHSVNLLEDKHNGKLCKLRGVAPLHLGKCNIAGWILGNPECESLSTASSWSYIVETSSTHEWTCYPGDFIDYEELREQLSSVSSFERFEIFPKTSSWPNHDSNKGVTAACPHAGAKSFYKNLIWLVKKGNSYPKLSKSYINDKGKEVLVLWGIHHPSTSADQQSLYQNADAYVFVGTSRYSKKFKPEIAIRPKVRDREGRMNYYWTLVEPGDKITFEAPGNLVVPRYAFAMERNAGSGIIISDTPVHNCNTTCQTPKGAINTSLPFQNIHPIKIGKCSKYVKSTKLRLATGLRNVPSIQSRGLFGAIAGFIEGGWTGMVDGWYGYHHQNEQGSGYAADLKSTQNAIDEITNKVNSVIEKMNTQFTAVGKEFNHLEKRIENLNKKVDDGFLDIWTYNAELLVLLENERTLDYHDSNVKNLYEKVRSQLKNNAKEIGNGCFEFYHKCDNTCMESVKNGTYDYPKYSEEAKLNREEIDGVKLESTRIYQILAIYSTVASSLVLVVSLGAISFWMCSNGSLQCRICI

SEQ ID NO: 6191 - protein, 566 aa, synthetic construct
  REGION 1..566: note = hemagglutinin__InfluenzaA__ADO79926
MKAILVVLLYTFATANADTLCIGYHANNSTDTVDTVLEKNVTVTHSVNLLEDKHNGKLCKLRGVAPLHLGKCNIAGWILGNPECESLSTASSWSYIVETSSTDKWTCYPGDFIDYEELREQLSSVSSFERFEIFPKTSSWPNHDSNKGVTAACPHAGAKSFYKNLIWLVKKGNSFSKLSKTYLNDKGKEVLVLWGIHHPSTSADQQSLYQNADAYVFVGTSRYSKKFKPEIAIRPKVRDQEGRMNYYWTLVEPGDKITFEATGNLVVPRYAFAMERNVGSGIIISDTPVHDCNTTCQTPKGAINTSLPFQNIHPITIGKCPKYVKSTKLRLATGLRNVPSIQSRGLFGAIAGFIEGGWTGMVDGWYGYHHQNEQGSGYAADLKSTQNAIDKITNKVNSVIEKMNTQFTAVGKEFNHLEKRIENLNKKVDDGFLDIWTYNAELLVLLENERTLDYHDSNVKNLYEKVRSQLKNNAKEMKNGCFEFYHKCDNTCMESVKNGTYDYPKYSEEAKLNREEIDGVKLESTRIYQILAIYSTVASSLVLVVSLGAISFWMCSNGSLQCRICI

SEQ ID NO: 6192 - protein, 566 aa, synthetic construct
  REGION 1..566: note = hemagglutinin__InfluenzaA__ADO79927
MKAILVVLLYTFATANADTLCIGYHANNSTDTVDTVLEKNVTVTHSVNLLEDKHNGKLCKLRGVAPLHLGKCNIAGWILGNPECESLSTASSWSYIVETSSTDKWTCYPGDFIDYEELREQLSSVSSFERFEIFPKTSSWPNHDSNKGVTAACPHAAAKSFYKNLIWLVKKGNSYPKLSKSYINDKGKEVLVLWGIHHPSTSADQQSLYQNADAYVFVGTSRYSKKFKPEIAIRPKVRDQEGRMNYYWTLVEPGDKITFEATGNLVVPRYAFAMERNAGSGIIISDTPVHDCNTTCQTPKGAINTSLPFQNIHPITIGKCPKYVKSTKLRLATGLRNIPSVQSRGLFGAIAGFIEGGWTGMVDGWYGYHHQNEQGSGYAADLKSTQNAIDKITNKVNSVIEKMNTQFTAVGKEFNHLEKRIENLNKKVDDGFLDIWTYNAELLVLLENERTLDYHDSNVKNLYEKVRSQLKNNAKEMKNGCFEFYHKCDNTCMESVKNGTYDYPKYSEEAKLNREEIDGVKLESTRIYQILAIYSTVASSLVLVVSLGAISFWMCSNGSLQCRICI

SEQ ID NO: 6193 - protein, 566 aa, synthetic construct
  REGION 1..566: note = hemagglutinin__InfluenzaA__ADO79928
MKAILVVLLYTFATANADTLCIGYHANNSTDTVDTVLEKNVTVTHSVNLLEDKHNGKLCKLRGVAPLHLGKCNIAGWILGNPECESLSTASSWSYIVETSSTDKWTCYPGDFIDYEELREQLSSVSSFERFEIFPKTNSWPNHDSNKGVTAACPHAGAKSFYKNLIWLVKKGNSYPKLSKSYINDKGKEVLVLWGIHHPSTSADQQSLYQNADAYVFVGTSKYSKKFKPEIAIRPKVRDQEGRMNYYWTLVEPGDKITFEATGNLVVPRYAFAMERNAGSGIIISDTPVHDCNTTCQTPKGAINTSLPFQNIHPITIGKCPKYVKSTKLRLATGLRNVPSIQSRGLFGAIAGFIEGGWTGMVDGWYGYHHQNEQGSGYAADLKSTQNAIDEITNKVNSVIEKMNTQFTAVGKEFNHLEKRIENLNKKVDDGFLDIWTYNAELLVLLENERTLDYHDSNVKNLYEKVRSQLKNNAKEIGNGCFEFYHKCDNTCMESVKNGTYDYPKYSEEAKLNREEIDGVKLESTRIYQILAIYSTVASSLVLVVSLGAISFWMCSNGSLQCRICI

SEQ ID NO: 6194 - protein, 566 aa, synthetic construct
  REGION 1..566: note = hemagglutinin__InfluenzaA__ADO79929
MKAILVVLLYTFATANADTLCIGYHANNSTDTVDTVLEKNVTVTHSVNLLEDKHNGKLCKLRGVAPLHLGKCNIAGWILGNPECESLSTASSWSYIVETSSTDKWTCYPGDFIDYEELREQLSSVSSFERFEIFPKTSSWPNHDSNKGVTAACPHAGAKSFYKNLIWLVKKGNSYPKLSKSYINDKGKEVLVLWGIHHPSTSADQQSLYQNADAYVFVGTSRYSKKFKPEIAIRPKVRGQEGRMNYYWTLVEPGDKITFEATGNLVVPRYAFAMERNAGSGIIISDTPVHDCNTTCQTPKGAINTSLPFQNIHPITIGKCPKYVKSTKLRLATGLRNIPSIQSRGLFGAIAGFIEGGWTGMVDGWYGYHHQNEQGSGYAADLKSTQNAIDEITNKVNSVIEKMNTQFTAVGKEFNHLEKRIENLNKKVDDGFLDIWTYNAELLVLLENERTLDYHDSNVKNLYEKVRSQLKNNAKEIGNGCFEFYHKCDNTCMESVKNGTYDYPKYSEEAKLNREEIDGVKLESTRIYQILAIYSTVASSLVLVVSLGAISFWMCSNGSLQCRICI

SEQ ID NO: 6195 - protein, 566 aa, synthetic construct
  REGION 1..566: note = hemagglutinin__InfluenzaA__ADO79930
MKAILVVLLYTFATANADTLCIGYHANNSTDTVDTVLEKNVTVTHSVNLLEDKHNGKLCKLRGVAPLHLGKCNIAGWILGNPECESLSTASSWSYIVETSSTDKWTCYPGDFIDYEELREQLSSVSSFERFEIFPKTSSWPNHDSNKGVTAACPHAGAKSFYKNLIWLVKKGNSYPKLSKSYINDKGKEVLVLWGIHHPSTSADQQSLYQNADAYVFVGTSRYSKKFKPEIAIRPKVRDREGRMNYYWTLVEPGDKITFEATGNLVVPRYAFAMERNAGSGIIISDTPVHNCNTTCQTPKGAINTSLPFQNIHPITIGKCPKYVKSTKLRLATGLRNVPSIQSRGLFGAIAGFIEGGWTGMVDGWYGYHHQNEQGSGYAADLKSTQNAIDEITNKVNSVIEKMNTQFTAVGKEFNHLEKRIENLNKKVDDGFLDIWTYNAELLVLLENERTLDYHDSNVKNLYEKVRSQLKNNAKEIGNGCFEFYHKCDNTCMESVKNGTYDYPKYSEEAKLNREEIDGVKLESTRIYQILAIYSTVASSLVLVVSLGAISFWMCSNGSLQCRICI

SEQ ID NO: 6196 - protein, 566 aa, synthetic construct
  REGION 1..566: note = hemagglutinin__InfluenzaA__ADO84715
MKAILVVLLYTFATANAGTLCIGYHANNSTDTVDTVLEKNVTVTHSVNLLEDKHNGKLCKLRGVAPLHLGKCNIAGWILGNPECESLSTASSWSYIVETFSSDNGTCYPGDFIDYEELREQLSSVSSFERFEIFPKTSSWPNHDSNKGVTAACPHAGAKSFYKNLIWLVKKGNSYPKLSKSYINDKGKEVLVLWGIHHPSTSADQQSLYQNADAYVFVGTSRYSKKFKPEIAIRPKVRDQEGRMNYYWTLVEPGDKITFEATGNLVVPRYAFAMERNAGSGIIISDTPVHDCNTTCQTPKGAINTSLPFQNIHPITIGKCPKYVKSTKLRLATGLRNVPSIQSRGLFGAIAGFIEGGWTGMVDGWYGYHHQNEQGSGYAADLKSTQNAIDEITNKVNSVIEKMNTQFTAVGKEFNHLEKRIENLNKKVDDGFLDIWTYNAELLVLLENERTLDYHDSNVKNLYEKVRSQLKNNAKEIGNGCFEFYHKCDNTCMESVKNGTYDYPKYSEEAKLNREEIDGVKLESTRIYQILAIYSTVASSLVLVVSLGAISFWMCSNGSLQCRICI

SEQ ID NO: 6197 - protein, 566 aa, synthetic construct; identical to SEQ ID NO: 2849
  REGION 1..566: note = hemagglutinin__InfluenzaA__ADP95341

SEQ ID NO: 6198 - protein, 566 aa, synthetic construct; identical to SEQ ID NO: 2656
  REGION 1..566: note = hemagglutinin__InfluenzaA__ADP95351

SEQ ID NO: 6199 - protein, 566 aa, synthetic construct; identical to SEQ ID NO: 2656
  REGION 1..566: note = hemagglutinin__InfluenzaA__ADP95361

SEQ ID NO: 6200 - protein, 566 aa, synthetic construct; identical to SEQ ID NO: 2656
  REGION 1..566: note = hemagglutinin__InfluenzaA__ADP95371

SEQ ID NO: 6201 - protein, 566 aa, synthetic construct; identical to SEQ ID NO: 2656
  REGION 1..566: note = hemagglutinin__InfluenzaA__ADP95381

SEQ ID NO: 6202 - protein, 566 aa, synthetic construct; identical to SEQ ID NO: 2656
  REGION 1..566: note = hemagglutinin__InfluenzaA__ADP95391

SEQ ID NO: 6203 - protein, 566 aa, synthetic construct; identical to SEQ ID NO: 2911
  REGION 1..566: note = hemagglutinin__InfluenzaA__ADQ28007

SEQ ID NO: 6204 - protein, 566 aa, synthetic construct; identical to SEQ ID NO: 2669
  REGION 1..566: note = hemagglutinin__InfluenzaA__ADQ28008

SEQ ID NO: 6205 - protein, 566 aa, synthetic construct; identical to SEQ ID NO: 4520
  REGION 1..566: note = hemagglutinin__InfluenzaA__ADQ28009

SEQ ID NO: 6206 - protein, 566 aa, synthetic construct
  REGION 1..566: note = hemagglutinin__InfluenzaA__ADQ28010
MKAILVVLLYTFATANADTLCIGYHANNSTDTVDTVLEKNVTVTHSVNLLEDKHNGKLCKLRGVAPLHLGKCNIAGWILGNPECESLSTASSWSYIVETSSSDNGTCYPGDFINYEELREQLSSVSSFERFEIFPKTSSWPNHDSNKGVTAACPHAGAKSFYKSLIWLVKKGNSYPKLSKSYINDKGKEVLVLWGIHHPSTSADQQSLYQNADAYVFVGTSRYSKKFKPEIAIRPKVRDQEGRMNYYWTLVEPGDKITFEATGNLVVPRYAFAMERNAGSGIIISDTPVHDCNTTCQTPKGAINTSLPFQNIHPITIGKCPKYVKSTKLRLATGLRNVPSIQSRGLFGAIAGFIEGGWTGMVDGWYGYHHQNEQGSGYAADLKSTQNAIDEITNKVNSVIEKMNTQFTAVGKEFNHLEKRIENLNKKVDDGFLDIWTYNAELLVLLENERTLDYHDSNVKNLYEKVRSQLKNNAKEIGNGCFEFYHKCDNTCMESVKNGTYDYPKYSEEAKLNREEIDGVKLESTRIYQILAIYSTVASSLVLVVSLGAISFWMCSNGSLQCRICI

SEQ ID NO: 6207 - protein, 566 aa, synthetic construct; identical to SEQ ID NO: 2669
  REGION 1..566: note = hemagglutinin__InfluenzaA__ADQ28011

SEQ ID NO: 6208 - protein, 566 aa, synthetic construct; identical to SEQ ID NO: 2669
  REGION 1..566: note = hemagglutinin__InfluenzaA__ADQ28012

SEQ ID NO: 6209 - protein, 566 aa, synthetic construct; identical to SEQ ID NO: 2669
  REGION 1..566: note = hemagglutinin__InfluenzaA__ADQ28013

SEQ ID NO: 6210 - protein, 566 aa, synthetic construct; identical to SEQ ID NO: 2911
  REGION 1..566: note = hemagglutinin__InfluenzaA__ADQ28014

SEQ ID NO: 6211 - protein, 566 aa, synthetic construct; identical to SEQ ID NO: 2911
  REGION 1..566: note = hemagglutinin__InfluenzaA__ADQ28015

SEQ ID NO: 6212 - protein, 566 aa, synthetic construct; identical to SEQ ID NO: 2669
  REGION 1..566: note = hemagglutinin__InfluenzaA__ADQ28016

SEQ ID NO: 6213 - protein, 566 aa, synthetic construct; identical to SEQ ID NO: 2669
  REGION 1..566: note = hemagglutinin__InfluenzaA__ADQ28017

SEQ ID NO: 6214 - protein, 566 aa, synthetic construct; identical to SEQ ID NO: 4915
  REGION 1..566: note = hemagglutinin__InfluenzaA__ADQ28018

SEQ ID NO: 6215 - protein, 566 aa, synthetic construct; identical to SEQ ID NO: 2911
  REGION 1..566: note = hemagglutinin__InfluenzaA__ADQ28019

SEQ ID NO: 6216 - protein, 566 aa, synthetic construct
  REGION 1..566: note = hemagglutinin__InfluenzaA__ADQ28020
MEAILVVLLYTFATANADTLCIGYHANNSTDTVDTVLEKNVTVTHSVNLLEDKHNGKLCKLRGVAPLHLGKCNIAGWILGNPECESLSTASSWSYIVETSSSDNGTCYPGDFIDYEELREQLSSVSSFERFEIFPKTSSWPNHDSNKGVTAACPQAGAKSFYKNLIWLVKKGNSYPKLSKSYINDKGKEVLVLWGIHHPSTSADQQSLYQNADAYVFVGSSRYSKKFKPEIAIRPKVRDQEGRMNYYWTLVEPGDKITFEATGNLVVPRYAFAMERNAGSGIIISDTPVHDCNTTCQTPKGAINTSLPFHNIHPITIGKCPKYVKSTKLRLATGLRNVPSIQSRGLFGAIAGFIEGGWTGMVDGWYGYHHQNEQGSGYAADLKSTQNAIDEITNKVNSVIEKMNTQFTAVGKEFNHLEKRIENLNKKVDDGFLDIWTYNAELLVLLENERTLDYHDSNVKNLYEKVRSQLKNNAKEIGNGCFEFYHKCDNTCMESVKNGTYDYPKYSEEAKLNREEIDGVKLESTRIYQILAIYSTVASSLVLVVSLGAISFWMCSNGSLQCRICI

SEQ ID NO: 6217 - protein, 566 aa, synthetic construct; identical to SEQ ID NO: 3863
  REGION 1..566: note = hemagglutinin__InfluenzaA__ADQ28021

SEQ ID NO: 6218 - protein, 566 aa, synthetic construct
  REGION 1..566: note = hemagglutinin__InfluenzaA__ADQ28022
MKAILVVLLYTFATANADTLCIGYHANNSTDTVDTVLEKNVTVTHSVNLLEDKHNGKLCKLRGVAPLHLGKCNIAGWILGNPECESLSTASSWSYIVETSSSDNGTCYPGNFIDYEELREQLSSVSSFERFEIFPKTSSWPNHDSNKGVTAACPHAGAKSFYKNLIWLVKKGNSYPKLSKSYINDKGKEVLVLWGIHHPSTSADQQSLYQNADAYVFVGTSRYSKKFKPEIAIRPKVRGQEGRMNYYWTLVEPGDKITFEATGNLVVPRYAFAMERNAGSGIIISDTPVHDCNTTCQTPKGAINTSLPFQNIHPITIGKCPKYVKSTKLRLATGLRNVPSIQSRGLFGAIAGFIEGGWTGMVDGWYGYHHQNEQGSGYAADLKSTQNAIDEITNKVNSVIEKMNTQFTAVGKEFNHLEKRIENLNKKVDDGFLDIWTYNAELLVLLENERTLDYHDSNVKNLYEKVRSQLKNNAKEIGNGCFEFYHKCDNTCMESVKNGTYDYPKYSEEAKLNREEIDGVKLESTRIYQILAIYSTVASSLVLVVSLGAISFWMCSNGSLQCRICI

SEQ ID NO: 6219 - protein, 566 aa, synthetic construct; identical to SEQ ID NO: 2669
  REGION 1..566: note = hemagglutinin__InfluenzaA__ADQ28023

SEQ ID NO: 6220 - protein, 566 aa, synthetic construct; identical to SEQ ID NO: 2911
  REGION 1..566: note = hemagglutinin__InfluenzaA__ADQ28024

SEQ ID NO: 6221 - protein, 566 aa, synthetic construct; identical to SEQ ID NO: 2911
  REGION 1..566: note = hemagglutinin__InfluenzaA__ADQ28025

SEQ ID NO: 6222 - protein, 566 aa, synthetic construct; identical to SEQ ID NO: 3414
  REGION 1..566: note = hemagglutinin__InfluenzaA__ADQ28028

SEQ ID NO: 6223 - protein, 566 aa, synthetic construct; identical to SEQ ID NO: 4894
  REGION 1..566: note = hemagglutinin__InfluenzaA__ADQ28029

SEQ ID NO: 6224 - protein, 566 aa, synthetic construct
  REGION 1..566: note = hemagglutinin__InfluenzaA__ADQ28030
MKAILVVLLYTFATANADTLCIGYHANNSTDTVDTVLEKNVTVTHSVNLLEDKHNGKLCKLRGVAPLHLGKCNIAGWILGNPECESLSTASSWSYIVETSSSDNGTCYPGDFINYEELREQLSSVSSFERFEIFPKTSSWPNHDSNKGITAACPHAGAKSFYKNLIWLVKKGNSYPKLSKSYINDKGKEVLVLWGIHHPSTSADQQSLYQNADAYVFVGTSRYSKKFKPEIAIRPKVRDQEGRMNYYWTLVEPGDKITFEATGNLVVPRYAFAMERNAGSGIIISDTPVHDCNTTCQTPKGAINTSLPFQNIHPITIGKCPKYVKSTKLRLATGLRNVPSIQSRGLFGAIAGFIEGGWTGMVDGWYGYHHQNEQGSGYAADLKSTQNAIDEITNKVNSVIEKMNTQFTAVGKEFNHLEKRIENLNKKVDDGFLDIWTYNAELLVLLENERTLDYHDSNVKNLYEKVRSQLKNNAKEIGNGCFEFYHKCDNTCMESVKNGTYDYPKYSEEAKLNREEIDGVKLESTRIYQILAIYSTVASSLVLVVSLGAISFWMCSNGSLQCRICI

SEQ ID NO: 6225 - protein, 566 aa, synthetic construct; identical to SEQ ID NO: 3863
  REGION 1..566: note = hemagglutinin__InfluenzaA__ADQ28031

SEQ ID NO: 6226 - protein, 566 aa, synthetic construct; identical to SEQ ID NO: 2911
  REGION 1..566: note = hemagglutinin__InfluenzaA__ADQ28032

SEQ ID NO: 6227 - protein, 566 aa, synthetic construct
  REGION 1..566: note = hemagglutinin__InfluenzaA__ADQ28034
MKAILVVLLYTFATANADTLCIGYHANNSTDTVDTVLEKNVTVTHSVNLLEDKHNGKLCKLRGVAPLHLGKCNIAGWILGNPECESLSTASSWSYIVETSSSDNGTCYPGDFINYEELREQLSSVSSFERFEIFPKTSSWPNHDSNKGVTAACPHAGAKSFYKNLIWLVKKGNSYPKLSKSYINDKGKEVLVLWGIHHPSTSADQQSLYQNADAYVFVGTSRYSKKFKPEIAIRPKVRGQEGRMNYYWTIVEPGDKITFEATGNLVVPRYAFAMERNAGSGIIISDTPVHDCNTTCQTPKGAINTSLPFQNIHPITIGKCPKYVKSTKLRLATGLRNVPSIQSRGLFGAIAGFIEGGWTGMVDGWYGYHHQNEQGSGYAADLKSTQNAIDEITNKVNSVIEKMNTQFTAVGKEFNHLEKRIENLNRKVDDGFLDIWTYNAELLVLLENERTLDYHDSNVKNLYEKVRSQLKNNAKEIGNGCFEFYHKCDNTCMESVKNGTYDYPKYSEEAKLNREEIDGVKLESTRIYQILAIYSTVASSLVLVVSLGAISFWMCSNGSLQCRICI

SEQ ID NO: 6228 - protein, 566 aa, synthetic construct
  REGION 1..566: note = hemagglutinin__InfluenzaA__ADQ28035
MKAILVVLLYTFATANADTLCIGYHANNSTDTVDTVLEKNVTVTHSVNLLEDKHNGKLCRLRGVAPLHLGKCNIAGWILGNPECESLSTASSWSYIVETSSSDNGTCYPGDFIDYEELREQLSSVSSFERFEIFPKTSSWPNHDSNKGVTAACPHAGAKSFYKNLIWLVKKGNSYPKLSKSYINDKGKEVLVLWGIHHPSTSADQQSLYQNADAYVFVGTSRYSKKFKPEIAIRPKVRGQEGRMNYYWTLVEPGDKITFEATGNLVVPRYAFAMERNAGSGIIISDTPVHDCNTTCQTPKGAINTSLPFQNIHPITIGKCPKYVKSTKLRLATGLRNVPSIQSRGLFGAIAGFIEGGWTGMVDGWYGYHHQNEQGSGYAADLKSTQNAIDEITNKVNSVIEKMNTQFTAVGKEFNHLEKRIENLNKKVDDGFLDIWTYNAELLVLLENERTLDYHDSNVKNLYEKVRSQLKNNAKEIGNGCFEFYHKCDNTCMESVKNGTYDYPKYSEEAKLNREEIDGVKLESTRIYQILAIYSTVASSLVLVVSLGAISFWMCSNGSLQCRICI

SEQ ID NO: 6229 - protein, 566 aa, synthetic construct; identical to SEQ ID NO: 2669
  REGION 1..566: note = hemagglutinin__InfluenzaA__ADQ28036

SEQ ID NO: 6230 - protein, 566 aa, synthetic construct; identical to SEQ ID NO: 2669
  REGION 1..566: note = hemagglutinin__InfluenzaA__ADQ28037

SEQ ID NO: 6231 - protein, 566 aa, synthetic construct; identical to SEQ ID NO: 2911
  REGION 1..566: note = hemagglutinin__InfluenzaA__ADQ28038

SEQ ID NO: 6232 - protein, 566 aa, synthetic construct; identical to SEQ ID NO: 2669
  REGION 1..566: note = hemagglutinin__InfluenzaA__ADQ28039

SEQ ID NO: 6233 - protein, 566 aa, synthetic construct; identical to SEQ ID NO: 2911
  REGION 1..566: note = hemagglutinin__InfluenzaA__ADQ28040

SEQ ID NO: 6234 - protein, 566 aa, synthetic construct; identical to SEQ ID NO: 2911
  REGION 1..566: note = hemagglutinin__InfluenzaA__ADQ28041

SEQ ID NO: 6235 - protein, 566 aa, synthetic construct
  REGION 1..566: note = hemagglutinin__InfluenzaA__ADQ28043
MEAILVVLLYTFATANADTLCIGYHANNSTDTVDTVLEKNVTVTHSVNLLEDKHNGKLCKLRGVAPLHLGKCNIAGWILGNPECESLSTASSWSYIVETSSSDNGTCYPGDFIDYEELREQLSSVSSFERFEIFPKTSSWPNHDSNKGVTAACPHDGAKSFYKNLIWLVKKGNSYPKLSKSYINDKGKEVLVLWGIHHPSTSADQQSLYQNADAYVFVGSSRYSKKFKPEIAIRPKVRDQEGRMNYYWTLVEPGDKITFEATGNLVVPRYAFAMERNAGSGIIISDTPVHDCNTTCQTPKGAINTSLPFHNIHPITIGKCPKYVKSTKLRLATGLRNVPSIQSRGLFGAIAGFIEGGWTGMVDGWYGYHHQNEQGSGYAADLKSTQNAIDEITNKVNSVIEKMNTQFTAVGKEFNHLEKRIENLNKKVDDGFLDIWTYNAELLVLLENERTLDYHDSNVKNLYEKVRSQLKNNAKEIGNGCFEFYHKCDNTCMESVKNGTYDYPKYSEEAKLNREEIDGVKLESTRIYQILAIYSTVASSLVLVVSLGAISFWMCSNGSLQCRICI

SEQ ID NO: 6236 - protein, 566 aa, synthetic construct; identical to SEQ ID NO: 2911
  REGION 1..566: note = hemagglutinin__InfluenzaA__ADQ28044

SEQ ID NO: 6237 - protein, 566 aa, synthetic construct
  REGION 1..566: note = hemagglutinin__InfluenzaA__ADQ28045
MKAILVVLLYTFATANADTLCIGYHANNSTDTVDTVLEKNVTVTHSVNLLEDKHNGKLCKLRGVAPLHLGKCNIAGWILGNPECESLSTASSWSYIVETSSSDNGTCYPGDFIDYEELREQLSSVSSFERFEIFPKTSSWPNHDSNKGVTAACSHAGAKSFYKNLIWLVKKGNSYPKLSKSYINDKGKEVLVLWGIHHPSTSADQQSLYQNADAYVFVGTSRYSKKFKPEIAIRPKVRDQEGRMNYYWTLVEPGDKITFEATGNLVVPRYAFAMERNAGSGIIISDTPVHDCNTTCQTPKGAINTSLPFQNIHPITIGKCPKYVKSTKLRLATGLRNVPSIQSRGLFGAIAGFIEGGWTGMVDGWYGYHHQNEQGSGYAADLKSTQNAIDEITNKVNSVIEKMNTQFTAVGKEFNHLEKRIENLNKKVDDGFLDIWTYNAELLVLLENERTLDYHDSNVKNLYEKVRNQLKNNAKEIGNGCFEFYHKCDNTCMESVKNGTYDYPKYSEEAKLNREEIDGVKLESTRIYQILAIYSTVASSLVLVVSLGAISFWMCSNGSLQCRICI

SEQ ID NO: 6238 - protein, 566 aa, synthetic construct; identical to SEQ ID NO: 3139
  REGION 1..566: note = hemagglutinin__InfluenzaA__ADQ28047

SEQ ID NO: 6239 - protein, 566 aa, synthetic construct; identical to SEQ ID NO: 2669
  REGION 1..566: note = hemagglutinin__InfluenzaA__ADQ28048

SEQ ID NO: 6240 - protein, 566 aa, synthetic construct; identical to SEQ ID NO: 2911
  REGION 1..566: note = hemagglutinin__InfluenzaA__ADQ28049

SEQ ID NO: 6241 - protein, 566 aa, synthetic construct; identical to SEQ ID NO: 2669
  REGION 1..566: note = hemagglutinin__InfluenzaA__ADQ28050

SEQ ID NO: 6242 - protein, 566 aa, synthetic construct
  REGION 1..566: note = hemagglutinin__InfluenzaA__ADQ28051
MKAILVVLLYTFATANADTLCIGYHANNSTDTVDTVLEKNVTVTHSVNLLEDKHDGKLCKLRGVAPLHLGKCNIAGWILGNPECESLSTASSWSYIVETSSSDNGTCYPGDFINYEELREQLSSVSSFERFEIFPKTSSWPNHDSNKGVTAACPHAGAKSFYKNLIWLVKKGNSYPKLSKSYINDKGKEVLVLWGIHHPSTSADQQSLYQNADAYVFVGTSRYSKKFKPEIAIRPKVRDQEGRMNYYWTLVEPGDKITFEATGNLVVPRYAFAMERNAGSGIIISDTPVHDCNTTCQTPKGAINTSLPFQNIHPITIGKCPKYVKSTKLRLATGLRNVPSIQSRGLFGAIAGFIEGGWTGMVDGWYGYHHQNEQGSGYAADLKSTQNAIDEITNKVNSVIEKMNTQFTAVGKEFNHLEKRIENLNKKVDDGFLDIWTYNAELLVLLENERTLDYHDSNVKNLYEKVRSQLKNNAKEIGNGCFEFYHKCDNTCMESVKNGTYDYPKYSEEAKLNREEIDGVKLESTRIYQILAIYSTVASSLVLVVSLGAISFWMCSNGSLQCRICI

SEQ ID NO: 6243 - protein, 566 aa, synthetic construct; identical to SEQ ID NO: 2669
  REGION 1..566: note = hemagglutinin__InfluenzaA__ADQ28053

SEQ ID NO: 6244 - protein, 566 aa, synthetic construct; identical to SEQ ID NO: 2911
  REGION 1..566: note = hemagglutinin__InfluenzaA__ADQ28055

SEQ ID NO: 6245 - protein, 566 aa, synthetic construct
  REGION 1..566: note = hemagglutinin__InfluenzaA__ADQ28056
MEAILVVLLYTFATADADTLCIGYHANNSTDTVDTVLEKNVTVTHSVNLLEDKHNGKLCKLRGVAPLHLGKCNIAGWILGNPECESLSTASSWSYIVETSSSDNGTCYPGDFIDYEELREQLSSVSSFERFEIFPKTSSWPNHDSNKGVTAACPHAGAKSFYKNLIWLVKKGNSYPKLSKSYINDKGKEVLVLWGIHHPSTSADQQSLYQNADAYVFVGSSRYSKKFKPEIAIRPKVRDQEGRMNYYWTLVEPGDKITFEATGNLVVPRYAFAMERNAGSGIIISDTPVHDCNTTCQTPKGAINTSLPFHNIHPITIGKCPKYVKSTKLRLATGLRNVPSIQSRGLFGAIAGFIEGGWTGMVDGWYGYHHQNEQGSGYAADLKSTQNAIDEITNKVNSVIEKMNTQFTAVGKEFNHLEKRIENLNKKVDDGFLDIWTYNAELLVLLENERTLDYHDSNVKNLYEKVRSQLKNNAKEIGNGCFEFYHKCDNTCMESVKNGTYDYPKYSEEAKLNREEIDGVKLESTRIYQILAIYSTVASSLVLVVSLGAISFWMCSNGSLQCRICI

SEQ ID NO: 6246 - protein, 566 aa, synthetic construct; identical to SEQ ID NO: 2669
  REGION 1..566: note = hemagglutinin__InfluenzaA__ADQ28057

SEQ ID NO: 6247 - protein, 566 aa, synthetic construct; identical to SEQ ID NO: 2669
  REGION 1..566: note = hemagglutinin__InfluenzaA__ADQ28058

SEQ ID NO: 6248 - protein, 566 aa, synthetic construct
  REGION 1..566: note = hemagglutinin__InfluenzaA__ADQ28059
MKAILVVLLYTLATANADTLCIGYHANNSTDTVDTVLEKNVTVTHSVNLLEDKHNGKLCKLRGVAPLHLGKCNIAGWILGNPECESLSTASSWSYIVETSSSDNGTCYPGDFIDYEELREQLSSVSSFERFEIFPKTSSWPNHDSNKGVTAACPHAGAKSFYKNLIWLVKKGNSYPKLSKSYINDKGKEVLVLWGIHHPSTSADQQSLYQNADAYVFVGTSKYSKKFKPEIAIRPKVRDQEGRMNYYWTLVEPGDKITFEATGNLVVPRYAFAMERNAGSGIIISDTPVHDCNTTCQTPKGAINTSLPFQNIHPITIGKCPKYVKSTKLRLATGLRNVPSIQSRGLFGAIAGFIEGGWTGMVDGWYGYHHQNEQGSGYAADLKSTQNAIDEITNKVNSVIEKMNTQFTAVGKEFNHLEKRIENLNKKVDDGFLDIWTYNAELLVLLENERTLDYHDSNVKNLYEKVRSQLKNNAKEIGNGCFEFYHKCDNTCMESVKNGTYDYPKYSEEAKLNREEIDGVKLESTRIYQILAIYSTVASSLVLVVSLGAISFWMCSNGSLQCRICI

SEQ ID NO: 6249 - protein, 566 aa, synthetic construct; identical to SEQ ID NO: 2669
  REGION 1..566: note = hemagglutinin__InfluenzaA__ADQ28060

SEQ ID NO: 6250 - protein, 566 aa, synthetic construct
  REGION 1..566: note = hemagglutinin__InfluenzaA__ADQ28061
MKAILVVLLYTFATANADTLCIGYHANNSTDTVDTVLEKNVTVTHSVNLLEDKHNGKLCKLRGVAPLHLGRCNIAGWILGNPECESLSTASSWSYIVETSSSDNGTCYPGDFIDYEELREQLSSVSSFERFEIFPKTSSWPNHDSNKGVTAACPHAGAKSFYKNLIWLVKKGNSYPKLSKSYINDKGKEVLVLWGIHHPSTSADQQSLYQNADANVFVGTSRYSKKFKPEIAIRPKVRDQEGRMNYYWTLVEPGDKITFEATGNLVVPRYAFAMERNAGSGIIISDTPVHDCNTTCQTPKGAINTSLPFQNIHPITIGKCPKYVKSTKLRLATGLRNVPSIQSRGLFGAIAGFIEGGWTGMVDGWYGYHHQNEQGSGYAADLKSTQNAIDEITNKVNSVIEKMNTQFTAVGKEFNHLEKRIENLNKKVDDGFLDIWTYNAELLVLLENERTLDYHDSNVKNLYEKVRSQLKNNAKEIGNGCFEFYHKCDNTCMESVKNGTYDYPKYSEEAKLNREEIDGVKLESTRIYQILAIYSTVASSLVLVVSLGAISFWMCSNGSLQCRICI

SEQ ID NO: 6251 - protein, 566 aa, synthetic construct
  REGION 1..566: note = hemagglutinin__InfluenzaA__ADQ28063
MKAILVVLLYTFATANADTLCIGYHANNSTDTVDTVLEKNVTVTHSVNLLEDKHNGKLCKLRGVAPLHLGKCNIAGWILGNPECESLSTASSWSYIVETSSSDNGTCYPGDFINYEELREQLSSVSSFERFEIFPKTSSWPNHDSNKGVTAACPHAGAKSFYKNLIWLVKKGNSYPKLSKSYINDKGKEVLVLWGIHHPSTSADQQSLYQNADAYVFVGTSRYSKKFKPEIAIRPKVRNQEGRMNYHWTLVKPGDKITFEATGNLVVPRYAFAVERNAGSGIIISDTPVHDCNTTCQTPKGAINTSLPFQNIHPITIGKCPKYVKSTKLRLATGLRNVPSIQSRGLFGAIAGFIEGGWTGMVDGWYGYHHQNEQGSGYAADLKSTQNAIDEITNKVNSVIEKMNTQFTAVGKEFNHLEKRIENLNKKVDDGFLDIWTYNAELLVLLENERTLDYHDSNVKNLYEKVRSQLKNNAKEIGNGCFEFYHKCDNTCMESVKNGTYDYPKYSEEAKLNREEIDGVKLESTRIYQILAIYSTVASSLVLVVSLGAISFWMCSNGSLQCRICI

SEQ ID NO: 6252 - protein, 566 aa, synthetic construct; identical to SEQ ID NO: 3417
  REGION 1..566: note = hemagglutinin__InfluenzaA__ADQ28064

SEQ ID NO: 6253 - protein, 566 aa, synthetic construct
  REGION 1..566: note = hemagglutinin__InfluenzaA__ADQ28065
MKAILVVLLYTFATANADTLCIGYHANNSTDTVDTVLEKNVTVTHSVNLLEDKHNGKLCKLRGVAPLHLGKCNIAGWILGNPECESLSTASSWSYIVETSSSDNGTCYPGDFIDYEELREQLSSVSSFERFEIFPKTSSWPNHDSNKGVTAACPHAGAKSFYKNLIWLVKKGNSYPKLSKSYINDKGKEVLVLWGIHHPSTSAGQQSLYQNADAYVFVGTSRYSKKFKPEIAIRPKVRDQEGRMNYYWTLVEPGDKITFEATGNLVVPRYAFAMERNAGSGIIISDTQVHDCNTTCQTPKGAINTSLPFQNIHPITIGKCPKYVKSTKLRLATGLRNVPSIQSRGLFGAIAGFIEGGWTGMVDGWYGYHHQNEQGSGYAADLKSTQNAIDKITNKVNSVIEKMNTQFTAVGKEFNHLEKRIENLNKKVDDGFLDIWTYNAELLVLLENERTLDYHDSNVKNLYEKVRSQLKNNAKEIGNGCFEFYHKCDNTCMESVKNGTYDYPKYSEEAKLNREEIDGVKLESTRIYQILAIYSTVASSLVLVVSLGAISFWMCSNGSLQCRICI

SEQ ID NO: 6254 - protein, 566 aa, synthetic construct
  REGION 1..566: note = hemagglutinin__InfluenzaA__ADQ28066
MKAILVVLLYTFATANADTLCIGYHANNSTDTVDTVLEKNVTVTHSVNLLEDKHNGKLCKLRGVAPLHLGKCNIAGWILGNPECESLSTASSWSYIVETSSSDNGTCYPGDFIDYEELREQLSSVSSFERFEIFPKTSSWPNHDSNKGVTAACPHAGAKSFYKNLIWLVKKGNSYPKLSKSYINDKGKEVLVLWGIHHPSTSADQQSLYQNADAYVFVGTSRYSKKFKPEIAIRPRVRDQEGRMNYYWTLVEPGDKITFEATGNLVVPRYAFAMERNAGSGIIISDTPVHDCNTTCQTPKGAINTSLPFQNIHPITIGKCPKYVKSTKLRLATGLRNVPSIQSRGLFGAIAGFIEGGWTGMVDGWYGYHHQNEQGSGYAADLKSTQNAIDKITNKVNSVIEKMNTQFTAVGKEFNHLEKRIENLNKKVDDGFLDIWTYNAELLVLLENERTLDYHDSNVKNLYEKVRSQLKNNAKEIGNGCFEFYHKCDNTCMESVKNGTYDYPKYSEEAKLNREEIDGVKLESTRIYQILAIYSTVASSLVLVVSLGAISFWMCSNGSLQCRICI

SEQ ID NO: 6255 - protein, 566 aa, synthetic construct
  REGION 1..566: note = hemagglutinin__InfluenzaA__ADQ28067
MKAILVVLLYTFATANADTLCIGYHANNSTDTVDTVLEKNVTVTHSVNLLEDKHNGKLCKLRGVAPLHLGKCNIAGWILGNPECESLSTASSWSYIVETSSSDNGTCYPGDFIDYEELREQLSSVSSFERFEIFPKTSSWPNHDSNKGVTAACPHAGAKSFYKNLIWLVKKGNSYPKLSKSYINDKGKEVLVLWGIHHPSTSADQQSLYQNADAYVFVGTSRYSKKFKPEIAIRPKVRDQEGRMNYYWTLVEPGDKITFEATGNLVVPRYAFAMERNAGSGIIISDTPVHDCNTTCQTPKGAINTSLPFQNIHPITIGKCPKYVKSTKLRLATGLRNVPSIQSRGLFGAIAGFIEGGWTGMVDGWYGYHHQNEQGSGYAADLKSTQNAIDKITNKVNSVIEKMNTQFTAVGKEFNHLEKRIENLNKKVDDGFLDIWTYNAELLVLLENERTLDYHDSNVKNLYEKVRSQLKNNAKEIGNGCFEFYHKCDNTCMESVKNGTYDYPKYSEEAKLNREEINGVKLESTRIYQILAIYSTVASSLVLVVSLGAISFWMCSNGSLQCRICI

SEQ ID NO: 6256 - protein, 566 aa, synthetic construct
  REGION 1..566: note = hemagglutinin__InfluenzaA__ADQ28068
MKAILVVLLYTFTTANADTLCIGYHANNSTDTVDTVLEKNVTVTHSVNLLEDKHNGKLCKLRGVAPLHLGKCNIAGWILGNPECESLSTASSWSYIVETSSSDNGTCYPGDFINYEELREQLSSVSSFERFEIFPKTSSWPNHDSNKGVTAACPHAGEKSFYKNLIWLVKKGNSYPKLSKSYINDKGKEVLVLWGIHHPSTSADQQSLYQNADAYVFVGTSRYSKKFKPEIAIRPKVRDQEGRMNYHWTLVKPGDKITFEATGNLVVPRYAFAMERNAGSGIIISDTPVHDCNTTCQTPKGAINTSLPFQNIHPITIGKCPKYVKSTKLRLATGLRNVPSIQSRGLFGAIAGFIEGGWTGMVDGWYGYHHQNEQGSGYAADLKSTQNAIDEITNKVNSVIEKMNTQFTAVGKEFNHLEKRIENLNKKVDDGFLDIWTYNAELLVLLENERTLDYHDSNVKNLYEKVRSQLKNNAKEIGNGCFEFYHKCDNTCMESVKNGTYDYPKYSEEAKLNREEIDGVKLESTRIYQILAIYSTVASSLVLVVSLGAISFWMCSNGSLQCRICI

SEQ ID NO: 6257 - protein, 566 aa, synthetic construct; identical to SEQ ID NO: 6255
  REGION 1..566: note = hemagglutinin__InfluenzaA__ADQ28069

SEQ ID NO: 6258 - protein, 566 aa, synthetic construct
  REGION 1..566: note = hemagglutinin__InfluenzaA__ADQ28070
MKAILVVLLYTFATANADTLCIGYHANNSTDTVDTVLEKNVTVTHSVNLLEDKHNGKLCKLRGVAPLHLGKCNIAGWILGNPECESLSTASSWSYIVETSSSDNGTCYPGDFIDYEELREQLSSVSSFERFEIFPKTSSWPNHDSNKGVTAACPHAGAKSFYKNLIWLVKKGNSYPKLSKSYINDKGKEVLVLWGIHHPSTSADQQSLYQNADAYVFVGTSRYSKKFKPEIAIRPKVRDQEGRMNYYWTLVEPGDKITFEATGNLVVPRYAFAMERNAGSGIIISDTPVHDCNTTCQTPKGAINTSLPFQNIHPITIGKCPKYVKSTKLRLATGLRNVPSIQSRGLFGAIAGFIEGGWTGMVDGWYGYHHQNEQGSGYAADLKSTQNAIDKITNKVNSVIEKMNTQFTAVGKEFNHLEKRIENLNKKVDDGFLDIWTYNAELLVLLENERTLDYHDSNVKNLYEKVRRQLKNNAKEIGNGCFEFYHKCDNTCMESVKNGTYDYPKYSEEAKLNREEIDGVKLESTRIYQILAIYSTVASSLVLVVSLGAISFWMCSNGSLQCRICI

SEQ ID NO: 6259 - protein, 566 aa, synthetic construct
  REGION 1..566: note = hemagglutinin__InfluenzaA__ADQ28071
MKAILVVLLYTLATANADTLCIGYHANNSTDTVDTVLEKNVTVTHSVNLLEDKHNGKLCKLRGVAPLHLGKCNIAGWILGNPECESLSTASSWSYIVETSSSDNGTCYPGDFIDYEELREQLSSVSSFERFEIFPKTSSWPNHDSNKGVTAACPHAGAKSFYKNLIWLVKKGNSYPKLSKSYINDKGKEVLVLWGIHHPSTSADQQSLYQNADAYVFVGTSRYSKKFKPEIAIRPKVRDQEGRMNYYWTLVEPGDKITFEATGNLVVPRYAFAMERNAGSGIIISDTPVHDCNTTCQTPKGAINTSLPFQNIHPITIGKCPKYVKSTKLRLATGLRNVPSIQSRGLFGAIAGFIEGGWTGMVDGWYGYHHQNEQGSGYAADLKSTQNAIDKITNKVNSVIEKMNTQFTAVGKEFNHLEKRIENLNKKVDDGFLDIWTYNAELLVLLENERTLDYHDSNVKNLYEKVRSQLKNNAKEIGNGCFEFYHKCDNTCMESVKNGTYDYPKYSEEAKLNREEIDGVKLESTRIYQILAIYSTVASSLVLVVSLGAISFWMCSNGSLQCRICI

SEQ ID NO: 6260 - protein, 566 aa, synthetic construct; identical to SEQ ID NO: 3613
  REGION 1..566: note = hemagglutinin__InfluenzaA__ADR32361

SEQ ID NO: 6261 - protein, 562 aa, synthetic construct
  REGION 1..562: note = hemagglutinin__InfluenzaA__ADT78887
MALIYLILLFTSVRGDQICIGYHANNSTEKVDTILERNVTVTHAKDILEKTHNGKLCKLNGIPPLELGDCSIAGWLLGNPECDRLLRVPEWSYIMEKENPKYSLCYPGSFNDYEELKHLISSVKHFEKVKILPKDGWTQHTTTGGSRACAVSGNPSFFRNMVWLTKKGPNYPVAKGSYNNTSGEQMLIIWGVHHPNDEAEQRALYQKVGTYVSASTSTLNKRSTPEIAARPEVNGLGSRMEFSWTLLDMWDTINFESTGNLVAPEYGFKISKRGSSGVMKTEGTLENCETKCQTPLGAINTTLPFHNVHPLTIGECPKYVKSEKLVLATGLRNVPQIESRGLFGAIAGFIEGGWQGMVDGWYGYHHSNDQGSGYAADKESTQKAFDGITNKVNSVIEKMNTQFEAVGKEFSNLEKRLENLNKKMEDGFLDVWTYNAELLVLMENERTLDFHDSNVKNLYDKVRMQLRDNVKELGNGCFEFYHKCDDECMDSVKNGTYDYPKYEEESKLNRNEIKGVKLSSMGVYQILAIYATVAGSLSLAIMMAGISFWMCSNGSLQCRICI

SEQ ID NO: 6262 - protein, 566 aa, synthetic construct
  REGION 1..566: note = hemagglutinin__InfluenzaA__ADT78908
MKAKLLILLCALSATDADTICIGYHANNSTDTVDTVLEKNVTVTHSVNLLEDSHNGKLCRLKGKAPLQLGKCNIAGWVLGNPECESLLSNRSWSYIAETPNSENGTCYPGDFADYEELREQLSSVSSFERFEIFPKERSWPKHNTTRGVTAACSHARKSSFYKNLVWLTEANGSYPNLSKSYVNNQEKEVLVLWGVHHPSNIEDQRTLYRKDNAYVSVVSSNYNRRFTPEIAKRPKVRDQPGRMNYYWTLLEPGDTIIFEATGNLIAPWYAFALSRGPGSGIITSNAPMDECDTKCQTPQGAINSSLPFQNIHPVTIGECPKYVRSTKLRMVTGLRNIPSIQSRGLFGAIAGFIEGGWTGMMDGWYGYHHQNEQGSGYAADQKSTQNAINGITNKVNSVIEKMNTQFTAVGKEFNKLEKRMENLNKKVDDGFLDIWTYNAELLVLLENERTLDFHDSNVKNLYEKVKNQLRNNAKELGNGCFEFYHKCDNECMESVKNGTYDYPKYSEESKLNREKIDGVKLESMGVYRILAIYSTVASSLVLLVSLGAISFWMCSNGSLQCRICI

SEQ ID NO: 6263 - protein, 566 aa, synthetic construct
  REGION 1..566: note = hemagglutinin__InfluenzaA__ADT78929
MKAKLLILLCALSATDADTICIGYHANNSTDTVDTVLEKNVTVTHSVNLLEDSHNGKLCRLKGIAPLQLGKCNIAGWILGNPECESLLSKRSWSYIAETPNSENGTCYPGDFADYEELREQLSSVSSFERFEIFPKERSWPKHNITRGVTAACSHAGKSSFYKNLLWLTETKGSYPNLSKSYVNNKEKEVLVLWGVHHPSNIEDQKTLYRKENAYVSVVSSNYNRRFTPEIAERPKVRGQAGRMNYYWTLLEPGDTIIFEANGNLIAPWYAFALSRGLGSGIITSNASMDECDTKCQTPQGAINSSLPFQNIHPVTIGECPKYVKSTKLRMVTGLRNIPSIQSRGLFGAIAGFIEGGWTGMIDGWYGYHHQNEQGSGYAADQKSTQNAINGITNKVNSVIEKMNTQFTAVGKEFNKLEKRMENLNKKVDDGFLDIWTYNAELLVLLENERTLDFHDSNVKNLYEKVKNQLRNNAKEIGNGCFEFYHKCNNECMESVKNGTYDYPKYSEESKLNREKIDGVKLESMGVYQILAIYSTVASSLVLLVSLGAISFWMCSNGSLQCRICI

SEQ ID NO: 6264 - protein, 566 aa, synthetic construct
  REGION 1..566: note = hemagglutinin__InfluenzaA__ADT78936
MKAKLLVLLCALSATYADTICIGYHANNSTDTVDTVLEKNVTVTHSVNLLEDSHNGKLCRLKGKAPLQLGKCNIAGWILGNPECESLLSKRSWSYIAETPNSENGTCYPGDFADYEELREQLSSVSSFERFEIFPKESSWPKHNTTRGVTAACSHARKSSFYKNLLWLTEANGSYPNLSKSYVNNQEKEVLVLWGVHHPSNIEDQRTLYRKENAYVSVVSSNYNRRFTPEIAERPKVRNQAGRMNYYWTLLEPGDTIIFEANGNLIAPWYAFALSRGLGSGIITSNASMDECDTKCQTPQGAINSSLPFQNIHPVTIGECPKYVKSTKLRMVTGLRNIPSIQSRGLFGAIAGFIEGGWTGMMDGWYGYHHQNEQGSGYAADQKSTQNAINGITNKVNSVIEKMNTQFTAVGKEFNKLEKRMENLNKKVDDGFLDIWTYNAELLVLLENERTLDFHDSNVKNLYEKVKNQLRNNAKELGNGCFEFYHKCDNECMESVKNGTYDYPKYSEESKLNREKIDGVKLESMGVYRILAIYSTVASSLVLLVSLGAISFWMCSNGSLQCRICI

SEQ ID NO: 6265 - protein, 562 aa, synthetic construct
  REGION 1..562: note = hemagglutinin__InfluenzaA__ADT78961
MAIICLILLFTAVRGDQICIGYHANNSTEKVDTILERNVTVTHAKDILEKTHNGKLCKLNGIPPLELGDCSIAGWLLGNPECDRLLSVPEWSYIMEKENPRDGLCYPGSFNDYEELKHLLSSVKHFEKVKILPKNRWTQHTTTGGSRACAVSGNPSFFRNMVWLTKKGSNYPVAKGSYNNTSGEQMLIIWGVHHPNDETEQRTLYQNVETYVSVSTSTLNKRSTPKIATRPEVNGLGSRMEFSWTLLDMWDTINFESTGNLIAPEYGFKISKRGSSGIMKTEGTLENCETKCQTPLGAINTTLPFHNVHPLTIGECPKYVKSEKLVLATGPRNVPQIESRGLFGAIAGFIEGGWQGMVDGWYGYHHSNDQGSGYAADKESTQKAFDGITNKVNSVIEKMNTQFEAVGKEFSNLERRLENLNKKMEDGFLDVWTYNAELLVLMENERTLDFHDSNVKNLYDKVRMQLRDNVKELGNGCFEFYHKCDDECMNSVKNGTYDYPKYEEESKLNRNEIKGVKLSSMGVYQILVIYATVAGSLSLAIMMAGISFWMCSNGSLQCRICI

SEQ ID NO: 6266 - protein, 566 aa, synthetic construct; identical to SEQ ID NO: 764
  REGION 1..566: note = hemagglutinin__InfluenzaA__ADT78971

SEQ ID NO: 6267 - protein, 566 aa, synthetic construct; identical to SEQ ID NO: 305
  REGION 1..566: note = hemagglutinin__InfluenzaA__ADT79010

SEQ ID NO: 6268 - protein, 566 aa, synthetic construct; identical to SEQ ID NO: 764
  REGION 1..566: note = hemagglutinin__InfluenzaA__ADT79030

SEQ ID NO: 6269 - protein, 566 aa, synthetic construct; identical to SEQ ID NO: 1342
  REGION 1..566: note = hemagglutinin__InfluenzaA__ADT79050

SEQ ID NO: 6270 - protein, 566 aa, synthetic construct
  REGION 1..566: note = hemagglutinin__InfluenzaA__ADT79108
MKARLLILLCALSATDADTICIGYHANNSTDTVDTVLEKNVTVTHSVNLLEDSHNGKLCRLKGIAPLQLGKCNIAGWILGNPECESLLSNRSWSYIAETPNSENGTCYPGDFADYEELREQLSSVSSFERFEIFPKERSWPKHNITRGVTAACSHAKKSSFYKNLLWLTEANGSYPNLIKSYVNNKEKEVLVLWGVHHPSNIEDQRTLYRKENAYVSVVSSNYNRRFTPEIAERPKVRGQAGRMNYYWTLLEPGDKIIFEANGNLIAPWYAFALSRGLGSGIITSNASMDECDTKCQTPQGAINSSLPFQNIHPVTIGECPKYVRSTKLRMVTGLRNIPSIQSRGLFGAIAGFIEGGWTGMVDGWYGYHHQNEQGSGYAADQKSTQNAINGITNKVNSVIEKMNTQFTAVGKEFNKLEKRMENLNKKVDDGFLDIWTYNAELLVLLENERTLDFHDSNVKNLYEKVKNQLRNNAKEIGNGCFEFYHKCDNECMESVKNGTYDYPKYSEESKLNREKIDGVKLESMGVYQILAIYSTVASSLVLLVSLGAISFWMCSNGSLQCRICI

SEQ ID NO: 6271 - protein, 562 aa, synthetic construct
  REGION 1..562: note = hemagglutinin__InfluenzaA__ADT79119
MAIIYLILLFTAVRGDQICIGYHANNSTEKVDTILERNVTVTHAKDILEKTHNGKLCKLNGIPPLELGDCSIAGWLLGNPECDRLLSVPEWSYIMEKENPRDGLCYPGSFNDYEELKHLLSSVKHFEKVKILPKDRWTQHTTTGGSRACAVSGNPSFFRNMVWLTKKGSNYPVAKGSYNNTSGEQMLIIWGVHHPNDETEQRTLYQNVGTYVSVGTSTLNKRSTPDIATRPKVNGLGGRMEFSWTLLDMWDTINFESTGNLIAPEYGFKISKRGSSGIMKTEGTLGNCETKCQTPLGAINTTLPFHNVHPLTIGECPKYVKSEKLVLATGLRNVPQIESRGLFGAIAGFIEGGWQGMVDGWYGYHHSNDQGSGYAADKESTQKAFDGITNKVNSVIEKMNTQFEAVGKEFSNLERRLENLNKKMEDGFLDVWTYNAELLVLMENERTLDFHDSNVKNLYDKVRMQLRDNVKELGNGCFEFYHKCDDECMNSVKNGTYDYPKYEEESKLNRNEIKGVKLSSMGVYQILAIYATVAGSLSLAIMMAGISFWMCSNGSLQCRICI

SEQ ID NO: 6272 - protein, 562 aa, synthetic construct
  REGION 1..562: note = hemagglutinin__InfluenzaA__ADT79129
MAIIYLILLFTAVRGDQICIGYHANNSTEKVDTILERNVTVTHAKDILEKTHNGKLCKLNGIPPLELGDCSIAGWLLGNPECDRLLRVPEWSYIMEKENPRDGLCYPGSFNDYEELKHLLSSVKHFEKVKILPKDRWTQHTTTGGSRACAVSGNPSFFRNMIWLTKKGSNYPVAKGSYNNTSGEQMLIIWGVHHPNDETEQRTLYQNVGTYVSVVTSTLNKRSTPKIATRPKVNGLGGRMEFSWTLLDMWDTINFESTGNLIAPEYGFKISKRGSSGIMKTEGTLENCETKCQTPLGAINTTLPFHNVHPLAIGECPKYVKSEKLVLATGLRNVPQIESRGLFGAIAGFIEGGWQGMVDGWYGYHHSNDQGSGYAADKESTQRAFDGITNKVNSVIEKMNTQFEAVGKEFSNLERRLENLNKKMEDGFLDVWTYNAELLVLMENERTLDFHDSNVKNLYDKVRMQLRDNVKELGNGCFEFYHKCDDECMNSVKNGTYDYPKYEEESKLNRNEIKGVKLSSMGVYQILAIYATVAGSLSLAIMMAGISFWMCSNGSLQCRICI

SEQ ID NO: 6273 - protein, 566 aa, synthetic construct
  REGION 1..566: note = hemagglutinin__InfluenzaA__ADT79232
MKAILVVLLYTFATANADTLCIGYHANNSTDTVDTVLEKNVTVTHSVNLLEDKHNGKLCKLRGVAPLHLGKCNIAGWILGNPECESLSTASSWSYIVETSSSDNGTCYPGDFIDYEELREQLSSVSSFERFEIFPKTSSWPNHDSNKGVTAACPHAGAKSFYKNLIWLVKKGNSYPKLSKSYINDKGKEVLVLWGIHHPSTSADQQSLYQNADAYVFVGSSRYSKKFKPEIAIRPKVRDQEGRMNYYWTLVEPGDKITFEATGNLVVPRYAFAMERNAGSGIIISDTPVHDCNTTCQTPKGAINTSLPFQNKHPITIGKCPKYVKSTKLRLATGLRNVPSIQSRGLFGAIAGFIEGGWTGMVDGWYGYHHQNEQGSGYAADVKSTQNAIDEITNKVNSVIEKMNTQFTAVGKEFNHLEKRIENLNKKVDDGFLDIWTYNAELLVLLENERTLDYHDSNVKNLYEKVRSQLKNNAKEIGNGCFEFYHKCDNTCMESVKNGTYDYPKYSEEAKLNREEIDGVKLESTRIYQILAIYSTVASSLVLVVSLGAISFWMCSNGSLQCRICI

SEQ ID NO: 6274 - protein, 566 aa, synthetic construct
  REGION 1..566: note = hemagglutinin__InfluenzaA__ADT79242
MKAILVVLLYTFATANADTLCIGYHANNSTDTVDTVLEKNVTVTHSVNLLEDKHNGKLCKLRGVAPLHLGKCNIAGWILGNPECESLSTASSWSYIVETPSSDNGTCYPGDFIDYEELREQLSSVSSFERFEIFPKTSSWPNHDSNKGVTAACPHAGAKSFYKNLIWLVKKGNSYPKLSKSYINDKGKEVLVLWGIHHPSTSADQQSLYQNADAYVFVGSSRYSKKFKPEIAIRPKVRDQEGRMNYYWTLVEPGDKITFEATGNLVVPRYAFAMERNAGSGIIISDTPVHDCNTTCQTPKGAINTSLPFQNIHPITIGKCPKYVKSTKLRLATGLRNVPSIQSRGLFGAIAGFIEGGWTGMVDGWYGYHHQNEQGSGYAADLKSTQNAIDEITNKVNSVIEKMNTQFTAVGKEFNHLEKRIENLNKKVDDGFLDIWTYNAELLVLLENERTLDYHDSNVKNLYEKVRSQLKNNAKEIGNGCFEFYHKCDNTCMESVKNGTYDYPKYSEEAKLNREEIDGVKLESTRIYQILAIYSTVASSLVLVVSLGAISFWMCSNGSLQCRICI

SEQ ID NO: 6275 - protein, 566 aa, synthetic construct
  REGION 1..566: note = hemagglutinin__InfluenzaA__ADT91182
MKAILVVLLYTFATANADTLCIGYHANNSTDTVDTVLEKNVTVTHSVNLLEDKHNGKLCKLRGVAPLHLGKCNIAGWILGNPECEPLSTASSWSYIVETSSSDNGTCYPGDFIDYEELREQLSSVSSFERFEIFPKTSSWPNHDSNKGVTTACPHAGAKSFYKNLIWLVKKGNSYPKLSKSYINDKGKEVLVLWGIHHPPTSADQQSLYQNADAYVFVGTSRYSKKFKPEIAIRPKVRDQEGRMNYYWTLVEPGDKITFEATGNLVVPRYAFAMERNAGSGIIISDTPVHDCNTTCQTPKGAINTSLPFQNIHPITIGKCPKYVKSTKLRLATGLRNVPSIQSRGLFGAIAGFIEGGWTGMVDGWYGYHHQNEQGSGYAADLKSTQNAIDGITNKVNSVIEKMNTQFTAVGKEFNHLEKRIENLNKKVDDGFLDIWTYNAELLVLLENERTLDYHDSNVKNLYEKVRSQLKNNAKEIGNGCFEFYHKCDNTCMESVKNGTYDYPKYSEEAKLNREEIDGVKLESTRIYQILAIYSTVASSLVLVVSLGAISFWMCSNGSLQCRICI

SEQ ID NO: 6276 - protein, 566 aa, synthetic construct
  REGION 1..566: note = hemagglutinin__InfluenzaA__ADU20561
MKAILVVLLYTFATANADTLCIGYHANNSTDTVDTVLEKNVTVTHSVNLLEDKHNGKLCKLGGVAPLHLGKCNIAGWILGNPECESLSTASSWSYIVETSSSDNGTCYPGDFIDYEELREQLSSVSSFERFEIFPKTSSWPNHDSNKGVTAACPHAGAKSFYKNLIWLVKKGNSYPKLSKSYINDKGKEVLVLWGIHHPSTSADQQSLYQNADAYVFVGTSRYSKKFKPEIAIRPKVRDQEGRMNYYWTLVEPGDKITFEATGNLVVPRYAFAMERNAGSGIIISDTPVHDCNTTCQTPKGAINTSLPFQNIHPITIGKCPKYVKSTKLRLATGLRNVPSIQSRGLFGAIAGFIEGGWTGMVDGWYGYHHQNEQGSGYAADLKSTQNAIDKITNKVNSVIEKMNTQFTAVGKEFNHLEKRIENLNKKVDDGFLDIWTYNAELLVLLENERTLDYHDSNVKNLYEKVRSQLKNNAKEIGNGCFEFYHKCDNTCMESVKNGTYDYPKYSEEAKLNREEIDGVKLESTRIYQILAIYSTVASSLVLVVSLGAISFWMCSNGSLQCRICI

SEQ ID NO: 6277 - protein, 566 aa, synthetic construct
  REGION 1..566: note = hemagglutinin__InfluenzaA__ADU20562
MKAILVVLLYTFATANADTLCIGYHANNSTDTVDTVLEKNVTVTHSVNLLEDKHNGKLCKLRGVAPLHLGKCKIAGWILGNPECESLSTASSWSYIVETSSSDNGTCYPGDFIDYEELREQLSSVSSFERFEIFPKTSSWPNHDSNKGVTAACPHAGAKSFYKNLIWLVKKGNSYPKLSKSYINDKGKEVLVLWGIHHPSTSADQQSLYQNADAYVFVGTSRYSKKFKPEIAIRPKVRDQEGRMNYYWTLVEPGDKITFEATGNLVVPRYAFAMERNAGSGIIISDTPVHDCNTTCQTPKGAINTSLPFQNIHPITIGKCPKYVKSTKLRLATGLRNVPSIQSRGLFGAIAGFIEGGWTGMVDGWYGYHHQNEQGSGYAADLKSTQNAIDKITNKVNSVIEKMNTQFTAVGKEFNHLEKRIENLNKKVDDGFLDIWTYNAELLVLLENERTLDYHDSNVKNLYEKVRSQLKNNAKEIGNGCFEFYHKCDNTCMESVKNGTYDYPKYSEEAKLNREEIDGVKLESTRIYQILAIYSTVASSLVLVVSLGAISFWMCSNGSLQCRICI

SEQ ID NO: 6278 - protein, 566 aa, synthetic construct
  REGION 1..566: note = hemagglutinin__InfluenzaA__ADU25478
MEAKLFVLFCAFTALKADTICVGYHANNSTDTVDTILERNVTVTHSVNLLESSHNGKLCSLNGKAPLQLGNCNVAGWILGNPECDLLLTVNSWSYIIETSTSKNGACYPGEFADYEELREQLSTVSSFERFEIFPKATSWPNHETTKGTTVACSHSGANSFYRNLLWIVKKGNSYPKLSKSYTNNKGKEVLVIWGVHHPPTDSDQQTLYQNNHTYVSVGSSKYYQRFTPEIVTRPKVREQAGRMNYYWTLLDQGDTITFEATGNLIAPWHAFALNKGSSSGIMMSDAHVHNCTTKCQTPHGALKSNLPFQNVHPITIGECPKYVKSTQLRMATGLRNIPSIQSRGLFGAIAGFIEGGWTGMIDGWYGYHHQNEQGSGYAADQKSTQIAIDGISNKVNSVIEKMNVQFTSVGKEFNNLEKRIENLNKKVDDGFLDIWTYNAELLILLENERTLDFHDFNVKNLYERVKSQLRNNAKEIGNGCFEFYHKCNNECMESVKNGTYNYPRYSEESKLNREEIDGVKLESVGVHQILAIYSTVASSLVLLVSLGAISFWMCSNGSLQCRICI

SEQ ID NO: 6279 - protein, 566 aa, synthetic construct
  REGION 1..566: note = hemagglutinin__InfluenzaA__ADU59558
MKAILVVLLYTFATANADTLCIGYHANNSTDTVDTVLEKNVTVTHSVNLLEDKHNGKLCKLRGVAPLHLGKCNIAGWILGNPECESLSTASSWSYIVETSSSDNGTCYPGDFIDYEELREQLSSVSSFERFEIFPKTSSWPNHDSNKGVTAACPHAGAKSFYKNLIWLVKKGNSYPKLSKSYINDKGKEVLVLWGIHHPSTSADQQSLYQNADAYVFVGTSRYSKKFKPEIAIRPKVRGQEGRMNYYWTLVEPGDKITFEATGNLVVPRYAFAMERNAGSGIIISDTPVHDCNTTCQTPKGAINTSLPFQNIHPITIGKCPKYVKSTKLRLATGLRNVPSIQSRGLFGAIAGFIEGGWTGMVDGWYGYHHQNEQGSGYAADLKSTQNAIDKITNKVNSVIEKMNTQFTAVGKEFNHLEKRIENLNKKVDDGFLDIWTYNAELLVLLENERTLDYHDSNVKNLYEKVRSQLKNNAKEIGNGCFEFYHKCDNTCMESVKNGTYDYPKYSEEAKLNREEIDGVKLESTRIYQILAIYSTVASSLVLVVSLGAISFWMCSNGSLQCRICI

SEQ ID NO: 6280 - protein, 566 aa, synthetic construct; identical to SEQ ID NO: 2669
  REGION 1..566: note = hemagglutinin__InfluenzaA__ADU59579

SEQ ID NO: 6281 - protein, 566 aa, synthetic construct; identical to SEQ ID NO: 2669
  REGION 1..566: note = hemagglutinin__InfluenzaA__ADU59590

SEQ ID NO: 6282 - protein, 566 aa, synthetic construct; identical to SEQ ID NO: 2669
  REGION 1..566: note = hemagglutinin__InfluenzaA__ADU59601

SEQ ID NO: 6283 - protein, 566 aa, synthetic construct; identical to SEQ ID NO: 2669
  REGION 1..566: note = hemagglutinin__InfluenzaA__ADU59612

SEQ ID NO: 6284 - protein, 566 aa, synthetic construct; identical to SEQ ID NO: 2669
  REGION 1..566: note = hemagglutinin__InfluenzaA__ADU59768

SEQ ID NO: 6285 - protein, 566 aa, synthetic construct; identical to SEQ ID NO: 2669
  REGION 1..566: note = hemagglutinin__InfluenzaA__ADU59769

SEQ ID NO: 6286 - protein, 566 aa, synthetic construct; identical to SEQ ID NO: 2669
  REGION 1..566: note = hemagglutinin__InfluenzaA__ADU59771

SEQ ID NO: 6287 - protein, 566 aa, synthetic construct; identical to SEQ ID NO: 2669
  REGION 1..566: note = hemagglutinin__InfluenzaA__ADU59772

SEQ ID NO: 6288 - protein, 566 aa, synthetic construct; identical to SEQ ID NO: 2669
  REGION 1..566: note = hemagglutinin__InfluenzaA__ADU59774

SEQ ID NO: 6289 - protein, 566 aa, synthetic construct; identical to SEQ ID NO: 2669
  REGION 1..566: note = hemagglutinin__InfluenzaA__ADU59906

SEQ ID NO: 6290 - protein, 566 aa, synthetic construct; identical to SEQ ID NO: 2669
  REGION 1..566: note = hemagglutinin__InfluenzaA__ADU59916

SEQ ID NO: 6291 - protein, 566 aa, synthetic construct; identical to SEQ ID NO: 2669
  REGION 1..566: note = hemagglutinin__InfluenzaA__ADU76756

SEQ ID NO: 6292 - protein, 566 aa, synthetic construct; identical to SEQ ID NO: 2669
  REGION 1..566: note = hemagglutinin__InfluenzaA__ADU76757

SEQ ID NO: 6293 - protein, 566 aa, synthetic construct; identical to SEQ ID NO: 2669
  REGION 1..566: note = hemagglutinin__InfluenzaA__ADU76758

SEQ ID NO: 6294 - protein, 566 aa, synthetic construct; identical to SEQ ID NO: 2669
  REGION 1..566: note = hemagglutinin__InfluenzaA__ADU76759

SEQ ID NO: 6295 - protein, 566 aa, synthetic construct; identical to SEQ ID NO: 3029
  REGION 1..566: note = hemagglutinin__InfluenzaA__ADU76761

SEQ ID NO: 6296 - protein, 566 aa, synthetic construct; identical to SEQ ID NO: 2669
  REGION 1..566: note = hemagglutinin__InfluenzaA__ADU76762

SEQ ID NO: 6297 - protein, 566 aa, synthetic construct
  REGION 1..566: note = hemagglutinin__InfluenzaA__ADU76764
MKAILVVLLYTFATANADTLCIGYHANNSTDTVDTVLEKNVTVTHSVNLLEDKHNGKLCKLRGVAPLHLGKCNIAGWILGNPECESLSTASSWSYIVEASSSNNGTCYPGDFIDYEELREQLSSVSSFERFEIFPKTSSWPNHDSNKGVTAACPHAGAKSFYKNLIWLVKKGNSYPKLSKSYINDKGKEVLVLWGIHHPSTSADQQSLYQNADAYVFVGTSRYSKKFKPEIAIRPKVRDQEGRMNYYWTLVEPGDKITFEATGNLVVPRYAFAMERNAGSGIIISDTPVHDCNTTCQTPKGAINTSLPFQNIHPITIGKCPKYVKSTKLRLATGLRNVPSIQSRGLFGAIAGFIEGGWTGMVDGWYGYHHQNEQGSGYAADLKSTQNAIDEITNKVNSVIEKMNTQFIAVGKEFNHLEKRIENLNKKVDDGFLDIWTYNAELLVLLENERTLDYHDSNVKNLYEKVRSQLKNNAKEIGNGCFEFYHKCDNTCMESVKNGTYDYPKYSEEAKLNREEIDGVKLESTRIYQILAIYSTVASSLVLVVSLGAISFWMCSNGSLQCRICI

SEQ ID NO: 6298 - protein, 566 aa, synthetic construct
  REGION 1..566: note = hemagglutinin__InfluenzaA__ADU76765
MKAILIVLLYTFATANADTLCIGYHANNSTDTVDTVLEKNVTVTHSVNLLEDKHNGKLCKLRGVAPLHLGKCNIAGWILGNPECESLSTASSWSYIVETSSSDNGTCYPGDFIDYEELREQLSSVSSFERFEIFPKTSSWPNHDSNKGVTAACPHAGAKSFYKNLIWLVKKGNSYPKLSKSYINDKGKEVLVLWGIHHPSTSADQQSLYQNADAYVFVGTSRYSKKFKPEIAIRPKVRDQEGRMNYYWTLVEPGDKITFEATGNLVVPRYAFAMERNAGSGIIISDTPVHDCNTTCQTPKGAINTSLPFQNIHPITIGKCPKYVKSTKLRLATGLRNVPSIQSRGLFGAIAGFIEGGWTGMVDGWYGYHHQNEQGSGYAADLKSTQNAIDEITNKVNSVIEKMNTQFTAVGKEFNHLEKRIENLNKKVDDGFLDIWTYNAELLVLLENERTLDYHDSNVKNLYEKVRSQLKNNAKEIGNGCFEFYHKCDNTCMESVKNGTYDYPKYSEEAKLNREEIDGVKLESTRIYQILAIYSSVASSLVLVVSLGAISFWMCSNGSLQCRICI

SEQ ID NO: 6299 - protein, 566 aa, synthetic construct; identical to SEQ ID NO: 4266
  REGION 1..566: note = hemagglutinin__InfluenzaA__ADU76766

SEQ ID NO: 6300 - protein, 566 aa, synthetic construct
  REGION 1..566: note = hemagglutinin__InfluenzaA__ADU76767
MKAILVVLLYTFATANADTLCIGYHANNSTDTVDTVLEKNVTVTHSVNLLEDKHNGKLCKLRGVAPLHLGKCNIAGWILGNPECESLSTASSWSYIVETSSSDNGTCYPGDFIDYEELREQLSSVSSFERFEIFPKTSSWPNHDSNKGVTAACPHAGAKSFYKNLIWLVKKGNSYPKLSKSYINDKGKEVLVLWGIHHPSTSADQQSLYQNADAYVFVGTSRYSKKFKPEIAIRPKVREQEGRMNYYWTLVEPGDKITFEATGNLVVPRYAFAMERNAGSGIIISDTPVHDCNTTCQTPKGAINTSLPFQNIHPITIGKCPKYVKSTKLRLATGLRNVPSIQSRGLFGAIAGFIEGGWTGMVDGWYGYHHQNEQGSGYAADLKSTQNAIDKITNKVNSVIEKMNTQFTAVGKEFNHLEKRIENLNKKVDDGFLDIWTYNAELLVLLENERTLDYHDSNVKNLYEKVRSQLKNNAKEIGNGCFEFYHKCDNTCMESVKNGTYDYPKYSEEAKLNREEIDGVKLESTRIYQILAIYSTVASSLVLVVSLGAISFWMCSNGSLQCRICI

SEQ ID NO: 6301 - protein, 566 aa, synthetic construct
  REGION 1..566: note = hemagglutinin__InfluenzaA__ADU76768
MKAILVVLLYTFAIANADTLCIGYHANNSTDTVDTVLEKNVTVTHSVNLLEDKHNGKLCKLRGVAPLHLGKCNIAGWILGNPECESLSTASSWSYIVETSSSDNGTCYPGDFIDYEELREQLSSVSSFERFEIFPKTSSWPNHDSNKGVTAACPHAGAKSFYKNLIWLVKKGNSYPKLSKSYINDKGKEVLVLWGIHHPSTSADQQSLYQNADAYVFVGTSKYSKKFKPEIAIRPKVRDQEGRMNYYWTLVEPGDKITFEATGNLVVPRYAFAMERNAGSGIIISDTPVHDCNTTCQTPKGAINTSLPFQNIHPITIGKCPKYVKSTKLRLATGLRNVPSIQSRGLFGAIAGFIEGGWTGMVDGWYGYHHQNEQGSGYAADLKSTQHAIDEITNKVNSVIEKMNTQFTAVGKEFNHLEKRIENLNKKVDDGFLDIWTYNAELLVLLENERTLDYHDSNVKNLYEKVRSQLKNNAKEIGNGCFEFYHKCDNTCMESVKNGTYDYPKYSEEAKLNREEINGVKLESTRIYQILAIYSTVASSLVLVVSLGAISFWMCSNGSLQCRICI

SEQ ID NO: 6302 - protein, 566 aa, synthetic construct; identical to SEQ ID NO: 2669
  REGION 1..566: note = hemagglutinin__InfluenzaA__ADU76769

SEQ ID NO: 6303 - protein, 566 aa, synthetic construct; identical to SEQ ID NO: 2669
  REGION 1..566: note = hemagglutinin__InfluenzaA__ADU76770

SEQ ID NO: 6304 - protein, 566 aa, synthetic construct; identical to SEQ ID NO: 2669
  REGION 1..566: note = hemagglutinin__InfluenzaA__ADU76771

SEQ ID NO: 6305 - protein, 566 aa, synthetic construct; identical to SEQ ID NO: 3414
  REGION 1..566: note = hemagglutinin__InfluenzaA__ADU76772

SEQ ID NO: 6306 - protein, 566 aa, synthetic construct; identical to SEQ ID NO: 2669
  REGION 1..566: note = hemagglutinin__InfluenzaA__ADU76774

SEQ ID NO: 6307 - protein, 566 aa, synthetic construct; identical to SEQ ID NO: 2669
  REGION 1..566: note = hemagglutinin__InfluenzaA__ADU76775

SEQ ID NO: 6308 - protein, 566 aa, synthetic construct; identical to SEQ ID NO: 2669
  REGION 1..566: note = hemagglutinin__InfluenzaA__ADU76776

SEQ ID NO: 6309 - protein, 566 aa, synthetic construct; identical to SEQ ID NO: 2669
  REGION 1..566: note = hemagglutinin__InfluenzaA__ADU76777

SEQ ID NO: 6310 - protein, 566 aa, synthetic construct; identical to SEQ ID NO: 2669
  REGION 1..566: note = hemagglutinin__InfluenzaA__ADU76778

SEQ ID NO: 6311 - protein, 566 aa, synthetic construct; identical to SEQ ID NO: 5527
  REGION 1..566: note = hemagglutinin__InfluenzaA__ADU76779

SEQ ID NO: 6312 - protein, 566 aa, synthetic construct; identical to SEQ ID NO: 2669
  REGION 1..566: note = hemagglutinin__InfluenzaA__ADU76780

SEQ ID NO: 6313 - protein, 566 aa, synthetic construct; identical to SEQ ID NO: 4266
  REGION 1..566: note = hemagglutinin__InfluenzaA__ADU76781

SEQ ID NO: 6314 - protein, 566 aa, synthetic construct; identical to SEQ ID NO: 3029
  REGION 1..566: note = hemagglutinin__InfluenzaA__ADU76782

SEQ ID NO: 6315 - protein, 566 aa, synthetic construct
  REGION 1..566: note = hemagglutinin__InfluenzaA__ADU76784
MKAILVVLLYTFATANADTLCIGYHANNSTDTVDTVLEKNVTVTHSVNLLEDKHNGKLCKLRGVAPLHLGKCNIAGWILGNPECESLSTASSWSYIVETSSSNNGTCYPGDFIDYEELREQLSSVSSFERFEIFPKTSSWPNHDSNKGVTAACPHAGAKSFYKNLIWLVKKGNSYPKLSKSYINDKGKEVLVLWGIHHPSTSADQQSLYQNADAYVFVGTSRYSKKFKPEIAIRPKVRDQEGRMNYYWTLVEPGDKITFEATGNLVVPRYAFAMERNAGSGIIISDTPVHDCNTTCQTPKGAINTSLPFQNIHPITIGKCPKYVKSTKLRLATGLRNVPSIQSRGLFGAIAGFIEGGWTGMVDGWYGYHHQNEQGSGYAADLKSTQNAIDEITNKVNSVIEKMNTQFTAVGKEFNHLEKRIENLNKKVDDGFLDIWTYNAELLVLLENERTLDYHDSNVKNLYEKVRSQLKNNAKEIGNGCFEFYHKCDNTCMESVKNGTYDYPKYSEEAKLNREEIDGVKLESTRIYQILAIYSTVASSLVLVVSLGAISFWMCSNGSLQCRICI

SEQ ID NO: 6316 - protein, 566 aa, synthetic construct; identical to SEQ ID NO: 2669
  REGION 1..566: note = hemagglutinin__InfluenzaA__ADU76785

SEQ ID NO: 6317 - protein, 566 aa, synthetic construct; identical to SEQ ID NO: 2669
  REGION 1..566: note = hemagglutinin__InfluenzaA__ADU76786

SEQ ID NO: 6318 - protein, 566 aa, synthetic construct
  REGION 1..566: note = hemagglutinin__InfluenzaA__ADU76787
MKAILVVLLYTFATANADTLCIGYHANNSTDTVDTVLEKNVTVTHSVNLLEDKHNGKLCKLRGVAPLHLGKCNIAGWILGNPECESLSTASSWSYIVETSSSDNGTCYPGDFIDYEELREQLSSVSSFERFEIFPKTSSWPNHDSNKGVTAACPHAGAKSFYKNLIWLVKKGNSYPKLSKSYINDKGKEVLVLWGIHHPSTSADQQSLYQNADAYVFVGTSRYSKKFKPEIAIRPKVREQEGRMNYYWTLVEPGDKITFEATGNLVVPRYAFAMERNAGSGIIISDTPVHDCNTTCQTPKGAINTSLPFHNIHSITIGKCPKYVKSTKLRLATGLRNVPSIQSRGLFGAIAGFIEGGWTGMVDGWYGYHHQNEQGSGYAADLKSTQNAIDEITNKVNSVIEKMNTQFTAVGKEFNHLEKRIENLNKKVDDGFLDIWTYNAELLVLLENERTLDYHDSNVKNLYEKVRSQLKNNAKEIGNGCFEFYHKCDNTCMESVKNGTYDYPKYSEEAKLNREEIDGVKLESTRIYQILAIYSTVASSLVLVVSLGAISFWMCSNGSLQCRICI

SEQ ID NO: 6319 - protein, 566 aa, synthetic construct; identical to SEQ ID NO: 6300
  REGION 1..566: note = hemagglutinin__InfluenzaA__ADU76788

SEQ ID NO: 6320 - protein, 566 aa, synthetic construct; identical to SEQ ID NO: 6300
  REGION 1..566: note = hemagglutinin__InfluenzaA__ADU76789

SEQ ID NO: 6321 - protein, 566 aa, synthetic construct; identical to SEQ ID NO: 2669
  REGION 1..566: note = hemagglutinin__InfluenzaA__ADU76790

SEQ ID NO: 6322 - protein, 566 aa, synthetic construct; identical to SEQ ID NO: 2669
  REGION 1..566: note = hemagglutinin__InfluenzaA__ADU76791

SEQ ID NO: 6323 - protein, 566 aa, synthetic construct; identical to SEQ ID NO: 6300
  REGION 1..566: note = hemagglutinin__InfluenzaA__ADU76792

SEQ ID NO: 6324 - protein, 566 aa, synthetic construct
  REGION 1..566: note = hemagglutinin__InfluenzaA__ADU76793
MKAILVVLLYTFATANADTLCIGYHANNSTDTVDTVLEKNVTVTHSVNLLEDKHNGKLCKLRGVAPLHLGKCNIAGWILGNPECESLSTASSWSYIVETSSSDNGTCYPGDFIDYEELREQLSSVSSFEKFEIFPKTSSWPNHDSNKGVTAACPHAGTKSFYKNLIWLVKKGNSYPKLSKSYINDKGKEVLVLWGIHHPSTSADQQSLYQNADAYVFVGTSRYSKKFKPEIAIRPKVRDQEGRMNYYWTLVEPGDKITFEATGNLVVPRYAFAMERNAGSGIIISDTPVHDCNTTCQTPKGAINTSLPFQNIHPITIGKCPKYVKSTKLRLATGLRNVPSIQSRGLFGAIAGFIEGGWTGMVDGWYGYHHQNEQGSGYAADLKSTQNAIDKITNKVNSVIEKMNTQFTAVGKEFNHLEKRIENLNKKVDDGFLDIWTYNAELLVLLENERTLDYHDSNVKNLYEKVRSQLKNNAKEIGNGCFEFYHKCDNTCMESVKNGTYDYPKYSEEAKLNREEIDGVKLESTRIYQILAIYSTVASSLVLVVSLGAISFWMCSNGSLQCRICI

SEQ ID NO: 6325 - protein, 566 aa, synthetic construct
  REGION 1..566: note = hemagglutinin__InfluenzaA__ADU85911
MKAIIVVLLYTFATADADTLCIGYHANNSTDTVDTVLEKNVTVTHSVNLLENKHNGKLCKLGGIAPLHLGKCDIAGWLLGNPECESLFTASSWSYIVETPNSDNGTCYPGDFINYEELREHLSSVSSFERFEIFPKANSWPNHDTNKGVTAACPYAGANSFYRNLIWLVKKGNSYPKLSKSYINNKKKEVLVIWGIHHPPTSTDQQTLYQNADAYVFVGSSKYSKRFKPEIAARPKVRDQAGRMDYYWTLIEPGDTITFEATGNLVVPRYAFAMKRGSGSGIIVSDAPVHDCNTTCQTPKGAINTSLPFQNIHPVTIGECPKYVKSTKLRMATGLRNIPSIQSRGLFGAIAGFLEGGWTGMIDGWYGYHHQNEQGSGYAADQKSTQNAIDGITNKVNSIIEKMNTQFTAVGKEFSQLEKRIESLNNKVDDGFLDIWTYNAELLVLLENERTLDYHDSNVKNLYEKVRSQLKNNAKEIGNGCFEFYHKCDNTCMESVKNGTYDYPKYSEEAKLNREEIDGVKLESARIYQILAIYSTVASSLVLLVSLGAISFWMCSNGSLQCRICI

SEQ ID NO: 6326 - protein, 566 aa, synthetic construct; identical to SEQ ID NO: 3833
  REGION 1..566: note = hemagglutinin__InfluenzaA__ADV17283

SEQ ID NO: 6327 - protein, 566 aa, synthetic construct; identical to SEQ ID NO: 3833
  REGION 1..566: note = hemagglutinin__InfluenzaA__ADV17293

SEQ ID NO: 6328 - protein, 566 aa, synthetic construct
  REGION 1..566: note = hemagglutinin__InfluenzaA__ADV17303
MKAILVVLLYTFATANADTLCIGYHANNSTDTVDTVLEKNVTVTHSVNLLEDKHNGKLCKLRGVAPLHLGKCNIAGWILGNPECESLSTASSWSYIVETSSSDNGTCYPGDFIDYEELREQLSSVSSFERFEIFPKTSSWPNHDSNKGVTAACPHAGAKSFYKNLIWLVKKGNSYPKLSKSYINDKGKEVLVLWGIHHPSTSADQQSLYQNADAYVFVGTSRYSKKFKPEIAIRPKVRDQEGRMNYYWTLVEPGDKITFEATGNLVVPRYAFAMERNAGSGIIISDTPVHDCNTTCQTPKGAINTSLPFQNIHPITIGKCPKYVKSTKLRLAKGLRNVPSIQSRGLFGAIAGFIEGGWTGMVDGWYGYHHQNEQGSGYAADLKSTQNAIDEITNKVNSVIEKMNTQFTAVGKEFNHLEKRIENLNKKVDDGFLDIWTYNAELLVLLENERTLDYHDSNVKNLYEKVRSQLKNNAKEIGNGCFEFYHKCDNTCMESVKNGTYDYPKYSEEAKLNREEIDGVKLESTRIYQILAIYSTVASSLVLVVSLGAISFWMCSNGSLQCRICI

SEQ ID NO: 6329 - protein, 566 aa, synthetic construct; identical to SEQ ID NO: 3833
  REGION 1..566: note = hemagglutinin__InfluenzaA__ADV17313

SEQ ID NO: 6330 - protein, 566 aa, synthetic construct
  REGION 1..566: note = hemagglutinin__InfluenzaA__ADV17323
MKAILVVLLYTFATTNADTLCIGYHANNSTDTVDTVLEKNVTVTHSVNLLEDKHNGKLCKLRGVAPLHLGKCNIAGWILGNPECESLSTASSWSYIVETSSSDNGTCYPGDFIDYEELREQLSSVSSFERFEIFPKTNSWPNHDSNKGVTAACPHAGAKSFYKNLIWLVKKGNSYPKLSKSYINDKGKEVLVLWGIHHPSTSADQQGLYQNADAYVFVGTSRYSKKFKPEIAIRPKVRDQEGRMNYYWTLVEPGDKITFEATGNLVVPRYAFAMERNAGSGIIISDTPVHDCNTTCQTPEGAINTSLPFQNIHPITIGKCPKYVKSTKLRLATGLRNVPSIQSRGLFGAIAGFIEGGWTGMVDGWYGYHHQNEQGSGYAADLKSTQNAIDKITNKVNYVIEKMNTQFTAVGKEFNHLEKRIENLNKKVDDGFLDIWTYNAELLVLLENERTLDYHDSNVKNLYEKVRSQLKNNAKEIGNGCFEFYHKCDNTCMESVKNGTYDYPKYSEEAKLNREEIDGVKLESTRIYQILAIYSTVASSLVLVVSLGAISFWMCSNGSLQCRICI

SEQ ID NO: 6331 - protein, 566 aa, synthetic construct
  REGION 1..566: note = hemagglutinin__InfluenzaA__ADV17333
MKAILVVLLYTFATANADTLCIGYHANNSTDTVDTVLEKNVTVTHSVNLLEDKHNGKLCKLRGVAPLHLGKCNIAGWILGNPECESLSTASSWSYIVETSSSDNGTCYPGDFIDYEELREQLSSVSSFERFEIFPKTSSWPNHDSNKGVTAACPHAGAKSFYKNLIWLVKKGNSYPKLSKSYINDKGKEVLVLWGIHHPSTSADQQNLYQNADAYVFVGTSRYSKKFKPEIAIRPKVRDQEGRMNYYWTLVEPGDKITFEATGNLVVLRYAFAMERNAGSGIIISDTPVHDCNTTCQTPKGAINTSLPFQNIHPITIGKCPKYVKSTKLRLATGLRNVPSIQSRGLFGAIAGFIEGGWTGMVDGWYGYHHQNEQGSGYAADLKSTQNAIDKITNKVNSVIEKMNTQFTAVGKEFNHLEKRIENLNKKVDDGFLDIWTYNAELLVLLENERTLDYYDSNVKNLYEKVRSQLKNNAKEIGNGCFEFYHKCDNTCMESVKNGTYDYPKYSEEAKLNREEIDGVKLESTRIYQILVIYSTVASSLVLVVSLGAISFWMCSNGSLQCRICI

SEQ ID NO: 6332 - protein, 566 aa, synthetic construct; identical to SEQ ID NO: 2669
  REGION 1..566: note = hemagglutinin__InfluenzaA__ADV19019

SEQ ID NO: 6333 - protein, 566 aa, synthetic construct; identical to SEQ ID NO: 3154
  REGION 1..566: note = hemagglutinin__InfluenzaA__ADV41677

SEQ ID NO: 6334 - protein, 566 aa, synthetic construct
  REGION 1..566: note = hemagglutinin__InfluenzaA__ADV58939
MKAILVVLLYTFATANADTLCIGYHANNSTDTVDTVLEKNVTVTHSVNLLEDKHNGKLCKLRGVAPLHLGKCNIAGWILGNPECESLSTASSWSYIVETSSSDNGTCYPGDFIDYEELREQLSSVSSFERFEIFPKTSSWPNHDSNKGVTAACPHAGAKGFYKNLIWLVKKGNSYPKLSKSYINDKGKEVLVLWGIHHPSTTADQQSLYQNADTYVFVGTSRYSKKFKPEIAIRPKVRDQEGRMNYYWTLVEPGDKITFEATGNLVVPRYAFAMERNAGSGIIISDTPVHDCNTTCQTPKGAINTSLPFQNIHPITIGKCPKYVKSTKLRLATGLRNVPSIQSRGLFGAIAGFIEGGWTGMVDGWYGYHHQNEQGSGYAADLKSTQNAIDKITNKVNSVIEKMNTQFTAVGKEFNHLEKRIENLNKKVDDGFLDIWTYNAELLVLLENERTLDYHDSNVKNLYEKVRNQLKNNAKEIGNGCFEFYHKCDNTCMESVKNETYDYPKYSEEAKLNREEIDGVKLESTRIYQILAIYSTVASSLVLVVSLGAISFWMCSNGSLQCRICI

SEQ ID NO: 6335 - protein, 565 aa, synthetic construct
  REGION 1..565: note = hemagglutinin__InfluenzaA__ADV69074
MKVKLLVLLCTFTATYADTICIGYHANNSTDTVDTVLEKNVTVTHSVNLLEDSHNGKLCLLKGIAPLQLGNCNVAGWILGNPECELLISKESWSYIVETPDPENGTCYPGYFTDYEELREQLSSVSSFKRFEIFPKESSWPNHTVTGVSASCSHNGKSSFYRNLLWLTVKNGLYPNLSKSYTNDKEKEVLVLWGVHHPPSIGDQRTLYHTENAYVSVVSSHYSRRFTPEIVKRPKVRDQEGRINYYWTLLEPGDTIICEANGNLIAPRYAFALSRGLGSGIITSNAPMGECNAKCQTPQGAINSSLPFQNVHPVTIGECPKYVKSAKLRMVTGLRNTPSIQSRGLFGAIAGFIEGGWTGMVDGWYGYHHQNEQGSGYAADQKSTQNAINGITNKVNSVIEKMNTQFTAVGKEFNKLERRMENLNKKVDDGFLDIWTYNAELLVLLENERTLDFHDSNVKNLYEKVKSQLKNNAKEIGNGCFEFYHKCNDECMESVKNGTYDYPKYSEESKLNREKIDGVKLESMEVYQILAIYSTVASSLVFLVALGAICFWMCSNGSLQCKICI

SEQ ID NO: 6336 - protein, 565 aa, synthetic construct
  REGION 1..565: note = hemagglutinin__InfluenzaA__ADV69075
MKVKLLVLLCTFTATYADTICIGYHANNSTDTVDTVLEKNVTVTHSVNLLEDSHNGKLCLLKGIAPLQLGNCNVAGWILGNPECELLISKESWSYIVETPDPENGTCYPGYVTDYEELREQLSSVSSFKRFEIFPKESSWPNHTVTGVSASCSHNGKSSFYRNLLWLTVKNGLYPNLSKSYTNDKEKEVLVLWGVHHPPSIGDQRTLYHTENAYVSVVSSHYSRRFTPEIVKRPKVRDQEGRINYYWTLLEPGDTIICEANGNLIAPRYAFALSRGFGSGIITSNAPMGECNAKCQTPQGAINSSLPFQNVHPVTIGECPKYVKSAKLRMVTGLRNTPSIQSRGLFGAIAGFIEGGWTGMVDGWYGYHHPNEQGSGYAADQKSTQNAINGITNKVNSVIEKMNTQFTAVGKEFNKLERRMENLNKKVDDGFLDIWTYNAELLVLLENERTLDFHDSNVKNLYEKVKSQLKNKVKEIGNGCFEFYHKCNDECMESVKNGTYDYPKYSEESKLNREKIDGVKLESMEVYQILAIYSTVASSLVFLVALGAICFWMCSNGSLQCKICI

SEQ ID NO: 6337 - protein, 565 aa, synthetic construct
  REGION 1..565: note = hemagglutinin__InfluenzaA__ADV69077
MKVKLLVLLCTFTATYADTICIGYHANNSTDTVDTVLEKNVTVTHSVNLLEDSHNGKLCLLKGIAPLQLGNCNVAGWILGNPECELLISKESWSYIVETPDPENGTCYPGYFTDYEELREQLSSVSSFKRFEIFPKESSWPNHTVTGVSASCSHNGKSSFYRNLLWLTVKNGLYPNLSKSYTNDKEKEVLVLWGVHHPPSIGDQRTLYHTENAYVSVVSSHYSRRFTPEIVKRPKVRDQEGRINYYWTLLEPGDTIIFEANGNLIAPRYAFALSRGFGSGIITSNAPMGECNAKCQTPQGAINSSLPFQNVHPVTIGECPKYVKSAKLRMVTGLRNTPSIQSRGLFGAIAGFIEGGWTGMVDGWYGYHHQNEQGSGYAADQKSTQNAINGITNKVNSVIEKMNTQFTAVGKEFNKLERRMENLNKKVDDGFLDIWTYNAELLVLLENERTLDFHDSNVKNLYEKVKSQLKNNAKEIGNGCFEFYHKCNDECMESVKNGTYDYPKYSEESKLNREKIDGVKLESMEVYQILAIYSTVASSLVFLVALGAICFWMCSNGSLQCKICI

SEQ ID NO: 6338 - protein, 565 aa, synthetic construct
  REGION 1..565: note = hemagglutinin__InfluenzaA__ADV69078
MKVKLLILLCTFTATYADTICIGYHANNSTDTVDTVLEKNVTVTHSVNLLEDSHNGKLCLLKGIAPLQLGNCSVAGWILGNPECESLISKKSWSYIVETPNPENGACYPGEFADYEELREQLSSVSSFERFEIFPKESSWPNHTAAGVSASCSHNGEKSFYRNLIWLTKKNGLYPNLSKSYENDKEKEVLILWGVHHPPNIENQRTLYRTENAYVSVVSSHYSGRFTPEITKRPKVRNQEGRINYYWTLLEPGDTIIFEANGNLIAPWYAFTLSRGLGSGIITSNAPMDECDAKCQTPQGAINSSLPFQNVHPVTIGECPKYVRSSKLRMVTGLRNIPSIQSRGLFGAIAGFIEGGWTGMVDGWYGYHHQNEQGSGYAADQESTQNAINGITNKVNSVIEKMNTQFTAVGKEFNKLERRMENLNKKVDDGFLDIWTYNAELLVLLENERTLDFHDSNVKSLYEKVKSQLKNNAKEIGNGCFEFYHKCNNECMESVKNGTYDYPKYSEESKLNREKIDGVKLDSMGVYRILAIYSTVASSLVLLVSLGAISFWMCSNGSLQCRICI

SEQ ID NO: 6339 - protein, 565 aa, synthetic construct
  REGION 1..565: note = hemagglutinin__InfluenzaA__ADV69079
MKVKLLILLCTFTATYADTICIGYHANNSTDTVDTVLEKNVTVTHSVNLLEDSHNGKLCLLKGIAPLQLGNCSVAGWILGNPECELLISKKSWSYIVKTPNPENGSCYPGYFADYEELREQLSSVSSFERFEMFPKESSWPNHNVNGVSASCSHNGKRSFYRNLLWLTGKNGLYPNLTKSYENNNEKEVLILWGVHHPSNIGDQRTLYHTENAYVSVMSSHYSRRFTPEINKRPKVRDQEGRINYYWTLLEPGDTIIFEANGNLIAPWYAFALSRGFGSGIITSSAPMDECDAKCQTPRGAINSSLPFQNVHPVTIGECPKYVRSAKLRMVTGLRNIPSIQSRGLFGAIAGFIEGGWTGMVDGWYGYHHQNEQGSGYAADQESTQNAINGITNKVNSVIEKMNTQFTAVGKEFNKLERRMENLNKKVDDGFLDIWTYNAELLVLLENERTLDFHDSNVKSLYEKVKSQLKNNAKEIGNGCFEFYHKCNNECMESVKNGTYDYPKYSEESKLNREKIDGVKLDSMGVYQILAIYSTVASSLVLLVSLGAISFWMCSNGSLQCRICI

SEQ ID NO: 6340 - protein, 565 aa, synthetic construct
  REGION 1..565: note = hemagglutinin__InfluenzaA__ADV69080
MKVKLLILLCTFTATYADTICIGYHANNSTDTVDTVLEKNVTVTHSVNLLEDSHNGKLCLLKGIAPLQLGNCSVAGWILGNPECESLISKKSWSYIVETPNPENGACYPGEFADYEELREQLSSVSSFERFEIFPKESSWPNHTAAGVSASCSHNGERSFYRNLIWLTMKNGLYPNLRKSYENDKEKEVLILWGVHHPPNIENQRTLYHTENAYVSVVSSHYSGRFTPEITKRPKVRDQEGRINYYWTLLEPGDTIIFEANGNLIAPWYAFTLSRGLGSGIITSNAPMDACDAKCQTPQGAINSSLPFQNVHPVTIGECPKYVRSAKLRMVTGLRNIPSIQSRGLFGAIAGFIEGGWTGMVDGWYGYHHQNEQGSGYAADQESTQNAINGITNKVNSVIEKMNTQFTAVGKEFNKLERRIENLNKKVDDGFIDIWTYNAELLVLLENERTLDFHDSNVKSLYEKVKSQLKNNAKEIGNGCFEFYHKCNNECMESVKNGTYDYPKYSEESKLNREKIDGVKLDSMGVYRILAIYSTVASSLVLLVSLGAISFWMCSNGSLQCRICI

SEQ ID NO: 6341 - protein, 565 aa, synthetic construct
  REGION 1..565: note = hemagglutinin__InfluenzaA__ADV69081
MKVKLLVLLCTFTATYADTICIGYHANNSTDTVDTVLEKNVTVTHSVNLLEDSHNGKLCLLKGIAPLQLGNCNVAGWILGNPECELLISKESWSYIVETPNPENGTCYPGYFTDYEELREQLSSVSSFKRFEIFPKESSWPNHTVTGVSASCSHNGESSFYRNLLWLTVKNGLYPKLSKSYTNDKEKEVLVLWGVHHPPNIRDQRTLYHTENAYVSVVSSHYSRRFTPEIVKRPKVRDQEGRINYYWTLLEPGDTIIFEANGNLIAPRYAFALSRGFGSGIITSNAPMGECNAKCQTPQGAIISSLPFQNVHPVTIGECPKYVKSAKLRMVTGLRNTPSIQSRGLFGAIAGFIEGGWTGMVDGWYGYHHQNEQGSGYAADQKSTQNAINGITNKVNSVIEKMNTQFTAVGKEFNKLERRMENLNKKVDDGFLDIWTYNAELLVLLENERTLDFHDSNVKNLYEKVKSQLKNNAKEIGNGCFEFYHKCNDECMESVKNGTYDYPKYSEESKLNREKIDGVKLESMEVYQILAIYSTVASSLVFLVALGAICFWMCSNGSLQCKICI

SEQ ID NO: 6342 - protein, 565 aa, synthetic construct
  REGION 1..565: note = hemagglutinin__InfluenzaA__ADV69083
MKVKLMVLLCTFTATYADTICVGYHANNSTDTVDTVLEKNVTVTHSVNLLEDSHNGKLCLLKGIAPLQLGSCSVAGWILGNPECELLISKESWSYIVETPNPENGTCYPGYFTDYEELREQLSSVSSFKRFEIFPKESSWPNHNVTGVSSSCSHNGKSSFYRNLLWLTVKNGLYPNLSKSYTNKKEKEVLVLWGVHHPSNIGDQRALYHTENAYVSVVSSHYSRRFTPEIAKRPKVRNQEGRINYYWTLLEPGDTIILEANGNLIAPRYAFELSKGLGSGIITSNAPMGECNAKCQTPQGAINSSLPFQNVHPVTIGECPKYVKSAKLRMVTGLRNTPSIQSRGLFGAIAGFIEGGWTGMVDGWYGYHHQNEQGSGYAADQQSTQNAINGITNKVNSVIEKMNTQFTAVGKEFNKLERRMENLNKKVDDGFLDIWTYNAELLVLLENERTLDFHDSNVKNLYEKVKSQLKNNAKEIGNGCFEFYHKCNDECMESVKNGTYDYPKYSEESKLNREKIDGVKLESMGVYNILAIYSTVASSLVLLVSLGAISFWMCSNGSLQCRICI

SEQ ID NO: 6343 - protein, 565 aa, synthetic construct
  REGION 1..565: note = hemagglutinin__InfluenzaA__ADV69084
MKVKLMVLLCTFTATYADTICVGYHANNSTDTVDTVLEKNVTVTHSVNLLEDSHNGKLCLLKGIAPLQLGSCSVAGWILGNPECELLISKESWSYIVETPNPENGTCYPGYFTDYEELREQLSSVSSFKRFEIFPKESSWPNHNVTGVSSSCSHNGKSSFYRNLLWLTVKNGLYPNLSKSYTNKKEKEVLILWGVHHPSNIRDQRALYYTENAYVSVVSSHYSRRFTPEIAKRPKVRNQEGRINYYWTLLEPGDTIIFEANGNLIAPRYAFELSKGFGSGIITSDAPMGECNAKCQTPQGAINSSLPFQNVHPVTIGECPKYVRSAKLRMVTGLRNTPSIQSRGLFGAIAGFIEGGWTGMVDGWYGYHHQNEQGSGYAADQQSTQNAINGITNKVNSVIEKMNTQFTAVGKEFNKLERRMENLNKKIDDGFLDIWTYNAELLVLLENERTLDFHDSNVKNLYEKVKSQLKNNAKEIGNGCFEFYHKCNDECMESVKNGTYDYPKYSEESKLNREKIDGVKLESMGVYNILAIYSTVASSLVLLVSLGAISFWMCSNGSLQCRICI

SEQ ID NO: 6344 - protein, 565 aa, synthetic construct
  REGION 1..565: note = hemagglutinin__InfluenzaA__ADV69085
MKVKLMVLLCTFTATYADTICVGYHANNSTDTVDTVLEKNVTVTHSVNLLEDSHNGKLCLLKGIAPLQLGSCSVAGWILGNPECELLISKESWSYIVETPNPENGTCYPGYFTDYEELREQLSSVSSFKRFEIFPKESSWPNHTVTGVSSSCSHNGKSSFYRNLLWLTMKNGLYPNLSKSYTNKKEKEVLVLWGVHHPSNIGDQRALYHTENAYVSVVSSHYSRRFTPEIAKRPKVRNQEGRINYYWTLLEPGDTIIFEANGNLIAPRYAFELSKGFGSGIITSNAPMGECNAKCQTPQGAINSSLPFQNVHPVTIGECPKYVRSSKLRMVTGLRNTPSIQSRGLFGAIAGFIEGGWTGMVDGWYGYHHQNEQGSGYAADQQSTQNAINGITNKVNSVIEKMNTQFTAVGKEFNKLERRMENLNKKIDDGFLDIWTYNAELLVLLENERTLDFHDSNVKNLYEKVKSQLKNNAKEIGNGCFEFYHKCNDECMESVKNGTYDYPKYSEESKLNREKIDGVKLESMGVYNILAIYSTVASSLVLLVSLGAISFWMCSNGSLQCRICI

SEQ ID NO: 6345 - protein, 565 aa, synthetic construct
  REGION 1..565: note = hemagglutinin__InfluenzaA__ADV69086
MKVKLLVLLCTFTATYADTICIGYHANNSTDTVDTVLEKNVTVTHSVNLLEDSHNGKLCLLKGIAPLQLGNCNVAGWILGNPECELLISKESWSYIVETPNPENGTCYPGYFTDYEELREQLSSVSSFKRFEIFPKESSWPKHTVTGVSASCSHNGKSSFYRNLLWLTGKNGLYPNLSKSYTNDKEKEVLVLWGVHHPSNIGDQRALYHKENAYVSVVSSHYSRRFTPEIVKRPKVRDQEGRINYYWTLLEPGDTIIFEANGNLIAPRYAFALSRGFGSGIITSNAPMDECNTKCQTPQGAINSSLPFQNVHPVTIGECPKYVKSAKLRMVTGLRNTPSIQSRGLFGAIAGFIEGGWTGMVDGWYGYHHQNEQGSGYAADQKSTQNAINGITNKVNSVIEKMNTQFTAVGKEFNKLERRMENLNKKVDDGFLDIWTYNAELLVLLENERTLDFHDSNVKNLYEKVKSQLKNNAKEIGNGCFEFYHKCNDECMESVKNGTYDYPKYSEESKLNREKIDGVKLESMEVYQILAIYSTVASSLVFLVSLGAICFWMCSNGSLQCRICI

SEQ ID NO: 6346 - protein, 565 aa, synthetic construct
  REGION 1..565: note = hemagglutinin__InfluenzaA__ADV69087
MKVKLMVLLCTFTATYADTICVGYHANNSTDTVDTVLEKNVTVTHSVNLLEDSHNGKLCLLKGIAPLQLGSCSVAGWILGNPECELLISKESWSYIVETPNPENGTCYPGYFTDYEELREQLSSVSSFKRFEIFPKESSWPNHTVNGVSSSCSHNGESSFYRNLLWLTVKDGLYPNLSKSYTNKKEKEVLVLWGVHHPSNIGDQRALYHTENAYVSVVSSHYSRRFTPEIAKRPKVRNQEGRINYYWTLLEPGDTIIFEANGNLIAPRYAFELSKGFGSGIITSNAPMGECNAKCQTPQGAINSSLPFQNVHPVTIGECPKYVRSTKLRMVTGLRNTPSIQSRGLFGAIAGFIEGGWTGMVDGWYGYHHQNEQGSGYAADQQSTQNAINGITNKVNSVIEKMNTQFTAVGKEFNKLERRMENLNKKIDDGFLDIWTYNAELLVLLENERTLDFHDSNVKNLYEKVKSQLKNNAKEIGNGCFEFYHKCNDECMESVKNGTYDYPKYSEESKLNREKIDGVKLESMGVYNILAIYSTVASSLVLLVSLGAISFWMCSNGSLQCRICI

SEQ ID NO: 6347 - protein, 565 aa, synthetic construct
  REGION 1..565: note = hemagglutinin__InfluenzaA__ADV69088
MKVKLLILLCTFTATYADTICIGYHANNSTDTVDTVLEKNVTVTHSVNLLEDSHNGKLCLLKGIAPLQLGNCSVTGWILGNPECELLISKKSWSYIVETPNPENGACYPGYFADYEELREQLSSVSSFERFEIFPKESSWPNHNVNGVSASCSHNGKSSFYRNLLWLTGKNGLYPSLTKSYANDKEKEVLILWGVHHPSNIGDQRTLYHTENAYVSVMSSHYSRRFTPEISKRPKVRDQEGRINYYWTLLEPGDTIIFEANGNLIAPWYAFALSRGFGSGIITSSAPMDACDAKCQTPQGAINSSLPFQNVHPVTIGECPKYVRSTKLRMVTGLRNIPSIQSRGLFGAIAGFIEGGWTGMVDGWYGYHHQNEQGSGYAADQESTQNALHGITNKVNSVIEKMNTQFTAVGKEFNKLERRMENLNKKVDDGFLDIWTYNAELLVLLENERTLDFHDSNVKSLYEKVKIQLKNNAKEIGNGCFEFYHKCNNECMESVRNGTYDYPKYSEESKLNREKIDGVKLDSMGVYQILAIYSTVASSLVLLVSLGAISFWMCSNGSLQCRICI

SEQ ID NO: 6348 - protein, 565 aa, synthetic construct
  REGION 1..565: note = hemagglutinin__InfluenzaA__ADV69089
MKVKLLILLCTFTATYADTICIGYHANNSTDTVDTVLEKNVTVTHSVNLLEDSHNGKLCLLKGIAPLQLGNCSVAGWILGNPECELLISKKSWSYIVETPNPENGACYPGYFADYEELREQLSSVSSFERFEIFPKESSWPNHNVNGVSASCSHNGKSSFYRNLLWLTGKNGLYPNLTKSYANNKEKEVLILWGVHHPSNIGDQRTLYHTENAYVSVMSSHYSRRFTPEITKRPKIRDQEGRINYYWTLLEPGDTIIYEANGNLIAPWYAFALSRGFGSGIITSSAPMDECDAKCQTPQGAINSSLPFQNVHPVTIGECPKYVRSAKLRMVTGLRNIPSIQSRGLFGAIAGFIEGGWTGMVNGWYGYRLHNDQGSGYAADQKSTQNALNGITNKVNSVIEKMNTQFTAVGKEFNKLERRMENLNKKVDDGFLDIWTYNAEMLVLLENERTLDFHDSNVKSLYERVKIQLKNNAKEIGNGCFEFYHKCNNECMESVRNGTYDYPKYSEESKLNREKIDGVKLDSMGVYQILAIYSTVASSLVLLVSLGAISFWMCSNGSLQCRICI

SEQ ID NO: 6349 - protein, 565 aa, synthetic construct
  REGION 1..565: note = hemagglutinin__InfluenzaA__ADV69090
MKVKLLVLLCTFTATYADTICIGYHANNSTDTVDTVLEKNVTVTHSVNLLEDSHNGKLCLLKGIAPLQLGNCSVAGWILGNPECESLISKESWSYIVETPNPENGTCYPGYFADYEELREQLSSVSSFERFEIFPKESSWPNHTVTGVSASCSHNGKSSFYRNLLWLTRKNGLYPNLSKSYANNKEKEVLVLWGVHHPPNLGDQRALYHTENAYVSVVSSHYSRRFTPEIAKRPKVRDQEGRINYYWTLLEPGDTIIFEANGNLIAPRFAFALSRGFGSGIITSNAPMDECDAKCQTPQGAINSSLPFQNVHPVTIGECPKYVRSTKLRMVTGLRNIPSIQSRGLFGAIAGFIEGGWTGMVDGWYGYHHQNEQGSGYAADQKSTQNAINGITNKVNSVIEKMNTQFTAVGKEFNKLERRMENLNKKVDDGFLDIWTYNAELLVLLENERTLDFHDSNVKNLYEKVKSQLKNNAKEIGNGCFEFYHKCNDECMESVKNGTYDYPKYSEESKLNREKIDGVKLESMGVYQILAIYSTVASSLVLLVSLGAISFWMCSNGSLQCRICI

SEQ ID NO: 6350 - protein, 565 aa, synthetic construct
  REGION 1..565: note = hemagglutinin__InfluenzaA__ADV69091
MKVKLLVLLCTFTATYADTICIGYHANNSTDTVDTVLEKNVTVTHSVNLLEDSHNGKLCLLKGIAPLQLGNCNVAGWILGNPECELLISKESWSYIVETPNPENGTCYPGYFTDYEELREQLSSVSSFKRFEIFPKESSWPNHTVTGVSASCSHNGKSSFYRNLLWLTRKNGLYPNLSKSYTNDKEKEVLVLWGVHHPSNIGDQRALYHKENAYVSVVSSHYSRRFTPEIVKRPKVRDQEGRINYYWTLLEPGDTIIFEANGNLIAPRYAFALSRGFGSGIITSNAPMDECNTKCQTPQGAINSSLPFQNVHPVTIGECPKYVKSAKLRMVTGLRNTPSIQSRGLFGAIAGFIEGGWTGMVDGWYGYHHQNEQGSGYAADQKSTQNAINGITNKVNSVIEKMNTQFTAVGKEFNKLERRMENLNKKVDDGFLDIWTYNAELLVLLENERTLDFHDSNVKNLYEKVKNQLKNNAKEIGNGCFEFYHKCNDECMESVKNGTYDYPKYSEESKLNREKIDGVKLESMEVYQILAIYSTVASSLVFLVSLGAICFWMCSNGSLQCRICI

SEQ ID NO: 6351 - protein, 565 aa, synthetic construct
  REGION 1..565: note = hemagglutinin__InfluenzaA__ADV69092
MKVKLLVLLCTFTATYADTICIGYHANNSTDTVDTVLEKNVTVTHSVNLLEDSHNGKLCLLKGIAPLQLGNCNVAGWILGNPECELLISKESWSYIVETPNPENGTCYPGYFTDYEELREQLSSVSSFKRFEIFPKESSWPNHTVTGVSASCSHNGKSSFYRNLLWLTGKNGLYPNLSKSYTNDKEKEVLVLWGVHHPSNIGDQRALYHKENAYVSVVSSHYSRRFTPEIVKRPKVRDQEGRINYYWTLLEPGDTIIFEANGNLIAPRYAFALSRGFGSGIITSNAPMDECNTKCQTPQGAINSSLPFQNVHPVTIGECPKYVKSAKLRMVTGLRNTLSIQSKGLFGAIAGFIEGGWTGMVDGWYGYHHQNEQGSGYAADQKSTQNAINGITNKVNSVIEKMNTQFTAVGKEFNKLERRMENLNKKVDDGFLDIWTYNAELLVLLENERTLDFHDSNVKNLYEKVKSQLKNNAKEIGNGCFEFYHKCNDECMESVKNGTYDYPKYSEESKLNREKIDGVKLESMEVYQILAIYSTVASSLVFLVSLGAICFWMCSNGSLQCRICI

SEQ ID NO: 6352 - protein, 565 aa, synthetic construct
  REGION 1..565: note = hemagglutinin__InfluenzaA__ADV69093
MKVKLMVLLCTFTATYADTICVGYHANNSTDTVDTVLEKNVTVTHSVNLLEDSHNGKLCLLKGIAPLQLGSCSVAGWILGNPECELLISKESWSYIVETPNPENGTCYPGYVTDYEELREQLSSVSSFKRFEIFPKESSWPNHTVTGVSSSCSHNGKSSFYRNLLWLTVKNGLYPNLSKSYTNKKEKEVLVLWGVHHPSNIGDQRALYHTENAYVSVVSSHYSRRFTPEIAKRPKVRNQEGRINYYWTLLEPGDTIIFEANGNLIAPRYAFELSKGFGSGIITSNAPMGECNAKCQTPQGAINSSLPFQNVHPVTIGECPKYVKSAKLRMVTGLRNTPSIQSRGLFGAIAGFIEGGWTGMVDGWYGYHHQNEQGSGYAADQQSTQNAINGITNKVNSVIEKMNTQFTAVGKEFNKLERRMENLNKRVDDGFLDIWTYNAELLVLLENERTLDFHDSNVKNLYEKVKSQLKNNAKEIGNGCFEFYHKCNDECMESVKNGTYDYPKYSEESKLNREKIDGVKLESMGVYNILAIYSTVASSLVLLVSLGAISFWMCSNGSLQCRICI

SEQ ID NO: 6353 - protein, 565 aa, synthetic construct
  REGION 1..565: note = hemagglutinin__InfluenzaA__ADV69094
MKVKLMVLLCTFTATYADTICVGYHANNSTDTVDTVLEKNVTVTHSVNLLEDSHNGKLCLLKGIAPLQLGSCSVAGWILGNPECELLISKESWSYIVETPNPENGTCYPGYFTDYEELREQLSSVSSFKRFEIFPKESSWPNHTVTGVSSSCSHNGKSSFYRNLLWLTVKNGLYPNLSKSYTNKKEKEVLVLWGVHHPSNIGDQRALYHTENAYVSVVSSHYSRRFTPEIAKRPKVRNQEGRINYYWTLLEPGDTIIFEANGNLIAPRYAFELSKGFGSGIITSNAPMGECNAKCQTPQGAINSSLPFQNVHPVTIGECPKYVKSAKLRMVTGLRNTPSIQSRGLFGAIAGFIEGGWTGMVHGWYGYHHQNEQGSGYAAEQQSTQYAINGITNKVNSVIEKMNTQFTAVGKEFNKLERRMENLNKRVDDGFLDIWTYNAELLVLLENERTLDFHDSNVKNLYEKVKSQLKNNAKEIGNGCFEFYHKCNDECMESVKNGTYDYPKYSEESKLNREKIDGVKLESMGVYNILAIYSTVASSLVLLVSLGAISFWMCSNGSLQCRICI

SEQ ID NO: 6354 - protein, 565 aa, synthetic construct
  REGION 1..565: note = hemagglutinin__InfluenzaA__ADV69095
MKVKLMVLLCTFTATYADTICVGYHANNSTDTVDTVLEKNVTVTHSVNLLEDSHNGKLCLLKGIAPLQLGSCSVAGWILGNPECELLISKESWSYIVEPPNPENGTCYPGYFTDYEELREQLSSVSSFKRFEIFPKESSWPNHTVNGVSSSCSHNGESSFYRNLLWLTVKDGLYPNLSKSYTNKKEKEVLVLWGVHHPSNIGDQRALYHTENAYVSVVSSHYSRRFTPEIAKRPKVRNQEGRINYYWTLLEPGDTIIFEANGNLIAPRYAFELSKGFGSGIITSNAPMGECNAKCQTPQGAINSSLPFQNVHPVTIGECPKYVRSTKLRMVTGLRNTPSIQSRGLFGAIAGFIEGGWTGMVDGWYGYHHQNEQGSGYAADQQSTQNAINGITNKVNSVIEKMNTQFTAVGKEFNKLERRMENLNKKIDDGFLDIWTYNAELLVLLENERTLDFHDSNVKNLYEKVKSQLKNNAKEIGNGCFEFYHKCNDECMESVKNGTYDYPKYSEESKLNREKIDGVKLESMGVYNILAIYSTVASSLVLLVSLGAISFWMCSNGSLQCRICI

SEQ ID NO: 6355 - protein, 565 aa, synthetic construct
  REGION 1..565: note = hemagglutinin__InfluenzaA__ADV69096
MKVKLMVLLCTFTATYADTICVGYHANNSTDTVDTVLEKNVTVTHSVNLLEDSHNGKLCLLKGIAPLQLGSCSVAGWILGNPECELLISKESWSYIVETPNPENGTCYPGYVTDYEELREQLSSVSSFKRFEIFPKESSWPNHTVTGVSSSCSHNGKSSFYRNLLWLTVKNGLYPNLSKSYTNKKEKEVLVLWGVHHPSNIGDQRALYHTENAYVSVVSSHYSRRFTPEIAKRPKVRNQEGRINYYWTLLEPGDTIIFEANGNLIAPRYAFELSKGFGSGIITSNAPMGECNAKCQTPKGAINSSLPFQNVHPVTIGECPKYVKSAKLRMVTGLRNTPSIQSRGLFGAIAGFIEGGWTGMVDGWYGYHHQNEQGSGYAADQQSTQNAINGITNKVNSVIEKMNTQFTAVGKEFNKLERRMENLNKKVDDGFLDIWTYNAELLVLLENERTLDFHESNVKNLYEKVKSQLKNNAKEIGNGCFEFYHKCNDECMESVKNGTYDYPKYSEESKLNREKIDGVKLESMGVYNILAIYSTVASSLVLLVSLGAISFWMCSNGSLQCRICI

SEQ ID NO: 6356 - protein, 565 aa, synthetic construct
  REGION 1..565: note = hemagglutinin__InfluenzaA__ADV69097
MKVKLLILLCTFTATYADTICIGYHANNSTDTVDTVLEKNVTVTHSVNLLEDSHNGKLCLLKGIAPLQLGNCSVAGWILGNPECELLISKKSWSYIVETPNPGNGACYPGYFADYEELREQLSSVSSFERFEIFPKESSWSNHNVNGVSASCSHNGKSSFYRNLLWLTGKNGLYPTLTKSYANDKEKEVLILWGVHHPSNIGDQRTLYHTENAYVSVMSSHYSRRFTPEISKRPKVRDQEGRINYYWTLLEPGDTIIFEANGNLIAPWYAFALSRGFGSGIITSNAPMDECDAKCQTPQGAINSSLPFQNIHPVTIGECPKYVRSAKLRMVTGLRNTPSIQSRGLFGAIAGFIEGGWTGMVDGWYGYHHQNEQGSGYAADQESTQNAINEITNKENSVIEKMNTQFTSVGKEFNKLERRMENLNKKVDDGFLDIWTYNAELLVLLENERTLDFHDSNVKSLYEKVKIQLKNNAKEIGNGCFEFYHKCNNECMESVRNGTYDYPKYSEESKLNREKIDGVKLDSMGVYQILAIYSTVASSLVLLVSLGAISFWMCSNGSLQCRICI

SEQ ID NO: 6357 - protein, 565 aa, synthetic construct
  REGION 1..565: note = hemagglutinin__InfluenzaA__ADV69098
MKVKLIVLLCTFTATYADTICVGYHANNSTDTVDTVLEKNVTVTHSVNLLEDSHNGKLCLLKGIAPLQLGSCSVAGWILGNPECELLISKESWSYIVETPNPENGTCYPGYFTDYEELREQLSSVSSFKRFEIFPKESSWPNHTVTGVSSSCSHNGNSSFYRNLLWLTVKNGLYPNLSKSYTNKKEKEVLVLWGVHHPSNIEDQRALYHTENAYVSVVSSHYSRRFNPEIAKRPKVRNQEGRINYYWTLLEPGDTIIFEANGNLIAPRYAFELSKGFGSGIITSNAPMGECNAKCQTPQGAINSNLPFQNVHPVTIGECPKYVRSAKLRMVTGLRNTPSIQSRGLFGAIAGFIEGGWTGMVDGWYGYHHHNEQGSGYAANQKSTPNAINGITNKVNSVIEKMNTQFTAVGKEFNKLERRMENLNKKVDDGFLDIWTYNAELLVLLENERTLDFHDSNVKNLYEKVRSQLKNNAKEIGNGCFEFYHKCNDECMESVKNGTYDYPKYSEESKLNREKIDGVKLESMGVYNILAIYSTVASSLVLLVSLGAISFWMCSNGSLQCRICI

SEQ ID NO: 6358 - protein, 565 aa, synthetic construct
  REGION 1..565: note = hemagglutinin__InfluenzaA__ADV69099
MKVKLIVLLCTFTATYADTICVGYHANNSTDTVDTVLEKNVTVTHSVNLLEDSHNGKLCLLKGIAPLQLGSCSVAGWILGNPECELLISKESWSYIVETPNPENGTCYPGYFTDYEELREQLSSVSSFKRFEIFPKESSWPNHTVTGVSSSCSHNGNSSFYRNLLWLTVKNGLYPNLSKSYTNKKEKEVLVLWGVHHPSNIEDQRALYHTENAYVSVVSSHYSRRFNPEIAKRPKVRNQEGRINYYWTLLEPGDTIIFEANGNLIAPRYAFELSKGFGSGIITSNAPMGECNAKCQTPQGAINSNLPFQNVHPVTIGECPKYVRSAKLRMVTGLRNTPSIQSRGLFGAIAGFIEGGWTGMVNGWYGYHHHNEQGSGYAANQQSPPNAINGITNKVNSVIEKMNTQFTAVGKEFNKLERRMENLNKKVDDGFLDIWTYNAELLVLLENERTLDFHDSNVKNLYEKVRSQLKNNAKEIGNGCFEFYHKCNDECMESVKNGTYDYPKYSEESKLNREKIDGVKLESMGVYNILAIYSTVASSLVLLVSLGAISFWMCSNGSLQCRICI

SEQ ID NO: 6359 - protein, 565 aa, synthetic construct
  REGION 1..565: note = hemagglutinin__InfluenzaA__ADV69100
MKVKLLILLCTFTATYADTICIGYHANNSTDTVDTVLEKNVTVTHSVNLLEDSHNGKLCLLKGIAPLQLGNCSVAGWILGNPECESLISKKSWSYIVETPKPENGTCYPGEFADYEELREQLSSVSSFERFEIFPKESSWPNHTAAGVSASCSHNGERSFYKNLIWLTVKNGLYPNLSKSYKNDKEKEVLILWGVHHPPNIENQRTLYHTENTYVSVVSSHYSGRFTPEITKRPKVRDQEGRINYYWTLLEPGDTIIFEANGNLIAPWYAFTLSRGLGSGIVTSNAPMDKCDAKCQTPHGAINSSLPFQNVHPVTIGECPKYVRSAKLRMVTGLRNIPSIQSRGLFGAIAGFIEGGWTGMVDGWYGYHHQNEQGSGYAADQESTQNAINGITNKVNSVIEKMNTQFTAVGKEFNKLERRMENLNKKVDDGFLDIWTYNAELLVLLENERTLDFHDSNVKSLYEKVKSQLKNNAKEIGNGCFEFYHKCNNECMESVKNGTYDYPKYSEESKLNREKIDGVKLDSMGVYRILAIYSTVASSLVLLVSLGAISFWMCSNGSLQCRICI

SEQ ID NO: 6360 - protein, 565 aa, synthetic construct
  REGION 1..565: note = hemagglutinin__InfluenzaA__ADV69101
MKVKLLILFCTFTATYADTICIGYHANNSTDTVDTVLEKNVTVTHSVNLLEDSHNGKLCLLKGIAPLQLGNCSVAGWILGNPECESLISKKSWSYIVETPNPENGACYPGEFADYEELREQLSSVSSFERFEIFPKESSWPNHTATGVSASCSHNGERSFYRNLIWLTVKNGLYPNLSKSYENDKEKEVLILWGVHHPPNIENQRTLYHTENAYVSVVSSHYSGRFTPEITKRPKVRDQEGRINYYWTLLEPGDTIIFEANGNLIAPWYAFTLSRGLGSGIITSNAPMDECDSKCQTPQGAINSSLPFQNVHPVTIGECPKYVRSAKLRMVTGLRNIPSIQSRGLFGAIAGFIEGGWTGMVDGWYGYHHQNEQGSGYAADQESTQNAINGITNKVNSVIEKMNPQFTAVGKEFNKLERRMENLNKKVDDGFLDIWTYNAELLVLLENERTLDFHDSNVKSLYEKVKSQLKNNAKEIGNGCFEFYHKCNNECMESVKNGTYDYPKYSEESKLNREKIDGVKLDSMGVYRILAIYSTVASSLVLLVSLGAISFWMCSNGSLQCRICI

SEQ ID NO: 6361 - protein, 565 aa, synthetic construct
  REGION 1..565: note = hemagglutinin__InfluenzaA__ADV69102
MKVKLLILFCTFTATYADTICIGYHANNSTDTVDTVLEKNVTVTHSVNLLEDSHNGKLCLLKGIAPLQLGNCSVAGWILGNPECESLISKKSWSYIVETPNPENGACYPGEFADYEELREQLSSVSSFERFEIFPKESSWPNHTATGVSASCSHNGERSFYRNLIWLTVKNGLYPNLSKSYENDKEKEVLILWGVHHPPNIENQRTLYHTENAYVSVVSSHYSGRFTPEITKRPKVRDQEGRINYYWTLLEPGDTIIFEANGNLIAPWYAFTLSTGLGSGIITSNAPMDECDSKCQTPQGAINSSLPFQNVHPVTIGECPKYVRSAKLRMVTGLRNIPSIQSRGLFGAIAGFIEGGWTGMVDGWYGYHHQNEQGSGYAADQESTQNAINGITNKVNSVIEKMNTQFTAVGKEFNKLERRMENLNKKVDDGFLDIWTYNAELLVLLENERTLDFHDSNVKSLYEKVKSQLKNNAKEIGNGCFEFYHKCNNECMESVKNGTYDYPKYSEESKLNREKIDGVKLDSMGVYRILAIYSTVASSLVLLVSLGAISFWMCSNGSLQCRICI

SEQ ID NO: 6362 - protein, 565 aa, synthetic construct
  REGION 1..565: note = hemagglutinin__InfluenzaA__ADV69103
MKVKLMVLLCTFTATYADTICVGYHANNSTDTVDTVLEKNVTVTHSVNLLEDSHNGKLCLLKGIAPLQLGSCSVAGWILGNPECELLISKESWSYIVETPNPENGTCYPGYFTDYEELREQLSSVSSFKRFEIFPKESSWPNHNVTGVSSSCSHNGKSSFYRNLLWLTVKNGLYPNLSKSYTNKKEKEVLVLWGVHHPSNIGDQRALYHTENAYVSVVSSHYSRRFTPEIAKRPKVRNQEGRINYYWTLLEPGDTIIFEANGNLIAPRYAFELSKGFGSGIITSNAPIGECNAKCQTPQGAINSSLPFQNVNPVTIGECPKYVKSAKLRMVTGLRNTPSIQSRGLFGAIAGFIEGGWTGMVDGWYGYHHQNEQGSGYAADQQSTQNAINGITNKVNSVIEKMNTQFTAVGKEFNKLERRMENLNKKVDDGFLDIWTYNAELLVLLENERTLDFHDSNVKNLYEKVKSQLKNNAKEIGNGCFEFYHKCNDECMESVKNGTYDYPKYSEESKLNREKIDGVKLESMGVYNILAIYSTVASSLVLLVSLGAISFWMCSNGSLQCRICI

SEQ ID NO: 6363 - protein, 565 aa, synthetic construct
  REGION 1..565: note = hemagglutinin__InfluenzaA__ADV69104
MKVKLLILFCTFTATYADTICIGYHANNSTDTVDTVLEKNVTVTHSVNLLEDSHNGKLCLLKGIAPLQLGNCSVAGWILGNPECESLISKKSWSYIVETPNPENGACYPGEFADYEELREQLSSVSSFERFEIFPKESSWPNHTATGVSASCSHNGERSFYRNLIWLTVKNGLYPNLSKSYENDKEKEVLILWGVHHPPNIENQRTLYHTENAYVSVVSSHYSGRFTPEITKRPKVRDQEGRINYYWTLLEPGDTIIFEANGNLIAPWYAFTLSRGLGSGIITSNAPMDECDSKCQTPQGAINSSLPFQNVHPVTIGECPKYVRSAKLRMVTGLRNIPSIQSRGLFGAIAGFIEGGWTGMVDGWYGYHHQNEQGSGYAADQESTQNAINGITNKVNSVIEKMNTQFTAVGKEFNKLERRMENLNKKVDDGFLDIWTYNAELLVLLENERTLDFHDSNVKSLYEKVKSQLKNNAKEIGNGCFEFYHKCNNECMESVKNGTYDYPKYSEESKLNREKIDGVKLDSMGVYRILAIYSTVASSLVLLVSLGAISFWMCSNGSLQCRICI

SEQ ID NO: 6364 - protein, 565 aa, synthetic construct
  REGION 1..565: note = hemagglutinin__InfluenzaA__ADV69105
MKVKLLILLCTFTATYADTICIGYHANNSTDTVDTVLEKNVTVTHSVNLLEDSHNGKLCLLKGIAPLQLGNCSVAGWILGNPECESLISKKSWSYIVETPNPENGACYPGEFADYEELREQLSSVSSFERFEIFPKESSWPNHTAAGVSASCSHNGERSFYRNLIWLTVKNGLYPNLSKSYKNDKEKEVLIIWGVHHPPNIENQRTLYHTENAYVSVVSSHYSGRFTPEITKRPKVRDQEGRINYYWTLLEPGDTIIFEANGNLIAPWYAFTLSRGLGSGIITSNAPMDECDAKCQTPQGAINSSLPFQNVHPVTIGECPKYVRSAKLRMVTGLRNIPSIQSRGLFGAIAGFIEGGWTGMVDGWYGYHHQNEQGSGYAADQESTQNAINGITNKVNSVIEKMNTQFTAVGKEFNKLERRMENLNKKVDDGFLDIWTYNAELLVLLENERTLDFHDSNVKSLYEKVKSQLKNNAKEIGNGCFEFYHKCNNECMESVKNGTYDYPKYSEESKLNREKIDGVKLDSMGVYRILAIYSTVASSLVLLVSLGAISFWMCSNGSLQCRICI

SEQ ID NO: 6365 - protein, 565 aa, synthetic construct
  REGION 1..565: note = hemagglutinin__InfluenzaA__ADV69106
MKVKLLILLCTFTATYADTICIGYHANNSTDTVDTVLEKNVTVTHSVNLLEDSHNGKLCLLKGIAPLQLGNCSVAGWILGNPECESLISKKSWSYIVETPNPGNGACYPGYFADYEELREQLSSVSSFERFEMFPKESSWPNHNVNGVSASCSHNGKSSFYRNLLWLTRKNGLYPNLTKSYANNNDKEVLILWGVHHPSNIGDQRTLYHTENAYVSVMSSHYSRRFTPEITKRPKVRDQEGRINYYWTLLEPGDTIIFEANGNLIAPWYAFALSRSFGSGIITSSAPMDECDAKCQTPQGAINSSLPFQNVHPVTIGECPKYVRSAKLKMVTGLRNIPSIQSRGLFGAIAGFIEGGWTGMVDGWYGYHHQNEQGSGYAADQESTQNAINGITNKVNSVIEKMNTQFTAVGKEFNKLEKRMENLNKKVDDGFLDIWTYNAELLVLLENERTLDFHDSNVKSLYEKVKIQLKNNAKEIGNGCFEFYHKCNNECMESVRNGTYDYPKYSEESKLNREKIDGVKLDSMGVYQILAIYSTVASSLVLLVSLGAISFWMCSNGSLQCRICI

SEQ ID NO: 6366 - protein, 565 aa, synthetic construct
  REGION 1..565: note = hemagglutinin__InfluenzaA__ADV69107
MKVKLLILLCTFTATYADTICIGYHANNSTDTVDTVLEKNVTVTHSVNLLEDSHNGKLCLLKGIAPLQLGNCSVAGWILGNPECESLISKESWSYIVETPNSDNGACYPGQFTDYEELREQLSSVSSFERFEIFPKESSWPNHTVTGVSASCSHNGERSFYRNLIWLTVKNGLYPNLSKSYENDKEKEVLILWGVHHPPNIGDQRTLYHTENAYISVVSSHYSGRFTPEITKRPKVRDQEGRINYYWTLLEPGDTIIFEANGNLIAPWYAFALSRGLGSGIITSNAPMDKCDAKCQTPQGAINSSLPFQNVHPVTIGECPKYVRSTKLRMVTGLRNIPSIQSRGLFGAIAGFIEGGWTGMVDGWYGYHHQNEQGSGYAADQESTQNAINGITNKVNSVIEKMNTQFTAVGKEFNKLERRMENLNKKVDDGFLDIWTYNAELLVLLENERTLDFHDSNVKSLYEKVKSQLKNNAKEIGNGCFEFYHKCNNECMESVRNGTYDYPKYSEESKLNREKIDGVKLDSMGVYRILAIYSTAASSLVLLVSLGAISFWMCSNGSLQCRICI

SEQ ID NO: 6367 - protein, 565 aa, synthetic construct
  REGION 1..565: note = hemagglutinin__InfluenzaA__ADV69108
MKVKLLVLLCTFTATYADTICVGYHANNSTDTVDTVLEKNVTVTHSVNLLEDSHNGKLCLLKGIAPLQLGSCSVAGWILGNPECELLISKESWSYIVETPNPENGTCYPGYFTDYEELREQLSSVSSFKRFEIFPKESSWPNHTVTGVSSSCSHNGKSSFYRNLLWLTMKNGLYPNLSKSYTNKKEKEVLVLWGVHHPSNIGDQRALYHTENAYVSVVSSHYSRRFTPEIAKRPKVRNQEGRINYYWTLLEPEDTIIFEANGNLIAPRYAFELSKGFGSGIITSNAPMGECNAKCQTPQGAINSSLPFQNVHPVTIGECPKYVRSSKLRMVTGLRNTPSIQSRGLFGAIAGFIEGGWTGMVDGWYGYHHQNEQGSGYAADQQSTQNAINGITNKVNSVIEKMNTQFTAVGKEFNKLERRMENLNKKIDDGFLDIWTYNAELLVLLENERTLDFHDSNVKNLYEKVKSQLKNNAKEIGNGCFEFYHKCNDECMESVKNGTYDYPKYSEESKLNREKIDGVKLESMGVYNILAIYSTVASSLVLLVSLGAISFWMCSNGSLQCRICI

SEQ ID NO: 6368 - protein, 565 aa, synthetic construct
  REGION 1..565: note = hemagglutinin__InfluenzaA__ADV69109
MKVKLLILLCTFKATYADTICIGYHANNSTETVDTVLEKNVTVTHSVNLLEDSHNGKLCLLKGIAPLQLGNCSVAGWILGNPECESLISKKSWSYIVETPNPENGACYPGEFADYEELREQLSSVSSFERFEIFPKESSWPNHTATGVSASCSHNGERSFYRNLIWLTVKNGLYPNLSKSYENDKKKEVLILWGVHHPPNIENQRTLYHTENAYVSVVSSHYSGRFTPEITKRPKVRDQEGRINYYWTLLEPGDTIIFEANGNLIAPWYAFTLSRGLGSGIITSNAPMDECDAKCQTPKGAINSSLPFQNVHPVTIGECPKYVRSAKLRMVTGLRNIPSIQSRGLFGAIAGFIEGGWTGMVDGWYGYHHQNEQGSGYAADQESTQNAINGITNKVNSVIEKMNTQFTAVGKEFNKLERRMENLNKKVDDGFLDIWTYNAELLVLLENERTLDFHDSNVKSLYEKVKSQLKNNAKEIGNGCFEFYHKCNNECMESVKNGTYDYPKYSEESKLNREKIDGVKLDSMGVYRILAIYSTVASSLVLLVSLGAISFWMCSNGSLQCRICI

SEQ ID NO: 6369 - protein, 566 aa, synthetic construct
  REGION 1..566: note = hemagglutinin__InfluenzaA__ADV76579
MKTIIALSYILCLVFAQKLPGNDDSTATLCLGHHAVPNGTIVKTITNDQIEVTNATELVQSSSTGEICDSPHQILDGENCTLIDALLGDPQCDGFQNKKWDLFVERSKAYSNCYPYDVPDYASLRSLVASSGTLEFNNESFNWTGVTQNGTSSACIRRSNNSFFSRLNWLTHLRFKYPALNVTMPNNEQFDKLYIWGVHHPGTDNDQIFLYAQASGRITVSTKRSQQTVIPNIGSRPRVRNIPSRISIYWTIVKPGDILLINSTGNLIAPRGYFKIRSGKSSIMRSDAPIGKCNSECITPNGSIPNDKPFQNVNRITYGACPRYVKQNTLKLATGMRNVPEKQTRGIFGAIAGFIENGWEGMVDGWYGFRHQNSEGRGQAADLKSTQAAIDQINGKLNRLIGKTNEKFHQIEKEFSEVEGRIQDLEKYVEDTKIDLWSYNAELLVALENQHTIDLTDSEMNKLFEKTKKQLRENAEDMGNGCFKIYHKCDNACIGSIRNGTYDHDVYRDEALNNRFQIKGVELKSGYKDWILWISFAISCFLLCVALLGFIMWACQKGNIRCNICI

SEQ ID NO: 6370 - protein, 566 aa, synthetic construct; identical to SEQ ID NO: 3588
  REGION 1..566: note = hemagglutinin__InfluenzaA__ADV76587

SEQ ID NO: 6371 - protein, 566 aa, synthetic construct; identical to SEQ ID NO: 3588
  REGION 1..566: note = hemagglutinin__InfluenzaA__ADV76598

SEQ ID NO: 6372 - protein, 566 aa, synthetic construct; identical to SEQ ID NO: 3411
  REGION 1..566: note = hemagglutinin__InfluenzaA__ADV76609

SEQ ID NO: 6373 - protein, 566 aa, synthetic construct; identical to SEQ ID NO: 3588
  REGION 1..566: note = hemagglutinin__InfluenzaA__ADV76620

SEQ ID NO: 6374 - protein, 566 aa, synthetic construct
  REGION 1..566: note = hemagglutinin__InfluenzaA__ADV76631
MKTIIALSYILCLVFAQKLPGNDNSTATLCLGHHAVPNGTIVKTITNDQIEVTNATELVQSSSTGEICDSPHQILDGKNCTLIDALLGDPQCDGFQNKKWDLFVERSKAYSNCYPYDVPDYASLRSLVASSGTLEFNNESFNWTGVTQNGTSSACIRRSKNSFFSRLNWLTHLNFKYPALNVTMPNNEQFDKLYIWGVHHPGTDKDQIFLYAQASGRITVSTKRSQQTVIPNIGSRPRVRNIPSRISIYWTMVKPGDILLINSTGNLIAPRGYFKIRSGKSSIMRSDTPIGKCNSECITPNGSIPNDKPFQNVNRITYGACPRYVKQNTLKLATGMRNVPEKQTRGIFGAIAGFIENGWEGMVDGWYGFRHQNSEGRGQAADLKSTQAAIDQINGKLNRLIGKANEKFHQIEKEFSEVEGRIQDLEKYVEDTKIDLWSYNAELLVALENQHTIDLTDSEMNKLFEKTKKQLRENAEDMGNGCFKIYHKCDNACIGSIRNGTYDHDVYRDEALNNRFQIKGVELKSGYKDWILWISFAISCFLLCVALLGFIMWACQKGNIRCNICI

SEQ ID NO: 6375 - protein, 566 aa, synthetic construct; identical to SEQ ID NO: 5592
  REGION 1..566: note = hemagglutinin__InfluenzaA__ADV76642

SEQ ID NO: 6376 - protein, 566 aa, synthetic construct; identical to SEQ ID NO: 5596
  REGION 1..566: note = hemagglutinin__InfluenzaA__ADV76664

SEQ ID NO: 6377 - protein, 566 aa, synthetic construct
  REGION 1..566: note = hemagglutinin__InfluenzaA__ADV76673
MKTIIALSYIFCLALGQDLPGNDNSTATLCLGHHAVPNGTLVKTITDDQIEVTNATELVQSSSTGKICNNPHRILDGIDCTLIDALLGDPHCDVFQNETWDLFVERSKAFSNCYPYDVPDYASLRSLVASSGTLEFITEGFTWTGVTQNGGSNACKRGPGSGFFSRLNWLTKSGSTYPVLNVTMPNNDNFDKLYIWGVHHPSTNQEQTSLYVQASGRVTVSTRRSQQTIIPNIESRPWVRGLSSRISIYWTIVNPGDVLVINSNGNLIAPRGYFKMRTGKSSIMRSDAPIDTCISECITPNGSIPNDKPFQNVNKITYGACPKYVKQNTLKLATGMRNVPEKQTRGLFGAKAGFIENGWEGMIDGWYGFRHQNSEGTGQAADLKSTQAAIDQINGKLNRVIEKTNEKFHQIEKEFSEVEGRIQDLEKYVEDTKIDLWSYNAELLVALENQHTIDLTDSEMNKLFEKTRRQLRENAEDMGNGCFKIYHKCDNACIESIRNGTYDHDVYRDEALNNRFQIKGVELKSGYKDWILWISFAISCFLLCVVLLGFIMWACQRGNIRCNICI

SEQ ID NO: 6378 - protein, 566 aa, synthetic construct
  REGION 1..566: note = hemagglutinin__InfluenzaA__ADV76682
MKTIIALSYILCLVFAQKLPGNDNSTATLCLGHHAVPNGTIVKTITNDQIEVTNATELVQSSSTGEICDSPHQILDGENCTLIDALLGDPQCDGFQNKKWDLFVERSKAYSNCYPYDVPDYASLRSLVASSGTLEFNNESFNWTGVTQNGTSSACIRRSNNSFFSRLNWLTHLNFKYPALNVTMPNNEQFDKLYIWGVHHPGTDKDQIFLYAQASGRITVSTKRSQQAVIPNIGSRPRVRNIPSRISIYWTIVKPGDILLINSTGNLIAPRGYFKIRSGESSIMRSDAPIGKCNSECITPNGSIPNDKPFQNVNRITYGACPRYVKQNTLKLATGMRNVPEKQTRGIFGAIAGFIENGWEGMVDGWYGFRHQNSEGRGQAADLKSTQAAIDQINGKLNRLIGKTNEKFHQIEKEFSEVEGRIQDLEKYVEDTKIDLWSYNAELLVALENQHTIDLTDSEMNKLFEKTKKQLRENAEDMGNGCFKIYHKCDNACIGSIRNGTYDHDVYRDEALNNRFQIKGVELKSGYKDWILWISFAISCFLLCVALLGFIMWACQKGNIRCNICI

SEQ ID NO: 6379 - protein, 566 aa, synthetic construct; identical to SEQ ID NO: 3613
  REGION 1..566: note = hemagglutinin__InfluenzaA__ADV76694

SEQ ID NO: 6380 - protein, 566 aa, synthetic construct; identical to SEQ ID NO: 3411
  REGION 1..566: note = hemagglutinin__InfluenzaA__ADV76705

SEQ ID NO: 6381 - protein, 566 aa, synthetic construct; identical to SEQ ID NO: 3613
  REGION 1..566: note = hemagglutinin__InfluenzaA__ADV76716

SEQ ID NO: 6382 - protein, 566 aa, synthetic construct
  REGION 1..566: note = hemagglutinin__InfluenzaA__ADV76727
MKTIIALSYILCLVFAQKLPGNDNSTATLCLGHHAVPNGTIVKTITNDQIEVTNATELVQSSSTGEICDSPHQILDGKNCTLIDALLGDPQCDGFQNKKWDLFVERSKAYSNCYPYDVPDYASLRSLVASSGTLEFNNESFNWTGVTQNGKSSACIRRSKNSFFSRLNWLTHLNFKYPALNVTMPNNEQFDKLYIWGVHHPGTDKDQIFLYAQASGRITVSTKRSQQTVIPNIGSRPRVRNIPSRISIYWTIVKPGDILLINSTGNLIAPRGYFKIRSGKSSIMRSDAPIGKCNSECITPNGSIPNDKPFQNVNRITYGACPRYVKQNTLKLATGMRNVPEKQTRGIFGAIAGFIENGWEGMVDGWYGFRHQNSEGRGQAADLKSTQAAIDQINGKLNRLIGKTNEKFHQIEKEFSEVEGRIQDLEKYVEDTKIDLWSYNAELLVALENQHTIDLTDSEMNKLFEKTKKQLRENAEDMGNGCFKIYHKCDNACIGSIRNGTYDHDVYRDEALNNRFQIKGVELKSGYKDWILWISFAISCFLLCVALLGFIMWACQKGNIRCNICI

SEQ ID NO: 6383 - protein, 566 aa, synthetic construct
  REGION 1..566: note = hemagglutinin__InfluenzaA__ADV91009
MKAILAVLLYTFATANADTLCIGYHANNSTDTVDTVLEKNVTVTHSVNLLEDKHNGKLCKLRGIAPLHLGKCNIAGWILGNPECESLSTASSWSYIVETPSSDNGTCYPGDFIDYEELREQLSSVSSFERFEIFPKTSSWPNHDSNKGVTAACPHAGAKSFYKNLIWLVKKGNSYPKLSKSYINDKGKKVLVLWGIHHPSTSADQQSLYQNADAYVFVGTSRYSKKFKPEIAIRPKVRDQEGRMNYYWTLVEPGDKITFEATGNLVVPRYAFAMERNAGSGIIISDTPVHDCNTTCQTPKGAINTSLPFQNIHPITIGKCPKYVESTKLRLATGLRNVPSIQSRGLFGAIAGFIEGGWTGMVDGWYGYHHQNEQGSGYAADLKSTQNAIDKITNKVNSVIEKMNTQFTAVGKEFNHLEKRIENLNKKVDDGFLDIWTYNAELLVLLENERTLDYHDSNVKNLYEKVRSQLKNNAKEIGNGCFEFYHKCDNTCMESVKNGTYDYPKYSEEAKLNREEIDGVKLESTRIYQILAIYSTVASSLVLVVSLGAISFWMCSNGSLQCRICI

SEQ ID NO: 6384 - protein, 566 aa, synthetic construct
  REGION 1..566: note = hemagglutinin__InfluenzaA__ADV91010
MKAILVVLLYTFATANADTLCIGYHANNSTDTVDTVLEKNVTVTHSVNLLEDKHNGKLCKLRGVAPLHLGKCNIAGWILGNPECESLSTASSWSYIVETSSSDNGTCYPGDFTDYEELREQLSSVSSFERFEIFPKTSSWPNHDSNKGVTTACPHAGAKSFYKNLIWLVKKGNSYPKLSKSYINDKGKEVLVLWGIHHPPTSADQQSLYQNADAYVFVGTSRYSKKFKPEIAIRPKVRDQEGRMNYYWTLVEPGDKITFEATGNLVVPRYAFAMERNAGSGIIISDTPVHDCNTTCQTPKGAINTSLPFQNIHPITIGKCPKYVKSTKLRLATGLRNVPSIQSRGLFGAIAGFIEGGWTGMVDGWYGYHHQNEQGSGYAADLKSTQNAIDEITNKVNSVIEKMNTQFTAVGKEFNHLEKRIENLNKKVDDGFLDIWTYNAELLVLLENERTLDYHDSNVKNLYEKVRSQLKNNAKEIGNGCFEFYHKCDNTCMESVKNGTYDYPKYSEEAKLNREEIDGVKLESTRIYQILAIYSTVASSLVLVVSLGAISFWMCSNGSLQCRICI

SEQ ID NO: 6385 - protein, 566 aa, synthetic construct
  REGION 1..566: note = hemagglutinin__InfluenzaA__ADW01407
MEAKLFVLFCAFTALKADTICVGYHANNSTDTVDTILEKNVTVTHSVNLLENSHNGKLCSLNGKIPLQLGNCNVAGWILGNPKCDLLLTANSWSYIIETSNSKNGACYPGEFADYEELKEQLSTVSSFERFEIFPKATSWPNHDTTRGTTVACSHSGANSFYRNLLWIVKKGNSYPKLSKSYTNNKGKEVLVIWGVHHPPTDSDQQTLYQNNHTYVSVGSSKYYKRLTPEIVARPKVREQAGRMNYYWTLLDQGDTITFEATGNLIAPWHAFALKKGSSSGIMRSDAQVHNCTTKCQTPHGALKGNLPFQNVHPVTIGECPKYVKSTQLRMATGLRNIPSIQSRGLFGAIAGFIEGGWTGMVDGWYGYHHRNEQGSGYAADQKSTQIAIDGISNKVNSVIEKMNIQFTSVGKEFNSLEKRMENLNKKVDDGFLDVWTYNAELLILLENERTLDFHDLNVKNLYEKVKSQLRNNAKEIGNGCFEFYHKCDNECMESVKNGTYNYPKYSEESKLNREEIDGVKLESMGIHQILAIYSTVASSLVLLVSLGAISFWMCSNGSLQCRVCI

SEQ ID NO: 6386 - protein, 565 aa, synthetic construct; identical to SEQ ID NO: 3131
  REGION 1..565: note = hemagglutinin__InfluenzaA__ADW09101

SEQ ID NO: 6387 - protein, 565 aa, synthetic construct
  REGION 1..565: note = hemagglutinin__InfluenzaA__ADW09111
MKVKLLVLLCTFTATYADTICIGYHANNSTDTVDTVLEKNVTVTHSVNLLENSHNGKLCLLKGIAPLQLGNCSVAGWILGNPECELLISKESWSYIVEKPNPENGTCYPGHFADYEELREQLSSVSSFERFEIFPKESSWPNHTVTGVSASCSHNGESSFYRNLLWLTGKNGLYPNLSKSYANNKEKEVLVLWGVHHPPNIVDQKTLYRTENAYVSVVSSHYSRKFTPEIAKRPKVRDQEGRINYYWTLLEPGDTIIFEANGNLIAPRYAFALSRGFGSGIINSNAPMDKCDAKCQTPRGAINSSLPFQNVHPVTIGECPKYVRSAKLRMVTGLRNIPSIQSRGLFGAIAGFIEGGWTGMVDGWYGYHHQNDQGSGYAADQKSTQNAINGITNKVNSVIEKMNTQFTAVGKEFNKLERRMENLNKKVDDGFIDIWTYNAELLVLLENERTLDFHDSNVKNLYEKVKSQLKNNAKEIGNGCFEFYHKCNDECMESVKNGTYDYPKYSEESKLNREKIDGVKLESMGVYQILAIYSTVASSLVLLVSLGAISFWMCSNGSLQCRICI

SEQ ID NO: 6388 - protein, 565 aa, synthetic construct
  REGION 1..565: note = hemagglutinin__InfluenzaA__ADW09120
MKVKLLVLLCTFTATYADTICIGYHANNSTDTVDTVLEKNVTVTHSVNLLENSHNGKLCLLKGIAPLQLGNCSVAGWILGNPECELLISKESWSYIVEKPNPENGTCYPGHFADYEELREQLSSVSSFERFEIFPKESSWPNHTVTGVSASCSHNGESSFYRNLLWLTVKNGLYPNLSKSYANNKEKEVLVLWGVHHPPNIVDQKTLYHTENAYVSVVSSHYSRKFTPEIAKRPKVRDQEGRINYYWTLLEPGDTIIFEANGNLIAPRYAFALSKGFGSGIINSNAPMDKCDAKCQTPRGAINSSLPFQNVHPVTIGECPKYVRSAKLRMVTGLRNIPSIQSRGLFGAIAGFIEGGWTGMVDGWYGYHHQNEQGSGYAADQKSTQNAINGITNKVNSVIEKMNTQFTAVGKEFNKLERRMENLNKKVDDGFIDIWTYNAELLVLLENERTLDFHDSNVKNLYEKVKSQLKNNAKEIGNGCFEFYHKCNDECMESVKNGTYDYPKYSEESKLNREKIDGVKLESMGVYQILAIYSTVASSLVLLVSLGAISFWMCSNGSLQCRICI

SEQ ID NO: 6389 - protein, 565 aa, synthetic construct; identical to SEQ ID NO: 3616
  REGION 1..565: note = hemagglutinin__InfluenzaA__ADW09131

SEQ ID NO: 6390 - protein, 565 aa, synthetic construct
  REGION 1..565: note = hemagglutinin__InfluenzaA__ADW09153
MKVKLLVLLCTFTATYADTICIGYHANNSTDTVDTVLEKNVTVTHSVNLLENSHNGKLCLLKGIAPLQLGNCSVAGWILGNPECELLISKESWSYIVEKPNPENGTCYPGHFADYEELREQLSSVSSFERFEIFPKESSWPNHTVTGVSASCSHNGESSFYRNLLWLTVKNGLYPNLSKSYANNKEKEVLVLWGVHHPPNIVDQKTLYRTENAYVSVVSSHYSRKFTPEIAKRPKVRDQEGRINYYWTLLEPGDTIIFEANGNLIAPRYAFALSRGFGSGIINSNAPMDKCDAKCQTPRGAINSSLPFQNVHPVTIGECPKYVRSAKLRMVTGLRNIPSIQSRGLFGAIAGFIEGGWTGMVDGWYGYHHQNEQGSGYAADQKSTQDAINGITNKVNSVIEKMNTQFTAVGKEFNKLERRMENLNKKVDDGFIDIWTYNAELLVLLENERTLDFHDSNVKNLYEKVKSQLKNNAKEIGNGCFEFYHKCNDECMESVKNGTYDYPKYSEESKLNREKIDGVKLESMGVYQILAIYSTVASSLVLLVSLGAISFWMCSNGSLQCRICI

SEQ ID NO: 6391 - protein, 565 aa, synthetic construct; identical to SEQ ID NO: 3616
  REGION 1..565: note = hemagglutinin__InfluenzaA__ADW09164

SEQ ID NO: 6392 - protein, 565 aa, synthetic construct
  REGION 1..565: note = hemagglutinin__InfluenzaA__ADW09186
MKVKLLVLLCTFTATYADTICIGYHANNSTDTVDTVLEKNVTVTHSVNLLENSHNGKLCLLKGIAPLQLGNCSVAGWILGNPECELLISKESWSYIVEKPNPENGTCYPGHFADYEELREQLSSVSSFERFEIFPKESSWPNHTVTGVSASCSHNGESSFYRNLLWLTGKNGLYPNLSKSYANNKEKEVLVLWGVHHPPNIVDQKTLYRTENAYVSVVSSHYSRKFTPEIAKRPKVRDQEGRINYYWTLLEPGDTIIFEANGNLIAPRYAFALSRGFGSGIINSNAPMDKCDAKCQTPQGAINSSLPFQNVHPVTIGECPKYVRSAKLRMVTGLRNTPSIQSRGLFGAIAGFIEGGWTGMVDGWYGYHHQNEQGSGYAADQKSTQNAINGITNKVNSVIEKMNTQFTAVGKEFNKLERRMENLNKKVDDGFIDIWTYNAELLVLLENERTLDFHDSNVKNLYEKVKSQLKNNAKEIGNGCFEFYHKCNDECMESVKNGTYDYPKYSEESKLNREKIDGVKLESMGVYQILAIYSTVASSLVLLVSLGAISFWMCSNGSLQCRICI

SEQ ID NO: 6393 - protein, 565 aa, synthetic construct; identical to SEQ ID NO: 3131
  REGION 1..565: note = hemagglutinin__InfluenzaA__ADW09197

SEQ ID NO: 6394 - protein, 565 aa, synthetic construct; identical to SEQ ID NO: 3616
  REGION 1..565: note = hemagglutinin__InfluenzaA__ADW09208

SEQ ID NO: 6395 - protein, 565 aa, synthetic construct; identical to SEQ ID NO: 3616
  REGION 1..565: note = hemagglutinin__InfluenzaA__ADW09219

SEQ ID NO: 6396 - protein, 565 aa, synthetic construct; identical to SEQ ID NO: 3131
  REGION 1..565: note = hemagglutinin__InfluenzaA__ADW09230

SEQ ID NO: 6397 - protein, 565 aa, synthetic construct
  REGION 1..565: note = hemagglutinin__InfluenzaA__ADW09241
MKVKLLVLLCTFTATYADTICIGYHANNSTDTVDTVLEKNVTVTHSVNLLENSHNGKLCLLKGIAPLQLGNCSVAGWILGNPECELLISKESWSYIVEKPNPENGTCYPGHFADYEEMREQLSSVSSFERFEIFPKESSWPNHTVTGVSASCSHNGESSFYRNLLWLTVKNGLYPNLSKSYANNKEKEVLVLWGVHHPPNIVDQKTLYRTENAYVSVVSSHYSRKFTPEIAKRPKVRDQEGRINYYWTLLEPGDTIIFEANGNLIAPRYAFALSRGFGSGIINSNAPMDKCDAKCQTPRGAINSSLPFQNVHPVTIGECPKYVRSAKLRMVTGLRNIPSIQSRGLFGAIAGFIEGGWTGMVDGWYGYHHQNEQGSGYAADQKSTQNAINGITNKVNSVIEKMNTQFTAVGKEFNKLERRMENLNKKVDDGFIDIWTYNAELLVLLENERTLDFHDSNVKNLYEKVKSQLKNNAKEIGNGCFEFYHKCNDECMESVKNGTYDYPKYSEESKLNREKIDGVKLESMGVYQILAIYSTVASSLVLLVSLGAISFWMCSNGSLQCRICI

SEQ ID NO: 6398 - protein, 565 aa, synthetic construct; identical to SEQ ID NO: 3616
  REGION 1..565: note = hemagglutinin__InfluenzaA__ADW09252

SEQ ID NO: 6399 - protein, 565 aa, synthetic construct
  REGION 1..565: note = hemagglutinin__InfluenzaA__ADW09274
MKVKLLVLLCTFTATYADTICIGYHANNSTDTVDTVLEKNVTVTHSVNLLENSHNGKLCLLKGIAPLQLGNCSVAGWILGNPECELLISKESWSYIVEKPNPENGTCYPGHFADYEELREQLSSVSSFERFEIFPKESSWPNHTVTGVSASCSHNGESSFYRNLLWLTVKNGLYPNLSKPYANNKEKEVLVLWGVHHPPNIVDQKTLYRTENAYVSVVSSHYSRKFTPEIAKRPKVRDQEGRINYYWTLLEPGDTIIFEANGNLIAPRYAFALSRGFGSGIINSNAPMDKCDAKCQTPRGAINSSLPFQNVHPVTIGECPKYVRSAKLRMVTGLRNIPSIQSRGLFGAIAGFIEGGWTGMVDGWYGYHHQNEQGSGYAADQKSTQNAINGITNKVNSVIEKMNTQFTAVGKEFNKLERRMENLNKKVDDGFIDIWTYNAELLVLLENERTLDFHDSNVKNLYEKVKSQLKNNAKEIGNGCFEFYHKCNDECMESVKNGTYDYPKYSEESKLNREKIDGVKLESMGVYQILAIYSTVASSLVLLVSLGAISFWMCSNGSLQCRICI

SEQ ID NO: 6400 - protein, 565 aa, synthetic construct
  REGION 1..565: note = hemagglutinin__InfluenzaA__ADW09285
MKVKLLVLLCTFTATYADTICIGYHANNSTDTVDTVLEKNVTVTHSVNLLENSHNGKLCLLKGIAPLQLGNCSVAGWILGNPECELLISKESWSYIVEKPNPENGTCYPGHFADYEELREQLSSVSSFERFEIFPKESSWPNHTVTGVSASCSHNGESSFYRNLLWLTGKNGLYPNLSKSYANNKEKEVLVLWGVHHPPNIVDQKTLYRTENAYVSVVSSHYSRKFTPEIAKRPKVRDQEGRINYYWTLLEPGDTITFEANGNLIAPRYAFALSRGFGSGIINSNAPMDKCDAKCQTPQGAINSSLPFQNVHPVTIGECPKYVRSAKLRMVTGLRNIPSIQSRGLFGAIAGFIEGGWTGMVDGWYGYHHQNEQGSGYAADQKSTQNAINGITNKVNSVIEKMNTQFTAVGKEFNKLERRMENLNKKVDDGFIDIWTYNAELLVLLENERTLDFHDSNVKNLYEKVKSQLKNNAKEIGNGCFEFYHKCNDECMESVKNGTYDYPKYSEESKLNREKIDGVKLESMGVYQILAIYSTVASSLVLLVSLGAISFWMCSNGSLQCRICI

SEQ ID NO: 6401 - protein, 565 aa, synthetic construct; identical to SEQ ID NO: 3616
  REGION 1..565: note = hemagglutinin__InfluenzaA__ADW09296

SEQ ID NO: 6402 - protein, 565 aa, synthetic construct; identical to SEQ ID NO: 3131
  REGION 1..565: note = hemagglutinin__InfluenzaA__ADW09307

SEQ ID NO: 6403 - protein, 565 aa, synthetic construct
  REGION 1..565: note = hemagglutinin__InfluenzaA__ADW09327
MKVKLLVLLCTFTATYADTICIGYHANNSTDTVDTVLEKNVTVTHSVNLLENSHNGKLCLLKGIAPLQLGNCSVAGWILGNPECELLISKESWSYIVEKPNPENGTCYPGHFADYEELREQLSSVSSFERFEIFPKESSWPNHTVTGVSASCSHNGESSFYRNLLWLTGKNGLYPNLSKSYANNKEKEVLVLWGVHHPPNIVDQKTLYRTENAYVSVVSSHYSRKFTPEIAKRPKVRDQEGRINYYWTLLEPGDTIIFEANGNLIAPRYAFALSRGFGSGIINSNAPMDKCDAKCQTPQGAINSSLPFQNVHPVTIGECPKYVRSAKLRMVTGLRNIPSIQSRGLFGAIAGFIEGGWTGMVDGWYGYHHQNEQGSGYAADQKSTQNAINGITNKVNSVIEKMNTQFTAVGKEFNKLERRMENLNKKVDDGFIDIWTYNAELLVLLENERTLDFHDSNVKNLYEKVKSQLKNNAKEIGNGCFEFYHKCNNECMESVKNGTYDYPKYSEESKLNREKIDGVKLESMGVYQILAIYSTVASSLVLLVSLGAISFWMCSNGSLQCRICI

SEQ ID NO: 6404 - protein, 565 aa, synthetic construct; identical to SEQ ID NO: 3616
  REGION 1..565: note = hemagglutinin__InfluenzaA__ADW10483

SEQ ID NO: 6405 - protein, 565 aa, synthetic construct
  REGION 1..565: note = hemagglutinin__InfluenzaA__ADW10494
MKVKLLVLLCTFTATYADTICIGYHANNSTDTVDTVLEKNVTVTHSVNLLENSHNGKLCLLKGIAPLQLGNCSVAGWILGNPECELLISKESWSYIVEKPNPENGTCYPGHFADYEELREQLSSVSSFERFEIFPKESSWPNHTVTGVSASCSHNGESSFYRNLLWLTGKNGLYPNLSKSYANNKEKEVLVLWGVHHPPNIVDQKTLYRTENAYVSVVSSHYSRKFTPEIAKRPKVRDQEGRINYYWTLLEPGDTIIFEANGNLIAPRYAFALSRGFGSGIINSNAPMDKCDAKCQTPQGAINSSLPFQNVHPVTIGECPKYVRSAKLRMVTGLRNIPSIQSRGLFGAIAGFIEGGWTGMVDGWYGYHHQNEQGSGYAADQKSTQNAINGITNKVNSVIEKMNTQFTAVGKEFNKLERRMENLNKKVDDGFIDIWTYNAELLVLLENERTLDFHDSNVKNLYEKVKNQLKNNAKEIGNGCFEFYHKCNDECMESVKNGTYDYPKYSEESKLNREKIDGVKLESMGVYQILAIYSTVASSLVLLVSLGAISFWMCSNGSLQCRICI

SEQ ID NO: 6406 - protein, 565 aa, synthetic construct; identical to SEQ ID NO: 3616
  REGION 1..565: note = hemagglutinin__InfluenzaA__ADW10505

SEQ ID NO: 6407 - protein, 565 aa, synthetic construct; identical to SEQ ID NO: 3616
  REGION 1..565: note = hemagglutinin__InfluenzaA__ADW10516

SEQ ID NO: 6408 - protein, 565 aa, synthetic construct
  REGION 1..565: note = hemagglutinin__InfluenzaA__ADW10527
MKVKLLVLLCTFTATYADTICIGYHANNSTDTVDTVLEKNVTVTHSVNLLENSHNGKLCLLKGIAPLQLGNCSVAGWILGNPECELLISKESWSYIVEKPNPENGTCYPGHFADYEELREQLSSVSSFERFEIFPKESSWPNHTVTGVSASCSHNGESSFYRNLLWLTGKNGLYPNLSKSYANNKEKEVLVLWGVHHPPNIVDQKTLYRTENAYVSVVSSHYSRKFTPEIAKRPKVRDQEGRINYYWTLLEPGDTIIFEANGNLIAPRYAFALSRGFGLGIINSNAPMDKCDAKCQTPQGAINSSLPFQNVHPVTIGECPKYVRSAKLRMVTGLRNIPSIQSRGLFGAIAGFIEGGWTGMVDGWYGYHHQNEQGSGYAADQKSTQNAINGITNKVNSVIEKMNTQFTAVGKEFNKLERRMENLNKKVDDGFIDIWTYNAELLVLLENERTLDFHDSNVKNLYEKVKSQLKNNAKEIGNGCFEFYHKCNDECMESVKNGTYDYPKYSEESKLNREKIDGVKLESMGVYQILAIYSTVASSLVLLVSLGAISFWMCSNGSLQCRICI

SEQ ID NO: 6409 - protein, 565 aa, synthetic construct
  REGION 1..565: note = hemagglutinin__InfluenzaA__ADW10538
MKVKLLVLLCTFTATYADTICIGYHANNSTDTVDTVLEKNVTVTHSVNLLENSHNGKLCLLKGIAPLQLGNCSVAGWILGNPECELLISKESWSYIVEKPNPENGTCYPGHFADYEELREQLSSVSSFERFEIFPKESSWPNHTVTGVSASCSHNGESSFYRNLLWLTGKNGLYPNLSKSYANNKEKEVLVLWGVHHPPNIVDQKTLYRTENAYVSVMSSHYSRKFTPEIAKRPKVRDQEGRINYYWTLLEPGDTIIFEANGNLIAPRYAFALSRGFGSGIINSNAPMDKCDAKCQTPQGAINSSLPFQNVHPVTIGECPKYVRSAKLRMVTGLRNIPSIQSRGLFGAIAGFIEGGWTGMVDGWYGYHHQNEQGSGYAADQKSTQNAINGITNKVNSVIEKMNTQFTAVGKEFNKLERRMENLNKKVDDGFIDIWTYNAELLVLLENERTLDFHDSNVKNLYEKVKSQLKNNAKEIGNGCFEFYHKCNDECMESVKNGTYDYPKYSEESKLNREKIDGVKLESMGVYQILAIYSTVASSLVLLVSLGAISFWMCSNGSLQCRICI

SEQ ID NO: 6410 - protein, 565 aa, synthetic construct; identical to SEQ ID NO: 3616
  REGION 1..565: note = hemagglutinin__InfluenzaA__ADW10549

SEQ ID NO: 6411 - protein, 565 aa, synthetic construct
  REGION 1..565: note = hemagglutinin__InfluenzaA__ADW10560
MKVKLLVLLCTFTATYADTICIGYHANNSTDTVDTVFEKNVTVTHSVNLLENSHNGKLCLLKGIAPLQLGNCSVAGWILGNPECELLISKESWSYIVEKPNPENGTCYPGHFADYEELREQLSSVSSFERFEIFPKESSWPNHTVTGVSASCSHNGERSFYRNLLWLTGKNGLYPNLSKSYANNKEKEVLVLWGVHHPPDIGDQKTLYHTENAYVSVVSSHYSRKFTPEIAKRPKVRDQEGRINYYWTLLEPGDTIIFEANGNLIAPRYAFALSRGFGSGIINSNAPMDKCDAKCQTPQGAINSSLPFQNVHPVTIGECPKYVRSAKLRMVTGLRNIPSIQSRGLFGAIAGFIEGGWTGMVDGWYGYHHQNEQGSGYAADQKSTQNAINGITNKVNSVIEKMNTQFTAVGKEFNKLERRMENLNKKVDDGFIDIWTYNAELLVLLENERTLDFHDSNVKNLYEKVKSQLKNNAKEIGNGCFEFYHKCNDECMESVKNGTYDYPKYSEESKLNREKIDGVKLESMGVYQILAIYSTVASSLVLLVSLGAISFWMCSNGSLQCRICI

SEQ ID NO: 6412 - protein, 565 aa, synthetic construct; identical to SEQ ID NO: 5953
  REGION 1..565: note = hemagglutinin__InfluenzaA__ADW10571

SEQ ID NO: 6413 - protein, 565 aa, synthetic construct; identical to SEQ ID NO: 3131
  REGION 1..565: note = hemagglutinin__InfluenzaA__ADW10582

SEQ ID NO: 6414 - protein, 565 aa, synthetic construct; identical to SEQ ID NO: 3616
  REGION 1..565: note = hemagglutinin__InfluenzaA__ADW10593

SEQ ID NO: 6415 - protein, 565 aa, synthetic construct; identical to SEQ ID NO: 3616
  REGION 1..565: note = hemagglutinin__InfluenzaA__ADW10604

SEQ ID NO: 6416 - protein, 565 aa, synthetic construct; identical to SEQ ID NO: 3616
  REGION 1..565: note = hemagglutinin__InfluenzaA__ADW10615

SEQ ID NO: 6417 - protein, 565 aa, synthetic construct
  REGION 1..565: note = hemagglutinin__InfluenzaA__ADW10626
MKVKLLVLLCTFTATYADTICIGYHANNSTDTVDTVLEKNVTVTHSVNLLENSHNGKLCLLKGIAPLQLGNCSVAGWILGNPECELLISKESWSYIVEKPNPENGTCYPGHFADYEELREQLSSVSSFERFEIFPKESSWPNHTVTGVSASCSHNGESSFYRNLLWLTVKNGLYPNLSKSYANNKEKEVLVLWGVHHPPSIVDQKTLYRTENAYVSVVSSHYSRKFTPEIAKRPKVRDQEGRINYYWTLLEPGDTIIFEANGNLIAPRYAFALSRGFGSGIINSNAPMDKCDAKCQTPRGAINSSLPFQNVHPVTIGECPKYVRSAKLRMVTGLRNIPSIQSRGLFGAIAGFIEGGWTGMVDGWYGYHHQNEQGSGYAADQKSTQNAINGITNKVNSVIEKMNTQFTAVGKEFNKLERRMENLNKKVDDGFIDIWTYNAELLVLLENERTLDFHDSNVKNLYEKVKSQLKNNAKEIGNGCFEFYHKCNDECMESVKNGTYDYPKYSEESKLNREKIDGVKLESMGVYQILAIYSTVASSLVLLVSLGAISFWMCSNGSLQCRICI

SEQ ID NO: 6418 - protein, 565 aa, synthetic construct
  REGION 1..565: note = hemagglutinin__InfluenzaA__ADW10721
MKVKLLVLLCTFTATYADTICIGYHANNSTDTVDTVLEKNVTVTHSVNLLENSHNGKLCLLKGIAPLQLGNCSVAGWILGNPECELLISKESWSYIVEKPNPENGTCYPGHFADYEELREQLSSVSSFKRFEIFPKESSWPNHTVTGVSASCSHNGESSFYRNLLWLTVKNGLYPNLSKSYANNKEKEVLVLWGVHHPPNIVDQRTLYHTENAYVSVVSSHYSRKFTPEIAKRPKVRNQEGRINYYWTLLEPGDTIIFEANGNLIAPRYAFALSRGFGSGIINSNAPMDKCDAKCQTPRGAINSSLPFQNVHPVTIGECPKYVRSAKLRMVTGLRNIPSIQSRGLFGAIAGFIEGGWTGMVDGWYGYHHQNEQGSGYAADQKSTQNAINGITNKVNSVIEKMNTQFTAVGKEFNKLERRMENLNKKVDDGFIDIWTYNAELLVLLENERTLDFHDSNVKNLYEKVKSQLKNNAKEIGNGCFEFYHKCNDECMESVKNGTYDYPKYSEESKLNREKIDGVKLESMGVYQILAIYSTVASSLVLLVSLGAISFWMCSNGSLQCRICI

SEQ ID NO: 6419 - protein, 565 aa, synthetic construct
  REGION 1..565: note = hemagglutinin__InfluenzaA__ADW10743
MKVKLLVLLCTFTATYADTICIGYHANNSTDTVDTVLEKNVTVTHSVNLLENSHNGKLCLLKGIAPLQLGNCSVAGWILGNPECELLISKESWSYIVEKPNPENGTCYPGHFADYEELREQLSSVSSFERFEIFPKESSWPNHTVTGVSASCSHNGESSFYRNLLWLTVKNGLYPNLSKSYANNKEKEVLVLWGVHHPPNIVDQKTLYRTENTYVSVVSSHYSRKFTPEIAKRPKIRDQEGRINYYWTLLEPGDTIIFEANGNLIAPRYAFALSRGFGSGIINSNAPMDKCDAKCQTPRGAINSSLPFQNVHPVTIGECPKYVRSVKLRMVTGLRNIPSIQSRGLFGAIAGFIEGGWTGMVDGWYGYHHQNEQGSGYAADQKSTQNAINGITNKVNSVIEKMNTQFTAVGKEFNKLERRMENLNKKVDDGFIDIWTYNAELLVLLENERTLDFHDSNVKNLYEKVKSQLKNNAKEIGNGCFEFYHKCNDECMESVKNGTYDYPKYSEESKLNREKIDGVKLESMGVYQILAIYSTVASSLVLLVSLGAISFWMCSNGSLQCRICI

SEQ ID NO: 6420 - protein, 565 aa, synthetic construct
  REGION 1..565: note = hemagglutinin__InfluenzaA__ADW10754
MKVKLLVLLCTFTATYADTICIGYHANNSTDTVDTVLEKNVTVTHSVNLLENSHNGKLCLLKGIAPLQLGNCSVAGWILGNPECELLISKESWSYIVEKPNPENGTCYPGHFADYEELREQLSSVSSFERFEIFPKESSWPNHTVTGVSASCSHNGENSFYRNLLWLTGKNGLYPNLSKSYANNKEKEVLVLWGVHHPPNIADQKTLYHTENAYVSVVSSHYSRKFTPEIAKRPKVRDQEGRINYYWTLLEPGDTIIFEANGNLIAPRYAFALSRGFGSGIINSNAPMDKCDAKCQTPQGAINSSLPFQNVHPVTIGECPKYVRSAKLRMVTGLRNIPSVQSRGLFGAIAGFIEGGWTGMVDGWYGYHHQNEQGSGYAADQKSTQNAINGITNKVNSVIEKMNTQFTAVGKEFNKLERRMENLNKKVDDGFIDIWTYNAELLVLLENERTLDFHDSNVKNLYEKVKSQLKNNAKEIGNGCFEFYHKCNDECMESVKNGTYDYPKYSEESKLNREKIDGVKLESMGVYQILAIYSTVASSLVLLVSLGAISFWMCSNGSLQCRICI

SEQ ID NO: 6421 - protein, 565 aa, synthetic construct
  REGION 1..565: note = hemagglutinin__InfluenzaA__ADW10765
MKVKLLVLLCTFTATYADTICIGYHANNSTDTVDTVLEKNVTVTHSVNLLENSHNGKLCLLKGIAPLQLGNCSVAGWILGNPECELLISKESWSYIVEKPNPENGTCYPGHFADYEELREQLSSVSSFERFEIFPKESSWPNHTVTGVSASCSHNGESSFYRNLLWLTVKNGLYPNLSKSYANNKEKEVLVLWGVHHPPNIVDQKTLYHTENAYVSVVSSHYSRKFTPEIAKRPKVRNQEGRINYYWTLLEPGDTIIFEANGNLIAPRYAFALSRGFGSGIINSNAPMDKCDAKCQTPRGAINSSLPFQNVHPVTIGECPKYVRSAKLRMVTGLRNIPSIQSRGLFGAIAGFIEGGWTGMVDGWYGYHHQNEQGSGYAADQKSTQNAINGITNKVNSVIEKMNTQFTAVGKEFNKLERRMENLNKKVDDGFIDIWTYNAELLVLLENERTLDFHDSNVKNLYEKVKSQLKNNAKEIGNGCFEFYHKCNDECMESVKNGTYDYPKYSEESKLNREKIDGVKLESMGVYQILAIYSTVASSLVLLVSLGAISFWMCSNGSLQCRICI

SEQ ID NO: 6422 - protein, 565 aa, synthetic construct
  REGION 1..565: note = hemagglutinin__InfluenzaA__ADW10776
MKVKLLVLLCTFTATYADTICIGYHANNSTDTVDTVLEKNVTVTHSVNLLENSHNGKLCLLKGIAPLQLGNCSVAGWILGNPECELLISKESWSYIVEKPNPENGTCYPGHFADYEELREQLSSVSSFERFEIFPKESSWPNHTVTGVSASCSHNGESSFYRNLLWLTGKNGLYPNLSKSYANDKEKEVLVLWGVHHPPNIVDQKTLYRTENAYVSVVSSHYSRKFTPEIAKRPKVRDQEGRINYYWTLLEPGDTIIFEANGNLIAPRYAFALSRGFGSGIINSNAPMDKCDAKCQTPQGAINSSLPFQNVHPVTIGECPKYVRSAKLRMVTGLRNIPSIQSRGLFGAIAGFIEGGWTGMVDGWYGYHHQNEQGSGYAADQKSTQNAINGITNKVNSVIEKMNTQFTAVGKEFNKLERRMENLNKKVDDGFIDIWTYNAELLVLLENERTLDFHDSNVKNLYEKVKSQLKNNAKEIGNGCFEFYHKCNDECMESVKNGTYDYPKYSEESKLNREKIDGVKLESMGVYQILAIYSTVASSLVLLVSLGAISFWMCSNGSLQCRICI

SEQ ID NO: 6423 - protein, 565 aa, synthetic construct
  REGION 1..565: note = hemagglutinin__InfluenzaA__ADW10787
MKVKILVLLCTFTATYADTICIGYHANNSTDTVDTVLEKNVTVTHSVNLLENSHNGKLCLLKGIAPLQLGNCSVAGWILGNPECELLISKESWSYIVEKPNPENGTCYPGHFADYEELREQLSSVSSFERFEIFPKESSWPNHTVTGVSASCSHNGESSFYRNLLWLTVKNGLYPNLSKSYANNKEKEVLVLWGVHHPPNIVDQKTLYRTENAYVSVVSSHYSRKFTPEIAKRPKVRDQEGRINYYWTLLEPGDTIIFEANGNLIAPRYAFALSRGFGSGIINSNAPMDKCDAKCQTPRGAINSSLPFQNVHPVTIGECPKYVRSAKLRMVTGLRNIPSIQSRGLFGAIAGFIEGGWTGMVDGWYGYHHQNEQGSGYAADQKSTQNAINGITNKVNSVIEKMNTQFTAVGKEFNKLERRMENLNKKVDDGFIDIWTYNAELLVLLENERTLDFHDSNVKNLYEKVKSQLKNNAKEIGNGCFEFYHKCNDECMESVKNGTYDYPKYSEESKLNREKIDGVKLESMGVYQILAIYSTVASSLVLLVSLGAISFWMCSNGSLQCRICI

SEQ ID NO: 6424 - protein, 565 aa, synthetic construct
  REGION 1..565: note = hemagglutinin__InfluenzaA__ADW10798
MKVKLLVLLCTFTATYADTICIGYHANNSTDTVDTVLEKNVTVTHSVNLLENSHNGKLCLLKGIAPLQLGNCSVAGWILGNPECELLISKESWSYIVEKPNPENGTCYPGHFADYEELREQLSSVSSFERFEIFPKESSWPNHTVTGVSASCSHNGESSFYRNLLWLTGKNGLYPNLSKSYANNKEKEVLVLWGVHHPPNIVDQKTLYRTENAYVSVVSSHYSRKFTPEIAKRPKVRDQEGRINYYWTLLEPGDTIIFEANGNLIAPRYAFALSRGFGSGIINSNAPMGKCDAKCQTPQGAINSSLPFQNVHPVTIGECPKYVRSAKLRMVTGLRNIPSIQSRGLFGAIAGFIEGGWTGMVDGWYGYHHQNEQGSGYAADQKSTQNAINGITNKVNSVIEKMNTQFTAVGKEFNKLERRVENLNKKVDDGFIDIWTYNAELLVLLENERTLDFHDSNVKNLYEKVKSQLKNNAKEIGNGCFEFYHKCNDECMESVKNGTYDYPKYSEESKLNREKIDGVKLESMGVYQILAIYSTVASSLVLLVSLGAISFWMCSNGSLQCRICI

SEQ ID NO: 6425 - protein, 565 aa, synthetic construct; identical to SEQ ID NO: 6421
  REGION 1..565: note = hemagglutinin__InfluenzaA__ADW10809

SEQ ID NO: 6426 - protein, 565 aa, synthetic construct; identical to SEQ ID NO: 3616
  REGION 1..565: note = hemagglutinin__InfluenzaA__ADW10820

SEQ ID NO: 6427 - protein, 565 aa, synthetic construct; identical to SEQ ID NO: 3131
  REGION 1..565: note = hemagglutinin__InfluenzaA__ADW10831

SEQ ID NO: 6428 - protein, 565 aa, synthetic construct
  REGION 1..565: note = hemagglutinin__InfluenzaA__ADW10842
MKVKLLVLLCTFTATYADTICIGYHANNSTDTVDTVLEKNVTVTHSVNLLENSHNGKLCLLKGIAPLQLGNCSVAGWILGNPECELLISKESWSYIVEKPNPENGTCYPGHFADYEELREQLSSVSSFERFEIFPKESSWPNHTVTGVSASCSHNGESSFYRNLLWLTVKNGLYPNLSKSYANNKEKEVLVLWGVHHPPNIVDQKTLYRTENAYVSVVSSHYSRKFAPEIAKRPKVRDQEGRINYYWTLLEPGDTIIFEANGNLIAPRYAFALSRGFGSGIINSNAPMDKCDAKCQTPRGAINSSLPFQNVHPVTIGECPKYVRSAKLRMVTGLRNIPSIQSRGLFGAIAGFIEGGWTGMVDGWYGYHHQNEQGSGYAADQKSTQNAINGITNKVNSVIEKMNTQFTAVGKEFNKLERRMENLNKKVDDGFIDIWTYNAELLVLLENERTLDFHDSNVKNLYEKVKSQLKNNAKEIGNGCFEFYHKCNDECMESVKNGTYDYPKYSEESKLNREKIDGVKLESMGVYQILAIYSTVASSLVLLVSLGAISFWMCSNGSLQCRICI

SEQ ID NO: 6429 - protein, 565 aa, synthetic construct; identical to SEQ ID NO: 5972
  REGION 1..565: note = hemagglutinin__InfluenzaA__ADW10853

SEQ ID NO: 6430 - protein, 565 aa, synthetic construct; identical to SEQ ID NO: 6421
  REGION 1..565: note = hemagglutinin__InfluenzaA__ADW10864

SEQ ID NO: 6431 - protein, 565 aa, synthetic construct; identical to SEQ ID NO: 6421
  REGION 1..565: note = hemagglutinin__InfluenzaA__ADW10875

SEQ ID NO: 6432 - protein, 565 aa, synthetic construct; identical to SEQ ID NO: 3616
  REGION 1..565: note = hemagglutinin__InfluenzaA__ADW10886

SEQ ID NO: 6433 - protein, 565 aa, synthetic construct
  REGION 1..565: note = hemagglutinin__InfluenzaA__ADW10897
MKVKLLVLLCTFTATYADTICIGYHANNSTDTVDTVLEKNVTVTHSVNLLENSHNGKLCLLKGIAPLQLGNCSVAGWILGNPECELLISKESWSYIVEKPNPENGTCYPGHFADYEELREQLSSVSSFERFEIFPKESSWPNHTVTGVSASCSHNGESSFYRNLLWLTGKNGLYPNLSKSYANNKEKEVLVLWGVHHPPSISDQKTLYHTENAYVSVVSSHYSRKFTPEIAKRPKVRDQEGRINYYWTLLEPGDTIIFEANGNLIAPRYAFALSRGFGSGIINSNAPMDKCDTKCQTPQGAINSSLPFQNVHPVTIGECPKYVRSAKLRMVTGLRNIPSIQSRGLFGAIAGFIEGGWTGMVDGWYGYHHQNEQGSGYAADQKSTQNAINGITNKVNSVIEKMNTQFTAVGKEFNKLERRMENLNKKVDDGFIDIWTYNAELLVLLENERTLDFHDSNVKNLYEKVKSQLKNNAKEVGNGCFEFYHKCNDECMESVKNGTYDYPKYSEESKLNREKIDGVKLESMGVYQILAIYSTVASSLVLLVSLGAISFWMCSNGSLQCRICI

SEQ ID NO: 6434 - protein, 566 aa, synthetic construct
  REGION 1..566: note = hemagglutinin__InfluenzaA__ADW23115
MKTIIALSYILCLVFAQKLPGNGNSTATLCLGHHAVPNGTIVKTITNDQIEVTNATELVQSSSTGEICDSPHQILDGENCTLIDALLGDPQCDGFQNKKWDLFVERSKAYSNCYPYDVPDYASLRSLVASSGTLEFNNESFNWTGVTQNGTSSACIRRSNNSFFSRLNWLTHSKFKYPALNVTMPNNEQFDKLYIWGVHHPGTDNDQIFLYAQASGRITVSTKRSQQTVIPNIGSRPRVRNIPSRISIYWTIVKPGDILLINSTGNLIAPRGYFKIRSGKSSIMRSDAPIGKCNSECITPNGSIPNDKPFQNVNRITYGACPRYVKQNTLKLATGMRNVPEKQTRGIFGAIAGFIENGWEGMVDGWYGFRHQNSEGRGQAADLKSTQAAIDQINGKLNRLIGKTNEKFHQIEKEFSEVEGRIQDLEKYVEDTKIDLWSYNAELLVALENQHTIDLTDSEMNKLFEKTKKQLRENAEDMGNGCFKIYHKCDNACIGSIRNGTYDHDVYRDEALNNRFQIKGVELKSGYKDWILWISFAISCFLLCVALLGFIMWACQKGNIRCNICI

SEQ ID NO: 6435 - protein, 566 aa, synthetic construct
  REGION 1..566: note = hemagglutinin__InfluenzaA__ADW54481
MKAILVVLLYTFATANADTLCIGYHANNSTDTVDTVLEKNVTVTHSVNLLEDKHNGKLCKLRGVAPLHLGKCNIAGWILGNPECESLSTASSWSYIVETSSSDNGTCYPGDFIDYEELREQLSSVSSFERFEIFPKTSSWPNHDSNKGVTAACPHAGAKSFYKNLIWLVKKGNSYPKLSKSYINDKGKEVLVLWGIHHPSTTADQQSLYQNADTYVFVGTSRYSKKFKPEIAIRPKVRDQEGRMNYYWTLVEPGDKITFEATGNLVVPRYAFAMERNAGSGIIISDTPVHDCNTTCQTPKGAINTSLPFQNIHPITIGKCPKYVKSTKLRLATGLRNVPSIQSRGLFGAIAGFIEGGWTGMVDGWYGYHHQNEQGSGYAADLKSTQNAIDKITNKVNSVIEKMNTQFTAVGKEFNHLEKRIENLNKKVDDGFLDIWTYNAELLVLLENERTLDYHDSNVKNLYEKVRNQLKNNAKEIGNGCFEFYHKCDNTCMESVKNGTYDYPKYSEEAKLNREEIDGVKLESTRIYQILAIYSTVASSLVLVVSLGAISFWMCSNGSLQCRICI

SEQ ID NO: 6436 - protein, 566 aa, synthetic construct
  REGION 1..566: note = hemagglutinin__InfluenzaA__ADW54512
MKAILVVLLYTFATANADTLCIGYHANNSTDTVDTVLEKNVTVTHSVNLLEDKHNGKLCKLRGVAPLHLGKCNIAGWILGNPECESLSTASSWSYIVETSSSDNGTCYPGDFIDYEELREQLSSVSSFKRFEIFPKTSSWPNHDSNKGVTTACPHAGAKSFYKNLIWLVKKGNSYPKLSKSYINDKGKEVLVLWGIHHPPTSADQQSLYQNADAYVFVGTSRYSKKFKPEIAIRPKVRDQEGRMNYYWTLVEPGDKITFEATGNLVVPRYAFAMERNAGSGIIISDTPVHDCNTTCQTPKGAINTSLPFQNIHPITIGKCPKYVKSTKLRLATGLRNVPSIQSRGLFGAIAGFIEGGWTGMVDGWYGYHHQNEQGSGYAADLKSTQNAIDEITNKVNSVIEKMNTQFTAVGKEFNHLEKRIENLNKKVDDGFLDIWTYNAELLVLLENERTLDYHDSNVKNLYEKVRSQLKNNAKEIGNGCFEFYHKCDNTCMESVKNGTYDYPKYSEEAKLNREEIDGVKLESTRIYQILAIYSTVASSLVLVVSLGAISFWMCSNGSLQCRICI

SEQ ID NO: 6437 - protein, 566 aa, synthetic construct
  REGION 1..566: note = hemagglutinin__InfluenzaA__ADW54527
MKAILVVLLYTFATASADTLCIGYHANNSTDTVDTVLEKNVTVTHSVNLLEDKHNGKLCKLRGVAPLHLGKCNIAGWILGNPECESLSTASSWSYIVETSSSDNGTCYPGDFIDYEELREQLSSVSSFERFEIFPKTSSWPNHDSNKGVTTACPHAGAKSFYKNLIWLVKKGNSYPKLSKSYINDKGKEVLVLWGIHHPPTSADQQSLYQNADAYVFVGTSRYSKKFKPEIAIRPKVRDQEGRMNYYWTLVEPGDKITFEATGNLVVPRYAFAMERNAGSGIIISDTPVHDCNTTCQTPNGAINTSLPFQNIHPITIGKCPKYVKSTKLRLATGLRNVPSIQSRGLFGAIAGFIEGGWTGMVDGWYGYHHQNEQGSGYAADLKSTQNAIDEITNKVNSVIEKMNTQFTAVGKEFNHLEKRIENLNKKVDDGFLDIWTYNAELLVLLENERTLDYHDSNVKNLYEKVRSQLKNNAKEIGNGCFEFYHKCDNTCMESVKNGTYDYPKYSEEAKLNREEIDGVKLESTRIYQILAIYSTVASSLVLVVSLGAISFWMCSNGSLQCRICI

SEQ ID NO: 6438 - protein, 566 aa, synthetic construct; identical to SEQ ID NO: 6435
  REGION 1..566: note = hemagglutinin__InfluenzaA__ADW65825

SEQ ID NO: 6439 - protein, 566 aa, synthetic construct
  REGION 1..566: note = hemagglutinin__InfluenzaA__ADW82135
MKTIIALSYILCLVFAQKLPGNDNSTATLCLGHHAVPNGTVVKTITNDQIEVTNATELVQSSSTGEICDSPHQILDGKNCTLIDALLGDPQCDGFQNKKWDLFVERSKAYSNCYPYDVPDYASLRSLVASSGTLEFNNESFNWTGVTQNGTSSACIRRSKNSFFSRLNWLTHLNFKYTALNVTMPNNEQFDKLYIWGVHHPGTDKDQIFLYAQASGRITVSTKRSQQTVIPNIGSRPRVRNIPSRISIYWTIVKPGDILLINSTGNLIAPRGYFKIRSGKSSIMRSDAPIGKCNSECITPNGSIPNDKPFQNVNRITYGACPRYVKQNTLKLATGMRNVPEKQTRGIFGAIAGFIENGWEGMVDGWYGFRHQNSEGRGQAADLKSTQAAIDQINGKLNRLIGKTNEKFHQIEKEFSEVEGRIQDLEKYVEDTKIDLWSYNAELLVALENQHTIDLTDSEMNKLFEKTKKQLRENAEDMGNGCFKIYHKCDNACIGSIRNGTYDHDVYRDEALNNRFQIKGVELKSGYKDWILWISFAISCFLLCVALLGFIMWACQKGNIRCNICI

SEQ ID NO: 6440 - protein, 566 aa, synthetic construct; identical to SEQ ID NO: 6439
  REGION 1..566: note = hemagglutinin__InfluenzaA__ADW82155

SEQ ID NO: 6441 - protein, 566 aa, synthetic construct; identical to SEQ ID NO: 6439
  REGION 1..566: note = hemagglutinin__InfluenzaA__ADW82166

SEQ ID NO: 6442 - protein, 566 aa, synthetic construct; identical to SEQ ID NO: 6439
  REGION 1..566: note = hemagglutinin__InfluenzaA__ADW82177

SEQ ID NO: 6443 - protein, 566 aa, synthetic construct; identical to SEQ ID NO: 2669
  REGION 1..566: note = hemagglutinin__InfluenzaA__ADW82188

SEQ ID NO: 6444 - protein, 566 aa, synthetic construct; identical to SEQ ID NO: 2669
  REGION 1..566: note = hemagglutinin__InfluenzaA__ADW82198

SEQ ID NO: 6445 - protein, 566 aa, synthetic construct; identical to SEQ ID NO: 2669
  REGION 1..566: note = hemagglutinin__InfluenzaA__ADW82208

SEQ ID NO: 6446 - protein, 566 aa, synthetic construct; identical to SEQ ID NO: 2669
  REGION 1..566: note = hemagglutinin__InfluenzaA__ADW82218

SEQ ID NO: 6447 - protein, 566 aa, synthetic construct; identical to SEQ ID NO: 2669
  REGION 1..566: note = hemagglutinin__InfluenzaA__ADW82228

SEQ ID NO: 6448 - protein, 566 aa, synthetic construct; identical to SEQ ID NO: 2669
  REGION 1..566: note = hemagglutinin__InfluenzaA__ADW82238

SEQ ID NO: 6449 - protein, 566 aa, synthetic construct; identical to SEQ ID NO: 2669
  REGION 1..566: note = hemagglutinin__InfluenzaA__ADW82248

SEQ ID NO: 6450 - protein, 566 aa, synthetic construct; identical to SEQ ID NO: 2669
  REGION 1..566: note = hemagglutinin__InfluenzaA__ADW82258

SEQ ID NO: 6451 - protein, 566 aa, synthetic construct
  REGION 1..566: note = hemagglutinin__InfluenzaA__ADW82268
MKAILVVLLYTFATANADTLCIGYHANNSTDTVDTVLEKNVTVTHSVNLLEDKHNGKLCKLRGVAPLHLGKCNIAGWILGNPECESLSTASSWSYIVETSSSDNGTCYPGDFIDYEELREQLSSVSSFERFEIFPKTSSWPNHDSNKGVTAACPHAGAKSFYKNLIWLVKKGNSYPKLSKSYINDKGKEVLVLWGIHHPSTSADQQSLYQNADAYVFVGTSRYSKKFKPEIAIRPKVRDQEGRMNYYWTLVEPGDKITFEATGNLVVPRYAFAMERNAGSGIIISDTPVHDCNTTCQTPKGAINTSLPFQNIHPITIGKCPKYVKSTKLRLATGLRNVPSIQSRGLFGAIAGFIEGGWTGMVDGWYGYHHQNEQGSGYAADLKSTQNAIDEITNKVNSVIEKMNTQFTAVGKEFNHLEKRIENLNKKVDDGFLDIWTYNAELLVLLENERTLDYHDSNVKNLYEKVRSQLKNNAKEIGNGCFEFYHKCDNTCMESVKNGTYDYPKYSEEAKLNREEIDGVKLESTRIHQILAIYSTVASSLVLVVSLGAISFWMCSNGSLQCRICI

SEQ ID NO: 6452 - protein, 566 aa, synthetic construct; identical to SEQ ID NO: 6439
  REGION 1..566: note = hemagglutinin__InfluenzaA__ADW93760

SEQ ID NO: 6453 - protein, 566 aa, synthetic construct
  REGION 1..566: note = hemagglutinin__InfluenzaA__ADW95319
MKAILVVLLYTFATANADTLCIGYHANNSTDTVDTVLEKNVTVTHSVNLLEDKHNGKLCKLRGVAPLHLGKCNIAGWILGNPECESLSTASSWSYIVETSSSDNGTCYPGDFIDYEELREQLSSVSSFERFEIFPKTSSWPNHDSNKGVTAACPHAGAKGFYKNLIWLVKKGNSYPKLSKSYINDKGKEVLVLWGIHHPSTTADQQSLYQNADTYVFVGTSRYSKKFKPEIAIRPKVRDQEGRMNYYWTLVEPGDKITFEATGNLVVPRYAFAMERNAGSGIIISDTPVHDCNTTCQTPKGAINTSLPFQNIHPITIGKCPKYVKSTKLRLATGLRNVPSIQSRGLFGAIAGFIEGGWTGMVDGWYGYHHQNEQGSGYAADLKSTQNAIDEITNKVNSVIEKMNTQFTAVGKEFNHLEKRIENLNKKVDDGFLDIWTYNAELLVLLENERTLDYHDSNVKNLYEKVRNQLKNNAKEIGNGCFEFYHKCDNTCMESVKNGTYDYPKYSEEAKLNREEIDGVKLESTRIYQILAIYSTVASSLVLVVSLGAISFWMCSNGSLQCRICI

SEQ ID NO: 6454 - protein, 566 aa, synthetic construct
  REGION 1..566: note = hemagglutinin__InfluenzaA__ADW95332
MKAILVVLLYTFATANADTLCIGYHANNSTDTVDTVLEKNVTVTHSVNLLEDKHNGKLCKLRGVAPLHLGKCNIAGWILGNPECESLSTASSWSYIVETSSSDNGTCYPGDFIDYEELREQLSSVSSFERFEIFPKTSSWPNHDSNKGVTAACPHAGAKGFYKNLIWLVKKGNSYPKLSKSYINDKGKEVLVLWGIHHPSTTADQQSLYQNADTYVFVGTSRYSKKFKPEIAIRPKVRDQEGRMNYYWTLVEPGDKITFEATGNLVVPRYAFAMERNAGSGIIISDTPVHDCNTTCQTPKGAINTSLPFQNIHPITIGKCPKYVKSTKLRLATGLRNVPSIQSRGLFGAIAGFIEGGWTGMVDGWYGYHHQNEQGSGYAADLKSTQNAIDKITNKVNSVIEKMNTQFTAVGKEFNHLEKRIENLNKKVDDGFLDIWTYNAELLVLLENERTLDYHDSNVKNLYEKVRNQLKNNAKEIGNGCFEFYHKCDNTCMESVKNGTYDYPKYSEEAKLNREEIDGVKLESTRIYQILAIYSTVASSLVLVVSLGAISFWMCSNGSLQCRICI

SEQ ID NO: 6455 - protein, 566 aa, synthetic construct
  REGION 1..566: note = hemagglutinin__InfluenzaA__ADX21078
MKTIIALSYILCLVFAQKLPGNDNSTATLCLGHHAVPNGTVVKTITNDQIEVTNATELVQSSSTGEICDSPHQILDGKNCTLIDALLGDPQCDGFQNKKWDLFVERSKAYSNCYPYDVPDYASLRSLVASSGTLEFNNESFNWTGVTQNGTSSACIRRSKNSFFSRLNWLTHLNFKYTALNVTMPNNEQFDKLYIWGVHHPGTDKDQIFLYAQASGRITVSTKRSQQTVIPNIGSRPRVRNIPSRISIYWTIVKPGDILLINSTGNLIAPRGYFKIRSGKSSIMRSDAPIGKCNSECITPNGSIPNDKPFQNVNRITYGACPRYVKQNTLKLATGMRNVPEKQTRGIFGAIAGFIENGWEGMVDGWYGFRHQNSEGRGQAADLKSTQAAIDQINGKLNRLIRKTNEKFHQIEKEFSEVEGRIQDLEKYVEDTKIDLWSYNAELLVALENQHTIDLTDSEMNKLFEKTKKQLRENAEDMGNGCFKIYHKCDNACIGSIRNGTYDHDVYRDEALNNRFQIKGVELKSGYKDWILWISFAISCFLLCVALLGFIMWACQKGNIRCNICI

SEQ ID NO: 6456 - protein, 566 aa, synthetic construct; identical to SEQ ID NO: 6455
  REGION 1..566: note = hemagglutinin__InfluenzaA__ADX21088

SEQ ID NO: 6457 - protein, 566 aa, synthetic construct
  REGION 1..566: note = hemagglutinin__InfluenzaA__ADX21098
MKAILVVLLYTFATANADTLCIGYHANNSTDTVDTVLEKNVTVTHSVNLLEDKHNGKLCKLRGVAPLHLGKCNIAGWILGNPECESLSTASSWSYIVETSSSDNGTCYPGDFIDYEELREQLSSVSSFERFEIFPKTSSWPNHDSNKGVTAACPHAGAKSFYKNLIWLVKKGNSYPKLSKSYINDKGKEVLVLWGIHHPSTSADQQSLYQNADAYVFVGTSRYSKKFKPEIAIRPKVRDQEGRMNYYWTLVEPGDKITFEATGNLVVPRYAFAMERNAGSGIIISDTPVHDCSTTCQTPKGAINTSLPFQNIHPITIGKCPKYVKSTKLRLATGLRNVPSIQSRGLFGAIAGFIEGGWTGMVDGWYGYHHQNEQGSGYAADLKSTQNAIDEITNKVNSVIEKMNTQFTAVGKEFNHLEKRIENLNKKVDDGFLDIWTYNAELLVLLENERTLDYHDSNVKNLYEKVRSQLKNNAKEIGNGCFEFYHKCDNTCMESVKNGTYDYPKYSEEAKLNREEIDGVKLESTRIHQILAIYSTVASSLVLVVSLGAISFWMCSNGSLQCRICI

SEQ ID NO: 6458 - protein, 566 aa, synthetic construct; identical to SEQ ID NO: 3588
  REGION 1..566: note = hemagglutinin__InfluenzaA__ADX36109

SEQ ID NO: 6459 - protein, 566 aa, synthetic construct
  REGION 1..566: note = hemagglutinin__InfluenzaA__ADX96278
MKAILVVLLYTFATANADTLCIGYHANNSTDTVDTVLEKNVTVTHSVNILEDKHNGKLCKLRGVAPLHLGKCNIAGWILGNPECESLSTASSWSYIVETSSSDNGTCYPGDFIDYEELREQLSSVSSFERFEIFPKTSSWPNHDSNKGVTAACPHAGAKGFYKNLIWLVKKGNSYPKLSKSYINDKGKEVLVLWGIHHPSTSADQQSLYQNADAYVFVGSSRYSKKFKPEIAIRPKVRDQEGRMNYYWTLVEPGDKITFEATGNLVVPRYAFAMERNAGSGIIISDTPVHDCNTTCQTPKGAVNTSLPFQNIHPITIGKCPKYVKSTKLRLATGLRNVPSIQSRGLFGAIAGFIEGGWTGMVDGWYGYHHQNEQGSGYAADLKSTQNAIDEITNKVNSVIEKMNTQFTAVGKEFNHLEKRIENLNKKVDDGFLDIWTYNAELLVLLENERTLDYHDSNVKNLYEKVRSQLKNNAKEVGNGCFEFYHKCDNTCMESVKNGTYDYPKYSEEAKLNREEIDGVKLESTRIYQILAIYSTAASSLVLVVSLGAISFWMCSNGSLQCRICI

SEQ ID NO: 6460 - protein, 566 aa, synthetic construct
  REGION 1..566: note = hemagglutinin__InfluenzaA__ADX96288
MKAILVVLLYTFATANADTLCIGYHANNSTDTVDTVLEKNVTVTHSVNILEDKHNGKLCKLRGVAPLHLGKCNIAGWILGNPECESLSTASSWSYIVETSSSDNGTCYPGDFIDYEELREQLSSVSSFERFEIFPKTSSWPNHDSNKGVTAACPHAGAKSFYKNLIWLVKQGNSYPKLSKSYINDKGKEVLVLWGIHHPSTSADQQSLYQNADAYVFVGSSRYSKKFKPEIAIRPKVRDQEGRMNYYWTLVEPGDKITFEATGNLVVPRYAFAMERNAGSGIIISDTPVHDCNTTCQTPKGAINTSLPFQNIHPITIGKCPKYVKSTKLRLATGLRNVPSIQSRGLFGAIAGFIEGGWTGMVDGWYGYHHQNEQGSGYAADLKSTQNAIDEITNKVNSVIEKMNTQFTAVGKEFNHLEKRIENLNKKVDDGFLDIWTYNAELLVLLENERTLDYHDSNVKNLYEKVRSQLKNNAKEVGNGCFEFYHKCDNTCMESVKNGTYDYPKYSEEAKLNREEIDGVKLESTRIYQILAIYSTAASSLVLVVSLGAISFWMCSNGSLQCRICI

SEQ ID NO: 6461 - protein, 566 aa, synthetic construct
  REGION 1..566: note = hemagglutinin__InfluenzaA__ADX96298
MKAILVVLLYTFATANADTLCIGYHANNSTDTVDTVLEKNVTVTHSVNILEDKHNGKLCKLRGVAPLHLGKCNIAGWILGNPECESLSTASSWSYIVETSSSDNGTCYPGDFIDYEELREQLSSVSSFERFEIFPKTSSWPNHDSNKGVTAACPHAGAKSFYKNLIWLVKKGNSYPKLSKSYINDKGKEVLVLWGIHHPSTSADQQSLYQNADAYVFVGTSRYSKKFKPEIVIRPKVRDQEGRMNYYWTLVEPGDKITFEATGNLVVPRYAFAMERNAGSGIIISDTPVHDCNTTCQTPKGAINTSLPFQNIHPITIGKCPKYVKSTKLRLATGLRNVPSIQSRGLFGAIAGFIEGGWTGMVDGWYGYHHQNEQGSGYAADLKSTQNAIDEITNKVNSVIEKMNTQFTAVGKEFNHLEKRIENLNKKVDDGFLDIWTYNAELLVLLENERTLDYHDSNVKNLYEKVRSQLKNNAKEIGNGCFEFYHKCDNTCMESVKNGTYDYPKYSEEAKLNREEIDGVKLESTRIYQILAIYSTVASSLVLVVSLGAISFWMCSTGSLQCRICI

SEQ ID NO: 6462 - protein, 566 aa, synthetic construct; identical to SEQ ID NO: 4266
  REGION 1..566: note = hemagglutinin__InfluenzaA__ADX96308

SEQ ID NO: 6463 - protein, 566 aa, synthetic construct
  REGION 1..566: note = hemagglutinin__InfluenzaA__ADX96318
MKAILVVLLYTFATANADTLCIGYHANNSTDTVDTVLEKNVTVTHSVNLLEDKHNGKLCKLRGVAPLHLGKCNIAGWILGNPECESLSTASSWSYIVETSSSDNGTCYPGDFIDYEELREQLSSVSSFERFEIFPKTSSWPNHDSNKGVTAACPHAGAKSFYKNLIWLVKKGNSYPKLSKSYINDKGKEVLVLWGIHHPSTSADQQSLYQNADSYVFVGTSRYSKKFKPEIAIRPKVRDQEGRMNYYWTLVEPGDKITFEATGNLVVPRYAFAMERNAGSGIIISDTPVHDCNTTCQTPKGAINTSLPFQNIHPITIGKCPKYVKSTKLRLATGLRNVPSIQSRGLFGAIAGFIEGGWTGMVDGWYGYHHQNEQGSGYAADLKSTQNAIDKITNKVNSVIEKMNTQFTAVGKEFNHLEKRIENLNKKVDDGFLDIWTYNAELLVLLENERTLDYHDSNVKNLYEKVRSQLKNNAKEIGNGCFEFYHKCDNTCMESVKNGTYDYPKYSEEAKLNREEIDGVKLESTRIYQILAIYSTVASSLVLVVSLGAISFWMCSNGSLQCRICI

SEQ ID NO: 6464 - protein, 566 aa, synthetic construct
  REGION 1..566: note = hemagglutinin__InfluenzaA__ADX96328
MKAILVVLLYTFATANADTLCIGYHANNSTDTVDTVLEKNVTVTHSVNLLEDKHNGKLCKLRGVAPLHLGKCNIAGWILGNPECESLSTASSWSYIVETSSSDNGTCYPGDFIDYEELREQLSSVSSFERFEIFPKTSSWPNHDSNKGVTAACPHAGAKSFYKNLIWLVKKGNSYPKLSKSYINDKGKEVLVLWGIHHPSTSADQQSLYQNADAYVFVGTSRYSKKFKPEIAIRPKVRDQEGRMNYYWTLVEPGDKITFEATGNLVAPRYAFAMERNAGSGIIISDTPVHDCNTTCQTPKGAINTSLPFQNIHPITIGKCPKYVKSTKLRLATGLRNVPSIQSRGLFGAIAGFIEGGWTGMVDGWYGYHHQNEQGSGYAADLKSTQNAIDKITNKVNSVIEKMNTQFTAVGKEFNHLEKRIENLNKKVDDGFLDIWTYNAELLVLLENERTLDYHDSNVKNLYEKVRSQLKNNAKEIGNGCFEFYHKCDNTCMESVKNGTYDYPKYSEEAKLNREEIDGVKLESTRIYQILAIYSTVASSLVLVVSLGAISFWMCSNGSLQCRICI

SEQ ID NO: 6465 - protein, 566 aa, synthetic construct
  REGION 1..566: note = hemagglutinin__InfluenzaA__ADX96347
MKAILVVLLYTFATANADTLCIGYHANNSTDTVDTVLEKNVTVTHSVNLLEDKHNGKLCKLRGVAPLHLGKCNIAGWILGNPECESLSTASSWSYIVETSSSDNGTCYPGDFIDYEELREQLSSVSSFERFEIFPKTSSWPNHDSNKGVTAACPHAGAKSFYKNLIWLVKKGNSYPKLSKSYINDKGKEVLVLWGIHHPSTSADQQSLYQNADAYVFVGTSRYSKKFKPEIAIRPKVRDQEGRMNYYWTLVEPGDKITFEATGNLVVPRYAFAMERNAGSGIIISDTPVHNCNTTCQTPKGAINTSLPFQNIHPITIGKCPKYVKSTKLRLATGLRNVPSIQSRGLFGAIAGFIEGGWTGMVDGWYGYHHQNEQGSGYAADLKSTQNAIDKITNKVNSVIEKMNTQFTAVGKEFNHLEKRIENLNKKVDDGFLDIWTYNAELLVLLENERTLDYHDSNVKNLYEKVRSQLKNNAKEIGNGCFEFYHKCDNTCMESVKNGTYDYPKYSEEAKLNREEIDGVKLESTRIYQILAIYSTVASSLVLVVSLGAISFWMCSNGSLQCRICI

SEQ ID NO: 6466 - protein, 566 aa, synthetic construct
  REGION 1..566: note = hemagglutinin__InfluenzaA__ADX96357
MKAILVVLLYTFATANADTLCIGYHANNSTDTVDTVLEKNVTVTHSVNILEDKHNGKLCKLRGVAPLHLGKCNIAGWILGNPECESLSTASSWSYIVETSSSDNGTCYPGDFIDYEELREQLSSVSSFERFEIFPKTSSWPNHDSNKGVTAACPHAGAKSFYKNLIWLVKKGNSYPKLSKSYINDKGKEVLVLWGIHHPSTSADQQSLYQNADAYVFVGTSRYSKKFKPEIVIRPKVRDQEGRMNYYWTLVEPGDKITFEATGNLVVPRYAFAMERNAGSGIIISDTPVHDCNTTCQTPKGAINTSLPFQNIHPITIGKCPKYVKSTKLRLATGLRNVPSIQSRGLFGAIAGFIEGGWTGMVDGWYGYHHQNEQGSGYAADLKSTQNAIDEITNKVNSVIEKMNTQFTAVGKEFNHLEKRIENLNKKVDDGFLDIWTYNAELLVLLENERTLDYHDSNVKNLYEKVRSQLKNNAKEIGNGCFEFYHKCDNTCMESVKNGTYDYPKYSEEAKLNREEIDGVKLESTRIYQILAIYSTVASSLVLVVSLGAISFWMCSNGSLQCRICI

SEQ ID NO: 6467 - protein, 566 aa, synthetic construct; identical to SEQ ID NO: 5606
  REGION 1..566: note = hemagglutinin__InfluenzaA__ADX96367

SEQ ID NO: 6468 - protein, 566 aa, synthetic construct
  REGION 1..566: note = hemagglutinin__InfluenzaA__ADX96378
MKAILVVLLYTFATANADTLCIGYHANNSTDTVDTVLEKNVTVTHSVNLLEDKHNGKLCKLRGVAPLHLGKCNIAGWILGNPECESLSTASSWSYIVETSSSDNGTCYPGDFIDYEELREQLSSVSSFERFEIFPKTSSWPNHDSNKGVTAACPHAGAKSFYKNLIWLVKKGNSYPKLSKSYINDKGKEVLVLWGIHHPSTSADQQSLYQNADAYVFVGTSRYSKKFKPEIAIRPKVRDQEGRMNYYWTLVEPGDKITFEATGNLVVPRYAFAMERNAGSGIIISDTPIHDCNTTCQTPKGAINTSLPFQNIHPITIGKCPKYVKSTKLRLATGLRNVPSIQSRGLFGAIAGFIEGGWTGMVDGWYGYHHQNEQGSGYAADLKSTQNAIDEITNKVNSVIEKMNTQFTAVGKEFNHLEKRIENLNKKVDDGFLDIWTYNAELLVLLENERTLDYHDSNVKNLYEKVRSQLKNNAKEIGNGCFEFYHKCDNTCMESVKNGTYDYPKYSEEAKLNREEIDGVKLESTRIYQILAIYSTVASSLVLVVSLGAISFWMCSNGSLQCRICI

SEQ ID NO: 6469 - protein, 566 aa, synthetic construct; identical to SEQ ID NO: 6468
  REGION 1..566: note = hemagglutinin__InfluenzaA__ADX96398

SEQ ID NO: 6470 - protein, 566 aa, synthetic construct
  REGION 1..566: note = hemagglutinin__InfluenzaA__ADX96408
MKAILVVLLYTFATANADTLCIGYHANNSTDTVDTVLEKNVTVTHSVNILEDKHNGKLCKLRGVAPLHLGKCNIAGWILGNPECESLSTASSWSYIVETSSSDNGTCYPGDFIDYEELREQLSSVSSFERFEIFPKTSSWPNHDSNKGVTAACPHAGAKSFYKNLIWLVKKGNSYPKLSKSYINDKGKEVLVLWGIHHPSTSADQQSLYQNADAYVFVGTSRYSKKFKPEIAIRPKVRDQEGRMNYYWTLVEPGDKITFEATGNLVVPRYAFAMERNAGSGIIISDTPIHDCNTTCQTPKGAINTSLPFQNIHPITIGKCPKYVKSTKLRLATGLRNVPSIQSRGLFGAIAGFIEGGWTGMVDGWYGYHHQNEQGSGYAADLKSTQNAIDEITNKVNSVIEKMNTQFTAVGKEFNHLEKRIENLNKKVDDGFLDIWTYNAELLVLLENERTLDYHDSNVKNLYEKVRSQLKNNAKEIGNGCFEFYHKCDNTCMESVKNGTYDYPKYSEEAKLNREEIDGVKLESTRIYQILAIYSTVASSLVLVVSLGAISFWMCSNGSLQCRICI

SEQ ID NO: 6471 - protein, 566 aa, synthetic construct; identical to SEQ ID NO: 2982
  REGION 1..566: note = hemagglutinin__InfluenzaA__ADX96427

SEQ ID NO: 6472 - protein, 566 aa, synthetic construct
  REGION 1..566: note = hemagglutinin__InfluenzaA__ADX96437
MKAILVVLLYTFATANADTLCIGYHANNSTDTVDTVLEKNVTVTHSVNILEDKHNGKLCKLRGVAPLHLGKCNIAGWILGNPECESLSTASSWSYIVETSSSDNGTCYPGDFIDYEELREQLSSVSSFERFEIFPKTSSWPNHDSNKGVTAACPHAGAKSFYKNLIWLVKKGNSYPKLSKSYINDKGKEVLVLWGIHHPSTSADQQSLYQNADAYVFVGSSRYSKKFKPEIAIRPKVRDQEGRMNYYWTLVEPGDKITFEATGNLVVPRYAFAMERNAGSGIIISDTPVHDCNTTCQTPKGAINTSLPFQNIHPITIGKCPKYVKSTKLRLATGLRNVPSIQSRGLFGAIAGFIEGGWTGMVDGWYGYHHQNEQGSGYAADLKSTQNAIDEITNKVNSVIEKMNTQFTAVGKEFNHLEKRLENLNKKVDDGFLDIWTYNAELLVLLENERTLDYHDSNVKNLYEKVRSQLKNNAKEVGNGCFEFYHKCDNTCMESVKNGTYDYPKYSEEAKLNREEIDGVKLESTRIYQILAIYSTAASSLVLVVSLGAISFWMCSNGSLQCRICI

SEQ ID NO: 6473 - protein, 566 aa, synthetic construct; identical to SEQ ID NO: 2656
  REGION 1..566: note = hemagglutinin__InfluenzaA__ADX96447

SEQ ID NO: 6474 - protein, 566 aa, synthetic construct; identical to SEQ ID NO: 2669
  REGION 1..566: note = hemagglutinin__InfluenzaA__ADX96497

SEQ ID NO: 6475 - protein, 566 aa, synthetic construct
  REGION 1..566: note = hemagglutinin__InfluenzaA__ADX96507
MKAILVVLLYTFATANADTLCIGYHANNSTDTVDTVLEKNVTVTHSVNLLEDKHNGKLCKLRGVAPLHLGKCNIAGWILGNPECESLSTASSWSYIVETSSSDNGTCYPGDFIDYEELREQLSSVSSFERFEIFPKTSSWPNHDSNKGVTAACPHAGAKSFYKNLIWLVKKGNSYPKLSKSYINDKGKEVLVLWGIHHPSTSADQQSLYQNADAYVFVGTSRYSKKFKPEIAIRPKVRDQEGRMNYYWTLVEPGDKITFEATGNLVVPRYAFAMERNAGSGIIISDTPVHDCNTTCQTPKGAINTSLPFQNIHPITIGKCPKYVKSTKLRLATGLRNVPSIQSRGLFGAIAGFIEGGWTGMVDGWYGYHHQNEQGSGYAADLKSTQNAIDEITNKVNSVIEKMNTQFTAVGKEFNHLEKRIENLNKKVDDGFLDIWTYNAELLVLLENERTLDYHDSNVKNLYEKVRSQLKNNAKEIGNGCFEFYHKCDNTCMESVKNGTYDYPKYSEEAKLNREEIDGVKLESTRIYQILAIYSTVASSLVLVVSLGAISFWMCSTGSLQCRICI

SEQ ID NO: 6476 - protein, 566 aa, synthetic construct; identical to SEQ ID NO: 6475
  REGION 1..566: note = hemagglutinin__InfluenzaA__ADX96517

SEQ ID NO: 6477 - protein, 566 aa, synthetic construct
  REGION 1..566: note = hemagglutinin__InfluenzaA__ADX96527
MKAILVVLLYTFATANADTLCIGYHANNSTDTVDTVLEKNVTVTHSVNLLEDKHNGKLCKLRGVAPLHLGKCNIAGWILGNPECESLSTASSWSYIVETSSSDNGTCYPGDFIDYEELREQLSSVSSFERFEIFPKTSSWPNHDSNKGVTAACPHAGAKSFYKNLIWLVKKGNSYPKLSKSYINDKGKEVLVLWGIHHPSTSADQQSLYQNADAYVFVGTSRYSKKFKPEIAIRPKVRDQEGRMNYYWTLVEPGDKITFEATGNLVVPRYAFAMERNAGSGIIISDTPVHDCNTTCQTPKGAINTSLPFQNIHPITIGKCPKYVKSTKLRLATGLRNVPSIQSRGLFGAIAGFIEGGWTGMVDGWYGYHHQNEQGSGYAADLKSTQNAIDEITNKVNSVIEKMNTQFTAVGKEFNHLEKRIENLNKKVDDGFLDIWTYNAELLVLLENERTLDYHDSNVKNLYEKVRSQLKNNAKEIGNGCFEFFHKCDNTCMESVKNGTYDYPKYSEEAKLNREEIDGVKLESTRIYQILAIYSTVASSLVLVVSLGAISFWMCSNGSLQCRICI

SEQ ID NO: 6478 - protein, 566 aa, synthetic construct; identical to SEQ ID NO: 2669
  REGION 1..566: note = hemagglutinin__InfluenzaA__ADX96537

SEQ ID NO: 6479 - protein, 566 aa, synthetic construct; identical to SEQ ID NO: 2669
  REGION 1..566: note = hemagglutinin__InfluenzaA__ADX96547

SEQ ID NO: 6480 - protein, 566 aa, synthetic construct; identical to SEQ ID NO: 3770
  REGION 1..566: note = hemagglutinin__InfluenzaA__ADX96557

SEQ ID NO: 6481 - protein, 566 aa, synthetic construct; identical to SEQ ID NO: 2669
  REGION 1..566: note = hemagglutinin__InfluenzaA__ADX96587

SEQ ID NO: 6482 - protein, 566 aa, synthetic construct; identical to SEQ ID NO: 2656
  REGION 1..566: note = hemagglutinin__InfluenzaA__ADX96597

SEQ ID NO: 6483 - protein, 566 aa, synthetic construct; identical to SEQ ID NO: 2656
  REGION 1..566: note = hemagglutinin__InfluenzaA__ADX96607

SEQ ID NO: 6484 - protein, 566 aa, synthetic construct
  REGION 1..566: note = hemagglutinin__InfluenzaA__ADX96627
MKAILVVLLYTFATANADTLCIGYHANNSTDTVDTVLEKNVTVTHSVNLLEDKHNGKLCKLRGVAPLHLGKCNIAGWILGNPECESLSTASSWSYIVETSSSDNGTCYPGDFIDYEELREQLSSVSSFERFEIFPKTSSWPNHDSNKGVTAACPHAGAKSFYKNLIWLVKKGNSYPKLSKSYINDKGKEVLVLWGIHHPSTSADQQSLYQNADAYVFVGTSRYSKKFKPEIAIRPKVRDQEGRMNYYWTLVEPGDKITFEATGNLVVPRYAFAMEKNAGSGIIISDTPVHDCNTTCQTPKGAINTSLPFQNIHPITIGKCPKYVKSTKLRLATGLRNVPSIQSRGLFGAIAGFIEGGWTGMVDGWYGYHHQNEQGSGYAADLKSTQNAIDEITNKVNSVIEKMNTQFTAVGKEFNHLEKRIENLNKKVDDGFLDIWTYNAELLVLLENERTLDYHDSNVKNLYEKVRSQLKNNAKEIGNGCFEFYHKCDNTCMESVKNGTYDYPKYSEEAKLNREEIDGVKLESTRIYQILAIYSTVASSLVLVVSLGAISFWMCSTGSLQCRICI

SEQ ID NO: 6485 - protein, 566 aa, synthetic construct; identical to SEQ ID NO: 3116
  REGION 1..566: note = hemagglutinin__InfluenzaA__ADX96637

SEQ ID NO: 6486 - protein, 566 aa, synthetic construct; identical to SEQ ID NO: 2669
  REGION 1..566: note = hemagglutinin__InfluenzaA__ADX96647

SEQ ID NO: 6487 - protein, 566 aa, synthetic construct; identical to SEQ ID NO: 2656
  REGION 1..566: note = hemagglutinin__InfluenzaA__ADX96657

SEQ ID NO: 6488 - protein, 566 aa, synthetic construct; identical to SEQ ID NO: 2669
  REGION 1..566: note = hemagglutinin__InfluenzaA__ADX96667

SEQ ID NO: 6489 - protein, 566 aa, synthetic construct
  REGION 1..566: note = hemagglutinin__InfluenzaA__ADX96677
MKAILVVLLYTFATANADTLCIGYHANNSTDTVDTVLEKNVTVTHSVNLLEDKHNGKLCKLRGVAPLHLGKCNIAGWILGNPECESLSTASSWSYIVETSSSDNGTCYPGDFIDYEELREQLSSVSSFERFEIFPKTSSWPNHDSNKGVTAACPHAGAKSFYKNLIWLVKKGNSYPKLSKSYINDKGKEVLVLWGIHHPSTSADQQSLYQNADAYVFVGSSRYSKKFKPEIAIRPKVRDQEGRMNYYWTVVEPGDKITFEATGNLVVPRYAFAMERNAGSGIIISDTPVHDCNTTCQTPKGAINTSLPFHNIHPITIGKCPKYVKSTKLRLATGLRNVPSIQSRGLFGAIAGFIEGGWTGMVDGWYGYHHQNEQGSGYAADLKSTQNAIDEITNKVNSVIEKMNTQFTAVGKEFNHLEKRIENLNKKVDDGFLDIWTYNAELLVLLENERTLDYHDSNVKNLYEKVRSQLKNNAKEIGNGCFEFYHKCDNTCMESVKNGTYDYPKYSEEAKLNREEIDGVKLESTRIYQILAIYSTVASSLVLVVSLGAISFWMCSNGSLQCRICI

SEQ ID NO: 6490 - protein, 566 aa, synthetic construct
  REGION 1..566: note = hemagglutinin__InfluenzaA__ADX96687
MKAILVVLLYTFATANADTLCIGYHANNSTDTVDTVLEKNVTVTHSVNLLEDKHNGKLCKLRGVAPLHLGKCNIAGWILGNPECESLSTASSWSYIVETSSSDNGTCYPGDFIDYEELREQLSSVSSFKRFEIFPKTSSWPNHDSNKGVTAACPHAGAKSFYKNLIWLVKKGNSYPKLSKSYINDKGKEVLVLWGIHHPSTSADQQSLYQNADAYVFVGTSRYSKKFKPEIAIRPKVRDQEGRMNYYWTLVEPGDKITFEATGNLVVPRYAFAMERNAGSGIIISDTPVYDCNTTCQTPKGAINTSLPFQNIHPITIGKCPKYVKSTKLRLATGLRNVPSIQSRGLFGAIAGFIEGGWTGMVDGWYGYHHQNEQGSGYAADLKSTQNAIDEITNKVNSVIEKMNTQFTAVGKEFNHLEKRIENLNKKVDDGFLDIWTYNAELLVLLENERTLDYHDSNVKNLYEKVRSQLKNNAKEIGNGCFEFYHKCDNTCMESVKNGTYDYPKYSEEAKLNREEIDGVKLESTRIYQILAIYSTVASSLVLVVSLGAISFWMCSNGSLQCRICI

SEQ ID NO: 6491 - protein, 566 aa, synthetic construct; identical to SEQ ID NO: 2669
  REGION 1..566: note = hemagglutinin__InfluenzaA__ADX96697

SEQ ID NO: 6492 - protein, 566 aa, synthetic construct
  REGION 1..566: note = hemagglutinin__InfluenzaA__ADX96707
MKAILVVLLYTFATANADTLCIGYHANNSTDTVDTVLEKNVTVTHSVNLLEDKHNGKLCKLRGVAPLHLGKCNIAGWILGNPECESLSTASSWSYIVETSSSDNGTCYPGDFIDYEELREQLSSVSSFERFEIFPKTSSWPNHDSNKGVTAACPHAGAKSFYKNLIWLVKKGNSYPKLSKSYINDKGKEVLVLWGIHHPSTSADQQSLYQNADAYVFVGTSRYSKKFKPEIAIRPKVRDQEGRMNYYWTLVEPGDKITFEATGNLVVPRYAFAMERNAGSGIIISDTPVHDCDTTCQTPKGAINTSLPFQNIHPITIGKCPKYVKSTKLRLATGLRNVPSIQSRGLFGAIAGFIEGGWTGMVDGWYGYHHQNEQGSGYAADLKSTQNAIDKITNKVNSVIEKMNTQFTAVGKEFNHLEKRIENLNKKVDDGFLDIWTYNAELLVLLENERTLDYHDSNVKNLYEKVRSQLKNNAKEIGNGCFEFYHKCDNTCMESVKNGTYDYPKYSEEAKLNREEIDGVKLESTRIYQILAIYSTVASSLVLVVSLGAISFWMCSTGSLQCRICI

SEQ ID NO: 6493 - protein, 566 aa, synthetic construct; identical to SEQ ID NO: 3829
  REGION 1..566: note = hemagglutinin__InfluenzaA__ADX96727

SEQ ID NO: 6494 - protein, 566 aa, synthetic construct
  REGION 1..566: note = hemagglutinin__InfluenzaA__ADX96737
MKAILVVLLYTFATANADTLCIGYHANNSTDTVDTVLEKNVTVTHSVNLLEDKHNGKLCKLRGVAPLHLGKCNIAGWILGNPECESLSTASSWSYIVETSSSDNGTCYPGDFIDYEELREQLSSVSSFERFEIFPKTSSWPNHDSNKGVTAACPHAGAKSFYKNLIWLVKKGNSYPKLSKSYINDKGKEVLVLWGIHHPSTSADQQSLYQNADAYVFVGTSRYSKKFKPEIAIRPKVKEQEGRMNYYWTLVEPGDKITFEATGNLVVPRYAFAMERKAGSGIIISDTPVHDCNTTCQTPKGAINTSLPFQNIHSITIGKCPKYVKSTKLRLATGLRNVPSIQSRGLFGAIAGFIEGGWTGMVDGWYGYHHQNEQGSGYAADLKSTQNAIDEITNKVNSVIEKMNTQFTAVGKEFNHLEKRIENLNKKVDDGFLDIWTYNAELLVLLENERTLDYHDSNVKNLYEKVRSQLKNNAKEIGNGCFEFYHKCDNTCMESVKNGTYDYPKYSEEAKLNREEIDGVKLESTRIYQILAIYSTVASSLVLVISLGAISFWMCSTGSLQCRICI

SEQ ID NO: 6495 - protein, 566 aa, synthetic construct; identical to SEQ ID NO: 2669
  REGION 1..566: note = hemagglutinin__InfluenzaA__ADX96747

SEQ ID NO: 6496 - protein, 566 aa, synthetic construct
  REGION 1..566: note = hemagglutinin__InfluenzaA__ADX96757
MKAILVVLLYTFATANADTLCIGYHANNSTDTVDTVLEKNVTVTHSVNLLEDKHNGKLCKLRGVAPLHLGKCNIAGWILGNPECESLSTASSWSYIVETSSSGNGTCYPGDFIDYEELREQLSSVSSFERFEIFPKTSSWPNHDSNKGVTAACPHAGAKSFYKNLIWLVKKGNSYPKLSKSYINDKGKEVLVLWGIHHPSTSADQQSLYQNADAYVFVGTSRYSKKFKPEIAIRPKVRDQEGRMNYYWTLVVPGDKITFEATGNLVVPRYAFAMERNAGSGIIISDTPVHDCNTTCQTPKGAINTSLPFQNIHPITIGKCPKYVKSTKLRLATGLRNVPSIQSRGLFGAIAGFIEGGWTGMVDGWYGYHHQNEQGSGYAADLKSTQNAIDEITNKVNSVIEKMNTQFTAVGKEFNHLEKRIENLNKKVDDGFLDIWTYNAELLVLLENERTLDYHDSNVKNLYEKVRSQLKNNAKEIGNGCFEFYHKCDNTCMESVKNGTYDYPKYSEEAKLNREEIDGVKLESTRIYQILAIYSTVASSLVLVVSLGAISFWMCSTGSLQCRICI

SEQ ID NO: 6497 - protein, 566 aa, synthetic construct
  REGION 1..566: note = hemagglutinin__InfluenzaA__ADX96767
MKAILVVLLYTFATANADTLCIGYHANNSTDTVDTVLEKNVTVTHSVNLLEDKHNGKLCKLRGVAPLHLGKCNIAGWILGNPECESLSTASSWSYIVETSSSDNGTCYPGDFIDYEELREQLSSVSSFERFEIFPKTSSWPNHDSNKGVTAACPHAGAKSFYKNLIWLVKKGNSYPKLSKSYINDKGKEVLVLWGIHHPSTSADQQSLYQNADAYVFVGTSRYSKKFKPEIAIRPKVRDQEGRMNYYWTLVESGDKITFEATGNLVVPRYAFAMERNAGSGIIISDTPVHDCNTTCQTPKGAINTSLPFQNIHPITIGKCPKYVKSTKLRLATGLRNVPSIQSRGLFGAIAGFIEGGWTGMVDGWYGYHHQNEQGSGYAADLKSTQNAIDEITNKVNSVIEKMNTQFTAVGKEFNHLEKRIENLNKKVDDGFLDIWTYNAELLVLLENERTLDYHDSNVKKLYEKVRSQLKNNAKEIGNGCFEFYHKCDNTCMESVKNGTYDYPKYSEEAKLNREEIDGVKLESTRIYQILAIYSTVASSLVLVVSLGAISFWMCSTGSLQCRICI

SEQ ID NO: 6498 - protein, 566 aa, synthetic construct
  REGION 1..566: note = hemagglutinin__InfluenzaA__ADX96777
MKAILVVLLYTFATANADTLCIGYHANNSTDTVDTVLEKNVTVTHSVNLLEDKHNGKLCKLRGVAPLHLGKCNIAGWILGNPECESLSTASSWSYIVETSSSDNGTCYPGDFIDYEELREQLSSVSSFERFEIFPKTSSWPNHDSNKGVTAACPHAGAKSFYKNLIWLVKKGNSYPKLSKSYINDKGKEVLVLWGIHHPSTSADQQSLYQNADAYVFVGTSRYSKKFKPEIAIRPKVRDQEGRMNYYWTLVVPGDKITFEATGNLVVPRYAFAMERNAGSGIIISDTPVHDCNTTCQTPKGAINTSLPFQNIHSITIGKCPKYVKSTKLRLATGLRNVPSIQSRGLFGAIAGFIEGGWTGMVDGWYGYHHQNEQGSGYAADLKSTQNAIDEITNKVNSVIEKMNTQFTAVGKEFNHLEKRIENLNKKVDDGFLDIWTYNAELLVLLENERTLDYHDSNVKNLYEKVRSQLKNNAKEIGNGCFEFYHKCDNTCMESVKNGTYDYPKYSEEAKLNREEIDGVKLESTRIYQILAIYSTVASSLVLVVSLGAISFWMCSNGSLQCRICI

SEQ ID NO: 6499 - protein, 566 aa, synthetic construct; identical to SEQ ID NO: 2669
  REGION 1..566: note = hemagglutinin__InfluenzaA__ADX96787

SEQ ID NO: 6500 - protein, 566 aa, synthetic construct; identical to SEQ ID NO: 5896
  REGION 1..566: note = hemagglutinin__InfluenzaA__ADX96797

SEQ ID NO: 6501 - protein, 566 aa, synthetic construct
  REGION 1..566: note = hemagglutinin__InfluenzaA__ADX96807
MKAILVVLLYTFATANADTLCIGYHANNSTDTVDTVLEKNVTVTHSVNILEDKHNGKLCKLRGVAPLHLGKCNIAGWILGNPECESLSTASSWSYIVETSSSDNGTCYPGDFIDYEELREQLSSVSSFERFEIFPKTSSWPNHDSNKGVTAACPHAGAKSFYKNLIWLVKKGNSYPKLSKSYINDKGKEVLVLWGIHHPSTSADQQSLYQNADAYVFVGSSRFSKKFKPEIAIRPKVRDQEGRMNYYWTLVEPGDKITFEATGNLVVPRYAFAMERNAGSGIIISDTPVHDCNTTCQTPKGAINTSLPFQNIHPITIGKCPKYVKSTKLRLATGLRNVPSIQSRGLFGAIAGFIEGGWTGMVDGWYGYHHQNEQGSGYAADLKSTQNAIDEITNKVNSVIEKMNTQFTAVGKEFNHLEKRIENLNKKVDDGFLDIWTYNAELLVLLENERTLDYHDSNVKNLYEKVRSQLKNNAKEVGNGCFEFYHKCDNTCMESVKNGTYDYPKYSEEAKLNREEIDGVKLESTRIYQILAIYSTVASSLVLVVSLGAISFWMCSNGSLQCRICI

SEQ ID NO: 6502 - protein, 566 aa, synthetic construct; identical to SEQ ID NO: 2656
  REGION 1..566: note = hemagglutinin__InfluenzaA__ADX96817

SEQ ID NO: 6503 - protein, 566 aa, synthetic construct
  REGION 1..566: note = hemagglutinin__InfluenzaA__ADX96837
MKAILVVLLYTFATANADTLCIGYHANNSTDTVDTVLEKNVTVTHSVNILEDKHNGKLCKLRGVAPLHLGKCNIAGWILGNPECESLSTASSWSYIVETSSSDNGTCYPGDFIDYEELREQLSSVSSFERFEIFPKTSSWPNHDSNKGVTAACPYAGAKSFYKNLIWLVKKGNSYPKLSKSYINDKGKEVLVLWGIHHPSTSADQQSLYQNADAYVFVGSSRYSKKFKPEIAIRPKVRDQEGRMNYYWTLVEPGDKITFEATGNLVVPRYAFAMERNAGSGIIISDTPVHDCNTTCQTPKGAINTSLPFQNIHPITIGKCPKYVKSTKLRLATGLRNVPSIQSRGLFGAIAGFIEGGWTGMVDGWYGYHHQNEQGSGYAADLKSTQNAIDEITNKVNSVIEKMNTQFTAVGKEFNHLEKRIENLNKKVDDGFLDIWTYNAELLVLLENERTLDYHDSNVKNLYEKVRSQLKNNAKEVGNGCFEFYHKCDNTCMESVKNGTYDYPKYSEEAKLNREEIDGVKLESTRIYQILAIYSTVASSLVLVVSLGAISFWMCSTGSLQCRICI

SEQ ID NO: 6504 - protein, 566 aa, synthetic construct; identical to SEQ ID NO: 2669
  REGION 1..566: note = hemagglutinin__InfluenzaA__ADX96847

SEQ ID NO: 6505 - protein, 566 aa, synthetic construct; identical to SEQ ID NO: 2669
  REGION 1..566: note = hemagglutinin__InfluenzaA__ADX96857

SEQ ID NO: 6506 - protein, 566 aa, synthetic construct; identical to SEQ ID NO: 2849
  REGION 1..566: note = hemagglutinin__InfluenzaA__ADX96867

SEQ ID NO: 6507 - protein, 566 aa, synthetic construct; identical to SEQ ID NO: 5606
  REGION 1..566: note = hemagglutinin__InfluenzaA__ADX96877

SEQ ID NO: 6508 - protein, 566 aa, synthetic construct
  REGION 1..566: note = hemagglutinin__InfluenzaA__ADX96897
MKAILVVLLYTFATANADTLCIGYHANNSTDTVDTVLEKNVTVTHSVNLLEDKHNGKLCKLRGVAPLHLGKCNIAGWILGNPECESLSTASSWSYIVETSSSDNGTCYPGDFIDYEELREQLSSVSSFERFEIFPKTSSWPNHDSNKGVTAACPHAGAKSFYKNLIWLVKKGNSYPKLSKSYINDKGKEVLVLWGIHHPSTSADQQSLYQNADAYVFVGTSRYSKKFKPEIAIRPKVRDQEGRMNYYWTLVEPGDKITFEATGNLVVPRYAFAMERNAGSGIIISDTPIHDCNTTCQTPKGAINTSLPFQNIHPITIGKCPKYVKSTKLRLATGLRNVPSIQSRGLFGAIAGFIEGGWTGMVDGWYGYHHQNEQGSGYAADLKSTQNAIDKITNKVNSVIEKMNTQFTAVGKEFNHLEKRIENLNKKVDDGFLDIWTYNAELLVLLENERTLDYHDSNVKNLYEKVRSQLKNNAKEIGNGCFEFYHKCDNTCMESVKNGTYDYPKYSEEAKLNREEIDGVKLESTRIYQILAIYSTVASSLVLVVSLGAISFWMCSNGSLQCRICI

SEQ ID NO: 6509 - protein, 566 aa, synthetic construct
  REGION 1..566: note = hemagglutinin__InfluenzaA__ADX96907
MKAILVVLLYTFATANADTLCIGYHANNSTDTVDTVLEKNVTVTHSVNLLEDKHSGKLCKLRGVAPLHLGKCNIAGWILGNPECESLSTASSWSYIVETSSSDNGTCYPGDFIDYEELREQLSSVSSFERFEIFPKTSSWPNHDSSKGVTAACPHAGAKSFYKNLIWLVKKGNSYPKLSKSYINDKGKEVLVLWGIHHPSTSADQQSLYQNADAYVFVGTSRYSKKFKPEIAIRPKVRDQEGRMNYYWTLVEPGDKITFEATGNLVVPRYAFAMERNAGSGIIISDTPVHDCNTTCQTPKGAINTSLPFQNIHPITIGKCPKYVKSTKLRLATGLRNVPSIQSRGLFGAIAGFIEGGWTGMVDGWYGYHHQNEQGSGYAADLKSTQNAIDKITNKVNSVIEKMNTQFTAVGKEFNHLEKRIENLNKKVDDGFLDIWTYNAELLVLLENERTLDYHDSNVKNLYEKVRSQLKNNAKEIGNGCFEFYHKCDNTCMESVKNGTYDYPKYSEEAKLNREEIDGVKLESTRIYQILAIYSTVASSLVLVVSLGAISFWMCSNGSLQCRICI

SEQ ID NO: 6510 - protein, 566 aa, synthetic construct
  REGION 1..566: note = hemagglutinin__InfluenzaA__ADX96927
MKAILVVLLYTFATANADTLCIGYHANNSTDTVDTLLEKNVTVTHSVNLLEDKHNGKLCKLRGVAPLHLGKCNIAGWILGNPECESLSTASSWSYIVETSSSDNGTCYPGDFIDYEELREQLSSVSSFERFEIFPKTSSWPNHDSNKGVTAACPHAGAKSFYKNLIWLVKKGNSYPKLSKSYINDKGKEVLVLWGIHHPSTSADQQSLYQNADAYVFVGTSRYSKKFKPEIAIRPKVRDQEGRMNYYWTLVEPGDKITFEATGNLVVPRYAFAMDRNAGSGIIISDTPVHDCNTTCQTPKGAINTSLPFQNIHPITIGKCPKYVKSTKLRLATGLRNVPSIQSRGLFGAIAGFIEGGWTGMVDGWYGYHHQNEQGSGYAADLKSTQNAIDEITNKVNSVIEKMNTQFTAVGKEFNHLEKRIENLNKKVDDGFLDIWTYNAELLVLLENERTLDYHDSNVKNLYEKVRSQLKNNAKEIGNGCFEFYHKCDNTCMESVKNGTYDYPKYSEEAKLNREEIDGVKLESTRIYQILAIYSTVASSLVLVVSLGAISFWMCSNGSLQCRICI

SEQ ID NO: 6511 - protein, 566 aa, synthetic construct; identical to SEQ ID NO: 4089
  REGION 1..566: note = hemagglutinin__InfluenzaA__ADX96937

SEQ ID NO: 6512 - protein, 566 aa, synthetic construct; identical to SEQ ID NO: 2656
  REGION 1..566: note = hemagglutinin__InfluenzaA__ADX96947

SEQ ID NO: 6513 - protein, 566 aa, synthetic construct; identical to SEQ ID NO: 3833
  REGION 1..566: note = hemagglutinin__InfluenzaA__ADX96957

SEQ ID NO: 6514 - protein, 566 aa, synthetic construct; identical to SEQ ID NO: 2982
  REGION 1..566: note = hemagglutinin__InfluenzaA__ADX96967

SEQ ID NO: 6515 - protein, 566 aa, synthetic construct; identical to SEQ ID NO: 2849
  REGION 1..566: note = hemagglutinin__InfluenzaA__ADX96977

SEQ ID NO: 6516 - protein, 566 aa, synthetic construct
  REGION 1..566: note = hemagglutinin__InfluenzaA__ADX96987
MKAILVVLLYTFATANADTLCIGYHANNSTDTVDTVLEKNVTVTHSVNILEDKHNGKLCKLRGVAPLHLGKCNIAGWILGNPECESLSTASSWSYIVETSSSDNGTCYPGDFIDYEELREQLSSVSSFERFEIFPKTSSWPNHDSNKGVTAACPHAGAKSFYKNLIWLVKKGNSYPKLSKSYINDKGKEVLVLWGIHHPSTSADQQSLYQNADAYVFVGSSRYSKKFKPEIAIRPKVRDQEGRMNYYWTLVEPGDKITFEATGNLVVPRYAFAMERNAGSGIIISDTPVHDCNTTCQTPKGAINTSLPFQNIHPITIGKCPKYVKSTKLRLATGLRNVPSIQSRGLFGAIAGFIEGGWTGMVDGWYGYHHQNEQGSGYAADLKSTQNAIDEITNKVNSVIEKMNTQFTAVGKEFNHLEKRIENLNKKVDDGFLDIWTYNAELLVLLENERTLDYHDSNVKNLYEKVRSQLKNNAKEIGNGCFEFYHKCDNTCMESVKNGTYDYPKYSEEAKLNREEIDGIKLESTRIYQILAIYSTVASSLVLVVSLGAISFWMCSNGSLQCRICI

SEQ ID NO: 6517 - protein, 566 aa, synthetic construct; identical to SEQ ID NO: 2849
  REGION 1..566: note = hemagglutinin__InfluenzaA__ADX96997

SEQ ID NO: 6518 - protein, 566 aa, synthetic construct
  REGION 1..566: note = hemagglutinin__InfluenzaA__ADX97007
MKAILVVLLYTFATANADTLCIGYHANNSTDTVDTVLEKNVTVTHSVNLLEDKHNGKLCKLRGVAPLHLGKCNIAGWILGNPECESLSTASSWSYIVETSSSDNGTCYPGDFIDYEELREQLSSVSSFERFEIFPKTSSWPNHDSNKGVTAACPHAGAKSFYKNLIWLVKKGNSYPKLSKSYINDKGKEVLVLWGIHHPSTSADQQSLYQNADAYVFVGTSRYSKKFKPEIAIRPKVRDQEGRMNYYWTLVEPGDKITFEATGNLVVPRYAFAMERNAGSGIIISDAPVHDCNTTCQTPKGAINTSLPFQNIHPITIGKCPKYVKSTKLRLATGLRNVPSIQSRGLFGAIAGFIEGGWTGMVDGWYGYHHQNEQGSGYAADLKSTQNAIDEITNKVNSVIEKMNTQFTAVGKEFNHLEKRIENLNKKVDDGFLDIWTYNAELLVLLENERTLDYHDSNVKNLYEKVRSQLKNNAKEIGNGCFEFYHKCDNTCMESVKNGTYDYPKYSEEAKLNREEIDGVKLESTRIYQILAIYSTVASSLVLVVSLGAISFWMCSNGSLQCRICI

SEQ ID NO: 6519 - protein, 566 aa, synthetic construct; identical to SEQ ID NO: 6468
  REGION 1..566: note = hemagglutinin__InfluenzaA__ADX97018

SEQ ID NO: 6520 - protein, 566 aa, synthetic construct
  REGION 1..566: note = hemagglutinin__InfluenzaA__ADX97028
MKAILVVLLYTFATANADTLCIGYHANNSTDTVDTVLEKNVTVTHSVNILEDKHNGKLCKLRGVAPLHLGKCNIAGWILGNPECESLSTASSWSYIVETSSSDNGTCYPGDFIDYEELREQLSSVSSFERFEIFPKTSSWPNHDSNKGVTAACPHAGAKSFYKNLIWLVKQGNSYPKLSKSYINDKGKEVLVLWGIHHPSTTADQQSLYQNADAYVFVGSSRYSKKFKPEIAIRPKVRDQEGRMNYYWTLVEPGDKITFEATGNLVVPRYAFAMERNAGSGIIISDTPVHDCNTTCQTPKGAINTSLPFQNIHPITIGKCPKYVKSTKLRLATGLRNVPSIQSRGLFGAIAGFIEGGWTGMVDGWYGYHHQNEQGSGYAADLKSTQNAIDEITNKVNSVIEKMNTQFTAVGKEFNHLEKRIENLNKKVDDGFLDIWTYNAELLVLLENERTLDYHDSNVKNLYEKVRSQLKNNAKEVGNGCFEFYHKCDNTCMESVKNGTYDYPKYSEEAKLNREEIDGVKLESTRIYQILAIYSTAASSLVLVVSLGAISFWMCSNGSLQCRICI

SEQ ID NO: 6521 - protein, 566 aa, synthetic construct; identical to SEQ ID NO: 5222
  REGION 1..566: note = hemagglutinin__InfluenzaA__ADX98640

SEQ ID NO: 6522 - protein, 566 aa, synthetic construct; identical to SEQ ID NO: 4221
  REGION 1..566: note = hemagglutinin__InfluenzaA__ADX98650

SEQ ID NO: 6523 - protein, 566 aa, synthetic construct
  REGION 1..566: note = hemagglutinin__InfluenzaA__ADX98665
MKAILVVLLYTFATANADTLCIGYHANNSTDTVDTVLEKNVTVTHSVNLLEDKHNGKLCKLRGVAPLHLGKCNIAGWILGNPECESLSTASSWSYIVETSSSGNGTCYPGDFIDYEELREQLSSVSSFERFEIFPKTSSWPNHDSNKGVTAACPHAGAKSFYKNLIWLVKKGNSYPKLSKSYINDKGKEVLVLWGIHHPSTSADQQSLYQNADAYVFVGTSRYSKKFKPEIAIRPKVRDQEGRMNYYWTLVEPGDKITFEATGNLVVPRYAFAMERNAGSGIIISDTPVHDCNTTCQTPKGAINTSLPFQNIHPITIGKCPKYVKSTKLRLATGLRNVPSIQSRGLFGAIAGFIEGGWTGMVDGWYGYHHQNEQGSGYAADLKSTQNAIDEITNKVNSVIEKMNTQFTAVGKEFNHLEKRIENLNKKVDDGFLDIWTYNAELLVLLENERTLDYHDSNVKNLYEKVRSQLKNNAKEIGNGCFEFYHKCDNTCMESVKNGTYDYPKYSEEAKLNREEIDGVKLESTRIYQILAIYSTAASSLVLVVSLGAISFWMCSNGSLQCRICI

SEQ ID NO: 6524 - protein, 566 aa, synthetic construct; identical to SEQ ID NO: 3833
  REGION 1..566: note = hemagglutinin__InfluenzaA__ADX98675

SEQ ID NO: 6525 - protein, 566 aa, synthetic construct; identical to SEQ ID NO: 3833
  REGION 1..566: note = hemagglutinin__InfluenzaA__ADX98695

SEQ ID NO: 6526 - protein, 566 aa, synthetic construct; identical to SEQ ID NO: 4221
  REGION 1..566: note = hemagglutinin__InfluenzaA__ADX98729

SEQ ID NO: 6527 - protein, 566 aa, synthetic construct; identical to SEQ ID NO: 5552
  REGION 1..566: note = hemagglutinin__InfluenzaA__ADX98739

SEQ ID NO: 6528 - protein, 566 aa, synthetic construct; identical to SEQ ID NO: 5301
  REGION 1..566: note = hemagglutinin__InfluenzaA__ADX98748

SEQ ID NO: 6529 - protein, 566 aa, synthetic construct; identical to SEQ ID NO: 2669
  REGION 1..566: note = hemagglutinin__InfluenzaA__ADX98758

SEQ ID NO: 6530 - protein, 566 aa, synthetic construct; identical to SEQ ID NO: 3022
  REGION 1..566: note = hemagglutinin__InfluenzaA__ADX98767

SEQ ID NO: 6531 - protein, 566 aa, synthetic construct; identical to SEQ ID NO: 4266
  REGION 1..566: note = hemagglutinin__InfluenzaA__ADX98777

SEQ ID NO: 6532 - protein, 566 aa, synthetic construct
  REGION 1..566: note = hemagglutinin__InfluenzaA__ADX98785
MKAILVVLLYTLATANADTLCIGYHANNSTDTVDTVLEKNVTVTHSVNLLEDKHNGKLCKLRGIAPLHLGKCNIAGWILGNPECESLSTASSWSYIVETSSSDNGTCYPGDFIDYEELREQLSSVSSFERFEIFPKTSSWPNHDSNKGVTAACPHAGAKSFYKNLIWLVKKGNSYPKLSKSYINDKGKEVLVLWGIHHPSTSADQQSLYQNADAYVFVGTSRYSKKFKPEIAIRPKVRDQEGRMNYYWTLVEPGDKITFEATGNLVVPRYAFAMERNAGSGIIISDTPVHDCNTTCQTPKGAINTSLPFQNIHPITIGKCPKYVKSTKLRLATGLRNVPSIQSRGLFGAIAGFIEGGWTGMVDGWYGYHHQNEQGSGYAADLKSTQNAIDEITNKVNSVIEKMNTQFTAVGKEFNHLEKRIENLNKKVDDGFLDIWTYNAELLVLLENERTLDYHDSNVKNLYEKVRSQLKNNAKEIGNGCFEFYHKCDNTCMESVKNGTYDYPKYSEEAKLNREEIGGVKLESTRIYQILAIYSTVASSLVLVVSLGAISFWMCSNGSLQCRICI

SEQ ID NO: 6533 - protein, 566 aa, synthetic construct; identical to SEQ ID NO: 3770
  REGION 1..566: note = hemagglutinin__InfluenzaA__ADX98792

SEQ ID NO: 6534 - protein, 566 aa, synthetic construct; identical to SEQ ID NO: 3770
  REGION 1..566: note = hemagglutinin__InfluenzaA__ADX98806

SEQ ID NO: 6535 - protein, 566 aa, synthetic construct; identical to SEQ ID NO: 5710
  REGION 1..566: note = hemagglutinin__InfluenzaA__ADX98818

SEQ ID NO: 6536 - protein, 566 aa, synthetic construct; identical to SEQ ID NO: 2669
  REGION 1..566: note = hemagglutinin__InfluenzaA__ADX98828

SEQ ID NO: 6537 - protein, 566 aa, synthetic construct; identical to SEQ ID NO: 6060
  REGION 1..566: note = hemagglutinin__InfluenzaA__ADX98843

SEQ ID NO: 6538 - protein, 566 aa, synthetic construct
  REGION 1..566: note = hemagglutinin__InfluenzaA__ADX98853
MKAILVVLLYTFATANADTLCIGYHANNSTDTVDTVLEKNVTVTHSVNLLEDKHNGKLCKLRGVAPLHLGKCNIAGWILGNPECESLSIASSWSYIVETSSSDNGTCYPGDFIDYEELREQLSSVSSFERFEIFPKTSSWPNHDSNKGVTAACPHAGAKSFYKNLIWLVKKGNSYPKLSKSYINDKGKEVLVLWGIHHPSTSADQQSLYQNADAYVFVGTSRYSKKFKPEIAIRPKVRDQEGRMNYHWTLVEPGDKITFEATGNLVVPRYAFAMERNAGSGIIISDTPVHDCNTTCQTPKGAINTSLPFQNIHPITIGKCPKYVKSTKLRLATGLRNVPSIQSRGLFGAIAGFIEGGWTGMVDGWYGYHHQNEQGSGYAADLKSTQNAIDKITNKVNSVIEKMNTQFTAVGKEFNHLEKRIENLNKKVDDGFLDIWTYNAELLVLLENERTLDYHDSNVKNLYEKVRSQLKNNAKEIGNGCFEFYHKCDNTCMESVKNGTYDYPKYSEEAKLNREEIDGVKLESTRIYQILAIYSTVASSLVLVVSLGAISFWMCSNGSLQCRICI

SEQ ID NO: 6539 - protein, 566 aa, synthetic construct; identical to SEQ ID NO: 3833
  REGION 1..566: note = hemagglutinin__InfluenzaA__ADX98860

SEQ ID NO: 6540 - protein, 566 aa, synthetic construct; identical to SEQ ID NO: 5221
  REGION 1..566: note = hemagglutinin__InfluenzaA__ADX98870

SEQ ID NO: 6541 - protein, 566 aa, synthetic construct
  REGION 1..566: note = hemagglutinin__InfluenzaA__ADX98880
MKAILVVLLYTFATANADTLCIGYHANNSTDTVDTVLEKNVTVTHSVNLLEDKHNGKLCKLRGVAPLHLGKCNIAGWILGNPECESLSTASSWSYIVETSSSDNGTCYPGDFIDYEELREQLSSVSSFERFEIFPKTSSWPNHDSNKGVTAACPHAGAKSFYKNLIWLVKKGNSYPKLSKSYINDKGKEVLVLWGIHHPSTSADQQSLYQNADAYVFVGTSRYSKKFKPEIAIRPKVRDQEGRMNYYWTLVEPGDKITFEATGNLVVPRYAFAMERNAGSGIIISDTPVHDCNTTCQTPKGAINTSLPFQNIHPITIGKCPKYVKSTKLRLATGLRNVPSIQSRGLFGAIAGFIEGGWTGMVDGWYGYHHQNEQGSGYAADLKSTQNAIDEITNKVNSIIEKMNTQFTAVGKEFNHLEKRIENLNKKVDDGFLDIWTYNAELLVLLENERTLDYHDSNVKNLYEKVRSQLKNNAKEIGNGCFEFYHKCDNTCMESVKNGTYDYPKYSEEAKLNREEIDGVKLESTRIYQILAIYSTVASSLVLVVSLGAISFWMCSNGSLQCRICI

SEQ ID NO: 6542 - protein, 566 aa, synthetic construct
  REGION 1..566: note = hemagglutinin__InfluenzaA__ADX98890
MKAILVVLLYTFATANADTLCIGYHANNSTDTVDTVLEKNVTVTHSVNLLEDKHNGKLCKLRGVAPLHLGKCNIAGWILGNPECESLSTASSWSYIVETSSSDNGTCYPGDFIDYEELREQLSSVSSFERFEIFPKTSSWPNHDSNKGVTAACPHAGAKSFYKNLIWLVKKGNSYPKLSKSYINDKGKEVLVLWGIHHPSTSADQQSLYQNADAYVFVGTSRYSKKFKPEIAIRPKVRDQEGRMNYYWTLVEPGDKITFEATGNLVVPRYAFAMERNAESGIIISDTPVHDCNTTCQTPKGAINTSLPFQNIHPITIGKCPKYVKSTKLRLATGLRNVPSIQSRGLFGAIAGFIEGGWTGMVDGWYGYHHQNEQGSGYAADLKSTQNAIDKITNKVNSVIEKMNTQFTAVGKEFNHLEKRIENLNKKVDDGFLDIWTYNAELLVLLENERTLDYHDSNVKNLYEKVRSQLKNNAKEIGNGCFEFYHKCDNTCMESVKNGTYDYPKYSEEAKLNREEIDGVKLESTRIYQILAIYSTVASSLVLVVSLGAISFWMCSNGSLQCRICI

SEQ ID NO: 6543 - protein, 566 aa, synthetic construct; identical to SEQ ID NO: 4221
  REGION 1..566: note = hemagglutinin__InfluenzaA__ADX98900

SEQ ID NO: 6544 - protein, 566 aa, synthetic construct
  REGION 1..566: note = hemagglutinin__InfluenzaA__ADX98910
MKAILVVLLYTFATANADTLCIGYHANNSTDTVDTVLEKNVTVTHSVNLLEDKHNGKLCKLRGVAPLHLGKCNIAGWILGNPECESLSTAISWSYIVETSSSDNGTCYPGDFIDYEELREQLSSVSSFERFEIFPKTSSWPNHDSNKGVTAACPHAGAKSFYKNLIWLVKKGNSYPKLSKSYINDKGKEVLVLWGIHHPSTSADQQSLYQNADAYVFVGTSRYSKKFKPEIAIRPKVRDQEGRMNYYWTLVEPGDKITFEATGNLVVPRYAFAMERNAGSGIIISDTPVHDCNTTCQTPKGAINTSLPFQNIHPITIGKCPKYVKSTKLRLATGLRNVPSIQSRGLFGAIAGFIEGGWTGMVDGWYGYHHQNEQGSGYAADLKSTQNAIDKITNKVNSVIEKMNTQFTAVGKEFNHLEKRIENLNKKVDDGFLDIWTYNAELLVLLENERTLDYHDSNVKNLYEKVRSQLKNNAKEIGNGCFEFYHKCDNTCMESVKNGTYDYPKYSEEAKLNREEIDGVKLESTRIYQILAIYSTVASSLVLVVSLGAISFWMCSNGSLQCRICI

SEQ ID NO: 6545 - protein, 566 aa, synthetic construct; identical to SEQ ID NO: 4221
  REGION 1..566: note = hemagglutinin__InfluenzaA__ADX98920

SEQ ID NO: 6546 - protein, 566 aa, synthetic construct; identical to SEQ ID NO: 3833
  REGION 1..566: note = hemagglutinin__InfluenzaA__ADX98930

SEQ ID NO: 6547 - protein, 566 aa, synthetic construct; identical to SEQ ID NO: 3460
  REGION 1..566: note = hemagglutinin__InfluenzaA__ADX98940

SEQ ID NO: 6548 - protein, 566 aa, synthetic construct; identical to SEQ ID NO: 5289
  REGION 1..566: note = hemagglutinin__InfluenzaA__ADX98950

SEQ ID NO: 6549 - protein, 566 aa, synthetic construct; identical to SEQ ID NO: 5270
  REGION 1..566: note = hemagglutinin__InfluenzaA__ADX98960

SEQ ID NO: 6550 - protein, 566 aa, synthetic construct
  REGION 1..566: note = hemagglutinin__InfluenzaA__ADX98970
MKAILVVLLYTFATANADTLCIGYHANNSTDTVDTVLEKNVTVTHSVNLLEDKHNGKLCKLRGVAPLHLGKCNIAGWILGNPECESLSTASSWSYIVETSSSDNGTCYPGDFIDYEELREQLSSVSSFERFEIFPKTSSWPNHDSNKGVTAACPHAGAKSFYKNLIWLVKKGNSYPKLSKSYINDKGKEVLVLWGIHHPSTSADQQGLYQNADAYVFVGTSRYSKKFKPEIAIRPKVRDQEGRMNYYWTLVEPGDKITFEATGNLVVPRYAFAMERNAGSGIIISDTPVHDCNTTCQTPKGAINTSLPFQNIHPITIGKCPKYVKSTKLRLATGLRNIPSIQSRGLFGAIAGFIEGGWTGMVDGWYGYHHQNEQGSGYAADLKSTQNAIDKITNKVNSVIEKMNTQFTAVGKEFNHLEKRIENLNKKVDDGFLDIWTYNAELLVLLENERTLDYHDSNVKNLYEKVRSQLKNNAKEIGNGCFEFYHKCDNTCMESVKNGTYDYPKYSEEAKLNREEIDGVKLESTRIYQILAIYSTVASSLVLVVSLGAISFWMCSNGSLQCRICI

SEQ ID NO: 6551 - protein, 566 aa, synthetic construct; identical to SEQ ID NO: 3770
  REGION 1..566: note = hemagglutinin__InfluenzaA__ADX98980

(The sequence listing continues in the following parts.)